United States Patent Application Publication US 2013/0267429 A1 - sequence listing, part 9

SEQ ID NO: 188817 - DNA, 54 bp, Artificial
  Synthetic oligonucleotide
aggaggatcatgctttcaatcgtgaggccgggtagcgatccaacatcaatctgt

SEQ ID NO: 188818 - DNA, 54 bp, Artificial
  Synthetic oligonucleotide
cccggcgagagtgcttcaggcagagtacgaccaatatgtttgaagtggctctcg

SEQ ID NO: 188819 - DNA, 53 bp, Artificial
  Synthetic oligonucleotide
tcggtatcttatcacgagttgcctcaagaatacgcagcgcaagctcgttttcg

SEQ ID NO: 188820 - DNA, 53 bp, Artificial
  Synthetic oligonucleotide
ctaacgcccgcatttgcacgggagtcggggtgattgttgcaaggccgacacag

SEQ ID NO: 188821 - DNA, 53 bp, Artificial
  Synthetic oligonucleotide
gacacctgtcagcgatgcaatagtggcctacgcgctaccccggaactagcgaa

SEQ ID NO: 188822 - DNA, 53 bp, Artificial
  Synthetic oligonucleotide
attattgggagagtgccgcccactcaagtgtttagcgcaagccttacacaggc

SEQ ID NO: 188823 - DNA, 53 bp, Artificial
  Synthetic oligonucleotide
aaggcgttagctttggagcgaatgagaagaagcttggctggcactcgcagccc

SEQ ID NO: 188824 - DNA, 55 bp, Artificial
  Synthetic oligonucleotide
gcccggatttcacggtagaggaagtcggttcagcccgtgacacctacaagctgac

SEQ ID NO: 188825 - DNA, 52 bp, Artificial
  Synthetic oligonucleotide
cgaattatccgcaccccacccagttcctgactgatttaccgagcgggcgctc

SEQ ID NO: 188826 - DNA, 52 bp, Artificial
  Synthetic oligonucleotide
tcgagagtggtatcggcaccgggttcaaaacgaagagaaccacgaacagcgt

SEQ ID NO: 188827 - DNA, 52 bp, Artificial
  Synthetic oligonucleotide
aacccatcgcgtcccaagatagcacgaaggggccgtcgcatgacgcgacgac

SEQ ID NO: 188828 - DNA, 52 bp, Artificial
  Synthetic oligonucleotide
gacgctagccttgtaagaatgaaattccgtgtccgctcacttgggaacggca

SEQ ID NO: 188829 - DNA, 52 bp, Artificial
  Synthetic oligonucleotide
atcggtgggtgcggggataaccaatagccacttattgcgcatcccgaggagt

SEQ ID NO: 188830 - DNA, 51 bp, Artificial
  Synthetic oligonucleotide
ttaatcactggctagcgtgccacccgctgcttttacgagtcgttttcaggg

SEQ ID NO: 188831 - DNA, 51 bp, Artificial
  Synthetic oligonucleotide
taagtagggtcgtaatggtctgcatatcgctgaaacaaccaatgttcgctc

SEQ ID NO: 188832 - DNA, 51 bp, Artificial
  Synthetic oligonucleotide
gatttgagcgccacgggcaaaatagttcgcttagacggaaagttggcggga

SEQ ID NO: 188833 - DNA, 51 bp, Artificial
  Synthetic oligonucleotide
aaaatgcgctctcgttcaccaactcatgggcagaaattggctggcttagtt

SEQ ID NO: 188834 - DNA, 51 bp, Artificial
  Synthetic oligonucleotide
accttgagcgatcacacctggtgcaacttcgtcggaagagcatgctccggt

SEQ ID NO: 188835 - DNA, 55 bp, Artificial
  Synthetic oligonucleotide
gcagctgcggttcgagaagcggacggatgaggccggagattgcgagtgtggtcat

SEQ ID NO: 188836 - DNA, 50 bp, Artificial
  Synthetic oligonucleotide
aagtgagtggcctgtgttccccggcgcataccattcgcgctccgcgagcc

SEQ ID NO: 188837 - DNA, 50 bp, Artificial
  Synthetic oligonucleotide
aatcaactgagcgccggcccaacggacggaccccttgtaattgcgctgac

SEQ ID NO: 188838 - DNA, 50 bp, Artificial
  Synthetic oligonucleotide
aatcactcgacggaccgccggtaaagctgcgcacgactgtgaccgaggag

SEQ ID NO: 188839 - DNA, 50 bp, Artificial
  Synthetic oligonucleotide
aatcagaagcacatgtcactgcacgcctagtgccttgacgcccgggggcg

SEQ ID NO: 188840 - DNA, 50 bp, Artificial
  Synthetic oligonucleotide
aatgctgggctacaagcttaggcgcgccgcacctttcgtcaacgcaaacc

SEQ ID NO: 188841 - DNA, 50 bp, Artificial
  Synthetic oligonucleotide
aatggggctacgaccggcttggtacgggctacacactctcgcgcgatcag

SEQ ID NO: 188842 - DNA, 50 bp, Artificial
  Synthetic oligonucleotide
aatggtcacggggatcgggccatctgtcgcggccagcgatgcttgcaggc

SEQ ID NO: 188843 - DNA, 50 bp, Artificial
  Synthetic oligonucleotide
aattcaagcgacgcactcccgaggcaagcacattggaggacgggcactga

SEQ ID NO: 188844 - DNA, 50 bp, Artificial
  Synthetic oligonucleotide
aattgcgcccagccctgtagggcgatcccgagtatccatcgcgccttctg

SEQ ID NO: 188845 - DNA, 50 bp, Artificial
  Synthetic oligonucleotide
acaacccgatccgccacattctagcgcaacaacaggcacttgcggggctg

SEQ ID NO: 188846 - DNA, 55 bp, Artificial
  Synthetic oligonucleotide
aatcgatttacagtaaacggctttatttcctgatccgctatggtaggttgcccta

SEQ ID NO: 188847 - DNA, 50 bp, Artificial
  Synthetic oligonucleotide
acaccaacggccctggcgtgtgggacgattccgacaccggtctcgcatgg

SEQ ID NO: 188848 - DNA, 50 bp, Artificial
  Synthetic oligonucleotide
acacctgcgacgattgccatacgaccaatgcatgggtccccgcccggttc

SEQ ID NO: 188849 - DNA, 50 bp, Artificial
  Synthetic oligonucleotide
acagcccccggactaacgccccctcttgcgcaatgtgttaccacgcagcg

SEQ ID NO: 188850 - DNA, 50 bp, Artificial
  Synthetic oligonucleotide
acagcgagggtcaaaaggtcagtgccacgcggctgagtgacaattgcgcg

SEQ ID NO: 188851 - DNA, 50 bp, Artificial
  Synthetic oligonucleotide
acagctggtctcgtcgttacccgctacgcgcgagccaagtccgcatgaca

SEQ ID NO: 188852 - DNA, 50 bp, Artificial
  Synthetic oligonucleotide
acaggcgacggtgagacacctcgttgagcgataactagctcccgcgcgcc

SEQ ID NO: 188853 - DNA, 50 bp, Artificial
  Synthetic oligonucleotide
acaggcgcaaattggccggatctcgtggttgggatcgcggttgctggcat

SEQ ID NO: 188854 - DNA, 50 bp, Artificial
  Synthetic oligonucleotide
acagggcagagcggcgtccgaacttgatcggtcatgcgcacttgatcggt

SEQ ID NO: 188855 - DNA, 50 bp, Artificial
  Synthetic oligonucleotide
acatgccgccgtcgtggcatcaggtgggaatgagcagcgcagcacgtatc

SEQ ID NO: 188856 - DNA, 50 bp, Artificial
  Synthetic oligonucleotide
cgccaagcatattgacagaaacccgttccaccaaattcgtgcttattagg

SEQ ID NO: 188857 - DNA, 55 bp, Artificial
  Synthetic oligonucleotide
gcaagatagctcgcataaggtgccatgagccgggccatctcagcatagtctgccg

SEQ ID NO: 188858 - DNA, 50 bp, Artificial
  Synthetic oligonucleotide
accatgcgcgctgtatgctggcatcgacgggggttgtaaacccattcccg

SEQ ID NO: 188859 - DNA, 50 bp, Artificial
  Synthetic oligonucleotide
accccctgaaggacgcacagggtctcagcgttaatccggaggagagcgtg

SEQ ID NO: 188860 - DNA, 50 bp, Artificial
  Synthetic oligonucleotide
acccgcgcccctggtcgtttctgtcaccaaagtgtctcccgtcacgcttg

SEQ ID NO: 188861 - DNA, 50 bp, Artificial
  Synthetic oligonucleotide
accgaacaattccaccccagcgccatgagctggctcgatgtcgcactacg

SEQ ID NO: 188862 - DNA, 50 bp, Artificial
  Synthetic oligonucleotide
accgcgacgggtccaacagccagagtccggcttgtgccaaagatcgcata

SEQ ID NO: 188863 - DNA, 50 bp, Artificial
  Synthetic oligonucleotide
acgaacccttgggactgcatgtgcctcgtcgcgtgcgctttcgctccact

SEQ ID NO: 188864 - DNA, 50 bp, Artificial
  Synthetic oligonucleotide
acgaactgggctacggggtcgatacggtgggctatctcgcaggggtttcc

SEQ ID NO: 188865 - DNA, 50 bp, Artificial
  Synthetic oligonucleotide
aaaccgtgaagtgggaccgctttgcccaacctgcgcaattgcaccgggag

SEQ ID NO: 188866 - DNA, 50 bp, Artificial
  Synthetic oligonucleotide
aaacgcacactcagaaccccctcaatcacccgaacgatcgcgcaagcgct

SEQ ID NO: 188867 - DNA, 50 bp, Artificial
  Synthetic oligonucleotide
aaacgcctatgactcaggcgcatacagacccggctgcctccggaaccacg

SEQ ID NO: 188868 - DNA, 60 bp, Artificial
  Synthetic oligonucleotide
tgttagagctttgcattattcctagctgggctaaggtaggattatctttagctccctgtg

SEQ ID NO: 188869 - DNA, 59 bp, Artificial
  Synthetic oligonucleotide
gcaatagcctttttatcctccgctacaggctgtcctaagcctgtttctactctgcggta

SEQ ID NO: 188870 - DNA, 55 bp, Artificial
  Synthetic oligonucleotide
ctgctaccgctgaaagcatacccgtcactgctatcgttctcacattactcttagt

SEQ ID NO: 188871 - DNA, 55 bp, Artificial
  Synthetic oligonucleotide
ctgcccttcaactgctgtcttactgtctaccccgccaaatatcttaggtgcaatg

SEQ ID NO: 188872 - DNA, 55 bp, Artificial
  Synthetic oligonucleotide
ctgcaattgtctgacctatgtctgcaaaagtattcaacacgtgaagattcactcc

SEQ ID NO: 188873 - DNA, 55 bp, Artificial
  Synthetic oligonucleotide
gatgctccggcataactgtatacacatgtccaaggacagtacttccattactgaa

SEQ ID NO: 188874 - DNA, 55 bp, Artificial
  Synthetic oligonucleotide
ctgagggtgctcggacaatcatagatacatgcaacacgatagaataagggtaggg

SEQ ID NO: 188875 - DNA, 55 bp, Artificial
  Synthetic oligonucleotide
ctcttttcacatcgtccttacgctttgcacccatgtactgcgatataataacgcc

SEQ ID NO: 188876 - DNA, 55 bp, Artificial
  Synthetic oligonucleotide
ctctgataaagtgtgacgatcggtaccataacggacagcattaccgtcccaacga

SEQ ID NO: 188877 - DNA, 55 bp, Artificial
  Synthetic oligonucleotide
ctctgagtatatcgtgcggattgattgagccctgtgtcaacggatatccggcttc

SEQ ID NO: 188878 - DNA, 55 bp, Artificial
  Synthetic oligonucleotide
gcaaatacaacaccggttgcattcggttctataggaataccagcggtaactgcta

SEQ ID NO: 188879 - DNA, 55 bp, Artificial
  Synthetic oligonucleotide
ctctacaatagaatgttcgcccattccgtaagagataatatctgcacccgaatca

SEQ ID NO: 188880 - DNA, 56 bp, Artificial
  Synthetic oligonucleotide
ccacgctttaccgtgtaggttctggctgtattagtagcctgtggctttgtagccct

SEQ ID NO: 188881 - DNA, 55 bp, Artificial
  Synthetic oligonucleotide
ctctaaggaaaagcccgttcgtcctattgaggatatgggaatcagctgtcgtact

SEQ ID NO: 188882 - DNA, 54 bp, Artificial
  Synthetic oligonucleotide
ctcggattacagggatacaatttcggggccgggtatattgactgggctttggaa

SEQ ID NO: 188883 - DNA, 55 bp, Artificial
  Synthetic oligonucleotide
ctcgcctcgtctcgtatagcgactcgtcacatcttccgtgatggcaagaagccga

SEQ ID NO: 188884 - DNA, 55 bp, Artificial
  Synthetic oligonucleotide
ctccccacctggtgacatcctgagcgtcaagatagctcccgccgtctacgcacac

SEQ ID NO: 188885 - DNA, 55 bp, Artificial
  Synthetic oligonucleotide
ctccagtaaagaaagaacccgctaaacggtccagaatgccactcatgccttcgcc

SEQ ID NO: 188886 - DNA, 55 bp, Artificial
  Synthetic oligonucleotide
ctcatcttccgacagatatatcttaggtgttgtgtctatatcattccactgaagt

SEQ ID NO: 188887 - DNA, 55 bp, Artificial
  Synthetic oligonucleotide
ctcatccgaatagtatatagcctgattgatatcgtgaagtaccatgactatagtc

SEQ ID NO: 188888 - DNA, 55 bp, Artificial
  Synthetic oligonucleotide
ctcagaactgccagtagataaacgggttgtttgtggcgtttacaagcaggatgct

SEQ ID NO: 188889 - DNA, 55 bp, Artificial
  Synthetic oligonucleotide
gagccctaaccactgtgccgagaacggttctgctctcgtcaccttgtctccggac

SEQ ID NO: 188890 - DNA, 55 bp, Artificial
  Synthetic oligonucleotide
gagcaggggcggctttgcatactctcgatccagggaatccgtttgctgcggagtt

SEQ ID NO: 188891 - DNA, 60 bp, Artificial
  Synthetic oligonucleotide
atcctcatacagatctaatgggttatatcgtgtacctagtatatggatctctccatccgg

SEQ ID NO: 188892 - DNA, 55 bp, Artificial
  Synthetic oligonucleotide
gactactgtatccgccctcacgctcacgcattatctgattataagcctgctgtac

SEQ ID NO: 188893 - DNA, 55 bp, Artificial
  Synthetic oligonucleotide
gacgctggtttgttcgctggatagactggtcgtaagcaaggaactccccaagcgt

SEQ ID NO: 188894 - DNA, 55 bp, Artificial
  Synthetic oligonucleotide
gacgaaaacagttacactatactgctatcacatcggccagagttatttgaaacct

SEQ ID NO: 188895 - DNA, 55 bp, Artificial
  Synthetic oligonucleotide
gacctcggcgttattcgagcgtaaagacgtcataataatagcgtctgtaagttgt

SEQ ID NO: 188896 - DNA, 55 bp, Artificial
  Synthetic oligonucleotide
gaccggatgcactacgagaatgtagaggtgcagcaatgggatgcgttagaggaag

SEQ ID NO: 188897 - DNA, 55 bp, Artificial
  Synthetic oligonucleotide
gacaggcgaagggatcttaactataggcaggctctatgtgctataggccaggtgg

SEQ ID NO: 188898 - DNA, 55 bp, Artificial
  Synthetic oligonucleotide
gacagagattacaggaatgcctaaggcaagggaaaaggcatttgcagtcgctacg

SEQ ID NO: 188899 - DNA, 55 bp, Artificial
  Synthetic oligonucleotide
gacacgccgattgcagagacgatggcggctttaaacgatctggttagaagcggaa

SEQ ID NO: 188900 - DNA, 55 bp, Artificial
  Synthetic oligonucleotide
gaatcatcccgttggagtccattccccggagtttcaccggtttaagattcgtgca

SEQ ID NO: 188901 - DNA, 55 bp, Artificial
  Synthetic oligonucleotide
gaacgccccaggattgagtacccggtcgtattcaatacagcggaggaaataatcg

SEQ ID NO: 188902 - DNA, 58 bp, Artificial
  Synthetic oligonucleotide
tccattactgctctcctcctaactcctgcataatccctacctctgtattaaagaggtt

SEQ ID NO: 188903 - DNA, 55 bp, Artificial
  Synthetic oligonucleotide
ctttgcatagctgaggatcttgtttacggccatctgtgtgagtacgtactgttcc

SEQ ID NO: 188904 - DNA, 55 bp, Artificial
  Synthetic oligonucleotide
gagtctatccttccggtttgtatgtattcgtgagtatgtgcttcaactcccggag

SEQ ID NO: 188905 - DNA, 55 bp, Artificial
  Synthetic oligonucleotide
gataagagtcctattgcgaagcttgaacctgcatttaaggataatctgtggggtg

SEQ ID NO: 188906 - DNA, 55 bp, Artificial
  Synthetic oligonucleotide
gatattccgtgtgtacttacccctcttagctggataatgttacctgattcgtcag

SEQ ID NO: 188907 - DNA, 55 bp, Artificial
  Synthetic oligonucleotide
cttatttcatggaacggggcggcaccaaagtatgatatcagagaatgggcacctg

SEQ ID NO: 188908 - DNA, 55 bp, Artificial
  Synthetic oligonucleotide
cttatgagccctgtatttatccatacataaagccgaagataatacaccgcagccg

SEQ ID NO: 188909 - DNA, 55 bp, Artificial
  Synthetic oligonucleotide
ctgtcacccttgaacctcagcgtcacaaggataagagggatataaagcagtgccg

SEQ ID NO: 188910 - DNA, 55 bp, Artificial
  Synthetic oligonucleotide
ctgtataaaacctatcagagtgatacggtgcgtgttcttttggataacccctacc

SEQ ID NO: 188911 - DNA, 55 bp, Artificial
  Synthetic oligonucleotide
cggttgcagcgttgtttaccgcacttatagcggtaggggcatttatcagcattcc

SEQ ID NO: 188912 - DNA, 55 bp, Artificial
  Synthetic oligonucleotide
cggttcgaagagatagcaaggtcgcttagagtaagtaggagtacggtttataaca

SEQ ID NO: 188913 - DNA, 60 bp, Artificial
  Synthetic oligonucleotide
acctcagctatgaggttatctatctccgccattaaatatctccctccgctctatgattag

SEQ ID NO: 188914 - DNA, 55 bp, Artificial
  Synthetic oligonucleotide
cggtccggaccatgacaagcagtttacagttgcggtgcttgtggacggcgagcgt

SEQ ID NO: 188915 - DNA, 55 bp, Artificial
  Synthetic oligonucleotide
cgggttaatattggattgacgtggatgtatgggtaggcaatctctagctttacag

SEQ ID NO: 188916 - DNA, 55 bp, Artificial
  Synthetic oligonucleotide
cgggcggagcgtatctgcatatagcaaacgagaaatactgcgctatggcaaagga

SEQ ID NO: 188917 - DNA, 55 bp, Artificial
  Synthetic oligonucleotide
cgggacccatacgcataccgatttccatcatagcggggttacaggagttggcaag

SEQ ID NO: 188918 - DNA, 55 bp, Artificial
  Synthetic oligonucleotide
gcccactgctctgtgtggcggtagcggactttggctttaacacgcatctcgccct

SEQ ID NO: 188919 - DNA, 55 bp, Artificial
  Synthetic oligonucleotide
cggctcgtttatacagctcggacttgcacttttcatcgcaactctgttatgctcg

SEQ ID NO: 188920 - DNA, 55 bp, Artificial
  Synthetic oligonucleotide
gcccatgaaatgcagactgcccggagataccacaaatgtatcctttgggcttcct

SEQ ID NO: 188921 - DNA, 55 bp, Artificial
  Synthetic oligonucleotide
gcccgaaatacctctatgccgtatacccgataagttttacggacgatggtgtcag

SEQ ID NO: 188922 - DNA, 54 bp, Artificial
  Synthetic oligonucleotide
gccgactatcgtagaacccgaccttgaaataccgggagttatggcgaacatttg

SEQ ID NO: 188923 - DNA, 55 bp, Artificial
  Synthetic oligonucleotide
cggagtaggcaaccgtatgaagttaaaatacactcgtgcaatggtaactgcagca

SEQ ID NO: 188924 - DNA, 56 bp, Artificial
  Synthetic oligonucleotide
ccgggggcaataaaggcacctgctccgatgtttaccggagaggtatccagaatgac

SEQ ID NO: 188925 - DNA, 55 bp, Artificial
  Synthetic oligonucleotide
gccggtgtactccatccgttccagaatacccacaaccgattgaccaatccaatga

SEQ ID NO: 188926 - DNA, 55 bp, Artificial
  Synthetic oligonucleotide
cggaggtaaataatctcggggcactatgcctgccttcggcagaatccgcgcccct

SEQ ID NO: 188927 - DNA, 55 bp, Artificial
  Synthetic oligonucleotide
cggacttcagtcctacgcacagaaagacccagttgttcagtataaattccttgga

SEQ ID NO: 188928 - DNA, 54 bp, Artificial
  Synthetic oligonucleotide
cggaataccgtattttgacgtatacgatccgagatttatggacttcggcgtacc

SEQ ID NO: 188929 - DNA, 55 bp, Artificial
  Synthetic oligonucleotide
cgcttccgactgacaaacgtttcccatgcggcatcgtcagacgccgataaatcat

SEQ ID NO: 188930 - DNA, 55 bp, Artificial
  Synthetic oligonucleotide
cgcttccatggacggcatgtgcatttatagcatacatgacttgtacagaagacgg

SEQ ID NO: 188931 - DNA, 55 bp, Artificial
  Synthetic oligonucleotide
gcctaaattcagtcaggcgcagaatctttcagagtatggctggaaagcggtaggt

SEQ ID NO: 188932 - DNA, 55 bp, Artificial
  Synthetic oligonucleotide
gcctcccggtgccagctgattaggattaaggaaccatgccaacgccattgcatac

SEQ ID NO: 188933 - DNA, 55 bp, Artificial
  Synthetic oligonucleotide
ctcacccactaccctatttcatggctcggtgctaaattatatgacctcatacccg

SEQ ID NO: 188934 - DNA, 55 bp, Artificial
  Synthetic oligonucleotide
ctcaaagacggctggtcgtcgtattacaatcatccggagggcggaaatctgcgga

SEQ ID NO: 188935 - DNA, 60 bp, Artificial
  Synthetic oligonucleotide
atgattaactcatcgtgtacggttattaccatgtggcaatccagagccttgtactgtgga

SEQ ID NO: 188936 - DNA, 55 bp, Artificial
  Synthetic oligonucleotide
gcaatgcacgctcataggagctaagatgtttgctccgaaatccaagttaggtggt

SEQ ID NO: 188937 - DNA, 55 bp, Artificial
  Synthetic oligonucleotide
ctatcttgagtaagcaatcctctaagccccatgaaaagacctgtagcaacaagca

SEQ ID NO: 188938 - DNA, 55 bp, Artificial
  Synthetic oligonucleotide
ctatatcaccgtgctggggagtgaggactactatccccgggcgggctacattccc

SEQ ID NO: 188939 - DNA, 55 bp, Artificial
  Synthetic oligonucleotide
ctaggtgtaactgtagattatgtgttgtccggcgagtatgcttctgacgattctg

SEQ ID NO: 188940 - DNA, 55 bp, Artificial
  Synthetic oligonucleotide
ctacctttgtatccatacggtcgtaagcagatgtacggatcgtgacgcagtcgga

SEQ ID NO: 188941 - DNA, 55 bp, Artificial
  Synthetic oligonucleotide
ctacctgtgaggatcctaatactctactggctatccgatcccctaactcgcccct

SEQ ID NO: 188942 - DNA, 55 bp, Artificial
  Synthetic oligonucleotide
gcagacatttgaatggtatctgccggatgattgctctcactgggataggcttgct

SEQ ID NO: 188943 - DNA, 55 bp, Artificial
  Synthetic oligonucleotide
ctaccagtacgtcatcatcctcgtagagtatgtcaagaggaatgtcctgtggcag

SEQ ID NO: 188944 - DNA, 55 bp, Artificial
  Synthetic oligonucleotide
ctacatttgcacggtttacatcgcattcctgtgctatagtcgaaatgtacacggc

SEQ ID NO: 188945 - DNA, 55 bp, Artificial
  Synthetic oligonucleotide
ctaacgttaaataatggatgatccggtgccaaaagtctaggtgctacagatgcaa

SEQ ID NO: 188946 - DNA, 60 bp, Artificial
  Synthetic oligonucleotide
gcctctgtttcaagaggtttctgagcctcccaatcaaagagagtaagatcatccatctgt

SEQ ID NO: 188947 - DNA, 55 bp, Artificial
  Synthetic oligonucleotide
cgttggtcagcttggtaagacgctcggtttctccgaggacaattctcaggtatcg

SEQ ID NO: 188948 - DNA, 55 bp, Artificial
  Synthetic oligonucleotide
cgttcacaatgataccggcagatctgcttagaaaagttgtaacgggaacatataa

SEQ ID NO: 188949 - DNA, 55 bp, Artificial
  Synthetic oligonucleotide
cgttagaggctgtagtgtgggggagcggagaagcttgttgtgtcgtggggcggat

SEQ ID NO: 188950 - DNA, 54 bp, Artificial
  Synthetic oligonucleotide
cgtcgaaactcaacggttttaaggttactcagattgaacgcaacgcatttcgtg

SEQ ID NO: 188951 - DNA, 55 bp, Artificial
  Synthetic oligonucleotide
cgtcctcttcacaatatccgccggtttcccctaatgccatcataacccaatgtgt

SEQ ID NO: 188952 - DNA, 55 bp, Artificial
  Synthetic oligonucleotide
gcatataagtaatccggcaaccgacagttttacataacagtaacagtcgctccac

SEQ ID NO: 188953 - DNA, 55 bp, Artificial
  Synthetic oligonucleotide
gcatgcaagcacgcttgatgccaagtcggatagtgctgtcatgcaggaggggaag

SEQ ID NO: 188954 - DNA, 55 bp, Artificial
  Synthetic oligonucleotide
cgtaaccagctccggaaggcttgtcccaagagctattatggttagccctatcaaa

SEQ ID NO: 188955 - DNA, 55 bp, Artificial
  Synthetic oligonucleotide
aattcagacggcgacctgccaagctcatatccgcccttagtgcctttgtacgagt

SEQ ID NO: 188956 - DNA, 55 bp, Artificial
  Synthetic oligonucleotide
gtctgtgagtcaagcattagtgccaactttaggtaagcttacatgccgttgtccc

SEQ ID NO: 188957 - DNA, 59 bp, Artificial
  Synthetic oligonucleotide
cgctcaaagttattaggaacctcctctatatgcactggcaccccagaataagcggaggc

SEQ ID NO: 188958 - DNA, 52 bp, Artificial
  Synthetic oligonucleotide
atacccggaaggtcggaggaaatacccagaccgaaaacgtgatggacagctt

SEQ ID NO: 188959 - DNA, 55 bp, Artificial
  Synthetic oligonucleotide
gtctgtctttatctgcggaattacattttcaggcggctcataaccgtccttaggc

SEQ ID NO: 188960 - DNA, 55 bp, Artificial
  Synthetic oligonucleotide
atactgccctctccgatgacgctgtgagcaccgatcgacgcgccagtccccacaa

SEQ ID NO: 188961 - DNA, 55 bp, Artificial
  Synthetic oligonucleotide
gtctcactgacacgccggagaggcgttcccttgtattggacaattaacataccgg

SEQ ID NO: 188962 - DNA, 55 bp, Artificial
  Synthetic oligonucleotide
gtcgggaaaggttctgctattcaaaacgtgctgacatcgttgtcctacccggagg

SEQ ID NO: 188963 - DNA, 55 bp, Artificial
  Synthetic oligonucleotide
gtcggaaacctgtacaaatgacggctgtataacttaccgttgcacggtctgcaat

SEQ ID NO: 188964 - DNA, 55 bp, Artificial
  Synthetic oligonucleotide
gtcgcggcgtgttgaatgttcgctttagcgctcgcatccaacacttgttcccagg

SEQ ID NO: 188965 - DNA, 55 bp, Artificial
  Synthetic oligonucleotide
gtcgcagagtgcctacattctcagtgccgtatccgataacgggatagtcataggg

SEQ ID NO: 188966 - DNA, 55 bp, Artificial
  Synthetic oligonucleotide
gtccgaagcccgaaacacagaagatggcggtaagctttaaaatggatcgccgcgg

SEQ ID NO: 188967 - DNA, 55 bp, Artificial
  Synthetic oligonucleotide
atcactgcacagaaaatggcccaggcagaggtcatgcatctgtacaacaacgtcc

SEQ ID NO: 188968 - DNA, 58 bp, Artificial
  Synthetic oligonucleotide
gttattaacttatctggatacactctctttagatacgctatatccgttctaagtgttc

SEQ ID NO: 188969 - DNA, 55 bp, Artificial
  Synthetic oligonucleotide
gtcccttcttctcttgaatagggaaataccccgagcttgtcaaacttcatctgcc

SEQ ID NO: 188970 - DNA, 55 bp, Artificial
  Synthetic oligonucleotide
aatccacttatctcgctctaccttcatgtcggctgactcatccgttgccgtcacg

SEQ ID NO: 188971 - DNA, 55 bp, Artificial
  Synthetic oligonucleotide
gtccacacgacctccgtccataataattatctggtctgcatgacacactgacgat

SEQ ID NO: 188972 - DNA, 54 bp, Artificial
  Synthetic oligonucleotide
tctgtatggggcttgtaaagacctttatggacgggatacttagtacgggagacg

SEQ ID NO: 188973 - DNA, 54 bp, Artificial
  Synthetic oligonucleotide
aatacttagtaccgtttttatcggttctcagataaacgatcttagccatcttta

SEQ ID NO: 188974 - DNA, 55 bp, Artificial
  Synthetic oligonucleotide
gtagttgtcatggttgatacttatagcaacacttgcgggatccgatgttatctgc

SEQ ID NO: 188975 - DNA, 55 bp, Artificial
  Synthetic oligonucleotide
tcttcccgttccgacaacccttgcacctccgcttttagccacgtcgggcatgatt

SEQ ID NO: 188976 - DNA, 55 bp, Artificial
  Synthetic oligonucleotide
gtagcctatgaagacaagactatagtgagcggctcaggatgggtaccaactcctg

SEQ ID NO: 188977 - DNA, 55 bp, Artificial
  Synthetic oligonucleotide
gtagaccaggcgcttgttatatttgcagttcatgaacccgaacctaactttcact

SEQ ID NO: 188978 - DNA, 55 bp, Artificial
  Synthetic oligonucleotide
tgaaacggagattcacagctataaacaaataccgcaccgccgtaaatttctacgg

SEQ ID NO: 188979 - DNA, 60 bp, Artificial
  Synthetic oligonucleotide
tgtcctgccttacaaccgtatgcaacgccactagctgtagagctggtatagtggaggcat

SEQ ID NO: 188980 - DNA, 58 bp, Artificial
  Synthetic oligonucleotide
cagcactccctaagttgaaatttaagccccacgctctgattacatccttaggctgtgg

SEQ ID NO: 188981 - DNA, 55 bp, Artificial
  Synthetic oligonucleotide
tgcaacgggaggagctgtggttgcggggcagtatctcggtaaacgagacagggat

SEQ ID NO: 188982 - DNA, 55 bp, Artificial
  Synthetic oligonucleotide
actattcaagcatagagtggctgcttcgggcagatatggtacatttaagcaggta

SEQ ID NO: 188983 - DNA, 55 bp, Artificial
  Synthetic oligonucleotide
ggtgatggccgaatccggacgatactcgaccaacaggataaacagctgtatcgga

SEQ ID NO: 188984 - DNA, 55 bp, Artificial
  Synthetic oligonucleotide
tatggtgtgttgcagcttcagaccgttggaagtgcgccggcacttagtgaacgca

SEQ ID NO: 188985 - DNA, 55 bp, Artificial
  Synthetic oligonucleotide
taagagtacttgtatccgcctctcccggcaaatctatggcggtctttgaaccgaa

SEQ ID NO: 188986 - DNA, 55 bp, Artificial
  Synthetic oligonucleotide
taacatccattaaatgggtaatcttttctatcgttgtcggcatagtcgcaggaag

SEQ ID NO: 188987 - DNA, 55 bp, Artificial
  Synthetic oligonucleotide
actacctggccgtctatgatccctcccacaactatctctaccggaaagaggccgc

SEQ ID NO: 188988 - DNA, 55 bp, Artificial
  Synthetic oligonucleotide
gtttggattgtgaagctccgttctcagattagtaagcctctgctgggtacgcttg

SEQ ID NO: 188989 - DNA, 55 bp, Artificial
  Synthetic oligonucleotide
gttgtaggtgttccaccacccatatacactgtatccagtcttctgcccttcatag

SEQ ID NO: 188990 - DNA, 55 bp, Artificial
  Synthetic oligonucleotide
agcctctcctgtgtagcctcccttttatcctcgatctccttagtattgagagctt

SEQ ID NO: 188991 - DNA, 59 bp, Artificial
  Synthetic oligonucleotide
actacaggacgtgcggacggagcccccggaagctatgtcttgggacttgatcatacaga

SEQ ID NO: 188992 - DNA, 55 bp, Artificial
  Synthetic oligonucleotide
gttcgtttgatccttaacctcgaaatacagttagatgatacgccaggatacccaa

SEQ ID NO: 188993 - DNA, 55 bp, Artificial
  Synthetic oligonucleotide
gttcgttaaggagcatacacacgtcggatggacgctttctgtcttcgatgcgctc

SEQ ID NO: 188994 - DNA, 55 bp, Artificial
  Synthetic oligonucleotide
agctctccgccttactgccacaatatgtacatctcgcccctattgctacctcagc

SEQ ID NO: 188995 - DNA, 55 bp, Artificial
  Synthetic oligonucleotide
gttcccttttcgtagcgcgcagaggtttctgttctgagccccgtcttgcgggaag

SEQ ID NO: 188996 - DNA, 55 bp, Artificial
  Synthetic oligonucleotide
gttccaagaagaacggtaagtgttacaacaagcacgaacgctgacgacagaccaa

SEQ ID NO: 188997 - DNA, 55 bp, Artificial
  Synthetic oligonucleotide
acgccattacggaactgctattttccccgcaggagaatatcaggcactccgggta

SEQ ID NO: 188998 - DNA, 55 bp, Artificial
  Synthetic oligonucleotide
acgaattcgttatcccgactgtcattaagccggaagtggataagcgtgtccaggc

SEQ ID NO: 188999 - DNA, 55 bp, Artificial
  Synthetic oligonucleotide
gttcaagatatgcggtttccgccttgcctattatctgaattctgcccttgtcgaa

SEQ ID NO: 189000 - DNA, 55 bp, Artificial
  Synthetic oligonucleotide
tcccgtctcacctaccaaaagtttcggtcgccttgtagttgcaataagtctgtcc

SEQ ID NO: 189001 - DNA, 54 bp, Artificial
  Synthetic oligonucleotide
acaggaacaccacgtctccggcttttattccccgtccctgtttacagtcaatca

SEQ ID NO: 189002 - DNA, 58 bp, Artificial
  Synthetic oligonucleotide
gctttggagggcttgtaggcgcaggcagaagcgagcttatggaagccgtattcggact

SEQ ID NO: 189003 - DNA, 55 bp, Artificial
  Synthetic oligonucleotide
acaccagaggtttctgctatcagagatgctgacagaattgttggacttcttgatg

SEQ ID NO: 189004 - DNA, 55 bp, Artificial
  Synthetic oligonucleotide
aattttgccatatacctcgcgctgtatatcgtgggaatgaaacggggaacgatcg

SEQ ID NO: 189005 - DNA, 55 bp, Artificial
  Synthetic oligonucleotide
gttaggtcttgcacaggttaagccatggggacatcttggagatgttgcggcggca

SEQ ID NO: 189006 - DNA, 55 bp, Artificial
  Synthetic oligonucleotide
gtgtgcacacaacgcacactttgagatggaatgcctaaagcgagccttacacata

SEQ ID NO: 189007 - DNA, 55 bp, Artificial
  Synthetic oligonucleotide
gtgaagcataaacgaccatactcgtaagttctcccgtagtcatagcaccgaaagt

SEQ ID NO: 189008 - DNA, 55 bp, Artificial
  Synthetic oligonucleotide
gtgaacctcaccgagacacacaagaccgtacagaacatcaaggcacggggagcat

SEQ ID NO: 189009 - DNA, 55 bp, Artificial
  Synthetic oligonucleotide
tcgcccgatatcatactatggtgctgcaaagctcggttcagaagcacttatatca

SEQ ID NO: 189010 - DNA, 55 bp, Artificial
  Synthetic oligonucleotide
agtcctaacaaatcgcttacagggagcgaccaccatatgcagtcaacccctccga

SEQ ID NO: 189011 - DNA, 55 bp, Artificial
  Synthetic oligonucleotide
cagataggtgttcccgcacttaggataataggtatccactatcttattgcagggg

SEQ ID NO: 189012 - DNA, 55 bp, Artificial
  Synthetic oligonucleotide
agatattaagggaatctgcgatattctttcagaagtaggcttatgtgcgagagac

SEQ ID NO: 189013 - DNA, 58 bp, Artificial
  Synthetic oligonucleotide
gttaaatacatcgttgatacccataggattgagggatctagctgtaccagatacctgt

SEQ ID NO: 189014 - DNA, 53 bp, Artificial
  Synthetic oligonucleotide
ggcgtaactcaaagtgacgggcgctacgaaacaaagtttcccgcggggcatac

SEQ ID NO: 189015 - DNA, 55 bp, Artificial
  Synthetic oligonucleotide
ggccatgtgatattacatccgggtgagtttatagtggtggcaccggaggatgcgc

SEQ ID NO: 189016 - DNA, 55 bp, Artificial
  Synthetic oligonucleotide
ggcattcagacttactctttacggtgaaagcgacagtgcgttggcggtaattgcg

SEQ ID NO: 189017 - DNA, 55 bp, Artificial
  Synthetic oligonucleotide
ggcatccgcaaattcctttacgccatcatctgtcatctcgtggtgtgtgcaggct

SEQ ID NO: 189018 - DNA, 55 bp, Artificial
  Synthetic oligonucleotide
taggtcatttcatcattgaccagaatcctgataccaaggtgctttacgttacttc

SEQ ID NO: 189019 - DNA, 55 bp, Artificial
  Synthetic oligonucleotide
ggcacgtacactctggtatcccttctgaacgaacttctgtcttccgttatgcatc

SEQ ID NO: 189020 - DNA, 55 bp, Artificial
  Synthetic oligonucleotide
ttgtggccttagagcgaggattgaatgtgagccgtttagcgaacattcaacccgc

SEQ ID NO: 189021 - DNA, 55 bp, Artificial
  Synthetic oligonucleotide
cagcggcagaaactactgctcagtaacgaaaacagataacacccctgcgttgcga

SEQ ID NO: 189022 - DNA, 55 bp, Artificial
  Synthetic oligonucleotide
ggcacacgtactatcccgcgtgctacgcttcgtgggtaagatactatacgaaatt

SEQ ID NO: 189023 - DNA, 55 bp, Artificial
  Synthetic oligonucleotide
tttaaagggagagtggaagtcaattaatgttggtagagtaatgacctgcgttctt

SEQ ID NO: 189024 - DNA, 56 bp, Artificial
  Synthetic oligonucleotide
tgccggtcgggcttaccggggcggaagtagcagtcagagtggatagcggtaaggta

SEQ ID NO: 189025 - DNA, 55 bp, Artificial
  Synthetic oligonucleotide
ggactgttcccgtttgccgtctaaatgcgcaagatacgaactcattgccatgcta

SEQ ID NO: 189026 - DNA, 55 bp, Artificial
  Synthetic oligonucleotide
caggacgtcctcgtagaatgggatggttcgattgcgtagcttcacgttacggagt

SEQ ID NO: 189027 - DNA, 55 bp, Artificial
  Synthetic oligonucleotide
caggatccgactgacagtcttctttgccgcaaaccacaaccgacttcccggatct

SEQ ID NO: 189028 - DNA, 55 bp, Artificial
  Synthetic oligonucleotide
tacagtaatgtcatagcctaagaatcttgccctatctcccgtatgcgttatctta

SEQ ID NO: 189029 - DNA, 55 bp, Artificial
  Synthetic oligonucleotide
ggacggaaccgttgcaaatgcggtaacacctgtagtgcctacaccggttcctgcg

SEQ ID NO: 189030 - DNA, 55 bp, Artificial
  Synthetic oligonucleotide
tagcgaagttgcaagttacgagcaggcgcgagtaacgctctcaatggaattgcgg

SEQ ID NO: 189031 - DNA, 55 bp, Artificial
  Synthetic oligonucleotide
tactcacaggagctgaccatgattgctgtaaaggaagccggtaccgaggataagg

SEQ ID NO: 189032 - DNA, 55 bp, Artificial
  Synthetic oligonucleotide
cagtcccatcaagcagcatatttggtgagacctccgctgaattcttcggctgtcc

SEQ ID NO: 189033 - DNA, 55 bp, Artificial
  Synthetic oligonucleotide
cagtcgggcatagggtaagcgtagcttttatccgcaagagtaaccgtgtaaagcg

SEQ ID NO: 189034 - DNA, 55 bp, Artificial
  Synthetic oligonucleotide
cagttatagccgtggtaccatatagacagtttcagaagggaggctggtctacatg

SEQ ID NO: 189035 - DNA, 58 bp, Artificial
  Synthetic oligonucleotide
gttctggatggatcccatatcagtacccatcttgttagcgttatccgccatatctatc

SEQ ID NO: 189036 - DNA, 55 bp, Artificial
  Synthetic oligonucleotide
cagttcgaaatctatgggaacggccaacgaaaacgcagtatatcttcagaaagcg

SEQ ID NO: 189037 - DNA, 55 bp, Artificial
  Synthetic oligonucleotide
tttgctcggaagaactgttgttgtagatacggtagaccatgctctttctctttcg

SEQ ID NO: 189038 - DNA, 55 bp, Artificial
  Synthetic oligonucleotide
atcttgtttgcgatagttgcagggatgactgcgccgttatcgccctttgtcagat

SEQ ID NO: 189039 - DNA, 55 bp, Artificial
  Synthetic oligonucleotide
atgactttatccgctccctctatctggcttacaaaatcactgtttacagcaccgg

SEQ ID NO: 189040 - DNA, 55 bp, Artificial
  Synthetic oligonucleotide
ggtcgtaaacgctccctactctcttggttgttgtcattagtgcgaatgaatcgcc

SEQ ID NO: 189041 - DNA, 55 bp, Artificial
  Synthetic oligonucleotide
ggtaaagtacaatccggtaatgtgcataacggaaagtccggcaggaaatctagca

SEQ ID NO: 189042 - DNA, 55 bp, Artificial
  Synthetic oligonucleotide
tggcaattccctgaccccggtatgcgggttctgtaaacatgttcgtaatataggc

SEQ ID NO: 189043 - DNA, 53 bp, Artificial
  Synthetic oligonucleotide
tggtacggcggaggggctactgtcctttactagcccggaggatgaaggttccc

SEQ ID NO: 189044 - DNA, 55 bp, Artificial
  Synthetic oligonucleotide
tatgccgaatcttgccaaaggaagtgcattcatatatggtcatgtacatctcccg

SEQ ID NO: 189045 - DNA, 55 bp, Artificial
  Synthetic oligonucleotide
actgtggcattactataacagagtcacaggttaattccatatatgactgcggcgg

SEQ ID NO: 189046 - DNA, 58 bp, Artificial
  Synthetic oligonucleotide
aagttaataacgcccctgctatctccagcggtcttagggagtactgctacaggtctgc

SEQ ID NO: 189047 - DNA, 55 bp, Artificial
  Synthetic oligonucleotide
gggcgagtttcatgagaatctgaccttgcagcaggcagtagacatctataagtcg

SEQ ID NO: 189048 - DNA, 55 bp, Artificial
  Synthetic oligonucleotide
gggcgaaatagcagcagatgatgaaacctttacacttgactataaggattgcctc

SEQ ID NO: 189049 - DNA, 55 bp, Artificial
  Synthetic oligonucleotide
agatgggcctggatatcctgcgaattcatgtggatccgaacaagaacaactggag

SEQ ID NO: 189050 - DNA, 55 bp, Artificial
  Synthetic oligonucleotide
aacctgattgagtacggatccgagcgtatatctaaatcccggatccttagatgcc

SEQ ID NO: 189051 - DNA, 55 bp, Artificial
  Synthetic oligonucleotide
ttgcgtgatcggaaagaggaatcccgctttcaacaggatgtgaacttacttccac

SEQ ID NO: 189052 - DNA, 55 bp, Artificial
  Synthetic oligonucleotide
attttgtcggatcttacaggactgccaattaagagtgaatatcatcttattcgcc

SEQ ID NO: 189053 - DNA, 55 bp, Artificial
  Synthetic oligonucleotide
caagaggtgcggcagtagcaaagtatggggaacttaatgaggatacggaggatga

SEQ ID NO: 189054 - DNA, 55 bp, Artificial
  Synthetic oligonucleotide
gggcagtacaaagtcatagtcggatacacccgttataagaccgtcccagctgcca

SEQ ID NO: 189055 - DNA, 55 bp, Artificial
  Synthetic oligonucleotide
gggaagagttgcctcgaatgaaatcttataaccgtcgcatatgagaggtgaaccg

SEQ ID NO: 189056 - DNA, 55 bp, Artificial
  Synthetic oligonucleotide
caatctgtcaagcgcagatgctttaagtccacaattactcagtccgtattccagc

SEQ ID NO: 189057 - DNA, 57 bp, Artificial
  Synthetic oligonucleotide
atacgctgtgaatgtctgccgttgtgagtgtcgggcaaggtcccccgacctttccaa

SEQ ID NO: 189058 - DNA, 54 bp, Artificial
  Synthetic oligonucleotide
caccctcctttactcaccttcgcaaatggatataatctccaaaacggcctcggg

SEQ ID NO: 189059 - DNA, 55 bp, Artificial
  Synthetic oligonucleotide
cacgactcatcggtcagtatcatcttaacgtaaacgtaactcgggaagagcttgc

SEQ ID NO: 189060 - DNA, 55 bp, Artificial
  Synthetic oligonucleotide
cacggaaagatgcttgccgtgacggacgcagacggaaaccgctacagcgtacctg

SEQ ID NO: 189061 - DNA, 55 bp, Artificial
  Synthetic oligonucleotide
ttggggattacagtgtgaactaagtggggatttggttctgcccgcagtaatgagg

SEQ ID NO: 189062 - DNA, 55 bp, Artificial
  Synthetic oligonucleotide
cagaatacggaattgccgagatggtaggtaagacgatgaaggatagagccagaag

SEQ ID NO: 189063 - DNA, 55 bp, Artificial
  Synthetic oligonucleotide
cagaatagcgtaggacgcattgagaagcggggcagggtgtcttgtgttacagctg

SEQ ID NO: 189064 - DNA, 55 bp, Artificial
  Synthetic oligonucleotide
ttgtagtctcgcggttgttatcaacccagtaaccactcgctgtatgacctccgac

SEQ ID NO: 189065 - DNA, 54 bp, Artificial
  Synthetic oligonucleotide
acggttatgccgagcggaagcacggtaatgctgtatatgggagacattccgtta

SEQ ID NO: 189066 - DNA, 54 bp, Artificial
  Synthetic oligonucleotide
tattgtatagatggtgcagtaggacatatcgttgacatagcttttacggatagg

SEQ ID NO: 189067 - DNA, 54 bp, Artificial
  Synthetic oligonucleotide
aaggggtgagaaatagcggaggattggaccttgaagcggaggggaggcacgcgg

SEQ ID NO: 189068 - DNA, 57 bp, Artificial
  Synthetic oligonucleotide
cggcggaggccaattcaaagcttcaggcgggacttgctatggatgcacttaaggcaa

SEQ ID NO: 189069 - DNA, 54 bp, Artificial
  Synthetic oligonucleotide
tgtacccttttcagtgctataccctgttacctctcctaccatctgcttatatgc

SEQ ID NO: 189070 - DNA, 54 bp, Artificial
  Synthetic oligonucleotide
tgttccggtacacaaattccgaagagagaggatcccgggagctgtctcgacgaa

SEQ ID NO: 189071 - DNA, 54 bp, Artificial
  Synthetic oligonucleotide
ttgacctccgcctccacaagcagtcaatcccaacgcacaaactgccgccattcc

SEQ ID NO: 189072 - DNA, 54 bp, Artificial
  Synthetic oligonucleotide
aacaaacgcctgaattgttcctgcgaaaccacctccgtgcactcggcatacgcc

SEQ ID NO: 189073 - DNA, 54 bp, Artificial
  Synthetic oligonucleotide
aaatggatagcggacgaagctatgcgtataccgttatagctgtctacaagcagc

SEQ ID NO: 189074 - DNA, 54 bp, Artificial
  Synthetic oligonucleotide
tttcaaagacccttgctccgtcagtgcttaagagcgactacgaagttttggaag

SEQ ID NO: 189075 - DNA, 54 bp, Artificial
  Synthetic oligonucleotide
aaagactgtaggactcctcacacttatggcacagtcaggtttattcattccggc

SEQ ID NO: 189076 - DNA, 54 bp, Artificial
  Synthetic oligonucleotide
aaaccaacgaggtcgtccgagtcggaacgagggccatccaagatgagagcggac

SEQ ID NO: 189077 - DNA, 54 bp, Artificial
  Synthetic oligonucleotide
ttttaatacacacgacaaaggtaagcacttttcttgccgcactcagtcgattgc

SEQ ID NO: 189078 - DNA, 54 bp, Artificial
  Synthetic oligonucleotide
gtagtataaagaatgcgcctatgtatcgatcaaacgacttcgcatcataccagt

SEQ ID NO: 189079 - DNA, 57 bp, Artificial
  Synthetic oligonucleotide
tccgccatagaatgcgccggctataagtgccagcaatgcaagtcccgtgtacacata

SEQ ID NO: 189080 - DNA, 54 bp, Artificial
  Synthetic oligonucleotide
gcggcgtgttgaatgttcgcttaaatgcgctcgcatccaacacttgctccgagg

SEQ ID NO: 189081 - DNA, 54 bp, Artificial
  Synthetic oligonucleotide
ggtaaacacgggagataatctgatacttatggatgtgggtgcggtaagacagcg

SEQ ID NO: 189082 - DNA, 54 bp, Artificial
  Synthetic oligonucleotide
agtcattaaatatcagccgccagagttttgacgtagcaagtacattcgccttgt

SEQ ID NO: 189083 - DNA, 54 bp, Artificial
  Synthetic oligonucleotide
atggggacacagaagggctatgctatccggtttacctcaaaggaagtgcgtccg

SEQ ID NO: 189084 - DNA, 54 bp, Artificial
  Synthetic oligonucleotide
agggatagctgttacctcagtaagaggcttataggtagccgatactctgagatc

SEQ ID NO: 189085 - DNA, 54 bp, Artificial
  Synthetic oligonucleotide
atgtaggcgtaaagggcggtatggtgatagtgtcggctgacgaccccggtccta

SEQ ID NO: 189086 - DNA, 54 bp, Artificial
  Synthetic oligonucleotide
cgctcttttatgcgaagcggtccctatgagcagagattacgtcgagatctgaag

SEQ ID NO: 189087 - DNA, 54 bp, Artificial
  Synthetic oligonucleotide
aggctcttgctatggtcgtggcaccgtttacgacaaactggcttccaattacga

SEQ ID NO: 189088 - DNA, 54 bp, Artificial
  Synthetic oligonucleotide
ggggcttctcttatcttaatgtcacatcttggacgtccgaagaatgaacccgac

SEQ ID NO: 189089 - DNA, 54 bp, Artificial
  Synthetic oligonucleotide
aggattgccccattgattgtaaagcctgtgtaacttgagcacgaagggcaacgc

SEQ ID NO: 189090 - DNA, 60 bp, Artificial
  Synthetic oligonucleotide
gcgaagagtgccgcacccagtgcaccgttaagctggcaatactcacttgtatggagctta

SEQ ID NO: 189091 - DNA, 57 bp, Artificial
  Synthetic oligonucleotide
cttgcggcagttgcctcaccggcatggtgtgtaggtacggcgctaggtgttttgatg

SEQ ID NO: 189092 - DNA, 54 bp, Artificial
  Synthetic oligonucleotide
taaagtccaatccgcgcctacagcttcccgaaacgctacataaaaggggcggcg

SEQ ID NO: 189093 - DNA, 54 bp, Artificial
  Synthetic oligonucleotide
attcgttccaaccgttgtcattccctcatcgagatgtccgtctaagagcgcaac

SEQ ID NO: 189094 - DNA, 54 bp, Artificial
  Synthetic oligonucleotide
cagtttgcgttatcactcataatcggtatgtcactctctcttactatatgcatg

SEQ ID NO: 189095 - DNA, 54 bp, Artificial
  Synthetic oligonucleotide
cagtacccgggcagaactgcagagcgtgtgatagaagagggcatggttactaca

SEQ ID NO: 189096 - DNA, 53 bp, Artificial
  Synthetic oligonucleotide
cagcgttcttgtaacggcgggaagtacgggagccgtcctttcggcaggagtcc

SEQ ID NO: 189097 - DNA, 54 bp, Artificial
  Synthetic oligonucleotide
agcacatggcggcataactcccacacagcacgctgcaaatcgagccctcgcctg

SEQ ID NO: 189098 - DNA, 54 bp, Artificial
  Synthetic oligonucleotide
cactgaatcttcaacagttccgttcactatacatccacttgaaacaaggctgtt

SEQ ID NO: 189099 - DNA, 53 bp, Artificial
  Synthetic oligonucleotide
gatccctcgaaccggggaggttatgaggtcaatcgctcgcattgtaacgctcc

SEQ ID NO: 189100 - DNA, 53 bp, Artificial
  Synthetic oligonucleotide
cataaaatcctcatatcgatagccttcgtctctcgttaaccggataatcgtcc

SEQ ID NO: 189101 - DNA, 53 bp, Artificial
  Synthetic oligonucleotide
ggttgccgtcacgacagtatgaaggtgcttgatatacttaaagccaccgttcc

SEQ ID NO: 189102 - DNA, 56 bp, Artificial
  Synthetic oligonucleotide
gaggaaatccataattatactctcagcattctgtatcctataccaatatgcgtctg

SEQ ID NO: 189103 - DNA, 53 bp, Artificial
  Synthetic oligonucleotide
tttcagacgtgcattatacgttgaagaccctaatgcgatacgttctcaggtaa

SEQ ID NO: 189104 - DNA, 53 bp, Artificial
  Synthetic oligonucleotide
ctgtactggacacttactaatccgtatgtatcgaagttcagatatgattgtgc

SEQ ID NO: 189105 - DNA, 53 bp, Artificial
  Synthetic oligonucleotide
ccgccactgtaatggcgcagagtagaaacgcccctttccaatgcgcgggtaac

SEQ ID NO: 189106 - DNA, 53 bp, Artificial
  Synthetic oligonucleotide
ggaagggtctcatccggaaactgatctaccctgccacacacagcctcaagcga

SEQ ID NO: 189107 - DNA, 53 bp, Artificial
  Synthetic oligonucleotide
ctttgcaaggtggaaattgccgttcctaatgctacaccgacatatgcccttgt

SEQ ID NO: 189108 - DNA, 53 bp, Artificial
  Synthetic oligonucleotide
aaatagcggaggattggaccttgaagcggaggggaggcacgcggaagtccaaa

SEQ ID NO: 189109 - DNA, 53 bp, Artificial
  Synthetic oligonucleotide
gacagtacagccctcttaccttagtaggtctgagaactattacgcaatcgacg

SEQ ID NO: 189110 - DNA, 53 bp, Artificial
  Synthetic oligonucleotide
cccaatatgtttatatctacatccgcatcgtttcccgtggaattaagccctac

SEQ ID NO: 189111 - DNA, 51 bp, Artificial
  Synthetic oligonucleotide
aacgcttcccctcagtattaccgcacggatgacaccccggaaaaacggacc

SEQ ID NO: 189112 - DNA, 53 bp, Artificial
  Synthetic oligonucleotide
cagccgtggagatgtaggaaccgtacaggtacccgagacagtgtgaccacacg

SEQ ID NO: 189113 - DNA, 56 bp, Artificial
  Synthetic oligonucleotide
atcgcatctaccgacaatctggttgcagtagcggagggagtgggcaataccgagcg

SEQ ID NO: 189114 - DNA, 53 bp, Artificial
  Synthetic oligonucleotide
ttaaactccattcgtgaggtgctcaccatgccagtgcaggggattaccaatgg

SEQ ID NO: 189115 - DNA, 53 bp, Artificial
  Synthetic oligonucleotide
gaattcccttgtaaacagtccctcactcgcaccaaacgggtctgttgcgtcat

SEQ ID NO: 189116 - DNA, 53 bp, Artificial
  Synthetic oligonucleotide
ggcgtgttgaatgctcgctttcgcgctcgtatccaacacttgctcccaggcca

SEQ ID NO: 189117 - DNA, 53 bp, Artificial
  Synthetic oligonucleotide
ccgcttaagccggacccttacctgtctggaccaaatgcttgacagcgctcttg

SEQ ID NO: 189118 - DNA, 53 bp, Artificial
  Synthetic oligonucleotide
cgtggggttccggcgaatctgctcggaattgacccgcaggagctgtttatcga

SEQ ID NO: 189119 - DNA, 53 bp, Artificial
  Synthetic oligonucleotide
gcataacttcgttaagtttcatatcgcttgtcggtcacgtaactttagtacgc

SEQ ID NO: 189120 - DNA, 53 bp, Artificial
  Synthetic oligonucleotide
tacaggtctgctcggttcaggacgctcagagctggtaagagctatatacggtg

SEQ ID NO: 189121 - DNA, 53 bp, Artificial
  Synthetic oligonucleotide
gcagatgcagtacaatctgatgtcgggcggctcacttatgaccatgaagaata

SEQ ID NO: 189122 - DNA, 53 bp, Artificial
  Synthetic oligonucleotide
acttaggactttgtgcgtggtgtatggagtgtttctcatagtatacggagtga

SEQ ID NO: 189123 - DNA, 53 bp, Artificial
  Synthetic oligonucleotide
tacaattagccatttgaagccatcaggtgagtagtcgtcttcatatagtgccg

SEQ ID NO: 189124 - DNA, 55 bp, Artificial
  Synthetic oligonucleotide
gccttgtaaacattataagttgctccctgaacactactccacttgattgtgcatg

SEQ ID NO: 189125 - DNA, 53 bp, Artificial
  Synthetic oligonucleotide
gcattgtgcgttctggttcccatcgccctgcatttaccgctcgttcaggagtc

SEQ ID NO: 189126 - DNA, 53 bp, Artificial
  Synthetic oligonucleotide
agcaacgcaggggctttacccgccaggttccacctataaggtactgacagcgc

SEQ ID NO: 189127 - DNA, 53 bp, Artificial
  Synthetic oligonucleotide
gcaccgaaacatgtacctagcgcatctgcaagaagcactcttccaaccttcgg

SEQ ID NO: 189128 - DNA, 53 bp, Artificial
  Synthetic oligonucleotide
agcacctgtcaataatagaacgctgctgcggtgtaagcggtttattaagacac

SEQ ID NO: 189129 - DNA, 53 bp, Artificial
  Synthetic oligonucleotide
cctgtacctgcataatagtgccgaatatgacgcacgggcctcgtccttatgcg

SEQ ID NO: 189130 - DNA, 53 bp, Artificial
  Synthetic oligonucleotide
gtatacggagcgtcctgcgaagtgccttactcaactgtcaaggcaggacttat

SEQ ID NO: 189131 - DNA, 53 bp, Artificial
  Synthetic oligonucleotide
gattacaccggggagcgcatcagaacgagccttcgcgtcatgaatacctttgt

SEQ ID NO: 189132 - DNA, 53 bp, Artificial
  Synthetic oligonucleotide
tcggtttatatgagcagcaccgtaacctatggccgcgggaaatttattgtgac

SEQ ID NO: 189133 - DNA, 53 bp, Artificial
  Synthetic oligonucleotide
aattacgatgaagcttccgtctggtgtgaaacttcataatctaagcacaggca

SEQ ID NO: 189134 - DNA, 53 bp, Artificial
  Synthetic oligonucleotide
agtcgcggcgtgttgaatgttcgctccacgcgctcgcatccaacacttgctcc

SEQ ID NO: 189135 - DNA, 47 bp, Artificial
  Synthetic oligonucleotide
gcggctgggccggttacggagttccgaacccggggtctaaaaacggt

SEQ ID NO: 189136 - DNA, 53 bp, Artificial
  Synthetic oligonucleotide
cgcgccgtttagcataacggagacgccagtccgcagtcagaacccttactttt

SEQ ID NO: 189137 - DNA, 53 bp, Artificial
  Synthetic oligonucleotide
aggcagctatctgtgatatatgaaatcgactcattgagcaacctcctcgtgga

SEQ ID NO: 189138 - DNA, 52 bp, Artificial
  Synthetic oligonucleotide
taataaacgaaccggtcgattaatccgtgctctccttacagaaatcgggcgg

SEQ ID NO: 189139 - DNA, 52 bp, Artificial
  Synthetic oligonucleotide
tatggggcggatgctcttggagtgggaagcaatatggctaaggctattcgct

SEQ ID NO: 189140 - DNA, 52 bp, Artificial
  Synthetic oligonucleotide
gccagaggagcgagcttaacagtttttgcagagccacgggcaggcgcataga

SEQ ID NO: 189141 - DNA, 52 bp, Artificial
  Synthetic oligonucleotide
tccgattgagtctatcgcagacaagatttcagcgatatttgtgcctgttgta

SEQ ID NO: 189142 - DNA, 52 bp, Artificial
  Synthetic oligonucleotide
gcttgccacaggttgtagcccttgtgaaacaccgtttaacattgccactccg

SEQ ID NO: 189143 - DNA, 52 bp, Artificial
  Synthetic oligonucleotide
tattgttcatacgccctccgttaattcttcgggtggtgaagtgagctttccg

SEQ ID NO: 189144 - DNA, 52 bp, Artificial
  Synthetic oligonucleotide
ttacgttatgctatacagcggcacattcgtccgttcctgaaattgtgcctga

SEQ ID NO: 189145 - DNA, 52 bp, Artificial
  Synthetic oligonucleotide
gcggcgtgttgaatattcgcttaaacgctcatatccaacacttgctccgagg

SEQ ID NO: 189146 - DNA, 55 bp, Artificial
  Synthetic oligonucleotide
cgcaaggtgcgtaactcctatacctgctgcgtaagctgccatctcatcaattgtg

SEQ ID NO: 189147 - DNA, 52 bp, Artificial
  Synthetic oligonucleotide
tatgccccgtcaactgccacatgaacctgagttccggcctcgttgcactctg

SEQ ID NO: 189148 - DNA, 52 bp, Artificial
  Synthetic oligonucleotide
tcacgcgtcagaacgaacggtatttggcagacgtcaacctcagattgcctca

SEQ ID NO: 189149 - DNA, 52 bp, Artificial
  Synthetic oligonucleotide
tataccggcttcaagttcaggtgtaactctgtttaaatcatcgttgcactcc

SEQ ID NO: 189150 - DNA, 52 bp, Artificial
  Synthetic oligonucleotide
gtaattaccttctgtggtttcgttatagccataggatgcgtttcttgtcgcc

SEQ ID NO: 189151 - DNA, 52 bp, Artificial
  Synthetic oligonucleotide
tacggccatgtgcttgtcattgcaggaagcaacggtatgagcggtgccgctt

SEQ ID NO: 189152 - DNA, 52 bp, Artificial
  Synthetic oligonucleotide
ggacgcaccgcttctgcgtgaggcggataagcacgagttgtcaagacgcttt

SEQ ID NO: 189153 - DNA, 52 bp, Artificial
  Synthetic oligonucleotide
tcatattctcatttggctactcaagatattcatactatccgtacaaccccgg

SEQ ID NO: 189154 - DNA, 52 bp, Artificial
  Synthetic oligonucleotide
aacgtgcaaccaatccgaagactacacctacacctgtagatacaaaggcaca

SEQ ID NO: 189155 - DNA, 52 bp, Artificial
  Synthetic oligonucleotide
cgtcagacacccgtgtcgatacccttaaaaccggacgcctgaaggtggatat

SEQ ID NO: 189156 - DNA, 52 bp, Artificial
  Synthetic oligonucleotide
cgggcatcggtatcactgttttcgtgggtgtgcatctgctaaccgcagggcg

SEQ ID NO: 189157 - DNA, 55 bp, Artificial
  Synthetic oligonucleotide
cctcgatcgtatttccgcacttgcactcacagatccacatgcaaccgttacggta

SEQ ID NO: 189158 - DNA, 52 bp, Artificial
  Synthetic oligonucleotide
cggaggtgtggtcggaagtatgataatcgctatgcaaaagggagttgccaga

SEQ ID NO: 189159 - DNA, 52 bp, Artificial
  Synthetic oligonucleotide
cgctgtcgcagaggtgacggattttagcgctgttgtaggaaatggtctgact

SEQ ID NO: 189160 - DNA, 52 bp, Artificial
  Synthetic oligonucleotide
cgaaaatacccttccgaaagccccacatagttggagcagtcccgtatcagta

SEQ ID NO: 189161 - DNA, 52 bp, Artificial
  Synthetic oligonucleotide
ccgccctgcgcaatcatggatcttgccttggtaacggcatccaaggtgccct

SEQ ID NO: 189162 - DNA, 52 bp, Artificial
  Synthetic oligonucleotide
ccctccatacgctctactatgtgctgtatgtctaagtgcctatctgtaccgc

SEQ ID NO: 189163 - DNA, 52 bp, Artificial
  Synthetic oligonucleotide
accgcatactacagcggaaagcacattgtaatcgtgcctacagttgcggcta

SEQ ID NO: 189164 - DNA, 52 bp, Artificial
  Synthetic oligonucleotide
ccagaagcttcggcgctttctgcttcacgagtataaaacacagaccgtgtac

SEQ ID NO: 189165 - DNA, 52 bp, Artificial
  Synthetic oligonucleotide
agaaacctttgcgtgcagtagaatttggtcagtgggcaattagactaataga

SEQ ID NO: 189166 - DNA, 52 bp, Artificial
  Synthetic oligonucleotide
agactcattccaggtccaagagtatcttcaagccaaaccctatctcctgtta

SEQ ID NO: 189167 - DNA, 52 bp, Artificial
  Synthetic oligonucleotide
agactgtgtttcaaccgaagctcccgttggctcatgtttgtcaattcaattt

SEQ ID NO: 189168 - DNA, 55 bp, Artificial
  Synthetic oligonucleotide
cctcgtaatattgtctcctcacacttatcacatccggaaaatcgcagtccaacca

SEQ ID NO: 189169 - DNA, 52 bp, Artificial
  Synthetic oligonucleotide
agatgtattctttcctatagcaaagggcggaacatcagccttacccggaggt

SEQ ID NO: 189170 - DNA, 52 bp, Artificial
  Synthetic oligonucleotide
atcccgctagcggcagggtggataagctcgatgtcgctgtaaggcgtagcgt

SEQ ID NO: 189171 - DNA, 52 bp, Artificial
  Synthetic oligonucleotide
agggccgtctcacgctgaagaggtagcgctaaatatgccgacagctgtggct

SEQ ID NO: 189172 - DNA, 52 bp, Artificial
  Synthetic oligonucleotide
atatcggaagcaatcgaggatgttttcgttagggcggctcgtcagctttaag

SEQ ID NO: 189173 - DNA, 52 bp, Artificial
  Synthetic oligonucleotide
atactccttaagcgccttgtaaagcatgccggcagactcgcccatcctgccc

SEQ ID NO: 189174 - DNA, 52 bp, Artificial
  Synthetic oligonucleotide
aggtagcgccggggatatggaccgcatgcgaggcagcgtgattacacaaaag

SEQ ID NO: 189175 - DNA, 52 bp, Artificial
  Synthetic oligonucleotide
gagcttaacagtttttgcagagccacgggcaggcgcatagaccgcacccgta

SEQ ID NO: 189176 - DNA, 52 bp, Artificial
  Synthetic oligonucleotide
gagcaaatatcaaggttgcggtaagaactgtagacggcacctttaccataca

SEQ ID NO: 189177 - DNA, 52 bp, Artificial
  Synthetic oligonucleotide
aacctgtcaaagctggtcgcatctatctcaataggcactctctcactgattt

SEQ ID NO: 189178 - DNA, 52 bp, Artificial
  Synthetic oligonucleotide
ctctatcatggattcctaccgctactgaggttactttatctcgtagcccccc

SEQ ID NO: 189179 - DNA, 55 bp, Artificial
  Synthetic oligonucleotide
cctgacctacataagccgcttcctgacctattgcaagatgcgccggtcccgggtt

SEQ ID NO: 189180 - DNA, 52 bp, Artificial
  Synthetic oligonucleotide
ctatgtaaccatggcagcggattccttagtatgtgcggcaggacgatgtgct

SEQ ID NO: 189181 - DNA, 51 bp, Artificial
  Synthetic oligonucleotide
cgcaggagccgcaattgctacagtgcttgctcaggcggttagtgtggtgct

SEQ ID NO: 189182 - DNA, 51 bp, Artificial
  Synthetic oligonucleotide
aagtgactcatgccacacctccatgccaaagctgcccgcacacggcccgta

SEQ ID NO: 189183 - DNA, 51 bp, Artificial
  Synthetic oligonucleotide
cgaagctccgggataattgtctgcgtggcacagccggtgtgcgtgtacctc

SEQ ID NO: 189184 - DNA, 51 bp, Artificial
  Synthetic oligonucleotide
gcggcagggtggataagctcgatgtcgctgtaaggcgtagcgtgcttaccg

SEQ ID NO: 189185 - DNA, 51 bp, Artificial
  Synthetic oligonucleotide
ccgattactattgatggtactctaagtctcttcgccactgcacaacttccg

SEQ ID NO: 189186 - DNA, 51 bp, Artificial
  Synthetic oligonucleotide
ctgatgctataagactactgccataccaaatggcaattgcatagctaagtg

SEQ ID NO: 189187 - DNA, 51 bp, Artificial
  Synthetic oligonucleotide
gcttaacctgcagcagggcggtaggcgcattatctggtttgggctcccgca

SEQ ID NO: 189188 - DNA, 51 bp, Artificial
  Synthetic oligonucleotide
acgagattcgaaagtggtcttcctgtagatatccagattcctacatatgaa

SEQ ID NO: 189189 - DNA, 51 bp, Artificial
  Synthetic oligonucleotide
acggcacacaccggcggggcagtctgggagaatgcagttatttccacagcc

SEQ ID NO: 189190 - DNA, 55 bp, Artificial
  Synthetic oligonucleotide
cgccgtagttgttcgtctgagacacactctcgatttattgtgagctgtgtgggag

SEQ ID NO: 189191 - DNA, 51 bp, Artificial
  Synthetic oligonucleotide
aacacgctcagcgggctcatacgtacctgctttgtgccacgagagggttgc

SEQ ID NO: 189192 - DNA, 51 bp, Artificial
  Synthetic oligonucleotide
acgttgcggctacccgtgcacttcatgagcttgctgtattccaccggggca

SEQ ID NO: 189193 - DNA, 51 bp, Artificial
  Synthetic oligonucleotide
aaagctcccgcacatacggactctgtctgggctgagttggggcttgcgtga

SEQ ID NO: 189194 - DNA, 51 bp, Artificial
  Synthetic oligonucleotide
agagacggtagcgcattacaccgcagccgagaattttctgccgggagtgga

SEQ ID NO: 189195 - DNA, 51 bp, Artificial
  Synthetic oligonucleotide
ggtaatgcgagctgtaaatccatcgcccaaattttctgccttaaccgcgtt

SEQ ID NO: 189196 - DNA, 51 bp, Artificial
  Synthetic oligonucleotide
aaacaggcatgctatctgcttaaacactcctcattgtccatcacagcaatt

SEQ ID NO: 189197 - DNA, 51 bp, Artificial
  Synthetic oligonucleotide
atatcatacagacattgtcttatatgggataaagggcggacagggcttaat

SEQ ID NO: 189198 - DNA, 51 bp, Artificial
  Synthetic oligonucleotide
atactgtaacaaccacaccgtttacggctatacacgaccagcctacaccgc

SEQ ID NO: 189199 - DNA, 51 bp, Artificial
  Synthetic oligonucleotide
tggccacatgatctttgacatcccaaccatcataagcgacctgtcccaggg

SEQ ID NO: 189200 - DNA, 51 bp, Artificial
  Synthetic oligonucleotide
cggcttaaacgcttcccctcagtattaccgcacggatgacaccccggaaaa

SEQ ID NO: 189201 - DNA, 58 bp, Artificial
  Synthetic oligonucleotide
ccccagccccataccgtaacaagtagcttgccacttatgatccgccttaggctcataa

SEQ ID NO: 189202 - DNA, 55 bp, Artificial
  Synthetic oligonucleotide
gcgagcagagtgaaatattctgttttccagcggcactacggggttaagacctccg

SEQ ID NO: 189203 - DNA, 51 bp, Artificial
  Synthetic oligonucleotide
aaggccgcagttgactcaggcgtctgcgtagttgcaaaggctgacggagag

SEQ ID NO: 189204 - DNA, 51 bp, Artificial
  Synthetic oligonucleotide
tgcagagccacgggcaggcgcatagaccgcacccgtacgagcgtaatagcg

SEQ ID NO: 189205 - DNA, 51 bp, Artificial
  Synthetic oligonucleotide
gcagcgtgcctaacacgctcagcgggctcatacgtacctgctttgtgccac

SEQ ID NO: 189206 - DNA, 51 bp, Artificial
  Synthetic oligonucleotide
cgttgtggcgaatctcacaggaagccctgccgcccttatatccggctcaag

SEQ ID NO: 189207 - DNA, 51 bp, Artificial
  Synthetic oligonucleotide
tcttctacgctctggtgaccgccaagtgccgtctgtacgatggactggcct

SEQ ID NO: 189208 - DNA, 51 bp, Artificial
  Synthetic oligonucleotide
aagtcagcgtccatacagtgcgacgtggacggtaactggagcgggagcctt

SEQ ID NO: 189209 - DNA, 51 bp, Artificial
  Synthetic oligonucleotide
ttgcagtacttacatgcgcactcttagcaatctcattaggcattaacccat

SEQ ID NO: 189210 - DNA, 51 bp, Artificial
  Synthetic oligonucleotide
gccgggtcagacacatttgcaagaccctgcagtgcagacatgaagccgccc

SEQ ID NO: 189211 - DNA, 50 bp, Artificial
  Synthetic oligonucleotide
agaggacaagatacgatatagagctcataaacgaaatgggtacctgcaag

SEQ ID NO: 189212 - DNA, 50 bp, Artificial
  Synthetic oligonucleotide
ttctgtagtaccctttgtaatggtagctgaggtagctcctgcctctgagt

SEQ ID NO: 189213 - DNA, 55 bp, Artificial
  Synthetic oligonucleotide
cctgacgaaagcgtgacaaagggctatgtgtcccctgaatccctcggtgagtatc

SEQ ID NO: 189214 - DNA, 50 bp, Artificial
  Synthetic oligonucleotide
aaagagggaaccaccagcggggtacagcccaggagcgatgtggccttcat

SEQ ID NO: 189215 - DNA, 50 bp, Artificial
  Synthetic oligonucleotide
agcaccggcgcccgtattgcaggcgcaccaaatactgcgtgtagtaaagc

SEQ ID NO: 189216 - DNA, 50 bp, Artificial
  Synthetic oligonucleotide
aagcgcaggtaaatgagataggcgcccagagcgactcgggccatacccat

SEQ ID NO: 189217 - DNA, 50 bp, Artificial
  Synthetic oligonucleotide
agcacctgttgtgtttgaaggaaccgccgccgtaccggaatgggcgacca

SEQ ID NO: 189218 - DNA, 50 bp, Artificial
  Synthetic oligonucleotide
agcactgcacgcttccgactgacaaacgtttcccatgcggcatcgtcaga

SEQ ID NO: 189219 - DNA, 50 bp, Artificial
  Synthetic oligonucleotide
aacgccagcgggagatgctggtagccggcggactgatcaatcgcatgaaa

SEQ ID NO: 189220 - DNA, 50 bp, Artificial
  Synthetic oligonucleotide
agccagacttaacgcagacggactgtttagcgccggccaagaggggcggc

SEQ ID NO: 189221 - DNA, 50 bp, Artificial
  Synthetic oligonucleotide
agcccccgtacaggtcgtcagccatttgtgccacagcatcgtgcagtggc

SEQ ID NO: 189222 - DNA, 50 bp, Artificial
  Synthetic oligonucleotide
agccgcacacccgtcaccgataagcaacgcaatggccagagagatggtta

SEQ ID NO: 189223 - DNA, 50 bp, Artificial
  Synthetic oligonucleotide
aaatgacagcgcataccggctttgatggtcccctcgacaatgcgcaccga

SEQ ID NO: 189224 - DNA, 55 bp, Artificial
  Synthetic oligonucleotide
cctgcgatttccgacagcttaagtgtagcgtcaacgcttatctcacggcttttgt

SEQ ID NO: 189225 - DNA, 50 bp, Artificial
  Synthetic oligonucleotide
agagcgaccgttgcctccgcaaaaccgagattgggaccgcagtggcctcc

SEQ ID NO: 189226 - DNA, 50 bp, Artificial
  Synthetic oligonucleotide
agcgaccgaagcacctgttgtgtttgaaggaaccgccgccgtaccggaat

SEQ ID NO: 189227 - DNA, 50 bp, Artificial
  Synthetic oligonucleotide
agcgtagcgtagcgaacgcaagagtatgtgtgcacgccgtcccctgcgct

SEQ ID NO: 189228 - DNA, 50 bp, Artificial
  Synthetic oligonucleotide
aggaatggcgaatatctcccggacgctctggtccgtaaaccgggggcagc

SEQ ID NO: 189229 - DNA, 50 bp, Artificial
  Synthetic oligonucleotide
aggacgaagcgcgagcatagttgcgggtgcgtgagcaatgtctgagaccg

SEQ ID NO: 189230 - DNA, 50 bp, Artificial
  Synthetic oligonucleotide
aggccccgccaaaagccattgtaaacgccccggagctgcaggtctatgtg

SEQ ID NO: 189231 - DNA, 50 bp, Artificial
  Synthetic oligonucleotide
aaaccgatgtgccttggacggcagagaatgttcaaaggacggacacggga

SEQ ID NO: 189232 - DNA, 50 bp, Artificial
  Synthetic oligonucleotide
aggccctcaaaggggccgatatgtgtagtggcaacacacaggcgcgccgg

SEQ ID NO: 189233 - DNA, 50 bp, Artificial
  Synthetic oligonucleotide
aacgtcgcgtcgagaccagagcatacacgctcacacgtcgctctcgtcct

SEQ ID NO: 189234 - DNA, 50 bp, Artificial
  Synthetic oligonucleotide
agggcggaatttgtagtggctcacagccgcaaggtcggaacagtcagcgg

SEQ ID NO: 189235 - DNA, 55 bp, Artificial
  Synthetic oligonucleotide
gcctgactacagttttatagacaaggccaaagaatatggttgtgagggattttgg

SEQ ID NO: 189236 - DNA, 50 bp, Artificial
  Synthetic oligonucleotide
agggcggagcattgatgatgcgtggttgggcgtttacagccggcagactc

SEQ ID NO: 189237 - DNA, 50 bp, Artificial
  Synthetic oligonucleotide
gtgcatgctacaaaccccgctatgtccgtcgtgctgccacctccaacagc

SEQ ID NO: 189238 - DNA, 50 bp, Artificial
  Synthetic oligonucleotide
aacgcttcaccggcattaagcctacgcatgttctccgccacgcctcccga

SEQ ID NO: 189239 - DNA, 50 bp, Artificial
  Synthetic oligonucleotide
aaaacttgcggccacccgctatggtatggccacggcgcccatgtatctcg

SEQ ID NO: 189240 - DNA, 50 bp, Artificial
  Synthetic oligonucleotide
gtgaccgcaccgggtcttagcaatgtaggtatatcggatgtaaggtcaat

SEQ ID NO: 189241 - DNA, 50 bp, Artificial
  Synthetic oligonucleotide
aacgcggacggtttcccttcgatgcgaaagggggcacagacggatggacc

SEQ ID NO: 189242 - DNA, 50 bp, Artificial
  Synthetic oligonucleotide
aataggcggcggagcgctgaggacgagagcgacgtgttcgcgtgtatact

SEQ ID NO: 189243 - DNA, 50 bp, Artificial
  Synthetic oligonucleotide
tcgtgcagctcgaccatatctccgtcctccggcacctctgcatgaaacga

SEQ ID NO: 189244 - DNA, 50 bp, Artificial
  Synthetic oligonucleotide
aaggttcgcgttcccctcgttcgtagcggccataagccatcgcagagagg

SEQ ID NO: 189245 - DNA, 50 bp, Artificial
  Synthetic oligonucleotide
aatgtctgttgagcacaagggcatcacaagccctgtggccggcaaagccg

SEQ ID NO: 189246 - DNA, 55 bp, Artificial
  Synthetic oligonucleotide
cgcccgtcccagtttatggtaggaatccggcacaccgccgacttctgcgttgagg

SEQ ID NO: 189247 - DNA, 50 bp, Artificial
  Synthetic oligonucleotide
tcggtccacctaaaactgataatcccataccacaagggaaagctataagc

SEQ ID NO: 189248 - DNA, 50 bp, Artificial
  Synthetic oligonucleotide
aattgcttcgcaatcccacacaccttaacgctccgcgggatgcacagccc

SEQ ID NO: 189249 - DNA, 50 bp, Artificial
  Synthetic oligonucleotide
acacccgcggctatgctcgcgcttcgtccttcgcttccaagtgtgcgctc

SEQ ID NO: 189250 - DNA, 50 bp, Artificial
  Synthetic oligonucleotide
acactatacggcgcttcccgctcttccctacacccccggaaatgacggct

SEQ ID NO: 189251 - DNA, 50 bp, Artificial
  Synthetic oligonucleotide
aaccggcgggggctgagcaagcgtttttcggaacacggactggagttcca

SEQ ID NO: 189252 - DNA, 50 bp, Artificial
  Synthetic oligonucleotide
acagccgcaagggcggaatttgtagtggctcacagccgcaaggtcggaac

SEQ ID NO: 189253 - DNA, 50 bp, Artificial
  Synthetic oligonucleotide
ttggcccgctcggcagaggtgctcccgacgagctaacgctacgcagctaa

SEQ ID NO: 189254 - DNA, 50 bp, Artificial
  Synthetic oligonucleotide
acagggcgcagaccgtttgcgacggacttattgcgggaactctgctcgct

SEQ ID NO: 189255 - DNA, 50 bp, Artificial
  Synthetic oligonucleotide
tgccacacctccatgccaaagctgcccgcacacggcccgtaaatacctgc

SEQ ID NO: 189256 - DNA, 50 bp, Artificial
  Synthetic oligonucleotide
aagggcctggtgcccatgtggggtgagctggttcatgaaaaggaccgtcc

SEQ ID NO: 189257 - DNA, 55 bp, Artificial
  Synthetic oligonucleotide
cgccatcacctcaatagtcaaccgttgcatgagaactgactctgatggtcaggtt

SEQ ID NO: 189258 - DNA, 50 bp, Artificial
  Synthetic oligonucleotide
tccaatctgacagacttcagcaacccaattggacttcctccgtgcctcac

SEQ ID NO: 189259 - DNA, 50 bp, Artificial
  Synthetic oligonucleotide
acgaggttggcggcgctcccttcttggggatccgcggtggtttgattaaa

SEQ ID NO: 189260 - DNA, 50 bp, Artificial
  Synthetic oligonucleotide
tcaccccgcaatagaaactgcagccctctcacgcccggagctaaaggcat

SEQ ID NO: 189261 - DNA, 50 bp, Artificial
  Synthetic oligonucleotide
acgggcaaggatgttaaggcgaccattactgacaaactgcccgctcacac

SEQ ID NO: 189262 - DNA, 50 bp, Artificial
  Synthetic oligonucleotide
tattacccgtagctcttattgcagaacctatttccgttccgaagaaccaa

SEQ ID NO: 189263 - DNA, 50 bp, Artificial
  Synthetic oligonucleotide
acgtgtgctcaaacagtgctccacgcacctgcgctatgctcgcgcttccg

SEQ ID NO: 189264 - DNA, 50 bp, Artificial
  Synthetic oligonucleotide
aagcggccgacgctttgagctggggtctggttaatgctgtctacccggca

SEQ ID NO: 189265 - DNA, 50 bp, Artificial
  Synthetic oligonucleotide
tatggaggcagccgccgtttatcaggcagcagcgtttttcgtgggaccgc

SEQ ID NO: 189266 - DNA, 50 bp, Artificial
  Synthetic oligonucleotide
tatgctgcggttctccggttccgatacaatggccacgcacaagcagacga

SEQ ID NO: 189267 - DNA, 50 bp, Artificial
  Synthetic oligonucleotide
actgcatcccaatcgcgtcgagggcagagtatgcacgcgaacacgtcgct

SEQ ID NO: 189268 - DNA, 55 bp, Artificial
  Synthetic oligonucleotide
cgccatattcggatataaacgtaaaagaaacatcccttcgggaagccatgaactc

SEQ ID NO: 189269 - DNA, 50 bp, Artificial
  Synthetic oligonucleotide
aacaaggcggaggtctttgcaacgtgcgacaggacagagcggctgtttga

SEQ ID NO: 189270 - DNA, 50 bp, Artificial
  Synthetic oligonucleotide
agaacgctatcctgattcggaaccacgcccccatgtgctttggccgcgac

SEQ ID NO: 189271 - DNA, 50 bp, Artificial
  Synthetic oligonucleotide
tagtcgctctttcgggagcacctctgccgagcgggccaatccctatgtgc

SEQ ID NO: 189272 - DNA, 50 bp, Artificial
  Synthetic oligonucleotide
agacaaaagctgggcatgggccaatcgccgaagggctaccgcagggtgat

SEQ ID NO: 189273 - DNA, 50 bp, Artificial
  Synthetic oligonucleotide
agaccgggtggatctacgcatataaggccgggtggcaggtgagcaccggc

SEQ ID NO: 189274 - DNA, 50 bp, Artificial
  Synthetic oligonucleotide
tagcgaacgcaagagtatgtgtgcacgccgtcccctgcgcttacgtcccg

SEQ ID NO: 189275 - DNA, 50 bp, Artificial
  Synthetic oligonucleotide
tagataggggctgtccggtagtgtatacaggctcccccgggcctatgccg

SEQ ID NO: 189276 - DNA, 50 bp, Artificial
  Synthetic oligonucleotide
agacgttggcgatgtttcgggccaaggcggcctcagtgtaagcctcgagg

SEQ ID NO: 189277 - DNA, 50 bp, Artificial
  Synthetic oligonucleotide
cggcccgttcgttgcatagcaattagggatcccgtgacggcgcaccgaaa

SEQ ID NO: 189278 - DNA, 50 bp, Artificial
  Synthetic oligonucleotide
cggccaagtaatgtctccgcaaacgggccctcgccgcttcgtctaatccc

SEQ ID NO: 189279 - DNA, 55 bp, Artificial
  Synthetic oligonucleotide
cctgctacaagcctctgtataatctctaactctcccatctcatgtaaataaatag

SEQ ID NO: 189280 - DNA, 50 bp, Artificial
  Synthetic oligonucleotide
gccgcgatctaaccgcctggcttttctgccctgagaagcattcacccccg

SEQ ID NO: 189281 - DNA, 50 bp, Artificial
  Synthetic oligonucleotide
gccgcggtattaccgggatatgccccacgccttgaatgtggcgatgttcc

SEQ ID NO: 189282 - DNA, 50 bp, Artificial
  Synthetic oligonucleotide
cgctgactgtctgtggcacctgcatgagtgtgagcacgcgtgaaaacgcg

SEQ ID NO: 189283 - DNA, 50 bp, Artificial
  Synthetic oligonucleotide
cgccttattcggagcaactgccctaagcccttccgctgtgggcaactcca

SEQ ID NO: 189284 - DNA, 50 bp, Artificial
  Synthetic oligonucleotide
cgccgtaaaatgggacgggacgctgtggatgctattctcggcggcagtcc

SEQ ID NO: 189285 - DNA, 50 bp, Artificial
  Synthetic oligonucleotide
cgcaccacagtccatcgcaaaggaaatggtccccgtcggggcaatcacag

SEQ ID NO: 189286 - DNA, 50 bp, Artificial
  Synthetic oligonucleotide
cgcaaggctcgtgcactccgctaaagctccgctggacttgacagcccagt

SEQ ID NO: 189287 - DNA, 50 bp, Artificial
  Synthetic oligonucleotide
cgaatacgcctaggtcggttttcgtaagggacctgccctcgccgcctgtc

SEQ ID NO: 189288 - DNA, 50 bp, Artificial
  Synthetic oligonucleotide
ccttgcacgtcccgttgcgaaccaagcggtcagagccgcaacttgaacag

SEQ ID NO: 189289 - DNA, 50 bp, Artificial
  Synthetic oligonucleotide
cctcgcttacgcaaggctcgtgcactccgctaaagctccgctggacttga

SEQ ID NO: 189290 - DNA, 55 bp, Artificial
  Synthetic oligonucleotide
cgccaggtaacagtatctgtggcaccataacctatatagaatcgtttccatgcac

SEQ ID NO: 189291 - DNA, 50 bp, Artificial
  Synthetic oligonucleotide
cctccgcaaaaccgagattgggaccgcagtggcctccgtgacggctgagc

SEQ ID NO: 189292 - DNA, 50 bp, Artificial
  Synthetic oligonucleotide
ccgtccgtgtgaacgtcacggcacgaagtacatagtaacggcaccgggct

SEQ ID NO: 189293 - DNA, 50 bp, Artificial
  Synthetic oligonucleotide
ccggggactgtcggggagatacgcgctttagcaggagcacatagcgaaga

SEQ ID NO: 189294 - DNA, 50 bp, Artificial
  Synthetic oligonucleotide
gctgcaccaactccggccgcacaatacgcttcggaacagccgacatcggt

SEQ ID NO: 189295 - DNA, 50 bp, Artificial
  Synthetic oligonucleotide
cccggcagtcccagtcctcccattccgcggctgtatgcactaagctccac

SEQ ID NO: 189296 - DNA, 50 bp, Artificial
  Synthetic oligonucleotide
cccgcctgagagcttgcaggtgcctgagaaacagtctgtgctggtgacgg

SEQ ID NO: 189297 - DNA, 50 bp, Artificial
  Synthetic oligonucleotide
cccgcccgtgtccgccgatatttttccgccgtacctgctgagaattgcgg

SEQ ID NO: 189298 - DNA, 50 bp, Artificial
  Synthetic oligonucleotide
cccagcagtgttccagcctcccgcgcgacacaatcgaggtgatccgttaa

SEQ ID NO: 189299 - DNA, 50 bp, Artificial
  Synthetic oligonucleotide
gagcttacgctagataccgttaccgccgatccacagtcctccactaaggc

SEQ ID NO: 189300 - DNA, 50 bp, Artificial
  Synthetic oligonucleotide
gaggggctgtcaagtccagcggagctttagcggagtgcacgagccttgcg

SEQ ID NO: 189301 - DNA, 55 bp, Artificial
  Synthetic oligonucleotide
cgagttaacaaactgacgaaccatcattctgagataccaaactggcaaactgacg

SEQ ID NO: 189302 - DNA, 50 bp, Artificial
  Synthetic oligonucleotide
gagggtcgtgcttctatccgcaccgaatccgcaagccttgagggtacggg

SEQ ID NO: 189303 - DNA, 50 bp, Artificial
  Synthetic oligonucleotide
cttgccgattaaaacgcccatctcaggaccgttaagctcaacatcaacat

SEQ ID NO: 189304 - DNA, 50 bp, Artificial
  Synthetic oligonucleotide
cttcgccctgacaggctgcaccaactccggccgcacaatacgcttcggaa

SEQ ID NO: 189305 - DNA, 50 bp, Artificial
  Synthetic oligonucleotide
cttcgatctttccccattgcacacctctcgtccgcggctcgctaccgccg

SEQ ID NO: 189306 - DNA, 50 bp, Artificial
  Synthetic oligonucleotide
gatcccgcaaccgaggggtacctgataggcactgacggtcattcgggtga

SEQ ID NO: 189307 - DNA, 50 bp, Artificial
  Synthetic oligonucleotide
ctgcgctacgcccttcttgcttgccgcagttatggggatatcgcccgttg

SEQ ID NO: 189308 - DNA, 50 bp, Artificial
  Synthetic oligonucleotide
ctgacggcggtgctacatggaatcccgttgcagacgcacccaagggactt

SEQ ID NO: 189309 - DNA, 50 bp, Artificial
  Synthetic oligonucleotide
gattgccgcgggaagctggcttgggaaaggactgacacagggcaggccaa

SEQ ID NO: 189310 - DNA, 50 bp, Artificial
  Synthetic oligonucleotide
gcaacgcctttttctgcgcgacggcaatcatccgcggcgtgagatcgatc

SEQ ID NO: 189311 - DNA, 50 bp, Artificial
  Synthetic oligonucleotide
ctcctacctgcttaaattgcactctctgatagctattgaggttactaagg

SEQ ID NO: 189312 - DNA, 55 bp, Artificial
  Synthetic oligonucleotide
aaggcatacaccgggggcaataaaggcacctgctccgatgtttaccggagaggta

SEQ ID NO: 189313 - DNA, 55 bp, Artificial
  Synthetic oligonucleotide
cgagggcggtcacttgtacggagatgtcctgatgatggatttagacacgctgcgg

SEQ ID NO: 189314 - DNA, 50 bp, Artificial
  Synthetic oligonucleotide
ctacgctggacttgacagcccagtgaagcagagcgaaacgtccgagtgct

SEQ ID NO: 189315 - DNA, 50 bp, Artificial
  Synthetic oligonucleotide
gcagaatatatcccgggtccggtactcgctgtccctttgagccgcgtcgg

SEQ ID NO: 189316 - DNA, 50 bp, Artificial
  Synthetic oligonucleotide
gcagacactcctttgcaaaagtcgcatgggcagccgaagtggcaccgctc

SEQ ID NO: 189317 - DNA, 50 bp, Artificial
  Synthetic oligonucleotide
ctacctgccgtgcggtttcgggcagacgcattgatgtcaggggagcggtc

SEQ ID NO: 189318 - DNA, 50 bp, Artificial
  Synthetic oligonucleotide
cgtgggttcccgggccaaacgcttgtgccacgcgattgcatgccaagatg

SEQ ID NO: 189319 - DNA, 50 bp, Artificial
  Synthetic oligonucleotide
cgtcggtggggtgccagggggcatcatcgcgactattggcgaggtcgcac

SEQ ID NO: 189320 - DNA, 50 bp, Artificial
  Synthetic oligonucleotide
cgtacccttattgatgcatcacatgccacagcgttcgtacggcctcttca

SEQ ID NO: 189321 - DNA, 50 bp, Artificial
  Synthetic oligonucleotide
cggtgcgaaccggacgggccatgcgtccctgaatacgaaatcaacgtgcg

SEQ ID NO: 189322 - DNA, 50 bp, Artificial
  Synthetic oligonucleotide
cggctccggacggttctacctttgatttgacaacgggggccgacggaacg

SEQ ID NO: 189323 - DNA, 50 bp, Artificial
  Synthetic oligonucleotide
attcggaaccacgcccccatgtgctttggccgcgacatgactgaggccct

SEQ ID NO: 189324 - DNA, 55 bp, Artificial
  Synthetic oligonucleotide
ccttatgaatggcgcatcttaaatgtcaagctcacagtcacacctctggaaaacc

SEQ ID NO: 189325 - DNA, 50 bp, Artificial
  Synthetic oligonucleotide
attccgtctgcagaaatcgcccatccgagtgacttcgcactccgccagga

SEQ ID NO: 189326 - DNA, 50 bp, Artificial
  Synthetic oligonucleotide
attcatcgtgtgcccagcccgggtaccaccagtctctgatccggtcgaga

SEQ ID NO: 189327 - DNA, 50 bp, Artificial
  Synthetic oligonucleotide
atgggcccccaagccggagcgagagcattccgtgaaacaattgatgcgtg

SEQ ID NO: 189328 - DNA, 50 bp, Artificial
  Synthetic oligonucleotide
atgcggcacgtttgcttgcggcaggggatattacctcgctttgcaggcgg

SEQ ID NO: 189329 - DNA, 50 bp, Artificial
  Synthetic oligonucleotide
atgcagccccatgaagggtgtgaagcgaagtctaaggcggggcatgcctt

SEQ ID NO: 189330 - DNA, 50 bp, Artificial
  Synthetic oligonucleotide
atcttgcgggggctcacggtgtgattatcaccaggcaccgggcagtaggc

SEQ ID NO: 189331 - DNA, 50 bp, Artificial
  Synthetic oligonucleotide
atctgtcgacgccgtgaatgaatggggcctgtcgctgactttggtcggga

SEQ ID NO: 189332 - DNA, 50 bp, Artificial
  Synthetic oligonucleotide
atctccataaagccgcgcccccgggcatccaatccgcaatagcgctcgat

SEQ ID NO: 189333 - DNA, 50 bp, Artificial
  Synthetic oligonucleotide
atctcaagctctcccgggctgcacacctccacatggtctaagccctccgg

SEQ ID NO: 189334 - DNA, 50 bp, Artificial
  Synthetic oligonucleotide
atcgaatccccgggcgatctgcagtgtggcgaatccgagtgaagtcgcga

SEQ ID NO: 189335 - DNA, 55 bp, Artificial
  Synthetic oligonucleotide
ccttccgtcttcaggactgtagtaccttgcattatagtagtaatctcccgtctct

SEQ ID NO: 189336 - DNA, 50 bp, Artificial
  Synthetic oligonucleotide
atcctccggacgctccatttcgggaacggctactgtaggcaactgtgcgg

SEQ ID NO: 189337 - DNA, 50 bp, Artificial
  Synthetic oligonucleotide
gtagttgtaggtagcgccggggatatggaccgcatgcgaggcagcgtgat

SEQ ID NO: 189338 - DNA, 50 bp, Artificial
  Synthetic oligonucleotide
atccggctctccttcaagtgtcagtcttatcatatggcctggatgataac

SEQ ID NO: 189339 - DNA, 50 bp, Artificial
  Synthetic oligonucleotide
atccagacaaaccttgcacgtcccgttgcgaaccaagcggtcagagccgc

SEQ ID NO: 189340 - DNA, 50 bp, Artificial
  Synthetic oligonucleotide
atcagcatggcggtaagacacatccccagcgggaaggttccgtccactga

SEQ ID NO: 189341 - DNA, 50 bp, Artificial
  Synthetic oligonucleotide
atatctgaggcttgcagtcaatggaagagctggtacgaaacttatggtaa

SEQ ID NO: 189342 - DNA, 50 bp, Artificial
  Synthetic oligonucleotide
atagccttcgctggcgagaatagaaagggcgcgtctcacggtgttgcggg

SEQ ID NO: 189343 - DNA, 50 bp, Artificial
  Synthetic oligonucleotide
atacacgcgaacacgtcgctctcgtcctcagcgctccgccgcctattgcg

SEQ ID NO: 189344 - DNA, 50 bp, Artificial
  Synthetic oligonucleotide
aggtgccagtaggacggctcgctccacttgtcaagaccgtagcaggcgct

SEQ ID NO: 189345 - DNA, 50 bp, Artificial
  Synthetic oligonucleotide
ccatacggtgtgagcggcgtgtgatggttgacgggcgcgaggtaaaaggg

SEQ ID NO: 189346 - DNA, 55 bp, Artificial
  Synthetic oligonucleotide
cgcaggcaagcccgtctagtccgtccgtaaggttagccgcatttaccaccgctac

SEQ ID NO: 189347 - DNA, 50 bp, Artificial
  Synthetic oligonucleotide
ccagatcacggccagtgatgaggtagcggtccccggtccataagcccggg

SEQ ID NO: 189348 - DNA, 50 bp, Artificial
  Synthetic oligonucleotide
ccactgtgtcgcgctgaccgaaagtaccctccaggccaacgcacgctatt

SEQ ID NO: 189349 - DNA, 50 bp, Artificial
  Synthetic oligonucleotide
cattgccccggcagttatggtcgggtttatcgcccacgcaggtgtaaccg

SEQ ID NO: 189350 - DNA, 50 bp, Artificial
  Synthetic oligonucleotide
cattgaaatttccgaacgccagcgggagatgctggtagccggcggactga

SEQ ID NO: 189351 - DNA, 50 bp, Artificial
  Synthetic oligonucleotide
catgcctgatctcccggggctccacattggggcgcagagggatcatcgtg

SEQ ID NO: 189352 - DNA, 50 bp, Artificial
  Synthetic oligonucleotide
cagtcccaggggcggttatgtgccgattgaccctcggagcctgaagaacg

SEQ ID NO: 189353 - DNA, 50 bp, Artificial
  Synthetic oligonucleotide
caggggacggcgtgcacacatactcttgcgagagcgcatagcgaagctgc

SEQ ID NO: 189354 - DNA, 50 bp, Artificial
  Synthetic oligonucleotide
cagctctgcgaacgggttcagggcttgttacgcttgcctcggtgagcgag

SEQ ID NO: 189355 - DNA, 50 bp, Artificial
  Synthetic oligonucleotide
cagcggccagagtatacacgctcacacgtcgctctcgtcctcagcgctcc

SEQ ID NO: 189356 - DNA, 50 bp, Artificial
  Synthetic oligonucleotide
cagcctccgccgttccggaagcctgagagatccacagctccgtttgtctc

SEQ ID NO: 189357 - DNA, 55 bp, Artificial
  Synthetic oligonucleotide
gcggcggattttcccatggggagcgcaggggaatacttgctggagtatctctatc

SEQ ID NO: 189358 - DNA, 50 bp, Artificial
  Synthetic oligonucleotide
cagccccgtgactccccacatatatcccgccgcgtatttgccccaggtct

SEQ ID NO: 189359 - DNA, 50 bp, Artificial
  Synthetic oligonucleotide
cagccaaagcgtcactccacttcggcgaagagccgtgcatttccggaacg

SEQ ID NO: 189360 - DNA, 50 bp, Artificial
  Synthetic oligonucleotide
cagcatcctcagtaagtgtaaagtgatgaggagtggcttctgcatgtata

SEQ ID NO: 189361 - DNA, 50 bp, Artificial
  Synthetic oligonucleotide
cagcagtacctcaggcacatagagctctccgcttgccatcagcggcccta

SEQ ID NO: 189362 - DNA, 50 bp, Artificial
  Synthetic oligonucleotide
cagagtgggataccggccgaaatactgtcatggcaggccgcatggggtgc

SEQ ID NO: 189363 - DNA, 50 bp, Artificial
  Synthetic oligonucleotide
ggctaacaggtcaggacttgtagctggcataagagcacttccaggcagtg

SEQ ID NO: 189364 - DNA, 50 bp, Artificial
  Synthetic oligonucleotide
cactttgaccgctaacgggcgaacctgggtcattccgcggttatccgggc

SEQ ID NO: 189365 - DNA, 50 bp, Artificial
  Synthetic oligonucleotide
caatacgccgaacctctcccgctctgcttacgtggcgagggtggacgcaa

SEQ ID NO: 189366 - DNA, 50 bp, Artificial
  Synthetic oligonucleotide
gggaaggttcccgttgatcaggcggaagaaaaggatgaatcggaactgtc

SEQ ID NO: 189367 - DNA, 50 bp, Artificial
  Synthetic oligonucleotide
caagtcccagcctgcacctgaactcgtgacttccgaaaggtgcccgcgta

SEQ ID NO: 189368 - DNA, 53 bp, Artificial
  Synthetic oligonucleotide
cgaaatgagcgtatccttatttcgtgagccggtaagagggttattcgttaatt

SEQ ID NO: 189369 - DNA, 55 bp, Artificial
  Synthetic oligonucleotide
gcggattctctgtttgagaacaccaattttgacaagccggccatccctggaatcg

SEQ ID NO: 189370 - DNA, 55 bp, Artificial
  Synthetic oligonucleotide
gcggaagcgtttctggacatttccaccacaaaacctcgcaaagagatctgcgagg

SEQ ID NO: 189371 - DNA, 55 bp, Artificial
  Synthetic oligonucleotide
cgagcacaaccctgctgcctgattctatgatctttcttgcaaggctacgcctttc

SEQ ID NO: 189372 - DNA, 55 bp, Artificial
  Synthetic oligonucleotide
gctcggacgggaagcgtttaaaacaggctgcacagtactgagaaatgaggttgcc

SEQ ID NO: 189373 - DNA, 56 bp, Artificial
  Synthetic oligonucleotide
ggctgttggagccaccccaagcggtagtcccggatgacctgagttagccttttgta

SEQ ID NO: 189374 - DNA, 55 bp, Artificial
  Synthetic oligonucleotide
gctgtccggttccataggggattccgcaggaaccataaccgtttgcgtagggctg

SEQ ID NO: 189375 - DNA, 55 bp, Artificial
  Synthetic oligonucleotide
gcttatgaagcgggagttaaggttacatcagcataccctggtactccaagtactg

SEQ ID NO: 189376 - DNA, 55 bp, Artificial
  Synthetic oligonucleotide
ccccttattatcacgctgaaaagccttactattccaccaatctcgagtgcattga

SEQ ID NO: 189377 - DNA, 55 bp, Artificial
  Synthetic oligonucleotide
cccctatatgtgactttagtcgcggcgtgttgaatgctcgctttagcgctcgtat

SEQ ID NO: 189378 - DNA, 55 bp, Artificial
  Synthetic oligonucleotide
ccccgtaagataaacggcaagtacgttatgttcagccgtccttcagacagcggtc

SEQ ID NO: 189379 - DNA, 55 bp, Artificial
  Synthetic oligonucleotide
ccccaactttgactattctatggctgacggcgtaagaaagacatataagcaccgc

SEQ ID NO: 189380 - DNA, 55 bp, Artificial
  Synthetic oligonucleotide
ggaaaccatgtctgtccgtggaacggccttctacaaagctgtcgtccgtgatgga

SEQ ID NO: 189381 - DNA, 55 bp, Artificial
  Synthetic oligonucleotide
ggaaacctttgcgtatacggtctttaccgccctgtctgctttgccctgcgagccg

SEQ ID NO: 189382 - DNA, 55 bp, Artificial
  Synthetic oligonucleotide
ggaacctcctctatatgcactggcaccccagaataagcggaggctataaccctgc

SEQ ID NO: 189383 - DNA, 55 bp, Artificial
  Synthetic oligonucleotide
ggaaggattttcacggagaagagataagtgtgcaggactgttggaaatctcgcaa

SEQ ID NO: 189384 - DNA, 60 bp, Artificial
  Synthetic oligonucleotide
tacgaaccgcctaaaaggtgtacgctccagctctttacactgctcctctgagatatgtga

SEQ ID NO: 189385 - DNA, 55 bp, Artificial
  Synthetic oligonucleotide
ccaaagtcggattttccgctcaactcgaccattgcatcctacctgattgttacct

SEQ ID NO: 189386 - DNA, 55 bp, Artificial
  Synthetic oligonucleotide
ggacagacttaaatgtaatgctgttccgatacagctccctatcggtgccgaagat

SEQ ID NO: 189387 - DNA, 55 bp, Artificial
  Synthetic oligonucleotide
ggaccagtaaagttgtatttagcaccaccagcacagattcccttcgcatcggaga

SEQ ID NO: 189388 - DNA, 55 bp, Artificial
  Synthetic oligonucleotide
catctttcatcattacgcagttagctacttcgttaccaaaaccgtgtgcgccgtg

SEQ ID NO: 189389 - DNA, 55 bp, Artificial
  Synthetic oligonucleotide
catctgctgcattaacccaaccgtacacgcctttaccgtcctgtgaaatgcaatg

SEQ ID NO: 189390 - DNA, 55 bp, Artificial
  Synthetic oligonucleotide
catcgacaggcaacgtttcaagtcagatagacggacttttagttccgctttgtgt

SEQ ID NO: 189391 - DNA, 55 bp, Artificial
  Synthetic oligonucleotide
catagcaggcacagatcttgtccacgcggcagtcattgggattgaagagctttcg

SEQ ID NO: 189392 - DNA, 55 bp, Artificial
  Synthetic oligonucleotide
cataatgcacggactgctgataacgttcaattttgtcggaatagtgcttatgcgc

SEQ ID NO: 189393 - DNA, 55 bp, Artificial
  Synthetic oligonucleotide
ccgttgcatccacggtcgcccagtataaagccatgggaacgaatattcccggaag

SEQ ID NO: 189394 - DNA, 55 bp, Artificial
  Synthetic oligonucleotide
ccgtggcttcccaacagattccacgcaaaagcagtaaacgagggtcagagaaagt

SEQ ID NO: 189395 - DNA, 60 bp, Artificial
  Synthetic oligonucleotide
tactgcttatccgcgaactgcctgacactgtcagaatgaaggaaaccgaggcagaggcct

SEQ ID NO: 189396 - DNA, 55 bp, Artificial
  Synthetic oligonucleotide
gcggtcttgccatattaaacggaatttgcaaggcatacctgactatcatcagggg

SEQ ID NO: 189397 - DNA, 55 bp, Artificial
  Synthetic oligonucleotide
ccgtagtaagaaccgtcatgttgcttattccgaccgccgctgcgattataccgga

SEQ ID NO: 189398 - DNA, 55 bp, Artificial
  Synthetic oligonucleotide
ccgggtcgaatataatctgaagattaggtgaatcaatagcgtcaagcacctttct

SEQ ID NO: 189399 - DNA, 55 bp, Artificial
  Synthetic oligonucleotide
gcgtcttcttttactattgcgtttgagtccttttcagagggcacagactcgcctg

SEQ ID NO: 189400 - DNA, 55 bp, Artificial
  Synthetic oligonucleotide
ccgggacagtctgggaccggtctggatggctctgtcgtcaccaggcgtatcattg

SEQ ID NO: 189401 - DNA, 55 bp, Artificial
  Synthetic oligonucleotide
ccgggaaactgagactgtgacccgtgaggcgttctggaatcacgatgctccggga

SEQ ID NO: 189402 - DNA, 55 bp, Artificial
  Synthetic oligonucleotide
ccgctttgacgttcgtttggtttacagtatccgcagagtcgccgttattcatctg

SEQ ID NO: 189403 - DNA, 54 bp, Artificial
  Synthetic oligonucleotide
gctacgcccgagtttaccgttcttgtccaaggtccgccctctgtgttccagaac

SEQ ID NO: 189404 - DNA, 55 bp, Artificial
  Synthetic oligonucleotide
ccgcattctgcatgtctctcggttttacaccggcacccggatacttctctgtcgg

SEQ ID NO: 189405 - DNA, 55 bp, Artificial
  Synthetic oligonucleotide
ccgcatctgatccatcgaatcaataatttccggcgcagaccgtgttccaatcagc

SEQ ID NO: 189406 - DNA, 60 bp, Artificial
  Synthetic oligonucleotide
tccgcatcttgtacgaagtcccttaaccatgccgcttcccagcttgtctgaccatgctgg

SEQ ID NO: 189407 - DNA, 55 bp, Artificial
  Synthetic oligonucleotide
ccgcagtacatcgtggacactttcaccctcgttgaactcaaccgtggtcggactc

SEQ ID NO: 189408 - DNA, 55 bp, Artificial
  Synthetic oligonucleotide
ccgcacgaaaacacgggacacacgacccataagtaccgagtgcgaacagaggatg

SEQ ID NO: 189409 - DNA, 55 bp, Artificial
  Synthetic oligonucleotide
ccgcaagtggcgtgatctggcactggtctgttattatcgcatgccacgggagacc

SEQ ID NO: 189410 - DNA, 55 bp, Artificial
  Synthetic oligonucleotide
ccgattgaaagggaaatcgtatctcccacagcgtagttgataccgccattggccg

SEQ ID NO: 189411 - DNA, 55 bp, Artificial
  Synthetic oligonucleotide
gctcagtgcatgcaaaatctatccgacctccttctctaaatacggtcgggcctac

SEQ ID NO: 189412 - DNA, 55 bp, Artificial
  Synthetic oligonucleotide
ccgaaggctctcgggccatgcgcttatctttcgacgattcggagaccacagagac

SEQ ID NO: 189413 - DNA, 55 bp, Artificial
  Synthetic oligonucleotide
gctcatctgcaagtacgggcaaaggaataccagacaactccggcaatggttcttc

SEQ ID NO: 189414 - DNA, 55 bp, Artificial
  Synthetic oligonucleotide
ccctttggcggctattttaactatggggattttcagatcattagtgcctcgccag

SEQ ID NO: 189415 - DNA, 55 bp, Artificial
  Synthetic oligonucleotide
ctgggagaaactgagcacgtagcttttggacgcggcgtaaaccgcaaaattcggc

SEQ ID NO: 189416 - DNA, 55 bp, Artificial
  Synthetic oligonucleotide
ctggaattataccatccgtcggcatatacagttgcggttgtcgagtggagtccca

SEQ ID NO: 189417 - DNA, 55 bp, Artificial
  Synthetic oligonucleotide
cgctaccgttcagttccacgtagaaagtagaagcgccattcgggtggtcatccgg

SEQ ID NO: 189418 - DNA, 55 bp, Artificial
  Synthetic oligonucleotide
catgcaggcacgcgcattgtatccacttagcgcctttgtgcaacatccacgggtg

SEQ ID NO: 189419 - DNA, 55 bp, Artificial
  Synthetic oligonucleotide
gcccagggtttggggcgataccgctgccccgtctgattgcgtcattgcttaagcc

SEQ ID NO: 189420 - DNA, 55 bp, Artificial
  Synthetic oligonucleotide
gcgttacatccaccgtacccgcaactggaatgccgtctggcaagtctgggtcggc

SEQ ID NO: 189421 - DNA, 55 bp, Artificial
  Synthetic oligonucleotide
ggagaggttgatatacctgtacatctcagcgagccagtatatcgtgtgcaggcca

SEQ ID NO: 189422 - DNA, 55 bp, Artificial
  Synthetic oligonucleotide
ggaggtcgtcttgcaagtagcgctgtaaaaggcacgatgactgtaggggacgcag

SEQ ID NO: 189423 - DNA, 55 bp, Artificial
  Synthetic oligonucleotide
ggctcagcgaaatgggctgcgatcgccctatgtgatccaccctggtcagaccttg

SEQ ID NO: 189424 - DNA, 55 bp, Artificial
  Synthetic oligonucleotide
gtttacggcctgatgcgtaatcaatggcaatcgggttaatgggttatcgttgcac

SEQ ID NO: 189425 - DNA, 55 bp, Artificial
  Synthetic oligonucleotide
tactgttctacgacgttaacgtgctggagatctgggctgacggatacatcccggg

SEQ ID NO: 189426 - DNA, 55 bp, Artificial
  Synthetic oligonucleotide
tagcacgcgcaccggttttgggcattctaacgacagatccttctgaagcaagatc

SEQ ID NO: 189427 - DNA, 55 bp, Artificial
  Synthetic oligonucleotide
tgacaaacgcacctcgtttgtgggcagtcacttcttctacgaagacgtctctggc

SEQ ID NO: 189428 - DNA, 55 bp, Artificial
  Synthetic oligonucleotide
cgactgggtttcagaaggatcgcttgctgtgatctacccgcgatcaacccggatc

SEQ ID NO: 189429 - DNA, 50 bp, Artificial
  Synthetic oligonucleotide
aaaggtcgtcagaggttaagcttccgacccaaaggtaaagtcgtggtaaa

SEQ ID NO: 189430 - DNA, 55 bp, Artificial
  Synthetic oligonucleotide
ttcaatttagctgggccgggattgcaaagtagggcgaattaacctgcatcgtatt

SEQ ID NO: 189431 - DNA, 55 bp, Artificial
  Synthetic oligonucleotide
tttccgtgaccagcgctcgttgttgccttggatggtgggattgggtggcccaatc

SEQ ID NO: 189432 - DNA, 55 bp, Artificial
  Synthetic oligonucleotide
atcgctgtaacccacgaatttatcaacgtaaaatctggccaacttagtctgattc

SEQ ID NO: 189433 - DNA, 54 bp, Artificial
  Synthetic oligonucleotide
cgcagcaccaagagtgccacaggaagcttagggagtgtagtctggcgtcaatga

SEQ ID NO: 189434 - DNA, 53 bp, Artificial
  Synthetic oligonucleotide
cgtagagacatcgattaactccaaccttgaccgtaatgcacgtcagtgtaggc

SEQ ID NO: 189435 - DNA, 53 bp, Artificial
  Synthetic oligonucleotide
tttgaagggtctgacgcactgtacatccccagggtgtatgagcagttcagcca

SEQ ID NO: 189436 - DNA, 48 bp, Artificial
  Synthetic oligonucleotide
cggcgaccccgtttaacacgggaccgcattttgctaccttttcggggt

SEQ ID NO: 189437 - DNA, 51 bp, Artificial
  Synthetic oligonucleotide
ctaagccaccacgttcctcacactttgtaatcctttcaccctttacaaatc

SEQ ID NO: 189438 - DNA, 51 bp, Artificial
  Synthetic oligonucleotide
cagtcgggtctctacggtcatattgaccagaaactcggtgccagcccgtga

SEQ ID NO: 189439 - DNA, 55 bp, Artificial
  Synthetic oligonucleotide
cgacactgtgatattcgtccatggagtggctcagtcccaactgctgtgggtccgg

SEQ ID NO: 189440 - DNA, 50 bp, Artificial
  Synthetic oligonucleotide
gaacgtcatcaccatatcgatgaggacacatacttatccggccgtccgtt

SEQ ID NO: 189441 - DNA, 50 bp, Artificial
  Synthetic oligonucleotide
agcgtcgttcagctcccctgccgagtcgtagtgtgaggcgtgggtcggcg

SEQ ID NO: 189442 - DNA, 50 bp, Artificial
  Synthetic oligonucleotide
agcgtcgcccgtccatatcaccctgcctcaccaggtacaattgcggctcg

SEQ ID NO: 189443 - DNA, 50 bp, Artificial
  Synthetic oligonucleotide
agcggttcaccggtaatgctcgggtttgggactgcattgcgctgagcgga

SEQ ID NO: 189444 - DNA, 50 bp, Artificial
  Synthetic oligonucleotide
aaaacccggcagcccatctatccagatcgaggactggcccgcctgacttc

SEQ ID NO: 189445 - DNA, 50 bp, Artificial
  Synthetic oligonucleotide
aaacgctctttcgaccctagaccctgtccggtcgtgacgcaacccggctc

SEQ ID NO: 189446 - DNA, 50 bp, Artificial
  Synthetic oligonucleotide
aaagacgcccctgtattgcagcgacaatcaggaggtgcggacccgacacc

SEQ ID NO: 189447 - DNA, 50 bp, Artificial
  Synthetic oligonucleotide
aacccggctcagcgccttagttcggcctgaatcaggaggttgcgtggtgt

SEQ ID NO: 189448 - DNA, 50 bp, Artificial
  Synthetic oligonucleotide
aacgggaagagggctgcacccgtactactgcgggtagcgggttactgtcg

SEQ ID NO: 189449 - DNA, 50 bp, Artificial
  Synthetic oligonucleotide
aagaacgactcctacggtgtcgcgtttgacctgtcctggccggtcaacga

SEQ ID NO: 189450 - DNA, 55 bp, Artificial
  Synthetic oligonucleotide
cgttcagcaacggttggctcttgtgggaagtggaacggtccaatgacgctgtctg

SEQ ID NO: 189451 - DNA, 50 bp, Artificial
  Synthetic oligonucleotide
aagcagggaacgccggtacctgatagtcccgggccaactggttattgccc

SEQ ID NO: 189452 - DNA, 50 bp, Artificial
  Synthetic oligonucleotide
aaggacgcctatttggtgagtttcgcccgccccatggcctatggcatgtg

SEQ ID NO: 189453 - DNA, 50 bp, Artificial
  Synthetic oligonucleotide
aatccccgttcggtggcctgaatcaccaggcgttttctggaccggcccaa

SEQ ID NO: 189454 - DNA, 50 bp, Artificial
  Synthetic oligonucleotide
aatcctcccctacgagcccccatgttctcgccgtagcgtgggcttacagc

SEQ ID NO: 189455 - DNA, 50 bp, Artificial
  Synthetic oligonucleotide
aatttgccccggtgcccaatggcattaaagcgtctggcctcaatggcacg

SEQ ID NO: 189456 - DNA, 50 bp, Artificial
  Synthetic oligonucleotide
acatgaaaggcatgcgcgttaccaccctgtacggtggtcagccctacggc

SEQ ID NO: 189457 - DNA, 50 bp, Artificial
  Synthetic oligonucleotide
accccggggaattgagaagccggtcacagctttaggtcagcgcagcccag

SEQ ID NO: 189458 - DNA, 50 bp, Artificial
  Synthetic oligonucleotide
acccgccgcttgcagggctcccggtgatccactactctcccgctgatcac

SEQ ID NO: 189459 - DNA, 50 bp, Artificial
  Synthetic oligonucleotide
acctgcatcgttttagcactctctggcggtaaggcgcccagtgatgggcg

SEQ ID NO: 189460 - DNA, 50 bp, Artificial
  Synthetic oligonucleotide
acgacatttgatgctctgggcccgggatttgcgctgccgtgggctgaaag

SEQ ID NO: 189461 - DNA, 55 bp, Artificial
  Synthetic oligonucleotide
ccagctgagacctcataactcgactccaaagcgtcggcagacatccagtgcgctg

SEQ ID NO: 189462 - DNA, 50 bp, Artificial
  Synthetic oligonucleotide
agcgctgcaggggaaagcgattcgcatccgtcattcgctgaatcaggggg

SEQ ID NO: 189463 - DNA, 50 bp, Artificial
  Synthetic oligonucleotide
agccgtatcacccccacaacatgacggagccgaaagagcttcgggggcga

SEQ ID NO: 189464 - DNA, 50 bp, Artificial
  Synthetic oligonucleotide
agccgctatcccccgattccaactgtccgttccgggagcactgcactgaa

SEQ ID NO: 189465 - DNA, 50 bp, Artificial
  Synthetic oligonucleotide
agccccgcggtcgcacaactgacctaccgtacccgcccctggtatccacg

SEQ ID NO: 189466 - DNA, 50 bp, Artificial
  Synthetic oligonucleotide
agccatgggggagtcctgttacgtggtaatgggtgggggcccgacactta

SEQ ID NO: 189467 - DNA, 50 bp, Artificial
  Synthetic oligonucleotide
agcaccgagggtctgcggttttcaacgattgccgggaaggttgatggggc

SEQ ID NO: 189468 - DNA, 50 bp, Artificial
  Synthetic oligonucleotide
agatcagggaattgtcaccgcagctatgcgtcccgcccgggtctggagat

SEQ ID NO: 189469 - DNA, 50 bp, Artificial
  Synthetic oligonucleotide
agagcacgacggtcagaaggcaaagcgcggcttgacggtattcctgctgg

SEQ ID NO: 189470 - DNA, 50 bp, Artificial
  Synthetic oligonucleotide
agaccctgtccggtcgtgacgcaacccggctcagcgccttagttcggcct

SEQ ID NO: 189471 - DNA, 50 bp, Artificial
  Synthetic oligonucleotide
agaatgggaagatcgggtcgttaaagaagcgcatgccccaacccggcgca

SEQ ID NO: 189472 - DNA, 55 bp, Artificial
  Synthetic oligonucleotide
ctacgaccaaagctggcgcctgcagactcgcgctaccctgccccacgatggtgtg

SEQ ID NO: 189473 - DNA, 50 bp, Artificial
  Synthetic oligonucleotide
actggcgggtctggtgagccgagatttttgttggccccgtcctaaccagc

SEQ ID NO: 189474 - DNA, 50 bp, Artificial
  Synthetic oligonucleotide
actggccaggtgttagcccaatgacccgaattgaatccccctgcgtggcg

SEQ ID NO: 189475 - DNA, 50 bp, Artificial
  Synthetic oligonucleotide
actgcgtccctcagcctcggtgaactggcactggtaacgtcatggcccgg

SEQ ID NO: 189476 - DNA, 50 bp, Artificial
  Synthetic oligonucleotide
actgaactggcacctgctgttgggggagcccgccgatacgctctcagatt

SEQ ID NO: 189477 - DNA, 50 bp, Artificial
  Synthetic oligonucleotide
actcgggcacccgtgcctcggcaacagaaccgtaaggcggcatcagggta

SEQ ID NO: 189478 - DNA, 50 bp, Artificial
  Synthetic oligonucleotide
actccgctccagactgtagagccaacggatctcttccgcccagcgagcgg

SEQ ID NO: 189479 - DNA, 50 bp, Artificial
  Synthetic oligonucleotide
acggcggcccgtcaaaatgtgatcccaactgattgtccgagtcgctggct

SEQ ID NO: 189480 - DNA, 55 bp, Artificial
  Synthetic oligonucleotide
ctcctcgtggttaagtaccagcataaggtagccaatctgattggtcggtacgtga

SEQ ID NO: 189481 - DNA, 55 bp, Artificial
  Synthetic oligonucleotide
ctgcaccgcctgattcgactcataatcggcactggaacacgcagtcccatccacg

SEQ ID NO: 189482 - DNA, 55 bp, Artificial
  Synthetic oligonucleotide
ctggtctgagccaatcattaccagaatcccgggtaacaataacaaaccggtggtg

SEQ ID NO: 189483 - DNA, 55 bp, Artificial
  Synthetic oligonucleotide
ctcgtgtgttctcgaccggctttagctacggctccatgttctctaacggactttc

SEQ ID NO: 189484 - DNA, 55 bp, Artificial
  Synthetic oligonucleotide
cctagtcgagcttcaacccgactccggcgttacacttttgatatgcaacagcggg

SEQ ID NO: 189485 - DNA, 55 bp, Artificial
  Synthetic oligonucleotide
ccgcgtgcatatcttgggtggcactgtcgcctatgcgggtggccttgttggatgg

SEQ ID NO: 189486 - DNA, 55 bp, Artificial
  Synthetic oligonucleotide
ccgacgtgaagagcctcgttgttcacccgtatacaacgacccactccgaactcac

SEQ ID NO: 189487 - DNA, 55 bp, Artificial
  Synthetic oligonucleotide
cacgcggctagtatcaatgcaatagttgtcgttcaaagtcgtgagtgtctgtgca

SEQ ID NO: 189488 - DNA, 55 bp, Artificial
  Synthetic oligonucleotide
attcgtcctaataaccaatgttgtcggagtttgccacttgtttagcggcattgtg

SEQ ID NO: 189489 - DNA, 55 bp, Artificial
  Synthetic oligonucleotide
agtccagtacggttatgctccgaccccgcattatgctggtaccgcatctctcgtc

SEQ ID NO: 189490 - DNA, 55 bp, Artificial
  Synthetic oligonucleotide
agtcagcaaatcgtaaggcaacgagagcgtaatgccatcgcaatcgcgagtggcg

SEQ ID NO: 189491 - DNA, 52 bp, Artificial
  Synthetic oligonucleotide
agggaggcttacgtctacgttatcgtaaaacgggtcgtcaataatggagtcc

SEQ ID NO: 189492 - DNA, 55 bp, Artificial
  Synthetic oligonucleotide
tcgcatgtgcatgttgtgaacgacatccggccatttattgccttcgctgaaccac

SEQ ID NO: 189493 - DNA, 55 bp, Artificial
  Synthetic oligonucleotide
tcacaaggcggtttccgagctttgtggaaccgatgcgttctagaggcatttcgcg

SEQ ID NO: 189494 - DNA, 55 bp, Artificial
  Synthetic oligonucleotide
cggtccgttcatcctgtacaccgaccaaatcagtcggccagaccacagaagacgt

SEQ ID NO: 189495 - DNA, 55 bp, Artificial
  Synthetic oligonucleotide
tagagttatcaaacgaaaccatgtaaggcgggcgtggaatcttgccctggttcgc

SEQ ID NO: 189496 - DNA, 55 bp, Artificial
  Synthetic oligonucleotide
tacgtgacgcttgtgacggaattcgtgacacacatgttcgaccgcgacgataatt

SEQ ID NO: 189497 - DNA, 55 bp, Artificial
  Synthetic oligonucleotide
aagagcctatcggacgcaaaatggcacatcgtctcgccaacgctctcggaactag

SEQ ID NO: 189498 - DNA, 55 bp, Artificial
  Synthetic oligonucleotide
gtggccaggtcaataagccgctcgaaatcacttacacgagcaatggcgaaaccta

SEQ ID NO: 189499 - DNA, 55 bp, Artificial
  Synthetic oligonucleotide
gtgcataggacacgactcgtgaggagatgtctgtgggtcgtcggtgtagaaaggg

SEQ ID NO: 189500 - DNA, 55 bp, Artificial
  Synthetic oligonucleotide
ggtccgcgttcgctttgacaagtggaatggtgaaacgttagtaagcatagcgaag

SEQ ID NO: 189501 - DNA, 55 bp, Artificial
  Synthetic oligonucleotide
gggagatccctgattgcagcgatcaacagctcaaatgcggggctagaaagcgtgg

SEQ ID NO: 189502 - DNA, 55 bp, Artificial
  Synthetic oligonucleotide
ggcgttccttgggacttgcggctacggcagcaataaagttacgagccaggtccgc

SEQ ID NO: 189503 - DNA, 55 bp, Artificial
  Synthetic oligonucleotide
ggcgtgggttccatgttcggcccttgaatttatcatccgtagcttcggtgcaaac

SEQ ID NO: 189504 - DNA, 55 bp, Artificial
  Synthetic oligonucleotide
gcgtccccgccacagattgtttcagaaccgattgcgcatacatcggacgcgccgc

SEQ ID NO: 189505 - DNA, 52 bp, Artificial
  Synthetic oligonucleotide
actacgagggtgaaagaggcgtgaaagcgacttacggttacgtaggttctcc

SEQ ID NO: 189506 - DNA, 55 bp, Artificial
  Synthetic oligonucleotide
gacacttggggtggctttcgggcctttatagcgatgcgtctttaacagtcctact

SEQ ID NO: 189507 - DNA, 55 bp, Artificial
  Synthetic oligonucleotide
gacaaggcataacggttgtgagcaaacgtacaacgagcaagcgtcacattggggc

SEQ ID NO: 189508 - DNA, 53 bp, Artificial
  Synthetic oligonucleotide
cccctggtttaaatccaatgggacacttacgaacgaacaccaggccactaagc

SEQ ID NO: 189509 - DNA, 54 bp, Artificial
  Synthetic oligonucleotide
gaggtaactgatgactcatataggcctcctaatcatttccgggtgggtaaagtc

SEQ ID NO: 189510 - DNA, 54 bp, Artificial
  Synthetic oligonucleotide
gacatcgcaatacccttgcgctggatcccataattcacccaacggtactccaga

SEQ ID NO: 189511 - DNA, 53 bp, Artificial
  Synthetic oligonucleotide
ccttttggtgctcacgcttgcgggtattgtacacatgacttacatgatggtga

SEQ ID NO: 189512 - DNA, 53 bp, Artificial
  Synthetic oligonucleotide
ccccatgaaagggaacgattacaccgacccaagctacaacacggtcgcgttct

SEQ ID NO: 189513 - DNA, 53 bp, Artificial
  Synthetic oligonucleotide
tacttcgaaatccaagaagtcgaatcccattcagaacacgtaaagcaactaag

SEQ ID NO: 189514 - DNA, 51 bp, Artificial
  Synthetic oligonucleotide
cctgataacggacggaatcccacttctctttgtcgaacggggtcaccttgc

SEQ ID NO: 189515 - DNA, 50 bp, Artificial
  Synthetic oligonucleotide
agtctcggtttccgcgtgcctacgctccgtgcgtctatcatcgccctttc

SEQ ID NO: 189516 - DNA, 55 bp, Artificial
  Synthetic oligonucleotide
cggatcggtaacgttcctctgttgcataggcggaataagtcggaagcaagaggcg

SEQ ID NO: 189517 - DNA, 50 bp, Artificial
  Synthetic oligonucleotide
acggactccccgacccgcgttggattccgctcggttgcgacatcgaaact

SEQ ID NO: 189518 - DNA, 50 bp, Artificial
  Synthetic oligonucleotide
acgcggccacccaccttgagggaattcgcaatgcgcgggagagtcttttc

SEQ ID NO: 189519 - DNA, 50 bp, Artificial
  Synthetic oligonucleotide
acgcgagccctcaggcaatttgcgccccgcaagcgtgcgatttaacgtca

SEQ ID NO: 189520 - DNA, 50 bp, Artificial
  Synthetic oligonucleotide
accggttcttgcgaccgcttgggataatggcgtacgtgggggagactgcg

SEQ ID NO: 189521 - DNA, 50 bp, Artificial
  Synthetic oligonucleotide
accgccctagagcaagacttcggcttcaagcccgcaacacctctccgcga

SEQ ID NO: 189522 - DNA, 50 bp, Artificial
  Synthetic oligonucleotide
acccgcaagctgggaaatcctcacgcacgaagaaggcgccccaagcaaga

SEQ ID NO: 189523 - DNA, 50 bp, Artificial
  Synthetic oligonucleotide
accccacccaagccgggtcttccgctaccccttctagcgggcttcagacg

SEQ ID NO: 189524 - DNA, 50 bp, Artificial
  Synthetic oligonucleotide
acaggctcccgctcttgtaaattcaggatcggtctgcacgcgagcggcct

SEQ ID NO: 189525 - DNA, 50 bp, Artificial
  Synthetic oligonucleotide
acacccacacgtcaagccgcatgggctcatcgcctggcataaacacgtcg

SEQ ID NO: 189526 - DNA, 50 bp, Artificial
  Synthetic oligonucleotide
acaagccggacattgcttatgcggcgtctgagccccgcagtgggggtgcg

SEQ ID NO: 189527 - DNA, 55 bp, Artificial
  Synthetic oligonucleotide
cgcggtcgagtacatgggcttagacttttcgctagaatcgaccacggataaaatc

SEQ ID NO: 189528 - DNA, 50 bp, Artificial
  Synthetic oligonucleotide
aatggacactcggccgttacgcaggctaccacaattacggcacctccccg

SEQ ID NO: 189529 - DNA, 50 bp, Artificial
  Synthetic oligonucleotide
aatctttgtcgggctgcatggccccacgactttcttgccatcgcagacgc

SEQ ID NO: 189530 - DNA, 50 bp, Artificial
  Synthetic oligonucleotide
aacgagaacgcctccgcacatgtaatgggctgccgggacgactggaatcc

SEQ ID NO: 189531 - DNA, 50 bp, Artificial
  Synthetic oligonucleotide
aaccttcaagcggagcacaccaccctcaacatgcaacggaagcgtcggga

SEQ ID NO: 189532 - DNA, 50 bp, Artificial
  Synthetic oligonucleotide
aaccgcccgtttgcggtgatgcgcggaaacccgatggggagcccgatgtg

SEQ ID NO: 189533 - DNA, 50 bp, Artificial
  Synthetic oligonucleotide
aacaggcccgcgtggactttttccgcgctgtaggcgccccctacgacgaa

SEQ ID NO: 189534 - DNA, 50 bp, Artificial
  Synthetic oligonucleotide
aggctggaacgccgcgctttctgttgccaagtttgttgttggcgtggtgg

SEQ ID NO: 189535 - DNA, 50 bp, Artificial
  Synthetic oligonucleotide
aggctcgtggccatcgagtaattcgtggtagacgggtagcccgaggcgta

SEQ ID NO: 189536 - DNA, 50 bp, Artificial
  Synthetic oligonucleotide
aggctcggctgcaaggccgtttgaatttgcaccggaaaagcgcatttgcg

SEQ ID NO: 189537 - DNA, 50 bp, Artificial
  Synthetic oligonucleotide
aggcgtcaccacgcgaaactgcctactggcaagcaacttgcgacccgcca

SEQ ID NO: 189538 - DNA, 55 bp, Artificial
  Synthetic oligonucleotide
cgcgaccgtcattaccagaatgcgatttacaagggtcacgaatttacagtcgtcg

SEQ ID NO: 189539 - DNA, 50 bp, Artificial
  Synthetic oligonucleotide
aggcgtcaattcccgcgatctcgccacattccacacggacccgctgattc

SEQ ID NO: 189540 - DNA, 50 bp, Artificial
  Synthetic oligonucleotide
aggcggagtcccgtcgaccattagcctcacaagcgatgtgaccgactcga

SEQ ID NO: 189541 - DNA, 50 bp, Artificial
  Synthetic oligonucleotide
aggcctgcgtacaaacgccgcaacccgtacagtcgtagctggacacggaa

SEQ ID NO: 189542 - DNA, 50 bp, Artificial
  Synthetic oligonucleotide
agcgtaggcttacggcgggcaagttgaacccagacaacacttccccgctg

SEQ ID NO: 189543 - DNA, 50 bp, Artificial
  Synthetic oligonucleotide
agccttggctgcgtgatggaccgtaagtgccacacgaaccagtgcccgat

SEQ ID NO: 189544 - DNA, 50 bp, Artificial
  Synthetic oligonucleotide
agcctcacgcaggaggtgcaaaagcgtgtgcctgacgtagtcgcttcgtc

SEQ ID NO: 189545 - DNA, 50 bp, Artificial
  Synthetic oligonucleotide
agcccacccgcagtaatgccctgcaaacgggcggtcccaaggcaacagct

SEQ ID NO: 189546 - DNA, 50 bp, Artificial
  Synthetic oligonucleotide
agccataccgccgcggtgagtgccaaggtgagaatggtagtcggttccgt

SEQ ID NO: 189547 - DNA, 50 bp, Artificial
  Synthetic oligonucleotide
agcagcgttatgaaccgagcgatacgacccgctatccgggcattctcggc

SEQ ID NO: 189548 - DNA, 50 bp, Artificial
  Synthetic oligonucleotide
agcacaaacgacccacgccccatagggacgtgagcgctcgccttattctc

SEQ ID NO: 189549 - DNA, 54 bp, Artificial
  Synthetic oligonucleotide
cgcatacggacttcgagcttacgggtacgggccttgaggcggacaccgtccttg

SEQ ID NO: 189550 - DNA, 50 bp, Artificial
  Synthetic oligonucleotide
agacgtcggtcggtcaaatgccatgcggaacacgcagcccgccttttcat

SEQ ID NO: 189551 - DNA, 50 bp, Artificial
  Synthetic oligonucleotide
agacaacggcagttacacccacgtaggcaaggccgccgactttaccaccc

SEQ ID NO: 189552 - DNA, 50 bp, Artificial
  Synthetic oligonucleotide
agaatcgtccgatggtaaggcctgcgtagaatcccggccaccagcgacct

SEQ ID NO: 189553 - DNA, 50 bp, Artificial
  Synthetic oligonucleotide
agaactgggcgacgttccgccccttagcatggccgagttccgtggccgtt

SEQ ID NO: 189554 - DNA, 50 bp, Artificial
  Synthetic oligonucleotide
agaacccccatcacaaagcacaccgaaacgagcaagaggagccgccgcga

SEQ ID NO: 189555 - DNA, 55 bp, Artificial
  Synthetic oligonucleotide
cgcactagaacggtgtaaccccacaatagacatatcatcggcagttatcccgcta

SEQ ID NO: 189556 - DNA, 55 bp, Artificial
  Synthetic oligonucleotide
cgcacgtgaaccgcttccgttacgcacccgcaagctgggaaatcctcacgcacga

SEQ ID NO: 189557 - DNA, 58 bp, Artificial
  Synthetic oligonucleotide
gatgcgaaaaaatagctaagaaacacggattgacgaacgccaaagagcaaggcaacca

SEQ ID NO: 189558 - DNA, 54 bp, Artificial
  Synthetic oligonucleotide
tttctttggattgccgtaataggcttaggaattggtttttacagctattaccaa

SEQ ID NO: 189559 - DNA, 60 bp, Artificial
  Synthetic oligonucleotide
tggtggcattccatagcgagcatcctgtttgttcaacggctctcacaaagcttgcaaatt

SEQ ID NO: 189560 - DNA, 60 bp, Artificial
  Synthetic oligonucleotide
acgcaatacatggttgtaaagcacaacgacagcaagcaccaacatttacacattgtcgcc

SEQ ID NO: 189561 - DNA, 60 bp, Artificial
  Synthetic oligonucleotide
tgacccctctcatatcgagtataatgagcaacttgcacgaaatatggctctaaaactgga

SEQ ID NO: 189562 - DNA, 58 bp, Artificial
  Synthetic oligonucleotide
aggatttagccggcatcatgaaaggcgttgaaaagttgggctatacagtccaatacaa

SEQ ID NO: 189563 - DNA, 53 bp, Artificial
  Synthetic oligonucleotide
atattcaaggcttctgaaatagaccgaaacctaagttacactaagcttttaag

SEQ ID NO: 189564 - DNA, 60 bp, Artificial
  Synthetic oligonucleotide
agtacagtgcctacacaatgagcgaaattgacagcctttacaaaacacatgctgacagga

SEQ ID NO: 189565 - DNA, 55 bp, Artificial
  Synthetic oligonucleotide
aggcttctgaaatagaccgaaacctaagttacactaagcttttaaggcacattga

SEQ ID NO: 189566 - DNA, 56 bp, Artificial
  Synthetic oligonucleotide
tgacgaggggcaaaatattttttttctaagtcttgaatgagccaagaagtacttgc

SEQ ID NO: 189567 - DNA, 56 bp, Artificial
  Synthetic oligonucleotide
cgttatatcataagcacttccactatcagagtaattaaccacttctgaaacgtgca

SEQ ID NO: 189568 - DNA, 53 bp, Artificial
  Synthetic oligonucleotide
gcggagttaaggggcatttaagaggttgagggaaaaaggagtgttcgcaatgg

SEQ ID NO: 189569 - DNA, 55 bp, Artificial
  Synthetic oligonucleotide
gcacaacgacagcaagcaccaacatttacacattgtcgccaatcgggtcaactat

SEQ ID NO: 189570 - DNA, 55 bp, Artificial
  Synthetic oligonucleotide
gccagacaaggaaggaacagtaacggtatatcctccctcaatctcgggatgtagg

SEQ ID NO: 189571 - DNA, 55 bp, Artificial
  Synthetic oligonucleotide
ttgtccgtacaagcttgtttgggcatcttcggcatactgccaatcgccattaaga

SEQ ID NO: 189572 - DNA, 54 bp, Artificial
  Synthetic oligonucleotide
tcgaattaaccgctattaaaagtgccggtatatctttagtaagggtgctccgcc

SEQ ID NO: 189573 - DNA, 54 bp, Artificial
  Synthetic oligonucleotide
ggccattcttggggaggtgcattggcggtagagtattacctaaaatacccaggg

SEQ ID NO: 189574 - DNA, 55 bp, Artificial
  Synthetic oligonucleotide
ggctgtggaccacgcatctgcttccatgcatgtaggagctaccactgtggagcta

SEQ ID NO: 189575 - DNA, 55 bp, Artificial
  Synthetic oligonucleotide
ggcttaggttggcaataggtctatatctagtgttcgtagggataactgagcccga

SEQ ID NO: 189576 - DNA, 55 bp, Artificial
  Synthetic oligonucleotide
ggtaacccgtcactggcgcttaccacctttccttctatcacccgatcctgagcgt

SEQ ID NO: 189577 - DNA, 54 bp, Artificial
  Synthetic oligonucleotide
ggttaccggaaaccctgatggagcgttagacggtgtctataaattagcatttac

SEQ ID NO: 189578 - DNA, 55 bp, Artificial
  Synthetic oligonucleotide
gttctgatccacctaattgagacgtagcattaatcgtcaaggtacctgctgagct

SEQ ID NO: 189579 - DNA, 57 bp, Artificial
  Synthetic oligonucleotide
ggcaatcaagagcaaagccgaaaggtcaaacttgagcctttccgactattgcctacg

SEQ ID NO: 189580 - DNA, 55 bp, Artificial
  Synthetic oligonucleotide
gttgtaagctaaaacgtctaaggccgtgaacatcaaatcttgacgcattacgcct

SEQ ID NO: 189581 - DNA, 55 bp, Artificial
  Synthetic oligonucleotide
taatggccctgcttttgacggtcgaatcaagccagaattagtagcgtatagtatg

SEQ ID NO: 189582 - DNA, 55 bp, Artificial
  Synthetic oligonucleotide
tagaggctattaaacgtaccgcagaaacttttgtgactgatagtcaggaaggact

SEQ ID NO: 189583 - DNA, 55 bp, Artificial
  Synthetic oligonucleotide
tcatttctccgttacgctcccttccagtaattacccatgcgcccgccaattctcc

SEQ ID NO: 189584 - DNA, 53 bp, Artificial
  Synthetic oligonucleotide
aacggggtcaatatggacgagctcaccgaaagaacggtaactaccttcgaatg

SEQ ID NO: 189585 - DNA, 54 bp, Artificial
  Synthetic oligonucleotide
accaaataggcgtatcagttcccactaattcgtcactaggttggaagtcgggaa

SEQ ID NO: 189586 - DNA, 54 bp, Artificial
  Synthetic oligonucleotide
agaccgaaacctaagttacactaagcttttaaggcacattgaggaacacaaaga

SEQ ID NO: 189587 - DNA, 55 bp, Artificial
  Synthetic oligonucleotide
caacgcggtacgtctacaagcatgaatgttcaggcaggatttagcggaagcagct

SEQ ID NO: 189588 - DNA, 55 bp, Artificial
  Synthetic oligonucleotide
ccatctgcgttcaattgggtctggtataaatcaaatcctcctatacctccctccc

SEQ ID NO: 189589 - DNA, 55 bp, Artificial
  Synthetic oligonucleotide
ctcggtatagaacgggagaagcaatcgctcgcttcctctattgggaaaattgaga

SEQ ID NO: 189590 - DNA, 59 bp, Artificial
  Synthetic oligonucleotide
cgactgttaatgagagttctagactttgactatcgtcaggaattggctctcccgaagct

SEQ ID NO: 189591 - DNA, 55 bp, Artificial
  Synthetic oligonucleotide
ctcatttaccagttgtggttctactttagcagtgatttcacccgctacttcttgc

SEQ ID NO: 189592 - DNA, 55 bp, Artificial
  Synthetic oligonucleotide
ctagactttgactatcgtcaggaattggctctcccgaagcttgcagatcctcgag

SEQ ID NO: 189593 - DNA, 55 bp, Artificial
  Synthetic oligonucleotide
cgctggctgtagtctccccacttactccggcattgattacattgtattcgtagcc

SEQ ID NO: 189594 - DNA, 53 bp, Artificial
  Synthetic oligonucleotide
cgtctgatctagagtttacccaaaacctaatacttacgacttaaaactcatac

SEQ ID NO: 189595 - DNA, 54 bp, Artificial
  Synthetic oligonucleotide
cgtaaaggtaaatggaataaccaggactgttattcttctgggctcggttatagc

SEQ ID NO: 189596 - DNA, 54 bp, Artificial
  Synthetic oligonucleotide
caatatgaactcctataaaaccaatgcctgcttctgcatttaaatgaggggtga

SEQ ID NO: 189597 - DNA, 54 bp, Artificial
  Synthetic oligonucleotide
cattgtcgccaatcgggtcaactatgaaggcaaagccatatccgacagccacag

SEQ ID NO: 189598 - DNA, 51 bp, Artificial
  Synthetic oligonucleotide
ctttaactcacgccacaaacctccctttaattagttttactccttatagta

SEQ ID NO: 189599 - DNA, 54 bp, Artificial
  Synthetic oligonucleotide
gcacccgaaattgatttgagtagcttagaatcgaaatttgaagccttaaacgat

SEQ ID NO: 189600 - DNA, 53 bp, Artificial
  Synthetic oligonucleotide
gaaattcccaacgggttcacctccattcacggctacagttaatttaccattcg

SEQ ID NO: 189601 - DNA, 57 bp, Artificial
  Synthetic oligonucleotide
ccccaagtgatacagccagacaaggaaggaacagtaacggtatatcctccctcaatc

SEQ ID NO: 189602 - DNA, 54 bp, Artificial
  Synthetic oligonucleotide
gccacctgcttaagagtagacaactatattaaaggggctgaagacaatccaatt

SEQ ID NO: 189603 - DNA, 53 bp, Artificial
  Synthetic oligonucleotide
cttgaattacctctctagctcggtacatggtcggcatttccctattttgtacc

SEQ ID NO: 189604 - DNA, 53 bp, Artificial
  Synthetic oligonucleotide
caagcccattgaccatcacaacccactttctaacaatggagtgatgaaacaca

SEQ ID NO: 189605 - DNA, 53 bp, Artificial
  Synthetic oligonucleotide
caacactaggaaaagcggtttggcacagctctatttcctttgctgaaggagac

SEQ ID NO: 189606 - DNA, 52 bp, Artificial
  Synthetic oligonucleotide
gacgcttgcgctagggcggtccagccaaactaccatctggttcaggcatccg

SEQ ID NO: 189607 - DNA, 52 bp, Artificial
  Synthetic oligonucleotide
aaggaaacgggggctagccacgagcggagagtaacggagcgaacaaggcttg

SEQ ID NO: 189608 - DNA, 52 bp, Artificial
  Synthetic oligonucleotide
ttgattaccgctaagggctgcggttaaggcgtcatgtaaggctgtaggccca

SEQ ID NO: 189609 - DNA, 52 bp, Artificial
  Synthetic oligonucleotide
ttgaacggtaacaggggccgattccgtggggcaattacctggctccgcagaa

SEQ ID NO: 189610 - DNA, 52 bp, Artificial
  Synthetic oligonucleotide
acggtgggcctgttaccgccatatcgtgcctaagcgacataccttgcgggct

SEQ ID NO: 189611 - DNA, 52 bp, Artificial
  Synthetic oligonucleotide
tcgtccggctgaatcgtttccgcctgcacaatggaggccagggcactaactt

SEQ ID NO: 189612 - DNA, 56 bp, Artificial
  Synthetic oligonucleotide
ccaaaaggcggacagatacgaggaatcagccacaaaatactatttttacaagtaca

SEQ ID NO: 189613 - DNA, 52 bp, Artificial
  Synthetic oligonucleotide
tccttccgcaaagagggctgagccttcagttcggagaccacaacgatgccct

SEQ ID NO: 189614 - DNA, 52 bp, Artificial
  Synthetic oligonucleotide
tagggcgtgccaccctacagggggactacaacagttgggcggcactaaaggc

SEQ ID NO: 189615 - DNA, 52 bp, Artificial
  Synthetic oligonucleotide
taaagctgcggcatttccctgtgcccgtagcgtcccaaaccaggggaacatc

SEQ ID NO: 189616 - DNA, 52 bp, Artificial
  Synthetic oligonucleotide
gggagggataccgccttataatgtagaatgggaagatggctctacattaaaa

SEQ ID NO: 189617 - DNA, 52 bp, Artificial
  Synthetic oligonucleotide
gtgtaagcctctgtgcaactcagtggttaaagtactagtagcctttggctac

SEQ ID NO: 189618 - DNA, 51 bp, Artificial
  Synthetic oligonucleotide
tcaatccggagcagaaagctttgcggatatcacggcttgcccgggaacgga

SEQ ID NO: 189619 - DNA, 51 bp, Artificial
  Synthetic oligonucleotide
taggtctttcgtccggctgaatcgtttccgcctgcacaatggaggccaggg

SEQ ID NO: 189620 - DNA, 51 bp, Artificial
  Synthetic oligonucleotide
cacctgaatttacgaaagaaccgtagcgagctattgcatgtggaacgactc

SEQ ID NO: 189621 - DNA, 50 bp, Artificial
  Synthetic oligonucleotide
gccaagccttgctcgctccgttactctccgctcatagctagcccccgttt

SEQ ID NO: 189622 - DNA, 60 bp, Artificial
  Synthetic oligonucleotide
tatccgttgagcttaccctatatgaagtatgggagcattacagaagattagcatacgatt

SEQ ID NO: 189623 - DNA, 58 bp, Artificial
  Synthetic oligonucleotide
caagaacgaaagaaagagtatccgttgagcttaccctatatgaagtatgggagcatta

SEQ ID NO: 189624 - DNA, 53 bp, Artificial
  Synthetic oligonucleotide
caaccatcttgttttgcgcccttcggttgcaaaagggtagcccagaacaaagt

SEQ ID NO: 189625 - DNA, 57 bp, Artificial
  Synthetic oligonucleotide
ccgatattgaaagaacattaattgatatttgtgtccgaccattttactctggtggag

SEQ ID NO: 189626 - DNA, 58 bp, Artificial
  Synthetic oligonucleotide
gaaggtccacaatctccatatattcttatagatataaaccttaatatcccgaaggaga

SEQ ID NO: 189627 - DNA, 55 bp, Artificial
  Synthetic oligonucleotide
gccctaccccacctgaattaatggatccgtcaaccccagaagcagtggcggaacg

SEQ ID NO: 189628 - DNA, 51 bp, Artificial
  Synthetic oligonucleotide
aaacctggaacgttttcgtctaatacctctaagcccactgccgctcttaag

SEQ ID NO: 189629 - DNA, 51 bp, Artificial
  Synthetic oligonucleotide
gtatagtctgtaaacaggttacttcgtcttccatgacctctcattgcgtaa

SEQ ID NO: 189630 - DNA, 51 bp, Artificial
  Synthetic oligonucleotide
ctttgttccacgtacatataggtagcttcctgctcgtgtgaggcgtagtga

SEQ ID NO: 189631 - DNA, 51 bp, Artificial
  Synthetic oligonucleotide
tatggagttaggcatgatgaccggccctcctatgggaccgatggttgggct

SEQ ID NO: 189632 - DNA, 51 bp, Artificial
  Synthetic oligonucleotide
gccgggtccgctgatacaggtggtacagttcgtaggcttcatgggggccta

SEQ ID NO: 189633 - DNA, 51 bp, Artificial
  Synthetic oligonucleotide
tcaatctcaaattcatagataccctaaacaattttaggcgaagactagtct

SEQ ID NO: 189634 - DNA, 51 bp, Artificial
  Synthetic oligonucleotide
tataggagatgtagttcttcaaaacggcttgctatctacaccgcatcaacg

SEQ ID NO: 189635 - DNA, 51 bp, Artificial
  Synthetic oligonucleotide
aaccggggtatctggcggtgcaaatgcaaccggctgtgtgttgggagttcc

SEQ ID NO: 189636 - DNA, 51 bp, Artificial
  Synthetic oligonucleotide
tcccaaatccagattgatcttaacaggagggaaccggagggacgtggaaca

SEQ ID NO: 189637 - DNA, 51 bp, Artificial
  Synthetic oligonucleotide
cggtaaattccggttctccagtcgcggccgtaacccgcacttccgcgataa

SEQ ID NO: 189638 - DNA, 54 bp, Artificial
  Synthetic oligonucleotide
aaccggaccgcaaggcgacacaggggaaaccggagcacaaggtattcagggtga

SEQ ID NO: 189639 - DNA, 51 bp, Artificial
  Synthetic oligonucleotide
tcgcagggcggggtagctcccattgtgggaatgttagggttttcaatggcg

SEQ ID NO: 189640 - DNA, 51 bp, Artificial
  Synthetic oligonucleotide
accttgtatggcaatgttatgcaagttttccgtgcggctggtgcccggata

SEQ ID NO: 189641 - DNA, 51 bp, Artificial
  Synthetic oligonucleotide
cggaacacaactagatgtgtataaggaaggttacgaatggattaatcacag

SEQ ID NO: 189642 - DNA, 51 bp, Artificial
  Synthetic oligonucleotide
tcgcgacaaccgccatgctattacccattctggcacccatggcgctagcac

SEQ ID NO: 189643 - DNA, 51 bp, Artificial
  Synthetic oligonucleotide
cgttaaatgcccaccagattctaaggcagctcctagatcatgagctagaga

SEQ ID NO: 189644 - DNA, 51 bp, Artificial
  Synthetic oligonucleotide
tcgggacaggtaatattatctacgcacaggcaggtttactcttaccaagtc

SEQ ID NO: 189645 - DNA, 51 bp, Artificial
  Synthetic oligonucleotide
gcccatacaatcctgtaataccattgtcgaagtcatgattacctattgtag

SEQ ID NO: 189646 - DNA, 51 bp, Artificial
  Synthetic oligonucleotide
tacgagtcgaagtacgggcattccaggggcaaccaccgttcccacgtcggt

SEQ ID NO: 189647 - DNA, 51 bp, Artificial
  Synthetic oligonucleotide
accggcctctttaagtgattggctcatacgatcgcaccccataccctcttc

SEQ ID NO: 189648 - DNA, 51 bp, Artificial
  Synthetic oligonucleotide
tctaaattggaatcgagtgggatttgacacgctaggcgactggtcttggta

SEQ ID NO: 189649 - DNA, 54 bp, Artificial
  Synthetic oligonucleotide
atacgctcacggcgtacccctggtggcatacggtaaggaataggctgacgggtt

SEQ ID NO: 189650 - DNA, 51 bp, Artificial
  Synthetic oligonucleotide
accgcagaactctggacggatttagcagtaggaaaccgtagggactttgtg

SEQ ID NO: 189651 - DNA, 51 bp, Artificial
  Synthetic oligonucleotide
gcgcgctacttcagctatcataaaaccacccattcggttgtctatagcacg

SEQ ID NO: 189652 - DNA, 51 bp, Artificial
  Synthetic oligonucleotide
taatggcctgcgtgggttgctgagcggagtttgttaccggggcgccatcca

SEQ ID NO: 189653 - DNA, 51 bp, Artificial
  Synthetic oligonucleotide
taagttaggctggtggaactcccgaacccaacttgcacttggtaattcccc

SEQ ID NO: 189654 - DNA, 51 bp, Artificial
  Synthetic oligonucleotide
gccaggggtggcgtatccccggtgggactgaagccatttttagaggcccgt

SEQ ID NO: 189655 - DNA, 51 bp, Artificial
  Synthetic oligonucleotide
cgcacgtcgtaagtattagcagtatgggaggtgtgcaagggagtttgaagt

SEQ ID NO: 189656 - DNA, 51 bp, Artificial
  Synthetic oligonucleotide
cgatggttacccatgtgctaggcctatgtggtttgcacaggcgccaggcca

SEQ ID NO: 189657 - DNA, 51 bp, Artificial
  Synthetic oligonucleotide
tgacgttgagtggaccagttgggaaatggtcaaacgcgcagaccaagtcac

SEQ ID NO: 189658 - DNA, 51 bp, Artificial
  Synthetic oligonucleotide
agcttcgggcggttggcgtttaaatggagccaaaggtggcggcgctattta

SEQ ID NO: 189659 - DNA, 51 bp, Artificial
  Synthetic oligonucleotide
gttgaaataatagcgtaaatctgcagtattcccagattggacaggagcgcc

SEQ ID NO: 189660 - DNA, 56 bp, Artificial
  Synthetic oligonucleotide
acaagcgccgaaattgtgcaataaacgcaagtttagaccaccgcccaattctgggc

SEQ ID NO: 189661 - DNA, 51 bp, Artificial
  Synthetic oligonucleotide
gcgtgggttgctgagcggagtttgttaccggggcgccatccatagtgtagc

SEQ ID NO: 189662 - DNA, 51 bp, Artificial
  Synthetic oligonucleotide
ccgcgtctgccgtagttaggcatttcggggtcttcgtgcattttgcgccct

SEQ ID NO: 189663 - DNA, 51 bp, Artificial
  Synthetic oligonucleotide
ccgatgtacttgatagctattctattgataggttacaactcttgggtacag

SEQ ID NO: 189664 - DNA, 51 bp, Artificial
  Synthetic oligonucleotide
ttcgttactgcaccgtcttccactaccacacggttacggaagatttgtagg

SEQ ID NO: 189665 - DNA, 51 bp, Artificial
  Synthetic oligonucleotide
atggcgggctgcctgctacgcgcagaggaaccgaagtaggtttcccttcac

SEQ ID NO: 189666 - DNA, 51 bp, Artificial
  Synthetic oligonucleotide
attagggacctctattaaatctacagctccgggtaatggttatggaacagc

SEQ ID NO: 189667 - DNA, 51 bp, Artificial
  Synthetic oligonucleotide
ttcttctgcatcgggagatcgtgaatcggccctgtctactccatctattgc

SEQ ID NO: 189668 - DNA, 51 bp, Artificial
  Synthetic oligonucleotide
atttcgtccaacctgttccaaagtaaagtgagcatcaagtgcaaatgcctg

SEQ ID NO: 189669 - DNA, 51 bp, Artificial
  Synthetic oligonucleotide
aatacgagccatctaaagccaattcattgggcttggccaatgtaccaggat

SEQ ID NO: 189670 - DNA, 51 bp, Artificial
  Synthetic oligonucleotide
caaacgacaaccggtacgtggccgtgtcgctcgtcttgttgatcagtttca

SEQ ID NO: 189671 - DNA, 56 bp, Artificial
  Synthetic oligonucleotide
cgagtagaggggtcctcccctagttaggacggactgcgcctctcacaccactaagc

SEQ ID NO: 189672 - DNA, 51 bp, Artificial
  Synthetic oligonucleotide
aagtggcgattcctagctgggcattaggggccggtggaacccgcttcggaa

SEQ ID NO: 189673 - DNA, 51 bp, Artificial
  Synthetic oligonucleotide
cacaccgcgcgattataccgatcccggaactttagacccctcggacctgcg

SEQ ID NO: 189674 - DNA, 51 bp, Artificial
  Synthetic oligonucleotide
cacatcacaccaatggcacccaacatcacaaccaccaactcgtataaagta

SEQ ID NO: 189675 - DNA, 51 bp, Artificial
  Synthetic oligonucleotide
ggatatgacggtaacttccgatacagacgttacctacgttttaccatctgc

SEQ ID NO: 189676 - DNA, 51 bp, Artificial
  Synthetic oligonucleotide
cccatgtggcggtaaattccggttctccagtcgcggccgtaacccgcactt

SEQ ID NO: 189677 - DNA, 51 bp, Artificial
  Synthetic oligonucleotide
ggcatcctggtgtagaggctgggaacgccgttggggacgttttattcggga

SEQ ID NO: 189678 - DNA, 51 bp, Artificial
  Synthetic oligonucleotide
aacctccgacaaaggtatagcacgctataacatttatcatagtcagagtac

SEQ ID NO: 189679 - DNA, 51 bp, Artificial
  Synthetic oligonucleotide
aaggggtcgcaggaaccgcgctttatggtacagaagccagaaacggtgcga

SEQ ID NO: 189680 - DNA, 51 bp, Artificial
  Synthetic oligonucleotide
gggcctccgtgtgtcatcccatctaccacagcaacacccgtaggcacaccg

SEQ ID NO: 189681 - DNA, 51 bp, Artificial
  Synthetic oligonucleotide
tttcgatgccaatacttatatccgaggagccataaaggcggaccaaagtga

SEQ ID NO: 189682 - DNA, 56 bp, Artificial
  Synthetic oligonucleotide
gttctttaaatggtgtgattaagaattttgatataagccctgcatccgttcacgac

SEQ ID NO: 189683 - DNA, 51 bp, Artificial
  Synthetic oligonucleotide
ccactctgaaccgttgggcaaagggcggtaagctaacggcgtacggtatag

SEQ ID NO: 189684 - DNA, 51 bp, Artificial
  Synthetic oligonucleotide
cattgtgtcgctcccgttccctggtaattcataaacggacttttgtccaga

SEQ ID NO: 189685 - DNA, 51 bp, Artificial
  Synthetic oligonucleotide
ggcgcgactactacggacaggattcaccaagaagcatcgcctgtgggaacc

SEQ ID NO: 189686 - DNA, 51 bp, Artificial
  Synthetic oligonucleotide
gtacagggctttcccgggggcaaagcttatggcaggggcaataccatgcaa

SEQ ID NO: 189687 - DNA, 51 bp, Artificial
  Synthetic oligonucleotide
ttattgcgatcggaattaccgctttggttggaattcttacagttgtaacag

SEQ ID NO: 189688 - DNA, 51 bp, Artificial
  Synthetic oligonucleotide
ttatgcaggccgcctggtaaccgaatcgttgcaactcgctcccgggattgc

SEQ ID NO: 189689 - DNA, 51 bp, Artificial
  Synthetic oligonucleotide
gtacctcctgtaacgttcaccggactgaattgcttggttatcacgttgtag

SEQ ID NO: 189690 - DNA, 51 bp, Artificial
  Synthetic oligonucleotide
atcgattcacgcttagatgaaattcgtaatacccgtggtgaattaccctta

SEQ ID NO: 189691 - DNA, 50 bp, Artificial
  Synthetic oligonucleotide
acctgtgtaacgcccggccatttgaccaaaaggggcactcgggtacctcc

SEQ ID NO: 189692 - DNA, 50 bp, Artificial
  Synthetic oligonucleotide
cgtccgtggtggacttacgcttaatccggtctgtgcgagagcggtgccaa

SEQ ID NO: 189693 - DNA, 56 bp, Artificial
  Synthetic oligonucleotide
gaaccgctaagtacgagacccgtacgcttagtggtgtgagaggcgcagtccgtcct

SEQ ID NO: 189694 - DNA, 50 bp, Artificial
  Synthetic oligonucleotide
gcacactgctgcgagcccctgaaagtgccgttgggcaagctcactcttca

SEQ ID NO: 189695 - DNA, 50 bp, Artificial
  Synthetic oligonucleotide
aagggtgccgcgtaatatgccggaacccgaaaggttggcggatcagctct

SEQ ID NO: 189696 - DNA, 50 bp, Artificial
  Synthetic oligonucleotide
tggtttccccgccgtttaagaacccggccaccataactccaatgggggct

SEQ ID NO: 189697 - DNA, 50 bp, Artificial
  Synthetic oligonucleotide
tcggtactactgatacctccacgagcggaaagagtaagcgtaggatagaa

SEQ ID NO: 189698 - DNA, 50 bp, Artificial
  Synthetic oligonucleotide
aacggcgctgcagcaacccaacagtgtcgtgttaacccgaaagcgtgctg

SEQ ID NO: 189699 - DNA, 50 bp, Artificial
  Synthetic oligonucleotide
accgtacccgaaatgccggccgttccgttcacagggttgccttggatgcc

SEQ ID NO: 189700 - DNA, 50 bp, Artificial
  Synthetic oligonucleotide
acaacccgataaaccgctcccgcttgccgtccacatccgttgcggcaccc

SEQ ID NO: 189701 - DNA, 50 bp, Artificial
  Synthetic oligonucleotide
aaggtcgcctcgatagagcgaaggatcccacccgtatcggcatccccgct

SEQ ID NO: 189702 - DNA, 50 bp, Artificial
  Synthetic oligonucleotide
tcgtgggagcttgcgctacgaaggtgcacgtctcgagggagatcagctta

SEQ ID NO: 189703 - DNA, 50 bp, Artificial
  Synthetic oligonucleotide
gatgcccgggttcgcagctttcaattggcgaaacgcctgtgatggtggca

SEQ ID NO: 189704 - DNA, 54 bp, Artificial
  Synthetic oligonucleotide
ccgggggagggttctgctaaaagagagcggtcccaggtgggcttggctatagaa

SEQ ID NO: 189705 - DNA, 50 bp, Artificial
  Synthetic oligonucleotide
ctacccgaacgcccggaagaccctcatgtgtagtcgggtggccctgaagt

SEQ ID NO: 189706 - DNA, 50 bp, Artificial
  Synthetic oligonucleotide
aaagccgcgttgtgcaaccgcagggcgttctcttccccgtggttgaacca

SEQ ID NO: 189707 - DNA, 50 bp, Artificial
  Synthetic oligonucleotide
aacctcctggttcgtctgtaaaagttgaggcacaataagctgcatttagc

SEQ ID NO: 189708 - DNA, 50 bp, Artificial
  Synthetic oligonucleotide
accgcgaaggcttccctaacgtggtgcttcaggccggagccatgagcctg

SEQ ID NO: 189709 - DNA, 50 bp, Artificial
  Synthetic oligonucleotide
tctaattctacctccaaactcttacccttccgtaccatttcagccaatct

SEQ ID NO: 189710 - DNA, 50 bp, Artificial
  Synthetic oligonucleotide
accgccgtgtcgtattccgtgcgtagccacgtgcccacctgatgggatgc

SEQ ID NO: 189711 - DNA, 50 bp, Artificial
  Synthetic oligonucleotide
aagtccgccaccgacaaacccgataaggcagccgacccttcggccgagtt

SEQ ID NO: 189712 - DNA, 50 bp, Artificial
  Synthetic oligonucleotide
accgagtatttcaaagtgcgaatcggccccgaggtcccggcctgccatcc

SEQ ID NO: 189713 - DNA, 50 bp, Artificial
  Synthetic oligonucleotide
accgaccgcgtgaaagactgtacggtggacgccggtgcttacgaacgcaa

SEQ ID NO: 189714 - DNA, 50 bp, Artificial
  Synthetic oligonucleotide
gactcggatgtaccccatcgaccagtattcaatcgcatggtaggaattcc

SEQ ID NO: 189715 - DNA, 56 bp, Artificial
  Synthetic oligonucleotide
cgccttctctggcgcagaagtattacagccagcagttcaccaacttccagggcggt

SEQ ID NO: 189716 - DNA, 50 bp, Artificial
  Synthetic oligonucleotide
aattcgggtgatacccgtagcggactggcacttccttcttcaggggcggg

SEQ ID NO: 189717 - DNA, 50 bp, Artificial
  Synthetic oligonucleotide
aaggctccccgtcgaccatcctgtgcaacttcgcgggtggagttcgaata

SEQ ID NO: 189718 - DNA, 50 bp, Artificial
  Synthetic oligonucleotide
tattcccatgccccgatggaactttgacggtcccaagctgcctgcaccat

SEQ ID NO: 189719 - DNA, 50 bp, Artificial
  Synthetic oligonucleotide
acggacccaatcagatagcttggtacaaaatggccgaacacgaaggctat

SEQ ID NO: 189720 - DNA, 50 bp, Artificial
  Synthetic oligonucleotide
cgtaaggccgtgggaatctccgatggaatggtccgggtgtccgtgggcct

SEQ ID NO: 189721 - DNA, 50 bp, Artificial
  Synthetic oligonucleotide
aattcgaggatggtggggcattccgccggggcgaggtatttcgggccaac

SEQ ID NO: 189722 - DNA, 50 bp, Artificial
  Synthetic oligonucleotide
aaggcttaggcgaagacgggttgccgcctactggaggttctcccacacct

SEQ ID NO: 189723 - DNA, 50 bp, Artificial
  Synthetic oligonucleotide
ttttgcaatcgaggaactagtggaatcgatggctctacctcaacagcggt

SEQ ID NO: 189724 - DNA, 50 bp, Artificial
  Synthetic oligonucleotide
tttgtaaggcgcgttgtcgcacctctggcggatcgttgtgtacggctgca

SEQ ID NO: 189725 - DNA, 50 bp, Artificial
  Synthetic oligonucleotide
acgctggcatcagcacaaaacaccattcagcctgaaccggtcccgcagct

SEQ ID NO: 189726 - DNA, 56 bp, Artificial
  Synthetic oligonucleotide
gttatgcagatttaatagacagtccagtaatgtatacagagcatgaacctgtatcg

SEQ ID NO: 189727 - DNA, 49 bp, Artificial
  Synthetic oligonucleotide
aaagcggcaaaaccccggtgccccgtagaaaaccggcttccgttcaaca

SEQ ID NO: 189728 - DNA, 50 bp, Artificial
  Synthetic oligonucleotide
tcagcgctctaccatggcccattcccaaaaagccatcccgcattcccgtt

SEQ ID NO: 189729 - DNA, 50 bp, Artificial
  Synthetic oligonucleotide
aatttaccagacctcgtgtattacaaccacgcacagcacgttactgttgg

SEQ ID NO: 189730 - DNA, 50 bp, Artificial
  Synthetic oligonucleotide
acgccacaacacggaaatggcgtctgggcgccttctatacgggtgcacaa

SEQ ID NO: 189731 - DNA, 50 bp, Artificial
  Synthetic oligonucleotide
gcaaaacgtttatatgcgatagcgtgtcagtggagaagcgtcggaattaa

SEQ ID NO: 189732 - DNA, 50 bp, Artificial
  Synthetic oligonucleotide
tcccactgtaaacctacgcttcccgttatgcgcgggcccacttgcgtttc

SEQ ID NO: 189733 - DNA, 50 bp, Artificial
  Synthetic oligonucleotide
aagggaatcgtatgcctgggggtgctccccggatacatcggtggtttgcc

SEQ ID NO: 189734 - DNA, 50 bp, Artificial
  Synthetic oligonucleotide
gccgccgcagctttgggctgccagtctatccgtgtaaacctgaacggaag

SEQ ID NO: 189735 - DNA, 49 bp, Artificial
  Synthetic oligonucleotide
aagggccacgccgggggttcccagttttagcgtacgtccttcgttctcg

SEQ ID NO: 189736 - DNA, 50 bp, Artificial
  Synthetic oligonucleotide
cgtatgaatccggcttgacgctctttctctatggtccgtatctgcgggac

SEQ ID NO: 189737 - DNA, 57 bp, Artificial
  Synthetic oligonucleotide
gacgaaaatattgaacgtcagaaactgaataatcagctttctttgggatgggattta

SEQ ID NO: 189738 - DNA, 56 bp, Artificial
  Synthetic oligonucleotide
tcgtgtgacaccgccaagagttcgcacagttcgtccaaagccagcaagacgtgtta

SEQ ID NO: 189739 - DNA, 50 bp, Artificial
  Synthetic oligonucleotide
tcctcaccagggtgtgcatccaacaacattccgtatgccggacccgcaaa

SEQ ID NO: 189740 - DNA, 50 bp, Artificial
  Synthetic oligonucleotide
acgacatctgcgagagcagtgggcgagttggcgtgctggccagtttccgt

SEQ ID NO: 189741 - DNA, 50 bp, Artificial
  Synthetic oligonucleotide
tcgcactcgaaatgagcaggctcaacttggcgttgaagaattaaggagca

SEQ ID NO: 189742 - DNA, 50 bp, Artificial
  Synthetic oligonucleotide
acaaatgcaactagacagcgttccatacaatcgaattccgtttggagcat

SEQ ID NO: 189743 - DNA, 50 bp, Artificial
  Synthetic oligonucleotide
tcgcccggggtttaccgatctactgttgggttcgcggcagagacggggat

SEQ ID NO: 189744 - DNA, 50 bp, Artificial
  Synthetic oligonucleotide
aatactagccggtaccccgcggtgttacgaaccccagcgtactgcgcatt

SEQ ID NO: 189745 - DNA, 50 bp, Artificial
  Synthetic oligonucleotide
acatgggctcccgggctcctttgacatacgggggtacatccttccgcacc

SEQ ID NO: 189746 - DNA, 50 bp, Artificial
  Synthetic oligonucleotide
aacggacgaagagccaagcgtagctgcttggggcgacaccttgctccccg

SEQ ID NO: 189747 - DNA, 50 bp, Artificial
  Synthetic oligonucleotide
acatccttgccggactccgtatgcgtagcgtgccaggtgccatagacccg

SEQ ID NO: 189748 - DNA, 50 bp, Artificial
  Synthetic oligonucleotide
tgcatatctttagcttccgtttggtgcgaaaagtcttcagggtcgtgagt

SEQ ID NO: 189749 - DNA, 56 bp, Artificial
  Synthetic oligonucleotide
agcgcccccaaagagcagataccccagaggagatacttgcgaaaagacccgcctcg

SEQ ID NO: 189750 - DNA, 50 bp, Artificial
  Synthetic oligonucleotide
tgcccgaagctttaactgagcacccgcatatcacccgtgtacccgcccct

SEQ ID NO: 189751 - DNA, 50 bp, Artificial
  Synthetic oligonucleotide
gccaatgtcgtgcttgagcgaacccgccctcagtatggccagaacctgta

SEQ ID NO: 189752 - DNA, 50 bp, Artificial
  Synthetic oligonucleotide
ttctgtgggagcaggaccccttggccgcacaattgaacttggaagcggta

SEQ ID NO: 189753 - DNA, 50 bp, Artificial
  Synthetic oligonucleotide
aaggccaccacgggttccccgataaagagcatcaggcgtacccaggcggc

SEQ ID NO: 189754 - DNA, 50 bp, Artificial
  Synthetic oligonucleotide
aatactcgtcccgtaggcatctaccgcctcataggagcccccgctgcgca

SEQ ID NO: 189755 - DNA, 50 bp, Artificial
  Synthetic oligonucleotide
tgcgcttgtggcttggggaccgcgctcgctagacattaacagcttgcgtc

SEQ ID NO: 189756 - DNA, 50 bp, Artificial
  Synthetic oligonucleotide
gccaagtccgagcgctctgtggcgtaaagcgaagtttctggcgcctgtta

SEQ ID NO: 189757 - DNA, 50 bp, Artificial
  Synthetic oligonucleotide
aaacagcggttatcgcaggctttgcccctgactgccgacaagaggtgcgc

SEQ ID NO: 189758 - DNA, 50 bp, Artificial
  Synthetic oligonucleotide
gacaaatcggcaactgttggtacccgctgagaccagggctcgggatgccc

SEQ ID NO: 189759 - DNA, 50 bp, Artificial
  Synthetic oligonucleotide
aataggcttgcggcggcctgccccatttgaaaggcgcggtcgttaatcgt

SEQ ID NO: 189760 - DNA, 56 bp, Artificial
  Synthetic oligonucleotide
caacatctgggggcaggagtgtagatcatctatggcgcgtggtcccgcgtgtagac

SEQ ID NO: 189761 - DNA, 50 bp, Artificial
  Synthetic oligonucleotide
ctgcctgcgatcctggttgccccgaattcaccacagaaagacccgcaacc

SEQ ID NO: 189762 - DNA, 50 bp, Artificial
  Synthetic oligonucleotide
acagccaggcattccgagcatggtggccgaatatgggagtgtgagtgccg

SEQ ID NO: 189763 - DNA, 50 bp, Artificial
  Synthetic oligonucleotide
aacggatacgtgagcctgacgtgggaagctacgggtgagcggacggctta

SEQ ID NO: 189764 - DNA, 50 bp, Artificial
  Synthetic oligonucleotide
aatgccacgtgtagtgaagccgctccctattgctgaggggtcagggcgct

SEQ ID NO: 189765 - DNA, 50 bp, Artificial
  Synthetic oligonucleotide
acagcttgctgagcgtaccgtaatcgtggcggcactccgtggcgaggtat

SEQ ID NO: 189766 - DNA, 50 bp, Artificial
  Synthetic oligonucleotide
ttcggtacattccggctccgggataccagcggctgtcatgtttgcgggta

SEQ ID NO: 189767 - DNA, 50 bp, Artificial
  Synthetic oligonucleotide
aacggacttggggcaccactcggttgtttggactccgcccgttacggaat

SEQ ID NO: 189768 - DNA, 50 bp, Artificial
  Synthetic oligonucleotide
gacactttggtaccgcaacaactgggcttggggaaacggcagctaccgcc

SEQ ID NO: 189769 - DNA, 50 bp, Artificial
  Synthetic oligonucleotide
gcagttgctccccgttgcggtcggtaacttccaacggagcgttaaagcgg

SEQ ID NO: 189770 - DNA, 50 bp, Artificial
  Synthetic oligonucleotide
aatccccaaacggccatccggggaaaaacgggctggacgcacccgacgac

SEQ ID NO: 189771 - DNA, 56 bp, Artificial
  Synthetic oligonucleotide
gcgtccaagacgcagacgtgtaagacactatcgtccgcgtgtgacaccgccaagag

SEQ ID NO: 189772 - DNA, 50 bp, Artificial
  Synthetic oligonucleotide
gcccactgtattacgagccttttatggcttacgtacctaataaccataga

SEQ ID NO: 189773 - DNA, 50 bp, Artificial
  Synthetic oligonucleotide
aaagcatagcgccaacatttacggctaattttaacccttcagtagtaccg

SEQ ID NO: 189774 - DNA, 50 bp, Artificial
  Synthetic oligonucleotide
aagtctacggctaccgcagccttgggggttacgttcggtattggcgccta

SEQ ID NO: 189775 - DNA, 50 bp, Artificial
  Synthetic oligonucleotide
aacggcgcctgagctagcatagtaaaagggcaggccacgcggagctttgc

SEQ ID NO: 189776 - DNA, 50 bp, Artificial
  Synthetic oligonucleotide
tcttgaaccagaccagtcttgaccttacatcttccaatggcgacctgctt

SEQ ID NO: 189777 - DNA, 50 bp, Artificial
  Synthetic oligonucleotide
gacggttccctcccactgtaaacctacgcttcccgttatgcgcgggccca

SEQ ID NO: 189778 - DNA, 50 bp, Artificial
  Synthetic oligonucleotide
aagtgcgaatcggccccgaggtcccggcctgccatcccgtaaagcagaca

SEQ ID NO: 189779 - DNA, 50 bp, Artificial
  Synthetic oligonucleotide
ttgcaccgggataggttagtcctgcccaaacacgccaaccttcgggcggc

SEQ ID NO: 189780 - DNA, 50 bp, Artificial
  Synthetic oligonucleotide
cttcgtgcgaaccatcggcaccgcagggaatagcttcgccgttatcggta

SEQ ID NO: 189781 - DNA, 50 bp, Artificial
  Synthetic oligonucleotide
accctgaagaccatagtgcgctccaacccgggggtcctcaggctcgaacg

SEQ ID NO: 189782 - DNA, 56 bp, Artificial
  Synthetic oligonucleotide
acggcccagagagcgccccacgacagaaacctccatactatgggtaaggcgtgtat

SEQ ID NO: 189783 - DNA, 50 bp, Artificial
  Synthetic oligonucleotide
ctcacgaccattatataaggcagttggtaaagtaaagagctccatgggaa

SEQ ID NO: 189784 - DNA, 50 bp, Artificial
  Synthetic oligonucleotide
acccgggtcatgggccgtgcagagttctccggaatggggtgcctcggtcc

SEQ ID NO: 189785 - DNA, 50 bp, Artificial
  Synthetic oligonucleotide
tgggtccggtgcacttaccactactgtagctgttgcagtctcgcaatttg

SEQ ID NO: 189786 - DNA, 50 bp, Artificial
  Synthetic oligonucleotide
acccgcggccaaacgcactgaagttcgggcaacttacgacgaccgcttct

SEQ ID NO: 189787 - DNA, 50 bp, Artificial
  Synthetic oligonucleotide
aaactgcggattgtagcccgcatcgccataagcggcgcccggtctcaatt

SEQ ID NO: 189788 - DNA, 50 bp, Artificial
  Synthetic oligonucleotide
aaaccttgggggcatcatcgatccgcaagtccccgagctcttgccactct

SEQ ID NO: 189789 - DNA, 50 bp, Artificial
  Synthetic oligonucleotide
aagttcaggccgcggactccgtctgtcatggtcgggaattccccgtcgtt

SEQ ID NO: 189790 - DNA, 50 bp, Artificial
  Synthetic oligonucleotide
tgaattgggcgggttgacatggacccgaattgacgatggagccccgggcg

SEQ ID NO: 189791 - DNA, 50 bp, Artificial
  Synthetic oligonucleotide
acccccggcaacgagtttccggtcgtactctacaacaccgcgcaccactc

SEQ ID NO: 189792 - DNA, 50 bp, Artificial
  Synthetic oligonucleotide
aagttgggccgtccataggtgcggctacccgccataggtcggtgttttgg

SEQ ID NO: 189793 - DNA, 56 bp, Artificial
  Synthetic oligonucleotide
ctggcggacccacacaggtaagcatatctcccacacgtgcggctggtaatttgcca

SEQ ID NO: 189794 - DNA, 50 bp, Artificial
  Synthetic oligonucleotide
acccaatcggcccgaaagggcatttgccgcaaccgtccaatcgtgcacgg

SEQ ID NO: 189795 - DNA, 50 bp, Artificial
  Synthetic oligonucleotide
aaaatgttctattcgttcgttgtcctgaatgcgttggttaaaatcgccca

SEQ ID NO: 189796 - DNA, 50 bp, Artificial
  Synthetic oligonucleotide
gaaggaaccccaaaatttgctaaggacacggcaacattaaattctccacc

SEQ ID NO: 189797 - DNA, 50 bp, Artificial
  Synthetic oligonucleotide
ctcacggagagccaggacaccgttgtgatatagccgtgggggctccgcta

SEQ ID NO: 189798 - DNA, 50 bp, Artificial
  Synthetic oligonucleotide
acaccttgttgggcggtcctacggaaagcgacaacttgggcgagcccgac

SEQ ID NO: 189799 - DNA, 50 bp, Artificial
  Synthetic oligonucleotide
aaacacactgatacccgaggcccaccacggaacacgaccgccgcccgtaa

SEQ ID NO: 189800 - DNA, 50 bp, Artificial
  Synthetic oligonucleotide
atagttgggccgccgtggtccggttagtacggacaatggaatgtcccccg

SEQ ID NO: 189801 - DNA, 50 bp, Artificial
  Synthetic oligonucleotide
gtagtgatagagccattcttagaccgcacggacttggtacaacgcgccat

SEQ ID NO: 189802 - DNA, 50 bp, Artificial
  Synthetic oligonucleotide
ccgtacattttaaccaaagggcttacgacgccctgaacacccacttgtcg

SEQ ID NO: 189803 - DNA, 50 bp, Artificial
  Synthetic oligonucleotide
ccggttttccggtttgtcctacgtgttcgctgtgcggacgccatcccata

SEQ ID NO: 189804 - DNA, 56 bp, Artificial
  Synthetic oligonucleotide
tagcatgagcttccacatgcgccaccaaatcgcgataggcatccgttgcaacttcg

SEQ ID NO: 189805 - DNA, 50 bp, Artificial
  Synthetic oligonucleotide
ccggcggcccagtgcgtttcctcatcggaatttaccagcacagtacccgg

SEQ ID NO: 189806 - DNA, 50 bp, Artificial
  Synthetic oligonucleotide
aagcagcccttgtgtcggcgtgggcaccgttacattatcggttgcactgg

SEQ ID NO: 189807 - DNA, 50 bp, Artificial
  Synthetic oligonucleotide
atcctctgggctcgcccaatgttggtttgccaggtgcggttgccagtata

SEQ ID NO: 189808 - DNA, 50 bp, Artificial
  Synthetic oligonucleotide
atcgaatcggagccggtgactgggactgcgcacgttccatattgcgccgt

SEQ ID NO: 189809 - DNA, 50 bp, Artificial
  Synthetic oligonucleotide
atcgcaagcagcgtgctcccggtacggcagaccaaaccgtagatgtcgta

SEQ ID NO: 189810 - DNA, 50 bp, Artificial
  Synthetic oligonucleotide
gtacatcacttggataccccttggcgacccagtgacctgcaacaaaggga

SEQ ID NO: 189811 - DNA, 50 bp, Artificial
  Synthetic oligonucleotide
ccgctttaacgctccgttggaagttaccgaccgcaacggggagcaactgc

SEQ ID NO: 189812 - DNA, 50 bp, Artificial
  Synthetic oligonucleotide
atcgcaggctttgcccctgactgccgacaagaggtgcgccaacgcttgtt

SEQ ID NO: 189813 - DNA, 50 bp, Artificial
  Synthetic oligonucleotide
atcgcagggggtagccagtccattcgcttcgggtgggatgccttacgcca

SEQ ID NO: 189814 - DNA, 50 bp, Artificial
  Synthetic oligonucleotide
atcgcccgcatagcagtccgtagcctgcaaggtaaggcttaccgtacgcg

SEQ ID NO: 189815 - DNA, 56 bp, Artificial
  Synthetic oligonucleotide
tagccgagcttcccgctgccaatccgtctataccatcagtaaggttcgcaccgtta

SEQ ID NO: 189816 - DNA, 50 bp, Artificial
  Synthetic oligonucleotide
aacaggacatcgtcatcccatacggcatctgcgtgcacccgacaacgggg

SEQ ID NO: 189817 - DNA, 50 bp, Artificial
  Synthetic oligonucleotide
atctgatggtgtgtcgtggcggaggtgtttgggtcagtcgtgacgggctt

SEQ ID NO: 189818 - DNA, 50 bp, Artificial
  Synthetic oligonucleotide
atgcgtttgttaagcgctgctgctgccatacgtcgcggtcgcgtaagtgc

SEQ ID NO: 189819 - DNA, 50 bp, Artificial
  Synthetic oligonucleotide
aacccgaacattcctgcagtctggcccgatggtagtcccggtcccgacat

SEQ ID NO: 189820 - DNA, 50 bp, Artificial
  Synthetic oligonucleotide
gctcggatccgaatggcgcggtctattggctcgcgcgaatgcttgtgggt

SEQ ID NO: 189821 - DNA, 50 bp, Artificial
  Synthetic oligonucleotide
aggtctgcgatttcatgggcgttggtaagggctcgtcccaagggtggagc

SEQ ID NO: 189822 - DNA, 50 bp, Artificial
  Synthetic oligonucleotide
aggtgcgccaacgcttgttagacttggggtttgtgcgcggcactaccatt

SEQ ID NO: 189823 - DNA, 50 bp, Artificial
  Synthetic oligonucleotide
aggttgtgccgaacgagcaagccctcaaccaatctaggggcagggtccga

SEQ ID NO: 189824 - DNA, 50 bp, Artificial
  Synthetic oligonucleotide
cctgtacaccgaatgaaaaccccgcaccccgcgcaatatcggcagaggct

SEQ ID NO: 189825 - DNA, 50 bp, Artificial
  Synthetic oligonucleotide
aaatgggctccttacccgggtcgccgctcaggtgggtatccgcggcatgg

SEQ ID NO: 189826 - DNA, 56 bp, Artificial
  Synthetic oligonucleotide
ccccgtctggaaattcctgcctacggatggtggaatgaggcacttcacggggtggc

SEQ ID NO: 189827 - DNA, 50 bp, Artificial
  Synthetic oligonucleotide
aggtttggataccaccgcttacctgcataggtcgtacggtgatggctttt

SEQ ID NO: 189828 - DNA, 50 bp, Artificial
  Synthetic oligonucleotide
agtccgcaacccaaccaaccgggaactccgtacaaggtgtctcccgctcc

SEQ ID NO: 189829 - DNA, 50 bp, Artificial
  Synthetic oligonucleotide
agtctctgtccgtaagtcgtccggctcgatcaggctgcggatggagtcat

SEQ ID NO: 189830 - DNA, 50 bp, Artificial
  Synthetic oligonucleotide
agtgcggccgaggcaggctcaagttgggcggagatagtggtttgggagcc

SEQ ID NO: 189831 - DNA, 50 bp, Artificial
  Synthetic oligonucleotide
gctgtttgtgtccttccgtctataatagtattcgaaccggttaattcagt

SEQ ID NO: 189832 - DNA, 50 bp, Artificial
  Synthetic oligonucleotide
aacgttcggcttcggttccgcttcactttggggccaccttgccccttgaa

SEQ ID NO: 189833 - DNA, 50 bp, Artificial
  Synthetic oligonucleotide
ccgttacggctgcgaatgggccggggctcacgtataactggtcgcccggt

SEQ ID NO: 189834 - DNA, 50 bp, Artificial
  Synthetic oligonucleotide
ataccgcggtaaccagacctgtagtcgcgttgaccgttgccacggacgtg

SEQ ID NO: 189835 - DNA, 50 bp, Artificial
  Synthetic oligonucleotide
ataccgcgtacaacaatgtcggctgcactggcggttaggtgggctgaacc

SEQ ID NO: 189836 - DNA, 50 bp, Artificial
  Synthetic oligonucleotide
atacggcatctgcgtgcacccgacaacgggggatgtctacgtgacggatg

SEQ ID NO: 189837 - DNA, 56 bp, Artificial
  Synthetic oligonucleotide
aatacaccgtggcacctattttcatgcagggcaacaagagcggtgggcacgagtgg

SEQ ID NO: 189838 - DNA, 50 bp, Artificial
  Synthetic oligonucleotide
atacgggtgaggccttggataacaaaacgccgctactcaaagcactgagt

SEQ ID NO: 189839 - DNA, 50 bp, Artificial
  Synthetic oligonucleotide
cagaaggttggcgccccaagcagagagcttcaaaatggcagggccgctca

SEQ ID NO: 189840 - DNA, 50 bp, Artificial
  Synthetic oligonucleotide
cccgaaaaggataccaccgccgggaaatttggttacagggcgggagcacc

SEQ ID NO: 189841 - DNA, 50 bp, Artificial
  Synthetic oligonucleotide
aactccgagtcccagtacaacggcctctccctgtatgccgtcggttccgg

SEQ ID NO: 189842 - DNA, 50 bp, Artificial
  Synthetic oligonucleotide
ggcagcggtacgcccaacggttgcagaccgtcgtcctttgattggaaagc

SEQ ID NO: 189843 - DNA, 50 bp, Artificial
  Synthetic oligonucleotide
ggcatgatgaccggccctcctatgggaccgatggttgggctttttggcat

SEQ ID NO: 189844 - DNA, 50 bp, Artificial
  Synthetic oligonucleotide
cccatattctacaatgtatgttcgcaggccatggactattagacaatatg

SEQ ID NO: 189845 - DNA, 50 bp, Artificial
  Synthetic oligonucleotide
cccagcggcagctccctgtcgtaaaggcagcagtcgggaagttgtttgta

SEQ ID NO: 189846 - DNA, 50 bp, Artificial
  Synthetic oligonucleotide
gggcgcggcagccattagcagcgcagacttgttagccaatcacgtggcgc

SEQ ID NO: 189847 - DNA, 50 bp, Artificial
  Synthetic oligonucleotide
ggccatctgggcaagtgacgccctgcaatacagtggaggcgcggttacct

SEQ ID NO: 189848 - DNA, 60 bp, Artificial
  Synthetic oligonucleotide
gagcaccgcaccatcttttacacgcgcttgactgcgttgcgatggaatactcgcttgctt

SEQ ID NO: 189849 - DNA, 56 bp, Artificial
  Synthetic oligonucleotide
aggctgatgaccctccgcacccatatcgccctacagcgccgtatgattgatgccct

SEQ ID NO: 189850 - DNA, 50 bp, Artificial
  Synthetic oligonucleotide
cagtggggttggcatgcacgttatgcaggggatgacaatactttaggtac

SEQ ID NO: 189851 - DNA, 50 bp, Artificial
  Synthetic oligonucleotide
ccagttgcaagcacaaatccctgcagattacccagagcaggtaaaaccct

SEQ ID NO: 189852 - DNA, 50 bp, Artificial
  Synthetic oligonucleotide
ggccgttctctgcgtaaaagtttaacaaatcacgaagccagtccggttca

SEQ ID NO: 189853 - DNA, 50 bp, Artificial
  Synthetic oligonucleotide
aactgcggaagcgggttctaaggttaccgtggtcgttggtggggccacct

SEQ ID NO: 189854 - DNA, 50 bp, Artificial
  Synthetic oligonucleotide
ccacggccacttttctggcagcggctccgttaagggtcagctctccggaa

SEQ ID NO: 189855 - DNA, 50 bp, Artificial
  Synthetic oligonucleotide
ccaaaggcaggacctacgtttcctagcgcagaggctgcgcctccaagtgc

SEQ ID NO: 189856 - DNA, 50 bp, Artificial
  Synthetic oligonucleotide
ccaactccattagctgctacaatgatgcgagcaccaatgagtcgtatgga

SEQ ID NO: 189857 - DNA, 50 bp, Artificial
  Synthetic oligonucleotide
aagattgcgggccggtgtaccgtgtaaccactgtgcggtaaggcttccgg

SEQ ID NO: 189858 - DNA, 49 bp, Artificial
  Synthetic oligonucleotide
aaccccggtgccccgtagaaaaccggcttccgttcaacaagcgggtagc

SEQ ID NO: 189859 - DNA, 50 bp, Artificial
  Synthetic oligonucleotide
aacccactgcggtccgggcagaaagcctcgattcaaccctggtccatacg

SEQ ID NO: 189860 - DNA, 55 bp, Artificial
  Synthetic oligonucleotide
gcgtggaaatagaacgccaatttctgaacagattagaaggcggttgtacagcacc

SEQ ID NO: 189861 - DNA, 50 bp, Artificial
  Synthetic oligonucleotide
ggacgccatcccatatcggacactggtttggaacaagccgttgcggctcc

SEQ ID NO: 189862 - DNA, 50 bp, Artificial
  Synthetic oligonucleotide
aactccagggcggaacaaaacgcggtcggtgccattgttaaagccccgac

SEQ ID NO: 189863 - DNA, 50 bp, Artificial
  Synthetic oligonucleotide
ccgagaggccctgacctaatgagccggaagctacccgaacgcccggaaga

SEQ ID NO: 189864 - DNA, 50 bp, Artificial
  Synthetic oligonucleotide
attggctcgtgggtatcaacggtacgcaggctttgaccgtcgctgccggg

SEQ ID NO: 189865 - DNA, 50 bp, Artificial
  Synthetic oligonucleotide
caaacacgcaggaacggtgcaggcggcaactgccgaaatggcattgcaaa

SEQ ID NO: 189866 - DNA, 50 bp, Artificial
  Synthetic oligonucleotide
caaacggtgtaaactgcggattgtagcccgcatcgccataagcggcgccc

SEQ ID NO: 189867 - DNA, 50 bp, Artificial
  Synthetic oligonucleotide
aacatcatttcccgggggcccgtcacccagcgtaccgcctacgaagtgat

SEQ ID NO: 189868 - DNA, 50 bp, Artificial
  Synthetic oligonucleotide
ggtaggtttgccacttctacggtttctctagcaggtgctgttgcctcgtt

SEQ ID NO: 189869 - DNA, 50 bp, Artificial
  Synthetic oligonucleotide
ccctcgggagacttccaccacctgtgcctccgtggtctccgatttggcac

SEQ ID NO: 189870 - DNA, 50 bp, Artificial
  Synthetic oligonucleotide
aacatagaccccggggagcacctgtccgctgtaatctcgtgctgtccccg

SEQ ID NO: 189871 - DNA, 55 bp, Artificial
  Synthetic oligonucleotide
cgggaactatcttgtaaccgccgtaggagctaatggctgtgagtcgtcaagaagc

SEQ ID NO: 189872 - DNA, 50 bp, Artificial
  Synthetic oligonucleotide
gggttgacatggacccgaattgacgatggagccccgggcgacctattcgg

SEQ ID NO: 189873 - DNA, 50 bp, Artificial
  Synthetic oligonucleotide
caccacctgtgcctccgtggtctccgatttggcaccggtccccacttgcc

SEQ ID NO: 189874 - DNA, 50 bp, Artificial
  Synthetic oligonucleotide
cacgcgggaggattacgaagaacggtgtgcgagcccttttggccgatgta

SEQ ID NO: 189875 - DNA, 50 bp, Artificial
  Synthetic oligonucleotide
cccgctgatgtggtgacctgtgcgaggtaatagccggagcgcaagcctct

SEQ ID NO: 189876 - DNA, 50 bp, Artificial
  Synthetic oligonucleotide
cactaagctcccgcggcgctccgaagaccagtccaacacgggtaagcaaa

SEQ ID NO: 189877 - DNA, 50 bp, Artificial
  Synthetic oligonucleotide
aaagcgtcatgctcgcagtgaggttggcactcgcagtggtgatccccgca

SEQ ID NO: 189878 - DNA, 50 bp, Artificial
  Synthetic oligonucleotide
tagatctcgagagtttcgtggtagatggggctagacttgtaatgcacgat

SEQ ID NO: 189879 - DNA, 50 bp, Artificial
  Synthetic oligonucleotide
agaaccagcgtgccacgaccgaccgcaagcgagtggtgaacctgacgcgt

SEQ ID NO: 189880 - DNA, 50 bp, Artificial
  Synthetic oligonucleotide
aaccgcgctaccagggcgagcttgtactcccgttgccagctgcccttaat

SEQ ID NO: 189881 - DNA, 50 bp, Artificial
  Synthetic oligonucleotide
aacgttaaccgaacaactcgtttactatatcctcgattcttgcgacaagc

SEQ ID NO: 189882 - DNA, 55 bp, Artificial
  Synthetic oligonucleotide
gcgtcgtgaatagttagcgcatcttctgtgtcgcgcgttaaaatacgcatccacg

SEQ ID NO: 189883 - DNA, 50 bp, Artificial
  Synthetic oligonucleotide
cgcgcttgtgttacggtcgtgcggttggactcaatggcaatgctgcggaa

SEQ ID NO: 189884 - DNA, 50 bp, Artificial
  Synthetic oligonucleotide
aaggcatcagcgtctacggggcgcaagtctcccggataccccggggaatt

SEQ ID NO: 189885 - DNA, 50 bp, Artificial
  Synthetic oligonucleotide
aaaggacggcccttgcaatacggacggggcggtacacaaatgttgctcga

SEQ ID NO: 189886 - DNA, 50 bp, Artificial
  Synthetic oligonucleotide
gcgattcacccgacaccgccaatgccccagcacaatcctatgtcaaccga

SEQ ID NO: 189887 - DNA, 50 bp, Artificial
  Synthetic oligonucleotide
cgcgctaccgcctacagacccgggggtcgcatttcgtatgcaacagcaaa

SEQ ID NO: 189888 - DNA, 50 bp, Artificial
  Synthetic oligonucleotide
gcgcaagatgttcgggtttggccagaagctggttacggttgggcacctgc

SEQ ID NO: 189889 - DNA, 49 bp, Artificial
  Synthetic oligonucleotide
aaaggcgtagagcccgtaccgttcccctccaacgggataatggccgggg

SEQ ID NO: 189890 - DNA, 50 bp, Artificial
  Synthetic oligonucleotide
agatctaggccgtgactggccaaatcgtcaaaatacccgcccggggccac

SEQ ID NO: 189891 - DNA, 50 bp, Artificial
  Synthetic oligonucleotide
tacctatttggaccaaccgatgggctgcacgggacacacctcttgccccg

SEQ ID NO: 189892 - DNA, 50 bp, Artificial
  Synthetic oligonucleotide
aaagggcattgtctggacggcactggcatacaaggtatggtcgggccgca

SEQ ID NO: 189893 - DNA, 55 bp, Artificial
  Synthetic oligonucleotide
gcgtccgagcgcagcactagtgacgtcttcgatgtttgtcacgccggtcgcatcc

SEQ ID NO: 189894 - DNA, 50 bp, Artificial
  Synthetic oligonucleotide
agatgctaagcataccgcgaggtgcgatagccccagggtgagtagcccca

SEQ ID NO: 189895 - DNA, 50 bp, Artificial
  Synthetic oligonucleotide
tatggcggcagcttttaatacgcctgtaggtgcgtccagcccaggaccaa

SEQ ID NO: 189896 - DNA, 50 bp, Artificial
  Synthetic oligonucleotide
acgggcaccgatacgcaaacgggggccttcggcctggttgtatccaaaaa

SEQ ID NO: 189897 - DNA, 50 bp, Artificial
  Synthetic oligonucleotide
gccgtacccgtccacagtgcaatagcagccgtaacctgattcgcccagga

SEQ ID NO: 189898 - DNA, 50 bp, Artificial
  Synthetic oligonucleotide
cggttatgcgctcctttgagaccagcagccatcgccatacccagtgcagc

SEQ ID NO: 189899 - DNA, 50 bp, Artificial
  Synthetic oligonucleotide
gccgtccagtctgtcgataaaattcagagcgtcgggatagtcttgccaag

SEQ ID NO: 189900 - DNA, 50 bp, Artificial
  Synthetic oligonucleotide
actaccgctatgagtccgcacagtgttgccaccatacgcgcgggctacga

SEQ ID NO: 189901 - DNA, 50 bp, Artificial
  Synthetic oligonucleotide
aacgggcctggctatgggtccccaccttgtattttacacagggcctcccc

SEQ ID NO: 189902 - DNA, 50 bp, Artificial
  Synthetic oligonucleotide
actcaccgccagccacgacccaagtgatgtgctcccctttgcggagcgca

SEQ ID NO: 189903 - DNA, 50 bp, Artificial
  Synthetic oligonucleotide
actcacgcccgttgggattccgttattacccgcctcaccgtagctcgcgc

SEQ ID NO: 189904 - DNA, 55 bp, Artificial
  Synthetic oligonucleotide
cggctattactgccccgaaatgtcgagcaaagagattgcaggcgctactattagc

SEQ ID NO: 189905 - DNA, 50 bp, Artificial
  Synthetic oligonucleotide
actcatgggcctactggccgcttccggacggtcattgtactgccggggaa

SEQ ID NO: 189906 - DNA, 50 bp, Artificial
  Synthetic oligonucleotide
actgccagccgtttcagccagcgcaagagtagccccgccgtgtagcacgc

SEQ ID NO: 189907 - DNA, 50 bp, Artificial
  Synthetic oligonucleotide
tagtcgaagcaccgctacagctacgctggcgcacttctacggcaaccaca

SEQ ID NO: 189908 - DNA, 50 bp, Artificial
  Synthetic oligonucleotide
cgggtggccggcaatcgtttttagtggatggccagatgcctctttcggga

SEQ ID NO: 189909 - DNA, 50 bp, Artificial
  Synthetic oligonucleotide
tagccgcggagagaattacggccaaaaggagaccgatcagccccatgggc

SEQ ID NO: 189910 - DNA, 50 bp, Artificial
  Synthetic oligonucleotide
actgggacggaatttttggtccacgggaggtgtggccccgggaggattgg

SEQ ID NO: 189911 - DNA, 50 bp, Artificial
  Synthetic oligonucleotide
cgggcagtttgagtatgacgaactcgcgccatcgcaacagggcaatgcct

SEQ ID NO: 189912 - DNA, 50 bp, Artificial
  Synthetic oligonucleotide
aacgtgctgctcgaatcgacggtttcccaggtggggcgtggggccgagaa

SEQ ID NO: 189913 - DNA, 50 bp, Artificial
  Synthetic oligonucleotide
acttccgagtgccatccggtaagcgcccacgagcttctttgggcccgcat

SEQ ID NO: 189914 - DNA, 50 bp, Artificial
  Synthetic oligonucleotide
agcgggggttgggtacgctgaagtagggatcccgtcgagatcacacgcta

SEQ ID NO: 189915 - DNA, 55 bp, Artificial
  Synthetic oligonucleotide
cgattgcagtaagtgatattgtatcaactgaccccgtaagtggcgcaacagtaga

SEQ ID NO: 189916 - DNA, 50 bp, Artificial
  Synthetic oligonucleotide
aaggaacccaagtgggcacagtgggtcgaattaaggccgagcctggtgct

SEQ ID NO: 189917 - DNA, 50 bp, Artificial
  Synthetic oligonucleotide
agctccgcactgttccaccgcacttcacatcctgcatgcggacaggtact

SEQ ID NO: 189918 - DNA, 50 bp, Artificial
  Synthetic oligonucleotide
agctgccgtcacacccaagtccaactgcacccgcccgaacaacttccggt

SEQ ID NO: 189919 - DNA, 50 bp, Artificial
  Synthetic oligonucleotide
cgatgctccatttgggatagcaccggtaggcttgcaaggattaatgtggc

SEQ ID NO: 189920 - DNA, 50 bp, Artificial
  Synthetic oligonucleotide
aggccagcttccttaccgtcagggcgcattggtcagcagttctatcccgc

SEQ ID NO: 189921 - DNA, 50 bp, Artificial
  Synthetic oligonucleotide
cgagcttcgtgtgcctgccggacatccattgttgtctgcggctcccggta

SEQ ID NO: 189922 - DNA, 50 bp, Artificial
  Synthetic oligonucleotide
aggccccgggtctggatacaacaaaattggtctagcgaccatccgggcga

SEQ ID NO: 189923 - DNA, 50 bp, Artificial
  Synthetic oligonucleotide
gttaggtcgttccaaacatcggtgtacttcattacggcatttcggcacgc

SEQ ID NO: 189924 - DNA, 50 bp, Artificial
  Synthetic oligonucleotide
aggcccgtgcagctcccaacagatcggaatggacttcggccgtagagcgg

SEQ ID NO: 189925 - DNA, 50 bp, Artificial
  Synthetic oligonucleotide
aggcgcgtacgctccccagcaaagtccgccaactgatacggagctccctg

SEQ ID NO: 189926 - DNA, 55 bp, Artificial
  Synthetic oligonucleotide
gccttgctattggattaatcaacactccgaaagcccctgtattatgatagtattc

SEQ ID NO: 189927 - DNA, 50 bp, Artificial
  Synthetic oligonucleotide
cgaatggcgcggtctattggctcgcgcgaatgcttgtgggtggcgaagat

SEQ ID NO: 189928 - DNA, 50 bp, Artificial
  Synthetic oligonucleotide
agggcagtgctcccattcggtatgggtagcctcatcgccgcctacgtgta

SEQ ID NO: 189929 - DNA, 50 bp, Artificial
  Synthetic oligonucleotide
agggcatatgcagcgtggaggggcgccatcttgttacgacagggtcttgg

SEQ ID NO: 189930 - DNA, 50 bp, Artificial
  Synthetic oligonucleotide
agggcgaatctgcctgagggggttatccgtttggctcctttggcgcgtac

SEQ ID NO: 189931 - DNA, 50 bp, Artificial
  Synthetic oligonucleotide
aagctgggaggcaaatagtttgtcgcgggattgcgtaatggcctcggcgg

SEQ ID NO: 189932 - DNA, 50 bp, Artificial
  Synthetic oligonucleotide
agggtcagcaccgcaattgtggaacctttctttagttggcgggccgtgcc

SEQ ID NO: 189933 - DNA, 50 bp, Artificial
  Synthetic oligonucleotide
aagctgccagtagctgcctgcgaggggtaatgcgaagctggggcacttca

SEQ ID NO: 189934 - DNA, 50 bp, Artificial
  Synthetic oligonucleotide
cgcgaatcctcacgtctgcctgcgatcctggttgccccgaattcaccaca

SEQ ID NO: 189935 - DNA, 50 bp, Artificial
  Synthetic oligonucleotide
agcaatgcccagccctccggtagcggcacaaaccatgaccggtttgtttc

SEQ ID NO: 189936 - DNA, 50 bp, Artificial
  Synthetic oligonucleotide
cgcctacagaagtcaaatgaaagcaaccaaagcacaagaatctggacgat

SEQ ID NO: 189937 - DNA, 55 bp, Artificial
  Synthetic oligonucleotide
cggcgcgttctcccataccgtttacagttaggtgcaagccatggcatcctgctct

SEQ ID NO: 189938 - DNA, 50 bp, Artificial
  Synthetic oligonucleotide
agcacctcataggtagcctgggtatcggcctccgcactatgcgcatcggt

SEQ ID NO: 189939 - DNA, 50 bp, Artificial
  Synthetic oligonucleotide
aacccttggtcggtagggcgcatgggagcattgtcgcctaagtgccactt

SEQ ID NO: 189940 - DNA, 50 bp, Artificial
  Synthetic oligonucleotide
agcacctgtaccgagggcgtcttcgtgtgaaccattggcaccgcagggga

SEQ ID NO: 189941 - DNA, 50 bp, Artificial
  Synthetic oligonucleotide
cgcccggaagaccctcatgtgtagtcgggtggccctgaagtctggagtcg

SEQ ID NO: 189942 - DNA, 50 bp, Artificial
  Synthetic oligonucleotide
gcggaggcgccggttgcattagccgtctgaaactcacggtctttgtacgc

SEQ ID NO: 189943 - DNA, 50 bp, Artificial
  Synthetic oligonucleotide
agcagtgcggcggcaaatatgcccttgatccccacggggaggagttcatt

SEQ ID NO: 189944 - DNA, 50 bp, Artificial
  Synthetic oligonucleotide
taatgcagattccattgggccggtaatggtagggttgacccgtgccgccc

SEQ ID NO: 189945 - DNA, 50 bp, Artificial
  Synthetic oligonucleotide
agcatagccctgctaggtacgcaagtggccccggaaaatgcgcccatcaa

SEQ ID NO: 189946 - DNA, 50 bp, Artificial
  Synthetic oligonucleotide
cgcactctaacggcgcctgagctagcatagtaaaagggcaggccacgcgg

SEQ ID NO: 189947 - DNA, 50 bp, Artificial
  Synthetic oligonucleotide
gcggtacaaattcggtgtaggcctgttttgcacggtcttcgggcgtcgga

SEQ ID NO: 189948 - DNA, 55 bp, Artificial
  Synthetic oligonucleotide
cgcaaattagatgagcacaccgccatagacgaggagacaaacactcaatatccgc

SEQ ID NO: 189949 - DNA, 50 bp, Artificial
  Synthetic oligonucleotide
gcgtacgacatcagttgcttgtggccctgcgtaacgccccaccacgagtc

SEQ ID NO: 189950 - DNA, 50 bp, Artificial
  Synthetic oligonucleotide
agcctccccaaacgttccggggtcccacgatgcatggaccgatgagatcc

SEQ ID NO: 189951 - DNA, 50 bp, Artificial
  Synthetic oligonucleotide
aacccggtctgcatcccctcagcgggttccctttacgcggctctgcaaat

SEQ ID NO: 189952 - DNA, 50 bp, Artificial
  Synthetic oligonucleotide
agcgaagatggcagaatcgttcggctcaaggatgtggggcgtgtcgagct

SEQ ID NO: 189953 - DNA, 50 bp, Artificial
  Synthetic oligonucleotide
agcgccgctacacagctcataacgaccccgtaccacgtagcccttcccac

SEQ ID NO: 189954 - DNA, 60 bp, Artificial
  Synthetic oligonucleotide
gaggcttggtatgctcccgatattccagttccatatggccctgccggctatggtggcttg

SEQ ID NO: 189955 - DNA, 55 bp, Artificial
  Synthetic oligonucleotide
cggcctgactataatcgcctatcgaatcccaaccggtatcgggtccgagttgcgc

SEQ ID NO: 189956 - DNA, 55 bp, Artificial
  Synthetic oligonucleotide
cgcaacaattgcaagctctactctacgattcttagaacgaccatcggcagtggta

SEQ ID NO: 189957 - DNA, 55 bp, Artificial
  Synthetic oligonucleotide
cgcaagatcgggtacctatacgctggcgaatgttacggcactagaaggttatatg

SEQ ID NO: 189958 - DNA, 55 bp, Artificial
  Synthetic oligonucleotide
gcggtgctcgttcattagtgcctcccggataggaaaattggactgactgtttaga

SEQ ID NO: 189959 - DNA, 55 bp, Artificial
  Synthetic oligonucleotide
gcgtggaggcttgggtgtcgcttcgtcggaagtagagaacatctataaacaagcc

SEQ ID NO: 189960 - DNA, 55 bp, Artificial
  Synthetic oligonucleotide
cgatcatattggtgcgtaaccaagaaggaatttcgattgatttattggccatcgt

SEQ ID NO: 189961 - DNA, 55 bp, Artificial
  Synthetic oligonucleotide
cgatagcactgttcctaggattaactcagcgacacgctacgaagttcgattcggc

SEQ ID NO: 189962 - DNA, 53 bp, Artificial
  Synthetic oligonucleotide
gctaaactccgctgccgaggtaaacggggtggaattacagttttggatccaac

SEQ ID NO: 189963 - DNA, 55 bp, Artificial
  Synthetic oligonucleotide
cgagtctggaccagatgcccttgcctcacttaccatagagcaagcaacacaactt

SEQ ID NO: 189964 - DNA, 55 bp, Artificial
  Synthetic oligonucleotide
cgagtatgtctcgtgtagtgtttcggctatcgtaaccactgccattgttaccgcc

SEQ ID NO: 189965 - DNA, 60 bp, Artificial
  Synthetic oligonucleotide
gatttagaagtcataagtcttaatattactgctgaatacttgagtattgatagcgaatta

SEQ ID NO: 189966 - DNA, 55 bp, Artificial
  Synthetic oligonucleotide
cgggaagaggaatccgacctacagcttatagcacagacatgagcgtaaaccctgc

SEQ ID NO: 189967 - DNA, 55 bp, Artificial
  Synthetic oligonucleotide
gctaacacgcataccgaaacaacagtatctggtacagcaatgacgaatgcttacc

SEQ ID NO: 189968 - DNA, 55 bp, Artificial
  Synthetic oligonucleotide
cgggagatacctatgatatgatccttaccttaagcgatttgaatgctccaggggt

SEQ ID NO: 189969 - DNA, 55 bp, Artificial
  Synthetic oligonucleotide
gcctgtaacattgtctaatgcaggaatggtgaacgtgaatgaaaaggtcaggtgt

SEQ ID NO: 189970 - DNA, 55 bp, Artificial
  Synthetic oligonucleotide
gctaccattccgtttaatgcggttcccggttcagaagatcgaatgggatatgagc

SEQ ID NO: 189971 - DNA, 55 bp, Artificial
  Synthetic oligonucleotide
gctaccctctgcgtggcttacgggagtgcgtgttaagtcactatcaccagagtct

SEQ ID NO: 189972 - DNA, 55 bp, Artificial
  Synthetic oligonucleotide
cgagcatctaccatgatgtttctacagatttcagggctgtagtagatgtcgctca

SEQ ID NO: 189973 - DNA, 55 bp, Artificial
  Synthetic oligonucleotide
cgggcatcccgttttgcttagctcgaagcccgaccaaaggcaagaggaagacgac

SEQ ID NO: 189974 - DNA, 55 bp, Artificial
  Synthetic oligonucleotide
cgcgcaacataaaccattaatacaacggatgccaacgtagaggtttgaaacgaca

SEQ ID NO: 189975 - DNA, 55 bp, Artificial
  Synthetic oligonucleotide
gcgattcgcgtagtgcctcgcccgagatacccataggtttatagaaaccccttga

SEQ ID NO: 189976 - DNA, 57 bp, Artificial
  Synthetic oligonucleotide
gccgctccgtcggctcgaactgggggagtgcgagggggtcgcaccctcgcaccgcgc

SEQ ID NO: 189977 - DNA, 55 bp, Artificial
  Synthetic oligonucleotide
gcgcaatcttcgcgcgtggagcttgtgacgacaaaggtcagatgtacatgcacgt

SEQ ID NO: 189978 - DNA, 55 bp, Artificial
  Synthetic oligonucleotide
gcgatggtatgcttaccgttacagttgtactgctagttactcctactgttaccgg

SEQ ID NO: 189979 - DNA, 54 bp, Artificial
  Synthetic oligonucleotide
cgcggtagctaaaagtttgtcggtagttttgccaaacgcagacacaataacgac

SEQ ID NO: 189980 - DNA, 55 bp, Artificial
  Synthetic oligonucleotide
cgcggtgactcgccttgagggatcgtactttaatgtgatgggtatgcccctgcac

SEQ ID NO: 189981 - DNA, 55 bp, Artificial
  Synthetic oligonucleotide
gcgcatatcacctttggcaacctcatctactgtttggaaaacggtaagatctgga

SEQ ID NO: 189982 - DNA, 55 bp, Artificial
  Synthetic oligonucleotide
cgcgtatgcttacaatgaagatggcttacggcggtagttgtactgcgcctacgat

SEQ ID NO: 189983 - DNA, 54 bp, Artificial
  Synthetic oligonucleotide
cgccggaggaatcgttacgggccttgcattacttttacagtcataaggaccggc

SEQ ID NO: 189984 - DNA, 55 bp, Artificial
  Synthetic oligonucleotide
cgcgtgatgagtttgcttttacaatacaacttgcctatctatcacggcggttggc

SEQ ID NO: 189985 - DNA, 55 bp, Artificial
  Synthetic oligonucleotide
gcgatgctcgatgctcctcggcgctcgtaaagtgccgctcataccggatcactcg

SEQ ID NO: 189986 - DNA, 55 bp, Artificial
  Synthetic oligonucleotide
gcgccacatcttgtatggtatagaaaccatctacatcaacgtggtctagacgtgc

SEQ ID NO: 189987 - DNA, 54 bp, Artificial
  Synthetic oligonucleotide
gccttccctaataggcgctacgtaaaaacctgacgcccgtgcaccaaaaggcat

SEQ ID NO: 189988 - DNA, 51 bp, Artificial
  Synthetic oligonucleotide
cgcccggcaatacattcgggacgtgggtagaaaatacggacgtaacggaag

SEQ ID NO: 189989 - DNA, 55 bp, Artificial
  Synthetic oligonucleotide
gcgcgcctaaatgtagctagtggtgtagtgccttacgtacaaataggtgctggct

SEQ ID NO: 189990 - DNA, 55 bp, Artificial
  Synthetic oligonucleotide
cgccatagtttgtggtagatatctacgttgtgcaggatctaaccaatactcgcga

SEQ ID NO: 189991 - DNA, 54 bp, Artificial
  Synthetic oligonucleotide
gcgctaaaattacttgccggcaccagtttgaaataggaatgtccccaaagtccc

SEQ ID NO: 189992 - DNA, 54 bp, Artificial
  Synthetic oligonucleotide
cggaacaaataccgaaaatccactaacaccaaaacatcgcattaactctgtact

SEQ ID NO: 189993 - DNA, 55 bp, Artificial
  Synthetic oligonucleotide
gcgatacgcgtatgcttacaatgaagatggcttacggcggtagttgtactgcgcc

SEQ ID NO: 189994 - DNA, 55 bp, Artificial
  Synthetic oligonucleotide
cggaacatacactcctgcaaggtggcctatgtgtataggtccgttagtatacggc

SEQ ID NO: 189995 - DNA, 55 bp, Artificial
  Synthetic oligonucleotide
gcgaaactgcaggtctctctgccgtaattgtcacctcgcttaattgactttcacc

SEQ ID NO: 189996 - DNA, 55 bp, Artificial
  Synthetic oligonucleotide
cgcagggtaaaattcattgcgttcattcccacactctcgtgactctctgccgaaa

SEQ ID NO: 189997 - DNA, 54 bp, Artificial
  Synthetic oligonucleotide
cgcagatggttttcgatgccggtttaaaggttcacaggaatcttgggccgggat

SEQ ID NO: 189998 - DNA, 60 bp, Artificial
  Synthetic oligonucleotide
gcgatgaaattctgcggtatgcaattggaggatagtgttccaagttacagtgttttaagc

SEQ ID NO: 189999 - DNA, 55 bp, Artificial
  Synthetic oligonucleotide
cggagaatggttcaaaattgtttcatcgcatggtgggcaaaacaatgccaatacg

SEQ ID NO: 190000 - DNA, 55 bp, Artificial
  Synthetic oligonucleotide
cggagtcgccaccatgtgtccatggtccgtcgggagaatctgcataggaaaccga

SEQ ID NO: 190001 - DNA, 55 bp, Artificial
  Synthetic oligonucleotide
cggcaataggagcggctgtagatagtgagacagacacccaacaatttatgttgcc

SEQ ID NO: 190002 - DNA, 55 bp, Artificial
  Synthetic oligonucleotide
cggcacttagcctatttgatgacaatcgcgacagtacggaaataaacgtacaaca

SEQ ID NO: 190003 - DNA, 55 bp, Artificial
  Synthetic oligonucleotide
gcggcgcactaactcttcggtatcacgcactgataggttatcggaaatgatacgc

SEQ ID NO: 190004 - DNA, 54 bp, Artificial
  Synthetic oligonucleotide
gcgggaggttcgcgtccgttgatttacgcaacctttaaaaccattgtagatgag

SEQ ID NO: 190005 - DNA, 54 bp, Artificial
  Synthetic oligonucleotide
cggcctgaaccaagtggctaaccgaggtataagtagggtatcctggattgggta

SEQ ID NO: 190006 - DNA, 52 bp, Artificial
  Synthetic oligonucleotide
ccgagaatataacccttgttttattacctttcaacggctcaggctttcctat

SEQ ID NO: 190007 - DNA, 53 bp, Artificial
  Synthetic oligonucleotide
ggacggcacataccataaagcgtattttcagaacggaaccttaaaggccgaag

SEQ ID NO: 190008 - DNA, 53 bp, Artificial
  Synthetic oligonucleotide
ccgattttctggggcttccgttcatttatgttaggcccgagcccaagtcccac

SEQ ID NO: 190009 - DNA, 59 bp, Artificial
  Synthetic oligonucleotide
acacgcagtatgttctttaaatggtgtgattaagaattttgatataagccctgcatccg

SEQ ID NO: 190010 - DNA, 55 bp, Artificial
  Synthetic oligonucleotide
ccgccaacgctttgtgtaaggtgcctatcccaaagggtatgcactataatccgtg

SEQ ID NO: 190011 - DNA, 55 bp, Artificial
  Synthetic oligonucleotide
ccgccaattccgtcggcgccagccaaagtaacaaatccaacgcccgttagcgctg

SEQ ID NO: 190012 - DNA, 55 bp, Artificial
  Synthetic oligonucleotide
ccgccacgtatcagggcgtacaggcaaatatcgattattccgtaatcagggcgcc

SEQ ID NO: 190013 - DNA, 55 bp, Artificial
  Synthetic oligonucleotide
ccgccatggtaacattgacggtggagcgaccgtttacgggcacgttctgcgtaac

SEQ ID NO: 190014 - DNA, 55 bp, Artificial
  Synthetic oligonucleotide
ggacattccgccttttcttatcgcaagtacgctgaacatgagtgtggcgcaacga

SEQ ID NO: 190015 - DNA, 55 bp, Artificial
  Synthetic oligonucleotide
ggacaaccttcttgtggggtatcagcgcctatcgaatttggcgatacgcgtatgc

SEQ ID NO: 190016 - DNA, 55 bp, Artificial
  Synthetic oligonucleotide
ccgcgtctgcatatacattaaaccagcgccagacgtgcgaatccacattcaccgc

SEQ ID NO: 190017 - DNA, 54 bp, Artificial
  Synthetic oligonucleotide
ggacaaagccccttagagtttactgaacgctttaaaacagacttagattgcgaa

SEQ ID NO: 190018 - DNA, 55 bp, Artificial
  Synthetic oligonucleotide
ccgctatgcaatttgaaagtgtttacgcaatgcggttctatgagcttatgagcgg

SEQ ID NO: 190019 - DNA, 55 bp, Artificial
  Synthetic oligonucleotide
ggaagtttgcactgcgtaggtatgtgtgggcccatagcctttatgttaccagtag

SEQ ID NO: 190020 - DNA, 58 bp, Artificial
  Synthetic oligonucleotide
agacgggcgagagcgtcgcgtcaaggaaggccgcgcagcggccgaccggacggatgcg

SEQ ID NO: 190021 - DNA, 55 bp, Artificial
  Synthetic oligonucleotide
ggaagcacgaccaacgtgagcagcgtagctgtaagcattccaccgataactaccg

SEQ ID NO: 190022 - DNA, 54 bp, Artificial
  Synthetic oligonucleotide
ggaacggacggacaacctatagacgtttggcgtttaatgccacaaactagattg

SEQ ID NO: 190023 - DNA, 55 bp, Artificial
  Synthetic oligonucleotide
ccgctttgcaggagacactacaagcagagttttcgaagacaaaacacctactgcc

SEQ ID NO: 190024 - DNA, 55 bp, Artificial
  Synthetic oligonucleotide
ccggacaatctcagggtgctttcagcgtaggtactaatgtactacaatttgagac

SEQ ID NO: 190025 - DNA, 55 bp, Artificial
  Synthetic oligonucleotide
gctttcgcgaattaagatcaggattttacgagccacgtcgattccgcttaagtcg

SEQ ID NO: 190026 - DNA, 55 bp, Artificial
  Synthetic oligonucleotide
ccggctccgcctggaaatccattacacggaaatcgacccctgaggatataccaat

SEQ ID NO: 190027 - DNA, 55 bp, Artificial
  Synthetic oligonucleotide
ccgggccgtccgtcataattcaagatatcggcatggataaatctgagctctaccg

SEQ ID NO: 190028 - DNA, 55 bp, Artificial
  Synthetic oligonucleotide
ccccttgcagttcgctgtgtacatcttctgaatagaagaaaggcgctctaaaacc

SEQ ID NO: 190029 - DNA, 54 bp, Artificial
  Synthetic oligonucleotide
cccctttgttaagcgttgcaataagaggggtagcttggtcgaggataacgtcta

SEQ ID NO: 190030 - DNA, 55 bp, Artificial
  Synthetic oligonucleotide
cccgaagggtagcatgcaatcataaatccctcggttcagaatagatgctggaagc

SEQ ID NO: 190031 - DNA, 51 bp, Artificial
  Synthetic oligonucleotide
cctgaaagttttgaacaactttggttattttctcgtgtgaaatatttaaaa

SEQ ID NO: 190032 - DNA, 55 bp, Artificial
  Synthetic oligonucleotide
agcagacaagacaaaaacggttacagtattctcgttaattctataaacgatacga

SEQ ID NO: 190033 - DNA, 55 bp, Artificial
  Synthetic oligonucleotide
ggatgagagacctataaacagggttcttcttgtcatactcgagattgacccctcg

SEQ ID NO: 190034 - DNA, 55 bp, Artificial
  Synthetic oligonucleotide
cccgacgactttattataagtgtatggcgcatatagacagcgaatggggcttgcg

SEQ ID NO: 190035 - DNA, 51 bp, Artificial
  Synthetic oligonucleotide
cccgatcttaaaacctccccagtcttcgggatcacccgatttaaattctcg

SEQ ID NO: 190036 - DNA, 55 bp, Artificial
  Synthetic oligonucleotide
cccgctcccgaagatttatatcatgttgggacgcttgctaaaatcttgcgaatga

SEQ ID NO: 190037 - DNA, 55 bp, Artificial
  Synthetic oligonucleotide
ggagtgaactgggtacaggcaacacaattcagttcttggcgtaccaaccgtgtaa

SEQ ID NO: 190038 - DNA, 55 bp, Artificial
  Synthetic oligonucleotide
ggaggttgcaattagcattggagggtgtaggaaatagtgcctctgtacgagtcgt

SEQ ID NO: 190039 - DNA, 55 bp, Artificial
  Synthetic oligonucleotide
cccgttatgggccatctcggacttacgccgcagtcgatttatcagttcggcacgt

SEQ ID NO: 190040 - DNA, 55 bp, Artificial
  Synthetic oligonucleotide
ccctaatcagttggttacccaaaccttaggcagtatgcacgccccttatatggac

SEQ ID NO: 190041 - DNA, 55 bp, Artificial
  Synthetic oligonucleotide
ccctacggttcctatgatatcaccaaggtcgtacacaggttcgaccatagcggac

SEQ ID NO: 190042 - DNA, 55 bp, Artificial
  Synthetic oligonucleotide
ggaggatcgcatcgaagcaatccgagtgctcgctgaggcgcggaacgaactcgat

SEQ ID NO: 190043 - DNA, 57 bp, Artificial
  Synthetic oligonucleotide
agcgaccgcacatggagtaataacggaattgtctggacagcaaccaacgcccgtacc

SEQ ID NO: 190044 - DNA, 55 bp, Artificial
  Synthetic oligonucleotide
ccctgagaggtacgacacagggatatccaagatactaaggcacatacggcaaccg

SEQ ID NO: 190045 - DNA, 55 bp, Artificial
  Synthetic oligonucleotide
ggagcttgggaccttgtaagtcgcctaagagggctacatgggtattgagttcctc

SEQ ID NO: 190046 - DNA, 53 bp, Artificial
  Synthetic oligonucleotide
cccttacatttcaggcctgtagcaaatacctccccttcgtttgtaacaaactg

SEQ ID NO: 190047 - DNA, 55 bp, Artificial
  Synthetic oligonucleotide
ggagccataaaaggttatggtggttgtcctatggctaaggatgagcttacaggta

SEQ ID NO: 190048 - DNA, 54 bp, Artificial
  Synthetic oligonucleotide
cccttatggggcggaagccttacggcaggagctaagtattcgcaggtattttcg

SEQ ID NO: 190049 - DNA, 54 bp, Artificial
  Synthetic oligonucleotide
cccttcggttagagcgcctgaatacttgggtaagtccgccaacttgtggaacac

SEQ ID NO: 190050 - DNA, 55 bp, Artificial
  Synthetic oligonucleotide
ggagactatataactctcggcaaaatgctaggcataccgcagaatacagctcgaa

SEQ ID NO: 190051 - DNA, 53 bp, Artificial
  Synthetic oligonucleotide
ccgaagaaggattagagggtaatgaaggattaatttacaccaaaggtgtgggc

SEQ ID NO: 190052 - DNA, 53 bp, Artificial
  Synthetic oligonucleotide
ccttattagatttatggcatcgtgggaaagaagaaggggtgctaaaaccagtt

SEQ ID NO: 190053 - DNA, 53 bp, Artificial
  Synthetic oligonucleotide
ccttcaaacagtagagttacagttaacttgggaaacgtagaaggagaaagtga

SEQ ID NO: 190054 - DNA, 54 bp, Artificial
  Synthetic oligonucleotide
agcgtctaccgaagcacgcgttttgatcacaggaccaaacgggaccggaaagga

SEQ ID NO: 190055 - DNA, 55 bp, Artificial
  Synthetic oligonucleotide
ccttcaatgtctctgtatacactagcaacttaattctgccgcttcgatttgggcc

SEQ ID NO: 190056 - DNA, 55 bp, Artificial
  Synthetic oligonucleotide
ccttcgggaactaaatcgggtacttacgagatagtgtatagcatctgtgagcgtt

SEQ ID NO: 190057 - DNA, 55 bp, Artificial
  Synthetic oligonucleotide
ccttcgggaggcatgacctcaagtatatcgccgaccttaagtttggtattcgcat

SEQ ID NO: 190058 - DNA, 55 bp, Artificial
  Synthetic oligonucleotide
gctcttggtaaggatcttaggtgaagattatagcttagcaaccttaagtcgaggg

SEQ ID NO: 190059 - DNA, 55 bp, Artificial
  Synthetic oligonucleotide
gctctgctgtttacggtactccacaacgaagcgctacaggatataatgccaaacg

SEQ ID NO: 190060 - DNA, 55 bp, Artificial
  Synthetic oligonucleotide
cgaaagcaacgggtccgtatacttcgatgtgcaggaatataacagccgcggactg

SEQ ID NO: 190061 - DNA, 55 bp, Artificial
  Synthetic oligonucleotide
gctcctgtagccctatagggaaatgtagcccatgacggataagacacagtcccgg

SEQ ID NO: 190062 - DNA, 53 bp, Artificial
  Synthetic oligonucleotide
cgaacctgtaaatattccctggtgttgttccgaataaaagcctaccaattgcc

SEQ ID NO: 190063 - DNA, 55 bp, Artificial
  Synthetic oligonucleotide
cgaactgaaaatggctgtgtcctctctcgacagtaaacaattaggcgtgtacccg

SEQ ID NO: 190064 - DNA, 55 bp, Artificial
  Synthetic oligonucleotide
cgaaggctgctagttgctattgtgagttcttctagcgacttgtctttagcgttgc

SEQ ID NO: 190065 - DNA, 52 bp, Artificial
  Synthetic oligonucleotide
agggtacagacggttttagaatgtctattaaggatttgcgtaaatctttcgt

SEQ ID NO: 190066 - DNA, 55 bp, Artificial
  Synthetic oligonucleotide
cgaagtttgtacctgttgcactagcaaaggactcagacatgtattgtacgcagtt

SEQ ID NO: 190067 - DNA, 55 bp, Artificial
  Synthetic oligonucleotide
gctccgcatctggttccaacacaatccgaccgatatcaccagcactggtaaaggc

SEQ ID NO: 190068 - DNA, 55 bp, Artificial
  Synthetic oligonucleotide
gctagcctctaagctggggttaattatctctactgtacccgattggtaatccacc

SEQ ID NO: 190069 - DNA, 55 bp, Artificial
  Synthetic oligonucleotide
gctacttgcaccaaggcaatggttatcagggagactcacaaatgcacgcctgggc

SEQ ID NO: 190070 - DNA, 55 bp, Artificial
  Synthetic oligonucleotide
gctactggaggtttagcggtggcaggagattatcctaccaattattcaccagcac

SEQ ID NO: 190071 - DNA, 55 bp, Artificial
  Synthetic oligonucleotide
cgacaatggtctttaagtattcgggctttgctacatcttgcatggggtgtggctc

SEQ ID NO: 190072 - DNA, 53 bp, Artificial
  Synthetic oligonucleotide
cgacaccgtccgtatattcgctggtaagtctaccttcccataaaacggtacgc

SEQ ID NO: 190073 - DNA, 54 bp, Artificial
  Synthetic oligonucleotide
cgacggagcttttaaacttgcgacgacgggacttaatgttgtggtagtaggcca

SEQ ID NO: 190074 - DNA, 55 bp, Artificial
  Synthetic oligonucleotide
gctacggtgcacttggaacacaacttcaatggtagattattctcgcgtattccat

SEQ ID NO: 190075 - DNA, 55 bp, Artificial
  Synthetic oligonucleotide
ccggttaagcacaaccaatcttccgaaagacgataacggctatggcgtaaatctc

SEQ ID NO: 190076 - DNA, 53 bp, Artificial
  Synthetic oligonucleotide
aggtacagaaagccagcccgacaagtcattctggcggggtacgttcgggtggg

SEQ ID NO: 190077 - DNA, 55 bp, Artificial
  Synthetic oligonucleotide
gctttagaggcgttaccagaagataaggctcagtattttatgtgggaacacttta

SEQ ID NO: 190078 - DNA, 55 bp, Artificial
  Synthetic oligonucleotide
gcttgagggcaaacaattgttgggatagaagagtagcgtaagcgcataacagagt

SEQ ID NO: 190079 - DNA, 54 bp, Artificial
  Synthetic oligonucleotide
ccgtccatttggtcattcttatagaacccctctgaggcaactttcccactacgg

SEQ ID NO: 190080 - DNA, 55 bp, Artificial
  Synthetic oligonucleotide
gcttctattaaggtaggtgatggtatcgtaggtcgtgtagtggacacgcttggaa

SEQ ID NO: 190081 - DNA, 55 bp, Artificial
  Synthetic oligonucleotide
gcttctactaatattttgatgggacgttcttgcatacgagacgaacccgttagcg

SEQ ID NO: 190082 - DNA, 55 bp, Artificial
  Synthetic oligonucleotide
gcttcggaacttttggcacagtccaacggcttgatgttaggcggtcttacaggcg

SEQ ID NO: 190083 - DNA, 55 bp, Artificial
  Synthetic oligonucleotide
ccgttagattcggcgtacgtggacactaagtaccttgtatcgtcgggtgagagac

SEQ ID NO: 190084 - DNA, 55 bp, Artificial
  Synthetic oligonucleotide
gcttccacatgcgccaccaaatcgcgataggcatccgttgcaacttcgcgtaccg

SEQ ID NO: 190085 - DNA, 55 bp, Artificial
  Synthetic oligonucleotide
cctagctcagcgtataacttacgcttgacaatacatttcgcaaacgtttgtctgg

SEQ ID NO: 190086 - DNA, 53 bp, Artificial
  Synthetic oligonucleotide
cctcacaaaccaggcgtatatacaaaccgtttggaacgaagaatttgccttta

SEQ ID NO: 190087 - DNA, 58 bp, Artificial
  Synthetic oligonucleotide
agtccatcggaatcatccgccccgtccgacttgtccgacaggtcagcctcgtccgaga

SEQ ID NO: 190088 - DNA, 51 bp, Artificial
  Synthetic oligonucleotide
cctccaacgcttgggaacgcgataattttaccctttcggcggtaacacaaa

SEQ ID NO: 190089 - DNA, 55 bp, Artificial
  Synthetic oligonucleotide
cctctatggcgggtatgacggaggtcaagcacagtatgtgcgcgtaccatatgcc

SEQ ID NO: 190090 - DNA, 55 bp, Artificial
  Synthetic oligonucleotide
gcttagcataactagtgtactgtcctggtgctatccagaagtcggcttgctgtcc

SEQ ID NO: 190091 - DNA, 55 bp, Artificial
  Synthetic oligonucleotide
cctgccattcttatgattccacgatctgcaagcattctacccctgtaggtatctt

SEQ ID NO: 190092 - DNA, 55 bp, Artificial
  Synthetic oligonucleotide
cctggaagatgcttacggagaagccacttacgcagaaggactgctgcttaacggc

SEQ ID NO: 190093 - DNA, 55 bp, Artificial
  Synthetic oligonucleotide
gctgtcgccatgtgtacacgctatacaggctgctaagctaggtaggatgaatcag

SEQ ID NO: 190094 - DNA, 49 bp, Artificial
  Synthetic oligonucleotide
cctggggttacgacggcgggtgaaggttcagcggggtttaatgtaaggg

SEQ ID NO: 190095 - DNA, 55 bp, Artificial
  Synthetic oligonucleotide
gctgtcctcacagccacaagtgatgatgaacggactaccgcccaaaccagtctgg

SEQ ID NO: 190096 - DNA, 55 bp, Artificial
  Synthetic oligonucleotide
cctgtgcgattgcgttaggaggaacttcgtttacaagtccatatcctacccatat

SEQ ID NO: 190097 - DNA, 54 bp, Artificial
  Synthetic oligonucleotide
cctgtttccaatgaagattccggtgaaaattactttcattacgtcattacaccc

SEQ ID NO: 190098 - DNA, 54 bp, Artificial
  Synthetic oligonucleotide
atcccctgtattgatggtggtttaaactcaatgattttgagcctttttcgcccc

SEQ ID NO: 190099 - DNA, 54 bp, Artificial
  Synthetic oligonucleotide
cttggaggtcccgagttggattcttcccagcggtaattgagtagtcctgcgttt

SEQ ID NO: 190100 - DNA, 55 bp, Artificial
  Synthetic oligonucleotide
cttggcgtaggaggttgagcgcctattcctaggaagcttagcccgctttctatca

SEQ ID NO: 190101 - DNA, 55 bp, Artificial
  Synthetic oligonucleotide
cttgtcccagccgaaattatactagcgaaacgttggcagcaaggctaacggaacc

SEQ ID NO: 190102 - DNA, 55 bp, Artificial
  Synthetic oligonucleotide
ctttatcgcccacaatcgtagaaccttccgagaaaatttcattagactgtggtgt

SEQ ID NO: 190103 - DNA, 55 bp, Artificial
  Synthetic oligonucleotide
ctttctgttctatagaggtggatcgaacgaattacaatacaccgcagagtggttt

SEQ ID NO: 190104 - DNA, 55 bp, Artificial
  Synthetic oligonucleotide
ctttgaatctgataacatgtcgactgtgctcgatgggacagagcagtatgatttg

SEQ ID NO: 190105 - DNA, 55 bp, Artificial
  Synthetic oligonucleotide
ctttgattttgcggtgcatctaccaaaacttcctgtccattaataattgtccctg

SEQ ID NO: 190106 - DNA, 55 bp, Artificial
  Synthetic oligonucleotide
gcaagaggcctaaaagatgctggttacgccacggatagaaaatatcctgataagc

SEQ ID NO: 190107 - DNA, 55 bp, Artificial
  Synthetic oligonucleotide
gcaaacgaaaatgctaactaacccacgacaggacataagagcagccgataacagc

SEQ ID NO: 190108 - DNA, 55 bp, Artificial
  Synthetic oligonucleotide
gaaattgctgcaaggttaacatccttaacgtatagcgcattaatacggttgtacc

SEQ ID NO: 190109 - DNA, 59 bp, Artificial
  Synthetic oligonucleotide
atcccgatgggtcatcgagacactcgaagtgacagtcattttacggtctcagcgccccg

SEQ ID NO: 190110 - DNA, 55 bp, Artificial
  Synthetic oligonucleotide
gaacaatacctctatcgggctacaataacggcatacggacacacttttagcgggc

SEQ ID NO: 190111 - DNA, 55 bp, Artificial
  Synthetic oligonucleotide
gaacattaattgatatttgtgtccgaccattttactctggtggagtatcacaggt

SEQ ID NO: 190112 - DNA, 55 bp, Artificial
  Synthetic oligonucleotide
gaacgtgtaaatagtccgcaaggcagctatatgacaggcaaacggcaaagtacgg

SEQ ID NO: 190113 - DNA, 55 bp, Artificial
  Synthetic oligonucleotide
gaagctaacgaactccaaataatggagtcggtttaccctagtgttgctccttatc

SEQ ID NO: 190114 - DNA, 53 bp, Artificial
  Synthetic oligonucleotide
aaccggtaagaatgcaacacgggtttggcccaacgtatcgtgaaagttatgac

SEQ ID NO: 190115 - DNA, 55 bp, Artificial
  Synthetic oligonucleotide
gattctcgactctgcggtacgcttgctactaacgtctcgtggcttggcgtcagtt

SEQ ID NO: 190116 - DNA, 52 bp, Artificial
  Synthetic oligonucleotide
gattcggtttacaatccgtttcgcggagtagaaacgttctttagggtgatta

SEQ ID NO: 190117 - DNA, 54 bp, Artificial
  Synthetic oligonucleotide
gaatctgaaaagaacggtggtcggctaaggtatacaggggtagaggcctatccg

SEQ ID NO: 190118 - DNA, 55 bp, Artificial
  Synthetic oligonucleotide
gattcactactgcagttcccagcagcgatagaatcttggaaagtagcatttaaag

SEQ ID NO: 190119 - DNA, 54 bp, Artificial
  Synthetic oligonucleotide
cttaacattcgcgggcgcggtaacttaggtaattccgaccctctctatatcgta

SEQ ID NO: 190120 - DNA, 60 bp, Artificial
  Synthetic oligonucleotide
atggcgagtgcggtttgtgcatcgaaacctatttctattccggcttgcatggaggcgcga

SEQ ID NO: 190121 - DNA, 55 bp, Artificial
  Synthetic oligonucleotide
cttactctacggcatcgctatgatttggaaacgctacgataccgaaggtcttctt

SEQ ID NO: 190122 - DNA, 54 bp, Artificial
  Synthetic oligonucleotide
cttagtcccctatacctgtcttgttcttgttgtcgttcctgatttcttcggttc

SEQ ID NO: 190123 - DNA, 55 bp, Artificial
  Synthetic oligonucleotide
cttattgctgtcgcgtacatataccactgaggcagtcgagcctaccatcagcaca

SEQ ID NO: 190124 - DNA, 55 bp, Artificial
  Synthetic oligonucleotide
cttcattatgaggatcgttattgtgcacagaagacatactactacccactaaagc

SEQ ID NO: 190125 - DNA, 51 bp, Artificial
  Synthetic oligonucleotide
cttccatagaagggccggtacgaccagtaagtcgaaaagaataccgtaaac

SEQ ID NO: 190126 - DNA, 55 bp, Artificial
  Synthetic oligonucleotide
cttccgtcgcgccattgtgtggtaggtacagaactggcataatcacaataccagg

SEQ ID NO: 190127 - DNA, 55 bp, Artificial
  Synthetic oligonucleotide
cttcgcagttaccacccttgcgacttactaatgcttccagacgttactccagcgc

SEQ ID NO: 190128 - DNA, 55 bp, Artificial
  Synthetic oligonucleotide
gcactgaaaagtatcgatcgattgggcttacgcggaaaggtgagcgtcattggga

SEQ ID NO: 190129 - DNA, 55 bp, Artificial
  Synthetic oligonucleotide
gcacgatatcatggtagaaagaggattacacttaggtcgtgagcgcaaggatgct

SEQ ID NO: 190130 - DNA, 55 bp, Artificial
  Synthetic oligonucleotide
gcaccttgtattgaacacgtaagaactcgcactaaaggtcttgcagaagcgtcaa

SEQ ID NO: 190131 - DNA, 55 bp, Artificial
  Synthetic oligonucleotide
attctctggccgaatacccgtgagactcttttggcaagaccacgtaacgagcggt

SEQ ID NO: 190132 - DNA, 55 bp, Artificial
  Synthetic oligonucleotide
gcacagtggctttgttcttatagagtgttttggctaccgatttgccaaactctcc

SEQ ID NO: 190133 - DNA, 55 bp, Artificial
  Synthetic oligonucleotide
cttctacaaggaacaacgatgcagggagctaatgcaagtcgctggatacaagtcc

SEQ ID NO: 190134 - DNA, 55 bp, Artificial
  Synthetic oligonucleotide
cttctcttcggcctaaaaggctacactctctacttgttaccgctatgcgataatc

SEQ ID NO: 190135 - DNA, 55 bp, Artificial
  Synthetic oligonucleotide
cttgcaaggtcgctcggattatgcccgagttacctgcattttgatgctttctatg

SEQ ID NO: 190136 - DNA, 55 bp, Artificial
  Synthetic oligonucleotide
cttgcatccgacgagagagggacgagcgagaggaatgcactcttgcaactacgtg

SEQ ID NO: 190137 - DNA, 55 bp, Artificial
  Synthetic oligonucleotide
cttgccattcaaaacattgtagagcatcagaagtttcgttattcggcaagacacc

SEQ ID NO: 190138 - DNA, 55 bp, Artificial
  Synthetic oligonucleotide
gcaattagtccaaaacgagggtgttctgatacaggaacccattctgatgtagcaa

SEQ ID NO: 190139 - DNA, 55 bp, Artificial
  Synthetic oligonucleotide
cttgcgagaccctagttaccactggacaagtagtacttgctggtgaagtacgatc

SEQ ID NO: 190140 - DNA, 55 bp, Artificial
  Synthetic oligonucleotide
cttgcggtgatttccccatctttccagtaacggtagcttgtatcgattacgaatg

SEQ ID NO: 190141 - DNA, 55 bp, Artificial
  Synthetic oligonucleotide
gagccaggatatccataaccattgccgtctgaatcgcaaccctttacagtaccat

SEQ ID NO: 190142 - DNA, 60 bp, Artificial
  Synthetic oligonucleotide
cgcgttggcccaagtgccccagcattgcataaaacggagtggagtgttgtagatctgtcc

SEQ ID NO: 190143 - DNA, 60 bp, Artificial
  Synthetic oligonucleotide
catatcgggctggagcagaatggctgcgtaaaggactcctacaacagcgccactagctcc

SEQ ID NO: 190144 - DNA, 55 bp, Artificial
  Synthetic oligonucleotide
gagccctgccaggctcgatgtgcgcctcttgcgttcagtgctcatcgttcgttcc

SEQ ID NO: 190145 - DNA, 55 bp, Artificial
  Synthetic oligonucleotide
gagcggaagcacaacttatacctactcttaaacttacggcagtagcttcggtagg

SEQ ID NO: 190146 - DNA, 55 bp, Artificial
  Synthetic oligonucleotide
gagcgtgcacaactactgctattaaccacaaacgactctttagaagaggtggcac

SEQ ID NO: 190147 - DNA, 55 bp, Artificial
  Synthetic oligonucleotide
gaggatgatctaactttcgcaaggtcaaccgcgtacagcacccgtggatttctgt

SEQ ID NO: 190148 - DNA, 54 bp, Artificial
  Synthetic oligonucleotide
gaggccggcacgaaaattccaaccaatctgcaaagggttgtatcgtgggtaaag

SEQ ID NO: 190149 - DNA, 55 bp, Artificial
  Synthetic oligonucleotide
gatgccaaaggaaacgctagagaattacacacagacttagcattagatgcgatcg

SEQ ID NO: 190150 - DNA, 55 bp, Artificial
  Synthetic oligonucleotide
gaggctaggaacactaatactactcggcacctctatcacaacttcagactgcggt

SEQ ID NO: 190151 - DNA, 55 bp, Artificial
  Synthetic oligonucleotide
gaggctgtttggtacaccggtagaatgatgggtgaaacacttgcccaaactctat

SEQ ID NO: 190152 - DNA, 55 bp, Artificial
  Synthetic oligonucleotide
gatgcaactgcacgtagagatgctttctctaacttacctgcagacgataacagcc

SEQ ID NO: 190153 - DNA, 55 bp, Artificial
  Synthetic oligonucleotide
gagggttacgatagcagacgcattaagaagttgttacacttgccttgcggagcag

SEQ ID NO: 190154 - DNA, 53 bp, Artificial
  Synthetic oligonucleotide
ccaataaaccctgaatctatcgtgttcttaccttcaaagtttatcctgtttat

SEQ ID NO: 190155 - DNA, 55 bp, Artificial
  Synthetic oligonucleotide
gaggtagggaaatattaggccgcttgggcttacaaatgaaactgtcagatgtgga

SEQ ID NO: 190156 - DNA, 55 bp, Artificial
  Synthetic oligonucleotide
gatgaactaagggttctttggtcgatattcccagtaatatatctaagagaaccgt

SEQ ID NO: 190157 - DNA, 55 bp, Artificial
  Synthetic oligonucleotide
gatctgcagttgatacacgctcgcgttgacaccattcgcaatgtgcgtggtgagc

SEQ ID NO: 190158 - DNA, 55 bp, Artificial
  Synthetic oligonucleotide
gagtcatcatctgaccgacctgcgaggctgccgtcacaaggatgcgtagctgccc

SEQ ID NO: 190159 - DNA, 55 bp, Artificial
  Synthetic oligonucleotide
gatcatctacaagaaatagcccataccagttggaatgaaagagctttgcatgcga

SEQ ID NO: 190160 - DNA, 54 bp, Artificial
  Synthetic oligonucleotide
gagttgtcctgtaagccttagggttgtatttggggtcggagatgttaaagctgg

SEQ ID NO: 190161 - DNA, 55 bp, Artificial
  Synthetic oligonucleotide
gatactggatacgacatcccagtttgttcctacaagcttatactgaccgattccg

SEQ ID NO: 190162 - DNA, 55 bp, Artificial
  Synthetic oligonucleotide
gatcaggcatgcggtcatgcaagggtatttacctgtattctttaccaaatctccc

SEQ ID NO: 190163 - DNA, 55 bp, Artificial
  Synthetic oligonucleotide
gatagtccctgaatggaaaggcaatcctaaaccattaacaaagaatatctccgac

SEQ ID NO: 190164 - DNA, 55 bp, Artificial
  Synthetic oligonucleotide
gacaccagttgtagagcaaattcatggaggtacagatgaaggtacaggtatgtct

SEQ ID NO: 190165 - DNA, 58 bp, Artificial
  Synthetic oligonucleotide
ccagctaaagccaaagcacaacctctagttatacccctaccatgctctacaaattcac

SEQ ID NO: 190166 - DNA, 55 bp, Artificial
  Synthetic oligonucleotide
gacacgatcacccttcccacagattctacctatgtgttgaccctgtttaaggaag

SEQ ID NO: 190167 - DNA, 55 bp, Artificial
  Synthetic oligonucleotide
gacactacgatcgtaaatgttgcgctaaatgatatgcgcggtagtcttggcgcca

SEQ ID NO: 190168 - DNA, 53 bp, Artificial
  Synthetic oligonucleotide
gattaaaccactcgtagagggagtaatagatccccattttcacgtcggtttta

SEQ ID NO: 190169 - DNA, 55 bp, Artificial
  Synthetic oligonucleotide
gacatcgctattggagtatgcgcccgtacctgctatttgatccgccaagggattg

SEQ ID NO: 190170 - DNA, 55 bp, Artificial
  Synthetic oligonucleotide
gaccaagctacgtaaactatagattcgtaagcgttactccaaggagcgtggccag

SEQ ID NO: 190171 - DNA, 55 bp, Artificial
  Synthetic oligonucleotide
gaccgaacatatttacatttgaggaattgtggtagcgcacatgggcataatcaaa

SEQ ID NO: 190172 - DNA, 55 bp, Artificial
  Synthetic oligonucleotide
gacctcaatcgtaattatatgggtcagggagcagcctatagatatactaagggtc

SEQ ID NO: 190173 - DNA, 55 bp, Artificial
  Synthetic oligonucleotide
gatgttggtgctccagagtgtgtactttatcccaagtccattggctgggatcggg

SEQ ID NO: 190174 - DNA, 55 bp, Artificial
  Synthetic oligonucleotide
gacgcccagacttttcatacgcaagcacaaattgagcggagcgccgcctaaagct

SEQ ID NO: 190175 - DNA, 55 bp, Artificial
  Synthetic oligonucleotide
gacggaaattcagggcagatgctcacgcaaaccgaagccagtataatcgaccaag

SEQ ID NO: 190176 - DNA, 54 bp, Artificial
  Synthetic oligonucleotide
cccctatcggactgttctccaatctgggtggttcttatctattctgtttttacc

SEQ ID NO: 190177 - DNA, 55 bp, Artificial
  Synthetic oligonucleotide
gacgggcaaatggtacgtgttttagatgatactgcagtacaaaccagattagcag

SEQ ID NO: 190178 - DNA, 55 bp, Artificial
  Synthetic oligonucleotide
gatgtacagcaaccatacctgctaatactacatttgctcctatagttacatgacc

SEQ ID NO: 190179 - DNA, 55 bp, Artificial
  Synthetic oligonucleotide
gactccgtaattccgctaacttgtatcgcttgtctgtcaatctagactccgagaa

SEQ ID NO: 190180 - DNA, 55 bp, Artificial
  Synthetic oligonucleotide
gatggttacgccctttgaaggcatcaatcggcactaccaagagcccatggtaacg

SEQ ID NO: 190181 - DNA, 55 bp, Artificial
  Synthetic oligonucleotide
gagaacaatacctgtagtgggtctgtctaagcgatgtactactcccagataagca

SEQ ID NO: 190182 - DNA, 55 bp, Artificial
  Synthetic oligonucleotide
gagaccgcacactttgactgttccaaaacccctaatacctattgctggtaaatct

SEQ ID NO: 190183 - DNA, 55 bp, Artificial
  Synthetic oligonucleotide
gagagggctctagtggtaggtacacctagatgatgcattgcttcgctcataagat

SEQ ID NO: 190184 - DNA, 55 bp, Artificial
  Synthetic oligonucleotide
gatgcttgttgtcaatgggttcgcaatcgtttagcaggtcgaaagtcgacgaggg

SEQ ID NO: 190185 - DNA, 55 bp, Artificial
  Synthetic oligonucleotide
gatgccgattctccttacggaatgccatctccagaagcgctaaatgagcgaccag

SEQ ID NO: 190186 - DNA, 55 bp, Artificial
  Synthetic oligonucleotide
cgtaagtagccacaggtataaagccatcaaccatattccaagttgtaccaccatc

SEQ ID NO: 190187 - DNA, 57 bp, Artificial
  Synthetic oligonucleotide
ccgagcggaacgcaaattgacgtgcttactcggacgtgtcgcgccagtagttaacaa

SEQ ID NO: 190188 - DNA, 55 bp, Artificial
  Synthetic oligonucleotide
cgtaatatgagcggctatgtagaagcaaacggaacgttagaagtaccaccacaaa

SEQ ID NO: 190189 - DNA, 55 bp, Artificial
  Synthetic oligonucleotide
cgtacacttttggaaaggcgatttgcaattgatcaatcgggcggttcaagagggg

SEQ ID NO: 190190 - DNA, 55 bp, Artificial
  Synthetic oligonucleotide
gccgcaaggtatcccattctcattaaggtgtgctacaagagcatcacgatctgtg

SEQ ID NO: 190191 - DNA, 55 bp, Artificial
  Synthetic oligonucleotide
gccgaaggtatgagtcttgctacagctacaaattatgggttgctcatcacagggg

SEQ ID NO: 190192 - DNA, 54 bp, Artificial
  Synthetic oligonucleotide
cgtaggttttactcctgtagtacccaatccgccagaggctagtgtacttcctgt

SEQ ID NO: 190193 - DNA, 55 bp, Artificial
  Synthetic oligonucleotide
gcccgtagtgttttgccgccaccgtaagcttgtctatggtcgtaccgcctattcc

SEQ ID NO: 190194 - DNA, 55 bp, Artificial
  Synthetic oligonucleotide
cgtgaaaacctccattccaatcccactctaccgtatcacctaactcaacagttag

SEQ ID NO: 190195 - DNA, 55 bp, Artificial
  Synthetic oligonucleotide
cgtgcaattggttgtcgtctaaatctgtaagaggcttaatacgtgtttggcagcc

SEQ ID NO: 190196 - DNA, 55 bp, Artificial
  Synthetic oligonucleotide
cgtgcccctgagaggtaggacacagggatatccaagatactaaggcacatacggc

SEQ ID NO: 190197 - DNA, 55 bp, Artificial
  Synthetic oligonucleotide
cgtggaagcagtaccaccgaatacccatatgaaagctctgccaccgattaccgag

SEQ ID NO: 190198 - DNA, 59 bp, Artificial
  Synthetic oligonucleotide
tactcggacgtgtcgcgccagtagttaacaacggctatacgcaatgcgggcgtaagtgc

SEQ ID NO: 190199 - DNA, 55 bp, Artificial
  Synthetic oligonucleotide
cgtgtcactctttagataggaagggtactggtcctgctttaaggaatgtggagtc

SEQ ID NO: 190200 - DNA, 55 bp, Artificial
  Synthetic oligonucleotide
gcccggtctgcggctccccgcgtgaagagcgatacttcctcgtacctgcgtccga

SEQ ID NO: 190201 - DNA, 54 bp, Artificial
  Synthetic oligonucleotide
gcccctgtaataggacctttagccccaagagccaccccttacaacatcaccgta

SEQ ID NO: 190202 - DNA, 55 bp, Artificial
  Synthetic oligonucleotide
cgttcgaaaattctgcggcttgatttggtgagtaacgcggtgagttttcgtccat

SEQ ID NO: 190203 - DNA, 55 bp, Artificial
  Synthetic oligonucleotide
cgtttgacgaattgcacccaccgggatatatggattaaagctccgaggctggatc

SEQ ID NO: 190204 - DNA, 55 bp, Artificial
  Synthetic oligonucleotide
gcccctgcaaataggacttggctatgagttaccttatctaagcctgttatttcgt

SEQ ID NO: 190205 - DNA, 55 bp, Artificial
  Synthetic oligonucleotide
ctaaagcaccacctgcagttcctaagatcaatgcccaagtttgattggacttagc

SEQ ID NO: 190206 - DNA, 55 bp, Artificial
  Synthetic oligonucleotide
ctaagccaaaagatatacctactccacttacatctttcaatccaaatatccccgt

SEQ ID NO: 190207 - DNA, 55 bp, Artificial
  Synthetic oligonucleotide
ctaaggctttaggagagcgaagttcgaggcttaatacgccattgtcggaagttac

SEQ ID NO: 190208 - DNA, 54 bp, Artificial
  Synthetic oligonucleotide
cgggcggttattcttaccggtaagcacagtcacctgaatgggtttagacagaac

SEQ ID NO: 190209 - DNA, 58 bp, Artificial
  Synthetic oligonucleotide
tagatgacaatggtttggtattggcggttcataccacggcggcaaacgaacacgatag

SEQ ID NO: 190210 - DNA, 55 bp, Artificial
  Synthetic oligonucleotide
cggggagggtctcgacccggcagcgcgtggatgcaggcgtcgtggcattcggatg

SEQ ID NO: 190211 - DNA, 55 bp, Artificial
  Synthetic oligonucleotide
cggggcacagcgtatgacagctcagcaaggtcaacagatcgttggagctgcgggg

SEQ ID NO: 190212 - DNA, 55 bp, Artificial
  Synthetic oligonucleotide
cgggtacatcacgggaaatcgttatttatctggataattcgttcagtatgcaggc

SEQ ID NO: 190213 - DNA, 55 bp, Artificial
  Synthetic oligonucleotide
gcctctatgggatcactctcacgggtggaggtgcattatttacccttagagggct

SEQ ID NO: 190214 - DNA, 55 bp, Artificial
  Synthetic oligonucleotide
cggtaacgatcgatccacaaccaaatactccggatgcaccagtagtagcttctac

SEQ ID NO: 190215 - DNA, 52 bp, Artificial
  Synthetic oligonucleotide
cggtaatcattgtggttgtggtaacgacttttaaagtaccatcggtttggtc

SEQ ID NO: 190216 - DNA, 55 bp, Artificial
  Synthetic oligonucleotide
cggtacaatccataccagatgcagagcttatcgcagaaatctattccgtaagcaa

SEQ ID NO: 190217 - DNA, 55 bp, Artificial
  Synthetic oligonucleotide
cggtaggtaatgcaatagcttcgtctaaggcattggtatgtaacgattgggtgcc

SEQ ID NO: 190218 - DNA, 55 bp, Artificial
  Synthetic oligonucleotide
cggtatgttggccgcgatggtattgggagcagacgccgtacaaatcggaagtcgg

SEQ ID NO: 190219 - DNA, 55 bp, Artificial
  Synthetic oligonucleotide
cggtcaaaaggccgaacagtcgggtcgcaagcacgtcaggatcctcctcaaggcc

SEQ ID NO: 190220 - DNA, 60 bp, Artificial
  Synthetic oligonucleotide
tcagacagcataccagcgtcgcacgtagtacaagagctggcaacgaatccagtggttgct

SEQ ID NO: 190221 - DNA, 55 bp, Artificial
  Synthetic oligonucleotide
gcctcggggccatatagttgtcgtagttgcgttgcatggccgcactcaatggccg

SEQ ID NO: 190222 - DNA, 52 bp, Artificial
  Synthetic oligonucleotide
cggtctggccaaaacccaaacgtcgttcaacgaggtcggagatatagggcct

SEQ ID NO: 190223 - DNA, 55 bp, Artificial
  Synthetic oligonucleotide
gcctactggtacatttactgtacttggatcatctattcctgtcgtttcctcacag

SEQ ID NO: 190224 - DNA, 55 bp, Artificial
  Synthetic oligonucleotide
gcctaccgaaatagcatcacttacgcaacgctcacattctttggggtctacttgg

SEQ ID NO: 190225 - DNA, 55 bp, Artificial
  Synthetic oligonucleotide
gccgtgacgaacttggaggggatagagctttccgcaacaacggatgggcgtaagg

SEQ ID NO: 190226 - DNA, 55 bp, Artificial
  Synthetic oligonucleotide
gccggcttttcagcgattgtactctctacaacatgcaccgtcgctttgggtttca

SEQ ID NO: 190227 - DNA, 55 bp, Artificial
  Synthetic oligonucleotide
cggttatgggatatcctccattagtgcatcaatgtattggattgttatccttcgt

SEQ ID NO: 190228 - DNA, 55 bp, Artificial
  Synthetic oligonucleotide
cgtaagcgtgtatatacactgcatcggcgcctcctaaaatcgcagagtttgcctc

SEQ ID NO: 190229 - DNA, 55 bp, Artificial
  Synthetic oligonucleotide
ctcgctagcggcaggtatcaaagggaatttaggagcgtggcaagtagatttgagc

SEQ ID NO: 190230 - DNA, 55 bp, Artificial
  Synthetic oligonucleotide
ctcggttacccgcacgaaactgacgaatacctatatacagcgattctttggttac

SEQ ID NO: 190231 - DNA, 55 bp, Artificial
  Synthetic oligonucleotide
tctaaagtcgacatattgggtactaacttcgacatattgggtactggttttagaa

SEQ ID NO: 190232 - DNA, 55 bp, Artificial
  Synthetic oligonucleotide
ctctatgtacgctcgtttataaatcctacagccgaaggaagtgccgtgtgcaatg

SEQ ID NO: 190233 - DNA, 55 bp, Artificial
  Synthetic oligonucleotide
gcatctcttctgcgtccatagaacggatacctacttgcactagattatgtttctg

SEQ ID NO: 190234 - DNA, 55 bp, Artificial
  Synthetic oligonucleotide
gcatcggtatcggttggagaataatgcgtgtgatttgatacaaatcttggtcgta

SEQ ID NO: 190235 - DNA, 55 bp, Artificial
  Synthetic oligonucleotide
gcataaactggctgtgttcggtatccatgcggtctgccgctgaggcgacataccg

SEQ ID NO: 190236 - DNA, 55 bp, Artificial
  Synthetic oligonucleotide
ctgattgtggaacgggattcgtagcagtaggatctttactaacggctgtatgcgc

SEQ ID NO: 190237 - DNA, 55 bp, Artificial
  Synthetic oligonucleotide
gcagtgttgtggagcgatagcgtagcatcacgaagcgtatgaacgtatagcccgg

SEQ ID NO: 190238 - DNA, 55 bp, Artificial
  Synthetic oligonucleotide
gcagtggctaccgctaccggagcccctaatagaaaagtaacttccgacaatggcg

SEQ ID NO: 190239 - DNA, 55 bp, Artificial
  Synthetic oligonucleotide
ctgctttagacagcaaactagccatacaagcgccctatatgtcgagcgtaatgac

SEQ ID NO: 190240 - DNA, 55 bp, Artificial
  Synthetic oligonucleotide
gcagtagctaccactccacgaggttcactacctcctacagcgatgggcttcccta

SEQ ID NO: 190241 - DNA, 55 bp, Artificial
  Synthetic oligonucleotide
ctggcccatggcctcaaccaaatctatcccgaagcccatagcaagtatgtcagtg

SEQ ID NO: 190242 - DNA, 59 bp, Artificial
  Synthetic oligonucleotide
tctgtttccggacaggaatgatgtcgataaactaattatcggttcttactgctcaatag

SEQ ID NO: 190243 - DNA, 55 bp, Artificial
  Synthetic oligonucleotide
ctggtaacacttcccgctacgagcatacagcacaagtgggcgttttagggctcga

SEQ ID NO: 190244 - DNA, 55 bp, Artificial
  Synthetic oligonucleotide
gcagattaggttggccccgatgcaattgcttctagatacgctgtacgaagacctt

SEQ ID NO: 190245 - DNA, 55 bp, Artificial
  Synthetic oligonucleotide
ctggtgcgctgaaatgtattggctcgtcccctccgtatactacgcaaggtaccag

SEQ ID NO: 190246 - DNA, 53 bp, Artificial
  Synthetic oligonucleotide
ctggtgctatgccctaggggaatcgttgaggaaactacccttttccactcggg

SEQ ID NO: 190247 - DNA, 55 bp, Artificial
  Synthetic oligonucleotide
ctgtagactatggaggcgaacacgaaatgagtcaggaaaacctaatgcctatggg

SEQ ID NO: 190248 - DNA, 55 bp, Artificial
  Synthetic oligonucleotide
ctgtgattagggttgtcattcccgtttcactaaccgcttgtttcatccgcgaaag

SEQ ID NO: 190249 - DNA, 55 bp, Artificial
  Synthetic oligonucleotide
ctgtgcctatgcggtccgtcaggatgcgtaaatggccgcaccggttgtattattg

SEQ ID NO: 190250 - DNA, 55 bp, Artificial
  Synthetic oligonucleotide
ctgtttcgccaggcacagtatagggcaagcctgctaatagcaatgccattcgggc

SEQ ID NO: 190251 - DNA, 55 bp, Artificial
  Synthetic oligonucleotide
gcccctactggcgaccctaaggcaccactacaagcgttgatattcgactcggtat

SEQ ID NO: 190252 - DNA, 54 bp, Artificial
  Synthetic oligonucleotide
ctaccttctttacctcttaaataaggaccgaatgcgccttctaatcctactcga

SEQ ID NO: 190253 - DNA, 57 bp, Artificial
  Synthetic oligonucleotide
cggcgctgaacttcggtcaaaaggccgaacagtcgggtcgcaagcacgtcaggatcc

SEQ ID NO: 190254 - DNA, 59 bp, Artificial
  Synthetic oligonucleotide
tgaacttaaaaccgctatgcaatttgaaagtgtttacgcaatgcggttctatgagctta

SEQ ID NO: 190255 - DNA, 55 bp, Artificial
  Synthetic oligonucleotide
gcccacttgttgcgtatatcctggtatggtgcgggcattggtaactgaatagttc

SEQ ID NO: 190256 - DNA, 55 bp, Artificial
  Synthetic oligonucleotide
gcccactgtcctccaagaaagttacctatagttagcatcaccaaaccaacggtta

SEQ ID NO: 190257 - DNA, 55 bp, Artificial
  Synthetic oligonucleotide
gcccaaaagtgatactgcacataccaaaccccatacttctcatacattcgcgccg

SEQ ID NO: 190258 - DNA, 55 bp, Artificial
  Synthetic oligonucleotide
ctatcaccgctgccggtagtgtgaatccctcggatatctggccagagcttaaccg

SEQ ID NO: 190259 - DNA, 55 bp, Artificial
  Synthetic oligonucleotide
gccaggcatgattccttctttcagagcaatttcacgtgtgcgatatgctgcatct

SEQ ID NO: 190260 - DNA, 55 bp, Artificial
  Synthetic oligonucleotide
gccagcctaatgttcccgcacttacgacttcaattgtgctgtctaatccccaacc

SEQ ID NO: 190261 - DNA, 55 bp, Artificial
  Synthetic oligonucleotide
ctcacgcttcgttatattttcagcggagttcgtgaatgcatagcatttgaagggt

SEQ ID NO: 190262 - DNA, 55 bp, Artificial
  Synthetic oligonucleotide
gccaccaatggatctgcatcagctagcgaattggttattaatggccttgcacctt

SEQ ID NO: 190263 - DNA, 55 bp, Artificial
  Synthetic oligonucleotide
gccacagctcccatacttttacctatggtttgggcttgtatagtaacagctggtg

SEQ ID NO: 190264 - DNA, 55 bp, Artificial
  Synthetic oligonucleotide
ctcagtagattccaaagcattagagaatcgccccgtaaacaacgtaacccaagcc

SEQ ID NO: 190265 - DNA, 58 bp, Artificial
  Synthetic oligonucleotide
tgaagtaggttcgccgctgccgccaactgtagtaaataagcgttcccaacgcacgcca

SEQ ID NO: 190266 - DNA, 55 bp, Artificial
  Synthetic oligonucleotide
gccaacggtcttggttaaggcaagtagcgtggagtagggacacgttcttgtcggc

SEQ ID NO: 190267 - DNA, 55 bp, Artificial
  Synthetic oligonucleotide
ctcccgttaaaaggatggagctaaagtcagaagtccattcccatactaatccgtg

SEQ ID NO: 190268 - DNA, 55 bp, Artificial
  Synthetic oligonucleotide
ctccctagacggctcttcatattattcaccgctctatcagtgccatcgttttggg

SEQ ID NO: 190269 - DNA, 55 bp, Artificial
  Synthetic oligonucleotide
ctcctagataggcatacccttcgtctgagaagtcgtgcatggagtgattaccgtg

SEQ ID NO: 190270 - DNA, 55 bp, Artificial
  Synthetic oligonucleotide
gcatgtaatgtggccgaagtgtgtgagcatgcatcggcagcttctatggtggcgc

SEQ ID NO: 190271 - DNA, 55 bp, Artificial
  Synthetic oligonucleotide
ctcctcctgttggcgaatcgtaccaaatataagttgaacaggcttcttcgggtat

SEQ ID NO: 190272 - DNA, 55 bp, Artificial
  Synthetic oligonucleotide
gcatggtcgataccgaaataagccgtaagttcgtgtcccatagcgtgtaccgccc

SEQ ID NO: 190273 - DNA, 55 bp, Artificial
  Synthetic oligonucleotide
ctcgatatgctgtaaaacgttcaatcgaaattcctcacaacatacaagacgggca

SEQ ID NO: 190274 - DNA, 55 bp, Artificial
  Synthetic oligonucleotide
ctcgccgctactataggattctatcggagcacagcgcaagtcgcctgaataaagg

SEQ ID NO: 190275 - DNA, 55 bp, Artificial
  Synthetic oligonucleotide
taattccgccttggttaagttggagaatcgtgtcttctattgcatatacaccaga

SEQ ID NO: 190276 - DNA, 59 bp, Artificial
  Synthetic oligonucleotide
tgaatgttaagactacaaacgatatgctcttagaacttattcctgtttttagagcatta

SEQ ID NO: 190277 - DNA, 55 bp, Artificial
  Synthetic oligonucleotide
taatcacttgtatatcagccaaagacggatttcccttgatagcatagcggttctg

SEQ ID NO: 190278 - DNA, 55 bp, Artificial
  Synthetic oligonucleotide
taagttccggagcgagtttccataggtttgcgaggccgtatttaatcacgtcaag

SEQ ID NO: 190279 - DNA, 55 bp, Artificial
  Synthetic oligonucleotide
taacacaacctatagtcctgacggaaccttcagagagtattcaaaatgggactgg

SEQ ID NO: 190280 - DNA, 55 bp, Artificial
  Synthetic oligonucleotide
taaatggagcagaacctgtctttccgtacgctgaaagccccttgcggcccttccg

SEQ ID NO: 190281 - DNA, 55 bp, Artificial
  Synthetic oligonucleotide
aaggaagacgtccttagctcctaagcggaatcctgcgcgtttctcaagcactgcc

SEQ ID NO: 190282 - DNA, 55 bp, Artificial
  Synthetic oligonucleotide
gttttggtaagaccattttaggtttctgccctttccgcatcccgcatctaggatg

SEQ ID NO: 190283 - DNA, 55 bp, Artificial
  Synthetic oligonucleotide
gttttgcgactttgccgatgcgtaaatccaactgcgctcaatacggttaaaaggt

SEQ ID NO: 190284 - DNA, 55 bp, Artificial
  Synthetic oligonucleotide
gttttaagcgacttttggctagagagttgtggcgtgtgcagtaaatttcgagggg

SEQ ID NO: 190285 - DNA, 55 bp, Artificial
  Synthetic oligonucleotide
agcggttgaaggtatatcatcccaaggacattctgtaacccaatgcgtattatcg

SEQ ID NO: 190286 - DNA, 55 bp, Artificial
  Synthetic oligonucleotide
gtttggtgtaaatggatcgcaagcattgtttgggtctgttataacaccgttggga

SEQ ID NO: 190287 - DNA, 56 bp, Artificial
  Synthetic oligonucleotide
tgtcctttgcttcttacgatgtagaaagacgcacccgaaaaggctctttttacgca

SEQ ID NO: 190288 - DNA, 55 bp, Artificial
  Synthetic oligonucleotide
gtttcgcgggaattacccgtgaaggtatcttatggtttccaatcggtgcacctga

SEQ ID NO: 190289 - DNA, 53 bp, Artificial
  Synthetic oligonucleotide
gtttacggtcaataaacgagcggtaaacggtggcgtataagataatccccaca

SEQ ID NO: 190290 - DNA, 52 bp, Artificial
  Synthetic oligonucleotide
gtttacgactggaaatggtgtaaacgggtttactttaaatcctgcgatcggc

SEQ ID NO: 190291 - DNA, 55 bp, Artificial
  Synthetic oligonucleotide
gttggccattacacgagaagtaacagttggctaccaaccagacgaattggtcgtg

SEQ ID NO: 190292 - DNA, 55 bp, Artificial
  Synthetic oligonucleotide
aggaaggaccatatttagtacaaccaacagacgaagcttttgataatggtgaacg

SEQ ID NO: 190293 - DNA, 55 bp, Artificial
  Synthetic oligonucleotide
gttctggaggttatcctagaaatatagaaacagggtacgaaataacaggcttaga

SEQ ID NO: 190294 - DNA, 55 bp, Artificial
  Synthetic oligonucleotide
gttcaatttgtcggctgcaattttcaaacgcgttacggggtctgtccagtcatgc

SEQ ID NO: 190295 - DNA, 55 bp, Artificial
  Synthetic oligonucleotide
aggagcgcttcaatatgaggtgatacagtatagactggaacacgaatacggtgct

SEQ ID NO: 190296 - DNA, 54 bp, Artificial
  Synthetic oligonucleotide
actacgtcaaaacgtgttggatacccttagtggctacaataaacgggccgctga

SEQ ID NO: 190297 - DNA, 55 bp, Artificial
  Synthetic oligonucleotide
tagtttgtctgccattcgcataaactcaccctcaaatggcgcacttatcgtgtaa

SEQ ID NO: 190298 - DNA, 55 bp, Artificial
  Synthetic oligonucleotide
ttaatcgccgttccctcttgctaacttcaaaagcttatcgcttcgctcaaaattt

SEQ ID NO: 190299 - DNA, 55 bp, Artificial
  Synthetic oligonucleotide
tagttcgtaaaagcaccaatgccgaattcccactttggtatttggtcacaagtgt

SEQ ID NO: 190300 - DNA, 54 bp, Artificial
  Synthetic oligonucleotide
actcatatccctatcctcctggagggcgaagttagtggttggaggttgttttcc

SEQ ID NO: 190301 - DNA, 55 bp, Artificial
  Synthetic oligonucleotide
tagtcttgttttgacctggtgcagactcagcctcattaggcatgcctggacgtct

SEQ ID NO: 190302 - DNA, 55 bp, Artificial
  Synthetic oligonucleotide
tagtcgataagtatggtcttgacgcagcctatgcctcctatcaaattggcatgag

SEQ ID NO: 190303 - DNA, 55 bp, Artificial
  Synthetic oligonucleotide
taggacggactgcgcctctcacaccactaagcgtacgggtctcgtacttagcggt

SEQ ID NO: 190304 - DNA, 55 bp, Artificial
  Synthetic oligonucleotide
tagcccaacgtggcgatttagaggtgtaacctaactcctcctggtaacgcagcgt

SEQ ID NO: 190305 - DNA, 55 bp, Artificial
  Synthetic oligonucleotide
tagatacaaattcgtaagcagttgcatcataagcagagtctgtccattctgccac

SEQ ID NO: 190306 - DNA, 55 bp, Artificial
  Synthetic oligonucleotide
tacttggtcgaaatcactacggtcactatctgtataaacggccgaccaatacagt

SEQ ID NO: 190307 - DNA, 55 bp, Artificial
  Synthetic oligonucleotide
tacttctgataaaccgatctgatgtacctcctctggatttagattggttgtcgtg

SEQ ID NO: 190308 - DNA, 55 bp, Artificial
  Synthetic oligonucleotide
tacttcgaacgtgcgcgccaacgcgcttgtgcctcacgctcagcgggatcatacc

SEQ ID NO: 190309 - DNA, 53 bp, Artificial
  Synthetic oligonucleotide
ttctacccaccgccctaaaggccccataacggtaatgtgcaaggcttcgtaac

SEQ ID NO: 190310 - DNA, 55 bp, Artificial
  Synthetic oligonucleotide
tactctaccttcgcttattcccacaaacttattaccattttgaccgtagccatct

SEQ ID NO: 190311 - DNA, 55 bp, Artificial
  Synthetic oligonucleotide
tacggctgtcactttctgccggagtataatagaccatgttttccgttccatgcac

SEQ ID NO: 190312 - DNA, 55 bp, Artificial
  Synthetic oligonucleotide
agaggcaaatttgcaagcggttcagttaggaccccaaacttattccgcagcaatc

SEQ ID NO: 190313 - DNA, 55 bp, Artificial
  Synthetic oligonucleotide
tacgaactaaaagcgattagggttgctaatcccgccccattgatgccgtaaagcg

SEQ ID NO: 190314 - DNA, 55 bp, Artificial
  Synthetic oligonucleotide
agattggtgccttttgagctacgagaattcctattagagctccctcagaatgtcc

SEQ ID NO: 190315 - DNA, 55 bp, Artificial
  Synthetic oligonucleotide
tacccgtagcagtagcacaagtaggatgggtaacagcccccgctaatggcgcatt

SEQ ID NO: 190316 - DNA, 55 bp, Artificial
  Synthetic oligonucleotide
tacatggtttactgttccaaagtctccgcctggaccgggtagacaaagctcggga

SEQ ID NO: 190317 - DNA, 55 bp, Artificial
  Synthetic oligonucleotide
gtgagttttgttccaccgttggctaagacttgtaaacacgcatattgtacaatgt

SEQ ID NO: 190318 - DNA, 55 bp, Artificial
  Synthetic oligonucleotide
aaattataatcggcttggacatagtaggccagggaattccattgatcgttcgtcc

SEQ ID NO: 190319 - DNA, 55 bp, Artificial
  Synthetic oligonucleotide
gtctctaccggttttgagttggccatcacattctaatctcacacgaccacgcaaa

SEQ ID NO: 190320 - DNA, 59 bp, Artificial
  Synthetic oligonucleotide
ttgacgtgcttactcggacgtgtcgcgccagtagttaacaacggctatacgcaatgcgg

SEQ ID NO: 190321 - DNA, 55 bp, Artificial
  Synthetic oligonucleotide
gtcgtcagtactcacatatccactaaggtctaccgagttgccatcggcaatcgat

SEQ ID NO: 190322 - DNA, 55 bp, Artificial
  Synthetic oligonucleotide
agtccgttgtaagtcgcctcattaataccgtagagattctcgtagcgcagtaggg

SEQ ID NO: 190323 - DNA, 55 bp, Artificial
  Synthetic oligonucleotide
gtcgtcaagtaataattgattctctcacgtgctagaaacgtcgagtttgtgctgt

SEQ ID NO: 190324 - DNA, 55 bp, Artificial
  Synthetic oligonucleotide
agtgaactggggctaagtatggatgcattactccaactggttaaggatgcttggg

SEQ ID NO: 190325 - DNA, 55 bp, Artificial
  Synthetic oligonucleotide
gtcggtatatacaaggcttcccaaattacttgggcattcatgccggaggtgtttt

SEQ ID NO: 190326 - DNA, 55 bp, Artificial
  Synthetic oligonucleotide
agtgtaaacttacaacgatagccctgcctagaaagtaatggatcaagacgcattc

SEQ ID NO: 190327 - DNA, 55 bp, Artificial
  Synthetic oligonucleotide
agttacgcagtgctcggcgctcctaatctccctcgttgggtaaccgagcccattg

SEQ ID NO: 190328 - DNA, 55 bp, Artificial
  Synthetic oligonucleotide
agttcctgtaaataaagctcctggctctaccgataatttgccacataccacttcg

SEQ ID NO: 190329 - DNA, 55 bp, Artificial
  Synthetic oligonucleotide
gtcgattgtgaagatcctaagttggttgttatttgcgaaaacatagcctgcctta

SEQ ID NO: 190330 - DNA, 55 bp, Artificial
  Synthetic oligonucleotide
ataagttcctggcgtaatactagttccacttggacaaccaccgtctgtaggtgct

SEQ ID NO: 190331 - DNA, 55 bp, Artificial
  Synthetic oligonucleotide
ttgattgaaaacggaacaaataccgaaaatccactaacaccaaaacatcgcatta

SEQ ID NO: 190332 - DNA, 55 bp, Artificial
  Synthetic oligonucleotide
ataatgtttacaccatcgtgaaaattttcgtcataggcactctttccatcgtgag

SEQ ID NO: 190333 - DNA, 55 bp, Artificial
  Synthetic oligonucleotide
gtccggtaagtttgtgggcaagaaaagcctccagtatcattcctacggcgattgc

SEQ ID NO: 190334 - DNA, 55 bp, Artificial
  Synthetic oligonucleotide
gtccgcttatgagtgcaatggctcctactataatgtagtaacccatagatcctgc

SEQ ID NO: 190335 - DNA, 55 bp, Artificial
  Synthetic oligonucleotide
gtcagagagcatattgcggaactctaacgcctcaatagcgtgtagagcttgggtg

SEQ ID NO: 190336 - DNA, 55 bp, Artificial
  Synthetic oligonucleotide
gtcaaggtaatcgagtccgccttttatttgtcgcgctcccaatgcaatagcggca

SEQ ID NO: 190337 - DNA, 55 bp, Artificial
  Synthetic oligonucleotide
atacctgtagagcttctcaaccaatattatgtagccctctgctatttcgaccccg

SEQ ID NO: 190338 - DNA, 55 bp, Artificial
  Synthetic oligonucleotide
gttcaaggtaagcatagtatagctcgaaaagttgtcgagtgttagtggccgttga

SEQ ID NO: 190339 - DNA, 55 bp, Artificial
  Synthetic oligonucleotide
gttatgaggggtgggatggacagttaggtaataacgtgagagagtttacttatag

SEQ ID NO: 190340 - DNA, 55 bp, Artificial
  Synthetic oligonucleotide
gttagctatcacttggtcacaggtataactcgcttgatatttgtcctttaacgcc

SEQ ID NO: 190341 - DNA, 55 bp, Artificial
  Synthetic oligonucleotide
aggcgcatacaaaagtggaaccattggtaggctcggttcctgctgtggcgtagcc

SEQ ID NO: 190342 - DNA, 57 bp, Artificial
  Synthetic oligonucleotide
ttggacttatatcacctgttaatctaacccaatttcatacaaactatagaaattcta

SEQ ID NO: 190343 - DNA, 55 bp, Artificial
  Synthetic oligonucleotide
gttagagattgtcgctccgtttgtaatatttactgttccgttaggcaaagcgaag

SEQ ID NO: 190344 - DNA, 55 bp, Artificial
  Synthetic oligonucleotide
gttaagtgctaagaagccccgccttcggcaatactcaaccgttgtatgcaacact

SEQ ID NO: 190345 - DNA, 55 bp, Artificial
  Synthetic oligonucleotide
gtgtttgtaggttggtgggtcataacgtcagttatggcgggctgtggtagcacca

SEQ ID NO: 190346 - DNA, 55 bp, Artificial
  Synthetic oligonucleotide
gtgttatgatgcgcgtttgccacttaaacacttgcccggtaggtattgcgaccca

SEQ ID NO: 190347 - DNA, 55 bp, Artificial
  Synthetic oligonucleotide
gtgttaccgttgttgtactaggcgataccgtagcaccattgtttagccttacact

SEQ ID NO: 190348 - DNA, 53 bp, Artificial
  Synthetic oligonucleotide
gtgtggtttccaacggttggggcaactctggctctacttgggtcaccggaccg

SEQ ID NO: 190349 - DNA, 55 bp, Artificial
  Synthetic oligonucleotide
gtggtacttctaacgttccgtttgcttctacatagccgctcatattacgtaatgc

SEQ ID NO: 190350 - DNA, 55 bp, Artificial
  Synthetic oligonucleotide
gtggggtgtttctaccgctgctttccaaattgaaggagcacatgattctgatgga

SEQ ID NO: 190351 - DNA, 55 bp, Artificial
  Synthetic oligonucleotide
gtggaggcatcaaagcagtagcaattgccacccctgggataggatttcctttgtc

SEQ ID NO: 190352 - DNA, 55 bp, Artificial
  Synthetic oligonucleotide
gtgctcaaataggaaaggatgttcaccttagcggtggcgtaggtattggaggcgt

SEQ ID NO: 190353 - DNA, 59 bp, Artificial
  Synthetic oligonucleotide
ttgggacttcgaagacacctcctggcgccaggacgtctgcccctcattcgtctgcgacg

SEQ ID NO: 190354 - DNA, 55 bp, Artificial
  Synthetic oligonucleotide
gtgccggagcttgcggtataatcgcttcctgccaaggcaagtccgtccacggtcc

SEQ ID NO: 190355 - DNA, 55 bp, Artificial
  Synthetic oligonucleotide
gtgccgaataacgaaacttctgatgctctacaatgttttgaatggcaagactgtc

SEQ ID NO: 190356 - DNA, 55 bp, Artificial
  Synthetic oligonucleotide
aggtgtgagcattagcattcgttcccttaaagtaaggacttggtggagcaggagg

SEQ ID NO: 190357 - DNA, 55 bp, Artificial
  Synthetic oligonucleotide
gtgcccactcaacgaaagaacttgcgttagtttgtaagatggtattgggtaagcc

SEQ ID NO: 190358 - DNA, 55 bp, Artificial
  Synthetic oligonucleotide
aggttgggtaggcaccatctgcatcatacaattccctactcgagtgataaatgta

SEQ ID NO: 190359 - DNA, 54 bp, Artificial
  Synthetic oligonucleotide
ttcgttttcccggataccaatggaacgtgtggccgatccgatagattccgtttg

SEQ ID NO: 190360 - DNA, 55 bp, Artificial
  Synthetic oligonucleotide
ttcggctgcttctgtatcaacttttctgatttcagggtggttcgctaaacctagg

SEQ ID NO: 190361 - DNA, 55 bp, Artificial
  Synthetic oligonucleotide
ttcgatgtgcgcgataagcaggatgctttagccatgtgcgccctgaaattgggta

SEQ ID NO: 190362 - DNA, 55 bp, Artificial
  Synthetic oligonucleotide
ttcgagtcagggaaatacgtttgccgtaattaatgacactgcgcgtaacctttcg

SEQ ID NO: 190363 - DNA, 55 bp, Artificial
  Synthetic oligonucleotide
ttcaccaccaactttacaataagggccaagtgttgttgctccgtaaatcttagcc

SEQ ID NO: 190364 - DNA, 53 bp, Artificial
  Synthetic oligonucleotide
cggtcggtctgtcgaaactctccgctttaaattattccgtaaaaacacactga

SEQ ID NO: 190365 - DNA, 60 bp, Artificial
  Synthetic oligonucleotide
tttcggatacaagaagcaaattgcagtagatgacaatggtttggtattggcggttcatac

SEQ ID NO: 190366 - DNA, 55 bp, Artificial
  Synthetic oligonucleotide
aatgtaggacaacccgaagtgagtgtaattttagatcgcgataaaatggctgcct

SEQ ID NO: 190367 - DNA, 55 bp, Artificial
  Synthetic oligonucleotide
aatgttgatacggtcctacaattcattcatccagacgaccgtcaagctaccatag

SEQ ID NO: 190368 - DNA, 53 bp, Artificial
  Synthetic oligonucleotide
ttaggccgctcggccggttgcactcggttaggcaccggcgacccgatttcggt

SEQ ID NO: 190369 - DNA, 55 bp, Artificial
  Synthetic oligonucleotide
ttactccaggtttcagtaccataagaacatctccagaacgcttttggttatagcc

SEQ ID NO: 190370 - DNA, 55 bp, Artificial
  Synthetic oligonucleotide
acaaaccaacgtttctaataattgtgtggtcatcgacccatcttggatataactg

SEQ ID NO: 190371 - DNA, 55 bp, Artificial
  Synthetic oligonucleotide
tggttaggcatcatcgcctgagcactccagcgcagttgtgccgaggtactctcgg

SEQ ID NO: 190372 - DNA, 55 bp, Artificial
  Synthetic oligonucleotide
tggtgtggttaaagttgttggcccatcatctcctgaagagtctacccatgcaaag

SEQ ID NO: 190373 - DNA, 55 bp, Artificial
  Synthetic oligonucleotide
tggggtaacgattcgatcctcgcatctctgacctaaacgctggctaagatacccc

SEQ ID NO: 190374 - DNA, 55 bp, Artificial
  Synthetic oligonucleotide
tggactgactatgtacatccacttagccgtactcctatccttaaagcacaacacc

SEQ ID NO: 190375 - DNA, 55 bp, Artificial
  Synthetic oligonucleotide
tggaatgttaggtatggaaatgcaccgcgctattcgtttagtagtagatactgga

SEQ ID NO: 190376 - DNA, 50 bp, Artificial
  Synthetic oligonucleotide
ttttttgttattctccgagaatataacccttgttttattacctttcaacg

SEQ ID NO: 190377 - DNA, 55 bp, Artificial
  Synthetic oligonucleotide
acagagcaaagccttgtgtcgcaaagtattgcgctacccacgtgcttacattgcc

SEQ ID NO: 190378 - DNA, 55 bp, Artificial
  Synthetic oligonucleotide
tgcttttagacacgccctgtggaatatgcttatcgtacaccttagtgtgcaacga

SEQ ID NO: 190379 - DNA, 55 bp, Artificial
  Synthetic oligonucleotide
acagcttccttgcgaaaagtgtctataagggagcgtatttcagcttctgtagcgc

SEQ ID NO: 190380 - DNA, 55 bp, Artificial
  Synthetic oligonucleotide
tgctccgcagaatagctcactggcaccaccacggttacgtacaccgccgggaaca

SEQ ID NO: 190381 - DNA, 54 bp, Artificial
  Synthetic oligonucleotide
aaaacctctcgggttccagatcccgttgcaattcctatttgtcggcaaggctta

SEQ ID NO: 190382 - DNA, 55 bp, Artificial
  Synthetic oligonucleotide
ttgttgcgcatattttatgctatgcgctagcaaaggaataccgccaagtaagcgg

SEQ ID NO: 190383 - DNA, 51 bp, Artificial
  Synthetic oligonucleotide
ttgttaggaccgtttcgtgggggtcgttctgctgccgtaaccggggttcca

SEQ ID NO: 190384 - DNA, 55 bp, Artificial
  Synthetic oligonucleotide
aaggggtgaaaccgcgtagagcgatttaaccgggaggcccatcagggctgcctgc

SEQ ID NO: 190385 - DNA, 55 bp, Artificial
  Synthetic oligonucleotide
ttgtgtacctccgaatccccagcagtcattctgacttgtgcacgttgccgctagt

SEQ ID NO: 190386 - DNA, 55 bp, Artificial
  Synthetic oligonucleotide
ttgtcagcggaaccgcagtacgagttggagttgaacaaccacctataactgcttc

SEQ ID NO: 190387 - DNA, 60 bp, Artificial
  Synthetic oligonucleotide
gcgccttggatgatcacggtacatacataaatcgttttacctcacgacggtagcagagta

SEQ ID NO: 190388 - DNA, 55 bp, Artificial
  Synthetic oligonucleotide
aaggtcgagattacgctttccgtgaggcgatttccctaagctattccactgatca

SEQ ID NO: 190389 - DNA, 53 bp, Artificial
  Synthetic oligonucleotide
aaaagggaactccgatgttgcaaatggttaccacttctggaaacgggagagaa

SEQ ID NO: 190390 - DNA, 53 bp, Artificial
  Synthetic oligonucleotide
ttgctcagggatcggaattggaaggattcttacgcgaaacaagtttaaaaccc

SEQ ID NO: 190391 - DNA, 55 bp, Artificial
  Synthetic oligonucleotide
ttgcgatgtagatttgatctggggagacatacgtcactttgtgactgaagattta

SEQ ID NO: 190392 - DNA, 55 bp, Artificial
  Synthetic oligonucleotide
aagtctgctcatgtagggaataagattgtggcaacgcttaattctacagggacgc

SEQ ID NO: 190393 - DNA, 55 bp, Artificial
  Synthetic oligonucleotide
aagtgatactaataacccatagacttatgtacacttctcccgtcgcaagacggga

SEQ ID NO: 190394 - DNA, 55 bp, Artificial
  Synthetic oligonucleotide
aagtgccagttatctgagtacttgccacctacacgtaataaatctggacccgtac

SEQ ID NO: 190395 - DNA, 55 bp, Artificial
  Synthetic oligonucleotide
ttgcagtagatgacaatggtttggtattggcggttcataccacggcggcaaacga

SEQ ID NO: 190396 - DNA, 55 bp, Artificial
  Synthetic oligonucleotide
ttgcacagctcttcccggtcccggtaatcctcgggattgaagaatacctggacgg

SEQ ID NO: 190397 - DNA, 55 bp, Artificial
  Synthetic oligonucleotide
ttgcaattggagatatacatggtggtttaaaggcgctgcaacaagttatgaagcg

SEQ ID NO: 190398 - DNA, 56 bp, Artificial
  Synthetic oligonucleotide
gcgtacttttgggagtcagaagcgatggtttggcgtgggggtcacacggctcaaag

SEQ ID NO: 190399 - DNA, 55 bp, Artificial
  Synthetic oligonucleotide
ttgaggcacagttatggtatccttaactctcactgaaagcgtgtccgtttgtccc

SEQ ID NO: 190400 - DNA, 55 bp, Artificial
  Synthetic oligonucleotide
aatacgatatcagtgggttacgtcctaaagtaggaggctatgtgagttatatacc

SEQ ID NO: 190401 - DNA, 55 bp, Artificial
  Synthetic oligonucleotide
ttctggggatgtccgacaattggaaaacgctggggaaacgctatgcagacgaagg

SEQ ID NO: 190402 - DNA, 55 bp, Artificial
  Synthetic oligonucleotide
acctataccctaaaaccagctgctgccctctacattcaccccaatcaagtacacc

SEQ ID NO: 190403 - DNA, 55 bp, Artificial
  Synthetic oligonucleotide
tcgctattgagttagagccagagaactatggtaaggttgtgtatctcagccacga

SEQ ID NO: 190404 - DNA, 55 bp, Artificial
  Synthetic oligonucleotide
tcgccatctttcgcaactttggccaattccttcgctacttgaaaaccatctagag

SEQ ID NO: 190405 - DNA, 52 bp, Artificial
  Synthetic oligonucleotide
tcgaatcgacggtttcccaggtggggcgtggggccgagaacccatttaccga

SEQ ID NO: 190406 - DNA, 55 bp, Artificial
  Synthetic oligonucleotide
tccgtcaaggtttgctctgacaaggtttgctctgacaaggtttgctccgtcaagg

SEQ ID NO: 190407 - DNA, 53 bp, Artificial
  Synthetic oligonucleotide
tccgctgttgtttaaaccaccggctgcgcatggggagtaacccggcgtaacgg

SEQ ID NO: 190408 - DNA, 55 bp, Artificial
  Synthetic oligonucleotide
acgcatcccgaatcagaagaaggagcgatcgcggcaaagtggctcgacggtaaac

SEQ ID NO: 190409 - DNA, 60 bp, Artificial
  Synthetic oligonucleotide
gcgtcagcgaacggacaatccagcgacacataacgacactaagcgacaacatatcaaata

SEQ ID NO: 190410 - DNA, 52 bp, Artificial
  Synthetic oligonucleotide
tccagttaccttccaacattcttccgggagtttacattgtaaccgtaaatgg

SEQ ID NO: 190411 - DNA, 55 bp, Artificial
  Synthetic oligonucleotide
tccagaaacctgtgtacccacctctatttcatccacaggttgcacacttcccgta

SEQ ID NO: 190412 - DNA, 55 bp, Artificial
  Synthetic oligonucleotide
tcactaccgcggccttgatgcgttcgtgcgtcgcccgtcgtccggctttacgcga

SEQ ID NO: 190413 - DNA, 55 bp, Artificial
  Synthetic oligonucleotide
acgctttccaatttggacaaagtgtatcatggagtggctaccaacgttaccaaat

SEQ ID NO: 190414 - DNA, 55 bp, Artificial
  Synthetic oligonucleotide
tattgttacgtatatctgcacgctcgttaatccactcggctataatgtgacgtgc

SEQ ID NO: 190415 - DNA, 55 bp, Artificial
  Synthetic oligonucleotide
tatgagcggtatcacaaatcaccttgggaaactcctggagaatatcccaccttcc

SEQ ID NO: 190416 - DNA, 55 bp, Artificial
  Synthetic oligonucleotide
tatatcggattcttccataccggagcttaccaggaaacaatcggtggttatggcg

SEQ ID NO: 190417 - DNA, 55 bp, Artificial
  Synthetic oligonucleotide
acggtaccatgttagcgccaattgttggatctgatacggttaacactgtaacaga

SEQ ID NO: 190418 - DNA, 55 bp, Artificial
  Synthetic oligonucleotide
acgttgcaggacgacaaaccgcagagactcttagagcaaatctccaaggttggta

SEQ ID NO: 190419 - DNA, 54 bp, Artificial
  Synthetic oligonucleotide
acgttgtttgcaacggacagcccgacctttgtggtaacgcccaagaaatgttga

SEQ ID NO: 190420 - DNA, 60 bp, Artificial
  Synthetic oligonucleotide
gctccttattaaatcgatttcacgttgctcatatattggatccagcatgataatattagg

SEQ ID NO: 190421 - DNA, 55 bp, Artificial
  Synthetic oligonucleotide
actacacagtagacacaatccgttttgaaccgttaactgactgctagcttcaaga

SEQ ID NO: 190422 - DNA, 55 bp, Artificial
  Synthetic oligonucleotide
tatacctctatcataggagaaaagacacgagtgatctgtgcttgggtagtggtgt

SEQ ID NO: 190423 - DNA, 55 bp, Artificial
  Synthetic oligonucleotide
tgctactgggttacttttagttccacttgttgtattgagtcctagatgtaaggat

SEQ ID NO: 190424 - DNA, 55 bp, Artificial
  Synthetic oligonucleotide
tgcggtatgcaattggaggatagtgttccaagttacagtgttttaagccgattcc

SEQ ID NO: 190425 - DNA, 55 bp, Artificial
  Synthetic oligonucleotide
tgcaggtatttttatgatgttgagcctttgtattatggctacagcaatgggactc

SEQ ID NO: 190426 - DNA, 55 bp, Artificial
  Synthetic oligonucleotide
tgcagggcaacaagagcggtgggcacgagtggatcattgagttcgaaaccgcccc

SEQ ID NO: 190427 - DNA, 55 bp, Artificial
  Synthetic oligonucleotide
tgcagatctatatctaatgtacgccgaagcactcaatgaagtgcaaggtccttcc

SEQ ID NO: 190428 - DNA, 55 bp, Artificial
  Synthetic oligonucleotide
acatttacaaagtgggtgtagcctgtggcttagaaacagcccatagtagctcggt

SEQ ID NO: 190429 - DNA, 55 bp, Artificial
  Synthetic oligonucleotide
tgatttctaagacgcgttgggtagtagagcgtacttttgggagtcagaagcgatg

SEQ ID NO: 190430 - DNA, 55 bp, Artificial
  Synthetic oligonucleotide
accacggttttggatgagcgtctaatcgtatgggcggactatattatatttccgc

SEQ ID NO: 190431 - DNA, 60 bp, Artificial
  Synthetic oligonucleotide
ggacgacatgcgggaagctgcggcaatttatacgatcaaagcgctggttgctcggggagc

SEQ ID NO: 190432 - DNA, 55 bp, Artificial
  Synthetic oligonucleotide
tgattcgataatattcctccgcttcacaagtactgcccgtatcgtgtgctcttcc

SEQ ID NO: 190433 - DNA, 55 bp, Artificial
  Synthetic oligonucleotide
tgacgtagatgccgaaaaggagttgcttgctgcacatgatatcatcgtatggcac

SEQ ID NO: 190434 - DNA, 54 bp, Artificial
  Synthetic oligonucleotide
acccgcctacaaggagggcctatggactacacccctggtatcctcgaaactgag

SEQ ID NO: 190435 - DNA, 55 bp, Artificial
  Synthetic oligonucleotide
aaactgtagctgttactggtgtaaacgatgggtctaattacgaacgttgtgacac

SEQ ID NO: 190436 - DNA, 55 bp, Artificial
  Synthetic oligonucleotide
accctctcgctatgattgggatgaactgtcccgcacgagtgatgaggtttacccc

SEQ ID NO: 190437 - DNA, 55 bp, Artificial
  Synthetic oligonucleotide
tcttgctacagctacaaattatgggttgctcattacaggggtagtggtaggggtg

SEQ ID NO: 190438 - DNA, 55 bp, Artificial
  Synthetic oligonucleotide
tctatcgggcagggcgacggattccgggtcctcaaacacgccaccaaaccggtca

SEQ ID NO: 190439 - DNA, 55 bp, Artificial
  Synthetic oligonucleotide
tctactgtggctagacgtttgccttgacattcgcaataggcatttgccgcatacc

SEQ ID NO: 190440 - DNA, 55 bp, Artificial
  Synthetic oligonucleotide
tctaagcgatagaaatgagccccttgtcctatctggcttaaatctactcgtacag

SEQ ID NO: 190441 - DNA, 55 bp, Artificial
  Synthetic oligonucleotide
tcgtacgcacctgcggtacagaacaaattacgggagcgtattattgaaactgcgg

SEQ ID NO: 190442 - DNA, 55 bp, Artificial
  Synthetic oligonucleotide
ggacgcaatagctgaagccgaaaaccaataaacttgctttgttcggaaaagaaga

SEQ ID NO: 190443 - DNA, 55 bp, Artificial
  Synthetic oligonucleotide
acctacctgtatatgtagcagaagaccctttgcgtgctgtagtaaggggtacggg

SEQ ID NO: 190444 - DNA, 55 bp, Artificial
  Synthetic oligonucleotide
gggatatgcgctcatactagatgctaaaccctacaagaaccctgcgaaatatgcg

SEQ ID NO: 190445 - DNA, 54 bp, Artificial
  Synthetic oligonucleotide
cagttcggcaggggctttatccatttacgacggaacttggaagtacatcgaacc

SEQ ID NO: 190446 - DNA, 55 bp, Artificial
  Synthetic oligonucleotide
cataagaaacacctcgcttatctaaggctctttgcacggtagtacgaaccttatc

SEQ ID NO: 190447 - DNA, 55 bp, Artificial
  Synthetic oligonucleotide
catacgccagacctcgttgccgttgcaaagctctagtgtcaggttttcgctaaac

SEQ ID NO: 190448 - DNA, 55 bp, Artificial
  Synthetic oligonucleotide
catacgtaaggcttaaccccgagaaaacataccaatcggtgttagagatgttgcc

SEQ ID NO: 190449 - DNA, 55 bp, Artificial
  Synthetic oligonucleotide
catagggctcctttacggtaaatgtcccaatcacatccttcacaatggtccccgg

SEQ ID NO: 190450 - DNA, 55 bp, Artificial
  Synthetic oligonucleotide
catagttgtgattgcccgtagtaagtttctgcccaagcgattcgaaaatgtccga

SEQ ID NO: 190451 - DNA, 55 bp, Artificial
  Synthetic oligonucleotide
catatcgacgatatacaggcagccgtcaggtccggtctttgattctaccggtcta

SEQ ID NO: 190452 - DNA, 55 bp, Artificial
  Synthetic oligonucleotide
aagagcaacgggcacaacgctgccgcctaccacgcaggtatgagtgcagagcaac

SEQ ID NO: 190453 - DNA, 55 bp, Artificial
  Synthetic oligonucleotide
ggacgcacggggcacgtaggttttaacgaaccaggctctcacgtcaattcacaaa

SEQ ID NO: 190454 - DNA, 55 bp, Artificial
  Synthetic oligonucleotide
catcccctaaggcggatagaacggacaaagagcggttggtagtgacggtagagcc

SEQ ID NO: 190455 - DNA, 55 bp, Artificial
  Synthetic oligonucleotide
catctctaatgcctccattgtctctattggggataatgcctctattagttgctgg

SEQ ID NO: 190456 - DNA, 55 bp, Artificial
  Synthetic oligonucleotide
catgacccagaaacacgccgtaatagtattgttttccgaggtaacctcgctcgcc

SEQ ID NO: 190457 - DNA, 55 bp, Artificial
  Synthetic oligonucleotide
catggccttagagcgcccagaaactattgcgggctatgctttaaacatagaaacc

SEQ ID NO: 190458 - DNA, 55 bp, Artificial
  Synthetic oligonucleotide
catggtcgttagtaacgagctcactataggctttagcctgccacaaatcgctcat

SEQ ID NO: 190459 - DNA, 55 bp, Artificial
  Synthetic oligonucleotide
gggactgtgtacccactccgattgcgttgccagtggtaaagttgaattcaggatc

SEQ ID NO: 190460 - DNA, 55 bp, Artificial
  Synthetic oligonucleotide
gggaagctagcataaaacaagggattctctggccattccggcttgtcgtaaatgg

SEQ ID NO: 190461 - DNA, 55 bp, Artificial
  Synthetic oligonucleotide
cattctaattgatcgtataggtcgccaatcattttctggcgtgttaccagcaatg

SEQ ID NO: 190462 - DNA, 55 bp, Artificial
  Synthetic oligonucleotide
gggaagccgttacatctgaacgttggtactttactagtttatgggcgtcagttgc

SEQ ID NO: 190463 - DNA, 55 bp, Artificial
  Synthetic oligonucleotide
ggcttgtgcaacttcagatactggtgaattaacatttaccattaacgatcctagt

SEQ ID NO: 190464 - DNA, 55 bp, Artificial
  Synthetic oligonucleotide
ggagagagtgtttaacaagttgatttctaagacgcgttgggtagtagagcgtact

SEQ ID NO: 190465 - DNA, 55 bp, Artificial
  Synthetic oligonucleotide
ccaaagccactggagaggcatttgtactttctcacgacttggtagaagcaactcc

SEQ ID NO: 190466 - DNA, 55 bp, Artificial
  Synthetic oligonucleotide
gggtctgcccatgtgtaggtacctgtaaatcctgaatgaccaaaactagccattg

SEQ ID NO: 190467 - DNA, 55 bp, Artificial
  Synthetic oligonucleotide
cacggactaatgaacaccaacccttatgctgaaagacgctttcaggaggctagag

SEQ ID NO: 190468 - DNA, 55 bp, Artificial
  Synthetic oligonucleotide
ggggttcagctagattctttggcagatatggtaagttttgggctaataccagggt

SEQ ID NO: 190469 - DNA, 55 bp, Artificial
  Synthetic oligonucleotide
cacgtagtggatttatactaggtccagatcaaagattaactgcttacgaaggact

SEQ ID NO: 190470 - DNA, 55 bp, Artificial
  Synthetic oligonucleotide
cacgtctggcaaaagaaacgcctaatagctggtatgttaaccagtatgacaaccc

SEQ ID NO: 190471 - DNA, 52 bp, Artificial
  Synthetic oligonucleotide
ggggctgggccaatacgggagaggaaattacggtccacacgggttgggacaa

SEQ ID NO: 190472 - DNA, 55 bp, Artificial
  Synthetic oligonucleotide
cactcagtatttggtgtagcacaaccaagaacttgtcctggtgtgccaacagaat

SEQ ID NO: 190473 - DNA, 55 bp, Artificial
  Synthetic oligonucleotide
cactcctgcgtactggagatacgctaccaagctttgaaggcttgtgtgctaccct

SEQ ID NO: 190474 - DNA, 55 bp, Artificial
  Synthetic oligonucleotide
cagaagccgaaatacgctcccttatagacacttttcgcaaggaagcagtgcgcac

SEQ ID NO: 190475 - DNA, 54 bp, Artificial
  Synthetic oligonucleotide
cgtttttataaaagatgttctcctccagctccaaaagtacccgagcctaataga

SEQ ID NO: 190476 - DNA, 59 bp, Artificial
  Synthetic oligonucleotide
ggatgagcgggaagagtattgtccctctagtctccggaacggcgtgtgctataccagcg

SEQ ID NO: 190477 - DNA, 53 bp, Artificial
  Synthetic oligonucleotide
ggggcggtctttggtatagaaactacggcttccggcatcgtaataccccaatc

SEQ ID NO: 190478 - DNA, 55 bp, Artificial
  Synthetic oligonucleotide
cagactagattatgcaacttcaggtttacttttagttggcaaaacaagtagtgcc

SEQ ID NO: 190479 - DNA, 55 bp, Artificial
  Synthetic oligonucleotide
cagactctggttgcggattgagcgttgataaggctactaacatacctgctcggtc

SEQ ID NO: 190480 - DNA, 55 bp, Artificial
  Synthetic oligonucleotide
ggggcattagttctacgttgatatacacttgttctcgtggttggttgagggcaaa

SEQ ID NO: 190481 - DNA, 55 bp, Artificial
  Synthetic oligonucleotide
cagcgtatgtttcctatgcagcgaattctgagcttaaccatcctgactacgtgac

SEQ ID NO: 190482 - DNA, 52 bp, Artificial
  Synthetic oligonucleotide
caggaaccgtttacgacgaccaaaatgtacctttgccgggagcttcggtcca

SEQ ID NO: 190483 - DNA, 55 bp, Artificial
  Synthetic oligonucleotide
gggctataatagatattccggtacgcttactggtactgcagcggcaattagagcc

SEQ ID NO: 190484 - DNA, 55 bp, Artificial
  Synthetic oligonucleotide
cagggttagcgttggctatagaagtctctgaactgatagtaccgataaggtaacc

SEQ ID NO: 190485 - DNA, 55 bp, Artificial
  Synthetic oligonucleotide
gggcgctatcataaccgccgcgactatatgagcttccccagcttagggcgtacag

SEQ ID NO: 190486 - DNA, 55 bp, Artificial
  Synthetic oligonucleotide
caggtcacgcgctttatggctatgacggcaagtgcaagaatgtacacggacacag

SEQ ID NO: 190487 - DNA, 51 bp, Artificial
  Synthetic oligonucleotide
gggttggcaaatagtaaaacggtatagttatggataaaacctcgattttta

SEQ ID NO: 190488 - DNA, 55 bp, Artificial
  Synthetic oligonucleotide
gggccattgggtgcgaatgtacttcttgaatatcggatatttgctgtcctgacaa

SEQ ID NO: 190489 - DNA, 55 bp, Artificial
  Synthetic oligonucleotide
ccatcgcggaagtgatcagttttgcttaatatttcggtgacgagcatcaaattta

SEQ ID NO: 190490 - DNA, 55 bp, Artificial
  Synthetic oligonucleotide
ccatcttgaaaactatctgtaagcgccgaagtctcattacctagcaccccaggaa

SEQ ID NO: 190491 - DNA, 55 bp, Artificial
  Synthetic oligonucleotide
ccatggtagctctctccaaatgctaggctaaagcctataaacacccaaagaacac

SEQ ID NO: 190492 - DNA, 55 bp, Artificial
  Synthetic oligonucleotide
ccattatcggaaatcacttcccagaagtaaacgataaactattgaacgtgttgca

SEQ ID NO: 190493 - DNA, 55 bp, Artificial
  Synthetic oligonucleotide
ggcccgaagtgacagagaggatttgatcggattttgtcgtgaatccatccgcagg

SEQ ID NO: 190494 - DNA, 52 bp, Artificial
  Synthetic oligonucleotide
cccacaactaaaggagcgttgggaacgattagttcaaattttgtccgatcgg

SEQ ID NO: 190495 - DNA, 55 bp, Artificial
  Synthetic oligonucleotide
ggccatgccataaacggtacgcgctcagtatcggtgcgattcagtttcggtgggg

SEQ ID NO: 190496 - DNA, 55 bp, Artificial
  Synthetic oligonucleotide
ggcatttcgtagcctaaaccaagtttccagatgtcagggtggttagccgtacgct

SEQ ID NO: 190497 - DNA, 55 bp, Artificial
  Synthetic oligonucleotide
cccatgcgatattttactaggttggtagaattcccaaagcgatggcatggtatag

SEQ ID NO: 190498 - DNA, 58 bp, Artificial
  Synthetic oligonucleotide
gtaaccgcacaggtaacaggcactacaatcgccacaatttccgatgaaaacggacaga

SEQ ID NO: 190499 - DNA, 55 bp, Artificial
  Synthetic oligonucleotide
ggcagtactttggacagtttacgtgccgcttccatcttgaagaatatgcgaacgc

SEQ ID NO: 190500 - DNA, 55 bp, Artificial
  Synthetic oligonucleotide
cccattctgcactagctaaagtctatgtggccgataatgcgtctacagatggatc

SEQ ID NO: 190501 - DNA, 55 bp, Artificial
  Synthetic oligonucleotide
ccccagttggcattacactatgcttcacaggaatcagtacgctacagctttgggg

SEQ ID NO: 190502 - DNA, 52 bp, Artificial
  Synthetic oligonucleotide
ccccatagtgggcggaagtgtaagcggttccgttcaacacgggtttcattgt

SEQ ID NO: 190503 - DNA, 54 bp, Artificial
  Synthetic oligonucleotide
ggcaacaattccagaattgacttttagaaccgttccggaaggtggtgtagagag

SEQ ID NO: 190504 - DNA, 54 bp, Artificial
  Synthetic oligonucleotide
ggattgatttagggttttgccatcgggcgtaaggtaaataatctcatcgtacgt

SEQ ID NO: 190505 - DNA, 55 bp, Artificial
  Synthetic oligonucleotide
ccccgcgacctgcctatggcgtatatcaattacgaccagagccagctgtccgaga

SEQ ID NO: 190506 - DNA, 55 bp, Artificial
  Synthetic oligonucleotide
ggattcggagacagcagaatcaacatgagaggttttgatggtgctaacattgcgg

SEQ ID NO: 190507 - DNA, 55 bp, Artificial
  Synthetic oligonucleotide
ggatgatttgacgcccttgcatcaaatttccaatgaagtcgccaaatcggattat

SEQ ID NO: 190508 - DNA, 55 bp, Artificial
  Synthetic oligonucleotide
cccctggagaggctaactcaccagagaactcatgccatgcgttaggatcatgacc

SEQ ID NO: 190509 - DNA, 60 bp, Artificial
  Synthetic oligonucleotide
gtctgcggtcgggcgtccgagcgcagcactagtgacgtcttcgatgtttgtcacgccggt

SEQ ID NO: 190510 - DNA, 54 bp, Artificial
  Synthetic oligonucleotide
ccccttacccggatgtccggaaagtaccttggaatcatcaaatatcgtaggcag

SEQ ID NO: 190511 - DNA, 55 bp, Artificial
  Synthetic oligonucleotide
ggctcataccgctttacggcatcaatggggcgggattagcaaccctaatcgcttt

SEQ ID NO: 190512 - DNA, 55 bp, Artificial
  Synthetic oligonucleotide
ggctatgtcgctcacgatgtaggacctaatctaggaggttctcaagcatcgcacg

SEQ ID NO: 190513 - DNA, 55 bp, Artificial
  Synthetic oligonucleotide
ccaacggggtgggaacactggccgaggtgaaccctgaccatggcacgttcacgct

SEQ ID NO: 190514 - DNA, 55 bp, Artificial
  Synthetic oligonucleotide
ggctatacctatttagcaaactctggtgtagagcaaccaatgactacacacgcag

SEQ ID NO: 190515 - DNA, 55 bp, Artificial
  Synthetic oligonucleotide
ccaaggttcgcgaggcggttctccatggcttcttacgtgtgacgtgaacattccg

SEQ ID NO: 190516 - DNA, 55 bp, Artificial
  Synthetic oligonucleotide
ggcggtagtattgttattccgcatttaaggcgtgcacacgagtattgggaggcta

SEQ ID NO: 190517 - DNA, 55 bp, Artificial
  Synthetic oligonucleotide
ccaatatattgcgattctgtgtattaggactccaagtatagcgcagcactccgct

SEQ ID NO: 190518 - DNA, 55 bp, Artificial
  Synthetic oligonucleotide
ccacaaagtgacgctgtctccaatgcgcaatacacggatacggaacttcgtcaac

SEQ ID NO: 190519 - DNA, 55 bp, Artificial
  Synthetic oligonucleotide
ccacagaaggttgatctgcgataagacgcttgtaaataccactatgagtgcgtcc

SEQ ID NO: 190520 - DNA, 59 bp, Artificial
  Synthetic oligonucleotide
gtgaagattcggtttccaattttcatcagaagctttgattctgtaatgcccttcatccc

SEQ ID NO: 190521 - DNA, 55 bp, Artificial
  Synthetic oligonucleotide
ccacatacgcataggtaacgactactacgcaaagcgcaataaaacctacggcctc

SEQ ID NO: 190522 - DNA, 55 bp, Artificial
  Synthetic oligonucleotide
ccacatggggttagacacccacgattacggattgttgcacgaacctatgaaagcc

SEQ ID NO: 190523 - DNA, 55 bp, Artificial
  Synthetic oligonucleotide
ggcgcatttgacgctcttatttataagctggaccctaaggcagagaaagggtcta

SEQ ID NO: 190524 - DNA, 55 bp, Artificial
  Synthetic oligonucleotide
ccagactttatgaggcgtgtttagatgcggatatgtcggtaggttctcgttactc

SEQ ID NO: 190525 - DNA, 55 bp, Artificial
  Synthetic oligonucleotide
ggcgcagcaagagagcgctaccatcctaacgacccaagtaatagtgaatacacag

SEQ ID NO: 190526 - DNA, 55 bp, Artificial
  Synthetic oligonucleotide
ccaggaaaccgcttcgcttttggcgtatgcctatcatgagccgtggacagtggct

SEQ ID NO: 190527 - DNA, 55 bp, Artificial
  Synthetic oligonucleotide
ggcctatactaaaacccgtctgattcatccatggatagggatttggagcttcagc

SEQ ID NO: 190528 - DNA, 55 bp, Artificial
  Synthetic oligonucleotide
ccaggtgctattgcgctgctccttgtcgtgtatgaggttattaatccagccttgg

SEQ ID NO: 190529 - DNA, 55 bp, Artificial
  Synthetic oligonucleotide
ggccgtaatcatccgaaacataaatatacggagtaaagtcatcgaatcgatatcc

SEQ ID NO: 190530 - DNA, 55 bp, Artificial
  Synthetic oligonucleotide
ggccgatgtgaaaatgctaccgttttgcgccaagttgtccagttcgggcgtaagg

SEQ ID NO: 190531 - DNA, 53 bp, Artificial
  Synthetic oligonucleotide
taagagatttgaaaatcgctaaatacgacttttttaatgttaagtacgacaaa

SEQ ID NO: 190532 - DNA, 55 bp, Artificial
  Synthetic oligonucleotide
ccatcaggagtttgctgccagattaattgatttaaggtgttgtaacgatactctg

SEQ ID NO: 190533 - DNA, 55 bp, Artificial
  Synthetic oligonucleotide
ggtgaggttgattcgtaattccgtaaggtggctaacgaagcaatcggatgacaag

SEQ ID NO: 190534 - DNA, 55 bp, Artificial
  Synthetic oligonucleotide
ggtcttgtgggaaagaacacctatagttttgcgtcttagcgcaatcaaacctaga

SEQ ID NO: 190535 - DNA, 55 bp, Artificial
  Synthetic oligonucleotide
ggtcttgatatcaatggccaaccggctaacatccttgtcgcttgtgccgttgtaa

SEQ ID NO: 190536 - DNA, 55 bp, Artificial
  Synthetic oligonucleotide
gtagcttctacgtttacccctgctaaaggaacagcctcgggagtacgaatgtctc

SEQ ID NO: 190537 - DNA, 55 bp, Artificial
  Synthetic oligonucleotide
ggtctccatatatttaggcttataggtaatgtaagggtttgtcaggtctacccaa

SEQ ID NO: 190538 - DNA, 55 bp, Artificial
  Synthetic oligonucleotide
ggtctagctcttgggcgtctaaggcatgcatcgcggcgtataagttcgccgctgc

SEQ ID NO: 190539 - DNA, 55 bp, Artificial
  Synthetic oligonucleotide
ggtcgcgtacggcaataaaagcgggattgaagcgctctacgtgtcctacttgtcc

SEQ ID NO: 190540 - DNA, 55 bp, Artificial
  Synthetic oligonucleotide
ggtcagaagctaccaagggaacgatgcttaatcccaacagcgggattgatgcggt

SEQ ID NO: 190541 - DNA, 55 bp, Artificial
  Synthetic oligonucleotide
ggtcaatgcttctagtgcctattgctgttttcggacttatggcgcagctcacctc

SEQ ID NO: 190542 - DNA, 60 bp, Artificial
  Synthetic oligonucleotide
taccaggcggacatcaaaccgtgtcattctgtcacattgctcgctgtgtatgccgtcgtg

SEQ ID NO: 190543 - DNA, 55 bp, Artificial
  Synthetic oligonucleotide
caaacgacgactataacttaagctaagttgttggctttctgagaattcgtgtcca

SEQ ID NO: 190544 - DNA, 55 bp, Artificial
  Synthetic oligonucleotide
ggtattaacgattcgagagttgctgcatggcaacctgcaaagtttgcggcgcgcg

SEQ ID NO: 190545 - DNA, 55 bp, Artificial
  Synthetic oligonucleotide
atcattgacagttccgatttgattgttgagagtgaaggcttagctgagttttgga

SEQ ID NO: 190546 - DNA, 55 bp, Artificial
  Synthetic oligonucleotide
caacatcttgtatacttgtctttgggcagtaatttgggcaatagatttgagcaca

SEQ ID NO: 190547 - DNA, 55 bp, Artificial
  Synthetic oligonucleotide
caacatgggctccctatccaccgcaaagctcctaagttcgaggacttatccactg

SEQ ID NO: 190548 - DNA, 53 bp, Artificial
  Synthetic oligonucleotide
atcaggtaacgacggagcccgaagcgtggggcgccactcggaacccttggaac

SEQ ID NO: 190549 - DNA, 55 bp, Artificial
  Synthetic oligonucleotide
gtaggcttctatgagttcggggtgaatccaagtgccgtgttggtctttgcggggc

SEQ ID NO: 190550 - DNA, 55 bp, Artificial
  Synthetic oligonucleotide
caacgagtgcattttgactagcagtccctaaagaataagtccctacttggctatt

SEQ ID NO: 190551 - DNA, 55 bp, Artificial
  Synthetic oligonucleotide
gtaagcccttcgcgtgaaatggctatttgtcgctcgaaagcaatgtcgtagccgt

SEQ ID NO: 190552 - DNA, 55 bp, Artificial
  Synthetic oligonucleotide
atcgttcaatggcaaagtacgcttcaaacgcgcctatgctaccagtatgagtgtg

SEQ ID NO: 190553 - DNA, 57 bp, Artificial
  Synthetic oligonucleotide
taccgccataatggctacttgcggctgaggaataatcggcgtccctagggtgttacc

SEQ ID NO: 190554 - DNA, 55 bp, Artificial
  Synthetic oligonucleotide
gtaagcgataagcctctcgcaacctgcgtttgagtaaatttctatccactgcgcg

SEQ ID NO: 190555 - DNA, 55 bp, Artificial
  Synthetic oligonucleotide
ggttatttgtggtgttgggttgactattaatacaagttctacaaaactcgcacag

SEQ ID NO: 190556 - DNA, 55 bp, Artificial
  Synthetic oligonucleotide
gtaatcaccataggttaccccgaggcgcgtattatcctcagtcagtgtgctatat

SEQ ID NO: 190557 - DNA, 53 bp, Artificial
  Synthetic oligonucleotide
gtacattcccgatataagcccgttacccgacgaattcaccctagaatttgacg

SEQ ID NO: 190558 - DNA, 53 bp, Artificial
  Synthetic oligonucleotide
gtaccctaacccgacttataccaggtttgcgtaaaatgcaaacgtatgacgag

SEQ ID NO: 190559 - DNA, 55 bp, Artificial
  Synthetic oligonucleotide
gtactaactatacgtgtgttaggtggtactaaacgccgttacgcatcagtaggcg

SEQ ID NO: 190560 - DNA, 55 bp, Artificial
  Synthetic oligonucleotide
aacaaatacctccattggtcagctaatagagattggtttggtatggatccaactc

SEQ ID NO: 190561 - DNA, 55 bp, Artificial
  Synthetic oligonucleotide
ggttactgcaattagcgatgatacaggaggtaacacatcagacggaattacctca

SEQ ID NO: 190562 - DNA, 53 bp, Artificial
  Synthetic oligonucleotide
ggttaatttgcgtgttggtaagttttgtgccgtttatgtatacaccagttggg

SEQ ID NO: 190563 - DNA, 55 bp, Artificial
  Synthetic oligonucleotide
atccctcacggattggttgtgaagtcttgctggcaccgtgggccattgtagcagt

SEQ ID NO: 190564 - DNA, 55 bp, Artificial
  Synthetic oligonucleotide
tacgatgtcgggcagtgcgatgtttattttgaatactccgaagaaaaaaacggtc

SEQ ID NO: 190565 - DNA, 55 bp, Artificial
  Synthetic oligonucleotide
ggttaaatcaccggccatacttagtgcctctagaatagaaacacgctcgtttggt

SEQ ID NO: 190566 - DNA, 55 bp, Artificial
  Synthetic oligonucleotide
ggttaaagtcgctccaccaactttagtgtcttctgacacctgatttaaacgctct

SEQ ID NO: 190567 - DNA, 55 bp, Artificial
  Synthetic oligonucleotide
ggtggggttgcctgataattgtcgttattgtgcattagcttagcattgtatcccc

SEQ ID NO: 190568 - DNA, 55 bp, Artificial
  Synthetic oligonucleotide
ggtgcctctttaatacgcgtcaatcctctggaataaaattttgcggtatacttcg

SEQ ID NO: 190569 - DNA, 55 bp, Artificial
  Synthetic oligonucleotide
attactcctaatggctctcgaatagacatcagttctaacacggaacagagtacgc

SEQ ID NO: 190570 - DNA, 54 bp, Artificial
  Synthetic oligonucleotide
gggttgtaaagcgttccagtgcttgcatacccaatttcgaatttccttgtgggt

SEQ ID NO: 190571 - DNA, 55 bp, Artificial
  Synthetic oligonucleotide
atagggaagaaccctctacgagccagcacactgtagaatacaggcgaaatatgtc

SEQ ID NO: 190572 - DNA, 55 bp, Artificial
  Synthetic oligonucleotide
gggttctacagcaaattgtgcagatccaatgacagttctaaacgctatcgtcgct

SEQ ID NO: 190573 - DNA, 55 bp, Artificial
  Synthetic oligonucleotide
atagcgtaggatggtcacaactttacccagtacaagtaaacagtagcgtattacc

SEQ ID NO: 190574 - DNA, 55 bp, Artificial
  Synthetic oligonucleotide
atagcgatcccatgcgcggccgagtacgaatgcttgctgttcgtgtcgggctggg

SEQ ID NO: 190575 - DNA, 59 bp, Artificial
  Synthetic oligonucleotide
aacatcagttatgatttagatccaactacaattgtttacaccctaattgctattgctta

SEQ ID NO: 190576 - DNA, 55 bp, Artificial
  Synthetic oligonucleotide
gtatactctacagcagaccgtgagagtcttcacgtaaaatttgcagacgaggcag

SEQ ID NO: 190577 - DNA, 55 bp, Artificial
  Synthetic oligonucleotide
gggttaaacgaaatcataattccctcggttcagaatagctgcaagggcagagcgt

SEQ ID NO: 190578 - DNA, 55 bp, Artificial
  Synthetic oligonucleotide
caccacgttgttcttctgcagaaggggttgcgaataccgcactgtaatgtgggtg

SEQ ID NO: 190579 - DNA, 55 bp, Artificial
  Synthetic oligonucleotide
cacccaagagaacacgatttagttattggcacttttggtcgtgctgcatgggttt

SEQ ID NO: 190580 - DNA, 55 bp, Artificial
  Synthetic oligonucleotide
caccccagggacgaagttcatagagccattttgctcctcgttgtacagcattcgg

SEQ ID NO: 190581 - DNA, 55 bp, Artificial
  Synthetic oligonucleotide
cacccgacggacaagtaggacgtgctactaaaggcgccgctcaagcactactcgg

SEQ ID NO: 190582 - DNA, 55 bp, Artificial
  Synthetic oligonucleotide
cacccgtagtactcgcgctactcaccatatagataaagccatcacttgccgcatc

SEQ ID NO: 190583 - DNA, 55 bp, Artificial
  Synthetic oligonucleotide
caccctagatacacaagctgcaattacggagtatagttatgcgcataccgtttcg

SEQ ID NO: 190584 - DNA, 50 bp, Artificial
  Synthetic oligonucleotide
caccctgaccaggaacaaagcgttaaacaactccaaatacgtaaaccctt

SEQ ID NO: 190585 - DNA, 53 bp, Artificial
  Synthetic oligonucleotide
cacccttgtagttcgtgataaaacaacaggttgtgaaaccactaacccaacac

SEQ ID NO: 190586 - DNA, 52 bp, Artificial
  Synthetic oligonucleotide
ctagcaaaggacactaacttaaatgaaagggagacagaagttaaaaaggggc

SEQ ID NO: 190587 - DNA, 58 bp, Artificial
  Synthetic oligonucleotide
aaggaatcaaatatttaggctcaatttctcgagtattatgcttttctgacgagcctgt

SEQ ID NO: 190588 - DNA, 55 bp, Artificial
  Synthetic oligonucleotide
gggtgctcattagcaatagatataccactcctatactgaggacaataagggcgcc

SEQ ID NO: 190589 - DNA, 55 bp, Artificial
  Synthetic oligonucleotide
gtattgcttaagccgagatcataacgtccggtgatttcgagctgacgtttgtacg

SEQ ID NO: 190590 - DNA, 50 bp, Artificial
  Synthetic oligonucleotide
ggtatcggacaactctaatagggaaacgtcggaaaccaacccaaacacct

SEQ ID NO: 190591 - DNA, 53 bp, Artificial
  Synthetic oligonucleotide
ggtactacccagggtacttctaccgacttcgaagggcactatacacttcccaa

SEQ ID NO: 190592 - DNA, 55 bp, Artificial
  Synthetic oligonucleotide
gtaggtaacctctccgtgggcggtagcggaaaatctcctatggtaatgcatattg

SEQ ID NO: 190593 - DNA, 55 bp, Artificial
  Synthetic oligonucleotide
caagcgtcgtgttaggattcatacgtcttatagcctgtaccgtttctgcccagat

SEQ ID NO: 190594 - DNA, 55 bp, Artificial
  Synthetic oligonucleotide
ggtaagtccagtttctattccttcaggttctaccaaggcacgaattttggtgcaa

SEQ ID NO: 190595 - DNA, 55 bp, Artificial
  Synthetic oligonucleotide
gtaggtatccgttctatggacgcagaagagatgcaatatgtaccaaaaggacagt

SEQ ID NO: 190596 - DNA, 55 bp, Artificial
  Synthetic oligonucleotide
caatcggacttgtgcgaatatcttgaagtaccgctggaacatatcttggcgtaac

SEQ ID NO: 190597 - DNA, 55 bp, Artificial
  Synthetic oligonucleotide
caattatccctatctctacttctgatacgctacagttaccactcgccagtcttcc

SEQ ID NO: 190598 - DNA, 59 bp, Artificial
  Synthetic oligonucleotide
tctcatggtagctcaccgtcacatccggctgggtcgtgcccaacgcattaggggtgttc

SEQ ID NO: 190599 - DNA, 54 bp, Artificial
  Synthetic oligonucleotide
cacaagctgtcccggaaattaatggtacaatacttttgccgcttaatccaaaac

SEQ ID NO: 190600 - DNA, 54 bp, Artificial
  Synthetic oligonucleotide
gggttttacgacagaagggtaacttcttgagtagcctgtaaccaacgcgtctgc

SEQ ID NO: 190601 - DNA, 55 bp, Artificial
  Synthetic oligonucleotide
cacacttacgcacacgtactaatacctttagcgctgttatgcgtttacgctctgc

SEQ ID NO: 190602 - DNA, 55 bp, Artificial
  Synthetic oligonucleotide
atatgcctgttggccgtacctaccgtcatggccgtacagaattgggacgaccatg

SEQ ID NO: 190603 - DNA, 55 bp, Artificial
  Synthetic oligonucleotide
gtagttccaccagtagtaaatgccaataactcatgagaaaggtttggccttacgc

SEQ ID NO: 190604 - DNA, 55 bp, Artificial
  Synthetic oligonucleotide
cacagtgccggcctgctgaggacgcacggtgcgctggtatgtctgagcggatcgt

SEQ ID NO: 190605 - DNA, 54 bp, Artificial
  Synthetic oligonucleotide
tttctgtgtctaaaaccgccacataatcgtccgtggtatctgcgggatcacccc

SEQ ID NO: 190606 - DNA, 54 bp, Artificial
  Synthetic oligonucleotide
gtcgtactgcacgtatgcatgccgaaggaacagcctttgtattgcaatgggaac

SEQ ID NO: 190607 - DNA, 54 bp, Artificial
  Synthetic oligonucleotide
tttgccgatttatctggcgcgtacacggttagcaactccgtttgtggagctggg

SEQ ID NO: 190608 - DNA, 54 bp, Artificial
  Synthetic oligonucleotide
ttggtactgatgacactacaattgccagcttaagaagcggtgatttacaaggtc

SEQ ID NO: 190609 - DNA, 59 bp, Artificial
  Synthetic oligonucleotide
ggacggttgctggctgtttacgtcgtattcgtgcgcaagctcaagatgtaaggcgcgta

SEQ ID NO: 190610 - DNA, 54 bp, Artificial
  Synthetic oligonucleotide
ttttgcctcagcgctattatctggcgatgaattttcgttaccattgaatagggg

SEQ ID NO: 190611 - DNA, 54 bp, Artificial
  Synthetic oligonucleotide
gcctctcagttgataaaatcgctgcctatctttcagaattaaagtcgaatgcct

SEQ ID NO: 190612 - DNA, 54 bp, Artificial
  Synthetic oligonucleotide
ggccaaacttaagagcaacgggcacaacgctgccgcctaccacgcaggtatgag

SEQ ID NO: 190613 - DNA, 54 bp, Artificial
  Synthetic oligonucleotide
tagaaattcaaagtttcgaccgatatcgccgtgctattgctctggtatactatg

SEQ ID NO: 190614 - DNA, 54 bp, Artificial
  Synthetic oligonucleotide
taccgacttagagtatatgggagaacttaggtatatcattaataagaatatagg

SEQ ID NO: 190615 - DNA, 54 bp, Artificial
  Synthetic oligonucleotide
taccctgaatatcggcttgagatcccgtccaagatttcagctagcgcagcatat

SEQ ID NO: 190616 - DNA, 53 bp, Artificial
  Synthetic oligonucleotide
taccatttccagtcggtaactgggccacccgcaactcccacattaaacacccc

SEQ ID NO: 190617 - DNA, 54 bp, Artificial
  Synthetic oligonucleotide
tatactcaaccccgaagtttagtgaatagttggtcgttgccttactaccattcc

SEQ ID NO: 190618 - DNA, 54 bp, Artificial
  Synthetic oligonucleotide
ggggagcacttaacccagcacgtggtgagaatggaccgcgcgctaccaacttat

SEQ ID NO: 190619 - DNA, 54 bp, Artificial
  Synthetic oligonucleotide
gggctccacgtggctacgatcattacggcccccgtgtatctgtcccagcaaagg

SEQ ID NO: 190620 - DNA, 56 bp, Artificial
  Synthetic oligonucleotide
ggacatttcgaatagaacttaaatagatagaatctctccgagaaacttgctttaac

SEQ ID NO: 190621 - DNA, 54 bp, Artificial
  Synthetic oligonucleotide
taattagcaagttggtaagggtctgtatcactcgccacacttgcccatcctgca

SEQ ID NO: 190622 - DNA, 54 bp, Artificial
  Synthetic oligonucleotide
aaatggagtcaatttgcactatgtaacgggaggacaaggcagtccattagtctt

SEQ ID NO: 190623 - DNA, 54 bp, Artificial
  Synthetic oligonucleotide
taacgtactggtgattcgtgctacgcagggtggttgattgatttacaatagtaa

SEQ ID NO: 190624 - DNA, 54 bp, Artificial
  Synthetic oligonucleotide
gttttgcttaaatagctttatatacaatgcaaatcagtaacttattccattagc

SEQ ID NO: 190625 - DNA, 54 bp, Artificial
  Synthetic oligonucleotide
tcgctgcttttctcccagccccgcacttggcggtctactccaccactttgtaac

SEQ ID NO: 190626 - DNA, 54 bp, Artificial
  Synthetic oligonucleotide
gcccagatatcatcggtcgtcgagccaaagtggattatggctttgctggagatg

SEQ ID NO: 190627 - DNA, 54 bp, Artificial
  Synthetic oligonucleotide
tctataaccatggcataccaccgttttcatggcttagaaacgcgtatcgttcgc

SEQ ID NO: 190628 - DNA, 54 bp, Artificial
  Synthetic oligonucleotide
gcaattagattgaacatttctcgcattcggctgcggactcggtttccgtaatgg

SEQ ID NO: 190629 - DNA, 54 bp, Artificial
  Synthetic oligonucleotide
aaccctgcgccgataatggctcctacccccaaagcagttaatcctctggcggtt

SEQ ID NO: 190630 - DNA, 54 bp, Artificial
  Synthetic oligonucleotide
tcttgtggcaaaatcacttcgtccacaaaaccacgctgagcagctgtgtatgga

SEQ ID NO: 190631 - DNA, 59 bp, Artificial
  Synthetic oligonucleotide
cccaaaagcatactagtcatagaagttttctcaaaatcctcgatagacatatcgttatc

SEQ ID NO: 190632 - DNA, 54 bp, Artificial
  Synthetic oligonucleotide
gcggacttccgcaaatcaatgttacttacgatcgggtacgcttggccaactacg

SEQ ID NO: 190633 - DNA, 54 bp, Artificial
  Synthetic oligonucleotide
gttacatcaggataggtgtcaatgccttcacgattagggtttgtataccatcct

SEQ ID NO: 190634 - DNA, 54 bp, Artificial
  Synthetic oligonucleotide
gtggcggggttcgccacaaaagatatagcgcacagcccgacccttgtggtaacg

SEQ ID NO: 190635 - DNA, 54 bp, Artificial
  Synthetic oligonucleotide
tggccacatcgccatagctcaaaggtagtttgtgctcgcagaccgatttgacta

SEQ ID NO: 190636 - DNA, 54 bp, Artificial
  Synthetic oligonucleotide
gccgtacgactggaaagatgtggtagcgttagattatagcaacccaaatcttcg

SEQ ID NO: 190637 - DNA, 54 bp, Artificial
  Synthetic oligonucleotide
tgtcacgcaacgtatcattacccactactaaaccagctgtaaccattgctaacg

SEQ ID NO: 190638 - DNA, 54 bp, Artificial
  Synthetic oligonucleotide
tgttcaatgaaaagtttgtcataggggcagcttaccgttgggatgcggcagtta

SEQ ID NO: 190639 - DNA, 54 bp, Artificial
  Synthetic oligonucleotide
ggaccaaccgatgggctgcacgggacacacctcttgccccgtttggatgatcaa

SEQ ID NO: 190640 - DNA, 54 bp, Artificial
  Synthetic oligonucleotide
ttacggccaaggagctgcactgatgggagatttaggccccgtaattggctggcc

SEQ ID NO: 190641 - DNA, 54 bp, Artificial
  Synthetic oligonucleotide
ggttggcacgcagatccttatataggacgtgagtttcatggtgtttggggagac

SEQ ID NO: 190642 - DNA, 59 bp, Artificial
  Synthetic oligonucleotide
ctcagtgcgcatttggtgtgctgtctggcgtgcataaacgtcgctaatccagtgcggag

SEQ ID NO: 190643 - DNA, 53 bp, Artificial
  Synthetic oligonucleotide
ggacgtaccgggcacttaccaaatccgactggaagggtttactacgtatggca

SEQ ID NO: 190644 - DNA, 54 bp, Artificial
  Synthetic oligonucleotide
gatgtagaaagcgatccctatgaaaccgtcaatttggccggtgaccctaaattc

SEQ ID NO: 190645 - DNA, 54 bp, Artificial
  Synthetic oligonucleotide
acaacatggggtagggccgctactcaaactgcagggggagcacgtggaatacct

SEQ ID NO: 190646 - DNA, 54 bp, Artificial
  Synthetic oligonucleotide
acgtcttacgtacatagtactgtaaggacctcgtaaattaggggcgacacctgc

SEQ ID NO: 190647 - DNA, 54 bp, Artificial
  Synthetic oligonucleotide
cttcgtggaccgatagtcggatggcacgtgatgtaagtaggacagccactcgaa

SEQ ID NO: 190648 - DNA, 54 bp, Artificial
  Synthetic oligonucleotide
acccttttggaccgtgatatacagcatacataccagccataacagctagtaaaa

SEQ ID NO: 190649 - DNA, 54 bp, Artificial
  Synthetic oligonucleotide
cccttaactaccgatatacttgaaatttcaccgcatagagtttacctggtttca

SEQ ID NO: 190650 - DNA, 54 bp, Artificial
  Synthetic oligonucleotide
ctggtaataaagtcaatagcgctccaaacatagaccttggcgtagcgcgtaaaa

SEQ ID NO: 190651 - DNA, 54 bp, Artificial
  Synthetic oligonucleotide
agttccttgccaagacaactctagcatagatccgtaagagtctggagttggacc

SEQ ID NO: 190652 - DNA, 54 bp, Artificial
  Synthetic oligonucleotide
ctggatgcagccggtcctataagcactccccgggaaccaaatccatttaaaacg

SEQ ID NO: 190653 - DNA, 54 bp, Artificial
  Synthetic oligonucleotide
cggtaggcactgcttgctccgtggcggtttggaaccaaggagccgaaagggtaa

SEQ ID NO: 190654 - DNA, 54 bp, Artificial
  Synthetic oligonucleotide
agctgtacagcagaggcggatgcaccccgtaaagcctgtatctgccgggtttta

SEQ ID NO: 190655 - DNA, 54 bp, Artificial
  Synthetic oligonucleotide
agttttagcagtccgttataggtacgcacatctcctaaaccatagcgaggcgaa

SEQ ID NO: 190656 - DNA, 54 bp, Artificial
  Synthetic oligonucleotide
ctgcctgccattatagtccggctgaatgggtaaatgtctactaaaccttctatc

SEQ ID NO: 190657 - DNA, 54 bp, Artificial
  Synthetic oligonucleotide
aggacaacgcaatagcatagctaagaattgctccttgactgaaaccacttatcc

SEQ ID NO: 190658 - DNA, 54 bp, Artificial
  Synthetic oligonucleotide
atgttacctggggagcacttaacccagcacgtggtgagaatggaccgcgcgcta

SEQ ID NO: 190659 - DNA, 54 bp, Artificial
  Synthetic oligonucleotide
aactcagggaggacaactggcccaccatgcatgcacgcccattcgcacatagtt

SEQ ID NO: 190660 - DNA, 54 bp, Artificial
  Synthetic oligonucleotide
ctcttgaaatttgagcatcgcccgttccattagtgatttattctccactcgttt

SEQ ID NO: 190661 - DNA, 54 bp, Artificial
  Synthetic oligonucleotide
atgccagcgaactcagggaggacaactggcccaccatgcatgcacgcccattcg

SEQ ID NO: 190662 - DNA, 54 bp, Artificial
  Synthetic oligonucleotide
cgatcatttggtggttcaaaacacgctttatggtggggcgactcactttatacg

SEQ ID NO: 190663 - DNA, 54 bp, Artificial
  Synthetic oligonucleotide
atacccgaccgttgtgcgtcattccccctagactcacgccctgaccccgtaagc

SEQ ID NO: 190664 - DNA, 59 bp, Artificial
  Synthetic oligonucleotide
gcgctatacactcgacctatagcgcccagcctttgcggggtttcctctgctatcgggag

SEQ ID NO: 190665 - DNA, 54 bp, Artificial
  Synthetic oligonucleotide
cgataaagagaccatctcgttgctagtagctttggcagaagaggtaggtttaag

SEQ ID NO: 190666 - DNA, 54 bp, Artificial
  Synthetic oligonucleotide
ctccagtggtgcgccagcctctcccgctatacagcactcacccttacaggcatt

SEQ ID NO: 190667 - DNA, 54 bp, Artificial
  Synthetic oligonucleotide
ccgtgtgctaaaacacctatagtctgtaatccgtattccatagcgcattggtgt

SEQ ID NO: 190668 - DNA, 54 bp, Artificial
  Synthetic oligonucleotide
acgattcatagcgaggggcgttctcaaaatcgtcgtggggagccttaaactgat

SEQ ID NO: 190669 - DNA, 54 bp, Artificial
  Synthetic oligonucleotide
cgagcgactttttaggctgatgaccctccgcacccatatcgccctacagcgccg

SEQ ID NO: 190670 - DNA, 54 bp, Artificial
  Synthetic oligonucleotide
cgtaccgttcctgactcttatcccgcctccgaatgccgaacttgctgctgcaga

SEQ ID NO: 190671 - DNA, 54 bp, Artificial
  Synthetic oligonucleotide
agggcgtattagaacactctaaacacaaaggctggcaacttaataacgctgatg

SEQ ID NO: 190672 - DNA, 54 bp, Artificial
  Synthetic oligonucleotide
cgcatcgcagttgcaaatccttagccgtttcgtggcggacacttacaaacacat

SEQ ID NO: 190673 - DNA, 54 bp, Artificial
  Synthetic oligonucleotide
gaggtgagccccaatgctataaccaccctaaatctttcagctgaactaggttca

SEQ ID NO: 190674 - DNA, 54 bp, Artificial
  Synthetic oligonucleotide
ccaggcagttccccgtctggaaattcctgcctacggatggtggaatgaggcact

SEQ ID NO: 190675 - DNA, 59 bp, Artificial
  Synthetic oligonucleotide
cccgcagcgggattggctgccatcgtacttactgcaattgggacattaggtggctatga

SEQ ID NO: 190676 - DNA, 54 bp, Artificial
  Synthetic oligonucleotide
cgcagacgtgtaagacgctatcgtccgcgtgtgacaccgccaagagttcgcaca

SEQ ID NO: 190677 - DNA, 54 bp, Artificial
  Synthetic oligonucleotide
ccagtacaactcgtaatgccgtaggccctagcgtgtctgacccacgtagcgggg

SEQ ID NO: 190678 - DNA, 53 bp, Artificial
  Synthetic oligonucleotide
cccaaccagagtaacctttcccaacttctacacggccttcattataaaagtga

SEQ ID NO: 190679 - DNA, 54 bp, Artificial
  Synthetic oligonucleotide
agaccctgtaaactaccttgccagtgcacccgctacccagctgtgggtacgtct

SEQ ID NO: 190680 - DNA, 54 bp, Artificial
  Synthetic oligonucleotide
caggtacgcactactaccgattaaacggaactgtacccactgccgtggattgga

SEQ ID NO: 190681 - DNA, 54 bp, Artificial
  Synthetic oligonucleotide
aggtgcaaaggagcgagacacttccgaaatgcccacatttccttgcagaggtcg

SEQ ID NO: 190682 - DNA, 54 bp, Artificial
  Synthetic oligonucleotide
aacgagctataccttaaaagattgatcgttggaggttttgacggagtctatgag

SEQ ID NO: 190683 - DNA, 54 bp, Artificial
  Synthetic oligonucleotide
aatcacttttgaccccgatggaatgaccccattatccttagaagccacacaaca

SEQ ID NO: 190684 - DNA, 54 bp, Artificial
  Synthetic oligonucleotide
agcatctggtccacgcatctgaattttaccaatgctaccgtcctccatcataac

SEQ ID NO: 190685 - DNA, 54 bp, Artificial
  Synthetic oligonucleotide
gaagttttcgactgctaatgttggctcataagttctcctatcgcgaacaggatt

SEQ ID NO: 190686 - DNA, 57 bp, Artificial
  Synthetic oligonucleotide
gcaggtaataaatcattattttcttctatccttaacattcttacatcttttacacaa

SEQ ID NO: 190687 - DNA, 54 bp, Artificial
  Synthetic oligonucleotide
cggaccattattcactttcgcaagtggggtaagcttattactgttctatgcatt

SEQ ID NO: 190688 - DNA, 51 bp, Artificial
  Synthetic oligonucleotide
agccggaagtggtgcggtcacttttggaacgccaaacagtcccggggttac

SEQ ID NO: 190689 - DNA, 54 bp, Artificial
  Synthetic oligonucleotide
cggcgtggtatcctcaggctcgcagagtgctgccgtgtaggacgtgtccgtgag

SEQ ID NO: 190690 - DNA, 54 bp, Artificial
  Synthetic oligonucleotide
ccccgcattgcgaaaggctcgaggcgtttggtacaccccgcaacctgtggtaaa

SEQ ID NO: 190691 - DNA, 54 bp, Artificial
  Synthetic oligonucleotide
acctctgacaattgcgaaccaagcttcattcgtacctcaaattcagccttactc

SEQ ID NO: 190692 - DNA, 53 bp, Artificial
  Synthetic oligonucleotide
agcgaacacccacgtttatggcccggaacagggtcccgaaccaattggagcga

SEQ ID NO: 190693 - DNA, 53 bp, Artificial
  Synthetic oligonucleotide
cttgcctacgccccttaccccatctctaaaacggacggggcactgaataccac

SEQ ID NO: 190694 - DNA, 53 bp, Artificial
  Synthetic oligonucleotide
cgactaaccaacatggaagactgacattcagtaacctaatttaccgggtaccc

SEQ ID NO: 190695 - DNA, 53 bp, Artificial
  Synthetic oligonucleotide
gttaaacgtgttatatcctgagaagaatccaacaccagcttgatctccagtaa

SEQ ID NO: 190696 - DNA, 53 bp, Artificial
  Synthetic oligonucleotide
aggctgccaggccactagaaaccagttcgtaagggttgggcccaagatcgcta

SEQ ID NO: 190697 - DNA, 55 bp, Artificial
  Synthetic oligonucleotide
ctgaaagtgtgttaaaactagaatcgtcgcttaaatcggctaatatggctttaaa

SEQ ID NO: 190698 - DNA, 56 bp, Artificial
  Synthetic oligonucleotide
acccgaatggtttacaggttggataaggattgtttggtatgccgtagcctatatgc

SEQ ID NO: 190699 - DNA, 53 bp, Artificial
  Synthetic oligonucleotide
cgacaacctccaacgtacctccacgcgctatgtggcaagcaacacttacaaaa

SEQ ID NO: 190700 - DNA, 53 bp, Artificial
  Synthetic oligonucleotide
gctatctgtggaacccaaaactcaacatttattacgtggcggcttccgagact

SEQ ID NO: 190701 - DNA, 53 bp, Artificial
  Synthetic oligonucleotide
cgagctgcagaaattggaggaactcccgctcccggatttacttcggcgcaagc

SEQ ID NO: 190702 - DNA, 53 bp, Artificial
  Synthetic oligonucleotide
aggcccactcccggagctggagcatcgccataccccgacatcggagccacggt

SEQ ID NO: 190703 - DNA, 53 bp, Artificial
  Synthetic oligonucleotide
aggactaaaagcgcacaggcgaacaacactagaaaacaagtctttaaggaaga

SEQ ID NO: 190704 - DNA, 50 bp, Artificial
  Synthetic oligonucleotide
gttcggtaccaacccacacctacgaacggaagtccgcccgtacgccccga

SEQ ID NO: 190705 - DNA, 53 bp, Artificial
  Synthetic oligonucleotide
aggaatggtcttcgcctcactcacccgctcctccgaaacaggtatcagcggca

SEQ ID NO: 190706 - DNA, 53 bp, Artificial
  Synthetic oligonucleotide
agcgctgctattgccgctgatacctgtttcggaggagcgggtgagtgaggcga

SEQ ID NO: 190707 - DNA, 53 bp, Artificial
  Synthetic oligonucleotide
agcgcagaggctgcgcctccaagtgctgttctaaaatcgagccccattgaagc

SEQ ID NO: 190708 - DNA, 53 bp, Artificial
  Synthetic oligonucleotide
taacgtgtgtataattaactgtccgttagagcctccgtcatcactagttggta

SEQ ID NO: 190709 - DNA, 58 bp, Artificial
  Synthetic oligonucleotide
ttacatagccttgtccgccgtggtgcggagttactttcacgcgcacacctgctggtgc

SEQ ID NO: 190710 - DNA, 53 bp, Artificial
  Synthetic oligonucleotide
cgcacggcgtacgactaccgctttaacgctccgttggaagttaccgaccgcaa

SEQ ID NO: 190711 - DNA, 53 bp, Artificial
  Synthetic oligonucleotide
taactggagatgaggcgcttgaggcgttacacgcagcttcgaaagcgtacgga

SEQ ID NO: 190712 - DNA, 53 bp, Artificial
  Synthetic oligonucleotide
agcacgtataactgttccatggtaggagattggctaccgccctcaggctccag

SEQ ID NO: 190713 - DNA, 53 bp, Artificial
  Synthetic oligonucleotide
cgcactggaaagtcaaagtacacaccctgttgctacagctatacatcaatatg

SEQ ID NO: 190714 - DNA, 53 bp, Artificial
  Synthetic oligonucleotide
cgccagacaaacctataaaatgctgcccataactgtaggcgggaaagaaaacg

SEQ ID NO: 190715 - DNA, 53 bp, Artificial
  Synthetic oligonucleotide
caactcttccgcaatgggcgtggcgagttcaggcaagtgcgaaacggtctgga

SEQ ID NO: 190716 - DNA, 53 bp, Artificial
  Synthetic oligonucleotide
caccacccgagatgcccttggcagacctaccgagcaactcacagggcacgcca

SEQ ID NO: 190717 - DNA, 52 bp, Artificial
  Synthetic oligonucleotide
caccgtttacctgaagcgtggtaccgttaatccatttagactcttccttggt

SEQ ID NO: 190718 - DNA, 51 bp, Artificial
  Synthetic oligonucleotide
cccgacccctagcggtgggattttcggctgatggaaagggggtacgcccta

SEQ ID NO: 190719 - DNA, 53 bp, Artificial
  Synthetic oligonucleotide
ggggcgcatattgtgatgcatagtgctacaaagtacttaggcggtcacagtga

SEQ ID NO: 190720 - DNA, 56 bp, Artificial
  Synthetic oligonucleotide
ttacacaacaaggtttattaaacaactatgccctattcaaagattgtaaggctaca

SEQ ID NO: 190721 - DNA, 53 bp, Artificial
  Synthetic oligonucleotide
cagatacggcacttgcacgtagccctcccccgagaaaaccccattactgcccg

SEQ ID NO: 190722 - DNA, 50 bp, Artificial
  Synthetic oligonucleotide
ccccgttgcggtcggtaacttccaacggagcgttaaagcggtagtcgtac

SEQ ID NO: 190723 - DNA, 53 bp, Artificial
  Synthetic oligonucleotide
ccccgcagtgaagccgcggaacgaagtggagcggcaaaacgaggagtatgagc

SEQ ID NO: 190724 - DNA, 53 bp, Artificial
  Synthetic oligonucleotide
ggggatcacgccggtatcgtgcaacgcgctgcgcaatctggttctttgcttcg

SEQ ID NO: 190725 - DNA, 53 bp, Artificial
  Synthetic oligonucleotide
ggcaggaggatatgcacccatccgacacggagcaaacactacgctgggcttgg

SEQ ID NO: 190726 - DNA, 53 bp, Artificial
  Synthetic oligonucleotide
ggggaattcctggtcaaggtccgacacctgccgggccgatcagcgatcacagg

SEQ ID NO: 190727 - DNA, 53 bp, Artificial
  Synthetic oligonucleotide
cagcccccttctccctaaggtatgaggaggctcccagcccaacttgccgttta

SEQ ID NO: 190728 - DNA, 53 bp, Artificial
  Synthetic oligonucleotide
caggaggataccgtctgcgaccctgcaatgggaacggctggttttctggtggc

SEQ ID NO: 190729 - DNA, 53 bp, Artificial
  Synthetic oligonucleotide
cccagccgtctggccctccgtcgaaaatcgcgatgtacattccgtttggcaac

SEQ ID NO: 190730 - DNA, 53 bp, Artificial
  Synthetic oligonucleotide
cattaccgtcaaagccatagaaatatgtatcaaacgaatggaaactccgcccc

SEQ ID NO: 190731 - DNA, 57 bp, Artificial
  Synthetic oligonucleotide
ttctttgcggttctttgattgagtttggctatcgttctcatttcatcccacctttcc

SEQ ID NO: 190732 - DNA, 53 bp, Artificial
  Synthetic oligonucleotide
cattgcgattgggatggcttactcaacagcattaaagcaactgagtgtgaaaa

SEQ ID NO: 190733 - DNA, 53 bp, Artificial
  Synthetic oligonucleotide
gggaagcattcttggagtggttcccagccagtgaagggtagttccgccgccta

SEQ ID NO: 190734 - DNA, 53 bp, Artificial
  Synthetic oligonucleotide
ccaaagctactcattggcacacaaccacaggttggtcctacttcgtctaactg

SEQ ID NO: 190735 - DNA, 53 bp, Artificial
  Synthetic oligonucleotide
gctattgtcgcagaatctgatcgcgtggctaaatttctaataccacgtagcga

SEQ ID NO: 190736 - DNA, 53 bp, Artificial
  Synthetic oligonucleotide
cgaatacaaccccgcattgcgaaaggctcgaggcgtttggtacaccccgcaac

SEQ ID NO: 190737 - DNA, 53 bp, Artificial
  Synthetic oligonucleotide
gctctaaggctaccaaatctttatgatttaaacttaaatcgacatcaggcaac

SEQ ID NO: 190738 - DNA, 53 bp, Artificial
  Synthetic oligonucleotide
cctttgccttgtccgcctgcatttcattgtctgcggcctgcggaacgatgtta

SEQ ID NO: 190739 - DNA, 53 bp, Artificial
  Synthetic oligonucleotide
gctctttgtctgccttacgctcgtttaatccatctacgatagcatctgttacg

SEQ ID NO: 190740 - DNA, 53 bp, Artificial
  Synthetic oligonucleotide
gtgagttgttaactaattgatctctataccaactcatgctttcaccacgccaa

SEQ ID NO: 190741 - DNA, 53 bp, Artificial
  Synthetic oligonucleotide
cctacgcgcctttcgggggtaatgtggtaggattagagactgccgcttggcga

SEQ ID NO: 190742 - DNA, 56 bp, Artificial
  Synthetic oligonucleotide
tctcgacccaagtacccccaacgccaaagtaggcatacaagctggtatggacgtcc

SEQ ID NO: 190743 - DNA, 53 bp, Artificial
  Synthetic oligonucleotide
ccgtctgcgaccctgcaatgggaacggctggttttctggtggctacgggcgaa

SEQ ID NO: 190744 - DNA, 53 bp, Artificial
  Synthetic oligonucleotide
atcaagaggcgggcgtgcgtcctacgacgggggatagaagaccactccttggt

SEQ ID NO: 190745 - DNA, 53 bp, Artificial
  Synthetic oligonucleotide
atcactactccacaaggagcaaagccggcgcctactcaaacacgcagcgcagg

SEQ ID NO: 190746 - DNA, 53 bp, Artificial
  Synthetic oligonucleotide
atcagatagggttgctgaactatacgggaacaagtaggctgaacctgaataca

SEQ ID NO: 190747 - DNA, 53 bp, Artificial
  Synthetic oligonucleotide
ccgctcccggatttacttcggcgcaagccatgactgctttacaggaaacggcc

SEQ ID NO: 190748 - DNA, 53 bp, Artificial
  Synthetic oligonucleotide
ccgcctaaaagggcaggagcaacgttgtcggcatgtgcgtttccgctggctaa

SEQ ID NO: 190749 - DNA, 53 bp, Artificial
  Synthetic oligonucleotide
ggacaatcggcatcaacttaatactagctcaggtgggtgctaaaatatgtgct

SEQ ID NO: 190750 - DNA, 53 bp, Artificial
  Synthetic oligonucleotide
ccgccccaatccccactgattgcagcattccaatccactccgtgaccaggcat

SEQ ID NO: 190751 - DNA, 53 bp, Artificial
  Synthetic oligonucleotide
atgggcgtggcgagttcaggcaagtgcgaaacggtctggagatgttcagacgg

SEQ ID NO: 190752 - DNA, 53 bp, Artificial
  Synthetic oligonucleotide
aagatctatgtgagctctgtaaatcccgggaatgctgcagaagacgtagaaaa

SEQ ID NO: 190753 - DNA, 58 bp, Artificial
  Synthetic oligonucleotide
ctatcgtgttcttaccttcaaagtttatcctgtttattgatatatgcaaatggggctg

SEQ ID NO: 190754 - DNA, 53 bp, Artificial
  Synthetic oligonucleotide
attgctagagggcgtgtcgcacgcaaaggtgacacagcaaaccgagcagctca

SEQ ID NO: 190755 - DNA, 53 bp, Artificial
  Synthetic oligonucleotide
ccgaacggtcagagaatttcagccacgctcgcaggaggatacaacccgattcg

SEQ ID NO: 190756 - DNA, 53 bp, Artificial
  Synthetic oligonucleotide
gccctaaaattgcacctgtcataactcccatagttaaaagcgctcctaaccaa

SEQ ID NO: 190757 - DNA, 53 bp, Artificial
  Synthetic oligonucleotide
gcccgtttaaagggcaaggggcaaatcaggcgctactcgatgcgctagcacta

SEQ ID NO: 190758 - DNA, 53 bp, Artificial
  Synthetic oligonucleotide
cgtgtcgtattttccataggtggccttagcaatgaccctacgtacaatggtac

SEQ ID NO: 190759 - DNA, 53 bp, Artificial
  Synthetic oligonucleotide
accgtggctccgatgtcggggtatggcgatgctccagctccgggagtgggcct

SEQ ID NO: 190760 - DNA, 53 bp, Artificial
  Synthetic oligonucleotide
tcggtgacccaacgaggtaggttaggtgcccccaatactgcatagctcagccc

SEQ ID NO: 190761 - DNA, 53 bp, Artificial
  Synthetic oligonucleotide
ctacactaccaaaatatcgataaagtctacactagggaaatgctggagcatag

SEQ ID NO: 190762 - DNA, 53 bp, Artificial
  Synthetic oligonucleotide
gccccaggtgatgagtggcgaacggaagttcctgcgttgccttcgcaagattt

SEQ ID NO: 190763 - DNA, 53 bp, Artificial
  Synthetic oligonucleotide
tcgtccgagaactccattactgcctgtcgtgctacgactacccgtgtggctca

SEQ ID NO: 190764 - DNA, 58 bp, Artificial
  Synthetic oligonucleotide
atgccacgagggggtttcacatacgcccacaaaatctcataagcacgcggagcacaga

SEQ ID NO: 190765 - DNA, 53 bp, Artificial
  Synthetic oligonucleotide
tctaaaatatatagatgccttcttaaacctattcggtatattcatcggatttg

SEQ ID NO: 190766 - DNA, 53 bp, Artificial
  Synthetic oligonucleotide
ctacgcccccgactttcctgcatcgctgggaggtgattcttacttggacggga

SEQ ID NO: 190767 - DNA, 53 bp, Artificial
  Synthetic oligonucleotide
aattcctgcctacggatggtggaatgaggcacttcacggggtggcgagagcag

SEQ ID NO: 190768 - DNA, 53 bp, Artificial
  Synthetic oligonucleotide
ctactgttggagatagtttagctgccacaattaacgtagttagtgcagatctt

SEQ ID NO: 190769 - DNA, 53 bp, Artificial
  Synthetic oligonucleotide
gaaattataggacctgacgttcagatcatagattcgggagaggcggttgctaa

SEQ ID NO: 190770 - DNA, 53 bp, Artificial
  Synthetic oligonucleotide
ctatccgcattaggcaatggctttcccattgctgacctacgaaaaaattcagg

SEQ ID NO: 190771 - DNA, 53 bp, Artificial
  Synthetic oligonucleotide
tcttggggcggtggacatcgtgtacccaacggaaggcttaacgtgggccctaa

SEQ ID NO: 190772 - DNA, 53 bp, Artificial
  Synthetic oligonucleotide
gccaccagaaaaccagccgttcccattgcagggtcgcagacggtatcctcctg

SEQ ID NO: 190773 - DNA, 52 bp, Artificial
  Synthetic oligonucleotide
aaaccgaaccgcacgtattggattattacaacgctaggccttttatggaatt

SEQ ID NO: 190774 - DNA, 53 bp, Artificial
  Synthetic oligonucleotide
ctcaggtgactggccgtcgttacctcgccccacgtccagatgtggtcagcttc

SEQ ID NO: 190775 - DNA, 58 bp, Artificial
  Synthetic oligonucleotide
cctcggacggtgctcaccacatattgtgcatctgcctcaacctgcggattaccctcta

SEQ ID NO: 190776 - DNA, 53 bp, Artificial
  Synthetic oligonucleotide
tgcccgcgttagcggttgtagcattgttggagctcctcgcagagagcgactgc

SEQ ID NO: 190777 - DNA, 53 bp, Artificial
  Synthetic oligonucleotide
cttgctatacgggagttccatatgcggatgcggtatcaataacaagggacaac

SEQ ID NO: 190778 - DNA, 53 bp, Artificial
  Synthetic oligonucleotide
cttcgttccgcggcttcactgcggggtatccgcttccatcggggctagtttca

SEQ ID NO: 190779 - DNA, 53 bp, Artificial
  Synthetic oligonucleotide
ctcctccccggaaagcacggcattagagcaggcacttatataggctggcggct

SEQ ID NO: 190780 - DNA, 53 bp, Artificial
  Synthetic oligonucleotide
tgcgtatgggcacgggtcactttgccgttgtcgatatagacttttacgtccaa

SEQ ID NO: 190781 - DNA, 53 bp, Artificial
  Synthetic oligonucleotide
gcatctggtacaccattgcaagatgaggatcgatggccgtggctcgatagcct

SEQ ID NO: 190782 - DNA, 53 bp, Artificial
  Synthetic oligonucleotide
cttcgcctcactcacccgctcctccgaaacaggtatcagcggcaatagcagcg

SEQ ID NO: 190783 - DNA, 53 bp, Artificial
  Synthetic oligonucleotide
tgctgacgatatgggtcgcccaaagtttcggccaatcccccgcatccgcatac

SEQ ID NO: 190784 - DNA, 53 bp, Artificial
  Synthetic oligonucleotide
tgggaacatcaggtgcccaagacggctcgtgctgtattgccgcggatcaacct

SEQ ID NO: 190785 - DNA, 53 bp, Artificial
  Synthetic oligonucleotide
tgctttccgtggttccgtttctaccggattcagagcgccttctctggcgcaga

SEQ ID NO: 190786 - DNA, 58 bp, Artificial
  Synthetic oligonucleotide
ttgcaactctaagtccatcggaatcatccgccccgtccgacttgtccgacaggtcagc

SEQ ID NO: 190787 - DNA, 53 bp, Artificial
  Synthetic oligonucleotide
acactcgcttccgcggaactaggcagtccatcgatagcaacaccagcggctta

SEQ ID NO: 190788 - DNA, 53 bp, Artificial
  Synthetic oligonucleotide
gcagtcgctctctgcgaggagctccaacaatgctacaaccgctaacgcgggca

SEQ ID NO: 190789 - DNA, 53 bp, Artificial
  Synthetic oligonucleotide
gataggagctgaactccccgatagtaacgtgttcgaaggtaaaacgctcttcc

SEQ ID NO: 190790 - DNA, 53 bp, Artificial
  Synthetic oligonucleotide
aaaactaaacggacttgtgagtctaattcccgattcaacaggcaagttagcag

SEQ ID NO: 190791 - DNA, 53 bp, Artificial
  Synthetic oligonucleotide
gaggctaaacatggtaaaacatcggtttgaatagtgtcatgttttacgtctcc

SEQ ID NO: 190792 - DNA, 53 bp, Artificial
  Synthetic oligonucleotide
agactcctttgccatacaaacgatgggtaggcatataagttaccaccatctta

SEQ ID NO: 190793 - DNA, 53 bp, Artificial
  Synthetic oligonucleotide
tacgtgtagttcctccagctactgcacgccgtggtgcgtatcttgctcctgga

SEQ ID NO: 190794 - DNA, 53 bp, Artificial
  Synthetic oligonucleotide
agaagcctctggagtagggtactttacgaaccaatcgcgcactacatagcgat

SEQ ID NO: 190795 - DNA, 53 bp, Artificial
  Synthetic oligonucleotide
agaacgtgcgatggacttgcataacaaccgcgtggggcgcaacctcatcacta

SEQ ID NO: 190796 - DNA, 53 bp, Artificial
  Synthetic oligonucleotide
acttggagtagttctgagtggaatgtatgggcagatagtacaataagtggctg

SEQ ID NO: 190797 - DNA, 57 bp, Artificial
  Synthetic oligonucleotide
gtcctaataatgggcaatggaagttcgatgtaacatttaacaatattggtaagcaac

SEQ ID NO: 190798 - DNA, 53 bp, Artificial
  Synthetic oligonucleotide
acttatacacgcggttaatgctcaaatccatacgcttggtatgcacctcgctt

SEQ ID NO: 190799 - DNA, 53 bp, Artificial
  Synthetic oligonucleotide
ttggaggaactcccgctcccggatttacttcggcgcaagccatgactgcttta

SEQ ID NO: 190800 - DNA, 52 bp, Artificial
  Synthetic oligonucleotide
aagtatcaggtaaagcggggcgttcgcgttggaaaggacgtcgttctagaac

SEQ ID NO: 190801 - DNA, 53 bp, Artificial
  Synthetic oligonucleotide
ttgcggttatggaagaaatggtacacaggcagcagaacgtttaaaagcgtaca

SEQ ID NO: 190802 - DNA, 53 bp, Artificial
  Synthetic oligonucleotide
acgggcttgtgcagcgtgactgtctttggtccaaatgccgaaaccgcaaacgg

SEQ ID NO: 190803 - DNA, 53 bp, Artificial
  Synthetic oligonucleotide
cggtggacatcgtgtacccaacggaaggcttaacgtgggccctaacggagaga

SEQ ID NO: 190804 - DNA, 53 bp, Artificial
  Synthetic oligonucleotide
cggtgtcgtattcatagggcctccaagagtgtctgcgagtagggatgccgggg

SEQ ID NO: 190805 - DNA, 53 bp, Artificial
  Synthetic oligonucleotide
acgagacaacgcctcggttccattattcgggaattgcaggctagacggtggct

SEQ ID NO: 190806 - DNA, 53 bp, Artificial
  Synthetic oligonucleotide
acgctagtaatatagaacaccggcataaagtgaaccattgcgtgtactcctac

SEQ ID NO: 190807 - DNA, 53 bp, Artificial
  Synthetic oligonucleotide
tatttgtagaccaggtccagtccgttgtcccgctcaggtagactttaaaccac

SEQ ID NO: 190808 - DNA, 53 bp, Artificial
  Synthetic oligonucleotide
ctgataatcaaaccccattagttcaaagggtttgaactgagagttcaaagggt

SEQ ID NO: 190809 - DNA, 57 bp, Artificial
  Synthetic oligonucleotide
gtgttggtttcataaccaccatgcttcgtggcgcagagtgggctgccaccggaaatg

SEQ ID NO: 190810 - DNA, 53 bp, Artificial
  Synthetic oligonucleotide
cggttatggatgattgcaactaatattgcctcgtctgaagagctagaccaact

SEQ ID NO: 190811 - DNA, 53 bp, Artificial
  Synthetic oligonucleotide
gacgtagacgtgtaagacgctatcgtccacgtgttgcccctccaagagttcgc

SEQ ID NO: 190812 - DNA, 53 bp, Artificial
  Synthetic oligonucleotide
tatcaattccctcgtcccgtacttcggaccaggttagtttgtgaatatccgac

SEQ ID NO: 190813 - DNA, 53 bp, Artificial
  Synthetic oligonucleotide
gccgtaagttcgtgtcccatagcgtgtaccgcccaatcggtagccacgcctaa

SEQ ID NO: 190814 - DNA, 53 bp, Artificial
  Synthetic oligonucleotide
tatcgcctctcctggcggaacgacgcactttaaggttgtgatgggtgcaacgg

SEQ ID NO: 190815 - DNA, 53 bp, Artificial
  Synthetic oligonucleotide
tatcgtcctcgtgtgacaccgccaagagttcgcacagttcgtccaaagccagc

SEQ ID NO: 190816 - DNA, 52 bp, Artificial
  Synthetic oligonucleotide
ggcttgtacgcgtattggagcggttcacgcaattgtttacgcaggactttct

SEQ ID NO: 190817 - DNA, 52 bp, Artificial
  Synthetic oligonucleotide
tttgagtatgtagggcagggtagaggcgactattctgcgttgcgaaagttac

SEQ ID NO: 190818 - DNA, 52 bp, Artificial
  Synthetic oligonucleotide
ttcccccttcgggtctgcgttaggtcccgactgacccccagctgattagcat

SEQ ID NO: 190819 - DNA, 52 bp, Artificial
  Synthetic oligonucleotide
aaggggtttatcatgagccagtataaaagccgaagtcaggtattgagctatg

SEQ ID NO: 190820 - DNA, 55 bp, Artificial
  Synthetic oligonucleotide
aagccaattcccgagcccagcgcttagagaatggggtgcttacccacttagaccc

SEQ ID NO: 190821 - DNA, 52 bp, Artificial
  Synthetic oligonucleotide
ggtatccagcccgttcctatatttaaactcgcgcatggagagcgtaatttta

SEQ ID NO: 190822 - DNA, 52 bp, Artificial
  Synthetic oligonucleotide
caagcaataagggtttttggttatattatgacgaaattaataccaaggcaag

SEQ ID NO: 190823 - DNA, 52 bp, Artificial
  Synthetic oligonucleotide
caatccacgctgtttcagccgcagcagactgcgacggtagtccagctctccg

SEQ ID NO: 190824 - DNA, 52 bp, Artificial
  Synthetic oligonucleotide
cagcaggcgcaccaggactaacagtcacttaccatgaaacgatggccgatgc

SEQ ID NO: 190825 - DNA, 52 bp, Artificial
  Synthetic oligonucleotide
ttgcatgccaagcaccttgtgataaccacaggaagtaaccctaaagtgtggc

SEQ ID NO: 190826 - DNA, 52 bp, Artificial
  Synthetic oligonucleotide
ttccattggattaaagggcataacggacaccccgacaatgagcgatgcgata

SEQ ID NO: 190827 - DNA, 52 bp, Artificial
  Synthetic oligonucleotide
acaacttgagctgtagcacttggtcctgaaactttagttgtggaatcagcac

SEQ ID NO: 190828 - DNA, 52 bp, Artificial
  Synthetic oligonucleotide
gggtactcttggttaggcatcatcgcctgagcactccagcgcagttgtgccg

SEQ ID NO: 190829 - DNA, 52 bp, Artificial
  Synthetic oligonucleotide
cacggtgcgtggtgagatttttcaaggggcgcgctacctaggcgctagctct

SEQ ID NO: 190830 - DNA, 52 bp, Artificial
  Synthetic oligonucleotide
aattgtacatcgaacccgttagcggaacgccacaagtggtgatagaattcaa

SEQ ID NO: 190831 - DNA, 57 bp, Artificial
  Synthetic oligonucleotide
gccgctgccgccaactgtagtaaataagcgttcccaacgcacgccacctttattggc

SEQ ID NO: 190832 - DNA, 52 bp, Artificial
  Synthetic oligonucleotide
aaaagcaaactgagatacgttctcggtaacagcttctttcatcaatccgcga

SEQ ID NO: 190833 - DNA, 52 bp, Artificial
  Synthetic oligonucleotide
ttccaaatgtaatacacgacgctgtttgtgatttgtagtgcgattggaagcg

SEQ ID NO: 190834 - DNA, 52 bp, Artificial
  Synthetic oligonucleotide
catgtgtgctattgcgtccttttcgttcaggatcataatttgggttgtcaaa

SEQ ID NO: 190835 - DNA, 52 bp, Artificial
  Synthetic oligonucleotide
aatggtgtgtaggcgtcctccgtaatcataaacgagccatccaaaggtcccg

SEQ ID NO: 190836 - DNA, 52 bp, Artificial
  Synthetic oligonucleotide
caggtgtgatacaacacaatgaagctgtgattgctgttaggatacttgtaac

SEQ ID NO: 190837 - DNA, 52 bp, Artificial
  Synthetic oligonucleotide
tcggagggaataaaccagtgcatgatccacaattaccagtctgctcttcata

SEQ ID NO: 190838 - DNA, 52 bp, Artificial
  Synthetic oligonucleotide
aggcttcgagcgaatgtttgataactccgttttgagttacttcggtcatggg

SEQ ID NO: 190839 - DNA, 52 bp, Artificial
  Synthetic oligonucleotide
tcccatagcgtgtaccgcccaatcggtagccacgcctaaacgcaacagtccg

SEQ ID NO: 190840 - DNA, 52 bp, Artificial
  Synthetic oligonucleotide
aggcgcgttgcatagctagcgcttgtccttgtggacggggagcgtaaaccga

SEQ ID NO: 190841 - DNA, 52 bp, Artificial
  Synthetic oligonucleotide
tatgctaatcagctgggggtcagtcgggacctaacgcagacccgaaggggga

SEQ ID NO: 190842 - DNA, 57 bp, Artificial
  Synthetic oligonucleotide
agcggtgaaatttgcctcaacggccccgcagcaagacgtgtacaagtgggcgatacc

SEQ ID NO: 190843 - DNA, 52 bp, Artificial
  Synthetic oligonucleotide
tataagcatacttcggggtgctgaatgttggcctctaaggtctcgaatggca

SEQ ID NO: 190844 - DNA, 52 bp, Artificial
  Synthetic oligonucleotide
taacccagcacgtggtgagaatggaccgcgcgctaccaacttatggggagat

SEQ ID NO: 190845 - DNA, 52 bp, Artificial
  Synthetic oligonucleotide
tagggcgtaccccctttccatcagccgaaaatcccaccgctaggggtcgggc

SEQ ID NO: 190846 - DNA, 52 bp, Artificial
  Synthetic oligonucleotide
actgccctcagacggtaaagtgaatgctcaacgcaatgattttccgtacgga

SEQ ID NO: 190847 - DNA, 52 bp, Artificial
  Synthetic oligonucleotide
tagccccgatggaagcggataccccgcagtgaagccgcggaacgaagtggag

SEQ ID NO: 190848 - DNA, 52 bp, Artificial
  Synthetic oligonucleotide
taaggttgcgttgataaagaatgctcctttggtggcaatagtctgttcgggg

SEQ ID NO: 190849 - DNA, 52 bp, Artificial
  Synthetic oligonucleotide
tacgccccttagcgtctatggtatagtgcagttgctccccgttgcggtcggt

SEQ ID NO: 190850 - DNA, 52 bp, Artificial
  Synthetic oligonucleotide
taatttcggctcgtgctccttacgatttacaatatgcaagtcatgcttggta

SEQ ID NO: 190851 - DNA, 52 bp, Artificial
  Synthetic oligonucleotide
tacaggctcgtaagcacaacggcggaaagtggacttgttcctggcgtggcta

SEQ ID NO: 190852 - DNA, 52 bp, Artificial
  Synthetic oligonucleotide
aaagtctcccatctctaatatcactccaacgagtcctaaaagcgtctgatac

SEQ ID NO: 190853 - DNA, 56 bp, Artificial
  Synthetic oligonucleotide
ccgtacgcttagtggtgtgagaggcgcagtccgtcctaactaggggcggatccgtc

SEQ ID NO: 190854 - DNA, 52 bp, Artificial
  Synthetic oligonucleotide
taccgaccgcaacggggagcaactgcactataccatagacgctaaggggcgt

SEQ ID NO: 190855 - DNA, 52 bp, Artificial
  Synthetic oligonucleotide
agcaccccaatgcgcatctaagccggcatcatctttagctgcattgtgaaat

SEQ ID NO: 190856 - DNA, 52 bp, Artificial
  Synthetic oligonucleotide
ggtctacctcattggccggaccataaccggggaatccctgggaacctcctgg

SEQ ID NO: 190857 - DNA, 52 bp, Artificial
  Synthetic oligonucleotide
attcgcccgtagccaccagaaaaccagccgttcccattgcagggtcgcagac

SEQ ID NO: 190858 - DNA, 52 bp, Artificial
  Synthetic oligonucleotide
ggtggagtagccacggtaggacaggcgcttacaggacgtttgcctggcgtta

SEQ ID NO: 190859 - DNA, 52 bp, Artificial
  Synthetic oligonucleotide
tgctgaaactagccccgatggaagcggataccccgcagtgaagccgcggaac

SEQ ID NO: 190860 - DNA, 52 bp, Artificial
  Synthetic oligonucleotide
ggtgtcttattcgtaagactactttcggagtagacttctttattctcctgag

SEQ ID NO: 190861 - DNA, 52 bp, Artificial
  Synthetic oligonucleotide
tgcgtcagggaagttggccgtactgatgctttctatgccgccaatgatagga

SEQ ID NO: 190862 - DNA, 52 bp, Artificial
  Synthetic oligonucleotide
tgcggtaaccggccccgctaaacatccacgtccagcctcatcagttccagtc

SEQ ID NO: 190863 - DNA, 52 bp, Artificial
  Synthetic oligonucleotide
atgataatttgccttccgctgtagtcgaagtactccacttttgaccttagga

SEQ ID NO: 190864 - DNA, 57 bp, Artificial
  Synthetic oligonucleotide
gaaagtgaacctggtagatatcgattaattggtactataaattgtacaggtgctacc

SEQ ID NO: 190865 - DNA, 52 bp, Artificial
  Synthetic oligonucleotide
gtaacgtttcggctatggttagtgcgctgcaagaagtcgtagacgtcgggct

SEQ ID NO: 190866 - DNA, 52 bp, Artificial
  Synthetic oligonucleotide
tgcgggtcacgtcctcgaaacaaggatagcggaagaccgggtggacatcttt

SEQ ID NO: 190867 - DNA, 52 bp, Artificial
  Synthetic oligonucleotide
gtacaagttggtaatatcttcagcatcgggtttggtattgtcttgcacacgt

SEQ ID NO: 190868 - DNA, 52 bp, Artificial
  Synthetic oligonucleotide
accacaccgccaattccgtcggcgccagccaaagtaacaaatccaacgcccg

SEQ ID NO: 190869 - DNA, 52 bp, Artificial
  Synthetic oligonucleotide
tcttgatcccatacactgtttacaacctgcatagaagttgcgccagctccaa

SEQ ID NO: 190870 - DNA, 52 bp, Artificial
  Synthetic oligonucleotide
gtgcaaccatctctctgcagcacgccacggtcctaaagtgtgagaactcgat

SEQ ID NO: 190871 - DNA, 52 bp, Artificial
  Synthetic oligonucleotide
gtgctcggttcaggccaccttgtctagtgtcccactgtcgtgaccactggct

SEQ ID NO: 190872 - DNA, 52 bp, Artificial
  Synthetic oligonucleotide
aggtatcaggggtcagacgattggtaaagccagtattgggtatgtgagtaac

SEQ ID NO: 190873 - DNA, 52 bp, Artificial
  Synthetic oligonucleotide
ggacctagacctccaaaggcaggacctacgtttcctagcgcagaggctgcgc

SEQ ID NO: 190874 - DNA, 52 bp, Artificial
  Synthetic oligonucleotide
cccgtcggcgtgacccactgaaatagtcgccgttcgagtaggagcatctgct

SEQ ID NO: 190875 - DNA, 56 bp, Artificial
  Synthetic oligonucleotide
cggaattgcacgttgaagggagcagtaacaccccgatagtacaccgaggctacggc

SEQ ID NO: 190876 - DNA, 52 bp, Artificial
  Synthetic oligonucleotide
gcggcacggggtcggtcatctcggatgcaggtgtattatcacgctcggaata

SEQ ID NO: 190877 - DNA, 52 bp, Artificial
  Synthetic oligonucleotide
ggagtatcaataaggagacgcgcacttgggttgagggcgccattcggaatgg

SEQ ID NO: 190878 - DNA, 52 bp, Artificial
  Synthetic oligonucleotide
gcattagatttagctacctcgctataagcaatataaccataacaaaatcctc

SEQ ID NO: 190879 - DNA, 52 bp, Artificial
  Synthetic oligonucleotide
ctcctcgttttgccgctccacttcgttccgcggcttcactgcggggtatccg

SEQ ID NO: 190880 - DNA, 52 bp, Artificial
  Synthetic oligonucleotide
gagattttgtacaaggaccgaaagagtaaattctatgctgcggtacatccca

SEQ ID NO: 190881 - DNA, 52 bp, Artificial
  Synthetic oligonucleotide
aaccagagggtggcagtaatgattcgcaaccacaatggatgggagaattcgt

SEQ ID NO: 190882 - DNA, 52 bp, Artificial
  Synthetic oligonucleotide
cccttatgcctctattggggataatgcctctattctgctgcggggcggtggt

SEQ ID NO: 190883 - DNA, 52 bp, Artificial
  Synthetic oligonucleotide
cgaaacagctcgttggttagccccaggttcttataacctatcagtacgcgat

SEQ ID NO: 190884 - DNA, 52 bp, Artificial
  Synthetic oligonucleotide
ccgctcatactcctcgttttgccgctccacttcgttccgcggcttcactgcg

SEQ ID NO: 190885 - DNA, 52 bp, Artificial
  Synthetic oligonucleotide
gcgtcccttggaagctcgccgtagttggcgcacttgcctttggtctgtctac

SEQ ID NO: 190886 - DNA, 55 bp, Artificial
  Synthetic oligonucleotide
cctcccctagttaggacggactgcgcctctcacaccactaagcgtacgggtctcg

SEQ ID NO: 190887 - DNA, 52 bp, Artificial
  Synthetic oligonucleotide
gctggtaaaactaacgcattagagtcttgcgcataagcttctgactgcccaa

SEQ ID NO: 190888 - DNA, 52 bp, Artificial
  Synthetic oligonucleotide
gcccgcttggtacaactgcgacctggtataccgcaatgaacgggggaaccag

SEQ ID NO: 190889 - DNA, 52 bp, Artificial
  Synthetic oligonucleotide
ggagcaccattgagtccgctgtggttgagcacaaaggggtggtcgtaggcac

SEQ ID NO: 190890 - DNA, 52 bp, Artificial
  Synthetic oligonucleotide
gcgtggaggacatgtccagtttaccgagccgagaggaggcttagaagcccga

SEQ ID NO: 190891 - DNA, 52 bp, Artificial
  Synthetic oligonucleotide
gcaatgccatgtaaattagagcttgagagctactcgctcgattctaaagggt

SEQ ID NO: 190892 - DNA, 52 bp, Artificial
  Synthetic oligonucleotide
ccgacaatcataaacgactgaccgtttattttacctaaaccgcccaccatcg

SEQ ID NO: 190893 - DNA, 52 bp, Artificial
  Synthetic oligonucleotide
cggtgattatctacgaccgtatcagggaagtaatgcgtgaacctcattggtc

SEQ ID NO: 190894 - DNA, 52 bp, Artificial
  Synthetic oligonucleotide
cgatgccaacatcaagagttgtgcctcgagtatcgcttcagggcctaatggc

SEQ ID NO: 190895 - DNA, 52 bp, Artificial
  Synthetic oligonucleotide
ggcgcccataaggtgttttaggccgaattgtaagagaacgcctaagacgatc

SEQ ID NO: 190896 - DNA, 52 bp, Artificial
  Synthetic oligonucleotide
gcctatgatggttcaatttcatttacctcgagagtaggggaaggtactgtgt

SEQ ID NO: 190897 - DNA, 55 bp, Artificial
  Synthetic oligonucleotide
aagttggtagtgctgagtcctgggcgaggccaaaaataggactcgtcggttgggc

SEQ ID NO: 190898 - DNA, 52 bp, Artificial
  Synthetic oligonucleotide
gattttgtctatctctagaccagtcaacgtacgcagacgcaactcgagaata

SEQ ID NO: 190899 - DNA, 52 bp, Artificial
  Synthetic oligonucleotide
gagtgccaccgttgcaatgattaccgctgccggtataaccgcgccactgtta

SEQ ID NO: 190900 - DNA, 52 bp, Artificial
  Synthetic oligonucleotide
cgtagctgctgggtcttgtgagcttctaaatgtagagtcgtttccaccggct

SEQ ID NO: 190901 - DNA, 52 bp, Artificial
  Synthetic oligonucleotide
gagtattctgattcaggcgagcttcctcttgttgcgtcaatccaaggctttt

SEQ ID NO: 190902 - DNA, 52 bp, Artificial
  Synthetic oligonucleotide
cgatggattgccccaggtgatgagtggcgaacggaagttcctgcgttgcctt

SEQ ID NO: 190903 - DNA, 52 bp, Artificial
  Synthetic oligonucleotide
cctggcgccaggacgtctgcccctcattcgtctgcgacgtgttccgcctgtg

SEQ ID NO: 190904 - DNA, 51 bp, Artificial
  Synthetic oligonucleotide
gctaattctatgaaaccgagtaccactttaacggtatctaaccaaccacca

SEQ ID NO: 190905 - DNA, 51 bp, Artificial
  Synthetic oligonucleotide
acatgacccggataaactcggagcaatccgtcccctgttgccagtcgaatt

SEQ ID NO: 190906 - DNA, 51 bp, Artificial
  Synthetic oligonucleotide
cgacaaatccgcgtccctactcccgcaacttgcgaaccgcaaaccgttgta

SEQ ID NO: 190907 - DNA, 51 bp, Artificial
  Synthetic oligonucleotide
gctactggggagccggatggggctatccaggatatgcctggggataccctg

SEQ ID NO: 190908 - DNA, 57 bp, Artificial
  Synthetic oligonucleotide
gcgctgccatgggtcgctcggcggccccaattgctgaacccgtcgcggaagatccca

SEQ ID NO: 190909 - DNA, 51 bp, Artificial
  Synthetic oligonucleotide
acagggcggactgcgttttgacgcgggacgtgtagcaaccaaagcgcatta

SEQ ID NO: 190910 - DNA, 51 bp, Artificial
  Synthetic oligonucleotide
gtgttaaaagcgggcatttagaaactatacacgcttatactaacgaccaga

SEQ ID NO: 190911 - DNA, 51 bp, Artificial
  Synthetic oligonucleotide
cgaaatgctaatgacagaagcggagttttatgcaaaaatagataagagttt

SEQ ID NO: 190912 - DNA, 51 bp, Artificial
  Synthetic oligonucleotide
acaggattacggattccttcaatgatatcatagagcgttccatggaaagcg

SEQ ID NO: 190913 - DNA, 51 bp, Artificial
  Synthetic oligonucleotide
gcataggctacgagaataacggttttatgttactatcacctatggcactta

SEQ ID NO: 190914 - DNA, 51 bp, Artificial
  Synthetic oligonucleotide
aggtgttctcataaccgcccctcttgaacctaaggcaccatcgccataaac

SEQ ID NO: 190915 - DNA, 51 bp, Artificial
  Synthetic oligonucleotide
tggaattctgttggactactgtttggattattttcgtattcgggtatgggg

SEQ ID NO: 190916 - DNA, 51 bp, Artificial
  Synthetic oligonucleotide
agtgccccctccgggacgattatcactcatcacctgtacccccggcattct

SEQ ID NO: 190917 - DNA, 51 bp, Artificial
  Synthetic oligonucleotide
gcagccgatagtgttcgggtgagcttgggattaggcggccaaggaggtacc

SEQ ID NO: 190918 - DNA, 51 bp, Artificial
  Synthetic oligonucleotide
atacactggtgcgacaccgccgagtgagaaccccagatatgccgacgtcgg

SEQ ID NO: 190919 - DNA, 56 bp, Artificial
  Synthetic oligonucleotide
cgcgccgaagcctttggataagtgcattctcgtcttatagttcggggcccaaccca

SEQ ID NO: 190920 - DNA, 60 bp, Artificial
  Synthetic oligonucleotide
gtaaagtactcttgtagttgtatcatgtgtggcattaatgaccaatgaaactcgcaaatt

SEQ ID NO: 190921 - DNA, 55 bp, Artificial
  Synthetic oligonucleotide
gataggttatatcgagtattgggcgtggggttttggttgctatcctaaagcttag

SEQ ID NO: 190922 - DNA, 55 bp, Artificial
  Synthetic oligonucleotide
gatccattatcacaccatctgtaggagctttgactagacgactttgttgacgtgc

SEQ ID NO: 190923 - DNA, 55 bp, Artificial
  Synthetic oligonucleotide
gatgtagatgccaatgctgcataagtaaatctcaccgcatcagcaccatacgcgc

SEQ ID NO: 190924 - DNA, 55 bp, Artificial
  Synthetic oligonucleotide
gatgtcactcccactaggatgctgcgctcccactaggatgctgcgctcccactag

SEQ ID NO: 190925 - DNA, 55 bp, Artificial
  Synthetic oligonucleotide
gattgagggcttagtgaatggtgcccagtcggtgtattttgatgatacgccgcta

SEQ ID NO: 190926 - DNA, 55 bp, Artificial
  Synthetic oligonucleotide
tgacagcttaacacgatcgtgatgacgtgacatgacgtagaacgacgtatgtacg

SEQ ID NO: 190927 - DNA, 55 bp, Artificial
  Synthetic oligonucleotide
gcaagtctgatattacggaagtactgttagtaggtggacaaacgcgtatgcctct

SEQ ID NO: 190928 - DNA, 55 bp, Artificial
  Synthetic oligonucleotide
gtttatgcccgagagcatacggatgattagagctagcaagagctccattatgact

SEQ ID NO: 190929 - DNA, 55 bp, Artificial
  Synthetic oligonucleotide
gttgtgcaatctgagggcgtcggttgtcgtagcgtgaggggttggatgtctggca

SEQ ID NO: 190930 - DNA, 55 bp, Artificial
  Synthetic oligonucleotide
gttcagtaattctctcacacaatgtcgagacaactgcttgtggcttttcgattaa

SEQ ID NO: 190931 - DNA, 56 bp, Artificial
  Synthetic oligonucleotide
atttgtaactattctagacaggatagccctagttatttgatttacaatataccctg

SEQ ID NO: 190932 - DNA, 55 bp, Artificial
  Synthetic oligonucleotide
gttaggtaagcacggactttggagccagcattcctatttgttcagtacgtatatc

SEQ ID NO: 190933 - DNA, 55 bp, Artificial
  Synthetic oligonucleotide
tcagcgtgttaagtccagggccggtgcgcttgttgctcaaggatgcgactgcaag

SEQ ID NO: 190934 - DNA, 55 bp, Artificial
  Synthetic oligonucleotide
gtggtattatctgccaatggaagagtatatggtgatactagggagattcctaggc

SEQ ID NO: 190935 - DNA, 55 bp, Artificial
  Synthetic oligonucleotide
gtggcttatatccgcggacaggctgtgccggtgattgatttaggacgcgcagtcg

SEQ ID NO: 190936 - DNA, 55 bp, Artificial
  Synthetic oligonucleotide
gtggagtcattcctccagtctgccatgcctaacgtaaactagtgaccgtttcact

SEQ ID NO: 190937 - DNA, 55 bp, Artificial
  Synthetic oligonucleotide
gtggagagactattcacgtgagaactgatccaacagcatgtataggatctcaccc

SEQ ID NO: 190938 - DNA, 55 bp, Artificial
  Synthetic oligonucleotide
gtgccaaagctacaaagctcactatggatcgccaaggtataagatctctagcagc

SEQ ID NO: 190939 - DNA, 55 bp, Artificial
  Synthetic oligonucleotide
gtgacacctctacaattaaaccgtgaggttcgttattggtggctgagatatcgcc

SEQ ID NO: 190940 - DNA, 55 bp, Artificial
  Synthetic oligonucleotide
gtgaatcagtccctgctttacgtatagtgagtcaatgtaatacagctaatgactt

SEQ ID NO: 190941 - DNA, 55 bp, Artificial
  Synthetic oligonucleotide
gtgaagagttaggtcatggtagagaagatgtaacagtcaactacttaggcagata

SEQ ID NO: 190942 - DNA, 60 bp, Artificial
  Synthetic oligonucleotide
gactattttatctgcgttacaacgcaataaagatggctcttttgctacgcaagcaaatag

SEQ ID NO: 190943 - DNA, 55 bp, Artificial
  Synthetic oligonucleotide
gtctttcaattctgatggctctaaactagccttatgatctggaccctccattgtc

SEQ ID NO: 190944 - DNA, 55 bp, Artificial
  Synthetic oligonucleotide
tcatagtcccatgagtaatgtgaggaatgcgtgaagtagacccctcaactggtac

SEQ ID NO: 190945 - DNA, 55 bp, Artificial
  Synthetic oligonucleotide
gtcgcctcttctcgagcttgttttagtgatatactcggatagcctccaataccta

SEQ ID NO: 190946 - DNA, 55 bp, Artificial
  Synthetic oligonucleotide
gtcctacccaagacatttgtatagctagatacttgagcactaactagctcaaacc

SEQ ID NO: 190947 - DNA, 55 bp, Artificial
  Synthetic oligonucleotide
gtcccatgcgccaaagctacaaagctcactatggatcgccaaggtataagatctc

SEQ ID NO: 190948 - DNA, 55 bp, Artificial
  Synthetic oligonucleotide
gtcactactttgaccagcaacacctgtacccgcttgtggctgcatattacctgcg

SEQ ID NO: 190949 - DNA, 55 bp, Artificial
  Synthetic oligonucleotide
tatagacattaccatcactaggattaatgacaccacccgcgctatacatagagcc

SEQ ID NO: 190950 - DNA, 55 bp, Artificial
  Synthetic oligonucleotide
tagtattcacatctgatagagatggtcgtccaaatatctatgttgcaccggttaa

SEQ ID NO: 190951 - DNA, 55 bp, Artificial
  Synthetic oligonucleotide
taggcataactcggatagtatctcctacactaaccttaccagaagcgacagtacc

SEQ ID NO: 190952 - DNA, 55 bp, Artificial
  Synthetic oligonucleotide
tagctgctattataccttgaactagttcgcgaatcataccctcatctgatacttg

SEQ ID NO: 190953 - DNA, 60 bp, Artificial
  Synthetic oligonucleotide
gctaagcagaacgcaagaattgaatgacttatagtcatatcgcttcgaccctcgtagatt

SEQ ID NO: 190954 - DNA, 55 bp, Artificial
  Synthetic oligonucleotide
tagctaaatcaagcgctgttcttccccatcacataggacagagacctgatattgc

SEQ ID NO: 190955 - DNA, 55 bp, Artificial
  Synthetic oligonucleotide
tagcccaagagtaaacagacatggccactaagcctaacataataagctgaactat

SEQ ID NO: 190956 - DNA, 55 bp, Artificial
  Synthetic oligonucleotide
tagactcaagcataaatgctgctaagccctcaatagctagaggcgtaccaaagat

SEQ ID NO: 190957 - DNA, 55 bp, Artificial
  Synthetic oligonucleotide
tacctcgtactcgtttagctccgaaataagactcatctaactcaaactccccagc

SEQ ID NO: 190958 - DNA, 55 bp, Artificial
  Synthetic oligonucleotide
taccgtctgtatttaaaccaaccctcgcgatgagataatacacgtgctaagcttt

SEQ ID NO: 190959 - DNA, 55 bp, Artificial
  Synthetic oligonucleotide
tacacgaaacattcgtacacaaattcaacttatgtctacccacaggcttcagttc

SEQ ID NO: 190960 - DNA, 55 bp, Artificial
  Synthetic oligonucleotide
tatcttttgtagaggctcgccttcataacattcatagtgactaatgccctctaga

SEQ ID NO: 190961 - DNA, 55 bp, Artificial
  Synthetic oligonucleotide
tattcgaaaataccctgaacagtacttatggcaacaccgtcgctataagacaaga

SEQ ID NO: 190962 - DNA, 55 bp, Artificial
  Synthetic oligonucleotide
taatgcggcgttaccttcaacatgcatcgactcgtcacgaattgaccactcaacg

SEQ ID NO: 190963 - DNA, 55 bp, Artificial
  Synthetic oligonucleotide
taatagcactacgtgattattacttgccagaactatcaaacgagcagatgatacc

SEQ ID NO: 190964 - DNA, 60 bp, Artificial
  Synthetic oligonucleotide
aggggctattcgaggtcctatacgaggtgatgtattctgggggcatggtcaacaggctga

SEQ ID NO: 190965 - DNA, 55 bp, Artificial
  Synthetic oligonucleotide
taagcaggccgagtaagccatgaactgcaagtcttacagtaagcagtactccttc

SEQ ID NO: 190966 - DNA, 55 bp, Artificial
  Synthetic oligonucleotide
taagacaatgggagatgtctcttgtactgggttgattgggttgtcaatgactgag

SEQ ID NO: 190967 - DNA, 55 bp, Artificial
  Synthetic oligonucleotide
gtttgatatcaggatcatttcacggtgataatgctgtgccgtgcatgtttagcgg

SEQ ID NO: 190968 - DNA, 55 bp, Artificial
  Synthetic oligonucleotide
gtttgagccgttggatgaaagctcagtaacagccttaaggcatttgattgatcac

SEQ ID NO: 190969 - DNA, 55 bp, Artificial
  Synthetic oligonucleotide
ggcttattgcttctgccattgagagattagcagttgagattagacatttgcatag

SEQ ID NO: 190970 - DNA, 55 bp, Artificial
  Synthetic oligonucleotide
ggctgtctcggttaggtcacttagaatatttaggaccgctcgttcagtgatccca

SEQ ID NO: 190971 - DNA, 55 bp, Artificial
  Synthetic oligonucleotide
ggctggataagcctctagcttacggataatagttgtaatctcactagctgtgata

SEQ ID NO: 190972 - DNA, 55 bp, Artificial
  Synthetic oligonucleotide
ggctaatgcactaggactagatatgaaaggtcttgcattccaatgggtaataatg

SEQ ID NO: 190973 - DNA, 55 bp, Artificial
  Synthetic oligonucleotide
ggcggcagcaccgatagtgaatttgtccatctcgcgtggcgccaaaacaaagaag

SEQ ID NO: 190974 - DNA, 55 bp, Artificial
  Synthetic oligonucleotide
ggcgatgctaggactatctacaagcgagtatgtgaatgctgtgtccgcaatgaag

SEQ ID NO: 190975 - DNA, 60 bp, Artificial
  Synthetic oligonucleotide
ttgctatttctgtttgttccatatctagccatataggttttgacataattgaatacatta

SEQ ID NO: 190976 - DNA, 55 bp, Artificial
  Synthetic oligonucleotide
ggcctagggtgtatgccatgcgtttatggttaaaccctgccaaaatggcggcttt

SEQ ID NO: 190977 - DNA, 55 bp, Artificial
  Synthetic oligonucleotide
ggcaagttgagcagacgaaggggtgatactatcacttgtaacatcggaagctaac

SEQ ID NO: 190978 - DNA, 55 bp, Artificial
  Synthetic oligonucleotide
tctgatgtgtgacaatcatagtgcaagacacttatgtctttaccttgactctctc

SEQ ID NO: 190979 - DNA, 55 bp, Artificial
  Synthetic oligonucleotide
ggattatctactggtggtatggtagtgcccggttattttgcgctagagatgggtg

SEQ ID NO: 190980 - DNA, 55 bp, Artificial
  Synthetic oligonucleotide
ggagttcatgcgacttcgcaagttgttaactttcattcagatgcagataggaatc

SEQ ID NO: 190981 - DNA, 55 bp, Artificial
  Synthetic oligonucleotide
ggagttaaacgtgtgaatagtacacgtagaggttcttatgcagttacacatagtg

SEQ ID NO: 190982 - DNA, 55 bp, Artificial
  Synthetic oligonucleotide
ggagctgtagttactgacatccatggtactagcaatcttgagtctagtttaatcg

SEQ ID NO: 190983 - DNA, 55 bp, Artificial
  Synthetic oligonucleotide
ggagattatagctcaaggcaacgagttggttgtggcagagtcgctagctttaccg

SEQ ID NO: 190984 - DNA, 55 bp, Artificial
  Synthetic oligonucleotide
ggacttctttagtggtagtggaactacggttgctacagcgcataagctagggcgt

SEQ ID NO: 190985 - DNA, 55 bp, Artificial
  Synthetic oligonucleotide
ggaattggctgttagctcggctaagcgcacagtcaccgcgtatacgataattccg

SEQ ID NO: 190986 - DNA, 60 bp, Artificial
  Synthetic oligonucleotide
cagtgttacaacgcaataaagatggctcttttgctacgcaagcaaatagaaagtctattc

SEQ ID NO: 190987 - DNA, 55 bp, Artificial
  Synthetic oligonucleotide
gctttacaaccatgcagtccgtttcacgacataggtattgctctaatggtagacc

SEQ ID NO: 190988 - DNA, 55 bp, Artificial
  Synthetic oligonucleotide
gcttataaaggccatgaagtgagaattaactcttggaaagcggagcataacgatc

SEQ ID NO: 190989 - DNA, 55 bp, Artificial
  Synthetic oligonucleotide
gcttagagaaatccctatgtccaaggagagtctaataatgacaccagaaacgacg

SEQ ID NO: 190990 - DNA, 55 bp, Artificial
  Synthetic oligonucleotide
gtcaataacaccgggatctataaacccaacaattagtattacacttggtgcccta

SEQ ID NO: 190991 - DNA, 55 bp, Artificial
  Synthetic oligonucleotide
gtcaactagggcctctgaccgttctcgtctcagagttcctaaagaattgtttacc

SEQ ID NO: 190992 - DNA, 55 bp, Artificial
  Synthetic oligonucleotide
gtaaacattgtttaagagaagatctccaggcataactaatgcccaccatcaacgg

SEQ ID NO: 190993 - DNA, 55 bp, Artificial
  Synthetic oligonucleotide
ggttggtcaagattctgcaatgtgtgatagttattcgcgtggtaaggagtaagga

SEQ ID NO: 190994 - DNA, 55 bp, Artificial
  Synthetic oligonucleotide
ggttctgatcctagctggactactcaaatgcaggatttaataggtaagatgcgtg

SEQ ID NO: 190995 - DNA, 55 bp, Artificial
  Synthetic oligonucleotide
ggttcatctgtatttgagggtataagagcatacgatacgcctaatggaattggag

SEQ ID NO: 190996 - DNA, 55 bp, Artificial
  Synthetic oligonucleotide
ggtgtagatacgcgtgcaattgtacgtaaagtacgcaaagaaggtgcggtaagag

SEQ ID NO: 190997 - DNA, 60 bp, Artificial
  Synthetic oligonucleotide
gtagccgtagcatacttagtttggcttataagatagtctgtatatatatctagtacatcc

SEQ ID NO: 190998 - DNA, 55 bp, Artificial
  Synthetic oligonucleotide
ggtctagttcatcacttaacacaacttctctaagtctttcagatgcttcgattgg

SEQ ID NO: 190999 - DNA, 55 bp, Artificial
  Synthetic oligonucleotide
ggtctagcttcggtattacgtgtaccaagaatagtagggtcttgcaactccatga

SEQ ID NO: 191000 - DNA, 55 bp, Artificial
  Synthetic oligonucleotide
ggtcctaagctctattctaagcgccacattagcttgattgataggaggattatcc

SEQ ID NO: 191001 - DNA, 55 bp, Artificial
  Synthetic oligonucleotide
ggtatgggagggtgtggcactgggcgtgaggattaggtgagctgagggactcctg

SEQ ID NO: 191002 - DNA, 55 bp, Artificial
  Synthetic oligonucleotide
ggtagaccgactatcactgtagatgataatgtgcgtgaatataatgttggcgagc

SEQ ID NO: 191003 - DNA, 55 bp, Artificial
  Synthetic oligonucleotide
tcgtaattatatgctctggcaaatataagttagaacctcgcgctctagcctcaag

SEQ ID NO: 191004 - DNA, 55 bp, Artificial
  Synthetic oligonucleotide
gggttgccggagttatccattacctcttgacgaagctctatgagccattggcgta

SEQ ID NO: 191005 - DNA, 55 bp, Artificial
  Synthetic oligonucleotide
gggttatgtttgtgttctgggagggtttattggttcagatgctcatgggaacact

SEQ ID NO: 191006 - DNA, 55 bp, Artificial
  Synthetic oligonucleotide
gggtcctaccaccttggcattacaccagttagtccgtatgagttcatgatccgag

SEQ ID NO: 191007 - DNA, 55 bp, Artificial
  Synthetic oligonucleotide
gggcgttaaaagaggcttctggtgatgtgcggaggtgtgctcgctatcaggagtt

SEQ ID NO: 191008 - DNA, 58 bp, Artificial
  Synthetic oligonucleotide
cgtatgctcaagacagatatagacaattaacggggcgtgagtgtcctaaaaatggagg

SEQ ID NO: 191009 - DNA, 55 bp, Artificial
  Synthetic oligonucleotide
gggaataactgggattattgaatctcaaactggaggtttgtggcattggtacttt

SEQ ID NO: 191010 - DNA, 55 bp, Artificial
  Synthetic oligonucleotide
ggcttgactaacctgatatagagcaggattgtctgctaagcgtaaatcttgacga

SEQ ID NO: 191011 - DNA, 55 bp, Artificial
  Synthetic oligonucleotide
cagcctagttatgcaatcaaagagcataaaatcgagcttaaaagctcttggacaa

SEQ ID NO: 191012 - DNA, 55 bp, Artificial
  Synthetic oligonucleotide
cagcatagtacattcctggcttagtaatcgacttaccaatattagatgcgccacc

SEQ ID NO: 191013 - DNA, 55 bp, Artificial
  Synthetic oligonucleotide
cagcaaccatatctcgaaaggcttgagtaactctaagtctacgtggacgtgatat

SEQ ID NO: 191014 - DNA, 55 bp, Artificial
  Synthetic oligonucleotide
cacttaactacgcctgatagtgggaaagtagcaggtgtgcctctatcgtatgagc

SEQ ID NO: 191015 - DNA, 55 bp, Artificial
  Synthetic oligonucleotide
cactggcatcctattggtatcgataaggtatacaaggagaatgtccaagagctta

SEQ ID NO: 191016 - DNA, 55 bp, Artificial
  Synthetic oligonucleotide
cactgcttaataccttgaggcaaaacatacttagactcatcgattgttggcatag

SEQ ID NO: 191017 - DNA, 55 bp, Artificial
  Synthetic oligonucleotide
cactcgccttgctcctgagcatctaaaatcaacaatgatgggtgtatggtggaca

SEQ ID NO: 191018 - DNA, 55 bp, Artificial
  Synthetic oligonucleotide
cacctccggaagttgtgccctaacgccaaactgagtacctagtttcagtctgtgg

SEQ ID NO: 191019 - DNA, 60 bp, Artificial
  Synthetic oligonucleotide
gcgacatttggttgtgcccttaccgcaggtactggcgctagtggtagcatggagccattc

SEQ ID NO: 191020 - DNA, 55 bp, Artificial
  Synthetic oligonucleotide
cacaaactatgtatatcggtgcttgagaaaaccctttgaaacttgagcctgatgc

SEQ ID NO: 191021 - DNA, 55 bp, Artificial
  Synthetic oligonucleotide
caatacgtatacacagtacttccggataccttaagtaacgactcaatatggcgac

SEQ ID NO: 191022 - DNA, 55 bp, Artificial
  Synthetic oligonucleotide
caagagtatgtgttgatgttgggacatttacagctatgtcagcgattgcaatggc

SEQ ID NO: 191023 - DNA, 55 bp, Artificial
  Synthetic oligonucleotide
caacgattgcaccgcttactaataatgcgataatacatttcggagcgatactctc

SEQ ID NO: 191024 - DNA, 55 bp, Artificial
  Synthetic oligonucleotide
caacaatcgatgagtctaagtatgttttgcctcaaggtattaagcagtgtgaagg

SEQ ID NO: 191025 - DNA, 55 bp, Artificial
  Synthetic oligonucleotide
atttaccgcacgtagttttgatgctagtaaggagagccaatcagtatcgttagtt

SEQ ID NO: 191026 - DNA, 55 bp, Artificial
  Synthetic oligonucleotide
attgcgagaggttgaaggcaatgtgtagcagtaaacgaaagataagatcgtcagg

SEQ ID NO: 191027 - DNA, 55 bp, Artificial
  Synthetic oligonucleotide
ttcaagcaggcgcttattatcaagccggctcgcagcaaagagctattaaaatgga

SEQ ID NO: 191028 - DNA, 55 bp, Artificial
  Synthetic oligonucleotide
ccactgtttatcacgtttgagcgaatggtcccttcccatgttgagacccacgggg

SEQ ID NO: 191029 - DNA, 55 bp, Artificial
  Synthetic oligonucleotide
ccacgtctcattctcgagcatagtccacatgttgttttaccatcaggtatcactc

SEQ ID NO: 191030 - DNA, 53 bp, Artificial
  Synthetic oligonucleotide
tgtactcaaaggggattactagaatgttaaaaagtgataagccgttttaaggc

SEQ ID NO: 191031 - DNA, 60 bp, Artificial
  Synthetic oligonucleotide
atcatttgctattgaaatgctttagtgatggcgttaatattaatacattgatgtgctact

SEQ ID NO: 191032 - DNA, 55 bp, Artificial
  Synthetic oligonucleotide
ccacgcctctagttagtctacgaaaccagttgtgtcattatacgaagcaacattg

SEQ ID NO: 191033 - DNA, 55 bp, Artificial
  Synthetic oligonucleotide
ccaccaaatgctgaacccttccaagtacgacctgttacaagctggaatggtctag

SEQ ID NO: 191034 - DNA, 55 bp, Artificial
  Synthetic oligonucleotide
ccacaccatactatctggtatataactaactatagtgttaccctcacctaactct

SEQ ID NO: 191035 - DNA, 55 bp, Artificial
  Synthetic oligonucleotide
ccaaatctgaatccctttcaaactttgtcagccgtaatggatcgatattagctga

SEQ ID NO: 191036 - DNA, 55 bp, Artificial
  Synthetic oligonucleotide
cattactgtagctgatggtggtaaagcatctccgtgaactctagagaatgcaacg

SEQ ID NO: 191037 - DNA, 55 bp, Artificial
  Synthetic oligonucleotide
catggttgtgggataaggcaactctcctaaagccgcaggagtagccagcctaacg

SEQ ID NO: 191038 - DNA, 55 bp, Artificial
  Synthetic oligonucleotide
catcatttgagtgttgataggtttgtgacaccacaacaattcgaagagtatcgca

SEQ ID NO: 191039 - DNA, 55 bp, Artificial
  Synthetic oligonucleotide
cataggaatctttagcgttttggatgcgatagaacacctttctaaggttgaccca

SEQ ID NO: 191040 - DNA, 55 bp, Artificial
  Synthetic oligonucleotide
catagctctcatgggctacctgcatagctggagcattctcataacgatctacagc

SEQ ID NO: 191041 - DNA, 55 bp, Artificial
  Synthetic oligonucleotide
cataccccttgagagcaccgatagagcctgtacgcagatcattaccatccataac

SEQ ID NO: 191042 - DNA, 56 bp, Artificial
  Synthetic oligonucleotide
gatgcctataaaattaacactaacgatactgatgaaaggtataacctagaaactat

SEQ ID NO: 191043 - DNA, 55 bp, Artificial
  Synthetic oligonucleotide
caggcatagggactcttaatgaatcacccaagttagtaggattaagcccgagatc

SEQ ID NO: 191044 - DNA, 55 bp, Artificial
  Synthetic oligonucleotide
cagcttattatgttaggcttagtggccatgtctgtttactcttgggctattatgt

SEQ ID NO: 191045 - DNA, 55 bp, Artificial
  Synthetic oligonucleotide
cagctgctatcgtaatattctcaacaggatcctctcttactatctataagtcgtg

SEQ ID NO: 191046 - DNA, 55 bp, Artificial
  Synthetic oligonucleotide
cagctgagatagcaatagatgttaaagctgatagttcacttaagccgacgcagcc

SEQ ID NO: 191047 - DNA, 55 bp, Artificial
  Synthetic oligonucleotide
cagctctacactctacaactattgatggtgagccaatacttttaggtcctcttcc

SEQ ID NO: 191048 - DNA, 55 bp, Artificial
  Synthetic oligonucleotide
cagctccaatagctagtactccagtaccacaaccatagtccagaactgttgaatc

SEQ ID NO: 191049 - DNA, 55 bp, Artificial
  Synthetic oligonucleotide
acgtatgttatgctcacatgtcagctctctaggtatcgcatattctgcgacgtac

SEQ ID NO: 191050 - DNA, 55 bp, Artificial
  Synthetic oligonucleotide
acgggcgcgactcagatgcttatgtatggtgcaggtgctcttacggggctaccat

SEQ ID NO: 191051 - DNA, 55 bp, Artificial
  Synthetic oligonucleotide
ttgtcgcttgtatattatcgattctagcttggtagtagtcgacactactttgcca

SEQ ID NO: 191052 - DNA, 55 bp, Artificial
  Synthetic oligonucleotide
acgaaaatttgatactacggtcgtctgacattcatacgcaattgttgctgcatca

SEQ ID NO: 191053 - DNA, 60 bp, Artificial
  Synthetic oligonucleotide
attcatgtaatttagttctcaaagaattcgcagcatcatctgaaagagtagttggtatac

SEQ ID NO: 191054 - DNA, 55 bp, Artificial
  Synthetic oligonucleotide
accaggtatgcaagatgcgactcaggctaagcaaattctaggtggcacatccaca

SEQ ID NO: 191055 - DNA, 54 bp, Artificial
  Synthetic oligonucleotide
accagaaccgacataacttgaacgtaccaatacaaacctttagctcgtgctttc

SEQ ID NO: 191056 - DNA, 55 bp, Artificial
  Synthetic oligonucleotide
aattagttggatatatctcaacagctcgaaacctgatcgcaatactcctaactgc

SEQ ID NO: 191057 - DNA, 55 bp, Artificial
  Synthetic oligonucleotide
aatccagagctacaatagcgattgattgtaaaagcaggaacactattaggtagtc

SEQ ID NO: 191058 - DNA, 55 bp, Artificial
  Synthetic oligonucleotide
aatatgcttagaggtgttaagagagttaacagtactcgtagaggctcatatgcag

SEQ ID NO: 191059 - DNA, 55 bp, Artificial
  Synthetic oligonucleotide
aatatatcttgaacgttagcgaaacccacaccaccagccatagcagtagttgcag

SEQ ID NO: 191060 - DNA, 55 bp, Artificial
  Synthetic oligonucleotide
aatactttctgatgggtatattacttcaggcgatccgtatgataatgcttggaag

SEQ ID NO: 191061 - DNA, 55 bp, Artificial
  Synthetic oligonucleotide
tttacagttagaagttcccgagagggctaaatatattcgcgtaatgtttgctgag

SEQ ID NO: 191062 - DNA, 55 bp, Artificial
  Synthetic oligonucleotide
aagctcctactcgactatcatcacaagcataaaccagctcaggtactcttgcctg

SEQ ID NO: 191063 - DNA, 55 bp, Artificial
  Synthetic oligonucleotide
aacatcactattagaggtatggctatcaaggttgggatcactgaacgagcggtcc

SEQ ID NO: 191064 - DNA, 59 bp, Artificial
  Synthetic oligonucleotide
gcctgttgaccatgcccccagaatacatcacctcgtataggacctcgaatagcccctcc

SEQ ID NO: 191065 - DNA, 55 bp, Artificial
  Synthetic oligonucleotide
aaatttatacaagcaatggagcaaaaccctcaagcactaatatctggtatgccca

SEQ ID NO: 191066 - DNA, 55 bp, Artificial
  Synthetic oligonucleotide
aaatggcgctacagtagcaatccctaatgaccctactaaccaaggtagagcatta

SEQ ID NO: 191067 - DNA, 55 bp, Artificial
  Synthetic oligonucleotide
atgctacgagggtcaactgcaatttcaaccgatgtatgcctcttaacactctcta

SEQ ID NO: 191068 - DNA, 55 bp, Artificial
  Synthetic oligonucleotide
atcttgttacctcataagacaagaactacgagtgacagtgatctacaacaaccag

SEQ ID NO: 191069 - DNA, 55 bp, Artificial
  Synthetic oligonucleotide
ttccctagcctgattaccgatgatatgatgtctagcttccacactaatgctaccc

SEQ ID NO: 191070 - DNA, 55 bp, Artificial
  Synthetic oligonucleotide
atagcctttatcgaagacccactgcgtgtagttagacttgcgcgtttcaaggctc

SEQ ID NO: 191071 - DNA, 55 bp, Artificial
  Synthetic oligonucleotide
ttcgttggatttatgcctcttataacacagactcttattctagagtaccactcac

SEQ ID NO: 191072 - DNA, 55 bp, Artificial
  Synthetic oligonucleotide
agtgtaccattggttgctctagatctaccttgttggctaggttgttgatctaatg

SEQ ID NO: 191073 - DNA, 55 bp, Artificial
  Synthetic oligonucleotide
agtccgattttccccaagttcgagctagaataccaccgccacccattgtcgcgat

SEQ ID NO: 191074 - DNA, 55 bp, Artificial
  Synthetic oligonucleotide
aggctttcacaaagcgagatgtagagctaaagtctccgggcataccaattagttg

SEQ ID NO: 191075 - DNA, 60 bp, Artificial
  Synthetic oligonucleotide
atggtaccgatcagtgcgacatctcgccgcctgtacatgactgaaagtgcacagcagctc

SEQ ID NO: 191076 - DNA, 55 bp, Artificial
  Synthetic oligonucleotide
aggcagtttagctttaagtggtgaagggctgatctagttagtactcactaacttg

SEQ ID NO: 191077 - DNA, 55 bp, Artificial
  Synthetic oligonucleotide
aggaaagtttagtgtagttgcgactgatagtgaaggtatagagtcgaatgttgct

SEQ ID NO: 191078 - DNA, 55 bp, Artificial
  Synthetic oligonucleotide
agcgccgtgatgttagcgccaaagtgtaggtcatacccgaaggcgtacatagagt

SEQ ID NO: 191079 - DNA, 55 bp, Artificial
  Synthetic oligonucleotide
ttgggttggtaagtacatttgagcatgactacttattgctaaatcagcgcgttgc

SEQ ID NO: 191080 - DNA, 55 bp, Artificial
  Synthetic oligonucleotide
agatcagcaaagctactaaaccagctttagatctccaaaagtctcttgataccag

SEQ ID NO: 191081 - DNA, 55 bp, Artificial
  Synthetic oligonucleotide
agacataaggtctgcttcgaacagatggtacaacgttcacgtgagtgcacatcct

SEQ ID NO: 191082 - DNA, 55 bp, Artificial
  Synthetic oligonucleotide
agacacctcaacattagccaattcaaatctacacagagcatccttatcaccaact

SEQ ID NO: 191083 - DNA, 52 bp, Artificial
  Synthetic oligonucleotide
actgagttacacgcaacaggggttatacgggtcaagggcaacgacctaaaag

SEQ ID NO: 191084 - DNA, 55 bp, Artificial
  Synthetic oligonucleotide
actcttcaaagttctcgcatggtttcctacgagctaccatatcagccttagcacg

SEQ ID NO: 191085 - DNA, 55 bp, Artificial
  Synthetic oligonucleotide
actctaccaattctcgaactgccttagcaaattctgcttgagtaccaactaaagt

SEQ ID NO: 191086 - DNA, 54 bp, Artificial
  Synthetic oligonucleotide
tagccaagcgccaactcggctagtaacaagttgtttaaccgtgtggtcaaaccc

SEQ ID NO: 191087 - DNA, 55 bp, Artificial
  Synthetic oligonucleotide
ctctaagtgaggtgattctcctcttgagaggagtaccttgcatagcaaggggagg

SEQ ID NO: 191088 - DNA, 55 bp, Artificial
  Synthetic oligonucleotide
ctcaatcgctggagttttgtattgacttgcttgtagggtattgccccaagccaga

SEQ ID NO: 191089 - DNA, 55 bp, Artificial
  Synthetic oligonucleotide
cgacgtagagactgtagacaacgtacacgttacacgacgtacgtacagcgatgtg

SEQ ID NO: 191090 - DNA, 55 bp, Artificial
  Synthetic oligonucleotide
cgagtttacctaactatatgtcgtaggtagtatagacattggttggggtcgactg

SEQ ID NO: 191091 - DNA, 55 bp, Artificial
  Synthetic oligonucleotide
cgcaagtatgcgggacattgctagatgttagcgtagaagcattgacattatgaga

SEQ ID NO: 191092 - DNA, 55 bp, Artificial
  Synthetic oligonucleotide
cgcacttatagcatcaggctcaagtttcaaagggttttctcaagcaccgatatac

SEQ ID NO: 191093 - DNA, 50 bp, Artificial
  Synthetic oligonucleotide
cgccctaaagggatttactttaccggggtcacgctcacaaaagcccttgt

SEQ ID NO: 191094 - DNA, 55 bp, Artificial
  Synthetic oligonucleotide
tgtttccatagctctagcatcttatttgccacaaccctattagcctttgcagttg

SEQ ID NO: 191095 - DNA, 55 bp, Artificial
  Synthetic oligonucleotide
cgcgtgaattaccaagcttctattgggacgctgagactaagatgaattgtctgca

SEQ ID NO: 191096 - DNA, 55 bp, Artificial
  Synthetic oligonucleotide
tgttatcaagccaagtagttatcatcggtatttcagatcttgcatgagagtcacc

SEQ ID NO: 191097 - DNA, 57 bp, Artificial
  Synthetic oligonucleotide
aaggtggctaggcgagaaaataggcaaagaattgcctgataatcgaaaattagagat

SEQ ID NO: 191098 - DNA, 55 bp, Artificial
  Synthetic oligonucleotide
cgctgtccccatcgtggtgcagagttaagtttaggtaaggtatgtgataatgcta

SEQ ID NO: 191099 - DNA, 55 bp, Artificial
  Synthetic oligonucleotide
cgcttacaacaaggtactagtggctgcggtaatatggcactagctgcaacagata

SEQ ID NO: 191100 - DNA, 55 bp, Artificial
  Synthetic oligonucleotide
ctattaaatcctgcatttgagtagtccagctaggatcagaacccttaatcgcgtc

SEQ ID NO: 191101 - DNA, 55 bp, Artificial
  Synthetic oligonucleotide
tgtcttcaacgatatagccggcattttctaaattctagatctgcccatggtccga

SEQ ID NO: 191102 - DNA, 55 bp, Artificial
  Synthetic oligonucleotide
ctagtgaccgtttcacttagaaaagcgcatgccacacttggccggtaaatgccag

SEQ ID NO: 191103 - DNA, 55 bp, Artificial
  Synthetic oligonucleotide
ctagatatgcatcatcgtacctctttcttaatacaagccaagtagggctaagggg

SEQ ID NO: 191104 - DNA, 55 bp, Artificial
  Synthetic oligonucleotide
ctagaataagagtctgtgttataagaggcataaatccaacgaaaactgcagaacc

SEQ ID NO: 191105 - DNA, 55 bp, Artificial
  Synthetic oligonucleotide
ctactctaactaatgaaagagaattcagcttagtagctaccgtcagtgtaggtag

SEQ ID NO: 191106 - DNA, 55 bp, Artificial
  Synthetic oligonucleotide
ctacgcagatagttggacaccaaatttagcggcaggttttaacgttggttatgtc

SEQ ID NO: 191107 - DNA, 55 bp, Artificial
  Synthetic oligonucleotide
ctacagatataagtggcttcccaactattatctacaaaactccagaaggtgcgct

SEQ ID NO: 191108 - DNA, 60 bp, Artificial
  Synthetic oligonucleotide
tggtggacctgcgatgcgtattggtctaggcggtggagcagcgtcatccgttgtatcttc

SEQ ID NO: 191109 - DNA, 55 bp, Artificial
  Synthetic oligonucleotide
ctatagatgatcgtgctaaggctgatatggtagctcgtaggaaaccatgcgagaa

SEQ ID NO: 191110 - DNA, 55 bp, Artificial
  Synthetic oligonucleotide
ctaatgcccaccatcaacggtttttataactcctgaagtattggttatattattc

SEQ ID NO: 191111 - DNA, 55 bp, Artificial
  Synthetic oligonucleotide
ctaatcaatacctagagcaaggtaagaagccggttataatcagtcgtggctatgg

SEQ ID NO: 191112 - DNA, 55 bp, Artificial
  Synthetic oligonucleotide
cgtgggtttgcacctatatactttacctgcaaagttgacgactgtgttttcatcg

SEQ ID NO: 191113 - DNA, 55 bp, Artificial
  Synthetic oligonucleotide
ctataggtaaatcgatgatcagtagctacaacaaaccggatttgcctcaagatat

SEQ ID NO: 191114 - DNA, 55 bp, Artificial
  Synthetic oligonucleotide
cgtctcccgctgcagtaagtgcagtatgtagtccctgccccgtttatatactatg

SEQ ID NO: 191115 - DNA, 55 bp, Artificial
  Synthetic oligonucleotide
cgtctagtcaaagctcctacagatggtgtgataatggatcgtatccatggtatgg

SEQ ID NO: 191116 - DNA, 55 bp, Artificial
  Synthetic oligonucleotide
ctatgctatacagttagggttttaaggagataagttttgcgtagagtggagatag

SEQ ID NO: 191117 - DNA, 55 bp, Artificial
  Synthetic oligonucleotide
tgtacttcttgcgacgatagttccacctatagctgcttgaattgcgacctcaaac

SEQ ID NO: 191118 - DNA, 53 bp, Artificial
  Synthetic oligonucleotide
cggtactatcttaccatttagtttggcacccttagtacggtggccaaccatag

SEQ ID NO: 191119 - DNA, 60 bp, Artificial
  Synthetic oligonucleotide
ctcgcaaattaaagcactgcttttagggtctgcttcaatatatgcaaaccagttagctat

SEQ ID NO: 191120 - DNA, 55 bp, Artificial
  Synthetic oligonucleotide
tgtcgcagttactcgtgctgagcatcgatgttatataggagtggcaaaatatcgt

SEQ ID NO: 191121 - DNA, 55 bp, Artificial
  Synthetic oligonucleotide
cctaccccattgaatcctaggtttagcttcaaacgcagcatagtacattcctggc

SEQ ID NO: 191122 - DNA, 52 bp, Artificial
  Synthetic oligonucleotide
ccgtttggattaaatgcggtaattcgaggggaatcaattaggccggtatccg

SEQ ID NO: 191123 - DNA, 55 bp, Artificial
  Synthetic oligonucleotide
ccgcttaggttatataagagattggcgtccaacgtggtatgctgactcttctaga

SEQ ID NO: 191124 - DNA, 55 bp, Artificial
  Synthetic oligonucleotide
ccgcggacaggctgtgccggtgattgatttaggacgcgcagtcggtatgtaaagc

SEQ ID NO: 191125 - DNA, 55 bp, Artificial
  Synthetic oligonucleotide
ccgatagacagtcagcttttgatagatcgttagggtttattccatttaagggtca

SEQ ID NO: 191126 - DNA, 55 bp, Artificial
  Synthetic oligonucleotide
ccgacacagctaatagttggtagtcgtggtatgcaacattggttaagtatgcaat

SEQ ID NO: 191127 - DNA, 55 bp, Artificial
  Synthetic oligonucleotide
ccctgagaattacctccggcaacaaactggaaattactagcaacaacttctgtag

SEQ ID NO: 191128 - DNA, 55 bp, Artificial
  Synthetic oligonucleotide
cccattgggttaccaatattcttgcctgttatttgcctaaagtggcttgcagcac

SEQ ID NO: 191129 - DNA, 55 bp, Artificial
  Synthetic oligonucleotide
ccatttggagcgggcattactcctagtgtaatgtcgattggtttaggtttacctg

SEQ ID NO: 191130 - DNA, 60 bp, Artificial
  Synthetic oligonucleotide
tgaagctagaatgactattagtgaagagttaggtcatggtagagaagatgtaacagtcaa

SEQ ID NO: 191131 - DNA, 55 bp, Artificial
  Synthetic oligonucleotide
ctgacgcttcgaatggaattaatccgtgatgactcctcatagtccagtctggtct

SEQ ID NO: 191132 - DNA, 55 bp, Artificial
  Synthetic oligonucleotide
ccatgagttcgctaggctgtagaaatactctattaatcgcactagctatcggtgt

SEQ ID NO: 191133 - DNA, 55 bp, Artificial
  Synthetic oligonucleotide
ctgactttccagatattagacaaaactcaccttgagccacacggagtgccccttt

SEQ ID NO: 191134 - DNA, 55 bp, Artificial
  Synthetic oligonucleotide
ccatcaattttgactctaactccactcaacagtaagtaactagcaaccataacag

SEQ ID NO: 191135 - DNA, 55 bp, Artificial
  Synthetic oligonucleotide
ccataggatacgtgacatcattaatattaacgaaccctctatcacctaactcacg

SEQ ID NO: 191136 - DNA, 54 bp, Artificial
  Synthetic oligonucleotide
ccagtaaatccttgtggggctggtagagttttaggcttatcgtcgattttgttg

SEQ ID NO: 191137 - DNA, 55 bp, Artificial
  Synthetic oligonucleotide
ccagcgggtgctactgcgcaatttgctgctattccgctagacttggctgataatc

SEQ ID NO: 191138 - DNA, 55 bp, Artificial
  Synthetic oligonucleotide
ctgatcgcaatctcggtaaaccaggtctaatcgcagcattagcattaacttgtac

SEQ ID NO: 191139 - DNA, 55 bp, Artificial
  Synthetic oligonucleotide
ccttgcggtggctatatggggactattgacatcaaaatctcaacacctagtagct

SEQ ID NO: 191140 - DNA, 55 bp, Artificial
  Synthetic oligonucleotide
cctccatatttaatggttacggctgtaacggcaggagctactccatgtggtatta

SEQ ID NO: 191141 - DNA, 60 bp, Artificial
  Synthetic oligonucleotide
ccccgtgccggagacaggtagagcatcagcccaagagatagctactgctttgggtgttga

SEQ ID NO: 191142 - DNA, 60 bp, Artificial
  Synthetic oligonucleotide
aatggctccatgctaccactagcgccagtacctgcggtaagggcacaaccaaatgtcgct

SEQ ID NO: 191143 - DNA, 55 bp, Artificial
  Synthetic oligonucleotide
ttaacaaccacatcaggacgataaacttaaaccaccgcatctatagaaagcttcg

SEQ ID NO: 191144 - DNA, 55 bp, Artificial
  Synthetic oligonucleotide
ccttcagctgaagctaaggagctcttggtcttgtaaattacaatgcagtagccgc

SEQ ID NO: 191145 - DNA, 55 bp, Artificial
  Synthetic oligonucleotide
cctggtgagggtagcgtccagcgaggattaaatcgatcactgtaaactgatctgg

SEQ ID NO: 191146 - DNA, 55 bp, Artificial
  Synthetic oligonucleotide
ctcttggaatgaattgctaacctcacataccttagctcacatagtgaccatcctc

SEQ ID NO: 191147 - DNA, 54 bp, Artificial
  Synthetic oligonucleotide
ttaacggggcgtgagtgtcctaaaaatggagggctaacatctaaacagctaaca

SEQ ID NO: 191148 - DNA, 54 bp, Artificial
  Synthetic oligonucleotide
tgattcgatatgcagtaacatcatgtgcatgggatcttttagctctgctgatgc

SEQ ID NO: 191149 - DNA, 54 bp, Artificial
  Synthetic oligonucleotide
gactccataggtgaagctgctagggatataactagaagtataggtcatggtacg

SEQ ID NO: 191150 - DNA, 54 bp, Artificial
  Synthetic oligonucleotide
agacggtgttctaagcgagtttggagacattactaatggaagcttaatccaagc

SEQ ID NO: 191151 - DNA, 54 bp, Artificial
  Synthetic oligonucleotide
ccaattaaaactagttgggctcaggagaatggtcttcaagcttactgcccaatc

SEQ ID NO: 191152 - DNA, 54 bp, Artificial
  Synthetic oligonucleotide
ctaattggaccataatcagttagataaccacggtaagcgtactttataggagtg

SEQ ID NO: 191153 - DNA, 59 bp, Artificial
  Synthetic oligonucleotide
tgtaaaaccctgctttgttaagcagaacgcaaaaattgaatgacttatagtcatatcgc

SEQ ID NO: 191154 - DNA, 54 bp, Artificial
  Synthetic oligonucleotide
ctcaagcgctatacttagtagtcatccgctgttatcacaagctcgaagtctagg

SEQ ID NO: 191155 - DNA, 54 bp, Artificial
  Synthetic oligonucleotide
cacccatcattgttgattttagatgctcaggagcaaggcgagtgactaaggcta

SEQ ID NO: 191156 - DNA, 54 bp, Artificial
  Synthetic oligonucleotide
taagccttatctacagcatatatcccagtagctaaactactcatatctgcgcct

SEQ ID NO: 191157 - DNA, 53 bp, Artificial
  Synthetic oligonucleotide
taaggtggttaggcgagaaaatgggcaaagaactacccgataatcgaaaatta

SEQ ID NO: 191158 - DNA, 54 bp, Artificial
  Synthetic oligonucleotide
gcaggcatatgtgggatctcaggtcttgagctagctttagcgtcccaatctaaa

SEQ ID NO: 191159 - DNA, 54 bp, Artificial
  Synthetic oligonucleotide
ccccaactggatttctcgtgtagagttgtgcccgcatctctgccgtcagctccc

SEQ ID NO: 191160 - DNA, 54 bp, Artificial
  Synthetic oligonucleotide
ctggatttgtaccaaagaggggtcgatctgaaaggtatagtacatgcagccgta

SEQ ID NO: 191161 - DNA, 54 bp, Artificial
  Synthetic oligonucleotide
ttaggtctttgggctgcaatagtcggtaacacaccattacgtgctttccataga

SEQ ID NO: 191162 - DNA, 54 bp, Artificial
  Synthetic oligonucleotide
agtggtatcacaggtttcttagcaccgggatcacctactaacgtttctcttaac

SEQ ID NO: 191163 - DNA, 54 bp, Artificial
  Synthetic oligonucleotide
gggctacttacaactaccaaaccagtccaatggtacacagtcaaaggcggtagc

SEQ ID NO: 191164 - DNA, 59 bp, Artificial
  Synthetic oligonucleotide
aagccccgactgctccatgcggttcccgtccactctagaaatgcaacttgacgtgttga

SEQ ID NO: 191165 - DNA, 54 bp, Artificial
  Synthetic oligonucleotide
gtgatttggatattgtcgtgtaggcaggacacccgttttctaatggaggagcac

SEQ ID NO: 191166 - DNA, 54 bp, Artificial
  Synthetic oligonucleotide
cggccaagatattagtgcggtgattcatcgtcaagatggctcgagtgagaatat

SEQ ID NO: 191167 - DNA, 54 bp, Artificial
  Synthetic oligonucleotide
gtagacggatatattatgtagtactttccacaaacaaagagactctgggtcgag

SEQ ID NO: 191168 - DNA, 54 bp, Artificial
  Synthetic oligonucleotide
ttcggggcatgctagctccgtgaagcgttaagaatgtagaaggtgggtgcgaca

SEQ ID NO: 191169 - DNA, 54 bp, Artificial
  Synthetic oligonucleotide
gtatatgcggcatttgcgttattgattgctattacgtcacagttcaccgtagtt

SEQ ID NO: 191170 - DNA, 54 bp, Artificial
  Synthetic oligonucleotide
ggctttgattggtggtcaaacgtcgtcagatattatggggaatgttaatgctag

SEQ ID NO: 191171 - DNA, 54 bp, Artificial
  Synthetic oligonucleotide
tatcactgtgcggatcctatgagagcgtcaacaaagatggggccccgcttgggc

SEQ ID NO: 191172 - DNA, 54 bp, Artificial
  Synthetic oligonucleotide
gcgatgtttatggtctagctctgaacttgaatacagattcggttggtgctgtag

SEQ ID NO: 191173 - DNA, 53 bp, Artificial
  Synthetic oligonucleotide
tttagctccggactactaattcatatcgtagcgcaattactcgctatcgagat

SEQ ID NO: 191174 - DNA, 53 bp, Artificial
  Synthetic oligonucleotide
acattatagtggtatagtacagtttgggtggccacagcactcaggttggctca

SEQ ID NO: 191175 - DNA, 58 bp, Artificial
  Synthetic oligonucleotide
aactgataggcaagccctagcaatacagttacaacgcgaattcgggcttcgtagagaa

SEQ ID NO: 191176 - DNA, 53 bp, Artificial
  Synthetic oligonucleotide
tagcgcaagcggtgaacgccaacacacaatgtgaccaaaccaacaacagggcc

SEQ ID NO: 191177 - DNA, 53 bp, Artificial
  Synthetic oligonucleotide
acttcggtaataagcattgctatgcacttagagaccattggagagcccaagga

SEQ ID NO: 191178 - DNA, 53 bp, Artificial
  Synthetic oligonucleotide
agctccacgcattttcatattagagcctcccatagttccaccgaacatcaagc

SEQ ID NO: 191179 - DNA, 53 bp, Artificial
  Synthetic oligonucleotide
atcgtgacgctcagaattcatcatcacaccgtataacatacgtgattgtccta

SEQ ID NO: 191180 - DNA, 53 bp, Artificial
  Synthetic oligonucleotide
atctgtcttggtggacctgcgatgcgtattggtctaggcggtggagcagcgtc

SEQ ID NO: 191181 - DNA, 53 bp, Artificial
  Synthetic oligonucleotide
ttcagccgataaagtcataattggaatcggttggaagcctccattaatagcat

SEQ ID NO: 191182 - DNA, 53 bp, Artificial
  Synthetic oligonucleotide
gcacatcctctactatacagaatgggtgctacatcaacagtgcgtatgtcatt

SEQ ID NO: 191183 - DNA, 53 bp, Artificial
  Synthetic oligonucleotide
caccagcaactaggttgtagccaaggttgtatttactactagcaaacttacaa

SEQ ID NO: 191184 - DNA, 53 bp, Artificial
  Synthetic oligonucleotide
ttataggatatatggcagcacctgtaagtatgggagctttagcgccacgtact

SEQ ID NO: 191185 - DNA, 53 bp, Artificial
  Synthetic oligonucleotide
ccagatagatataactatgttactgcgctaggtgatcctgtaatgcttaatgg

SEQ ID NO: 191186 - DNA, 60 bp, Artificial
  Synthetic oligonucleotide
tgcgtatgctcaagatagatataggcaattaacagggcgtgagtgtcctaaaaatggtgg

SEQ ID NO: 191187 - DNA, 53 bp, Artificial
  Synthetic oligonucleotide
tcgcttagagcttctatacgagcttctaactcactatagctaatgttgaactc

SEQ ID NO: 191188 - DNA, 53 bp, Artificial
  Synthetic oligonucleotide
gggctgtctcattgtatacattaagggcatttgccacatccgtcatagtttga

SEQ ID NO: 191189 - DNA, 53 bp, Artificial
  Synthetic oligonucleotide
tctgtagttatctcagtcattgacagtccaatcaagccagtacaagagacatc

SEQ ID NO: 191190 - DNA, 53 bp, Artificial
  Synthetic oligonucleotide
catctctgccgtcagctcccaagctccctaaggtcagtgcgaggcactaggct

SEQ ID NO: 191191 - DNA, 53 bp, Artificial
  Synthetic oligonucleotide
ggatattgttcacgctgtgaagtctattgttgcggagatagatagtggtaaga

SEQ ID NO: 191192 - DNA, 53 bp, Artificial
  Synthetic oligonucleotide
ttagctccaaagctaccctctgatctacccgaaatattactaccactagaagc

SEQ ID NO: 191193 - DNA, 52 bp, Artificial
  Synthetic oligonucleotide
tttccttttaggtacattcgcacattagtctgcttgcgggaccgctactctt

SEQ ID NO: 191194 - DNA, 52 bp, Artificial
  Synthetic oligonucleotide
tgaagcgatgcagtctggattagctcctgatggaggattatttgtcccagag

SEQ ID NO: 191195 - DNA, 52 bp, Artificial
  Synthetic oligonucleotide
tggtcttagacgtggtatggaagttaagaacacaaatgcgcctatttctgtt

SEQ ID NO: 191196 - DNA, 52 bp, Artificial
  Synthetic oligonucleotide
tcagtatattgtgaatacctgctatagcgagggtttgaacggtcatataacc

SEQ ID NO: 191197 - DNA, 60 bp, Artificial
  Synthetic oligonucleotide
tgctgaggttagcaaaggtaaggatacgccaagcggtcactgggagctagctggcgtgcc

SEQ ID NO: 191198 - DNA, 52 bp, Artificial
  Synthetic oligonucleotide
ggcaagctttaaaggtagtgaacccgtcttctattgggtttggactgaaggt

SEQ ID NO: 191199 - DNA, 52 bp, Artificial
  Synthetic oligonucleotide
agtactttgtgttgtagtcgtagcccaaccagcaccaagatttagactacca

SEQ ID NO: 191200 - DNA, 52 bp, Artificial
  Synthetic oligonucleotide
acgaagcccaaattcgcgttgtaactgtattgctagggcttgcctatcagtt

SEQ ID NO: 191201 - DNA, 52 bp, Artificial
  Synthetic oligonucleotide
ctcgtagattagtagtcttgagctattaactggttgaaacacttaacaaata

SEQ ID NO: 191202 - DNA, 52 bp, Artificial
  Synthetic oligonucleotide
atatggtctattgatcccttagttagacaagaggttagctctggacagttag

SEQ ID NO: 191203 - DNA, 52 bp, Artificial
  Synthetic oligonucleotide
gcaatctggattataagccttcgagtaataccatctagtatcgtgcctagag

SEQ ID NO: 191204 - DNA, 52 bp, Artificial
  Synthetic oligonucleotide
gcaaacgaaacgcccatagtaagtaccgaaagtccaataatagcaagtgact

SEQ ID NO: 191205 - DNA, 52 bp, Artificial
  Synthetic oligonucleotide
gaactacacatagagtcaggttgggtgcccagtgatacgcgcgaagatgtac

SEQ ID NO: 191206 - DNA, 52 bp, Artificial
  Synthetic oligonucleotide
atgcttaacccctgtagctttttcaagatcagataggcttatcttatacctg

SEQ ID NO: 191207 - DNA, 52 bp, Artificial
  Synthetic oligonucleotide
attctgccgctgcgattggctaattaccatcgtattatgaaaaccatcgtag

SEQ ID NO: 191208 - DNA, 60 bp, Artificial
  Synthetic oligonucleotide
ccaggcaccactattgtaaacattgtttaagagaagatctccaggcataactaatgccca

SEQ ID NO: 191209 - DNA, 52 bp, Artificial
  Synthetic oligonucleotide
ccttctggtcaggcgcgagcaaatgctagttaatgtactttgacatttccat

SEQ ID NO: 191210 - DNA, 52 bp, Artificial
  Synthetic oligonucleotide
cttaaacgtggcttacatactcgtcatatgtcaatgatagctctaggtggct

SEQ ID NO: 191211 - DNA, 52 bp, Artificial
  Synthetic oligonucleotide
ccaatcttagcagtagagaagtagtagctagatacacttactaagacatggg

SEQ ID NO: 191212 - DNA, 52 bp, Artificial
  Synthetic oligonucleotide
taattgagagcgaaaagtcttataagcaagcaatggaacatttcacgactcg

SEQ ID NO: 191213 - DNA, 52 bp, Artificial
  Synthetic oligonucleotide
aaagaaatcgccccacatgaccgccgtgcacgttgcctctaccttaccgcca

SEQ ID NO: 191214 - DNA, 52 bp, Artificial
  Synthetic oligonucleotide
ctgttgccgggcggccattcaccctagcctcgtgtgtgcgactgagtacagc

SEQ ID NO: 191215 - DNA, 51 bp, Artificial
  Synthetic oligonucleotide
atagccatagttacgctggtaaagttgatagtatcagttatgctactggct

SEQ ID NO: 191216 - DNA, 51 bp, Artificial
  Synthetic oligonucleotide
ctgcaactagctcaccaatattcgcggaacattgcttatgggagaatagag

SEQ ID NO: 191217 - DNA, 51 bp, Artificial
  Synthetic oligonucleotide
ctcgatgactccacttgaacgtaagaaaccagaacttatcaagcatagtag

SEQ ID NO: 191218 - DNA, 51 bp, Artificial
  Synthetic oligonucleotide
ctaggttttgtggaaggaaatgcttctgccgttgagccaagattgagaaaa

SEQ ID NO: 191219 - DNA, 60 bp, Artificial
  Synthetic oligonucleotide
ccattgcacacgggaaaatagattataatttggtattgaaatgctatagtgatgcctata

SEQ ID NO: 191220 - DNA, 51 bp, Artificial
  Synthetic oligonucleotide
cggtggatttattcaagcagatgctcagacatggaatggtagtaatataac

SEQ ID NO: 191221 - DNA, 51 bp, Artificial
  Synthetic oligonucleotide
cggcgattaataatatggcagttatgttgagtagcgctattctcgaccctg

SEQ ID NO: 191222 - DNA, 51 bp, Artificial
  Synthetic oligonucleotide
cgctacaggcgatggtacttccatactagccttatatgtttcaagcgtaat

SEQ ID NO: 191223 - DNA, 51 bp, Artificial
  Synthetic oligonucleotide
cacgatggtcctgtctcctttaggaagttgtcaattaaacgtactttacta

SEQ ID NO: 191224 - DNA, 51 bp, Artificial
  Synthetic oligonucleotide
catcaacagcttgaacatgtacttcattagcaagcacctgagccactcgta

SEQ ID NO: 191225 - DNA, 51 bp, Artificial
  Synthetic oligonucleotide
tatgatggtccatcaggatctgtacttggcaccccttcacgcggaaaactg

SEQ ID NO: 191226 - DNA, 51 bp, Artificial
  Synthetic oligonucleotide
taatgctgagattagaagctcaccagtagattggaagaagtaacttgcaac

SEQ ID NO: 191227 - DNA, 51 bp, Artificial
  Synthetic oligonucleotide
gttccggtgcagttagttgcctagcctttcgtcgtgcgagtctcctcgtag

SEQ ID NO: 191228 - DNA, 51 bp, Artificial
  Synthetic oligonucleotide
aactatttatgtagtctatcgtagttgctactccagccttgtaggagttcg

SEQ ID NO: 191229 - DNA, 51 bp, Artificial
  Synthetic oligonucleotide
gtgggatttctaatagtagaacctgtgagataggtttaagttatcactcgg

SEQ ID NO: 191230 - DNA, 60 bp, Artificial
  Synthetic oligonucleotide
tcattgccctgtattagtgtggaacacaaagagctatccagatgagtgaccaaacaacaa

SEQ ID NO: 191231 - DNA, 51 bp, Artificial
  Synthetic oligonucleotide
aagcttcgaatatggcactaatcttataccaaactatacgaatggtccctg

SEQ ID NO: 191232 - DNA, 51 bp, Artificial
  Synthetic oligonucleotide
gtatgatgaacctgtctcttctttcctactgcgccatctcctggactaccg

SEQ ID NO: 191233 - DNA, 51 bp, Artificial
  Synthetic oligonucleotide
ggtctagtactagagcaacttgccaacataagcatagaacctataactgat

SEQ ID NO: 191234 - DNA, 51 bp, Artificial
  Synthetic oligonucleotide
tccccgtatattagcgtaccccttaaccgtttgtcttgcagctaacgacta

SEQ ID NO: 191235 - DNA, 51 bp, Artificial
  Synthetic oligonucleotide
tcctgttgttgctagtactgcaagtctagcatatactttagttggaggtct

SEQ ID NO: 191236 - DNA, 51 bp, Artificial
  Synthetic oligonucleotide
ggtcctgatacgtgtagactgtgagcaattacataacccatgctagctata

SEQ ID NO: 191237 - DNA, 51 bp, Artificial
  Synthetic oligonucleotide
gcgagttaaaagtgttcgagatagacaagtctctcgacagggtaagattaa

SEQ ID NO: 191238 - DNA, 51 bp, Artificial
  Synthetic oligonucleotide
cttccaacaaccagcttcccatgttatttcatcagtgtccagtgttgcatt

SEQ ID NO: 191239 - DNA, 51 bp, Artificial
  Synthetic oligonucleotide
tgctaatattattcttatgggagatagccattcaggaatgcttgagactgg

SEQ ID NO: 191240 - DNA, 50 bp, Artificial
  Synthetic oligonucleotide
atctattacagctcactcaacaagcgcgccgcctcaccatacgtcttgct

SEQ ID NO: 191241 - DNA, 59 bp, Artificial
  Synthetic oligonucleotide
caaccaacttttatagccgatactagtagtactgatatttgcagagcctttattagatc

SEQ ID NO: 191242 - DNA, 50 bp, Artificial
  Synthetic oligonucleotide
agcatcgacttatggagtagctaagtatgtgcctgtagcgtgtgccggtc

SEQ ID NO: 191243 - DNA, 50 bp, Artificial
  Synthetic oligonucleotide
aaaagctcttggacaaagggtggaagaccaagagaaatcccaatcttgaa

SEQ ID NO: 191244 - DNA, 50 bp, Artificial
  Synthetic oligonucleotide
cctataggggttgcagtcttagtaatcatttgaccgctagctataccaat

SEQ ID NO: 191245 - DNA, 50 bp, Artificial
  Synthetic oligonucleotide
cgcgataatcttaactcgacaacactaggtgagctaatcgatataatcgg

SEQ ID NO: 191246 - DNA, 50 bp, Artificial
  Synthetic oligonucleotide
cggactctgtaggagctgtaatagctttctcaattgctcgtgactgctac

SEQ ID NO: 191247 - DNA, 50 bp, Artificial
  Synthetic oligonucleotide
ctcgcgtgagtacctatatcataaccaagacaagtaccctcaccttttgt

SEQ ID NO: 191248 - DNA, 50 bp, Artificial
  Synthetic oligonucleotide
ctgcgcctcagtgaagttaagactttcaggagttactattgtaaaagtag

SEQ ID NO: 191249 - DNA, 50 bp, Artificial
  Synthetic oligonucleotide
ctgggataaaagataacgatgtgcaagactggggagtaccagcagatgtg

SEQ ID NO: 191250 - DNA, 50 bp, Artificial
  Synthetic oligonucleotide
ggacgtatacatcaaccttacatcctagactattctacacttacataccg

SEQ ID NO: 191251 - DNA, 50 bp, Artificial
  Synthetic oligonucleotide
tctaggcggctataagtgtgtcttaaagcaaggttcgcgtgctagagaaa

SEQ ID NO: 191252 - DNA, 60 bp, Artificial
  Synthetic oligonucleotide
actggcttagacattattgagtgcattaattgcttcaatctcactctgttatgcttaacc

SEQ ID NO: 191253 - DNA, 51 bp, Artificial
  Synthetic oligonucleotide
tacacgcaacaggggttatacgggtcaagggcaacgacctaaaagggggta

SEQ ID NO: 191254 - DNA, 50 bp, Artificial
  Synthetic oligonucleotide
ggtaatcacgaccaatttacccctcttcagaagtcacacgcacacagtag

SEQ ID NO: 191255 - DNA, 50 bp, Artificial
  Synthetic oligonucleotide
gtctagtcacgggaataattgtgcgaactcctaccatcacacaaggtatc

SEQ ID NO: 191256 - DNA, 50 bp, Artificial
  Synthetic oligonucleotide
gtgtagtctcattgacgcaacctttgtatgattatggggcctacaaagat

SEQ ID NO: 191257 - DNA, 50 bp, Artificial
  Synthetic oligonucleotide
tacagcaaagctagcatacactttagctggaggtctcagtctagaaatgg

SEQ ID NO: 191258 - DNA, 50 bp, Artificial
  Synthetic oligonucleotide
tatagagtttcagacagttatatacgggtaaccgagctcgattctatgca

SEQ ID NO: 191259 - DNA, 57 bp, Artificial
  Synthetic oligonucleotide
cggtaaactatcttagctaaatcgtcaactgagtagaattctagcctttgaattata

SEQ ID NO: 191260 - DNA, 59 bp, Artificial
  Synthetic oligonucleotide
tagtcatatcgcttcgaccctcgtagattagtagccttgagctattaactggttgaaac

SEQ ID NO: 191261 - DNA, 58 bp, Artificial
  Synthetic oligonucleotide
gtggtacatccatactatttacccataattcaacaatacgtgatttactatcagggac

SEQ ID NO: 191262 - DNA, 57 bp, Artificial
  Synthetic oligonucleotide
gcttggtttggctatccaatgttactgtatacaattttcgctagttgtatatttggg

SEQ ID NO: 191263 - DNA, 55 bp, Artificial
  Synthetic oligonucleotide
taattcgtatgcgggttagtttgtcgctagattgcccgcccgtttgtggtgcggg

SEQ ID NO: 191264 - DNA, 57 bp, Artificial
  Synthetic oligonucleotide
acgaaggagtggcagtcgaagacaccacaccccgcctatcggcaccactctcaagag

SEQ ID NO: 191265 - DNA, 54 bp, Artificial
  Synthetic oligonucleotide
cgcaactccgctctgctaaaaacccgaacctacctcggcctactcaccccgtgc

SEQ ID NO: 191266 - DNA, 56 bp, Artificial
  Synthetic oligonucleotide
ctcgtgtagagttgtgcccgcatctctgccgtcagctcccaagctccctaaggtca

SEQ ID NO: 191267 - DNA, 49 bp, Artificial
  Synthetic oligonucleotide
aatgccgataaaataacctaaaaaccctatagggataaagtaaactaaa

SEQ ID NO: 191268 - DNA, 54 bp, Artificial
  Synthetic oligonucleotide
ccctagtaggcagatcgcgaaatggggagcgacgtaccgaacaaataccccgct

SEQ ID NO: 191269 - DNA, 53 bp, Artificial
  Synthetic oligonucleotide
agacctagcggtctttcgcaactccgctctgctaaaaacccgaacctacctcg

SEQ ID NO: 191270 - DNA, 51 bp, Artificial
  Synthetic oligonucleotide
agtggtttggcctttgcacctttagcggttttcgccgggctatggggtaac

SEQ ID NO: 191271 - DNA, 56 bp, Artificial
  Synthetic oligonucleotide
cgctctggggctggtctcaggcctactgggttcacactgaagtgtttccgtgaggg

SEQ ID NO: 191272 - DNA, 56 bp, Artificial
  Synthetic oligonucleotide
caagattgcccatacgtattactaagtcgtaatcactatccaaaagattgaccttg

SEQ ID NO: 191273 - DNA, 52 bp, Artificial
  Synthetic oligonucleotide
tttccccagtcctttaatagtctacctttagagtctcgtaaatagttatctt

SEQ ID NO: 191274 - DNA, 55 bp, Artificial
  Synthetic oligonucleotide
gcatgacgaggtctatccatagtacaaacaactagtgcagacatgtgcacaccct

SEQ ID NO: 191275 - DNA, 55 bp, Artificial
  Synthetic oligonucleotide
gcaatgtaaggttgtcattgtatcagtcttatggtagcgcacctgctcctgatgg

SEQ ID NO: 191276 - DNA, 55 bp, Artificial
  Synthetic oligonucleotide
gcacaaagtaacataaatatagatgcattgttgagccctaagacggagtctgcag

SEQ ID NO: 191277 - DNA, 55 bp, Artificial
  Synthetic oligonucleotide
gcacggggtgagtaggccgaggtaggttcgggtttttagcagagcggagttgtga

SEQ ID NO: 191278 - DNA, 55 bp, Artificial
  Synthetic oligonucleotide
gcttacctcgcacagggcttacttctacaacttcgttaagaacaggcctttgcca

SEQ ID NO: 191279 - DNA, 56 bp, Artificial
  Synthetic oligonucleotide
gttggtatacttagatgaaattttattctggattgcttatagaggttttaaggcga

SEQ ID NO: 191280 - DNA, 55 bp, Artificial
  Synthetic oligonucleotide
gcttaattgctttatctcgcctacctttgtcacggacggatgtgacacgtaaaat

SEQ ID NO: 191281 - DNA, 55 bp, Artificial
  Synthetic oligonucleotide
gctgttaccacggttgagccaacataacgtcccttagcagttgtacttgccacag

SEQ ID NO: 191282 - DNA, 55 bp, Artificial
  Synthetic oligonucleotide
gctgtaaatctgactgatgatttcatgcaagcagttgcaaatgaccaagactgga

SEQ ID NO: 191283 - DNA, 55 bp, Artificial
  Synthetic oligonucleotide
gctggcaagttattatagctgtacgtataatagtcagtcacaggcgttacttcct

SEQ ID NO: 191284 - DNA, 55 bp, Artificial
  Synthetic oligonucleotide
gctctaggtggtggtgtagttagagatttgctactcggtaatctaccagtgacca

SEQ ID NO: 191285 - DNA, 55 bp, Artificial
  Synthetic oligonucleotide
gctcgcaagttgatacattaaatcagcgctataagaccaagttacacgattctaa

SEQ ID NO: 191286 - DNA, 55 bp, Artificial
  Synthetic oligonucleotide
gctcatacaatactaccactctacccatacccattgcaaatggtgaggtctgact

SEQ ID NO: 191287 - DNA, 55 bp, Artificial
  Synthetic oligonucleotide
gctagtccagcactaagttgtcctatctctattactaacgttataagcatgttcg

SEQ ID NO: 191288 - DNA, 55 bp, Artificial
  Synthetic oligonucleotide
gctagcgactctgccacaaccaactccttgccttgaactataatctccggttctt

SEQ ID NO: 191289 - DNA, 55 bp, Artificial
  Synthetic oligonucleotide
gctagcccatctatatatcgtcagactggagcacctatagtcatggttgagctag

SEQ ID NO: 191290 - DNA, 55 bp, Artificial
  Synthetic oligonucleotide
gttgggttgggccccgaactataagacgagaatgcacttatccaaaggcttcggc

SEQ ID NO: 191291 - DNA, 55 bp, Artificial
  Synthetic oligonucleotide
gcgttgaaaccccaaaagttgaacctagtatcagtggactggttggattccacca

SEQ ID NO: 191292 - DNA, 55 bp, Artificial
  Synthetic oligonucleotide
gcgtacacagcagtgcacgcggtaatctaatgaccagactcagacatccgtgatc

SEQ ID NO: 191293 - DNA, 55 bp, Artificial
  Synthetic oligonucleotide
gcggagctatggctggagctatgataggaggagtgatcgggaataattgggtggc

SEQ ID NO: 191294 - DNA, 55 bp, Artificial
  Synthetic oligonucleotide
gcgaagtggtactaaagtatttgtagggtcgacatttgatccagctagtggtggt

SEQ ID NO: 191295 - DNA, 55 bp, Artificial
  Synthetic oligonucleotide
gcgaaggctctagcaaaatactacgactttaaactattagatagcggcaccattt

SEQ ID NO: 191296 - DNA, 55 bp, Artificial
  Synthetic oligonucleotide
gcctcacgtgcacagagcatgcgctctactgctgaatcttggacccatcctggtg

SEQ ID NO: 191297 - DNA, 55 bp, Artificial
  Synthetic oligonucleotide
gcccagaccaattacgtgggctcattgcagcgcgaggctttaacctccctcaagg

SEQ ID NO: 191298 - DNA, 55 bp, Artificial
  Synthetic oligonucleotide
tggtatacggctccatactttccattactacactatttggtgatactcggcagtg

SEQ ID NO: 191299 - DNA, 55 bp, Artificial
  Synthetic oligonucleotide
ctgcagcagctccgatagtagaatcacaaggtttacttagtgcaaatagtggtgg

SEQ ID NO: 191300 - DNA, 55 bp, Artificial
  Synthetic oligonucleotide
ctggcttaggcatggtaacacctttaggaaatgatgtccctacgacttgggctaa

SEQ ID NO: 191301 - DNA, 60 bp, Artificial
  Synthetic oligonucleotide
tcaacacccaaagcagtagctatctcttgggctgatgctctacctgtctccggcacgggg

SEQ ID NO: 191302 - DNA, 55 bp, Artificial
  Synthetic oligonucleotide
tgctcgtttgatagttctggcaagtaataatcacgtagtgctattaaggtcgttg

SEQ ID NO: 191303 - DNA, 55 bp, Artificial
  Synthetic oligonucleotide
ctggtgcatatcgaaatatgccactaagatccctcctaaagacattccaataacc

SEQ ID NO: 191304 - DNA, 55 bp, Artificial
  Synthetic oligonucleotide
ctgtctcgatgagtgcaagtagcggtggtaacaactatagtggtagtattccgct

SEQ ID NO: 191305 - DNA, 55 bp, Artificial
  Synthetic oligonucleotide
cttaacaggagctgcactaatgctctggcaaaggcgtaatgtagcatgcgattcg

SEQ ID NO: 191306 - DNA, 55 bp, Artificial
  Synthetic oligonucleotide
tgagtgcattaattgcttcaatctcactctgttatgcttaacccctgtagctttt

SEQ ID NO: 191307 - DNA, 55 bp, Artificial
  Synthetic oligonucleotide
cttcgtacatctgtggctgtgttcctgatggttcgtcagtctcattatgaccatt

SEQ ID NO: 191308 - DNA, 55 bp, Artificial
  Synthetic oligonucleotide
ctttagtgatggcgttaatattaatacattgatgtgctactccagccttgtagag

SEQ ID NO: 191309 - DNA, 55 bp, Artificial
  Synthetic oligonucleotide
tgacgtaagtcgattgcctgtagactacgcagactagggataggcaaaggtcaac

SEQ ID NO: 191310 - DNA, 55 bp, Artificial
  Synthetic oligonucleotide
gaatatatgtatcgtactgtggtggtctgaatgggaatggctcccataggctcat

SEQ ID NO: 191311 - DNA, 55 bp, Artificial
  Synthetic oligonucleotide
gaatatctacccgagatgagaggtgtaaaaccaccacacggagtatattgccata

SEQ ID NO: 191312 - DNA, 60 bp, Artificial
  Synthetic oligonucleotide
gacataatacagatctaggtctagttcatcacttaacacaacttctctaagtctttcaga

SEQ ID NO: 191313 - DNA, 55 bp, Artificial
  Synthetic oligonucleotide
gacatctacgctatcgttattagccactcccatgaaatgagcatctggactaaat

SEQ ID NO: 191314 - DNA, 55 bp, Artificial
  Synthetic oligonucleotide
gactatgcaccctttctacgaccttacctaagacattcgtatagcgagacacctc

SEQ ID NO: 191315 - DNA, 55 bp, Artificial
  Synthetic oligonucleotide
gagagtgtttatagctccgatgtaattgataagagtgtcattctcaagcgagtgg

SEQ ID NO: 191316 - DNA, 55 bp, Artificial
  Synthetic oligonucleotide
gagcttggacttgaggcacgtaagataagcttaggagagcgtcgacaaagagctc

SEQ ID NO: 191317 - DNA, 55 bp, Artificial
  Synthetic oligonucleotide
gaggccattcatcggcatctcatgttgttctgataaaggatacagcgcacagcag

SEQ ID NO: 191318 - DNA, 55 bp, Artificial
  Synthetic oligonucleotide
gaggcggcatatcaaacgctctaagctctaaaatacctagtctgcctgagctact

SEQ ID NO: 191319 - DNA, 55 bp, Artificial
  Synthetic oligonucleotide
gagttaccatcactgatattcttattggagcaagccctgattattcgttggtggc

SEQ ID NO: 191320 - DNA, 55 bp, Artificial
  Synthetic oligonucleotide
gagtttaacacaaggctaaagtttcgagacttggatgttctaaatctaacctgtc

SEQ ID NO: 191321 - DNA, 55 bp, Artificial
  Synthetic oligonucleotide
gagtttcacacgacggactaaagctgagcaaagcaccctgtcgcagactaagacc

SEQ ID NO: 191322 - DNA, 55 bp, Artificial
  Synthetic oligonucleotide
gatagaggcacacctgctactttcccactatcaggcgtagttaagtgttggcaag

SEQ ID NO: 191323 - DNA, 53 bp, Artificial
  Synthetic oligonucleotide
tcgtaggtttgtcatgggtcgggtcccttctgtggagggggtcggtcaagggc

SEQ ID NO: 191324 - DNA, 60 bp, Artificial
  Synthetic oligonucleotide
acactagactacaacctgaccgcattccaacttgacatctcatcagcttacctctacgct

SEQ ID NO: 191325 - DNA, 52 bp, Artificial
  Synthetic oligonucleotide
gttacatccgtacccttacgggagtgtcgagtacccgtctgaacacgtttgg

SEQ ID NO: 191326 - DNA, 55 bp, Artificial
  Synthetic oligonucleotide
gtgagcgttcgacggtgtacggccgaggaatcagtgggagcacgcagaccacgga

SEQ ID NO: 191327 - DNA, 55 bp, Artificial
  Synthetic oligonucleotide
aagcgcggtccgaatcccgccagcgtccgcgcgttgggagcgccacatcagttgt

SEQ ID NO: 191328 - DNA, 55 bp, Artificial
  Synthetic oligonucleotide
gtgacgaatgggatgtagccggttgggaggaagtacaactgagactcgctcggag

SEQ ID NO: 191329 - DNA, 55 bp, Artificial
  Synthetic oligonucleotide
gtctcaggatcgctgccaacacacacccggcaaagccccgtgccatcgcgaacat

SEQ ID NO: 191330 - DNA, 55 bp, Artificial
  Synthetic oligonucleotide
ggtcttgtgattttcgagatcaagtcttttgcgcgcgtccgtctaacggctagcc

SEQ ID NO: 191331 - DNA, 55 bp, Artificial
  Synthetic oligonucleotide
ggtcgcaggcgcgctgaagtcacctccgacttccatgtccttaacgcatccgaca

SEQ ID NO: 191332 - DNA, 54 bp, Artificial
  Synthetic oligonucleotide
ggtaccgcaaattttagttcgcgcggctcctggtcagggaagggcccacagccg

SEQ ID NO: 191333 - DNA, 53 bp, Artificial
  Synthetic oligonucleotide
gggttaccgacatcggagcgggtaggcccgaaaggagaagtgaaagccgacac

SEQ ID NO: 191334 - DNA, 55 bp, Artificial
  Synthetic oligonucleotide
aaggtacatccgctagacaagcccttcgttgtgcggacgggccaggacacgcctg

SEQ ID NO: 191335 - DNA, 60 bp, Artificial
  Synthetic oligonucleotide
ggtgttgtgcccaacaccggtgttgcgtatggtgtgggccgtggacatcacgatcagcgg

SEQ ID NO: 191336 - DNA, 55 bp, Artificial
  Synthetic oligonucleotide
gggacgatccatgtctagatgtcccgccttcatgttcgatcgtccggccatgcgg

SEQ ID NO: 191337 - DNA, 55 bp, Artificial
  Synthetic oligonucleotide
tttatgtgagggatatatcgacacttaccgaaagtatgacacctatgctgcgagg

SEQ ID NO: 191338 - DNA, 55 bp, Artificial
  Synthetic oligonucleotide
ttgcgggacggtggcagatgacgcacggtgtgggttttccgatgccgcctttcgg

SEQ ID NO: 191339 - DNA, 55 bp, Artificial
  Synthetic oligonucleotide
ttgcggccttgatgccggacgcgttgtctgccccgaaccagcaggttggtacctt

SEQ ID NO: 191340 - DNA, 55 bp, Artificial
  Synthetic oligonucleotide
ttctgccgctcagttatgtcggcttcggagtctcgggtgaaccgctcgggatgcg

SEQ ID NO: 191341 - DNA, 55 bp, Artificial
  Synthetic oligonucleotide
aaagtcgcctgacagtccgcaagaagtgaggatttcggtcgtgctagcagccgaa

SEQ ID NO: 191342 - DNA, 50 bp, Artificial
  Synthetic oligonucleotide
aacaaccgacgccgtccgaacaaccgacgccgtccgaacaaccgacgccg

SEQ ID NO: 191343 - DNA, 55 bp, Artificial
  Synthetic oligonucleotide
ttctcacccacgtccgttccgagagggaatccgatgagttcggtactggtcgagt

SEQ ID NO: 191344 - DNA, 55 bp, Artificial
  Synthetic oligonucleotide
ttcggttcggttgtccccaagtctcgcggttcgagccaccacatgcgcgtgatcg

SEQ ID NO: 191345 - DNA, 55 bp, Artificial
  Synthetic oligonucleotide
ttcgctctacaacttcatgtgcggaaagtctgttcagtgacgcaaggaaaagtgc

SEQ ID NO: 191346 - DNA, 58 bp, Artificial
  Synthetic oligonucleotide
ggtagcccaccagccccgggcacatcccggccctgcctcagaggagtacccatggcca

SEQ ID NO: 191347 - DNA, 55 bp, Artificial
  Synthetic oligonucleotide
tgtgccagtcatccgcgcagtggccgcccttaccgatggagccaacgccaccgca

SEQ ID NO: 191348 - DNA, 55 bp, Artificial
  Synthetic oligonucleotide
tggggacacaaggtatgcggaggttgagtggcggtaagcgcgcaggcggttcctg

SEQ ID NO: 191349 - DNA, 55 bp, Artificial
  Synthetic oligonucleotide
tggcgtcgtgttcaccatgagccacaaagggcagcctgcaatctgtcgaagcgtt

SEQ ID NO: 191350 - DNA, 53 bp, Artificial
  Synthetic oligonucleotide
tgacgtaaagccagaaggggaccgggctttgcttcttctgcttaccggggccg

SEQ ID NO: 191351 - DNA, 55 bp, Artificial
  Synthetic oligonucleotide
tctgcgaactcatcgcaggcacgaccgactggccgatgcctcacgcttccgaact

SEQ ID NO: 191352 - DNA, 54 bp, Artificial
  Synthetic oligonucleotide
tcgggtagcgaccgggtcgagacgtgtatccgcgcaatggccgtcgttcccctt

SEQ ID NO: 191353 - DNA, 55 bp, Artificial
  Synthetic oligonucleotide
tcgcctcatcagcgatcgtctgtgctccgcagggcacatcacgcctatacggtcg

SEQ ID NO: 191354 - DNA, 50 bp, Artificial
  Synthetic oligonucleotide
tcgcaaggttcggaacgggtctggagaggttcggaacgggttcggaacgg

SEQ ID NO: 191355 - DNA, 55 bp, Artificial
  Synthetic oligonucleotide
tcctcgtccgattagactgaagtcgggactttgaattgacgggacaccgtatgcc

SEQ ID NO: 191356 - DNA, 55 bp, Artificial
  Synthetic oligonucleotide
cttccagtcgtcctcctgccagcgaacttgacaggtttcggagccccatcgaact

SEQ ID NO: 191357 - DNA, 57 bp, Artificial
  Synthetic oligonucleotide
cgctcgctcgacaaggtccgggagacatccgggcggaccccattcgcgctattcaag

SEQ ID NO: 191358 - DNA, 55 bp, Artificial
  Synthetic oligonucleotide
gaacaaacgggacgggacagcgtcccagcccaggagatattcgaacggccgtcac

SEQ ID NO: 191359 - DNA, 55 bp, Artificial
  Synthetic oligonucleotide
gaaccggtgagcgatatcaagccaacaggccggtgacagactgcttcagtcccgc

SEQ ID NO: 191360 - DNA, 55 bp, Artificial
  Synthetic oligonucleotide
gacaatggatagtcaaccttcttccgcggcagaacgcgagcctgtttgcatggtc

SEQ ID NO: 191361 - DNA, 55 bp, Artificial
  Synthetic oligonucleotide
gaccttcgtgcattctcgcttctaccacgctctcggtgtcttcctgcgttacgga

SEQ ID NO: 191362 - DNA, 53 bp, Artificial
  Synthetic oligonucleotide
gacgttctttccccgggacgaacaagggtgtcagtctgcgtggggttatccgc

SEQ ID NO: 191363 - DNA, 55 bp, Artificial
  Synthetic oligonucleotide
gaggaagatctatgacaacaagcccgagaatacaacccacaccggagtcaacctt

SEQ ID NO: 191364 - DNA, 55 bp, Artificial
  Synthetic oligonucleotide
gagtgggtccatagtcaagcccttctggcccgctatgtgtgacctgcgtataccc

SEQ ID NO: 191365 - DNA, 55 bp, Artificial
  Synthetic oligonucleotide
gatctgtctgcggacagtacgcccgtgcagacgcctttgcatgcgcaatgccaca

SEQ ID NO: 191366 - DNA, 55 bp, Artificial
  Synthetic oligonucleotide
gcacaccgtgcacggtagacggtgcacccttccgctatgattggcgtgtacacgc

SEQ ID NO: 191367 - DNA, 55 bp, Artificial
  Synthetic oligonucleotide
gcagggcgccaaggacaggcgaccccgaacccgtcagcaggcgggggacggagag

SEQ ID NO: 191368 - DNA, 59 bp, Artificial
  Synthetic oligonucleotide
aagtcgaggtaaccgaccgggacatgcgtacacgcgagccacagtggccgcacgcactc

SEQ ID NO: 191369 - DNA, 55 bp, Artificial
  Synthetic oligonucleotide
gcataccttgctaccgggtgatcatgtatgtcgtatcgcatccgttgcgcactcg

SEQ ID NO: 191370 - DNA, 55 bp, Artificial
  Synthetic oligonucleotide
gccaaaggtgaatagcttacgcgttcacgttatcagaagggtagacgtccgggga

SEQ ID NO: 191371 - DNA, 55 bp, Artificial
  Synthetic oligonucleotide
gccaattagccgctttataccaccttcgtagtggcgaacaaccgctgctcccgtc

SEQ ID NO: 191372 - DNA, 55 bp, Artificial
  Synthetic oligonucleotide
gccaggaaaagccggaaggcgggtaccgtactcatctcaggttgttactcatctc

SEQ ID NO: 191373 - DNA, 55 bp, Artificial
  Synthetic oligonucleotide
gcccaaaaggtaccttcgccaactaccttcgcgactgtcgcatcacggacagttc

SEQ ID NO: 191374 - DNA, 55 bp, Artificial
  Synthetic oligonucleotide
ggcgtgccgagtaggctgcgatccctgtagtctcgggaagcacgagacagtgaga

SEQ ID NO: 191375 - DNA, 55 bp, Artificial
  Synthetic oligonucleotide
ggcgggttgtcccaagacattcgcgagatcctccggccatcctcgtacactggac

SEQ ID NO: 191376 - DNA, 55 bp, Artificial
  Synthetic oligonucleotide
ggcgactggtattcgagtgtcaagcgtctctagtatcggccactcgcagctacac

SEQ ID NO: 191377 - DNA, 55 bp, Artificial
  Synthetic oligonucleotide
ggcgaacccctccgggaaccgcaggtagtaacgcatgtacagctcgtagggtgat

SEQ ID NO: 191378 - DNA, 55 bp, Artificial
  Synthetic oligonucleotide
ggccacgttcagacatcggcgagagactattgcagagtcacccgagccccgtctg

SEQ ID NO: 191379 - DNA, 48 bp, Artificial
  Synthetic oligonucleotide
ggggtctgggagctggaccccccccgtccgggagctggaccccccccg

SEQ ID NO: 191380 - DNA, 53 bp, Artificial
  Synthetic oligonucleotide
ggaggttattgccccggcaacgaattccggtcaattcgaggttcgattggacc

SEQ ID NO: 191381 - DNA, 55 bp, Artificial
  Synthetic oligonucleotide
ggagcaagattagatgaacatcagtagtaacctgatggcgagcaggcatgggccg

SEQ ID NO: 191382 - DNA, 55 bp, Artificial
  Synthetic oligonucleotide
gcttgccaagttggctcctaagcgcaaccaggacaagctatcgctaacgctgatc

SEQ ID NO: 191383 - DNA, 55 bp, Artificial
  Synthetic oligonucleotide
gctcctgtaacataaacgaaacgacttcgtgatgtcacgggtccgccggggcatg

SEQ ID NO: 191384 - DNA, 55 bp, Artificial
  Synthetic oligonucleotide
gcggtcgaatgcgatgaggtgtagcctcggtaaagttctactatttcgtaaccgc

SEQ ID NO: 191385 - DNA, 55 bp, Artificial
  Synthetic oligonucleotide
gcggacgccacaccctgaacggtcgcacctactttcagcgcgaaacgggcctgtt

SEQ ID NO: 191386 - DNA, 55 bp, Artificial
  Synthetic oligonucleotide
acaccggtgttgcgtatggtgtgggccgtggacatcacgatcagcggtctgaccc

SEQ ID NO: 191387 - DNA, 55 bp, Artificial
  Synthetic oligonucleotide
gcgccggtacgcgtccctgccatgtgctggatatactcggatatacatggcctgg

SEQ ID NO: 191388 - DNA, 55 bp, Artificial
  Synthetic oligonucleotide
gcgaacttgtctgggatcgtttcctcgcatccaccattcgggatcgtctggatga

SEQ ID NO: 191389 - DNA, 54 bp, Artificial
  Synthetic oligonucleotide
tgaagggaactttcgcaccggaactgaaacacacagcgtggacgtgactactct

SEQ ID NO: 191390 - DNA, 57 bp, Artificial
  Synthetic oligonucleotide
gggccgctacgccgtccatcgggcgagtgggtctacacccggtatggcgcaccggca

SEQ ID NO: 191391 - DNA, 54 bp, Artificial
  Synthetic oligonucleotide
caacccgatggtcggtgcaagcttccaccaagggtgagaacaacgcactcagca

SEQ ID NO: 191392 - DNA, 54 bp, Artificial
  Synthetic oligonucleotide
gcaggagaaaagcagtacgggcctgccgcagacaacctcgacctgagttacctc

SEQ ID NO: 191393 - DNA, 54 bp, Artificial
  Synthetic oligonucleotide
cgtcaatcggaagtacgcacggccttgaggagacgtccacgtcctgtttaatct

SEQ ID NO: 191394 - DNA, 54 bp, Artificial
  Synthetic oligonucleotide
gtatgactctccgtcgggcgacctggtctctgacgatcactcccttaccgcgta

SEQ ID NO: 191395 - DNA, 54 bp, Artificial
  Synthetic oligonucleotide
ctatcaagccaagcattggagtgctgtggaagcctgacagggtgagttcttcag

SEQ ID NO: 191396 - DNA, 54 bp, Artificial
  Synthetic oligonucleotide
tcctccacgtctcgtgaccgccagatggctccttgcgtctgatccgacggtgct

SEQ ID NO: 191397 - DNA, 54 bp, Artificial
  Synthetic oligonucleotide
ccgcggctatccatcgtggaggtacgggtgcgcttaggtagaacaacacggtta

SEQ ID NO: 191398 - DNA, 54 bp, Artificial
  Synthetic oligonucleotide
tttcctgcgacgtagggcctcccaggcgattccagcggggctaccatcatcgga

SEQ ID NO: 191399 - DNA, 54 bp, Artificial
  Synthetic oligonucleotide
aatggcttaccacgttggaaagcggtgaggaaccccacgttctccatcgaatgc

SEQ ID NO: 191400 - DNA, 54 bp, Artificial
  Synthetic oligonucleotide
acggtcggctatttggtcgaagttaacggactccggcatacgtccagaataggc

SEQ ID NO: 191401 - DNA, 60 bp, Artificial
  Synthetic oligonucleotide
gggatgacgtgcacggtgcacggtgtgcccgagtaaagaaatacctcttggatcatgctc

SEQ ID NO: 191402 - DNA, 53 bp, Artificial
  Synthetic oligonucleotide
tctcactgtctcgtgcttcccgagactacagggaccggaggcttctcggcacg

SEQ ID NO: 191403 - DNA, 53 bp, Artificial
  Synthetic oligonucleotide
tctcaagccgagacagcgtcgccggagtaaacgatctactgaaaatgtcattc

SEQ ID NO: 191404 - DNA, 53 bp, Artificial
  Synthetic oligonucleotide
acgagcgggacacacaacggggctgtttcggctggtgctcgtacgatcagtcc

SEQ ID NO: 191405 - DNA, 53 bp, Artificial
  Synthetic oligonucleotide
cccctgctcgcgaagtgcgtttcgtagtgccaagtacggaatttcggctcgag

SEQ ID NO: 191406 - DNA, 53 bp, Artificial
  Synthetic oligonucleotide
cgcgtgcgagaggaccttgtgggccgtgtcgagaagttgacatggcaggaaat

SEQ ID NO: 191407 - DNA, 53 bp, Artificial
  Synthetic oligonucleotide
ccccacgctacgatattcacccgaacgcatttcatgagcgttacacattgcgt

SEQ ID NO: 191408 - DNA, 53 bp, Artificial
  Synthetic oligonucleotide
gttcgtgcggtccgttcgcgaggtaccccgagatttcgtggggtgactgaggg

SEQ ID NO: 191409 - DNA, 53 bp, Artificial
  Synthetic oligonucleotide
gtggtataggggatccaacaacggtctgactcctcacacccacggtccacgac

SEQ ID NO: 191410 - DNA, 53 bp, Artificial
  Synthetic oligonucleotide
gaccgacatacccctggccgaccactaccagctttcccgatgaagtcatgagc

SEQ ID NO: 191411 - DNA, 53 bp, Artificial
  Synthetic oligonucleotide
acatgctcaacgtctagcgtgcccttcaacgtcccggcagacaccgcacggac

SEQ ID NO: 191412 - DNA, 57 bp, Artificial
  Synthetic oligonucleotide
gctccgagatgggttgggatcgtgtatccgacgttccggtgacagtcggggcacgtc

SEQ ID NO: 191413 - DNA, 53 bp, Artificial
  Synthetic oligonucleotide
attcgattccgagacccctctcacgtcacaccggttgcacttgtggccgcgag

SEQ ID NO: 191414 - DNA, 53 bp, Artificial
  Synthetic oligonucleotide
ggggtttacgagatgtcactcgccgcattgttaatcgcttcggatcgacttgt

SEQ ID NO: 191415 - DNA, 53 bp, Artificial
  Synthetic oligonucleotide
aatcaagatcgtcccatggcgtgaggacggacggtgtaagcgggatacacggc

SEQ ID NO: 191416 - DNA, 52 bp, Artificial
  Synthetic oligonucleotide
agcacaaggagaccggcctagctgacagtcacctcacgagtccaactactac

SEQ ID NO: 191417 - DNA, 52 bp, Artificial
  Synthetic oligonucleotide
gctgttttcgccctctagtggctacgatcccggcccggtaacgaccatcaga

SEQ ID NO: 191418 - DNA, 52 bp, Artificial
  Synthetic oligonucleotide
tctagctagttagtggcctacatggcggcccccggcgcggactcctacctcc

SEQ ID NO: 191419 - DNA, 52 bp, Artificial
  Synthetic oligonucleotide
cccctgacacacccacccacaggaggagatcatgttcggacgcgagtcccgc

SEQ ID NO: 191420 - DNA, 52 bp, Artificial
  Synthetic oligonucleotide
tatgcgatggacgtatcggagagttgtcggatcgtgcacgctcggaatgggc

SEQ ID NO: 191421 - DNA, 52 bp, Artificial
  Synthetic oligonucleotide
tgcgtactgtaaccagccgatgtcctgaggtgcagtgtttcatggctcctca

SEQ ID NO: 191422 - DNA, 51 bp, Artificial
  Synthetic oligonucleotide
tatcgccaggaaacgactcacggaaaggacggtcctggtacatggacgact

SEQ ID NO: 191423 - DNA, 56 bp, Artificial
  Synthetic oligonucleotide
cgccgcgtcggctcgtcacactccccacaccaggccgaccgagggagcgagaccgg

SEQ ID NO: 191424 - DNA, 51 bp, Artificial
  Synthetic oligonucleotide
tattggtgcacccaccgttacccggccctcacgtctcgatcggcgctacat

SEQ ID NO: 191425 - DNA, 51 bp, Artificial
  Synthetic oligonucleotide
tccatatacgtcgtatcccggttacggagcatgcgtctcccaggtatggac

SEQ ID NO: 191426 - DNA, 51 bp, Artificial
  Synthetic oligonucleotide
tacttgcctgtagctgtaactgtccgtgttgctcctgagggtctgtaaggc

SEQ ID NO: 191427 - DNA, 51 bp, Artificial
  Synthetic oligonucleotide
gacgtgaacccggaaagctcggtcgtgagatcagtacgacgtgcacagggg

SEQ ID NO: 191428 - DNA, 51 bp, Artificial
  Synthetic oligonucleotide
ctcacctctgcgaggagacgggtgttctctgcgagggtgatcatctgtcgg

SEQ ID NO: 191429 - DNA, 51 bp, Artificial
  Synthetic oligonucleotide
gtcaccgacgcgggaggcaggacgtaggttcggagaagatttcgcgaacgg

SEQ ID NO: 191430 - DNA, 51 bp, Artificial
  Synthetic oligonucleotide
gcgttggaactaatcgcatgcgacttgtagaggaggtggggtagatgcaga

SEQ ID NO: 191431 - DNA, 51 bp, Artificial
  Synthetic oligonucleotide
ggtcagtaccgacctgtaggcggtgaggtcggccagtgggctgactcatcc

SEQ ID NO: 191432 - DNA, 51 bp, Artificial
  Synthetic oligonucleotide
caaccacgattctcgctactgatagtgaagcccgaggagacacatgagggt

SEQ ID NO: 191433 - DNA, 51 bp, Artificial
  Synthetic oligonucleotide
tgagtgcatcggtgtccgctatcgtgaccgatccctggcggttgcacgttc

SEQ ID NO: 191434 - DNA, 55 bp, Artificial
  Synthetic oligonucleotide
gatacaacgggtaaactacgtaaacgcggttcagaaacctgtgagtgtgatccca

SEQ ID NO: 191435 - DNA, 60 bp, Artificial
  Synthetic oligonucleotide
ccgctatgattggcgtgtacacgccaactctgggaacgggagagcatcgtggatcacggg

SEQ ID NO: 191436 - DNA, 51 bp, Artificial
  Synthetic oligonucleotide
caaggcgacagtcctcgaatcgtgcgcgccagtaggccggttgcggttcat

SEQ ID NO: 191437 - DNA, 51 bp, Artificial
  Synthetic oligonucleotide
acctggagtaggccgaatctggagtaggccgaatctggagttaggccaagt

SEQ ID NO: 191438 - DNA, 50 bp, Artificial
  Synthetic oligonucleotide
aaggcccggagccccacgtccgcgcacccccggccctgagctctcatctc

SEQ ID NO: 191439 - DNA, 50 bp, Artificial
  Synthetic oligonucleotide
aacacacgttcgaccataggagtgtccgggccaccccgacaagcacgaac

SEQ ID NO: 191440 - DNA, 50 bp, Artificial
  Synthetic oligonucleotide
aaggcctggggcgactcaagccctcaaccgggtgccgttagcggtggcat

SEQ ID NO: 191441 - DNA, 50 bp, Artificial
  Synthetic oligonucleotide
aaggcgccacgaacagccagtctaccgcaacggcataccatccgcgattc

SEQ ID NO: 191442 - DNA, 50 bp, Artificial
  Synthetic oligonucleotide
aaagcccgattcgcgggaccccgtacatgcagcatggactgcaatgtggg

SEQ ID NO: 191443 - DNA, 50 bp, Artificial
  Synthetic oligonucleotide
aagctgctcggaacgcgacgggccaagccgcctggatgatacgtccgctt

SEQ ID NO: 191444 - DNA, 50 bp, Artificial
  Synthetic oligonucleotide
aaagagcagatgccgggaaaacccacccctgaacctggtgtgaggccgat

SEQ ID NO: 191445 - DNA, 50 bp, Artificial
  Synthetic oligonucleotide
aaggctacagtgccggtggtaacaacagcgattctcgtcccaccgtgggc

SEQ ID NO: 191446 - DNA, 58 bp, Artificial
  Synthetic oligonucleotide
aggacacccgctcccgcgggatctccgtctgtacggtcactcgtcgcctcctcagcaa

SEQ ID NO: 191447 - DNA, 50 bp, Artificial
  Synthetic oligonucleotide
aagcgtgggtctccgacggcacgtggtttgatcgacacgttagtggcacc

SEQ ID NO: 191448 - DNA, 50 bp, Artificial
  Synthetic oligonucleotide
aaggggaggatgcgtgtgagtggaccagcatcgcggggaaagtcgtttga

SEQ ID NO: 191449 - DNA, 50 bp, Artificial
  Synthetic oligonucleotide
aaactctccggagtcgcatctgtggagtggggacggcaggaaggagcgat

SEQ ID NO: 191450 - DNA, 50 bp, Artificial
  Synthetic oligonucleotide
aagtcgggcccttttcgggactttaggccctggcagtgaaggctaggggt

SEQ ID NO: 191451 - DNA, 50 bp, Artificial
  Synthetic oligonucleotide
ggggtccactcgggtgaggagaacccggaacggcactccagacggccgga

SEQ ID NO: 191452 - DNA, 50 bp, Artificial
  Synthetic oligonucleotide
aatacggcaagatcttcagagcggtcattgcggacgcctgcccacaggcg

SEQ ID NO: 191453 - DNA, 50 bp, Artificial
  Synthetic oligonucleotide
aattcgtgccccgtggtgacaggaaccgcctgatgacgacgacctcccgt

SEQ ID NO: 191454 - DNA, 50 bp, Artificial
  Synthetic oligonucleotide
aaaacgggatgtgtccaccatgccccgtgtcagccttgggcagccgggac

SEQ ID NO: 191455 - DNA, 50 bp, Artificial
  Synthetic oligonucleotide
aaaatggctctccggtcgggtggggcacccatggctcgactccgcgtgga

SEQ ID NO: 191456 - DNA, 50 bp, Artificial
  Synthetic oligonucleotide
aatgtcgccagaggagtccagggaaaccgacgggccattacccgcggccg

SEQ ID NO: 191457 - DNA, 60 bp, Artificial
  Synthetic oligonucleotide
caaaggcgaacgatcccatgatcttttctgaatggatcttttctgaatgcgggagtgtga

SEQ ID NO: 191458 - DNA, 50 bp, Artificial
  Synthetic oligonucleotide
aaacgctgtgacctcctgtcggcagtacgacgcgcgggggcccagttggc

SEQ ID NO: 191459 - DNA, 50 bp, Artificial
  Synthetic oligonucleotide
aatggtcgcgcagtcctgatatctggtcaccaggtgcacgcccagtgggg

SEQ ID NO: 191460 - DNA, 50 bp, Artificial
  Synthetic oligonucleotide
ttgggacctgcgtgcagcgatcaccacggtataccccgccgcggcgagtc

SEQ ID NO: 191461 - DNA, 50 bp, Artificial
  Synthetic oligonucleotide
aatgcgcggtgacgagtacttctgagtgctcggcggtgggtgtgacccga

SEQ ID NO: 191462 - DNA, 50 bp, Artificial
  Synthetic oligonucleotide
aatgatctgttgtgagacggtgcgtgactgacggccgcccgtcggaggat

SEQ ID NO: 191463 - DNA, 50 bp, Artificial
  Synthetic oligonucleotide
aatctgtgcgtggaacagcagtcatggtggacccgctaccggggtaaggc

SEQ ID NO: 191464 - DNA, 50 bp, Artificial
  Synthetic oligonucleotide
aatcggcgcgactgacgacaactgcccagcggcccagctctgtcgaccag

SEQ ID NO: 191465 - DNA, 50 bp, Artificial
  Synthetic oligonucleotide
aatcgctggcgggtggtgggtaacgttgttgacgtgcttccggacgtggg

SEQ ID NO: 191466 - DNA, 50 bp, Artificial
  Synthetic oligonucleotide
aatcgcagacgttcggtcgccgagtgcccacgggcttctgtcgttgcgcc

SEQ ID NO: 191467 - DNA, 50 bp, Artificial
  Synthetic oligonucleotide
aatccccggggttggtctgaagatcccccgcgcagcacctagcatcggag

SEQ ID NO: 191468 - DNA, 58 bp, Artificial
  Synthetic oligonucleotide
ttgtcgcgactcgcggtcgtccgtgggtctgccacggctcgttggcacggtgggtagc

SEQ ID NO: 191469 - DNA, 50 bp, Artificial
  Synthetic oligonucleotide
aatcaggtcggtgcgaggggccataaggggcatgcaggggtgaactgacg

SEQ ID NO: 191470 - DNA, 50 bp, Artificial
  Synthetic oligonucleotide
aatcaggggaaggcgccacgaacagccagtctaccgcaacggcataccat

SEQ ID NO: 191471 - DNA, 50 bp, Artificial
  Synthetic oligonucleotide
aacctcgacgctccgaaccacctcggtactgtgccgacgatctccagtga

SEQ ID NO: 191472 - DNA, 50 bp, Artificial
  Synthetic oligonucleotide
aaccggattgtgcggggaccagccgactgctcggcgctacgacgggatct

SEQ ID NO: 191473 - DNA, 50 bp, Artificial
  Synthetic oligonucleotide
aaccgatggtgaccgaacgtgggtctcgacgcaagagtgggccgtcatca

SEQ ID NO: 191474 - DNA, 50 bp, Artificial
  Synthetic oligonucleotide
aacctttcacgttcggagtgcccagaagctaaccggacggccgcaacagg

SEQ ID NO: 191475 - DNA, 50 bp, Artificial
  Synthetic oligonucleotide
aacgacccttcggtgcgcgttcagtgccggactgtgacacgggagctgtg

SEQ ID NO: 191476 - DNA, 50 bp, Artificial
  Synthetic oligonucleotide
aacgcccggacgtcgttcgagaccgtgatgaggaaggttccggcgcgagt

SEQ ID NO: 191477 - DNA, 50 bp, Artificial
  Synthetic oligonucleotide
tcgcaagtccttcgactaacaacctgttttatcactctctgggaaagcgg

SEQ ID NO: 191478 - DNA, 50 bp, Artificial
  Synthetic oligonucleotide
aacgcggtgcaacggactggagtcgccccgaccacgtggatcgctacagc

SEQ ID NO: 191479 - DNA, 60 bp, Artificial
  Synthetic oligonucleotide
tgatcgcgcctcgttgctccgcatcgtgcgggtgcgtgtcgaccagacgggggcgacgcc

SEQ ID NO: 191480 - DNA, 50 bp, Artificial
  Synthetic oligonucleotide
aacggtaaattacgcacgtccgcacacacgacctgcgccgaagtggctct

SEQ ID NO: 191481 - DNA, 50 bp, Artificial
  Synthetic oligonucleotide
aacggtgcgcccgaatcatgcaccccaggcgggtcgatgactagagtgtc

SEQ ID NO: 191482 - DNA, 50 bp, Artificial
  Synthetic oligonucleotide
aaccctgatcggcggatcccccgacccgatgtccgtggtattcctgcgcc

SEQ ID NO: 191483 - DNA, 50 bp, Artificial
  Synthetic oligonucleotide
aacggttccaggcgctttggaccccagtgcccataaacgtcgggacttcg

SEQ ID NO: 191484 - DNA, 50 bp, Artificial
  Synthetic oligonucleotide
aactccccggaggtggttcgcgatgttcttcggtcgccacaagacgaccc

SEQ ID NO: 191485 - DNA, 50 bp, Artificial
  Synthetic oligonucleotide
tgccactagcggtggacgccacccgttcccccttcacagttcgtggtgct

SEQ ID NO: 191486 - DNA, 50 bp, Artificial
  Synthetic oligonucleotide
aaccctccacaccgcgtcaagtgcacctgcccccagtctgccccgatcac

SEQ ID NO: 191487 - DNA, 50 bp, Artificial
  Synthetic oligonucleotide
aactgccgcgatgactcctgcaacaagcggacatgccgcagatgttccca

SEQ ID NO: 191488 - DNA, 50 bp, Artificial
  Synthetic oligonucleotide
aagcgtgcgccaatacgcatcccgagactgcgcgggagtacccgtcggtc

SEQ ID NO: 191489 - DNA, 50 bp, Artificial
  Synthetic oligonucleotide
aacacgttgtccgagaccgaccctacgcggaatgcactttcaccggccga

SEQ ID NO: 191490 - DNA, 54 bp, Artificial
  Synthetic oligonucleotide
tgcccccgggactatggaggtcacgggaaaaacagaactccgtgatgtcgaccg

SEQ ID NO: 191491 - DNA, 50 bp, Artificial
  Synthetic oligonucleotide
aagcggttgggggtacagaacacttcccggaaacaggctaaccgcgcccg

SEQ ID NO: 191492 - DNA, 50 bp, Artificial
  Synthetic oligonucleotide
aacagcgctgacggtggcatgttgcagaaggccatgtggatcctggaggc

SEQ ID NO: 191493 - DNA, 50 bp, Artificial
  Synthetic oligonucleotide
aagcgctcgctgccctggttggggcccgtttgggacgtgctcacatgtcc

SEQ ID NO: 191494 - DNA, 50 bp, Artificial
  Synthetic oligonucleotide
aagcgaccagatcccagtccttccgggccactccacgtgaccactggtag

SEQ ID NO: 191495 - DNA, 50 bp, Artificial
  Synthetic oligonucleotide
aacatcccctagtcgagccaggagcgtgaggaccggatggccaccctgag

SEQ ID NO: 191496 - DNA, 50 bp, Artificial
  Synthetic oligonucleotide
aacatgatctaggtcacccgctgctatgcgacggctcacgtccgaccgcc

SEQ ID NO: 191497 - DNA, 50 bp, Artificial
  Synthetic oligonucleotide
aagcctacggaggacggtggacccgagcatcaggcggcatggccgtgcac

SEQ ID NO: 191498 - DNA, 50 bp, Artificial
  Synthetic oligonucleotide
aaccccagcccggtcatgagggtatagaaactggagtacgtggggcggcg

SEQ ID NO: 191499 - DNA, 50 bp, Artificial
  Synthetic oligonucleotide
aagccgtagcgtcccgcgccgcaagattggagtcctgacgcccattactt

SEQ ID NO: 191500 - DNA, 50 bp, Artificial
  Synthetic oligonucleotide
aagccgcggtcagaacggcctcccctctccctgtctgtcaccggctcgca

SEQ ID NO: 191501 - DNA, 50 bp, Artificial
  Synthetic oligonucleotide
attgggtgttcacctgggtaattccgggggtctgggagctggacccccgg

SEQ ID NO: 191502 - DNA, 50 bp, Artificial
  Synthetic oligonucleotide
aacccccagtcacccaacctaagacctgggctcgcggttgacaggcagga

SEQ ID NO: 191503 - DNA, 50 bp, Artificial
  Synthetic oligonucleotide
aagatttgcccgattgccgtggctcgaccgcgcgactgttggaagctccc

SEQ ID NO: 191504 - DNA, 50 bp, Artificial
  Synthetic oligonucleotide
aagatggtcgcgctttcgtggcgggggagctaacgtgtggccctgggtac

SEQ ID NO: 191505 - DNA, 50 bp, Artificial
  Synthetic oligonucleotide
aagaccgacgaaaggagcagataaccccaggccagcgtggctccggtgag

SEQ ID NO: 191506 - DNA, 50 bp, Artificial
  Synthetic oligonucleotide
tgcctacgtttgcctcgcacagatgacacttgaggcatctcacgtgtgat

SEQ ID NO: 191507 - DNA, 50 bp, Artificial
  Synthetic oligonucleotide
acgacccgttcagctggctcatctcggcagggctcacgtccgtgttccta

SEQ ID NO: 191508 - DNA, 50 bp, Artificial
  Synthetic oligonucleotide
acgacaccaattctcatcgggcgaggtgctccttccgtacacgcggggcc

SEQ ID NO: 191509 - DNA, 50 bp, Artificial
  Synthetic oligonucleotide
accggagccgattgcctgttaccttctgtcggcccgttgttctgcggcac

SEQ ID NO: 191510 - DNA, 50 bp, Artificial
  Synthetic oligonucleotide
accgcaaacgagcaatgcctggtggtccgcctagagcttcaaccggcgac

SEQ ID NO: 191511 - DNA, 50 bp, Artificial
  Synthetic oligonucleotide
accgagcccggcccccataaaaggagtgcagcgacatacggagcggcgcg

SEQ ID NO: 191512 - DNA, 59 bp, Artificial
  Synthetic oligonucleotide
attatgagcgggacgaccgcccataatcggcgaccgcgcgcacaagtcaacgccgttga

SEQ ID NO: 191513 - DNA, 50 bp, Artificial
  Synthetic oligonucleotide
acccttcgaaccagggcctcaccaaggtcgctcggcgtagcgattcgcta

SEQ ID NO: 191514 - DNA, 50 bp, Artificial
  Synthetic oligonucleotide
accctctggctgcgttagcacagcagggatggcggtacctcctgtggggt

SEQ ID NO: 191515 - DNA, 50 bp, Artificial
  Synthetic oligonucleotide
accctcccggggccacgctaccgaccgaatctaacgcccggtgaacggga

SEQ ID NO: 191516 - DNA, 50 bp, Artificial
  Synthetic oligonucleotide
acccgtctcgcacaccgtgccagggcctgttctcgtccaacgcgaatcca

SEQ ID NO: 191517 - DNA, 50 bp, Artificial
  Synthetic oligonucleotide
acccggttgtgctagctcatgtgccatcgcgctccgagcggcccttctct

SEQ ID NO: 191518 - DNA, 50 bp, Artificial
  Synthetic oligonucleotide
acccggtcgcaacgggtgatactcaccggatcaagcgcgcagcagatgta

SEQ ID NO: 191519 - DNA, 50 bp, Artificial
  Synthetic oligonucleotide
acccggtaggaggaccagccatgacgctgtatcagtgcccacgcgacgac

SEQ ID NO: 191520 - DNA, 50 bp, Artificial
  Synthetic oligonucleotide
acccggctgagtggttgtcactgtcggccccctcgccataggtcaatgca

SEQ ID NO: 191521 - DNA, 50 bp, Artificial
  Synthetic oligonucleotide
acccggcgagctactacgggacactggtcagtcagcggccgtctaggaca

SEQ ID NO: 191522 - DNA, 50 bp, Artificial
  Synthetic oligonucleotide
acccggccacgatccctgctagaacccccgccaatgccccgaaggcgtaa

SEQ ID NO: 191523 - DNA, 60 bp, Artificial
  Synthetic oligonucleotide
agaattccccccgacattccggcgccattcatgctgagcattcatggcacattctttggg

SEQ ID NO: 191524 - DNA, 50 bp, Artificial
  Synthetic oligonucleotide
acccgctgtagtcgccctaagctgccctcaccgtacgtggtcgacatccg

SEQ ID NO: 191525 - DNA, 50 bp, Artificial
  Synthetic oligonucleotide
acccgcgtgcgacccgccagccagggaatcccgatcgtgacgacccagtg

SEQ ID NO: 191526 - DNA, 50 bp, Artificial
  Synthetic oligonucleotide
acccgcgtgatatcccggcgcgttcgcgtagcacctcgactcgacatccg

SEQ ID NO: 191527 - DNA, 50 bp, Artificial
  Synthetic oligonucleotide
acccgcgtcggggatacttcccgaatagctttcctccgggctcaggaccc

SEQ ID NO: 191528 - DNA, 50 bp, Artificial
  Synthetic oligonucleotide
agaattcgacctgaaggcgcgctcctatgccctcgcggaggagatgctct

SEQ ID NO: 191529 - DNA, 50 bp, Artificial
  Synthetic oligonucleotide
agaagttgtcatccccggtgtggacgggcacatctgctcgcatcgcgcac

SEQ ID NO: 191530 - DNA, 50 bp, Artificial
  Synthetic oligonucleotide
agaagggtagacgtccggggaaaaggttggcgagcgagttgagcgcaact

SEQ ID NO: 191531 - DNA, 50 bp, Artificial
  Synthetic oligonucleotide
actcgcccgggcatacccgacactgctggcatcccggttgcatcctggct

SEQ ID NO: 191532 - DNA, 50 bp, Artificial
  Synthetic oligonucleotide
actcagggccacccatctggcctgcgcgtcagttctcgtgcggacacttg

SEQ ID NO: 191533 - DNA, 50 bp, Artificial
  Synthetic oligonucleotide
actaccgcaccgcgggtaccaccgcatgaacggatcattcggaaggagcg

SEQ ID NO: 191534 - DNA, 56 bp, Artificial
  Synthetic oligonucleotide
cttcactgcggacctgtcctgtcccgtcgcagggttggagatgaggttcgaccggg

SEQ ID NO: 191535 - DNA, 50 bp, Artificial
  Synthetic oligonucleotide
acgtggagccacaggtacagacgaccgtggtctcgtggtacgtcgggtga

SEQ ID NO: 191536 - DNA, 50 bp, Artificial
  Synthetic oligonucleotide
acggtccgtatggccgtggggtgtatgcgtcactgcactcatcgtccgtt

SEQ ID NO: 191537 - DNA, 50 bp, Artificial
  Synthetic oligonucleotide
acgggttcgggtgaggatccggccttacgggccctcctgaacggtgtcgt

SEQ ID NO: 191538 - DNA, 50 bp, Artificial
  Synthetic oligonucleotide
acgggtcagatgaacggcgagatctggttggaaggggaacggcggagctc

SEQ ID NO: 191539 - DNA, 50 bp, Artificial
  Synthetic oligonucleotide
acggccgtggaggtttgcgacacggtactagccgctgatcgctacgtgct

SEQ ID NO: 191540 - DNA, 50 bp, Artificial
  Synthetic oligonucleotide
acggcatgtcaggtggacgaacaggcgacctaccgctggtcagccggtga

SEQ ID NO: 191541 - DNA, 50 bp, Artificial
  Synthetic oligonucleotide
acggataggcgcacacgatgtgcaccacccgaccttgccactgtgggtag

SEQ ID NO: 191542 - DNA, 50 bp, Artificial
  Synthetic oligonucleotide
acggagccccaccgcaaacgagcaatgcctggtggtccgcctagagcttc

SEQ ID NO: 191543 - DNA, 50 bp, Artificial
  Synthetic oligonucleotide
acggagagggagcttgccgtatacgaccgaccgtgctgtgatcgcgtcgc

SEQ ID NO: 191544 - DNA, 50 bp, Artificial
  Synthetic oligonucleotide
acgctggagggacctgccgtaccgacggatccatggtgatcagctgtcgg

SEQ ID NO: 191545 - DNA, 54 bp, Artificial
  Synthetic oligonucleotide
caccgtccgaccgtaccaacaccggtgtttggtcacacggatgcaacaccggtg

SEQ ID NO: 191546 - DNA, 60 bp, Artificial
  Synthetic oligonucleotide
atgtgccacgtaggcggcggatgacgtccagttggatagatgacaccggagagtggagat

SEQ ID NO: 191547 - DNA, 50 bp, Artificial
  Synthetic oligonucleotide
acgcgtgggtgagtatgcacgccgtcaggactcgggctgccggttggacg

SEQ ID NO: 191548 - DNA, 50 bp, Artificial
  Synthetic oligonucleotide
acgcgcatgccatccgagaacgcattgaggttcgtgacgcccatgaggcg

SEQ ID NO: 191549 - DNA, 50 bp, Artificial
  Synthetic oligonucleotide
acgattcttccgctcggaccgacgcctgtcaccatcggacgtgcgcagga

SEQ ID NO: 191550 - DNA, 50 bp, Artificial
  Synthetic oligonucleotide
acgagcgtcagactcaaccgaaaccagagaccggctgcggtacaggggga

SEQ ID NO: 191551 - DNA, 50 bp, Artificial
  Synthetic oligonucleotide
acatacgggcccgcggttgctttgctgttgtctcggacgggtagagcata

SEQ ID NO: 191552 - DNA, 50 bp, Artificial
  Synthetic oligonucleotide
acagtgtcatagtcgtcggtcaatgcgtagccgggccccgttgcgtcgtc

SEQ ID NO: 191553 - DNA, 50 bp, Artificial
  Synthetic oligonucleotide
acagtgcggcccgaacgccttccaacaacctactccgcgccacactctcc

SEQ ID NO: 191554 - DNA, 50 bp, Artificial
  Synthetic oligonucleotide
acaggtccgggacatgcgacggaagggtcgtctttccgcctgctgacagc

SEQ ID NO: 191555 - DNA, 50 bp, Artificial
  Synthetic oligonucleotide
acaggggatcttggtccaacgtgagctgcgaggacgcgacttaccgggtg

SEQ ID NO: 191556 - DNA, 50 bp, Artificial
  Synthetic oligonucleotide
gcaacctggcgacgtaagaaacaaacgacaccgagctactgaattcgccc

SEQ ID NO: 191557 - DNA, 54 bp, Artificial
  Synthetic oligonucleotide
ttctgacgcccgggaaagaaacttatcgggcgtcagaggggctgacagccccgg

SEQ ID NO: 191558 - DNA, 50 bp, Artificial
  Synthetic oligonucleotide
acaggccgatttgggtctgcgagcaaggtaatggggcggacctccgtggg

SEQ ID NO: 191559 - DNA, 50 bp, Artificial
  Synthetic oligonucleotide
acagcgtcctgtgcgtctatcccagacttgccgtcgggtcggaggtcccg

SEQ ID NO: 191560 - DNA, 50 bp, Artificial
  Synthetic oligonucleotide
acagcgtaccggagttcccttgagcccgcacgatcagccacctatcaggc

SEQ ID NO: 191561 - DNA, 50 bp, Artificial
  Synthetic oligonucleotide
acagacctccgtgtccgcagcgcgaggcgtggtaggcctgtccacatgct

SEQ ID NO: 191562 - DNA, 50 bp, Artificial
  Synthetic oligonucleotide
acactggtcagtcagcggccgtctaggacaggcgggtccggagatcgaga

SEQ ID NO: 191563 - DNA, 50 bp, Artificial
  Synthetic oligonucleotide
acactctcggcggaggaactaccgacagtgacaccccaaccgtcggacgg

SEQ ID NO: 191564 - DNA, 50 bp, Artificial
  Synthetic oligonucleotide
acacgtcagaggtccgtgtgacagcagatcggtgtgcgctccggtagcga

SEQ ID NO: 191565 - DNA, 50 bp, Artificial
  Synthetic oligonucleotide
acacggctcgctcgcgcctgcaaatagcccggcccgtacatgctccaaga

SEQ ID NO: 191566 - DNA, 50 bp, Artificial
  Synthetic oligonucleotide
acacggagggtaacgctgccccattgggagacacatgggcgaagaccggt

SEQ ID NO: 191567 - DNA, 50 bp, Artificial
  Synthetic oligonucleotide
acacgatgtgcaccacccgaccttgccactgtgggtagtcacgcaggagc

SEQ ID NO: 191568 - DNA, 60 bp, Artificial
  Synthetic oligonucleotide
gagcgaatgcggttttgcgggttccggggctgctgtgatcttatcttgttctactgctca

SEQ ID NO: 191569 - DNA, 50 bp, Artificial
  Synthetic oligonucleotide
acacctaacctgtctgcgtcaaagcagacgacgctctagccgtcgggcgg

SEQ ID NO: 191570 - DNA, 50 bp, Artificial
  Synthetic oligonucleotide
acaccgacagaggcctcgccgcactgaaccgacttttcccgtcgtaggac

SEQ ID NO: 191571 - DNA, 50 bp, Artificial
  Synthetic oligonucleotide
acacacgactctgccagtctcgacccccgaccagttgcgagagttctgcg

SEQ ID NO: 191572 - DNA, 50 bp, Artificial
  Synthetic oligonucleotide
acaacaggcgtaccttcgcatggtccgcccgcaagtgcacgcgacagaca

SEQ ID NO: 191573 - DNA, 50 bp, Artificial
  Synthetic oligonucleotide
acccgcgtagtacgtccggaacccgtccaccaactcagctgctccgggta

SEQ ID NO: 191574 - DNA, 50 bp, Artificial
  Synthetic oligonucleotide
acccgactcgctttcccggacttgacgcacagtccccctggcgaccctcg

SEQ ID NO: 191575 - DNA, 50 bp, Artificial
  Synthetic oligonucleotide
acccgaattggtgcgcccacttccgcagattcagatcagccaactccgga

SEQ ID NO: 191576 - DNA, 50 bp, Artificial
  Synthetic oligonucleotide
accccttcccatcattgcgcgtgcctgaagttcgcccgatcgtgttcgca

SEQ ID NO: 191577 - DNA, 50 bp, Artificial
  Synthetic oligonucleotide
acccctgcagtcacgggaatccgccagttgatcggagcctcctgttagcg

SEQ ID NO: 191578 - DNA, 50 bp, Artificial
  Synthetic oligonucleotide
accccgggtggggaaatgtcagccatccccttgaggtgaccgtcttccgg

SEQ ID NO: 191579 - DNA, 57 bp, Artificial
  Synthetic oligonucleotide
ggatcaatggcccggactagtcatttggacaaccacccgtgtggggtctgtgccgtg

SEQ ID NO: 191580 - DNA, 50 bp, Artificial
  Synthetic oligonucleotide
accccggggcttcatcacgttccgtaccctctcccacgcacccgatcatt

SEQ ID NO: 191581 - DNA, 50 bp, Artificial
  Synthetic oligonucleotide
accccggctggcgctgctaagaggtaaccacatgccggttcgagggcatt

SEQ ID NO: 191582 - DNA, 50 bp, Artificial
  Synthetic oligonucleotide
acccccgaaacccgttgccactagggaactttgctcccgaacaggagcca

SEQ ID NO: 191583 - DNA, 50 bp, Artificial
  Synthetic oligonucleotide
acccagccttgcgcccacacgtggccccacagccgtgttcgtacttcgga

SEQ ID NO: 191584 - DNA, 50 bp, Artificial
  Synthetic oligonucleotide
acccagcaatcgattacgccaggtgacgtaccgagcggggagggtggtag

SEQ ID NO: 191585 - DNA, 50 bp, Artificial
  Synthetic oligonucleotide
acccacgcgttacggacgggagcccctcacgagtgatgcacgaatccgag

SEQ ID NO: 191586 - DNA, 50 bp, Artificial
  Synthetic oligonucleotide
acccacgccggtccgcgtatcgatgatggccactgggtcgagtatagcat

SEQ ID NO: 191587 - DNA, 50 bp, Artificial
  Synthetic oligonucleotide
acccacgaaccgcggaacccgggctctaccacagcgtgccctgatgtcgg

SEQ ID NO: 191588 - DNA, 50 bp, Artificial
  Synthetic oligonucleotide
acccaccgccgagacagaaccctcgcgtagggagcgcccagtggccacgc

SEQ ID NO: 191589 - DNA, 50 bp, Artificial
  Synthetic oligonucleotide
acccaccgagcgcgacgttactgcgccacacaccacacaagtccgtcggg

SEQ ID NO: 191590 - DNA, 59 bp, Artificial
  Synthetic oligonucleotide
ggactgacgtgcaccgcacaccgtgcaccgtgcacggcacagacgatcgtgacgtcacg

SEQ ID NO: 191591 - DNA, 50 bp, Artificial
  Synthetic oligonucleotide
accaggcgtcttgctccacggggcagtttgctccacggggcagtctctaa

SEQ ID NO: 191592 - DNA, 50 bp, Artificial
  Synthetic oligonucleotide
accacaacgctgacgggaaccctccgcacgtctcacccccagcatcgcaa

SEQ ID NO: 191593 - DNA, 50 bp, Artificial
  Synthetic oligonucleotide
accaaggccgaaccccctcttgtccacggatagcgggacgacgcacagta

SEQ ID NO: 191594 - DNA, 50 bp, Artificial
  Synthetic oligonucleotide
acatggtgcattgcggcaccgcctggtcatgccaaggtccacgttcacac

SEQ ID NO: 191595 - DNA, 50 bp, Artificial
  Synthetic oligonucleotide
acatcccgtgacaggttcgtcgcgaaaaatggctctccggtcgggtgggg

SEQ ID NO: 191596 - DNA, 58 bp, Artificial
  Synthetic oligonucleotide
tagacgcgcctcctcacggtccggcatccggatacggaaggtctccgcccatctcagc

SEQ ID NO: 191597 - DNA, 57 bp, Artificial
  Synthetic oligonucleotide
ccccaccaccctcactctctgccacggatcggagtgtcatgacccctcacaagatcg

SEQ ID NO: 191598 - DNA, 57 bp, Artificial
  Synthetic oligonucleotide
accccgtgcacgacggtgtgcaaaccggtgtgcaacgactgtgcatgcacggcccca

SEQ ID NO: 191599 - DNA, 56 bp, Artificial
  Synthetic oligonucleotide
gggcccgtcaatatcgacatcctgtcgttcctacaggagccgcagaacgtcactgc

SEQ ID NO: 191600 - DNA, 50 bp, Artificial
  Synthetic oligonucleotide
gggtaattccgggggtctgggagctggacccccggggggtctgggagctg

SEQ ID NO: 191601 - DNA, 52 bp, Artificial
  Synthetic oligonucleotide
cgtccctgtacgcccgggagaacggccacttcgggccggacctgtggacctc

SEQ ID NO: 191602 - DNA, 55 bp, Artificial
  Synthetic oligonucleotide
ctcgctgtgcgtcatcgtattgcggtcgtggcaccaatagggatgcggtcttcac

SEQ ID NO: 191603 - DNA, 55 bp, Artificial
  Synthetic oligonucleotide
ctctccgtcgacaatccacttctctcccgtggacttctctagccctttaaggcga

SEQ ID NO: 191604 - DNA, 55 bp, Artificial
  Synthetic oligonucleotide
ctcctgtgtatcagagtcgcaggtccaaatcgcctgtgaatgcctccgcttgtgg

SEQ ID NO: 191605 - DNA, 55 bp, Artificial
  Synthetic oligonucleotide
ctccgtttaggccctctcatggtcgtggaccggccacggatacaaccatcggagg

SEQ ID NO: 191606 - DNA, 55 bp, Artificial
  Synthetic oligonucleotide
cgccaggtagactcagaagacgcttctcgcgttgtgcgcagttgaggacgagggg

SEQ ID NO: 191607 - DNA, 55 bp, Artificial
  Synthetic oligonucleotide
cgatcaactagcgcgagaagtgtcaggttagagtccgtcgcagcgtttcttgacg

SEQ ID NO: 191608 - DNA, 55 bp, Artificial
  Synthetic oligonucleotide
ctcacaggatgccggagacctccgtcaacccagcggatcgcagccgttctctacg

SEQ ID NO: 191609 - DNA, 55 bp, Artificial
  Synthetic oligonucleotide
cctcccgggtctgtcacaggaattgggttcgcgcttccggctgtgtcgcatctga

SEQ ID NO: 191610 - DNA, 55 bp, Artificial
  Synthetic oligonucleotide
cgctcggcaagtgcacgtaaaggcaggtcacgcaccctgtttccgacacgtgagg

SEQ ID NO: 191611 - DNA, 55 bp, Artificial
  Synthetic oligonucleotide
cgctgtcctctcgtccgacaatcgtgttacgcgaagtgagcataacgagtcgggc

SEQ ID NO: 191612 - DNA, 53 bp, Artificial
  Synthetic oligonucleotide
acgggtcccctgtcgagtccgcgtgcgtgaccgtcacgtagtccgttacgtcc

SEQ ID NO: 191613 - DNA, 55 bp, Artificial
  Synthetic oligonucleotide
cggaccgtacctcagacgcaacgccccaaactagatgcgcttgacagctcccgtg

SEQ ID NO: 191614 - DNA, 55 bp, Artificial
  Synthetic oligonucleotide
cggaggtagccgtgtcctacagcgaatcgcgttatttatacgctttgtaacgacg

SEQ ID NO: 191615 - DNA, 55 bp, Artificial
  Synthetic oligonucleotide
cgttatatggacgccgttgagaaaccatcgcgccgagaccaggtgacgcgctagg

SEQ ID NO: 191616 - DNA, 54 bp, Artificial
  Synthetic oligonucleotide
cggaggttcggtgttcgactttcggtgttggatgtccggattttggttgcgagc

SEQ ID NO: 191617 - DNA, 55 bp, Artificial
  Synthetic oligonucleotide
cgggctgcgacactctcgccctcgacaggacgacataatccttgtctcgaccatc

SEQ ID NO: 191618 - DNA, 55 bp, Artificial
  Synthetic oligonucleotide
cggggctatcgctcgtaacggtcgctcgtaacggtccccatgagaccccatagac

SEQ ID NO: 191619 - DNA, 55 bp, Artificial
  Synthetic oligonucleotide
cggggctttgccgggtgtgtgttggcagcgatcctgagaccgcatggcgcaaatt

SEQ ID NO: 191620 - DNA, 55 bp, Artificial
  Synthetic oligonucleotide
cggtagacggtgcacccttccgctatgattggcgtgtacacgccaactctgggaa

SEQ ID NO: 191621 - DNA, 55 bp, Artificial
  Synthetic oligonucleotide
cgtccatcgggcgagtgggtctacacccggtatggcgcaccggcactcaccagag

SEQ ID NO: 191622 - DNA, 55 bp, Artificial
  Synthetic oligonucleotide
cgtccgatgtcggcaggacgacaatcaccggtatgacccgacgggaaagcgactt

SEQ ID NO: 191623 - DNA, 60 bp, Artificial
  Synthetic oligonucleotide
caggggtcaggcaagaccaaccagctgtacgtgctcacgggacagctggcccgctgcacg

SEQ ID NO: 191624 - DNA, 55 bp, Artificial
  Synthetic oligonucleotide
cgttactcaccgtgatagtgagcacccttacgctaagagatcggccaagaccttt

SEQ ID NO: 191625 - DNA, 55 bp, Artificial
  Synthetic oligonucleotide
cgtcgcacccatgcctggatgcgtacccggtcattcgacggctattcctgttacc

SEQ ID NO: 191626 - DNA, 55 bp, Artificial
  Synthetic oligonucleotide
atcaagcgcgcgtcagcaatgcgaacggcacagcgataccggaagctcgtcacgg

SEQ ID NO: 191627 - DNA, 55 bp, Artificial
  Synthetic oligonucleotide
atatccccgtgcactacccacgaacgaagcccagactctggaacggcggactccc

SEQ ID NO: 191628 - DNA, 55 bp, Artificial
  Synthetic oligonucleotide
atagtcagaccctgacccttcaagatcggtaggggagattttcgggatctcttcg

SEQ ID NO: 191629 - DNA, 55 bp, Artificial
  Synthetic oligonucleotide
agttcgaacactgtttgaagaacatagccaaacaccgtttggcgagtcaatggcg

SEQ ID NO: 191630 - DNA, 50 bp, Artificial
  Synthetic oligonucleotide
agtcccgggaaactcaccacgacacccaccccgttcggggtaccagctcc

SEQ ID NO: 191631 - DNA, 50 bp, Artificial
  Synthetic oligonucleotide
agccccgaaaccgagccgagccccgaaaccgagccgagccccgaaaccga

SEQ ID NO: 191632 - DNA, 55 bp, Artificial
  Synthetic oligonucleotide
atccgttccaatccaaggagcaccttcatggtgcagagtaccggtgtttacccct

SEQ ID NO: 191633 - DNA, 55 bp, Artificial
  Synthetic oligonucleotide
agacctttcctccgtgtcgctctactgcatcttggaactccttccacgctcgctc

SEQ ID NO: 191634 - DNA, 60 bp, Artificial
  Synthetic oligonucleotide
tatgcctcggtgtgtcgtcgcgagcacacgaccacgggacctcggcatcgggtcagtacc

SEQ ID NO: 191635 - DNA, 55 bp, Artificial
  Synthetic oligonucleotide
actcccatcgagcccggtatcgacaacgctcacgtcactgtcatcggaccgtccc

SEQ ID NO: 191636 - DNA, 55 bp, Artificial
  Synthetic oligonucleotide
caacctgaccgcattccaacttgacatctcatcagcttacctctacgctgacctt

SEQ ID NO: 191637 - DNA, 55 bp, Artificial
  Synthetic oligonucleotide
cacacgcgcgcgcactcgacacgatggacaggtggccacgggtaggccacaacag

SEQ ID NO: 191638 - DNA, 55 bp, Artificial
  Synthetic oligonucleotide
acgtcgtcggatcccaaccatcggatcccaaccaaccgagaggcacagggacgca

SEQ ID NO: 191639 - DNA, 55 bp, Artificial
  Synthetic oligonucleotide
cacgaccatagggctgcgtgtgtcactgaggtgcggtcggcaccttgtgtccgaa

SEQ ID NO: 191640 - DNA, 55 bp, Artificial
  Synthetic oligonucleotide
cagcgtcgctactccaggatctcaacgactcgataatccgatctagcctcgactg

SEQ ID NO: 191641 - DNA, 55 bp, Artificial
  Synthetic oligonucleotide
caggttgaacctaaacgctctgggatgtcaagaatcatcagatcctcggactcgg

SEQ ID NO: 191642 - DNA, 51 bp, Artificial
  Synthetic oligonucleotide
cagttcggggaaacattaccgttgcttccgttctactgtcccggaccgttc

SEQ ID NO: 191643 - DNA, 55 bp, Artificial
  Synthetic oligonucleotide
cctagggagacaactcgtcaatatgcaagactcgttttcaaattagagtgacggg

SEQ ID NO: 191644 - DNA, 55 bp, Artificial
  Synthetic oligonucleotide
ccgtgacacgcgacgatagaatccctgcacatatccggagggaccctgacgaccg

SEQ ID NO: 191645 - DNA, 52 bp, Artificial
  Synthetic oligonucleotide
cagtggtcggggggtcgtaggtttgtcatgggtcgggtcccttctgtggagg

SEQ ID NO: 191646 - DNA, 52 bp, Artificial
  Synthetic oligonucleotide
ccggccggccaccccgactttcggacactcttcggtaactgtccggcaacaa

SEQ ID NO: 191647 - DNA, 55 bp, Artificial
  Synthetic oligonucleotide
ccgcccacacccttagacagccgcctcaagaattcacaacgagtcccatccgacc

SEQ ID NO: 191648 - DNA, 55 bp, Artificial
  Synthetic oligonucleotide
accggtcgctccagcgtaaccaaccagccactctccttcggttctcgtgagcaca

SEQ ID NO: 191649 - DNA, 55 bp, Artificial
  Synthetic oligonucleotide
ccgatgacctggggttttactcccgatcatccggctatagcctcccctcggcagt

SEQ ID NO: 191650 - DNA, 55 bp, Artificial
  Synthetic oligonucleotide
ccgatcccagaattccgccggtatgacgaacgcggacggatcatgacgcacgtcg

SEQ ID NO: 191651 - DNA, 55 bp, Artificial
  Synthetic oligonucleotide
ccgaccctacgcggaatgcactttcaccggccgacatgcttcggctttaccggtc

SEQ ID NO: 191652 - DNA, 55 bp, Artificial
  Synthetic oligonucleotide
acgagatgtgcaccaaggactcgtgggtcaaccgggtgggccttctcagcgcgga

SEQ ID NO: 191653 - DNA, 55 bp, Artificial
  Synthetic oligonucleotide
ccgaagccgtgcctactgtccgatccacagtcggaagttgacataactgtaaccg

SEQ ID NO: 191654 - DNA, 55 bp, Artificial
  Synthetic oligonucleotide
cccttgcgagcctgagcgattcctgaatgccgaccaacgttcgggtaagcgatcg

SEQ ID NO: 191655 - DNA, 55 bp, Artificial
  Synthetic oligonucleotide
ccccaggttcctgcccggtaagtatcgcgccatctagtgacggaaaccaatgccg

SEQ ID NO: 191656 - DNA, 60 bp, Artificial
  Synthetic oligonucleotide
gcatctgtgttacagatgcataccttgctaccgggtgatcatgtatgtcgtatcgcatcc

SEQ ID NO: 191657 - DNA, 55 bp, Artificial
  Synthetic oligonucleotide
ccatcacggtcacttgagtcgcgttcgagaggaatgtagtttccgcttcgtaccg

SEQ ID NO: 191658 - DNA, 55 bp, Artificial
  Synthetic oligonucleotide
ccaccgcatgtcgtcagaccacggaatcaccacgtatggccacccgaaagtgggg

SEQ ID NO: 191659 - DNA, 55 bp, Artificial
  Synthetic oligonucleotide
ccaaaccgcctcggaagtccgagcagactggattaccgcttcggctatcgcggac

SEQ ID NO: 191660 - DNA, 55 bp, Artificial
  Synthetic oligonucleotide
catcgaatgatccaaagtacccacctcgccctgtacgtcacgtcgctagcgcgcg

SEQ ID NO: 191661 - DNA, 55 bp, Artificial
  Synthetic oligonucleotide
catcaccttcccttcgaggctcaatgcaagtgaaatctcaacggagcgaagccca

SEQ ID NO: 191662 - DNA, 55 bp, Artificial
  Synthetic oligonucleotide
tccacgcacagcgggattacgaagcgcgggactacggggcgcgtaactgcggaag

SEQ ID NO: 191663 - DNA, 55 bp, Artificial
  Synthetic oligonucleotide
tagttctctactccgatcgtggagggcgggtttagtcacccaaggtgaccgcaat

SEQ ID NO: 191664 - DNA, 55 bp, Artificial
  Synthetic oligonucleotide
tagtcacgctctttgctcgcgcgcatgttagttcgcatcttggcgaacgagtctg

SEQ ID NO: 191665 - DNA, 55 bp, Artificial
  Synthetic oligonucleotide
tacacgccaactctgggaacgggagagcatcgtggatcacgggagtcgggtggtc

SEQ ID NO: 191666 - DNA, 55 bp, Artificial
  Synthetic oligonucleotide
gtttcgtccggtctgtggataaccgggatgatcaggactgatgcgccggaaccgc

SEQ ID NO: 191667 - DNA, 57 bp, Artificial
  Synthetic oligonucleotide
atcgtaatggtcgtcctccgtataagtgggagcgaggatacaaggatactgtattag

SEQ ID NO: 191668 - DNA, 53 bp, Artificial
  Synthetic oligonucleotide
attccgaactccacccaagctttggtctactgataagtttaaacagtaacgag

SEQ ID NO: 191669 - DNA, 54 bp, Artificial
  Synthetic oligonucleotide
accgtatttagccataggtttaatgttatagttacctatagatgccccttcaaa

SEQ ID NO: 191670 - DNA, 60 bp, Artificial
  Synthetic oligonucleotide
agcggattcagactggctctaggcggggcacaggaattattcggagtgactcctgacctg

SEQ ID NO: 191671 - DNA, 56 bp, Artificial
  Synthetic oligonucleotide
cggacaagcccggataaaaaaatctaaggttcacgctcatgcattccggcacctgt

SEQ ID NO: 191672 - DNA, 58 bp, Artificial
  Synthetic oligonucleotide
acagaagcaactactacccaagaaccctgcgactctagcactcgtagggtgtcagtcg

SEQ ID NO: 191673 - DNA, 57 bp, Artificial
  Synthetic oligonucleotide
agcgcttggtcgcaattacctacgtcttatagatcacaaagaggtacttatctacgg

SEQ ID NO: 191674 - DNA, 60 bp, Artificial
  Synthetic oligonucleotide
aagtatttagccttatgtgatatggtccacactgattcacaccaaattcctcgtgcttga

SEQ ID NO: 191675 - DNA, 57 bp, Artificial
  Synthetic oligonucleotide
ttatccgatagttaattttggagctgctttaagcttgatgttcggaataggaggggc

SEQ ID NO: 191676 - DNA, 59 bp, Artificial
  Synthetic oligonucleotide
acctcgacaggtccgaatggcgagcaatgggcaacagtaggatacaggagcggaagacc

SEQ ID NO: 191677 - DNA, 55 bp, Artificial
  Synthetic oligonucleotide
ttgaaggagatgtacctagtcctattaacttacctagtggttgtgtatttcaagg

SEQ ID NO: 191678 - DNA, 60 bp, Artificial
  Synthetic oligonucleotide
agccattaatgtttctagagctccacaaaggctctctcaacattaatggacgccgcagta

SEQ ID NO: 191679 - DNA, 60 bp, Artificial
  Synthetic oligonucleotide
tcaaacaggaacttatccataacgaactttcacaagcaaccatatcaagatacatgactg

SEQ ID NO: 191680 - DNA, 57 bp, Artificial
  Synthetic oligonucleotide
ttttaattaggactactgcgacgtccattattgttgagggagcattttggagttcac

SEQ ID NO: 191681 - DNA, 55 bp, Artificial
  Synthetic oligonucleotide
cgttttaacgataccgattctcatacctctaggatctactttttgtcccacagac

SEQ ID NO: 191682 - DNA, 58 bp, Artificial
  Synthetic oligonucleotide
gggcaagtacatagtaagttggaacagcatactttgtatgaggtagtgaaacttcaac

SEQ ID NO: 191683 - DNA, 59 bp, Artificial
  Synthetic oligonucleotide
cttgcttaggaatgaaccctgacttaataccaggtggagaacattgtgcctcaacatct

SEQ ID NO: 191684 - DNA, 59 bp, Artificial
  Synthetic oligonucleotide
gctaataatcaagctgtcgctgtgggaattggttatgctccaacagaaagattaagatt

SEQ ID NO: 191685 - DNA, 59 bp, Artificial
  Synthetic oligonucleotide
gacaacgccatgaagtattatataactggtggtgaagagtatgaacgattggagataat

SEQ ID NO: 191686 - DNA, 55 bp, Artificial
  Synthetic oligonucleotide
ctaatgggcctgtgtttatttctaaggctggaaaccctattgacataacttatat

SEQ ID NO: 191687 - DNA, 59 bp, Artificial
  Synthetic oligonucleotide
ttaggcaggatgtgaagatatctaactcacagctggaatctacgaatatttttgactat

SEQ ID NO: 191688 - DNA, 59 bp, Artificial
  Synthetic oligonucleotide
ttctactatgaaagcaatagtactgggggcgtcagctataggtgctggttgtgcaatga

SEQ ID NO: 191689 - DNA, 58 bp, Artificial
  Synthetic oligonucleotide
tccatacatagatttccgttacctatcattcccatatgagaattgtggtttacttcgt

SEQ ID NO: 191690 - DNA, 54 bp, Artificial
  Synthetic oligonucleotide
tatttttgttacttgcgtcggaaataatgttacttgcgtcggaaataatgttac

SEQ ID NO: 191691 - DNA, 57 bp, Artificial
  Synthetic oligonucleotide
aggcgcacatgtgcgggggtttatccccatggggtcctcatgaaacccacatattgt

SEQ ID NO: 191692 - DNA, 57 bp, Artificial
  Synthetic oligonucleotide
atctgagggtatgataattcctcccttacttaaatataatgcagtagtttaagactc

SEQ ID NO: 191693 - DNA, 59 bp, Artificial
  Synthetic oligonucleotide
ctcaacgtctgcgctactgataatattatgtgttgctccttcagcatgtatacctattg

SEQ ID NO: 191694 - DNA, 59 bp, Artificial
  Synthetic oligonucleotide
tcgctgcagctaacaccaccatgtcagcatctatcaccagggtttctccgctcatggta

SEQ ID NO: 191695 - DNA, 57 bp, Artificial
  Synthetic oligonucleotide
agtctaccagattcaacagcaaaatccattccacgaactgtaaaacctaagttgata

SEQ ID NO: 191696 - DNA, 57 bp, Artificial
  Synthetic oligonucleotide
cttacgcctctaagagaattgtaagggttttgctcgcctctcttggaattgagctta

SEQ ID NO: 191697 - DNA, 58 bp, Artificial
  Synthetic oligonucleotide
tgctagatcgccgactagcatgagaaccttaacgatttaactcgccgattaaatcagt

SEQ ID NO: 191698 - DNA, 56 bp, Artificial
  Synthetic oligonucleotide
ctccaaacaaggcaactgggacattacgaagtacaggcaaagtaactccatttgga

SEQ ID NO: 191699 - DNA, 58 bp, Artificial
  Synthetic oligonucleotide
agtattggagcaagagctattgttggtatagtctgtgtaaaaattaatagcggataaa

SEQ ID NO: 191700 - DNA, 58 bp, Artificial
  Synthetic oligonucleotide
cttattctaggcttagtagtttggtgcttacgagtgctgtacactgcataagcacagc

SEQ ID NO: 191701 - DNA, 60 bp, Artificial
  Synthetic oligonucleotide
caaagctggaacagtacctaatatcaactatctaaatgtatcagtatcaggtgctagtgg

SEQ ID NO: 191702 - DNA, 58 bp, Artificial
  Synthetic oligonucleotide
gccgcagatcctactcccgatcccgctgcacatctgaatgttacaggtacctgtccct

SEQ ID NO: 191703 - DNA, 58 bp, Artificial
  Synthetic oligonucleotide
gaactatctggatgcagtgataggacttcctgccaacatattctacggaacatcaatc

SEQ ID NO: 191704 - DNA, 58 bp, Artificial
  Synthetic oligonucleotide
ttatagacttcttatagcttcagcttacacaggattcttagtgtggcatggtggatta

SEQ ID NO: 191705 - DNA, 58 bp, Artificial
  Synthetic oligonucleotide
agccattagtgtttcatgagctcaataaaaggctcattcaacaataatggacgtcgca

SEQ ID NO: 191706 - DNA, 58 bp, Artificial
  Synthetic oligonucleotide
cctaatgaagtaagaacaacagatatccaagttagttatagtatgatagacccttcaa

SEQ ID NO: 191707 - DNA, 58 bp, Artificial
  Synthetic oligonucleotide
agttgagaaccgaaaacacccatagcatcactaaatgttgcatttctaagtcttagtg

SEQ ID NO: 191708 - DNA, 57 bp, Artificial
  Synthetic oligonucleotide
gagtttcgctgcgttcgatatttcaagcccctcgatacacgggacaggagttttctc

SEQ ID NO: 191709 - DNA, 58 bp, Artificial
  Synthetic oligonucleotide
tagccttgcgtgatatggtccacgctgattcacgccagattcctcgtgcctgacgcta

SEQ ID NO: 191710 - DNA, 58 bp, Artificial
  Synthetic oligonucleotide
tcgacgtttaaatctgtggccgccgtgattattccgccatttacagccgttgctgcga

SEQ ID NO: 191711 - DNA, 58 bp, Artificial
  Synthetic oligonucleotide
ctttataatctccgcattctaaacaaactctatgtgctcttttaggagctccacattt

SEQ ID NO: 191712 - DNA, 57 bp, Artificial
  Synthetic oligonucleotide
ggctcattgtcgcccctcatactcccgctacccgtgttctccgctccttacgtcgac

SEQ ID NO: 191713 - DNA, 58 bp, Artificial
  Synthetic oligonucleotide
ctctgtctgcattcagattaaactgggttgatctcccgcttgtatcatacagtccgtt

SEQ ID NO: 191714 - DNA, 58 bp, Artificial
  Synthetic oligonucleotide
aagcacccgagtagcgtcaggcacgaggaatctggcgtgaatcagcgtggaccatatc

SEQ ID NO: 191715 - DNA, 58 bp, Artificial
  Synthetic oligonucleotide
tcctacattaatcatataatccactaattcagacggtgttttgtgtccatcagccatt

SEQ ID NO: 191716 - DNA, 58 bp, Artificial
  Synthetic oligonucleotide
tcccttggctgccgctagtattcttattccactgattaggaattcacgtgctaagaca

SEQ ID NO: 191717 - DNA, 55 bp, Artificial
  Synthetic oligonucleotide
tgtcaagaaccgtattattgtccaagctttaagtacaaacttagtactaaggata

SEQ ID NO: 191718 - DNA, 57 bp, Artificial
  Synthetic oligonucleotide
cagtaatgggggcttatttcatactcaggagttagtcgcttttctcgtgagtagaag

SEQ ID NO: 191719 - DNA, 57 bp, Artificial
  Synthetic oligonucleotide
gggcttgaaataacagccgagaatcaaagaaggatcgaagataatattataagcctg

SEQ ID NO: 191720 - DNA, 57 bp, Artificial
  Synthetic oligonucleotide
acaccaagcatagttccatgcataccaaatcctgttgtagccgccaattcaaatccc

SEQ ID NO: 191721 - DNA, 57 bp, Artificial
  Synthetic oligonucleotide
gcttcgcctattgagttagcttgaacaccatttcccataaaacctagtgctaatata

SEQ ID NO: 191722 - DNA, 57 bp, Artificial
  Synthetic oligonucleotide
gttactccaaagtaacatactactgatgctagtgcatagataattcctaaccatctc

SEQ ID NO: 191723 - DNA, 55 bp, Artificial
  Synthetic oligonucleotide
caactacctattttccctattactaagtatcttcagcgtacacagacttaactac

SEQ ID NO: 191724 - DNA, 57 bp, Artificial
  Synthetic oligonucleotide
tatctctatgagaaccgttgctaagacgacttacaagcccagcttttgggcttatag

SEQ ID NO: 191725 - DNA, 57 bp, Artificial
  Synthetic oligonucleotide
gacagtttacagatgaattattcacttataagcgtggttctgtctatagaggtaagc

SEQ ID NO: 191726 - DNA, 57 bp, Artificial
  Synthetic oligonucleotide
tgtgtgttgtatgctgtttcaatgagatagtaatgagagttccatcatctgtaggtt

SEQ ID NO: 191727 - DNA, 57 bp, Artificial
  Synthetic oligonucleotide
taagtgccacaggaagtgttgtaggcggaactataagtgctgttggttctgttacag

SEQ ID NO: 191728 - DNA, 57 bp, Artificial
  Synthetic oligonucleotide
tgtagccaaataatttgcaacttgacttccttccaaagcccacttgttcattgaagc

SEQ ID NO: 191729 - DNA, 57 bp, Artificial
  Synthetic oligonucleotide
atagtatgaaaccaatgttggagttattcgattaattggtgtatggtatatagctag

SEQ ID NO: 191730 - DNA, 52 bp, Artificial
  Synthetic oligonucleotide
tggtaagctccatacaataaaccccaacaggtccaaagggtaaagataaaat

SEQ ID NO: 191731 - DNA, 57 bp, Artificial
  Synthetic oligonucleotide
cgccagtatttccatatatcccaataccattatcggcatttaaatttattatcccgc

SEQ ID NO: 191732 - DNA, 57 bp, Artificial
  Synthetic oligonucleotide
aacttgtccatttaacactgattgaaccatgttaaaccataatggtctcatttgagc

SEQ ID NO: 191733 - DNA, 57 bp, Artificial
  Synthetic oligonucleotide
tgcactatgcctaaaaggcactattacaagcttgaggctaaagccttacaatttggt

SEQ ID NO: 191734 - DNA, 60 bp, Artificial
  Synthetic oligonucleotide
gtcgggcaatcaggaaagattgtgagtccaaaactatacatcgcattaggtattcacgga

SEQ ID NO: 191735 - DNA, 56 bp, Artificial
  Synthetic oligonucleotide
ggatcaatagccataggttctcgttctatagcctatgctgatggttcaacagcact

SEQ ID NO: 191736 - DNA, 56 bp, Artificial
  Synthetic oligonucleotide
aagcccaatgcacagagagcattcgcaggtgagggggaattcaatcccggagagca

SEQ ID NO: 191737 - DNA, 56 bp, Artificial
  Synthetic oligonucleotide
cctaatggacttacttggggtaaatttgccatagctactgcactcgctactcctga

SEQ ID NO: 191738 - DNA, 56 bp, Artificial
  Synthetic oligonucleotide
ccatctacattaactgttcctgtcgcacctgtaatattacttccgttttctaaatg

SEQ ID NO: 191739 - DNA, 56 bp, Artificial
  Synthetic oligonucleotide
gactctttatattctccaatgttgcctgacttaaatatacctgtggtaccaatacc

SEQ ID NO: 191740 - DNA, 56 bp, Artificial
  Synthetic oligonucleotide
atacagctgctggagctagaatcagtgtaattcttgcaccacttatgagagcaaga

SEQ ID NO: 191741 - DNA, 53 bp, Artificial
  Synthetic oligonucleotide
agaagaggaataaggggctattctaaaaatagttcgttactagccagatttct

SEQ ID NO: 191742 - DNA, 56 bp, Artificial
  Synthetic oligonucleotide
atgccactgatttatggacccacggttctgccccggccacaaactgggctggtcag

SEQ ID NO: 191743 - DNA, 56 bp, Artificial
  Synthetic oligonucleotide
ccctacgagtacttgtctcacggctaacaccctaacgagtgctagagccacgagtg

SEQ ID NO: 191744 - DNA, 56 bp, Artificial
  Synthetic oligonucleotide
gcattgcttattcagctgcaccaactattgaagcaggaactgggactagtagtaca

SEQ ID NO: 191745 - DNA, 60 bp, Artificial
  Synthetic oligonucleotide
tatcatagatatgcagtctttgtatggaatgaggatacaggacattatatgggatttcct

SEQ ID NO: 191746 - DNA, 56 bp, Artificial
  Synthetic oligonucleotide
cccgctgtactctattgctagtttcgttttgtaatatggcagatagtattcttcgg

SEQ ID NO: 191747 - DNA, 56 bp, Artificial
  Synthetic oligonucleotide
atttatggacccacggttctgccccggccacaaactgggctggtcagcataaccac

SEQ ID NO: 191748 - DNA, 54 bp, Artificial
  Synthetic oligonucleotide
caaggatagagaatctaactaagattaccgatttatttggtattcgttatgttt

SEQ ID NO: 191749 - DNA, 56 bp, Artificial
  Synthetic oligonucleotide
ccttttaagcctactcctttgtgtgtagcagtaagatatgttgatttagctatgtg

SEQ ID NO: 191750 - DNA, 56 bp, Artificial
  Synthetic oligonucleotide
gctacttaaacttcccaacacactatctaattgctctcgtaataaagaacgattcg

SEQ ID NO: 191751 - DNA, 56 bp, Artificial
  Synthetic oligonucleotide
ggagtagctaatcaagttagacaactattgagatcaggttctatcacttataaggc

SEQ ID NO: 191752 - DNA, 56 bp, Artificial
  Synthetic oligonucleotide
ggtggctatcaatcttggaactaaaatgggtatcagtcctgagcttgttaccatgt

SEQ ID NO: 191753 - DNA, 56 bp, Artificial
  Synthetic oligonucleotide
ccccgtgactctagcactcgtagagtgtcagtcgtgggaggttcagacagaccgcc

SEQ ID NO: 191754 - DNA, 56 bp, Artificial
  Synthetic oligonucleotide
agctactcactcctgccgtcgtgtagcttgctgggaagtatcccagaccctcagaa

SEQ ID NO: 191755 - DNA, 56 bp, Artificial
  Synthetic oligonucleotide
gtgtctagcaattcatatggagcattcctagggataataactaaattattaccgcc

SEQ ID NO: 191756 - DNA, 57 bp, Artificial
  Synthetic oligonucleotide
caagttttaacagagacagctatcaaacgcctgtaagctttgcgagttttaaagaga

SEQ ID NO: 191757 - DNA, 55 bp, Artificial
  Synthetic oligonucleotide
cttttcacttccataaagcacatcctgtgtatattgtcctactcctaccagtcta

SEQ ID NO: 191758 - DNA, 55 bp, Artificial
  Synthetic oligonucleotide
ctcaggcgttgaacaagtttggatataagtcgattgcggcacttagagagccgtc

SEQ ID NO: 191759 - DNA, 53 bp, Artificial
  Synthetic oligonucleotide
ggtgtggcttttcgggtatactttaggatggtttccgacaacagggtctgtta

SEQ ID NO: 191760 - DNA, 55 bp, Artificial
  Synthetic oligonucleotide
ctccacctctaacattacgtcctttagtatcgtaacctatgttagctgttactcc

SEQ ID NO: 191761 - DNA, 55 bp, Artificial
  Synthetic oligonucleotide
ctttccgaagaagcaacactaaaatgtcttgaactcacaggcggtaagttgaacg

SEQ ID NO: 191762 - DNA, 55 bp, Artificial
  Synthetic oligonucleotide
ggtgttcggtctgtgtatcgctattctcggaatgtgtattcatgcctatctgtcg

SEQ ID NO: 191763 - DNA, 55 bp, Artificial
  Synthetic oligonucleotide
gtactgtttctccaacagatagagtactatctactataaactttgagtactggtc

SEQ ID NO: 191764 - DNA, 55 bp, Artificial
  Synthetic oligonucleotide
ctgctaccaaacacattgtaaccatcgcccttacttgtagagatagttccatgat

SEQ ID NO: 191765 - DNA, 55 bp, Artificial
  Synthetic oligonucleotide
ctgctgtaacagttaatgttgctctatctgtaaatattcccacagctccctctac

SEQ ID NO: 191766 - DNA, 55 bp, Artificial
  Synthetic oligonucleotide
ctgcgacttcgcaagatgccgtgaatggaagacaattacatgagaccaatggacg

SEQ ID NO: 191767 - DNA, 60 bp, Artificial
  Synthetic oligonucleotide
gcctagtctttgtgacctcagcgttgccacagacctcagcgttgccatagacctcagcgt

SEQ ID NO: 191768 - DNA, 55 bp, Artificial
  Synthetic oligonucleotide
gtaaatccacaaaagacagcttgtactgaaaatcagattgctaaactggtgagag

SEQ ID NO: 191769 - DNA, 55 bp, Artificial
  Synthetic oligonucleotide
ctggaataagtgataatcccatacaagtaactactgttcctgatactagtggtgg

SEQ ID NO: 191770 - DNA, 52 bp, Artificial
  Synthetic oligonucleotide
ctgggaggaggtcttattaaaggcgaagtagtccttataacagggagtccgg

SEQ ID NO: 191771 - DNA, 55 bp, Artificial
  Synthetic oligonucleotide
ctggggaagttcctagcaagataaccaagctttgggatgattctgaccttctaag

SEQ ID NO: 191772 - DNA, 55 bp, Artificial
  Synthetic oligonucleotide
ctggttgctgtatcgtgtccaacagacacttttgttccatgagtcaattgagtag

SEQ ID NO: 191773 - DNA, 55 bp, Artificial
  Synthetic oligonucleotide
ctgtagtgatcctccaagtccaagacctatcatcacaaggaaagatcctcctatt

SEQ ID NO: 191774 - DNA, 55 bp, Artificial
  Synthetic oligonucleotide
ctgttgttcccgttccatcacctttatgatctccgccttgcactaatccattcgg

SEQ ID NO: 191775 - DNA, 55 bp, Artificial
  Synthetic oligonucleotide
ctctataagtaaaccgctcaaagtatcgtaatgcttggattccaactctatatgg

SEQ ID NO: 191776 - DNA, 53 bp, Artificial
  Synthetic oligonucleotide
ctgtttgacgactataaggaggagtttcggagttgggcaaataaaagtcgtag

SEQ ID NO: 191777 - DNA, 55 bp, Artificial
  Synthetic oligonucleotide
ctgtttgccatgcttcagcaggtacgcttaatcccactcctgttcccggcatagg

SEQ ID NO: 191778 - DNA, 59 bp, Artificial
  Synthetic oligonucleotide
cgatattaaagcgggcttcattaaatatacttgtactgagtgtggacattaccatacta

SEQ ID NO: 191779 - DNA, 52 bp, Artificial
  Synthetic oligonucleotide
agggacggctaatttttcagccgtccttttcaattaacacccatttagttga

SEQ ID NO: 191780 - DNA, 55 bp, Artificial
  Synthetic oligonucleotide
cttagacagataacaagctgtccagaagcgaaaagtaatggagttacttcaagca

SEQ ID NO: 191781 - DNA, 55 bp, Artificial
  Synthetic oligonucleotide
ctcgtggctctagcactcgtagagtattagtcgtaagtagttcactttattgctc

SEQ ID NO: 191782 - DNA, 55 bp, Artificial
  Synthetic oligonucleotide
ctcggtaccctgcggaacttattctgtagtacggctgagtgcaggttctttcctg

SEQ ID NO: 191783 - DNA, 55 bp, Artificial
  Synthetic oligonucleotide
gtaaataagccaatttcatttcaggctccaatgaatgccagctgtctatgtcctt

SEQ ID NO: 191784 - DNA, 55 bp, Artificial
  Synthetic oligonucleotide
ctcggcaaaatcatatttgcagctatctcaagtgatttatagcgagcagctgaat

SEQ ID NO: 191785 - DNA, 55 bp, Artificial
  Synthetic oligonucleotide
cttcttcttggtcatctaaagtgttgacggttggaatggaagtatccatagcgtc

SEQ ID NO: 191786 - DNA, 55 bp, Artificial
  Synthetic oligonucleotide
cttgaatatctgctaatatcctataatctcccactctataacgccaaagtccttt

SEQ ID NO: 191787 - DNA, 55 bp, Artificial
  Synthetic oligonucleotide
ctcccaaaagttgtgaaatagatcttgctgactgtccagatctagggccgatact

SEQ ID NO: 191788 - DNA, 55 bp, Artificial
  Synthetic oligonucleotide
cttgaattactttgtgacattcagacataatcaaataaggcggtcacagagagtg

SEQ ID NO: 191789 - DNA, 55 bp, Artificial
  Synthetic oligonucleotide
ctccagggtgtcctaaacagataggacaagtatgtgtattagagtcagcattatc

SEQ ID NO: 191790 - DNA, 56 bp, Artificial
  Synthetic oligonucleotide
ggcattgtgagagtcctaactttttatgtcgttttgttcaagcaacggatactttg

SEQ ID NO: 191791 - DNA, 55 bp, Artificial
  Synthetic oligonucleotide
cttgtcgcaagtattctgtcaaacgcagtaggtgctcctcctctttgtacatgcc

SEQ ID NO: 191792 - DNA, 55 bp, Artificial
  Synthetic oligonucleotide
gccatgccatatgaatcatattcccctgtataatagacattctatcttgcctagc

SEQ ID NO: 191793 - DNA, 55 bp, Artificial
  Synthetic oligonucleotide
gccattaatgtctcgagagctccacaaaggctctctctatagtaatggacgtcgc

SEQ ID NO: 191794 - DNA, 55 bp, Artificial
  Synthetic oligonucleotide
ggcctcaagagtttgatactgccgtcagtaactttaggggtaggatctgctgcta

SEQ ID NO: 191795 - DNA, 55 bp, Artificial
  Synthetic oligonucleotide
ggcccctataatcatccctgctattaggcccctagctgcagagtcccctcctgac

SEQ ID NO: 191796 - DNA, 55 bp, Artificial
  Synthetic oligonucleotide
gccctcgagaaatacatgacttattattgagagaatttcccggttttgttcgaga

SEQ ID NO: 191797 - DNA, 55 bp, Artificial
  Synthetic oligonucleotide
gccgcgagtgtgtgattcatctatgagagccctaggagatatgaagagacctctt

SEQ ID NO: 191798 - DNA, 55 bp, Artificial
  Synthetic oligonucleotide
gccgggaactcaaatcctaccgcatgtcccatttgagtagtaagcggtccaaggt

SEQ ID NO: 191799 - DNA, 55 bp, Artificial
  Synthetic oligonucleotide
gcctatcttcagccatagcctcaaacttagctaagggatattctatgctagactc

SEQ ID NO: 191800 - DNA, 55 bp, Artificial
  Synthetic oligonucleotide
gcctgtcagagatcagtatcggtgaggataaaggcttaatacaaagaagggccaa

SEQ ID NO: 191801 - DNA, 59 bp, Artificial
  Synthetic oligonucleotide
gccgtctctggccagtccatccagggcattttcaaaggtcatcataccgtactctcccc

SEQ ID NO: 191802 - DNA, 55 bp, Artificial
  Synthetic oligonucleotide
ggcagtaagacaggcttttaacgaaagcataaaccgtatactcagcatagcagtt

SEQ ID NO: 191803 - DNA, 55 bp, Artificial
  Synthetic oligonucleotide
gcgatgactactattctgttaaaccaagagctggtgttgacttcagatattcaca

SEQ ID NO: 191804 - DNA, 54 bp, Artificial
  Synthetic oligonucleotide
ggcaaaacctaagagtttggatccttatatgtataacgaaattcccggacttgc

SEQ ID NO: 191805 - DNA, 55 bp, Artificial
  Synthetic oligonucleotide
gcgccatgacaaagtctatatcggtaaatgctgtcttagggtctgtagtcgccag

SEQ ID NO: 191806 - DNA, 55 bp, Artificial
  Synthetic oligonucleotide
gcgggagaagctcaatatgcggtgagattcagcggaggagcttatatgcacggaa

SEQ ID NO: 191807 - DNA, 55 bp, Artificial
  Synthetic oligonucleotide
gcggggcttcgttatatcagattcgcctttatgacgaaacaggattacggatact

SEQ ID NO: 191808 - DNA, 55 bp, Artificial
  Synthetic oligonucleotide
gcggttgcctgcaagagagatcttatgtctgggatacatgatgcatttccagtga

SEQ ID NO: 191809 - DNA, 55 bp, Artificial
  Synthetic oligonucleotide
ggatagttgggagacgttgaatttatggcgctagctgtaaaggagtcactggtgg

SEQ ID NO: 191810 - DNA, 55 bp, Artificial
  Synthetic oligonucleotide
ggagcaggagcggactgtgatggacaagtcttagtttaccatgatatgttagggc

SEQ ID NO: 191811 - DNA, 55 bp, Artificial
  Synthetic oligonucleotide
ggacttgtaactaacagaccatttgtattgggaccagggcttggaagtgtaggag

SEQ ID NO: 191812 - DNA, 54 bp, Artificial
  Synthetic oligonucleotide
gtatttactgaattaccacgataatttacaagggttcaaagacacggaagatat

SEQ ID NO: 191813 - DNA, 54 bp, Artificial
  Synthetic oligonucleotide
ggactaagataaagaggtatagtataggactttaaacagaatttggtcttagaa

SEQ ID NO: 191814 - DNA, 55 bp, Artificial
  Synthetic oligonucleotide
ggaatggctttaggagctatcgaatctatgaaagccttcggaaaatcattaccgg

SEQ ID NO: 191815 - DNA, 55 bp, Artificial
  Synthetic oligonucleotide
ggaagagaatcattatgatgtggaattacgggaaagaggtattgctaagctcttg

SEQ ID NO: 191816 - DNA, 55 bp, Artificial
  Synthetic oligonucleotide
ggaagaaaccataacctgaacgacgtttagtttcacctgcccattcagaagcgta

SEQ ID NO: 191817 - DNA, 53 bp, Artificial
  Synthetic oligonucleotide
ggaactacggaataaacctagaggacaccgaatcaaacagcgtaaaggtaaga

SEQ ID NO: 191818 - DNA, 55 bp, Artificial
  Synthetic oligonucleotide
ggaaatacagagagtgacctaggaagtgacacttattgtcctaactgcggcagcc

SEQ ID NO: 191819 - DNA, 55 bp, Artificial
  Synthetic oligonucleotide
gcttgatctggaagtagcttccgggaatgaccagactttctcgcattcggatata

SEQ ID NO: 191820 - DNA, 55 bp, Artificial
  Synthetic oligonucleotide
gctgccatagctaagacttctgttttagtctgactgataataacactaggaagag

SEQ ID NO: 191821 - DNA, 55 bp, Artificial
  Synthetic oligonucleotide
gctcctatcactgcttacaatcgtatctctaaagagagagttacagttcattcta

SEQ ID NO: 191822 - DNA, 55 bp, Artificial
  Synthetic oligonucleotide
ggatgccctacggaggtgctgtaagagccttagagcatcattctgagagtataga

SEQ ID NO: 191823 - DNA, 59 bp, Artificial
  Synthetic oligonucleotide
agtacgtaccgcttttagatgaaacagtatgtagctatcacattgggcataagcttaaa

SEQ ID NO: 191824 - DNA, 55 bp, Artificial
  Synthetic oligonucleotide
gctagaaatggtgtaggacttgtaatcgttgaagcctcctgtgtggcttctgatg

SEQ ID NO: 191825 - DNA, 55 bp, Artificial
  Synthetic oligonucleotide
gctagaaatattcgtggtggagggagtttaacgattatagctactgtcctagtag

SEQ ID NO: 191826 - DNA, 55 bp, Artificial
  Synthetic oligonucleotide
gctaaactgttataatctactccttgtctttgtccagagatcgcatataccccaa

SEQ ID NO: 191827 - DNA, 54 bp, Artificial
  Synthetic oligonucleotide
gaacggctcggaatcaataggcttctatatggaaaacggaggaaccgtaactaa

SEQ ID NO: 191828 - DNA, 55 bp, Artificial
  Synthetic oligonucleotide
gaatatcgctaacaggaggagtggctataagtgaacttggaacagtaggtagagg

SEQ ID NO: 191829 - DNA, 55 bp, Artificial
  Synthetic oligonucleotide
gaatcaaggtcattaaagtagtatacaccagcttttgtaggatctggatgagtag

SEQ ID NO: 191830 - DNA, 55 bp, Artificial
  Synthetic oligonucleotide
gacataggttccgtaataggatcatttggtataccagagttcggtactaagttcg

SEQ ID NO: 191831 - DNA, 55 bp, Artificial
  Synthetic oligonucleotide
gaccacttggctatatgcttcttagaggggtatccgtttagtgtcgtcccgagga

SEQ ID NO: 191832 - DNA, 55 bp, Artificial
  Synthetic oligonucleotide
ggtatcgcgaaaatatgttactgtgtaggctacggtagaccaaagcgtgggagtg

SEQ ID NO: 191833 - DNA, 55 bp, Artificial
  Synthetic oligonucleotide
gacgactataaggaggagttccggagttgggcaaataaaagtcgtagtctagcca

SEQ ID NO: 191834 - DNA, 60 bp, Artificial
  Synthetic oligonucleotide
agtagcatcaagcacgaggaatttggtgtgaatcagtgtggaccatatcacataaggcta

SEQ ID NO: 191835 - DNA, 55 bp, Artificial
  Synthetic oligonucleotide
gactactgcgatctctttattagagtctgttgtgacgtgtcttaataatcagtgt

SEQ ID NO: 191836 - DNA, 55 bp, Artificial
  Synthetic oligonucleotide
ggggatggacttcgagatgcattggacccaagattgaaacagtaggataaggagg

SEQ ID NO: 191837 - DNA, 54 bp, Artificial
  Synthetic oligonucleotide
ggggacactgttcgtactggtgtttattactgtaggattcaaccttttaggagc

SEQ ID NO: 191838 - DNA, 55 bp, Artificial
  Synthetic oligonucleotide
gacttgcttattggctaagtatttattgaagacccgttgcaattcttctccaaac

SEQ ID NO: 191839 - DNA, 55 bp, Artificial
  Synthetic oligonucleotide
gagatggaacagttatctcctgctttgggattgcctatgtacttagtttatggaa

SEQ ID NO: 191840 - DNA, 55 bp, Artificial
  Synthetic oligonucleotide
gagattctgtacaaatggcaaagcacttagagaatttacaggtacaggggaatag

SEQ ID NO: 191841 - DNA, 55 bp, Artificial
  Synthetic oligonucleotide
gagctagtgtagggaagtatagaggaatggatagagctatgaaatctgggctagg

SEQ ID NO: 191842 - DNA, 55 bp, Artificial
  Synthetic oligonucleotide
gagctttacggagactggacatttgagcatgcgaagcagtggaaggaagcgggat

SEQ ID NO: 191843 - DNA, 55 bp, Artificial
  Synthetic oligonucleotide
gaggtctaacgttatcaggaatgtcacattctacgattgctgcgattttagcagg

SEQ ID NO: 191844 - DNA, 55 bp, Artificial
  Synthetic oligonucleotide
ggcgctagctatatcggagttgtcggtggaataccaaccattcaatgttgaaatt

SEQ ID NO: 191845 - DNA, 60 bp, Artificial
  Synthetic oligonucleotide
agtagcgtcaggcacgaggaatctggcgtgaatcagcgtggaccatatcacgcaaggcta

SEQ ID NO: 191846 - DNA, 55 bp, Artificial
  Synthetic oligonucleotide
gcatgtccttgtacctgggatcactgacagagaggatttgctagaaaagctgggc

SEQ ID NO: 191847 - DNA, 55 bp, Artificial
  Synthetic oligonucleotide
gcatatgataaagggttaaatgggacacaagaggacgcaataggtatagctgaac

SEQ ID NO: 191848 - DNA, 55 bp, Artificial
  Synthetic oligonucleotide
gcatataagagtacctaaggagatgactgtctatgaggctcacaatatgatagat

SEQ ID NO: 191849 - DNA, 55 bp, Artificial
  Synthetic oligonucleotide
gcaggtggaggttcacttattagaaacttcccagagttagtagcaaaacatacaa

SEQ ID NO: 191850 - DNA, 55 bp, Artificial
  Synthetic oligonucleotide
gcagaattgtccctggcatactcccataccagctcgtgtacgtcttttcacgccg

SEQ ID NO: 191851 - DNA, 55 bp, Artificial
  Synthetic oligonucleotide
ggcttgttgaatatcctagcccagctggaggttgcttacttactgacccaggata

SEQ ID NO: 191852 - DNA, 55 bp, Artificial
  Synthetic oligonucleotide
gggacatacgacatttactatagcaggacctactggagaagggcttacatcagct

SEQ ID NO: 191853 - DNA, 55 bp, Artificial
  Synthetic oligonucleotide
gcacaccaaacatcaacccattttgtcctttcatacgaacatttgtacttgaagt

SEQ ID NO: 191854 - DNA, 55 bp, Artificial
  Synthetic oligonucleotide
gcaactctaaaagtgagtagaacatttcctgtgtcatctaacaaacccgtcacta

SEQ ID NO: 191855 - DNA, 55 bp, Artificial
  Synthetic oligonucleotide
gcaacggtattacactatccggtttgtatcctcctattgatgattttaatacctc

SEQ ID NO: 191856 - DNA, 58 bp, Artificial
  Synthetic oligonucleotide
tcggtggttgtgtagtaccactccctgtgtccaatctaggggtcagaaatataggctg

SEQ ID NO: 191857 - DNA, 55 bp, Artificial
  Synthetic oligonucleotide
gatgctttaccgtttaagttccatcccatcgctagcttctctgaggtagcctctc

SEQ ID NO: 191858 - DNA, 55 bp, Artificial
  Synthetic oligonucleotide
gatctaaatctcaaggaagagctaactactcaatggaattctctgagtacactca

SEQ ID NO: 191859 - DNA, 55 bp, Artificial
  Synthetic oligonucleotide
gatatggccaacctatatcataacctttagttccaggaattgcaccttggctcat

SEQ ID NO: 191860 - DNA, 55 bp, Artificial
  Synthetic oligonucleotide
gatataatatccaccgctggcacagacatctcccatagaaatatatatcggtacg

SEQ ID NO: 191861 - DNA, 55 bp, Artificial
  Synthetic oligonucleotide
gatactgggagtggcatctgcagtgggttcgcttggaactgctataggttcgctg

SEQ ID NO: 191862 - DNA, 55 bp, Artificial
  Synthetic oligonucleotide
gagtcgttactccttatagatatgaaataagcctccaccgaagtgaaagcttatc

SEQ ID NO: 191863 - DNA, 55 bp, Artificial
  Synthetic oligonucleotide
agtcactgtgaacaactaccccaatagtaactgatccttttaagtaatctcttcc

SEQ ID NO: 191864 - DNA, 55 bp, Artificial
  Synthetic oligonucleotide
agtggaactgtatggatctttagctctgacaggaaagggacaccttactgattgg

SEQ ID NO: 191865 - DNA, 55 bp, Artificial
  Synthetic oligonucleotide
agtggcagaaatgttcggttccacaaaagcatagtccccataatgaggattactc

SEQ ID NO: 191866 - DNA, 55 bp, Artificial
  Synthetic oligonucleotide
tcggaattccagctcttaggttaaatggagattaccttgctatcatcacactagc

SEQ ID NO: 191867 - DNA, 59 bp, Artificial
  Synthetic oligonucleotide
agtcggattatgtgtttatgtaatcttactcataacaggaactccctatgctgctttaa

SEQ ID NO: 191868 - DNA, 55 bp, Artificial
  Synthetic oligonucleotide
ataaaactccccaagaagtttgccatccatagtactctttctcactccaatttgg

SEQ ID NO: 191869 - DNA, 54 bp, Artificial
  Synthetic oligonucleotide
ataaaatatggggcaaaggctgttgttttatgtacaggaacgttcttagacgga

SEQ ID NO: 191870 - DNA, 55 bp, Artificial
  Synthetic oligonucleotide
atctcattagagactccggtaggtagtgaggaagatagtgaattaggagatttcg

SEQ ID NO: 191871 - DNA, 55 bp, Artificial
  Synthetic oligonucleotide
tcacttctactacgataaccacgagaaccataatttccccaatcacggtcttctc

SEQ ID NO: 191872 - DNA, 55 bp, Artificial
  Synthetic oligonucleotide
tcacagcaatgggaaacaagggatgatttaggtcgagcatatataaattggagca

SEQ ID NO: 191873 - DNA, 55 bp, Artificial
  Synthetic oligonucleotide
tcaaggggttaaggctataactctaagagaaggggacgcagttgtgtcagctatg

SEQ ID NO: 191874 - DNA, 55 bp, Artificial
  Synthetic oligonucleotide
attcagcgaatcgagtattgtctcataagatattccataggggtaccgggttgtc

SEQ ID NO: 191875 - DNA, 55 bp, Artificial
  Synthetic oligonucleotide
attccaactactgaacctcccacgactgacaccctacgagtgctagaattgcggg

SEQ ID NO: 191876 - DNA, 50 bp, Artificial
  Synthetic oligonucleotide
attctccggaaggtaagtcttcgaactttataggtattttcgtgggaacg

SEQ ID NO: 191877 - DNA, 55 bp, Artificial
  Synthetic oligonucleotide
caaattcacggaggagccggatacttgaaaggaatgccagtagaaagattctacc

SEQ ID NO: 191878 - DNA, 60 bp, Artificial
  Synthetic oligonucleotide
gccgagcaaatctcgctgtgtctgaacaaagtgagtttagcgaatttgcagcgaacgtta

SEQ ID NO: 191879 - DNA, 55 bp, Artificial
  Synthetic oligonucleotide
caagggcataaatcagctgagtacaatacgcttgtaaaatggtggagcaaatatg

SEQ ID NO: 191880 - DNA, 55 bp, Artificial
  Synthetic oligonucleotide
cacataatcttaatacaagacctattgtaataagtggtgaggaaaaacttcagat

SEQ ID NO: 191881 - DNA, 55 bp, Artificial
  Synthetic oligonucleotide
tacaatagacgggtatgctcaaatgagaccgctttggttcaatatggttcaggca

SEQ ID NO: 191882 - DNA, 55 bp, Artificial
  Synthetic oligonucleotide
tagatatgattactgcaacaggaggggagctcatataccgagatatagcttatga

SEQ ID NO: 191883 - DNA, 55 bp, Artificial
  Synthetic oligonucleotide
catcatatgccaagatgggcagcttctccagaagaattttggcaatcatattctc

SEQ ID NO: 191884 - DNA, 55 bp, Artificial
  Synthetic oligonucleotide
tagctgctaaagtaaacgcgctataattcttagtatgtttgagggtatccagatg

SEQ ID NO: 191885 - DNA, 55 bp, Artificial
  Synthetic oligonucleotide
taggattaatagccctaggatgtccaacactaagaagcatactgtaatcaccatg

SEQ ID NO: 191886 - DNA, 55 bp, Artificial
  Synthetic oligonucleotide
caggctgtccggctaaagcaggcatggctatcattgctcctgcgatggcacctaa

SEQ ID NO: 191887 - DNA, 55 bp, Artificial
  Synthetic oligonucleotide
taggttcgggaacaccgagtgttacaatagctctggcacttataatatccatgag

SEQ ID NO: 191888 - DNA, 53 bp, Artificial
  Synthetic oligonucleotide
cagctttacttggaggtaaaagtttagcagatagaggtcttaaaactaagtcc

SEQ ID NO: 191889 - DNA, 60 bp, Artificial
  Synthetic oligonucleotide
tccattatatgcaaatcacacagttatagtaacagatactcttgttccttatcccaatgt

SEQ ID NO: 191890 - DNA, 60 bp, Artificial
  Synthetic oligonucleotide
gccgagcaaatctcactgtgtttgaagctgactgtcagcaagtttagtgaatttgcagcg

SEQ ID NO: 191891 - DNA, 55 bp, Artificial
  Synthetic oligonucleotide
cagctgtgtagctcatgcaatgtgctatggattctctactatgccaaaggtagag

SEQ ID NO: 191892 - DNA, 54 bp, Artificial
  Synthetic oligonucleotide
cagcaatcccgttctcgctttgtaaatccgatttattagttaagtctttcccta

SEQ ID NO: 191893 - DNA, 55 bp, Artificial
  Synthetic oligonucleotide
cacttggcccaccacggacttgaggctccatcagtctcgaaagttttagttacgg

SEQ ID NO: 191894 - DNA, 55 bp, Artificial
  Synthetic oligonucleotide
cactgagaagcacaggggaataatagctatgaagatagcagtcgtaggtctaggg

SEQ ID NO: 191895 - DNA, 53 bp, Artificial
  Synthetic oligonucleotide
cactatacttggtcttgttttcgttatctccgtccctactgaagggtcgtagt

SEQ ID NO: 191896 - DNA, 54 bp, Artificial
  Synthetic oligonucleotide
cacggagtctaggactttctggtactgtatacccaagtggtaacaagactttta

SEQ ID NO: 191897 - DNA, 55 bp, Artificial
  Synthetic oligonucleotide
cacgaagttcaaaatacccagctctaagaggaatataaatactgtctgcagctgc

SEQ ID NO: 191898 - DNA, 55 bp, Artificial
  Synthetic oligonucleotide
cacccgcaagaacttcccttatgctatgaattccagatttaacacggctctgtgc

SEQ ID NO: 191899 - DNA, 55 bp, Artificial
  Synthetic oligonucleotide
tatattacctggtgcaataagaggtggacataagatggctgaccttactatgaag

SEQ ID NO: 191900 - DNA, 55 bp, Artificial
  Synthetic oligonucleotide
ttcctatggaaagggaagccgctccacctagtgattcgaagggatctccgaaacc

SEQ ID NO: 191901 - DNA, 58 bp, Artificial
  Synthetic oligonucleotide
agtgtagggaatcctttaccaatagatattgcaagaggagtcgttctattaagagcag

SEQ ID NO: 191902 - DNA, 55 bp, Artificial
  Synthetic oligonucleotide
ttcgactgacttctcctcccgatgctattttagcaagcggtttcatgctttgccc

SEQ ID NO: 191903 - DNA, 55 bp, Artificial
  Synthetic oligonucleotide
ttcgctgcaaattcgctaaacttgtttcactcagacacagcgaaatttgctcggc

SEQ ID NO: 191904 - DNA, 55 bp, Artificial
  Synthetic oligonucleotide
accagtgttctaaatcccaaatctggtactaatctatgcataagactcgccccac

SEQ ID NO: 191905 - DNA, 52 bp, Artificial
  Synthetic oligonucleotide
accacgataatttacaagggttcaaagacacggaagatattaaccctaacta

SEQ ID NO: 191906 - DNA, 55 bp, Artificial
  Synthetic oligonucleotide
acagtctgttctttagcctatgtcgcaaatcacgacagaggggagctaaaagctg

SEQ ID NO: 191907 - DNA, 55 bp, Artificial
  Synthetic oligonucleotide
aatgttgagagagcctttgtggagctctggaaacattataggctggcaagtaatc

SEQ ID NO: 191908 - DNA, 55 bp, Artificial
  Synthetic oligonucleotide
aatatcgaacgtagcgaagctcactaccgtttagatttgttcggtaggcccatag

SEQ ID NO: 191909 - DNA, 55 bp, Artificial
  Synthetic oligonucleotide
ttctatgccctgatagtcctacaatttgaaataggtctgcatttcctcgaaccac

SEQ ID NO: 191910 - DNA, 55 bp, Artificial
  Synthetic oligonucleotide
aagtgtacactgaacctcccacgactgacaccctacgagtgctagagtcgcaggg

SEQ ID NO: 191911 - DNA, 52 bp, Artificial
  Synthetic oligonucleotide
aaggggtcaaggggctcccttgcacgttaaatgtcaaggtaaaacggcttgc

SEQ ID NO: 191912 - DNA, 60 bp, Artificial
  Synthetic oligonucleotide
agttgctcttgctacagaagctccccctattagtagagctgcaactgagaacattcctat

SEQ ID NO: 191913 - DNA, 55 bp, Artificial
  Synthetic oligonucleotide
aagaagtaggacattccgactacatctccataggagaaagtgggtataactgggg

SEQ ID NO: 191914 - DNA, 55 bp, Artificial
  Synthetic oligonucleotide
ttgagccgattgagatggcacttatagacgtagatgatagctacacaggagtagt

SEQ ID NO: 191915 - DNA, 55 bp, Artificial
  Synthetic oligonucleotide
aactagcttctccactagctgtattactatatccaaaagcggaactaaattttcc

SEQ ID NO: 191916 - DNA, 55 bp, Artificial
  Synthetic oligonucleotide
ttggaaagcattctacagactatgcaaaaggtgggaaaattaccctagccgagtt

SEQ ID NO: 191917 - DNA, 55 bp, Artificial
  Synthetic oligonucleotide
ttgtagcaaggtgcgaggctacctttaaaagtcttggaggtgctctgagtgggta

SEQ ID NO: 191918 - DNA, 55 bp, Artificial
  Synthetic oligonucleotide
ttgtatggaatgaggatacaggacattatatgggatttcctgagcttttagtggc

SEQ ID NO: 191919 - DNA, 55 bp, Artificial
  Synthetic oligonucleotide
tctctaggatttcctgtaggtaatagatctccagtaattcctcctactacatcag

SEQ ID NO: 191920 - DNA, 55 bp, Artificial
  Synthetic oligonucleotide
tctttcgagagatgaaacgtggttccttgtaattatagctgttactcttgttgca

SEQ ID NO: 191921 - DNA, 55 bp, Artificial
  Synthetic oligonucleotide
agggatagctcttactcttcctattagtagtgcagctctatgtatgatgataggg

SEQ ID NO: 191922 - DNA, 53 bp, Artificial
  Synthetic oligonucleotide
tgatagaaaccgtatcgtagaaacaaaaccgattaagggaaccattcgacgtg

SEQ ID NO: 191923 - DNA, 53 bp, Artificial
  Synthetic oligonucleotide
ataataggacaaattttcaagataacaggacaaattttcaacttaaaacagga

SEQ ID NO: 191924 - DNA, 55 bp, Artificial
  Synthetic oligonucleotide
aggagtatctccagagaatgcgtatattcccagagattcgtcactgtatcctctc

SEQ ID NO: 191925 - DNA, 55 bp, Artificial
  Synthetic oligonucleotide
agcttctagcttgtccggttccgatattatagattccggactcaaagtcttgagt

SEQ ID NO: 191926 - DNA, 55 bp, Artificial
  Synthetic oligonucleotide
tgctcagctactatctgaataatgtgtgccagctgtccagcgttgtggtcaacag

SEQ ID NO: 191927 - DNA, 55 bp, Artificial
  Synthetic oligonucleotide
agccagagtctatggattgagcagtgcaatgtcaggagagctattggaatttcca

SEQ ID NO: 191928 - DNA, 55 bp, Artificial
  Synthetic oligonucleotide
tgggctagcggagctaatccatattattctcaaaaaggagctacaggacaagtat

SEQ ID NO: 191929 - DNA, 55 bp, Artificial
  Synthetic oligonucleotide
agagcggaaagtccaaatcgttcggcattcagtatggtcataatgacagcattgg

SEQ ID NO: 191930 - DNA, 55 bp, Artificial
  Synthetic oligonucleotide
tgtacagtaccaatataattcaaaccactattcctatccgaattgcttatcgaaa

SEQ ID NO: 191931 - DNA, 55 bp, Artificial
  Synthetic oligonucleotide
agacgaagcaaatctaataacagtagattcactaactttagctgcggatccaaga

SEQ ID NO: 191932 - DNA, 55 bp, Artificial
  Synthetic oligonucleotide
tgttatccttacacaattaacctttgacatagataaagctctgctacgggcgttt

SEQ ID NO: 191933 - DNA, 53 bp, Artificial
  Synthetic oligonucleotide
acgggtttcatgggttagtacttgtacaggtgttgagtttctttccaatagcg

SEQ ID NO: 191934 - DNA, 60 bp, Artificial
  Synthetic oligonucleotide
atagctatatgcttgaattactttgtgacattcagacataatcaaataaggcggtcacag

SEQ ID NO: 191935 - DNA, 55 bp, Artificial
  Synthetic oligonucleotide
ttacggtaatctctttcgtgataaattctcgcttgatagtgtctttcagctcgtc

SEQ ID NO: 191936 - DNA, 55 bp, Artificial
  Synthetic oligonucleotide
ttccctacattagacgaaggaatcatcgcttctaaggcaggtccttttatggctc

SEQ ID NO: 191937 - DNA, 55 bp, Artificial
  Synthetic oligonucleotide
ttccgatcattgcctctaccccgaatgtcccgcttccctgcattggaacagcggt

SEQ ID NO: 191938 - DNA, 55 bp, Artificial
  Synthetic oligonucleotide
cgccacaggtggaataccaatagtgttacctgtaacagatgatagaacaatcata

SEQ ID NO: 191939 - DNA, 55 bp, Artificial
  Synthetic oligonucleotide
cgatatgggcagaagtttctacggtttaccttaaatggactgctacgagtgattt

SEQ ID NO: 191940 - DNA, 55 bp, Artificial
  Synthetic oligonucleotide
cgatatgacctaactccccctccacgctaagacccgctgctctggcaagccgtac

SEQ ID NO: 191941 - DNA, 55 bp, Artificial
  Synthetic oligonucleotide
cgataattttgcaagccctatttgaactggctgccatataaccggcattgcaagc

SEQ ID NO: 191942 - DNA, 55 bp, Artificial
  Synthetic oligonucleotide
cgaggtggagtacaattaagagctttggatgcagctatggtgtctaatccaagag

SEQ ID NO: 191943 - DNA, 54 bp, Artificial
  Synthetic oligonucleotide
cgacgcaattgaaaatactaggttagtggatataataaaagggcgtcttttgga

SEQ ID NO: 191944 - DNA, 55 bp, Artificial
  Synthetic oligonucleotide
gtctatcggtattggtctgtcttgtgtcctagtagggagatagggtgtccgaagg

SEQ ID NO: 191945 - DNA, 60 bp, Artificial
  Synthetic oligonucleotide
ataggcttgcaggatgtgagaactcctgtcccgtgtatcgaggggcttgaaatatcgaac

SEQ ID NO: 191946 - DNA, 55 bp, Artificial
  Synthetic oligonucleotide
gtgcactatcgtctgccacaccaatttcttccacgggcgaagttggcacaccacg

SEQ ID NO: 191947 - DNA, 52 bp, Artificial
  Synthetic oligonucleotide
cctcggacttttataacctcttattataactccgcttttacttattccctgc

SEQ ID NO: 191948 - DNA, 55 bp, Artificial
  Synthetic oligonucleotide
cctccgtataagtgggagcgaggatacaaggatactgtattagtagacccaggag

SEQ ID NO: 191949 - DNA, 52 bp, Artificial
  Synthetic oligonucleotide
gtgcctgttttccagtttcagggatttcgtaaacttttacgctgaatacttt

SEQ ID NO: 191950 - DNA, 55 bp, Artificial
  Synthetic oligonucleotide
cctattacattagtagcataagcatataagtcttctggtggaagattcctataca

SEQ ID NO: 191951 - DNA, 55 bp, Artificial
  Synthetic oligonucleotide
cctagtttgtcaagcacatcactgcttccgcttttgctcgagattgctcgattcc

SEQ ID NO: 191952 - DNA, 55 bp, Artificial
  Synthetic oligonucleotide
gtggataggcttcctcgtatggctaataggcggatttgacctgttagctaaggtc

SEQ ID NO: 191953 - DNA, 55 bp, Artificial
  Synthetic oligonucleotide
cctagattttataacaggctggatatgaacacgaccggaattattgtggtggcca

SEQ ID NO: 191954 - DNA, 55 bp, Artificial
  Synthetic oligonucleotide
gtgtaagtccggtactcaaagccaccattgtaagcagtaatcctacgacacccat

SEQ ID NO: 191955 - DNA, 55 bp, Artificial
  Synthetic oligonucleotide
cctaaattggtgggaggaacaaattcactaatgctgggaaacgttatagcacaac

SEQ ID NO: 191956 - DNA, 57 bp, Artificial
  Synthetic oligonucleotide
atcacgactatcgaagtccaacgggagctggataacctcctatagaaagactagtta

SEQ ID NO: 191957 - DNA, 55 bp, Artificial
  Synthetic oligonucleotide
ctcacgaaccacacacattagcccgcattaccagtagaagccattgagtacatgc

SEQ ID NO: 191958 - DNA, 55 bp, Artificial
  Synthetic oligonucleotide
gtacttaatttaggtctagcaggagcttggatagttatgaccatagatctagcta

SEQ ID NO: 191959 - DNA, 55 bp, Artificial
  Synthetic oligonucleotide
ctatgatttgtagtccagctcttaatacatcagctgtaggtgaatctgatccaga

SEQ ID NO: 191960 - DNA, 55 bp, Artificial
  Synthetic oligonucleotide
ctataggtccgtgaaccacatgaaccatatcttttagcggccctagaacaacccc

SEQ ID NO: 191961 - DNA, 54 bp, Artificial
  Synthetic oligonucleotide
ctacttacggattcgggtctccaagtgcggtattattcggattccttgtgggaa

SEQ ID NO: 191962 - DNA, 54 bp, Artificial
  Synthetic oligonucleotide
ctactaccactcttcttaccccagagtatccttttgccaagtttaccgctcgta

SEQ ID NO: 191963 - DNA, 55 bp, Artificial
  Synthetic oligonucleotide
gtagtaccactccctgtgtccaatctaggggtcagaaatataggctggctagcga

SEQ ID NO: 191964 - DNA, 55 bp, Artificial
  Synthetic oligonucleotide
gtatgagcatatcttgtcgggattcccagtaccagagtcggaattcctttccccg

SEQ ID NO: 191965 - DNA, 55 bp, Artificial
  Synthetic oligonucleotide
cgttcgctgcaaattcgctaaacttgctgacaagtcagtttcaaacacagcgaga

SEQ ID NO: 191966 - DNA, 55 bp, Artificial
  Synthetic oligonucleotide
cgtctgatagaatatccgaccaagattccggtacttttcgacttcccaaagttgc

SEQ ID NO: 191967 - DNA, 59 bp, Artificial
  Synthetic oligonucleotide
tcctcctgtatgccctagcccttttcccgagagcttagcagttcccattcccagtgctc

SEQ ID NO: 191968 - DNA, 55 bp, Artificial
  Synthetic oligonucleotide
cgtatgtatagccgttctgctcgaaacggtatagcaccgtaatggtggtattatg

SEQ ID NO: 191969 - DNA, 55 bp, Artificial
  Synthetic oligonucleotide
gtattccaaatgactgccgtacttcccggagaagctacagagaacattcctattg

SEQ ID NO: 191970 - DNA, 55 bp, Artificial
  Synthetic oligonucleotide
cggatgacattacaaacagcggagacattacggcaattggcaagatttcaggcgg

SEQ ID NO: 191971 - DNA, 55 bp, Artificial
  Synthetic oligonucleotide
cggagaggggatgaatacccatacctgtccgatttgtctgggacatccgggaacc

SEQ ID NO: 191972 - DNA, 55 bp, Artificial
  Synthetic oligonucleotide
cggagaaacttacgatactcttatggcattacgtcaggcaaaattacaaggagcg

SEQ ID NO: 191973 - DNA, 55 bp, Artificial
  Synthetic oligonucleotide
cgcttctagcaattgtaagctgtgcaaatgatgtaggaagcataagaaacaggct

SEQ ID NO: 191974 - DNA, 55 bp, Artificial
  Synthetic oligonucleotide
cgcctgtggcgatagtaagaaatgcaggaagagaagacgagagagtaacggcggc

SEQ ID NO: 191975 - DNA, 55 bp, Artificial
  Synthetic oligonucleotide
cgcctataattcacaaatgagtaccctatatcaaatggcactatatgtgtaatac

SEQ ID NO: 191976 - DNA, 54 bp, Artificial
  Synthetic oligonucleotide
cgcccattggtgtcactaggtagaaccccaggcttattacggggagtctcaacc

SEQ ID NO: 191977 - DNA, 55 bp, Artificial
  Synthetic oligonucleotide
ccactgagtaaaatgggatgttcagaggatcctagtggtttcaaaactcgtccac

SEQ ID NO: 191978 - DNA, 60 bp, Artificial
  Synthetic oligonucleotide
tacttatgttcttctctggtctatcagaaaaagatgctgtcaatactttcattgctggag

SEQ ID NO: 191979 - DNA, 55 bp, Artificial
  Synthetic oligonucleotide
ccataagtactgcataagtatcagtatagtcccctaattctctatgagtaagacc

SEQ ID NO: 191980 - DNA, 55 bp, Artificial
  Synthetic oligonucleotide
gtttcatcggatacgaagagaaccgatacgaatcctaccgcacgcggtcaggtga

SEQ ID NO: 191981 - DNA, 55 bp, Artificial
  Synthetic oligonucleotide
cccaactctatatccctttaaaccggcatctgaaattagttttgccgcaaatgtg

SEQ ID NO: 191982 - DNA, 55 bp, Artificial
  Synthetic oligonucleotide
cccattgcaggagtgacagattatacatatcgaggaattttagaggagtttcacc

SEQ ID NO: 191983 - DNA, 55 bp, Artificial
  Synthetic oligonucleotide
ccccatattctcttacttcgattgtgtcaactactggcattactgaggctgtgga

SEQ ID NO: 191984 - DNA, 54 bp, Artificial
  Synthetic oligonucleotide
ccccgcagttaaattatgtattatctaatcgcaggcaacaaagaaccttaaacc

SEQ ID NO: 191985 - DNA, 55 bp, Artificial
  Synthetic oligonucleotide
ccccgctgttatctactgcatttcctacagcataagcccctgctgagaataccat

SEQ ID NO: 191986 - DNA, 55 bp, Artificial
  Synthetic oligonucleotide
ccacatctcctgccacaatattcagctcattatcactatatactgacgcatcttt

SEQ ID NO: 191987 - DNA, 55 bp, Artificial
  Synthetic oligonucleotide
cccgagcaagtaagcaaacgaaggagtgataatctccacaaaggttgtaacatgg

SEQ ID NO: 191988 - DNA, 55 bp, Artificial
  Synthetic oligonucleotide
cccgcaactctagcactcgtagggtgtcagtcgtgggaggttcagtcaagtgtag

SEQ ID NO: 191989 - DNA, 59 bp, Artificial
  Synthetic oligonucleotide
ccaaaaacagacagtttacagatgaattattcacttataagcgtggttctgtctataga

SEQ ID NO: 191990 - DNA, 55 bp, Artificial
  Synthetic oligonucleotide
gttattatggctaacccagctatctctggaactaactatgcaatggtaagtaacc

SEQ ID NO: 191991 - DNA, 55 bp, Artificial
  Synthetic oligonucleotide
cccggcggtattgatgacgagcctgtataatcatttctcaagggtctcttattcc

SEQ ID NO: 191992 - DNA, 55 bp, Artificial
  Synthetic oligonucleotide
cccttatagaggctgtcacataccgaataggtccccacactaccgctgatgaccc

SEQ ID NO: 191993 - DNA, 51 bp, Artificial
  Synthetic oligonucleotide
taataaaagggcgtcttttggagaacgccctgaagcttaaaagaaactatt

SEQ ID NO: 191994 - DNA, 55 bp, Artificial
  Synthetic oligonucleotide
gtgtagactcctgatcttgagacgccctcaggacttgtaactatagcctgtatta

SEQ ID NO: 191995 - DNA, 51 bp, Artificial
  Synthetic oligonucleotide
gtgtttcaaacgataactggtaacaggattttaacgccgggaattatgggg

SEQ ID NO: 191996 - DNA, 55 bp, Artificial
  Synthetic oligonucleotide
tacaacccaaatttctgtaagcccacttgtgtatactgcacctggtagacctaaa

SEQ ID NO: 191997 - DNA, 55 bp, Artificial
  Synthetic oligonucleotide
ccgctcatattgatactttgggagcagtagtacgaaatgtgaaagcaaatggacg

SEQ ID NO: 191998 - DNA, 54 bp, Artificial
  Synthetic oligonucleotide
ccgcctgaaatgagtaaagttcctgttgaagctaaagttacagttcctgttccc

SEQ ID NO: 191999 - DNA, 55 bp, Artificial
  Synthetic oligonucleotide
ccgattgtactgtttctgcctgtgcataagatgttagtatcgcattcagtgctag

SEQ ID NO: 192000 - DNA, 60 bp, Artificial
  Synthetic oligonucleotide
gccagtgtcttccattgtcctgacagacaatggcactggcaaagggaaaaatccccttga

SEQ ID NO: 192001 - DNA, 58 bp, Artificial
  Synthetic oligonucleotide
gaggacttacaactataaaatcttgataagtttatcccgataattgcgtctgctattc

SEQ ID NO: 192002 - DNA, 55 bp, Artificial
  Synthetic oligonucleotide
ccgaccaagtagctaagaactacatagaccctaccaaagctcgtgaacagctatc

SEQ ID NO: 192003 - DNA, 54 bp, Artificial
  Synthetic oligonucleotide
ccgaacccaaacttcctgattctttcttgatttgtctacgtcctgacgtaccga

SEQ ID NO: 192004 - DNA, 55 bp, Artificial
  Synthetic oligonucleotide
ccaactgctacttgtggttttctgtcatcaatagatctgtatccacgatccagct

SEQ ID NO: 192005 - DNA, 54 bp, Artificial
  Synthetic oligonucleotide
taggaactccttctattccaactgttaacgctccaaatataactgtaagtggtt

SEQ ID NO: 192006 - DNA, 54 bp, Artificial
  Synthetic oligonucleotide
gtaggaggaataggtgctttaccaggagtagctgctccacctaatagattttca

SEQ ID NO: 192007 - DNA, 54 bp, Artificial
  Synthetic oligonucleotide
ggggaaacagtccctccaggaagtgacggtttgataactttgctagattggtta

SEQ ID NO: 192008 - DNA, 54 bp, Artificial
  Synthetic oligonucleotide
tacataggagctaatccaatcgttcgtaatctttcgttcgctaaccattttgtg

SEQ ID NO: 192009 - DNA, 54 bp, Artificial
  Synthetic oligonucleotide
tagcataccaataagtggagtgggagtaaactatgcgaatagagatttagaatc

SEQ ID NO: 192010 - DNA, 54 bp, Artificial
  Synthetic oligonucleotide
ttgccaggtagctgaatactatggaatgactcctcaatgttttgctacgctcac

SEQ ID NO: 192011 - DNA, 54 bp, Artificial
  Synthetic oligonucleotide
ttttcatactcacagtaaggtaagtgatgccaagctagagatcttcacaacctg

SEQ ID NO: 192012 - DNA, 60 bp, Artificial
  Synthetic oligonucleotide
cctagatgcaagatatagagctggtttagactataaggattcaggaagtgttacagatga

SEQ ID NO: 192013 - DNA, 54 bp, Artificial
  Synthetic oligonucleotide
gttgcatcctctttagttgtaagctggaatgttcctcctacatttattgttgtg

SEQ ID NO: 192014 - DNA, 54 bp, Artificial
  Synthetic oligonucleotide
tatagtaaactgcattgtcctttccatatacattcacattggtattagacattg

SEQ ID NO: 192015 - DNA, 54 bp, Artificial
  Synthetic oligonucleotide
ttacaagttagtggagttgtatcgccaaccccacgcccctactcttataacaat

SEQ ID NO: 192016 - DNA, 54 bp, Artificial
  Synthetic oligonucleotide
ggctgggcttacaactgtagcgattatggaacacgcatataaggaaactcagcg

SEQ ID NO: 192017 - DNA, 54 bp, Artificial
  Synthetic oligonucleotide
tattccaagtaaagagtcaaacagctttccacttgcaactagccctgaagctga

SEQ ID NO: 192018 - DNA, 54 bp, Artificial
  Synthetic oligonucleotide
tgctcctgaaaatgtgtcagggtctacgacttttactaggtttcctctatcatc

SEQ ID NO: 192019 - DNA, 54 bp, Artificial
  Synthetic oligonucleotide
ggtctaactcatgactgacaccctacgagtgctagagtcacaagtgtgcgacca

SEQ ID NO: 192020 - DNA, 54 bp, Artificial
  Synthetic oligonucleotide
tcataagggagcaattagcctctgttttaagatttatactttcacaagaattgt

SEQ ID NO: 192021 - DNA, 54 bp, Artificial
  Synthetic oligonucleotide
tctccttctcgtgaggaagttgattcttcggaagcttatagtcaattacgaaat

SEQ ID NO: 192022 - DNA, 54 bp, Artificial
  Synthetic oligonucleotide
tccaacaaaattatgcctgactggtgaggacaataaaagtcctcgcctatttaa

SEQ ID NO: 192023 - DNA, 54 bp, Artificial
  Synthetic oligonucleotide
cctacaagtaaattagttagcttattgacaggagttacaactcaacctaataag

SEQ ID NO: 192024 - DNA, 54 bp, Artificial
  Synthetic oligonucleotide
tcctatgggtggaaatctcgagtttgcagatagtgcaacgatagctagagcttt

SEQ ID NO: 192025 - DNA, 54 bp, Artificial
  Synthetic oligonucleotide
gacctagacacctagctcaagcagtaggaacacctagctttatagtacaaagac

SEQ ID NO: 192026 - DNA, 54 bp, Artificial
  Synthetic oligonucleotide
acgggtttcaagagtgtagtcaagttcgctcggatctacaatatcatattccac

SEQ ID NO: 192027 - DNA, 54 bp, Artificial
  Synthetic oligonucleotide
gaaagaggagctaaggaggcttatgcatgttgtacacacgctgtattctctgat

SEQ ID NO: 192028 - DNA, 54 bp, Artificial
  Synthetic oligonucleotide
agaaagccgacagtagtccatgtacaagcaatagcgaacagaaaacctaacgat

SEQ ID NO: 192029 - DNA, 54 bp, Artificial
  Synthetic oligonucleotide
agagctactgctcaattgacttttgcaacaggaggggcacaggtaatagctaac

SEQ ID NO: 192030 - DNA, 54 bp, Artificial
  Synthetic oligonucleotide
cttctgttaatagagtaacaatttggcatgttatgataggaactttcttattcc

SEQ ID NO: 192031 - DNA, 54 bp, Artificial
  Synthetic oligonucleotide
ctgcaagtgtggagtaaattcatcgaattgtatcacttctgatagaattctata

SEQ ID NO: 192032 - DNA, 54 bp, Artificial
  Synthetic oligonucleotide
agagttgatgtaggtcagacagtagtatgtagagatagagcagttattgcggtg

SEQ ID NO: 192033 - DNA, 54 bp, Artificial
  Synthetic oligonucleotide
agcggacgtgaattaggacaagctagtggtactaataaagaataccaaggagtt

SEQ ID NO: 192034 - DNA, 57 bp, Artificial
  Synthetic oligonucleotide
taacctggaacaagggaccagtcaaagacacctatagaggccaaggccacagtcacc

SEQ ID NO: 192035 - DNA, 54 bp, Artificial
  Synthetic oligonucleotide
cacctagtgaaccgggcctagtacctaaaagaagatctgttatctttggaattc

SEQ ID NO: 192036 - DNA, 54 bp, Artificial
  Synthetic oligonucleotide
ccactcccgatgcaccgtgcattaccactctgcagcttttaggcagggcagctc

SEQ ID NO: 192037 - DNA, 54 bp, Artificial
  Synthetic oligonucleotide
ccttgtagaagaatgttctacggttaatatattcactcccggcttacaatacac

SEQ ID NO: 192038 - DNA, 54 bp, Artificial
  Synthetic oligonucleotide
caagtataaccccaaatacaagagtaggatatcctatacattatatccctaatg

SEQ ID NO: 192039 - DNA, 54 bp, Artificial
  Synthetic oligonucleotide
atctacaactcttccacaagcaatcattccattgtgtgccatagttgctgccca

SEQ ID NO: 192040 - DNA, 54 bp, Artificial
  Synthetic oligonucleotide
cctagtgcgtgacgagggtttttagcaattgtagtcgatgttgttccactctta

SEQ ID NO: 192041 - DNA, 50 bp, Artificial
  Synthetic oligonucleotide
ccgtagttcttaacgtatcctccgtttactgcaactatacctttaaggtt

SEQ ID NO: 192042 - DNA, 54 bp, Artificial
  Synthetic oligonucleotide
ccggttcagagttgggctttcgttataccggatattggacagacacattatccg

SEQ ID NO: 192043 - DNA, 54 bp, Artificial
  Synthetic oligonucleotide
attataggcttacagttaaggagttatattgcaaaatcaaaggatattaaggca

SEQ ID NO: 192044 - DNA, 54 bp, Artificial
  Synthetic oligonucleotide
atttccattgaaaccagcacctatctctatcctaccatcccttaccataactgt

SEQ ID NO: 192045 - DNA, 60 bp, Artificial
  Synthetic oligonucleotide
taacactggcatataattaaatatgcgataaagtaagttaaacgatgcgaacatagcgat

SEQ ID NO: 192046 - DNA, 54 bp, Artificial
  Synthetic oligonucleotide
accccaagcacaccacgcacatcctatccaaacacataatggaaaagtgatagg

SEQ ID NO: 192047 - DNA, 54 bp, Artificial
  Synthetic oligonucleotide
cataagagaactgcataagtagtagcgcacttatgtgaacgacgcttcccactg

SEQ ID NO: 192048 - DNA, 54 bp, Artificial
  Synthetic oligonucleotide
gcactgtctccgttaccagattagaatttcaacggcatatggttggtattccaa

SEQ ID NO: 192049 - DNA, 54 bp, Artificial
  Synthetic oligonucleotide
aaactaccgatgctgtcaataagggacaattggatcgagaagtagctagagctt

SEQ ID NO: 192050 - DNA, 54 bp, Artificial
  Synthetic oligonucleotide
gcacggacatgtgtactgaccggaaccggactgcatctgataaagccgctcggc

SEQ ID NO: 192051 - DNA, 53 bp, Artificial
  Synthetic oligonucleotide
agtaagagagtagatgaaatcttatggcaagctatgccttgggacgttatggg

SEQ ID NO: 192052 - DNA, 53 bp, Artificial
  Synthetic oligonucleotide
tctaaatgtcgtatgcttgggagattcgcccgaagaagcacgaaaatcggctt

SEQ ID NO: 192053 - DNA, 53 bp, Artificial
  Synthetic oligonucleotide
agttcaataccatgagtatgggtattagcttcgattgacatcgcattataatt

SEQ ID NO: 192054 - DNA, 53 bp, Artificial
  Synthetic oligonucleotide
tcgagattatcataacctgttttcaggtggtcgctctttaagtcacagttgtc

SEQ ID NO: 192055 - DNA, 53 bp, Artificial
  Synthetic oligonucleotide
ataagtaccgtcggcgaatgagacagagcctaacctactcttgttatctatgt

SEQ ID NO: 192056 - DNA, 57 bp, Artificial
  Synthetic oligonucleotide
taaagttctcacttccccagctgtcataagttttcttgggacataagatgtagtcct

SEQ ID NO: 192057 - DNA, 53 bp, Artificial
  Synthetic oligonucleotide
gtctctaaggctaaggaggctcaagtaactctgtttgcgtctaagcttgagct

SEQ ID NO: 192058 - DNA, 53 bp, Artificial
  Synthetic oligonucleotide
aaaggaaccatcggagtttgtgaagctattgcacacttacaaggagccacaac

SEQ ID NO: 192059 - DNA, 53 bp, Artificial
  Synthetic oligonucleotide
tccggaacttcataacagactgaacaaaggtaaactctatcctcttgaaaacg

SEQ ID NO: 192060 - DNA, 53 bp, Artificial
  Synthetic oligonucleotide
tttggtcctatatgtcctccagttttactcaatctattaagcagagcagctct

SEQ ID NO: 192061 - DNA, 53 bp, Artificial
  Synthetic oligonucleotide
cctagagagagagcgattcaagatttatatgtaatcagaagtggtacaggagg

SEQ ID NO: 192062 - DNA, 53 bp, Artificial
  Synthetic oligonucleotide
caaccttgcacccaatgataaataaaggttgcattgataaacaaaagagttaa

SEQ ID NO: 192063 - DNA, 53 bp, Artificial
  Synthetic oligonucleotide
cccaaatgttgtaacaccaatatatgttggtagagctaacagtatagcaacat

SEQ ID NO: 192064 - DNA, 53 bp, Artificial
  Synthetic oligonucleotide
gtttatgaaggacttcctaaaagagtgggacgtactgaagttggtcaggtacg

SEQ ID NO: 192065 - DNA, 53 bp, Artificial
  Synthetic oligonucleotide
gcgatgccactactcctataatcaaactagtactaagtccttttatagttcgt

SEQ ID NO: 192066 - DNA, 53 bp, Artificial
  Synthetic oligonucleotide
atgtcaaggtaaaacggcttgcgtttccttgcattataacgtgctataataca

SEQ ID NO: 192067 - DNA, 53 bp, Artificial
  Synthetic oligonucleotide
ggggccataacccttatagaagggtctaccccgacttgacctgtagatattat

SEQ ID NO: 192068 - DNA, 53 bp, Artificial
  Synthetic oligonucleotide
tcagtaaaatcattcgaggctaaaataaccttagattatgaagacgttgacat

SEQ ID NO: 192069 - DNA, 53 bp, Artificial
  Synthetic oligonucleotide
cccgcccccatcttttgagtcgagccaagtaaaattcgtatatctccacttcg

SEQ ID NO: 192070 - DNA, 53 bp, Artificial
  Synthetic oligonucleotide
gctccacaatgataaatcacactagccgaagctgaataagtgtaggctgatgt

SEQ ID NO: 192071 - DNA, 53 bp, Artificial
  Synthetic oligonucleotide
gttgaagacgcaataaaattaaaaggtaagtattcagctttattgcttccaca

SEQ ID NO: 192072 - DNA, 53 bp, Artificial
  Synthetic oligonucleotide
attcaaactaggcaatgggctcctagggttcctatataaatcccgtagaaata

SEQ ID NO: 192073 - DNA, 53 bp, Artificial
  Synthetic oligonucleotide
attctaactcttatgagtggagctagtattagggtaggttatgatattgcaag

SEQ ID NO: 192074 - DNA, 53 bp, Artificial
  Synthetic oligonucleotide
ttagtaactgcatatggtggggtaaattctcatatggctatacgatgtgctga

SEQ ID NO: 192075 - DNA, 53 bp, Artificial
  Synthetic oligonucleotide
gacttgcaacatttggagtggctatgttgtcgttgttatgtggaatacaggcc

SEQ ID NO: 192076 - DNA, 53 bp, Artificial
  Synthetic oligonucleotide
ttactagtactggactttctgatggacttacaggagtagttactcgtacagta

SEQ ID NO: 192077 - DNA, 53 bp, Artificial
  Synthetic oligonucleotide
ggggtagttttaacgattcctagagctggatcagaaatgtctgaaagctccat

SEQ ID NO: 192078 - DNA, 59 bp, Artificial
  Synthetic oligonucleotide
cccaatgtcttaataatttctgggtgcattgaaggtatagaaagctctataagagctcc

SEQ ID NO: 192079 - DNA, 53 bp, Artificial
  Synthetic oligonucleotide
gaccttaatatcggatgggataaccaaagagtaggagtaacagctaatgtagg

SEQ ID NO: 192080 - DNA, 53 bp, Artificial
  Synthetic oligonucleotide
ggtagcaccgggaactgtatacgtaacttctacagctggtatgccaccctcta

SEQ ID NO: 192081 - DNA, 53 bp, Artificial
  Synthetic oligonucleotide
acgacatccattattgttgagggagcattttgaatctcatgaaacactaatgg

SEQ ID NO: 192082 - DNA, 53 bp, Artificial
  Synthetic oligonucleotide
gacttgctacttcttatcctatgacaactcctattgcagtagttcaaagagct

SEQ ID NO: 192083 - DNA, 53 bp, Artificial
  Synthetic oligonucleotide
gaaggctaagttaatcctagaaaacggaatgactttcgatggaaaggcgtttg

SEQ ID NO: 192084 - DNA, 50 bp, Artificial
  Synthetic oligonucleotide
acctattttcccgggacgaatccaagtattttaggcgtaaacagacttaa

SEQ ID NO: 192085 - DNA, 53 bp, Artificial
  Synthetic oligonucleotide
tgttcggatcagtcagcattttgaacactccaaatcctatacatccaatagcc

SEQ ID NO: 192086 - DNA, 53 bp, Artificial
  Synthetic oligonucleotide
actttcgtagtgttccgcccaacaagggtgtaaattttgatatcccatttcta

SEQ ID NO: 192087 - DNA, 53 bp, Artificial
  Synthetic oligonucleotide
agagccaacagttggagggacaccttggtctttaacaacacacggactaagtg

SEQ ID NO: 192088 - DNA, 53 bp, Artificial
  Synthetic oligonucleotide
accgtcaatcgcaaaattaaagctgtccacaagccgtttatctcttgcccgtt

SEQ ID NO: 192089 - DNA, 60 bp, Artificial
  Synthetic oligonucleotide
gttgtggaacttactgaggcaggtgttatatctggaagtacaactataccagctatgaat

SEQ ID NO: 192090 - DNA, 53 bp, Artificial
  Synthetic oligonucleotide
gggaagttccattattatctggcgcttctatattaacaagcggaactccatta

SEQ ID NO: 192091 - DNA, 53 bp, Artificial
  Synthetic oligonucleotide
accgacaaaagatagagaggctccagcaaggattgctgttacaattcttggag

SEQ ID NO: 192092 - DNA, 53 bp, Artificial
  Synthetic oligonucleotide
agctcctgatccagttaagtttgcttgaacctctccaggtggcgttataacta

SEQ ID NO: 192093 - DNA, 53 bp, Artificial
  Synthetic oligonucleotide
ctccatacaatagtgtggcaggtctaaaacgagtcatagatgctttgatcgat

SEQ ID NO: 192094 - DNA, 53 bp, Artificial
  Synthetic oligonucleotide
ctcataatttgaggtgctaccattccattactaagtcctaaaagaattgtacc

SEQ ID NO: 192095 - DNA, 53 bp, Artificial
  Synthetic oligonucleotide
tgccaataggtcgggagtcgccccaaccttgttccctgtgttccagttcgcta

SEQ ID NO: 192096 - DNA, 53 bp, Artificial
  Synthetic oligonucleotide
ttcgcactatggagtccaccgaacccaaacgtatgttctactccacacaaact

SEQ ID NO: 192097 - DNA, 52 bp, Artificial
  Synthetic oligonucleotide
cagttacactatctggttgggtagatacaactagagacttaggaggactaac

SEQ ID NO: 192098 - DNA, 52 bp, Artificial
  Synthetic oligonucleotide
cagtatggagaaaaaagtccctttgccgaaaaggctagcaagaacttagaca

SEQ ID NO: 192099 - DNA, 52 bp, Artificial
  Synthetic oligonucleotide
catagcttgagaagtaccacttctgtgatgagcttcaccagtaggatgagca

SEQ ID NO: 192100 - DNA, 54 bp, Artificial
  Synthetic oligonucleotide
gttgtagggttaatttcgttagtagggctaggttgttcaattacaatgactgta

SEQ ID NO: 192101 - DNA, 52 bp, Artificial
  Synthetic oligonucleotide
tatcataacatgccaaattgttactctatttacagaagcccctccaattaat

SEQ ID NO: 192102 - DNA, 52 bp, Artificial
  Synthetic oligonucleotide
catccttattataaagcgatgggagcggtaagggccttagatacgattcgat

SEQ ID NO: 192103 - DNA, 52 bp, Artificial
  Synthetic oligonucleotide
atggttctagagctccacaaaggctctttcactattataggacgtcgcagta

SEQ ID NO: 192104 - DNA, 52 bp, Artificial
  Synthetic oligonucleotide
atggtccacgctgattcacgccagattcctcgtgcctgacgctactcgggtg

SEQ ID NO: 192105 - DNA, 52 bp, Artificial
  Synthetic oligonucleotide
tcccaagagtctaaatcagttcctaggtgtcctcctgcattaccgccctcta

SEQ ID NO: 192106 - DNA, 52 bp, Artificial
  Synthetic oligonucleotide
atcagggctaattactctagaaacgccaaaagatcgaccaatttacgtgggg

SEQ ID NO: 192107 - DNA, 52 bp, Artificial
  Synthetic oligonucleotide
tctagtatcatttccttagtgtaagcacatttcctagccatagcactcctcc

SEQ ID NO: 192108 - DNA, 52 bp, Artificial
  Synthetic oligonucleotide
tctgatattgttgtaactgatgtaatgtatctcgattcgcccaaggtccatg

SEQ ID NO: 192109 - DNA, 52 bp, Artificial
  Synthetic oligonucleotide
aggcgaacccataaacggtaccggctcatgcggctgtgtcggcgcgtccgga

SEQ ID NO: 192110 - DNA, 52 bp, Artificial
  Synthetic oligonucleotide
tgttggaaaatgtgaatgccgtttgacagaatttgtaggacttactactcat

SEQ ID NO: 192111 - DNA, 60 bp, Artificial
  Synthetic oligonucleotide
gccagcctataatgtttccagagctccacaaaggttctttcaacattataggacgtcgca

SEQ ID NO: 192112 - DNA, 57 bp, Artificial
  Synthetic oligonucleotide
gggtcactacggggtgccgacaggatcgtatcttgtgttgcctgtgttgggaccgag

SEQ ID NO: 192113 - DNA, 52 bp, Artificial
  Synthetic oligonucleotide
accgttttgtgcttggttacctaaatattcaggggtgtaagtctgaatatgg

SEQ ID NO: 192114 - DNA, 52 bp, Artificial
  Synthetic oligonucleotide
aatataggaacaactgctggggttggaattagacttaatacaccaattggac

SEQ ID NO: 192115 - DNA, 52 bp, Artificial
  Synthetic oligonucleotide
aaattactgaacctcccacgactgagatcctacgagtgcaggagtcacagga

SEQ ID NO: 192116 - DNA, 52 bp, Artificial
  Synthetic oligonucleotide
aaaagccgaactcgcgaatccacttgctgtattcatataaccaacagcagaa

SEQ ID NO: 192117 - DNA, 52 bp, Artificial
  Synthetic oligonucleotide
cccgacatcactatttccgtagtaattcgtaatgtgctttctgcttcgtgaa

SEQ ID NO: 192118 - DNA, 52 bp, Artificial
  Synthetic oligonucleotide
gttactcgttcagaaatgtatcacaatgttggtaagtatgtatatgtcccat

SEQ ID NO: 192119 - DNA, 52 bp, Artificial
  Synthetic oligonucleotide
ccccagagaacatatatacccataacttgtaaggctcctcgcaattctcccc

SEQ ID NO: 192120 - DNA, 52 bp, Artificial
  Synthetic oligonucleotide
gtttgattctaactgtggtactttaagttgcattcatgcacaatcgcctgat

SEQ ID NO: 192121 - DNA, 52 bp, Artificial
  Synthetic oligonucleotide
ccgttgcctagagaggtaagtgctgggtgtggtctttctattagggcagagc

SEQ ID NO: 192122 - DNA, 52 bp, Artificial
  Synthetic oligonucleotide
ccactcatcaagtgggggtgcagtatttggagtaggtataggatttcaagcg

SEQ ID NO: 192123 - DNA, 54 bp, Artificial
  Synthetic oligonucleotide
gttccgggcagagttatcagtcttatcgttccctcacttaggttttgtgtttcg

SEQ ID NO: 192124 - DNA, 52 bp, Artificial
  Synthetic oligonucleotide
ccaattcccaattctacctcagagcacagcattccataagactctaccttac

SEQ ID NO: 192125 - DNA, 52 bp, Artificial
  Synthetic oligonucleotide
ccaatattttatcagtcaatagagctactattgcaaattatgagagtgggcg

SEQ ID NO: 192126 - DNA, 52 bp, Artificial
  Synthetic oligonucleotide
gcctaaaatatggagaggtgtccctacggttaaccgtaaattaaccagctac

SEQ ID NO: 192127 - DNA, 52 bp, Artificial
  Synthetic oligonucleotide
ccaaattgtcctcctgttaatcttgtatctgctgaagcatatccatctcttc

SEQ ID NO: 192128 - DNA, 52 bp, Artificial
  Synthetic oligonucleotide
ggtcctgacgaacagtttgtggcgggaagagctataggagctgatgcaggaa

SEQ ID NO: 192129 - DNA, 52 bp, Artificial
  Synthetic oligonucleotide
cctgcttgtatgttaaccaacgattatctttaaagcccattctttcagctgc

SEQ ID NO: 192130 - DNA, 51 bp, Artificial
  Synthetic oligonucleotide
ctaaaggctcttgtcttggagttgtacttgctaatccatatcctgaaccta

SEQ ID NO: 192131 - DNA, 51 bp, Artificial
  Synthetic oligonucleotide
gccaagtagaattataccatcttaggtccttaccccatacaataattggca

SEQ ID NO: 192132 - DNA, 51 bp, Artificial
  Synthetic oligonucleotide
ggtgctatttggtcagagaacagaattatggtgggatcaccctgtaataac

SEQ ID NO: 192133 - DNA, 51 bp, Artificial
  Synthetic oligonucleotide
ctaccccatatccacaacggctgcatccttgacatgaatatggtttaggct

SEQ ID NO: 192134 - DNA, 57 bp, Artificial
  Synthetic oligonucleotide
gacactagacaaaagggggtgggttatatatcattagctggaatggaaccatataag

SEQ ID NO: 192135 - DNA, 51 bp, Artificial
  Synthetic oligonucleotide
agggtaatgagtaactattcaaaggctatagaggctctagatacagcagga

SEQ ID NO: 192136 - DNA, 51 bp, Artificial
  Synthetic oligonucleotide
cgctgtaaattctaccaactcgctatgctcagacacgtcgagatttactcg

SEQ ID NO: 192137 - DNA, 51 bp, Artificial
  Synthetic oligonucleotide
tgaaaatactgatcttgaaaggggtgtctaaaatgttcgccccttgatatg

SEQ ID NO: 192138 - DNA, 51 bp, Artificial
  Synthetic oligonucleotide
tgaaggactaggaaaggttgttatgatagactacggtggaggaatgatagg

SEQ ID NO: 192139 - DNA, 51 bp, Artificial
  Synthetic oligonucleotide
actcctacggagtgtgcttcgcactttcgttattcaagaatagcgaccaaa

SEQ ID NO: 192140 - DNA, 51 bp, Artificial
  Synthetic oligonucleotide
ggtgtagtaatggctatacttgatggttctaaccctcttcttgtagaaaga

SEQ ID NO: 192141 - DNA, 51 bp, Artificial
  Synthetic oligonucleotide
actgcgaaattcaatagcagactaaacttgtagaagcctatggcgctggca

SEQ ID NO: 192142 - DNA, 51 bp, Artificial
  Synthetic oligonucleotide
ctatttcggatcttggagaatagtttatctcatatacggtgtaggtgagct

SEQ ID NO: 192143 - DNA, 51 bp, Artificial
  Synthetic oligonucleotide
tgccggcttttgccatcacaattatcgccatccctatcgtgctcacagtac

SEQ ID NO: 192144 - DNA, 51 bp, Artificial
  Synthetic oligonucleotide
actgctggattaatagacccgtggaaagcgtgtgcaaaaggaacactatct

SEQ ID NO: 192145 - DNA, 57 bp, Artificial
  Synthetic oligonucleotide
ccctactttaactgaaagtggatatccagtaatatttggttctgctcgtgctattgt

SEQ ID NO: 192146 - DNA, 51 bp, Artificial
  Synthetic oligonucleotide
gtaagctgtaataggagcacccattctctcaggtccatactctgggaaccc

SEQ ID NO: 192147 - DNA, 51 bp, Artificial
  Synthetic oligonucleotide
agcgatcattcaagtatccgctcctgatgaacacgggtattgcagttacgg

SEQ ID NO: 192148 - DNA, 51 bp, Artificial
  Synthetic oligonucleotide
gcacttatccctgttaccattcctgtcccagttgctgttactgtttcaagg

SEQ ID NO: 192149 - DNA, 51 bp, Artificial
  Synthetic oligonucleotide
ggttatcgctggggggagtaagattaaagcaagagcattatactctatgcc

SEQ ID NO: 192150 - DNA, 51 bp, Artificial
  Synthetic oligonucleotide
gcaaaagggagttactgtatatcctcatatgatggtagagggagctcataa

SEQ ID NO: 192151 - DNA, 51 bp, Artificial
  Synthetic oligonucleotide
ctttccagactaggtgaagtagcaatgataggaacttctatagctgtaggt

SEQ ID NO: 192152 - DNA, 51 bp, Artificial
  Synthetic oligonucleotide
gagtgcttttggcgggatatgacgatgctaagattggttccatgattgaat

SEQ ID NO: 192153 - DNA, 51 bp, Artificial
  Synthetic oligonucleotide
tgtcgctccgaagtctctcatgaatacgactcgagctttagtaataaaggc

SEQ ID NO: 192154 - DNA, 51 bp, Artificial
  Synthetic oligonucleotide
ggggatcccggagtagggaagactgccatagtagagggactggcccaaagg

SEQ ID NO: 192155 - DNA, 51 bp, Artificial
  Synthetic oligonucleotide
cattccacagccttcgccatactttcgcaacgcaggccatcgaactcggaa

SEQ ID NO: 192156 - DNA, 53 bp, Artificial
  Synthetic oligonucleotide
ccgaaacgtcgtaaaacacgacgcaattgaaaatactaggttagtggatataa

SEQ ID NO: 192157 - DNA, 51 bp, Artificial
  Synthetic oligonucleotide
cattaaatgtaggtcttgtcacatacattgctctgaatgctccatatggca

SEQ ID NO: 192158 - DNA, 51 bp, Artificial
  Synthetic oligonucleotide
catgagagaggtcatgacttcagcattagcaattcacggttatgatcaaaa

SEQ ID NO: 192159 - DNA, 51 bp, Artificial
  Synthetic oligonucleotide
acgggtgcagcgaaggagcatgcggtacctgtacggtaatactggacggga

SEQ ID NO: 192160 - DNA, 51 bp, Artificial
  Synthetic oligonucleotide
tttggatgcgggagcaaaattgtcaagcggatattgtggagatatgacgag

SEQ ID NO: 192161 - DNA, 51 bp, Artificial
  Synthetic oligonucleotide
caggatcttatacttggggagttacaactagccaagcgtatatgccaagag

SEQ ID NO: 192162 - DNA, 51 bp, Artificial
  Synthetic oligonucleotide
gcccctttacttgatgaatgactccctaaagctactccaccctgtcctgca

SEQ ID NO: 192163 - DNA, 51 bp, Artificial
  Synthetic oligonucleotide
ccatttgatctatacttgttatgtactcccagctggattgtatctacccat

SEQ ID NO: 192164 - DNA, 51 bp, Artificial
  Synthetic oligonucleotide
taaaagtagcggtgtagacacaagtcttatccagtagtggctatcgtggac

SEQ ID NO: 192165 - DNA, 51 bp, Artificial
  Synthetic oligonucleotide
gccccatacctactgcgaactccagtacaggcatatgaaacatcttcgctg

SEQ ID NO: 192166 - DNA, 51 bp, Artificial
  Synthetic oligonucleotide
ccccattgagaatatacctttactatctccagaagctacacttaaatctcc

SEQ ID NO: 192167 - DNA, 57 bp, Artificial
  Synthetic oligonucleotide
gaacataattaatatacctcctcaaatttgagggaatctaccgatagatttcaaatc

SEQ ID NO: 192168 - DNA, 51 bp, Artificial
  Synthetic oligonucleotide
attcacagcccgggagtagtaccaagtctgtctattcttgtaaaacttatg

SEQ ID NO: 192169 - DNA, 51 bp, Artificial
  Synthetic oligonucleotide
ttacttgcgtcggaaataatgttacttgcgtcggaaaccctttttagcaag

SEQ ID NO: 192170 - DNA, 51 bp, Artificial
  Synthetic oligonucleotide
gttactgtccggaggagaacaggtttctgtggcaattgctattcgtgggac

SEQ ID NO: 192171 - DNA, 51 bp, Artificial
  Synthetic oligonucleotide
gactcatgggagcagtagtagtaccagttaaggtagtattagctataccag

SEQ ID NO: 192172 - DNA, 51 bp, Artificial
  Synthetic oligonucleotide
tccacccgtcaaggatgaatatgctccagttgtatctgctctgtaaagcat

SEQ ID NO: 192173 - DNA, 51 bp, Artificial
  Synthetic oligonucleotide
gtgtcataaatccgagaaaatggaaaggagtactaatggctttagttccac

SEQ ID NO: 192174 - DNA, 51 bp, Artificial
  Synthetic oligonucleotide
atggcattagccacaacaataggattaggtacaataggaactgttgggact

SEQ ID NO: 192175 - DNA, 51 bp, Artificial
  Synthetic oligonucleotide
atgcagctagaccagcacaaggatataattctatcagtgcactgtttgcat

SEQ ID NO: 192176 - DNA, 51 bp, Artificial
  Synthetic oligonucleotide
ttggctcagagatattgcctgaattatctaccgttatatctgcgtttccat

SEQ ID NO: 192177 - DNA, 51 bp, Artificial
  Synthetic oligonucleotide
aactctcaatgcatcctctggttctataataagttctgaaaagtacatacc

SEQ ID NO: 192178 - DNA, 51 bp, Artificial
  Synthetic oligonucleotide
gcaccctttaaacacacaatggttgggcccgtacccggaataggcccggtg

SEQ ID NO: 192179 - DNA, 51 bp, Artificial
  Synthetic oligonucleotide
aactgctttgtctaactctttgtaagctactgataaagctgcgttagctgc

SEQ ID NO: 192180 - DNA, 51 bp, Artificial
  Synthetic oligonucleotide
cgacatcatgtgcttacttacgaaaagagaatgggagtggacgagattacg

SEQ ID NO: 192181 - DNA, 50 bp, Artificial
  Synthetic oligonucleotide
ggggacggttcacttagtggtggcgaggcatttgaaggacttaatatggc

SEQ ID NO: 192182 - DNA, 50 bp, Artificial
  Synthetic oligonucleotide
ttagtagcagatgtgagggcagctacacctactcaagctgtagagctttc

SEQ ID NO: 192183 - DNA, 50 bp, Artificial
  Synthetic oligonucleotide
gagattgaaccgccgctttgcttagaggagagtggttactgaagacagga

SEQ ID NO: 192184 - DNA, 50 bp, Artificial
  Synthetic oligonucleotide
gcagctcctggttttattgtgtcaacaattcctcccaatgagtgagcagc

SEQ ID NO: 192185 - DNA, 50 bp, Artificial
  Synthetic oligonucleotide
gcataggtggggttatactttctgcctatgtacatgattttgctccgaat

SEQ ID NO: 192186 - DNA, 50 bp, Artificial
  Synthetic oligonucleotide
ttcgctaaacttgctgacaagtcagcttcagacacagcgaaatttgctcg

SEQ ID NO: 192187 - DNA, 50 bp, Artificial
  Synthetic oligonucleotide
accattttccgtctaccaaaacctaacaagtctgggtatccagggtgagc

SEQ ID NO: 192188 - DNA, 50 bp, Artificial
  Synthetic oligonucleotide
acaacaagagcaggtcttttaagtgctccgcttagagacagatttggtgt

SEQ ID NO: 192189 - DNA, 60 bp, Artificial
  Synthetic oligonucleotide
gtgattttgctgggactcagattgtttcctgatctattgtgtagctcacacaaaatgaag

SEQ ID NO: 192190 - DNA, 50 bp, Artificial
  Synthetic oligonucleotide
aagtacgatctaaaaggtttctaactgctccacacatactatgccaatac

SEQ ID NO: 192191 - DNA, 50 bp, Artificial
  Synthetic oligonucleotide
ttgaatccgtttattgtggatgtgagtacatctgtagcagttgttacgtc

SEQ ID NO: 192192 - DNA, 50 bp, Artificial
  Synthetic oligonucleotide
aacataaatctatgagattgcaatctttaccagagttagtaggattaagt

SEQ ID NO: 192193 - DNA, 50 bp, Artificial
  Synthetic oligonucleotide
aacactgcttgttctcccatagctacatatctattagctaatagagctac

SEQ ID NO: 192194 - DNA, 50 bp, Artificial
  Synthetic oligonucleotide
aaatttgttccggtaatcaatggagctataggttggataagactaggtcc

SEQ ID NO: 192195 - DNA, 50 bp, Artificial
  Synthetic oligonucleotide
gcgatatttcatatatagctgtaactaacactcctggattaataggttct

SEQ ID NO: 192196 - DNA, 50 bp, Artificial
  Synthetic oligonucleotide
ggaacctgactatccatcacaagcagagtctatcggttacgatcaaagag

SEQ ID NO: 192197 - DNA, 50 bp, Artificial
  Synthetic oligonucleotide
ccaaacatacactccacctttataagtagttgcgaattcagcactaacca

SEQ ID NO: 192198 - DNA, 50 bp, Artificial
  Synthetic oligonucleotide
catagttgatacaggataaggattcaccttagttgcatctgttccaaagg

SEQ ID NO: 192199 - DNA, 50 bp, Artificial
  Synthetic oligonucleotide
ccaactatcatagctatttcatctatcttgtaaccttcaccacatacatc

SEQ ID NO: 192200 - DNA, 60 bp, Artificial
  Synthetic oligonucleotide
cacgacagaggggagctaaaagctgggtgcacgtttcgctcagtcagctatatccaaaat

SEQ ID NO: 192201 - DNA, 50 bp, Artificial
  Synthetic oligonucleotide
caggttaacggagttgtaagttcgattatgactcttgagaaggaacttag

SEQ ID NO: 192202 - DNA, 50 bp, Artificial
  Synthetic oligonucleotide
cacatatgtggttctatatgcacaggtgaacaatgtatcctgagatgaat

SEQ ID NO: 192203 - DNA, 50 bp, Artificial
  Synthetic oligonucleotide
caactacccctataatcaagctagtactaagcccttttatagtccgtgtt

SEQ ID NO: 192204 - DNA, 50 bp, Artificial
  Synthetic oligonucleotide
ccccttattacaaggttttctccaatatcagcctgcattgcttctgttct

SEQ ID NO: 192205 - DNA, 50 bp, Artificial
  Synthetic oligonucleotide
ccgtaagctcttctcctactctgtcaattgaccatctgtattgtccaggc

SEQ ID NO: 192206 - DNA, 50 bp, Artificial
  Synthetic oligonucleotide
gtggagtttcatggaaacccttaggatatagttggtcaggtttaaatgag

SEQ ID NO: 192207 - DNA, 50 bp, Artificial
  Synthetic oligonucleotide
atcttggtgttgcaagagctgcacatcatagacctaatgttattgttatg

SEQ ID NO: 192208 - DNA, 50 bp, Artificial
  Synthetic oligonucleotide
cctccaccttttccatagctatgttttaggctacaagtcatattaacacc

SEQ ID NO: 192209 - DNA, 50 bp, Artificial
  Synthetic oligonucleotide
ccttgtgaactactcacgactaacaccctatgagtgctagagtcgagagt

SEQ ID NO: 192210 - DNA, 50 bp, Artificial
  Synthetic oligonucleotide
ataagtaagagcatcggctagggtaagtcttccctccgcatcggtattgg

SEQ ID NO: 192211 - DNA, 60 bp, Artificial
  Synthetic oligonucleotide
cttacaatatgagcaaaaatgattacaaccatcttgtatttttacataggctcttgtcat

SEQ ID NO: 192212 - DNA, 50 bp, Artificial
  Synthetic oligonucleotide
agtcaccttgtagaagtgaacgaggatcaacaggtctaagttccaaatag

SEQ ID NO: 192213 - DNA, 50 bp, Artificial
  Synthetic oligonucleotide
cgtacttatatcaggagctataagaggtgtcttaggggtaatcatgttcg

SEQ ID NO: 192214 - DNA, 50 bp, Artificial
  Synthetic oligonucleotide
agtattctgttccgatgataagacccactttcagctttctaggaagttga

SEQ ID NO: 192215 - DNA, 50 bp, Artificial
  Synthetic oligonucleotide
ctaccagtagcagcatctacctttctgactattggagtattagcatcctt

SEQ ID NO: 192216 - DNA, 50 bp, Artificial
  Synthetic oligonucleotide
ctagcagctacattaacatgtcccattcctccggtataatgtcctagagt

SEQ ID NO: 192217 - DNA, 50 bp, Artificial
  Synthetic oligonucleotide
agcttctatcatagtgggtgtaggacttgtactttgtggtttacctcaaa

SEQ ID NO: 192218 - DNA, 50 bp, Artificial
  Synthetic oligonucleotide
ctctgtagttgttttgagttccgatgctgtcagatttgtattgtacggct

SEQ ID NO: 192219 - DNA, 50 bp, Artificial
  Synthetic oligonucleotide
agagctgaagagttaggaagaaacgatgaatggattaacacagagatagc

SEQ ID NO: 192220 - DNA, 50 bp, Artificial
  Synthetic oligonucleotide
ggttagacaggaaagtcaagtcttggaacataagatagaggaactagcga

SEQ ID NO: 192221 - DNA, 50 bp, Artificial
  Synthetic oligonucleotide
ctttgccttagctactgactcaggttcagtatgtctatctgatgacttat

SEQ ID NO: 192222 - DNA, 50 bp, Artificial
  Synthetic oligonucleotide
attaatttccagtaaaaataaaggggtcaaggggctcccttgcacgttaa

SEQ ID NO: 192223 - DNA, 59 bp, Artificial
  Synthetic oligonucleotide
gggcagggctaacactggcatataattaaatatgcgataaagtaagttaaacgatgcga

SEQ ID NO: 192224 - DNA, 50 bp, Artificial
  Synthetic oligonucleotide
acttccaaacatccagtaaacaatttgacctgctacctcaggagtagaac

SEQ ID NO: 192225 - DNA, 50 bp, Artificial
  Synthetic oligonucleotide
actgaaatttatggtagtcctgaacctagtctttatagttcagttcttgg

SEQ ID NO: 192226 - DNA, 50 bp, Artificial
  Synthetic oligonucleotide
ttaagtgaactactcacggctaacaccctaacgagtgctagagccacgag

SEQ ID NO: 192227 - DNA, 59 bp, Artificial
  Synthetic oligonucleotide
cagatatggtttatccttttaagcctactcctttgtgtgtagcagtaagatatgttgat

SEQ ID NO: 192228 - DNA, 60 bp, Artificial
  Synthetic oligonucleotide
cagccattagtgtttcgtgaactccaaaatgctccctcaacaataatggacgtcgcagta

SEQ ID NO: 192229 - DNA, 60 bp, Artificial
  Synthetic oligonucleotide
cagctgctagacaagtacagcttctactaagactagagctaactcgaggcgcctatagtt

SEQ ID NO: 192230 - DNA, 56 bp, Artificial
  Synthetic oligonucleotide
gatccgtataattttcttgtccttttaaactgctattgtatcttgtgaacttatta

SEQ ID NO: 192231 - DNA, 54 bp, Artificial
  Synthetic oligonucleotide
gatatatctgaaccaaagggagtgtaaacttttatgtctgttcccttagttaag

SEQ ID NO: 192232 - DNA, 54 bp, Artificial
  Synthetic oligonucleotide
cctattttccctattactaagtatcttcagcgtacacagacttaactactaggt

SEQ ID NO: 192233 - DNA, 55 bp, Artificial
  Synthetic oligonucleotide
tagggagcaagtatattattggctaaggtaagtaagtcagttagtaagttgtatt

SEQ ID NO: 192234 - DNA, 59 bp, Artificial
  Synthetic oligonucleotide
cagttggtgagttagtaaatccacaaaagacagcttgtactgaaaatcagattgctaaa

SEQ ID NO: 192235 - DNA, 58 bp, Artificial
  Synthetic oligonucleotide
cataagataaattcgtatgtatagccgttctgctcgaaacggtatagcaccgtaatgg

SEQ ID NO: 192236 - DNA, 60 bp, Artificial
  Synthetic oligonucleotide
attagcagaactattagaggcgtcaggttttgcagctcttacttggcagaatattgctat

SEQ ID NO: 192237 - DNA, 60 bp, Artificial
  Synthetic oligonucleotide
catagatatgttcaatggctttgctaattctccaatgatgtttaatggtagcataactgg

SEQ ID NO: 192238 - DNA, 58 bp, Artificial
  Synthetic oligonucleotide
tagcctccttggtctatcggtattggtctgtcttgtgtcctagtagggagatagggtg

SEQ ID NO: 192239 - DNA, 58 bp, Artificial
  Synthetic oligonucleotide
gagtatctaattgcagacagaaagggccttgaaaataagttatcagaatttataaaca

SEQ ID NO: 192240 - DNA, 54 bp, Artificial
  Synthetic oligonucleotide
cctagttacttttcgaacctagtagttaagtctgtgtacgctgaagatacttag

SEQ ID NO: 192241 - DNA, 60 bp, Artificial
  Synthetic oligonucleotide
tacttgctggacttagaaaagctcaatctggaacatatagtatagatggggtagaattaa

SEQ ID NO: 192242 - DNA, 60 bp, Artificial
  Synthetic oligonucleotide
tggatctactttaggtggagttactctatatgccattcccaatagcccaattgatttatc

SEQ ID NO: 192243 - DNA, 51 bp, Artificial
  Synthetic oligonucleotide
aatcgttggaaagggctataaatcgttttggaacttcaagggtaggtataa

SEQ ID NO: 192244 - DNA, 56 bp, Artificial
  Synthetic oligonucleotide
gctaagaagacaacagggcaacacccaggaggaatggttatagtaccacaaggaaa

SEQ ID NO: 192245 - DNA, 60 bp, Artificial
  Synthetic oligonucleotide
ttgttttgagcctatcatactctttcctgagtctaatgtcatattagatgaacggaagtc

SEQ ID NO: 192246 - DNA, 59 bp, Artificial
  Synthetic oligonucleotide
acgtccattattgttgagtgaacctttgtggagctcacgaaacactaatggctgtcaag

SEQ ID NO: 192247 - DNA, 57 bp, Artificial
  Synthetic oligonucleotide
gcattatttactgtggtatcggcggtttgtgtaacagggctttccgtagttgatgtg

SEQ ID NO: 192248 - DNA, 60 bp, Artificial
  Synthetic oligonucleotide
gtaaccattcatagctggtatagttgtacttccagatataacacctgcctcagtaagttc

SEQ ID NO: 192249 - DNA, 59 bp, Artificial
  Synthetic oligonucleotide
gtagaacatacctaccagtgttctaaatcccaaatctggtactaatctatgcataagac

SEQ ID NO: 192250 - DNA, 56 bp, Artificial
  Synthetic oligonucleotide
cgtaatggtggtattatgaattgtagcaaggtgcgaggctacctttaaaagtcttg

SEQ ID NO: 192251 - DNA, 59 bp, Artificial
  Synthetic oligonucleotide
cgtcggattgcacagattcaagtggattgggttcccgctggcagtaagtccaagcctaa

SEQ ID NO: 192252 - DNA, 60 bp, Artificial
  Synthetic oligonucleotide
tgttggactaactggctctaaccacatataataaccatcactgccactgttagcacctgg

SEQ ID NO: 192253 - DNA, 56 bp, Artificial
  Synthetic oligonucleotide
agactttacttttggacctagaatatcgctaacaggaggagtggctataagtgaac

SEQ ID NO: 192254 - DNA, 56 bp, Artificial
  Synthetic oligonucleotide
gtacaactgcttaaatacagtcattgtaattgaacaacctagccctactaacgaaa

SEQ ID NO: 192255 - DNA, 50 bp, Artificial
  Synthetic oligonucleotide
tttacttgctaaaaaagttaaattgattccacctaaatttacaaagttgg

SEQ ID NO: 192256 - DNA, 58 bp, Artificial
  Synthetic oligonucleotide
gcggtcacagagagtgattagttaattttagccttcgacattgtggcgaacctataaa

SEQ ID NO: 192257 - DNA, 54 bp, Artificial
  Synthetic oligonucleotide
ctagcctaatccaacccttaccaccatttacagttgggaagatactactaggac

SEQ ID NO: 192258 - DNA, 57 bp, Artificial
  Synthetic oligonucleotide
ctgtggggtcagaaataacaggtatcgcgaaaatatgttactgtgtaggctacggta

SEQ ID NO: 192259 - DNA, 60 bp, Artificial
  Synthetic oligonucleotide
acatacctcttttaggttctatgagtatagctattggatacgcaataatctctgcttggg

SEQ ID NO: 192260 - DNA, 60 bp, Artificial
  Synthetic oligonucleotide
agaacatacagattgaagaaatccaaggagcgttagatgaattatggcagtctataaaag

SEQ ID NO: 192261 - DNA, 60 bp, Artificial
  Synthetic oligonucleotide
tgtggccgccgtgattattccgccatttacagccgttgctgcgatacttcttgcgtccat

SEQ ID NO: 192262 - DNA, 55 bp, Artificial
  Synthetic oligonucleotide
ctaccagaccaagcgtaggggcttttaccctccctacatgcagagtttttgagga

SEQ ID NO: 192263 - DNA, 60 bp, Artificial
  Synthetic oligonucleotide
acttgacgatatgattgcatatgataaagggttaaatgggacacaagaggacgcaatagg

SEQ ID NO: 192264 - DNA, 52 bp, Artificial
  Synthetic oligonucleotide
gtacctaaaaccctatgtccgtaaaattcaccctgcttgtcggggtgaatag

SEQ ID NO: 192265 - DNA, 52 bp, Artificial
  Synthetic oligonucleotide
accgctaaatccccacctacagcctttaagtaaatgttacgaccataaatac

SEQ ID NO: 192266 - DNA, 59 bp, Artificial
  Synthetic oligonucleotide
accggtacatttgaaatgtaacagtctgttctttagcctatgtcgcaaatcacgacaga

SEQ ID NO: 192267 - DNA, 58 bp, Artificial
  Synthetic oligonucleotide
gcctgaacctcccacgactgacaccctacgagtgctagagtcgcagggttcttgggta

SEQ ID NO: 192268 - DNA, 59 bp, Artificial
  Synthetic oligonucleotide
agctgtcttaactaataatggaacaatccatatagatgctactaagggttatggattat

SEQ ID NO: 192269 - DNA, 55 bp, Artificial
  Synthetic oligonucleotide
cacgattacaagttgtgaggtacacatatggcattcggcaactcttcgcaggacg

SEQ ID NO: 192270 - DNA, 55 bp, Artificial
  Synthetic oligonucleotide
cgaatatgccccacatatccttcgaagtggtgatgctggtcggtctttctaacgt

SEQ ID NO: 192271 - DNA, 50 bp, Artificial
  Synthetic oligonucleotide
agcgcaatttaccccgaccaggagcctgactgggatcgggtcagtcggac

SEQ ID NO: 192272 - DNA, 50 bp, Artificial
  Synthetic oligonucleotide
agccgactccccctgtcccgccgtataggcccaccattcgctgcgtttat

SEQ ID NO: 192273 - DNA, 50 bp, Artificial
  Synthetic oligonucleotide
agccaccccgccgcgtgtatacggagcctgtgcagctgggtatcaagcgt

SEQ ID NO: 192274 - DNA, 50 bp, Artificial
  Synthetic oligonucleotide
agcagaaacacgcgcagctcactagccacgagtgcggccaatccaaaggt

SEQ ID NO: 192275 - DNA, 50 bp, Artificial
  Synthetic oligonucleotide
agcaccaattgggggtccagtcccgctcgggtcgcttcgtagtgtaccgt

SEQ ID NO: 192276 - DNA, 50 bp, Artificial
  Synthetic oligonucleotide
agagtcccggcacattactcgtccgacccaccgcgtactgacgtcccgat

SEQ ID NO: 192277 - DNA, 50 bp, Artificial
  Synthetic oligonucleotide
agaggccgtctagccttctttcatcccgcctcgcgtcagccaattgcgag

SEQ ID NO: 192278 - DNA, 50 bp, Artificial
  Synthetic oligonucleotide
agactggccggtccccttgctatcccaatttcgatcaagcgaggctcccc

SEQ ID NO: 192279 - DNA, 50 bp, Artificial
  Synthetic oligonucleotide
agactgaccccttgctgggcaatgaagagagcaccaccgcctaccgtgcg

SEQ ID NO: 192280 - DNA, 50 bp, Artificial
  Synthetic oligonucleotide
acttgggtcatacgctgcacggaatggggcggttggctgacgctgcggat

SEQ ID NO: 192281 - DNA, 55 bp, Artificial
  Synthetic oligonucleotide
cgatctgacagtacttgccgatcgtggtactgccggcaattcccacacaacctgc

SEQ ID NO: 192282 - DNA, 50 bp, Artificial
  Synthetic oligonucleotide
actgccccgggaacggatgaggcggtagccggacaaatcgcgcgctggaa

SEQ ID NO: 192283 - DNA, 50 bp, Artificial
  Synthetic oligonucleotide
acgtgtcgccctccgtttgagagacacgatgccttgggcgttaggcggtg

SEQ ID NO: 192284 - DNA, 50 bp, Artificial
  Synthetic oligonucleotide
acgggccgtaataccaccccagcaccgtgtatcccccgcgcctaaacttg

SEQ ID NO: 192285 - DNA, 55 bp, Artificial
  Synthetic oligonucleotide
cgccgaaatgatcgatctggtattcgagataagtggtggcaccttgcccatcgca

SEQ ID NO: 192286 - DNA, 55 bp, Artificial
  Synthetic oligonucleotide
cggcctgtcgtgaatgaatggagccggggtccaggtgtaaacggtgtggcactcg

SEQ ID NO: 192287 - DNA, 55 bp, Artificial
  Synthetic oligonucleotide
acaggatggcggatagctcggctatcgtcaagccactgagttgcataagggcgtc

SEQ ID NO: 192288 - DNA, 55 bp, Artificial
  Synthetic oligonucleotide
ctccggctcaaccgaacgttgcgcgcgtatagtgcaagcgattgggcattagtgc

SEQ ID NO: 192289 - DNA, 55 bp, Artificial
  Synthetic oligonucleotide
gaaaataacgagatacacctgatgtcctttatggatcacacgccagggcagggtc

SEQ ID NO: 192290 - DNA, 55 bp, Artificial
  Synthetic oligonucleotide
tttcgctttcgtgcgacaactggcgaacgatggcacggggacgcagaagagcaag

SEQ ID NO: 192291 - DNA, 55 bp, Artificial
  Synthetic oligonucleotide
ttaccacggcgccacactcaatctgcactgcggctttgctgatacatccgatcaa

SEQ ID NO: 192292 - DNA, 55 bp, Artificial
  Synthetic oligonucleotide
agctgaaatcatgcggtgcccattctgcaaaggtccggatacccaagtggtggac

SEQ ID NO: 192293 - DNA, 55 bp, Artificial
  Synthetic oligonucleotide
caccgtactcttaaagagagctacgctcatttattgcaacgcgaccgctccgcct

SEQ ID NO: 192294 - DNA, 55 bp, Artificial
  Synthetic oligonucleotide
gtcctctggttcgacggatagaagcaggccgtgtgaatatgattgctgatctttc

SEQ ID NO: 192295 - DNA, 55 bp, Artificial
  Synthetic oligonucleotide
ggtaactatcctgttccgcgctaaatacggttgtatgattaggcataccagtacc

SEQ ID NO: 192296 - DNA, 55 bp, Artificial
  Synthetic oligonucleotide
gggatatatgaatacgacgggtagtcaaggtggtgccgaagaggcaggggctaac

SEQ ID NO: 192297 - DNA, 55 bp, Artificial
  Synthetic oligonucleotide
gggaatggttactttcatgagcttgaaaacgcatgggaactctttgtgtctcccc

SEQ ID NO: 192298 - DNA, 55 bp, Artificial
  Synthetic oligonucleotide
ggctggtgtgacgctatccgtctccaccttgcgtttgacggagatacctgtcgac

SEQ ID NO: 192299 - DNA, 55 bp, Artificial
  Synthetic oligonucleotide
ggctgggccacaactgtattgtcgagataggaagcggttaatcagaagtcgaatg

SEQ ID NO: 192300 - DNA, 55 bp, Artificial
  Synthetic oligonucleotide
ggctggctagcccgggtacgcaacgagtcatttatgcggaacagtgtctgtccag

SEQ ID NO: 192301 - DNA, 55 bp, Artificial
  Synthetic oligonucleotide
ggctgatggctcacacgacggcaaaccttgcgcctatcctcgaaaggctcggtgc

SEQ ID NO: 192302 - DNA, 55 bp, Artificial
  Synthetic oligonucleotide
gctccggggcttttcggcgcatattcgaagatatcttggccatgcatcggactcg

SEQ ID NO: 192303 - DNA, 55 bp, Artificial
  Synthetic oligonucleotide
gaacgctatcattcctgagtggagtccttccatactggtcagttttgaatggcga

SEQ ID NO: 192304 - DNA, 55 bp, Artificial
  Synthetic oligonucleotide
agagataaagttgcagtaatcgcagtttggtaattttgcagtacgaatcggctga

SEQ ID NO: 192305 - DNA, 55 bp, Artificial
  Synthetic oligonucleotide
acaacggggctgcggaactcgcacgttccgaccagctgccacgtgctcaaacagt

SEQ ID NO: 192306 - DNA, 54 bp, Artificial
  Synthetic oligonucleotide
cgacagcggggtccgtattgcagatggatgtgttgctatacggtgccagattgt

SEQ ID NO: 192307 - DNA, 54 bp, Artificial
  Synthetic oligonucleotide
tcttcattgctggttatgtcagataatacgccgcttgggattattaccgagcgt

SEQ ID NO: 192308 - DNA, 53 bp, Artificial
  Synthetic oligonucleotide
agtgcggactagttgtatggacacaacgtgccgtgcaatttgaagaagagcgg

SEQ ID NO: 192309 - DNA, 53 bp, Artificial
  Synthetic oligonucleotide
actgagactgcccacatccgcgttacccggtgagcccgtaaagcttaatctga

SEQ ID NO: 192310 - DNA, 53 bp, Artificial
  Synthetic oligonucleotide
catgggaacgggtcgctggaattgcccacagtgtagcagaggggtcatcgtct

SEQ ID NO: 192311 - DNA, 53 bp, Artificial
  Synthetic oligonucleotide
tttgcgcaacaattttagaattgcccaacaccaccgggtagctgatactgtgt

SEQ ID NO: 192312 - DNA, 52 bp, Artificial
  Synthetic oligonucleotide
ataatgcccgtattgatcggagacataactccggacatcagcttgcaaccca

SEQ ID NO: 192313 - DNA, 51 bp, Artificial
  Synthetic oligonucleotide
ccctgacgaatatccattttatagggcgacagcgtaggcgtatcaatactg

SEQ ID NO: 192314 - DNA, 50 bp, Artificial
  Synthetic oligonucleotide
agtcagattgcagcggtgcgcaagtgcagtggaacgaggctgaaccggga

SEQ ID NO: 192315 - DNA, 55 bp, Artificial
  Synthetic oligonucleotide
caggacactcaacttcagggcgacgctcgacaaagtggacgcctatactggtgcc

SEQ ID NO: 192316 - DNA, 50 bp, Artificial
  Synthetic oligonucleotide
agtccgggccaactgcggacagtcgcgccaaggattcagaagctgatggt

SEQ ID NO: 192317 - DNA, 50 bp, Artificial
  Synthetic oligonucleotide
agtgatcgcggcacggtcagcctcatccgctacgatcagtgcggatagcc

SEQ ID NO: 192318 - DNA, 50 bp, Artificial
  Synthetic oligonucleotide
agtgccgcgctcgactgtttgcagtagcaccgggataggcttgctgcgtg

SEQ ID NO: 192319 - DNA, 50 bp, Artificial
  Synthetic oligonucleotide
agtggattgcctgcctttggtacaaccacggcctaccccttgcgggtgta

SEQ ID NO: 192320 - DNA, 50 bp, Artificial
  Synthetic oligonucleotide
atatcatgcggcagacgaaatcactgcacgcctccagccgcggtttgctg

SEQ ID NO: 192321 - DNA, 50 bp, Artificial
  Synthetic oligonucleotide
tggacgagctcttttaccagaacgagaggtttattcggaactatctgctg

SEQ ID NO: 192322 - DNA, 50 bp, Artificial
  Synthetic oligonucleotide
atatgccaccacggcgtgcccagtgagtttgtctcgctacgcatgcagct

SEQ ID NO: 192323 - DNA, 50 bp, Artificial
  Synthetic oligonucleotide
atccgcggagctcgaacttggtgagtggccggtaggcagggcgcggtgcg

SEQ ID NO: 192324 - DNA, 50 bp, Artificial
  Synthetic oligonucleotide
atcgggatgatcgctcccacagagacgcgctccacgggtcacagattcgc

SEQ ID NO: 192325 - DNA, 50 bp, Artificial
  Synthetic oligonucleotide
atgacgggtggctggttcgtgctgatccacgaggtatatccgcacggcga

SEQ ID NO: 192326 - DNA, 55 bp, Artificial
  Synthetic oligonucleotide
cagtaaccgatgccagtaataatgtgtacacagtcgtcgatagctacatctacac

SEQ ID NO: 192327 - DNA, 50 bp, Artificial
  Synthetic oligonucleotide
atgcacgctagcggaaagcataacgccactcccttcgcgcagcggacatc

SEQ ID NO: 192328 - DNA, 50 bp, Artificial
  Synthetic oligonucleotide
atgcgatgcagctcacccagggggcgatcttccgtcactttgcaaccaag

SEQ ID NO: 192329 - DNA, 50 bp, Artificial
  Synthetic oligonucleotide
atggcttccaggacacgcggactgacatcggaaggaccggggcccatcag

SEQ ID NO: 192330 - DNA, 50 bp, Artificial
  Synthetic oligonucleotide
caaattccggatgatgcctgagcgccagatcgtaccgctcaagtgccgcg

SEQ ID NO: 192331 - DNA, 50 bp, Artificial
  Synthetic oligonucleotide
caacagcactacgcccgagccttgccacaagctgcccgtggtttgcgcaa

SEQ ID NO: 192332 - DNA, 50 bp, Artificial
  Synthetic oligonucleotide
caacggcgtcataagacacaacccacggtctacggaagcgggggctaccg

SEQ ID NO: 192333 - DNA, 50 bp, Artificial
  Synthetic oligonucleotide
cagcgtcccgtgttctcctatcgcttgtcggtgttgcacttctgggcgct

SEQ ID NO: 192334 - DNA, 50 bp, Artificial
  Synthetic oligonucleotide
cacccgatacgagcctggccttgcacagaccgcaattacccccgctgcac

SEQ ID NO: 192335 - DNA, 50 bp, Artificial
  Synthetic oligonucleotide
cagccatcgacccgcatgaccaggcatccggcttcgtcgtgatcgttctg

SEQ ID NO: 192336 - DNA, 50 bp, Artificial
  Synthetic oligonucleotide
acggcggtctgctactccgtcgcatgtcctgactggcacggaatcatgcg

SEQ ID NO: 192337 - DNA, 55 bp, Artificial
  Synthetic oligonucleotide
caagcagtgcagtcctggcttgtggtagagcgttggtgatttcccagcgtcaccc

SEQ ID NO: 192338 - DNA, 50 bp, Artificial
  Synthetic oligonucleotide
acggcctgcgcagtcgggacgctgctggcaagaacagctttttcgtgtcg

SEQ ID NO: 192339 - DNA, 50 bp, Artificial
  Synthetic oligonucleotide
acggactcctccatacggcgggtagcctcaattagcagcaggtctccggc

SEQ ID NO: 192340 - DNA, 50 bp, Artificial
  Synthetic oligonucleotide
acgccacaccctgcgatcggtgcttcggactgcatgacttgccatacgac

SEQ ID NO: 192341 - DNA, 50 bp, Artificial
  Synthetic oligonucleotide
accggggaaaccatacgccgcgcatcgaacttgctggggcagtgatgcaa

SEQ ID NO: 192342 - DNA, 50 bp, Artificial
  Synthetic oligonucleotide
accgcgccccaaccggaatcaggcgttgcaatcaacgcgcctcatactca

SEQ ID NO: 192343 - DNA, 50 bp, Artificial
  Synthetic oligonucleotide
accgcatcatgttgcccggaagaaagcagacggggcgtctggcctatcac

SEQ ID NO: 192344 - DNA, 50 bp, Artificial
  Synthetic oligonucleotide
accgcagagttttgctgcgccatcgtaggtcagtgaacgccgcgcaacca

SEQ ID NO: 192345 - DNA, 50 bp, Artificial
  Synthetic oligonucleotide
accccgtgttttgcgaaaacccgttccatcgcactgcgcgtaccggatcc

SEQ ID NO: 192346 - DNA, 50 bp, Artificial
  Synthetic oligonucleotide
acatcggcactatagccccgtccggcaaagtggcattcatgcgttgcgca

SEQ ID NO: 192347 - DNA, 50 bp, Artificial
  Synthetic oligonucleotide
acacgacttcttgcaaggttcgcccgaatggcacgcacaccgcgcaaccc

SEQ ID NO: 192348 - DNA, 55 bp, Artificial
  Synthetic oligonucleotide
attactgttgaaaagcgcgcgattacaatcgttagcgagattcctgtcaagtctt

SEQ ID NO: 192349 - DNA, 50 bp, Artificial
  Synthetic oligonucleotide
acaccttgtaggtcggcagtgggtcgaatgccggatgtcgcgtgagaccg

SEQ ID NO: 192350 - DNA, 50 bp, Artificial
  Synthetic oligonucleotide
aatgctgcttgcgctaggatttgtcgagactgcaaccagccgggcactgc

SEQ ID NO: 192351 - DNA, 50 bp, Artificial
  Synthetic oligonucleotide
aatgcgacctgccatgcgaggtgcaacgtgggcgagtctgtcctgattcg

SEQ ID NO: 192352 - DNA, 50 bp, Artificial
  Synthetic oligonucleotide
aatgcagagggaccagcgtgcgagttacctggccgttccaggaatcgtcc

SEQ ID NO: 192353 - DNA, 50 bp, Artificial
  Synthetic oligonucleotide
aaggctcggctgcagcggttgacaggcaagttacacccctctgccgacac

SEQ ID NO: 192354 - DNA, 50 bp, Artificial
  Synthetic oligonucleotide
aaggcagtgggtgagttgcaggcggcatatcgagaggcagcccgtcacga

SEQ ID NO: 192355 - DNA, 50 bp, Artificial
  Synthetic oligonucleotide
aaggcactacggcggtctgctactccgtcgcatgtcctgactggcacgga

SEQ ID NO: 192356 - DNA, 50 bp, Artificial
  Synthetic oligonucleotide
aaggacccaacttcccggtggggcggcagaccagtgtgttgcgctggtag

SEQ ID NO: 192357 - DNA, 50 bp, Artificial
  Synthetic oligonucleotide
aagctgccgagcgctttaagcaagtcgccgaaaagctgacccgtggccgg

SEQ ID NO: 192358 - DNA, 50 bp, Artificial
  Synthetic oligonucleotide
aagcatcgcgcgaccgcagtagcgaacagtatctggtggggctggggaag

SEQ ID NO: 192359 - DNA, 55 bp, Artificial
  Synthetic oligonucleotide
ccgctgtaatcaatcggttccaaggcgtggcagttgccagaaacaccgtggtgtg

SEQ ID NO: 192360 - DNA, 50 bp, Artificial
  Synthetic oligonucleotide
aacggtcgtcaatgtcttgaatggcgtcaaacattccgtcgtacagcatg

SEQ ID NO: 192361 - DNA, 50 bp, Artificial
  Synthetic oligonucleotide
aacggaggctgaggccagttaccggcgtgctctcgaactttgcccggatt

SEQ ID NO: 192362 - DNA, 50 bp, Artificial
  Synthetic oligonucleotide
aacccggaccgctcctgactcaccctgactgtagattcgcgccggaccga

SEQ ID NO: 192363 - DNA, 50 bp, Artificial
  Synthetic oligonucleotide
aaacctgtcgctcccgacgcatcgacgccagtcacttgccgcaacggggg

SEQ ID NO: 192364 - DNA, 50 bp, Artificial
  Synthetic oligonucleotide
aaaccgcctactcacaggcaacgctcaaccgcattacagcacatggcgcg

SEQ ID NO: 192365 - DNA, 50 bp, Artificial
  Synthetic oligonucleotide
aaaatactggcgtgcaggcggcacaagcgatgcgcagatcattcggcgcg

SEQ ID NO: 192366 - DNA, 50 bp, Artificial
  Synthetic oligonucleotide
agtaggcacgacgccgggacaacacaggatggactcgcgctgcactgtcc

SEQ ID NO: 192367 - DNA, 50 bp, Artificial
  Synthetic oligonucleotide
aggttcagtcaaagcgcgcactaggttggcacgaatggtcgcgtcggctt

SEQ ID NO: 192368 - DNA, 50 bp, Artificial
  Synthetic oligonucleotide
aggtggcggggcgaaatatgggacaaacgcaagagcggccagatttaccc

SEQ ID NO: 192369 - DNA, 50 bp, Artificial
  Synthetic oligonucleotide
aggtgcaagtcgtctacctgggcagtgcgatgggttaccagaagccgcgt

SEQ ID NO: 192370 - DNA, 55 bp, Artificial
  Synthetic oligonucleotide
ccggtttccgggcatacgcatacggtgttcgctctgatagtgtccgtgtccgttg

SEQ ID NO: 192371 - DNA, 50 bp, Artificial
  Synthetic oligonucleotide
agggctcagtacgcctgcgcttactccgtaccacgtcagcaaagttgcga

SEQ ID NO: 192372 - DNA, 50 bp, Artificial
  Synthetic oligonucleotide
agggaacgggggcgcaggaaggttttgtcaaagtgcgtccggaactgcag

SEQ ID NO: 192373 - DNA, 50 bp, Artificial
  Synthetic oligonucleotide
aggcgctcagtcagcgactggcacgctttattgcggtctacccgtacggg

SEQ ID NO: 192374 - DNA, 50 bp, Artificial
  Synthetic oligonucleotide
aggcgcactcaccaccgttgccacgcaagtcgtgtcctactacttcggtt

SEQ ID NO: 192375 - DNA, 50 bp, Artificial
  Synthetic oligonucleotide
agcttggtcgcggaagagtccttcccgatcaacgttgtggcaccgtggcg

SEQ ID NO: 192376 - DNA, 50 bp, Artificial
  Synthetic oligonucleotide
agctctcggctcgggtcgacttgcgcatcccttcagccttggttgagggc

SEQ ID NO: 192377 - DNA, 50 bp, Artificial
  Synthetic oligonucleotide
agctcgtgctgggtaacggttccaatgacctgctggagttggccgcgtgc

SEQ ID NO: 192378 - DNA, 50 bp, Artificial
  Synthetic oligonucleotide
agctaatctggtcggacataccttgctggtcggaacgacgcgggtgggta

SEQ ID NO: 192379 - DNA, 50 bp, Artificial
  Synthetic oligonucleotide
agcggacgtgcgcaacttgagccgtacacccgggaaatcttgcatgcaat

SEQ ID NO: 192380 - DNA, 50 bp, Artificial
  Synthetic oligonucleotide
agcgcagcgctcacgccccttcgcagaaaaggatttaaccgagttgcgtc

SEQ ID NO: 192381 - DNA, 55 bp, Artificial
  Synthetic oligonucleotide
caccaccatagcgataccgatcgtacggtgaccgcaccgaaatgagtgtccgctg

SEQ ID NO: 192382 - DNA, 55 bp, Artificial
  Synthetic oligonucleotide
gacgccggtttcgcattccacgctgaacgtcacagaggcaccacggatagccacc

SEQ ID NO: 192383 - DNA, 55 bp, Artificial
  Synthetic oligonucleotide
gagggacgaatgtgccgtctgccgggactgttgagccctgaatccgatccgcgtt

SEQ ID NO: 192384 - DNA, 55 bp, Artificial
  Synthetic oligonucleotide
gatcacagtggttcgcttgacccgtcctccaggcgccgtttagtctcccgtatgc

SEQ ID NO: 192385 - DNA, 55 bp, Artificial
  Synthetic oligonucleotide
gcgtgactgaaaaccgatccgacggatggtcaactccacgttgccactgcctgtg

SEQ ID NO: 192386 - DNA, 55 bp, Artificial
  Synthetic oligonucleotide
tgcgagttcacgcgagggtgctgaagtgaagaggcggtgatgctcccgaatctgt

SEQ ID NO: 192387 - DNA, 55 bp, Artificial
  Synthetic oligonucleotide
ggccaccgtatcggttgagaatggttctcaaggtaacggcttgaagatacccgag

SEQ ID NO: 192388 - DNA, 55 bp, Artificial
  Synthetic oligonucleotide
ggcgctcaatgtgcgctacgtgggttcgctcgttgccgacttccatcgcaacttg

SEQ ID NO: 192389 - DNA, 55 bp, Artificial
  Synthetic oligonucleotide
tgccgcgtgcggacaagtcgccgaatcggctacggatcactgtgcatcacctgtg

SEQ ID NO: 192390 - DNA, 55 bp, Artificial
  Synthetic oligonucleotide
tgacgtctcccactttgatgcttacaagggagtcgatggaggttcccagtggaat

SEQ ID NO: 192391 - DNA, 55 bp, Artificial
  Synthetic oligonucleotide
tattcggccggtccgcctgcggtggtcctcaccgtgttctgggcctggtacgcga

SEQ ID NO: 192392 - DNA, 55 bp, Artificial
  Synthetic oligonucleotide
cacgcgcggtcatgttgagtgtcgcggaatagatctgcgggcgattggctggaat

SEQ ID NO: 192393 - DNA, 54 bp, Artificial
  Synthetic oligonucleotide
acggacaattcagtacatgacgctttctccccgccgatgactgactaccacttc

SEQ ID NO: 192394 - DNA, 54 bp, Artificial
  Synthetic oligonucleotide
ggagacgttgtggagagcaagcataggcgacacgacggacccgctgttctcaag

SEQ ID NO: 192395 - DNA, 54 bp, Artificial
  Synthetic oligonucleotide
aaaccccgttcctgattctccgatgtcccagtcgtcctacatgctcgatctccg

SEQ ID NO: 192396 - DNA, 53 bp, Artificial
  Synthetic oligonucleotide
tcttcgaacaccggatagccgctcccaccgaacgcgctcgcatccgaattgag

SEQ ID NO: 192397 - DNA, 53 bp, Artificial
  Synthetic oligonucleotide
gtgtcaggatccaccgtggttagcacgcagcgcgcgcacagtgtaccagcccc

SEQ ID NO: 192398 - DNA, 53 bp, Artificial
  Synthetic oligonucleotide
ctagcgccggggccggacctttcattgggatgtagaaacgggagctggaacca

SEQ ID NO: 192399 - DNA, 53 bp, Artificial
  Synthetic oligonucleotide
aagagtacttcccgattcaacaggactgccgtgccctaccggtggactgttga

SEQ ID NO: 192400 - DNA, 53 bp, Artificial
  Synthetic oligonucleotide
gccggggcgtcgagaaacttgttggcatcgacacgcacgccgtactgaaattg

SEQ ID NO: 192401 - DNA, 51 bp, Artificial
  Synthetic oligonucleotide
ggaccatgcggatcccacgccgaactaccaacggcatccttcgtgtctgga

SEQ ID NO: 192402 - DNA, 51 bp, Artificial
  Synthetic oligonucleotide
accacgtgccgccgtggtgagttgacggaaccgcatccgatcagtggcgat

SEQ ID NO: 192403 - DNA, 55 bp, Artificial
  Synthetic oligonucleotide
acaacggtcgcccgtgctctgtcgctctccgctcgtgacgcaagagacgcggtcc

SEQ ID NO: 192404 - DNA, 50 bp, Artificial
  Synthetic oligonucleotide
aagtcacaccgcgggcacactccatgcgatgccactcctactctgtcacg

SEQ ID NO: 192405 - DNA, 50 bp, Artificial
  Synthetic oligonucleotide
aagggtggcaacgtgcgaccgtattccgcgtcccatgtttgccaatcgga

SEQ ID NO: 192406 - DNA, 50 bp, Artificial
  Synthetic oligonucleotide
aagggctatcggcgctcggcccctccgtgacacagcatgtcacatccgtg

SEQ ID NO: 192407 - DNA, 50 bp, Artificial
  Synthetic oligonucleotide
aagcgccagagcggtcagtcagggggcatgtgtgttggcccggtagcgct

SEQ ID NO: 192408 - DNA, 50 bp, Artificial
  Synthetic oligonucleotide
aagaacacacgcgccattcagttcacgagtgtgccgcgcgactccatccg

SEQ ID NO: 192409 - DNA, 50 bp, Artificial
  Synthetic oligonucleotide
aactggacgctgccaggtactccttccggtctgccccgtcgtggataggg

SEQ ID NO: 192410 - DNA, 50 bp, Artificial
  Synthetic oligonucleotide
aactcgagacgggtgatgtcggacggtggtggtacccgcacccagaaggt

SEQ ID NO: 192411 - DNA, 50 bp, Artificial
  Synthetic oligonucleotide
aactccgggtcttgaaactggtggtgtcgcgtcaggcgcacctaccgcca

SEQ ID NO: 192412 - DNA, 50 bp, Artificial
  Synthetic oligonucleotide
aacgtcgggtatcgcgcaagacggccagtccaccgatgcccaattccacg

SEQ ID NO: 192413 - DNA, 50 bp, Artificial
  Synthetic oligonucleotide
aacgatggtccgtgctctccgacgatcgacccgccattggcacaccggtt

SEQ ID NO: 192414 - DNA, 55 bp, Artificial
  Synthetic oligonucleotide
cacgttccgtgcaatcacgcgtgtgaccgtactgttcccacgtccggagacccga

SEQ ID NO: 192415 - DNA, 50 bp, Artificial
  Synthetic oligonucleotide
aacgacacggcacttcgaaggcacggggaagacagatggcgaaggcgttt

SEQ ID NO: 192416 - DNA, 50 bp, Artificial
  Synthetic oligonucleotide
aaccctgacacagcgacactggctggccaattgttggtcgaagcgcgaac

SEQ ID NO: 192417 - DNA, 50 bp, Artificial
  Synthetic oligonucleotide
aaccaagagcaacgtccgaagctgccttcgcgcggaagtctgacacagca

SEQ ID NO: 192418 - DNA, 50 bp, Artificial
  Synthetic oligonucleotide
aacatgggcgggattcgaagcagaggtgggacctcacgcacaatgccccg

SEQ ID NO: 192419 - DNA, 50 bp, Artificial
  Synthetic oligonucleotide
aacaggggctctgtcgtgcagcggtcttgaacggtcacatcgcagacgat

SEQ ID NO: 192420 - DNA, 50 bp, Artificial
  Synthetic oligonucleotide
aacactcccgcatcgaccacctactgccatgcatctgcacacgcttcgcc

SEQ ID NO: 192421 - DNA, 50 bp, Artificial
  Synthetic oligonucleotide
aacacatgaaccgactgcgcccccatacccgcaacagtccacgagtggtc

SEQ ID NO: 192422 - DNA, 50 bp, Artificial
  Synthetic oligonucleotide
aaagaccctagcatcgcctcagtgcctcgccagcacagtgctcacacgag

SEQ ID NO: 192423 - DNA, 50 bp, Artificial
  Synthetic oligonucleotide
aaaaccgccgcgccacagtgtaccgatggtgggatcagtggcaatggccg

SEQ ID NO: 192424 - DNA, 50 bp, Artificial
  Synthetic oligonucleotide
acaggtggcgtcacgcgaatggatgggacgaccagcgtcgataggggact

SEQ ID NO: 192425 - DNA, 55 bp, Artificial
  Synthetic oligonucleotide
catgcgtaccgtcgccaaaccgcacttcgcctgtcgtacgatcgagaacgtatac

SEQ ID NO: 192426 - DNA, 50 bp, Artificial
  Synthetic oligonucleotide
acagtgggtgccgcctcactgatcgacggcagtatgacacgactggtcgc

SEQ ID NO: 192427 - DNA, 50 bp, Artificial
  Synthetic oligonucleotide
acatgggtcaaccgcacctgagcgtcacgtgcattgacagcgatccctgc

SEQ ID NO: 192428 - DNA, 50 bp, Artificial
  Synthetic oligonucleotide
accacagcggtggccagtgtgacgaaccgcaggttgcgcgctaagttcat

SEQ ID NO: 192429 - DNA, 50 bp, Artificial
  Synthetic oligonucleotide
acagcgccaaactccgggcgctcgcccacactcactattcactgcgggtt

SEQ ID NO: 192430 - DNA, 50 bp, Artificial
  Synthetic oligonucleotide
accagccccggcgcgagatacacgtatggtcgcccccagggatcattggg

SEQ ID NO: 192431 - DNA, 50 bp, Artificial
  Synthetic oligonucleotide
accatacccggccagaccgcataccatgggcaggtggctccttgccaaga

SEQ ID NO: 192432 - DNA, 50 bp, Artificial
  Synthetic oligonucleotide
accatgcaccggaatgtctcgcgcctgacacgatccatggccaagtggcg

SEQ ID NO: 192433 - DNA, 50 bp, Artificial
  Synthetic oligonucleotide
acccctccgacagggacagactgtcatagggttgcccacgagacccacca

SEQ ID NO: 192434 - DNA, 50 bp, Artificial
  Synthetic oligonucleotide
acccctgtgtggggaccgcctgagatgtgcaccgaccgattgtgtgctca

SEQ ID NO: 192435 - DNA, 50 bp, Artificial
  Synthetic oligonucleotide
acccgtctcatcgtcagaccgggtgccacagccacaccctacgatgtgca

SEQ ID NO: 192436 - DNA, 55 bp, Artificial
  Synthetic oligonucleotide
ccaatctccctctccggactccatctcccgtgtgcataactggccaaatcccggg

SEQ ID NO: 192437 - DNA, 50 bp, Artificial
  Synthetic oligonucleotide
accctcggactcgtgcaattgttgcccacgcagctcgaaacggcagtcca

SEQ ID NO: 192438 - DNA, 50 bp, Artificial
  Synthetic oligonucleotide
acagcatgagccgcgatgcgctactgccatcactgttcgcccgtgtgcat

SEQ ID NO: 192439 - DNA, 50 bp, Artificial
  Synthetic oligonucleotide
acagcagatcgtaggtggacggattcaccagccccggcgcgagatacacg

SEQ ID NO: 192440 - DNA, 50 bp, Artificial
  Synthetic oligonucleotide
acagatccgaccacgcgacaccgtactcccgatgtatccgctgggctcga

SEQ ID NO: 192441 - DNA, 50 bp, Artificial
  Synthetic oligonucleotide
aatggacttatcctgcagcttcaacgcagcgctctgccgcgaggcctgat

SEQ ID NO: 192442 - DNA, 50 bp, Artificial
  Synthetic oligonucleotide
aatgacgcctcgcagcaccgccgttgacagggggtcgagtggggacacga

SEQ ID NO: 192443 - DNA, 50 bp, Artificial
  Synthetic oligonucleotide
ccatgcttgttcatcgcccctgaagcatcgtttctcacggagcgacaaac

SEQ ID NO: 192444 - DNA, 55 bp, Artificial
  Synthetic oligonucleotide
cccaccaacccctccacttgcttgcgaacacgtatcggccagaggggcgaacgat

SEQ ID NO: 192445 - DNA, 55 bp, Artificial
  Synthetic oligonucleotide
gaatgtgctattccccgtgccattggactctctgacgacggtcaacacgtacatt

SEQ ID NO: 192446 - DNA, 55 bp, Artificial
  Synthetic oligonucleotide
gacgcacctgtagtgagtcgagtgcacgcccgggctcacccacaggggcaaggta

SEQ ID NO: 192447 - DNA, 53 bp, Artificial
  Synthetic oligonucleotide
cacgccgccacccgtttaacagccttttgcacatgggtaggggatggaaaaag

SEQ ID NO: 192448 - DNA, 57 bp, Artificial
  Synthetic oligonucleotide
cggctttacgtggcgacaagacgataaacgagcttgccaccctctacagtgtacacc

SEQ ID NO: 192449 - DNA, 55 bp, Artificial
  Synthetic oligonucleotide
cgccaccgccgcacgttagctccaggacttcgcatttaagctccaggacttcgca

SEQ ID NO: 192450 - DNA, 55 bp, Artificial
  Synthetic oligonucleotide
cgcagcttatgcattgatccttgtccacccatggtttgcctgccaccgtatcccc

SEQ ID NO: 192451 - DNA, 55 bp, Artificial
  Synthetic oligonucleotide
cgcaatgcagcttgacctacatgcagtcgcctacaacctggtacgaatgtccaac

SEQ ID NO: 192452 - DNA, 55 bp, Artificial
  Synthetic oligonucleotide
cgatgttcgtacagcttgcgatactgttctgccgacggtttctggacgaccggcc

SEQ ID NO: 192453 - DNA, 55 bp, Artificial
  Synthetic oligonucleotide
cgatctgcctaaggctcgtatcaggacgcatcgcctctatcaacgggcgaacgtg

SEQ ID NO: 192454 - DNA, 55 bp, Artificial
  Synthetic oligonucleotide
cgactggacatagtgaatgaccccgtcgatgttcctcctgtcgatttccatgctg

SEQ ID NO: 192455 - DNA, 55 bp, Artificial
  Synthetic oligonucleotide
cgacccgttgaagttcctgggtgccacagttgacaccatagtcctcgaagtcccc

SEQ ID NO: 192456 - DNA, 55 bp, Artificial
  Synthetic oligonucleotide
cgaatggaaggctgcagaaaaggactccaaaggatggctggtcataacaggcgag

SEQ ID NO: 192457 - DNA, 55 bp, Artificial
  Synthetic oligonucleotide
cctggccagcagtgttagcggcaagggtttggcagctttcccgggtgttagcctg

SEQ ID NO: 192458 - DNA, 50 bp, Artificial
  Synthetic oligonucleotide
cctccggtttacacagaacggttttgggccggtacgcgaggactggaccc

SEQ ID NO: 192459 - DNA, 54 bp, Artificial
  Synthetic oligonucleotide
agagcggttccccccctgcgctctataatactcacgctttttcggacaggtagt

SEQ ID NO: 192460 - DNA, 51 bp, Artificial
  Synthetic oligonucleotide
ccgtcgccccgggtagaggtgtaagtttaggtagctggtactaaatttcga

SEQ ID NO: 192461 - DNA, 55 bp, Artificial
  Synthetic oligonucleotide
ccggaccagctctttggaacctgcgtgatgcacctcagccgacgctgcaatctgc

SEQ ID NO: 192462 - DNA, 55 bp, Artificial
  Synthetic oligonucleotide
ccgcggctgtgtaactgttcgtgtgcgttaccactcgagcaccggcgtattcgca

SEQ ID NO: 192463 - DNA, 55 bp, Artificial
  Synthetic oligonucleotide
ccgcgatgctttcagcatcggctatggcggaagtaaccgctaaaagcgtgatcgc

SEQ ID NO: 192464 - DNA, 55 bp, Artificial
  Synthetic oligonucleotide
ccgactcctgtttcgctatatctgcactgaaaccgcggtcccctttgcactcggg

SEQ ID NO: 192465 - DNA, 52 bp, Artificial
  Synthetic oligonucleotide
ccgaaggtcggtacgattcatgttgccggagtttcttacgggcaacttcccg

SEQ ID NO: 192466 - DNA, 55 bp, Artificial
  Synthetic oligonucleotide
cccttcgggcaattatgttgatgtcgaggggaggaaagagcgccttgtgcagtcg

SEQ ID NO: 192467 - DNA, 54 bp, Artificial
  Synthetic oligonucleotide
ccctggcaccgcgaattccgggcggctattccgtcgaaagggatacgctggttc

SEQ ID NO: 192468 - DNA, 55 bp, Artificial
  Synthetic oligonucleotide
cccgttgagggcgttcgtctggtagcccatgaatttgtacatcccgtgaaactcg

SEQ ID NO: 192469 - DNA, 55 bp, Artificial
  Synthetic oligonucleotide
cccgctggactcaaaccttgacaatcactcgtgcaattgaataacatgccgtgtt

SEQ ID NO: 192470 - DNA, 60 bp, Artificial
  Synthetic oligonucleotide
aactcgtattagagcaaaatctgtcgctttcagtagcatccaagcgactgggtatcccag

SEQ ID NO: 192471 - DNA, 55 bp, Artificial
  Synthetic oligonucleotide
acggtttgccgcacgaagagagaggagcgtcctttcctggagcaaagacctgcgt

SEQ ID NO: 192472 - DNA, 55 bp, Artificial
  Synthetic oligonucleotide
ccactaaccgatagagaccggccatgatctacacacgacacggattcaggcatcc

SEQ ID NO: 192473 - DNA, 53 bp, Artificial
  Synthetic oligonucleotide
ccacagcaccggaaaagaagtattcgacgtggagggaccggtggatggaaaac

SEQ ID NO: 192474 - DNA, 55 bp, Artificial
  Synthetic oligonucleotide
gtccctgagcccgatgctcttcatgtagcattccacagcgtactccaccgtaccc

SEQ ID NO: 192475 - DNA, 55 bp, Artificial
  Synthetic oligonucleotide
gtcatctggatagacgggaacctggaggatgtttgcacacgaggcgcagcacgag

SEQ ID NO: 192476 - DNA, 55 bp, Artificial
  Synthetic oligonucleotide
gtaagtataacaggtccatgcccaatgtcagaggttgggtaatctaccgaagaga

SEQ ID NO: 192477 - DNA, 55 bp, Artificial
  Synthetic oligonucleotide
ggttctcggaattgcaagcggggagacgctcaaggatgcgcctaagggatgagtc

SEQ ID NO: 192478 - DNA, 55 bp, Artificial
  Synthetic oligonucleotide
ggtgaaatgtggcgcctgccattccatgcgaagtcttgttgcgggttacaagtcg

SEQ ID NO: 192479 - DNA, 55 bp, Artificial
  Synthetic oligonucleotide
ggtctgcccgtacacctgattccttgtccttcggatgggaatataaccgctggca

SEQ ID NO: 192480 - DNA, 52 bp, Artificial
  Synthetic oligonucleotide
ggtcgcaagggatttcaacgggttagcgttttcggggcttcttcgtggcgtg

SEQ ID NO: 192481 - DNA, 57 bp, Artificial
  Synthetic oligonucleotide
agaggtcatacactgtgggcgcccgaaatgccttgccgccggataatttgaacgtgg

SEQ ID NO: 192482 - DNA, 55 bp, Artificial
  Synthetic oligonucleotide
ggtccgacccgcaagaggtctccccaaactgacaacgcaagtcaaactgaggcta

SEQ ID NO: 192483 - DNA, 54 bp, Artificial
  Synthetic oligonucleotide
ggtcattccctgggacctatcattcgtgggaggggtcaacgaggtcgtaaggaa

SEQ ID NO: 192484 - DNA, 55 bp, Artificial
  Synthetic oligonucleotide
tttgccctctcgccccatgggatagcctcccggatgaaatccgcgtccagttccg

SEQ ID NO: 192485 - DNA, 55 bp, Artificial
  Synthetic oligonucleotide
ggtaaggactttcaatggagcgaatgcgtttcttggtaatccagccaaccaggcg

SEQ ID NO: 192486 - DNA, 50 bp, Artificial
  Synthetic oligonucleotide
ggggttttagggtcccggtggggaaaggtgacttgcaccaacgctttcgc

SEQ ID NO: 192487 - DNA, 55 bp, Artificial
  Synthetic oligonucleotide
ggggccatgaatcaaggcgggcgctctttggacggaaaacccgcctcaatctcac

SEQ ID NO: 192488 - DNA, 55 bp, Artificial
  Synthetic oligonucleotide
ggggcatgtgacgcagcaattcaagcctcgggaggtctatgtcgcctcctctttc

SEQ ID NO: 192489 - DNA, 52 bp, Artificial
  Synthetic oligonucleotide
aaaatccccgcttcggttcctggggaggatcggggaccggtacaggatcagc

SEQ ID NO: 192490 - DNA, 55 bp, Artificial
  Synthetic oligonucleotide
gggcggagatacctctttgatttagcgacactttccaatgaacgacctgcgcttg

SEQ ID NO: 192491 - DNA, 55 bp, Artificial
  Synthetic oligonucleotide
gggccttcgtccaccctgaagtaggcatggccgtgcagttgggctagttgagagg

SEQ ID NO: 192492 - DNA, 60 bp, Artificial
  Synthetic oligonucleotide
acgcaacgtgagccacatataaatgtctagggccataggtgattgtttcagcgccgcaag

SEQ ID NO: 192493 - DNA, 55 bp, Artificial
  Synthetic oligonucleotide
gggccagggtgtctaggaattccggcgcaaaccctttcggcgctaatccatagcg

SEQ ID NO: 192494 - DNA, 55 bp, Artificial
  Synthetic oligonucleotide
gggagattctagccggccctgacgtgtctgtccagcgcacgagggatgcctgagg

SEQ ID NO: 192495 - DNA, 52 bp, Artificial
  Synthetic oligonucleotide
gggaccgggtgatatactgaacgttaaggagaacgaggaactaccgaactac

SEQ ID NO: 192496 - DNA, 55 bp, Artificial
  Synthetic oligonucleotide
ggctccgaggacgtccactatatttccgccgacattttcgtttacaagatcggag

SEQ ID NO: 192497 - DNA, 54 bp, Artificial
  Synthetic oligonucleotide
ggccttcattcgccagaggttggaagccgaaaagccacctacgccggggaactc

SEQ ID NO: 192498 - DNA, 55 bp, Artificial
  Synthetic oligonucleotide
tgcctcgaagggtggcttgtgcgccgtgggccgttacggtactggtctgaacccc

SEQ ID NO: 192499 - DNA, 55 bp, Artificial
  Synthetic oligonucleotide
tgcagggctttacgttcattttatgcgcgtaatacttcgaacccttcatgccccg

SEQ ID NO: 192500 - DNA, 55 bp, Artificial
  Synthetic oligonucleotide
aacagagacgtacatggatgaagctatccatcttttcgacaagtggcgtttccca

SEQ ID NO: 192501 - DNA, 55 bp, Artificial
  Synthetic oligonucleotide
tgaattgggataccgttttaccggccaatgtcggctatattaccgccatgatgta

SEQ ID NO: 192502 - DNA, 55 bp, Artificial
  Synthetic oligonucleotide
aaaggaaaggaacgtatatgataggtctgcagaggttaggcgtggcctatcacta

SEQ ID NO: 192503 - DNA, 60 bp, Artificial
  Synthetic oligonucleotide
cggacagagtgacgaaaaaccgacatattcagttgacaaaatgcgtcaatggttgaatga

SEQ ID NO: 192504 - DNA, 55 bp, Artificial
  Synthetic oligonucleotide
tgcgctcgttcgcgtcggcaagggtcgtgcgggagacatcaccacgaaagccgat

SEQ ID NO: 192505 - DNA, 55 bp, Artificial
  Synthetic oligonucleotide
tctttctgactgcacgacaaagtcttcaacgcgagttgtaccaggtcttcagtat

SEQ ID NO: 192506 - DNA, 55 bp, Artificial
  Synthetic oligonucleotide
tcttcccggtgtctgctgctcctttggctgctgcatcggcggccggtttaaggct

SEQ ID NO: 192507 - DNA, 55 bp, Artificial
  Synthetic oligonucleotide
tctggaacgcctctcacaaatggccagtcgcctgccgaagggagtcactcccgtt

SEQ ID NO: 192508 - DNA, 55 bp, Artificial
  Synthetic oligonucleotide
aaccccgtttgctttcatctctcatggtgttgttgtattggagcgcgctttctgc

SEQ ID NO: 192509 - DNA, 55 bp, Artificial
  Synthetic oligonucleotide
tggtatgcataggagcggtacatccgctcttacaaggatactcaatctgctgggg

SEQ ID NO: 192510 - DNA, 55 bp, Artificial
  Synthetic oligonucleotide
tggtttccttccataacccctttgcaggagagcggacataggtggtaagaccgcc

SEQ ID NO: 192511 - DNA, 55 bp, Artificial
  Synthetic oligonucleotide
aaccgacatattcagttgacaaaatgcgtcaatggttgaatgacaacgcaagtga

SEQ ID NO: 192512 - DNA, 55 bp, Artificial
  Synthetic oligonucleotide
tccgtcgataacaggaatcgactggtaaagatccatggtgcggtcgatgaggacc

SEQ ID NO: 192513 - DNA, 55 bp, Artificial
  Synthetic oligonucleotide
tcactggtacctgagcatgggaagctaaagcgtcccgtatgaaacctacccggtt

SEQ ID NO: 192514 - DNA, 56 bp, Artificial
  Synthetic oligonucleotide
atagccaaatggaaggcgtcaacccctaaagaacgttctgcctcgcaagagcactt

SEQ ID NO: 192515 - DNA, 55 bp, Artificial
  Synthetic oligonucleotide
tattatgactgccgttttcatgattgcttacaggatcatttcatgtccccagtgg

SEQ ID NO: 192516 - DNA, 55 bp, Artificial
  Synthetic oligonucleotide
taggcttcgagtgtcctcaagacgtcggaaacctttatcgatatcttgatctgcc

SEQ ID NO: 192517 - DNA, 55 bp, Artificial
  Synthetic oligonucleotide
ttatcaagtctgtataaagctgagatacctgtcggaaggctgtctgaatactgaa

SEQ ID NO: 192518 - DNA, 51 bp, Artificial
  Synthetic oligonucleotide
ttcgggagttcccctttcttgagggcctttgccggttggccgtccgccgtg

SEQ ID NO: 192519 - DNA, 55 bp, Artificial
  Synthetic oligonucleotide
tacaggtcgagtattgggctcccaggaacatctggccatcggaatgtccagctag

SEQ ID NO: 192520 - DNA, 55 bp, Artificial
  Synthetic oligonucleotide
gttcccagaacttgtcagggtgaggcggagtgatgactgtcccaatgggcaacgg

SEQ ID NO: 192521 - DNA, 54 bp, Artificial
  Synthetic oligonucleotide
gtgtcattcacccaaccgtttccccttaactcgcccctgatcgtgacgattccc

SEQ ID NO: 192522 - DNA, 55 bp, Artificial
  Synthetic oligonucleotide
gtcgaccctgactacgcccttctcttggcaagggatgccttgtatcggagcacgg

SEQ ID NO: 192523 - DNA, 55 bp, Artificial
  Synthetic oligonucleotide
gccgtaagccatgagcctgtcaccgattgcagttatagccatgtgttgtatagcg

SEQ ID NO: 192524 - DNA, 51 bp, Artificial
  Synthetic oligonucleotide
gcccgttccttggcccacgtcttaaagctcttctccccggtttcaatttcc

SEQ ID NO: 192525 - DNA, 60 bp, Artificial
  Synthetic oligonucleotide
catgttgtaattccatctcccggcaagccttgtcgagcttcattcggtccttgtcgatgg

SEQ ID NO: 192526 - DNA, 55 bp, Artificial
  Synthetic oligonucleotide
aatggtcgtcttgctcggcgtagcccgtccatcgagacaacggcgggcgagttct

SEQ ID NO: 192527 - DNA, 55 bp, Artificial
  Synthetic oligonucleotide
gccacatataaatgtctagggccataggtgattgtttcagcgccgcaagcgccct

SEQ ID NO: 192528 - DNA, 51 bp, Artificial
  Synthetic oligonucleotide
aattgcgggagtgaacccgttgaacggaggggttaatgttcaaaggcgcgt

SEQ ID NO: 192529 - DNA, 55 bp, Artificial
  Synthetic oligonucleotide
gcatcggccttacctacaccagcaatgcactggaagggaacagcctgaccgagag

SEQ ID NO: 192530 - DNA, 55 bp, Artificial
  Synthetic oligonucleotide
gcagacgaaagcgactatcttcggctcgaaatcgtgctgtttagcttcagcgtgc

SEQ ID NO: 192531 - DNA, 55 bp, Artificial
  Synthetic oligonucleotide
acaaggacgtcgtcggggattgtcgcgagacggtcgagagatgcaagccaatggc

SEQ ID NO: 192532 - DNA, 55 bp, Artificial
  Synthetic oligonucleotide
acaataatcctcgaagctctgataaccccattcccggaagtgaccacgggaactc

SEQ ID NO: 192533 - DNA, 53 bp, Artificial
  Synthetic oligonucleotide
gattccagctccccttcggaaaagcgtccgtagtaaacccgtgccgcgctccc

SEQ ID NO: 192534 - DNA, 55 bp, Artificial
  Synthetic oligonucleotide
gatggtagtagcgttaaagagttttgcgctcaacatgtagacattcctccgctca

SEQ ID NO: 192535 - DNA, 55 bp, Artificial
  Synthetic oligonucleotide
gatacaggtagtcctcatattgtcggtatctattgccttagtcgggatagccttc

SEQ ID NO: 192536 - DNA, 58 bp, Artificial
  Synthetic oligonucleotide
gggtgataatctggtctgcccgtacacctgattccttgtccttcggatgggaatataa

SEQ ID NO: 192537 - DNA, 55 bp, Artificial
  Synthetic oligonucleotide
gaggggcgaaacctatcgaggaagtttcagccgaaccacaacttaggcagtacga

SEQ ID NO: 192538 - DNA, 55 bp, Artificial
  Synthetic oligonucleotide
gagggccgggtgtctcgtaatatcgatgagcggccttccctccacttcctcagtg

SEQ ID NO: 192539 - DNA, 55 bp, Artificial
  Synthetic oligonucleotide
gaggcgccggtagagagaatctggcaactgttgacggactttggactctatcccg

SEQ ID NO: 192540 - DNA, 52 bp, Artificial
  Synthetic oligonucleotide
gagccttttctcgtttcacattttcgttaaacgaggtgtagtccacctttgg

SEQ ID NO: 192541 - DNA, 55 bp, Artificial
  Synthetic oligonucleotide
gagcaaaatctgtcgctttcagtagcatccaagcgactgggtatcccagaaggaa

SEQ ID NO: 192542 - DNA, 55 bp, Artificial
  Synthetic oligonucleotide
gagattagtaacggtagtgcagccatgcaggcataccatagcatgtgtgcttcgg

SEQ ID NO: 192543 - DNA, 55 bp, Artificial
  Synthetic oligonucleotide
gacgtactggcaattaatcaaggcggggcatactacacggccatcgaccagcaag

SEQ ID NO: 192544 - DNA, 55 bp, Artificial
  Synthetic oligonucleotide
ggagtttggctggtctcgcgggacaggtttcgtgcagacttcctgcgggtgtttt

SEQ ID NO: 192545 - DNA, 55 bp, Artificial
  Synthetic oligonucleotide
ggaggcgccttggcaattcaccccgcttccgtcatggcctatgttgttgaccagg

SEQ ID NO: 192546 - DNA, 55 bp, Artificial
  Synthetic oligonucleotide
ggaatccacgtagctgctgacatcgctagtggggtagtcataacctgggccgtag

SEQ ID NO: 192547 - DNA, 56 bp, Artificial
  Synthetic oligonucleotide
agtttcccccgattgagtccatccctatggcgcagtgaaaagagcctttcgaggaa

SEQ ID NO: 192548 - DNA, 53 bp, Artificial
  Synthetic oligonucleotide
aatactggtcaaaagccccctccgtgcggccgtaatcgtaagtaatgcccctg

SEQ ID NO: 192549 - DNA, 55 bp, Artificial
  Synthetic oligonucleotide
gctatccgaccttcgacactacgtcgatctattcggttttcgccgttgaccgcta

SEQ ID NO: 192550 - DNA, 55 bp, Artificial
  Synthetic oligonucleotide
gctaaatccctgtgcggactcgaccgttactaggtagttgcctactaccatgtcc

SEQ ID NO: 192551 - DNA, 55 bp, Artificial
  Synthetic oligonucleotide
gcgtttgccttcggagagagcgtctacggggcgggcagggactatcggtcatttc

SEQ ID NO: 192552 - DNA, 55 bp, Artificial
  Synthetic oligonucleotide
ttttgtgcatctgcagcggggtaacgacaaagtacggggagttgtaataatcggc

SEQ ID NO: 192553 - DNA, 55 bp, Artificial
  Synthetic oligonucleotide
gcgagcgaggagacgaggcgtaccctctgtacgttgagtttccaagcgagcggta

SEQ ID NO: 192554 - DNA, 54 bp, Artificial
  Synthetic oligonucleotide
cgcacgcatcttaggaggttccatggtctttgccgcgaaggtgtccgaggttcc

SEQ ID NO: 192555 - DNA, 54 bp, Artificial
  Synthetic oligonucleotide
acattcgacgatctggcaaacgccttgcacgtctacccttcaataggagaggga

SEQ ID NO: 192556 - DNA, 54 bp, Artificial
  Synthetic oligonucleotide
agaatggtgcgtatagccgatttatcgagagccgatatgctgtcggtcactaat

SEQ ID NO: 192557 - DNA, 54 bp, Artificial
  Synthetic oligonucleotide
acatcagggccagtttcagggacggaatactggatgtccgcatcccgaaaactg

SEQ ID NO: 192558 - DNA, 60 bp, Artificial
  Synthetic oligonucleotide
ccatactctgctaatcatcttcggccccctcttctgcggcaaattgccgctgaattgcca

SEQ ID NO: 192559 - DNA, 46 bp, Artificial
  Synthetic oligonucleotide
cggaaacgagaaagggccgggggtttcccggcccttctgggggtac

SEQ ID NO: 192560 - DNA, 54 bp, Artificial
  Synthetic oligonucleotide
gccggctcaatattccgacttcgatccataaagcgggtacacatggccgagatt

SEQ ID NO: 192561 - DNA, 54 bp, Artificial
  Synthetic oligonucleotide
caggttaaatgcggtgcatatacctgcaatcaaacccggttatacatgttggta

SEQ ID NO: 192562 - DNA, 54 bp, Artificial
  Synthetic oligonucleotide
tctgcactggaggtgaaatctcccaagaggtacgagtaccaactggttccggca

SEQ ID NO: 192563 - DNA, 54 bp, Artificial
  Synthetic oligonucleotide
catatgggtttcctcgggcctccgtttccgctgattagatctccgttgagtgta

SEQ ID NO: 192564 - DNA, 54 bp, Artificial
  Synthetic oligonucleotide
gcgatgcacaacttatctaccgtaatgcataacttatcgagcgcgatgcacgaa

SEQ ID NO: 192565 - DNA, 54 bp, Artificial
  Synthetic oligonucleotide
tcgcgcttccactcgtccgcaccaccgggcctcatgtcaaaccgtcacctgtcg

SEQ ID NO: 192566 - DNA, 54 bp, Artificial
  Synthetic oligonucleotide
ctttgccccgagtagagagtacgccaggagtggtattaatcgcctcgtctactg

SEQ ID NO: 192567 - DNA, 54 bp, Artificial
  Synthetic oligonucleotide
aagggagccgtcctagaggcgctgggaagcacaccggatttctatatgactgga

SEQ ID NO: 192568 - DNA, 54 bp, Artificial
  Synthetic oligonucleotide
gggctccggggcttcaacttccaggcggttctttttctgccgtagcatgtagat

SEQ ID NO: 192569 - DNA, 50 bp, Artificial
  Synthetic oligonucleotide
gttccggaaattttccgtcacttttctcactgctaggggggttgaagggg

SEQ ID NO: 192570 - DNA, 57 bp, Artificial
  Synthetic oligonucleotide
ccaaattacagcctgtttagcggtccatgcccttcccacggtcaatatccttttgca

SEQ ID NO: 192571 - DNA, 54 bp, Artificial
  Synthetic oligonucleotide
ggggaatcccctcgccacaccgtgccagcaaccaattcgtctcatatccgtttg

SEQ ID NO: 192572 - DNA, 54 bp, Artificial
  Synthetic oligonucleotide
gcccaatgacccggtagctgcatatctggccatctgttgataagagctaaatcg

SEQ ID NO: 192573 - DNA, 53 bp, Artificial
  Synthetic oligonucleotide
ccttgaagaactccatgccaatgtacgggatgcggttcggtgccacttcgatg

SEQ ID NO: 192574 - DNA, 53 bp, Artificial
  Synthetic oligonucleotide
ctcgactaggggtaaagatgaactcagaagaacagggcgattacggggcagat

SEQ ID NO: 192575 - DNA, 53 bp, Artificial
  Synthetic oligonucleotide
aggtcaaccggcacgcgtttgtgctccaggggctttatcgcgaaatagtgctg

SEQ ID NO: 192576 - DNA, 53 bp, Artificial
  Synthetic oligonucleotide
gagggatgtgccacgccaacaactcatctgaacatcggaaaggggaagagtga

SEQ ID NO: 192577 - DNA, 53 bp, Artificial
  Synthetic oligonucleotide
ttggctccccagcccttgacggtttcgtggactcggtcacgggatttccaggg

SEQ ID NO: 192578 - DNA, 53 bp, Artificial
  Synthetic oligonucleotide
ataagaatgggctcatccccaatccgcgccacggagcagggctcaatcccaac

SEQ ID NO: 192579 - DNA, 53 bp, Artificial
  Synthetic oligonucleotide
ggtggtgacaatttcccacaccggatacatcaagcgtaatgcggtgaccatgt

SEQ ID NO: 192580 - DNA, 53 bp, Artificial
  Synthetic oligonucleotide
atctcgtaaacgttagaagccttttgtaccagtgtcctccgtggcgcctaaag

SEQ ID NO: 192581 - DNA, 59 bp, Artificial
  Synthetic oligonucleotide
ggttgaaaattctgcgggaccgttcaagcagggtagtcagtgtctgatcaggatttgcg

SEQ ID NO: 192582 - DNA, 53 bp, Artificial
  Synthetic oligonucleotide
atctatctcctggggaccatgaagtcgtttcgcctcgccaagacccctgatct

SEQ ID NO: 192583 - DNA, 52 bp, Artificial
  Synthetic oligonucleotide
cgctggaaacggcggtgcctcccttttgcaaaggagaccccaacggccggag

SEQ ID NO: 192584 - DNA, 53 bp, Artificial
  Synthetic oligonucleotide
gattatgcaatagccttggcccgcatagatgagctaatagatgccgatctagg

SEQ ID NO: 192585 - DNA, 53 bp, Artificial
  Synthetic oligonucleotide
cgtagtcgaaatggacctgctaataaacggcagcacaacatcggcgctgtttt

SEQ ID NO: 192586 - DNA, 52 bp, Artificial
  Synthetic oligonucleotide
ttttaccggccgaccgacgaagcgtgtatccatccgccgtaacgtcatcaac

SEQ ID NO: 192587 - DNA, 52 bp, Artificial
  Synthetic oligonucleotide
ggttataagcgtcaatgggatcgtcttgacactgctttcagcgtcatacttt

SEQ ID NO: 192588 - DNA, 52 bp, Artificial
  Synthetic oligonucleotide
tgatattaatgtctcccgcgtggaatcccgcgttgcacagggtgggcacaat

SEQ ID NO: 192589 - DNA, 52 bp, Artificial
  Synthetic oligonucleotide
agctaccccctgccgctttgggctcccgggctcgtgacggacaacgagatgc

SEQ ID NO: 192590 - DNA, 52 bp, Artificial
  Synthetic oligonucleotide
ctagtgcaaaggcgttgcctgaaagcgcgcgaatggctcttttgtctattgg

SEQ ID NO: 192591 - DNA, 52 bp, Artificial
  Synthetic oligonucleotide
tgaatcaggttgtttacaaagcgcggatcccatgtctgggctatatcatacg

SEQ ID NO: 192592 - DNA, 59 bp, Artificial
  Synthetic oligonucleotide
cggtcacgtaccgtttcgacagattcgatctcttcgcttgtgacatcgatcactcccac

SEQ ID NO: 192593 - DNA, 52 bp, Artificial
  Synthetic oligonucleotide
actgtgccgtcgcctttagcttgatatcaggcgtgtagggcaggtcttttcc

SEQ ID NO: 192594 - DNA, 52 bp, Artificial
  Synthetic oligonucleotide
ttcgtttgtggcgagtcgtgcggtaagctcttctctattaatggttgatact

SEQ ID NO: 192595 - DNA, 52 bp, Artificial
  Synthetic oligonucleotide
accgccttaattatcatggtcagccgatttaaccttaacggtgctgcctcac

SEQ ID NO: 192596 - DNA, 52 bp, Artificial
  Synthetic oligonucleotide
tgggctcgcttgcgactctgatgaaggatggtcggctaggagttgtgacccc

SEQ ID NO: 192597 - DNA, 52 bp, Artificial
  Synthetic oligonucleotide
aagccctatcaggcagttaagtcccttgtctgatgcttacgtcagtcgtccc

SEQ ID NO: 192598 - DNA, 52 bp, Artificial
  Synthetic oligonucleotide
gaaacggccgtaagagtttcctgcgcccgttgtctcactgaattcgacatcg

SEQ ID NO: 192599 - DNA, 52 bp, Artificial
  Synthetic oligonucleotide
gatagttacccaaacgctcatgagtgatctctccgatctcgaccgctctcaa

SEQ ID NO: 192600 - DNA, 52 bp, Artificial
  Synthetic oligonucleotide
tctcgatataccgtgcgggatcggacgacacagtgtggagcttgcgcgacgt

SEQ ID NO: 192601 - DNA, 52 bp, Artificial
  Synthetic oligonucleotide
gtcgcgcatgcatagttgcaagaggttgtgtgccacgctttcccacagccgc

SEQ ID NO: 192602 - DNA, 52 bp, Artificial
  Synthetic oligonucleotide
gcgtgcatctatataacccggccgtggtgcgacctgtcaaccgttttcatga

SEQ ID NO: 192603 - DNA, 55 bp, Artificial
  Synthetic oligonucleotide
ggcgcccgaaatgccttgccgccggataatttgaacgtggttgtgtcaaacggtc

SEQ ID NO: 192604 - DNA, 51 bp, Artificial
  Synthetic oligonucleotide
atccgttcggagagcctcgcttccggagggagagtgacggacgcttgtggt

SEQ ID NO: 192605 - DNA, 51 bp, Artificial
  Synthetic oligonucleotide
tttcgcaggcggaaggcagaatcatcggagcgagtatggggttacgtgacg

SEQ ID NO: 192606 - DNA, 51 bp, Artificial
  Synthetic oligonucleotide
ttgcgcgctgggtcaaacctgcgtcgctctggaattaccgatgcttgtcgc

SEQ ID NO: 192607 - DNA, 51 bp, Artificial
  Synthetic oligonucleotide
agtatccggcagtttgcggggaccaagctcccggaaatagacgtcctgggt

SEQ ID NO: 192608 - DNA, 51 bp, Artificial
  Synthetic oligonucleotide
atgcagaccttatcgaccacaccaaaatgtggaactatgactatggcggcg

SEQ ID NO: 192609 - DNA, 51 bp, Artificial
  Synthetic oligonucleotide
gggaacgcctgcttgaggtatggcgctgcaccgaaaatgttcacgcgccct

SEQ ID NO: 192610 - DNA, 51 bp, Artificial
  Synthetic oligonucleotide
accttcgacgcgagtcggcttctccgcgactcaaccaatgacagggtattg

SEQ ID NO: 192611 - DNA, 51 bp, Artificial
  Synthetic oligonucleotide
aatgattggcgcccagaattcaacggaagtcgctgtttcgaaccggatggg

SEQ ID NO: 192612 - DNA, 51 bp, Artificial
  Synthetic oligonucleotide
cgggtcggacaggatattccaaccccatttcgcacaatcgcgggcggagta

SEQ ID NO: 192613 - DNA, 51 bp, Artificial
  Synthetic oligonucleotide
cgtctcatcacgggtggaccccgcaaagttgcacgcaaggagtcacgtaaa

SEQ ID NO: 192614 - DNA, 54 bp, Artificial
  Synthetic oligonucleotide
cttttgtagtcgatcacgggggcaaggtctttgactctggcggtcggttcctgg

SEQ ID NO: 192615 - DNA, 51 bp, Artificial
  Synthetic oligonucleotide
gtatagagacgccagaagccttgaactattccctttgctcgcttacgcagc

SEQ ID NO: 192616 - DNA, 51 bp, Artificial
  Synthetic oligonucleotide
gtcttcttctgcgtttctcaggataatgagcaaggtgcgaggcgtgcatag

SEQ ID NO: 192617 - DNA, 51 bp, Artificial
  Synthetic oligonucleotide
ccctgatttcctattcgcctcttgtcatcagcttgtcgttcctcgaacacc

SEQ ID NO: 192618 - DNA, 51 bp, Artificial
  Synthetic oligonucleotide
cccgcgtaaaatgttttctgtgccaggtgtgctgtaatgagtagcatccaa

SEQ ID NO: 192619 - DNA, 51 bp, Artificial
  Synthetic oligonucleotide
ccccccccttcagggcatgaaatgcccccaagaggaccatttcgattactg

SEQ ID NO: 192620 - DNA, 51 bp, Artificial
  Synthetic oligonucleotide
tcgggactctaaaatctaaagcgtggctccacagtgcctgttgtgaaaatc

SEQ ID NO: 192621 - DNA, 51 bp, Artificial
  Synthetic oligonucleotide
actgccgatgcgagccacaaagtcaccgctgtttcaccgcaaatgaggccc

SEQ ID NO: 192622 - DNA, 51 bp, Artificial
  Synthetic oligonucleotide
cataatacgtcgcacggaatacagcaagcctttaagaaatccgtacttttc

SEQ ID NO: 192623 - DNA, 51 bp, Artificial
  Synthetic oligonucleotide
cagttatggaaagatggatcgacaatcttgtaacgactgaacctgcccgat

SEQ ID NO: 192624 - DNA, 51 bp, Artificial
  Synthetic oligonucleotide
cacaccgggggcctgggcaaccacaaaggcaataacggccaccgttacacc

SEQ ID NO: 192625 - DNA, 58 bp, Artificial
  Synthetic oligonucleotide
gaggcaattctgtcgaaggttttattcgtgctgtcagtatgactaaaagcgttgtaaa

SEQ ID NO: 192626 - DNA, 50 bp, Artificial
  Synthetic oligonucleotide
aggaaggccggatataaggcgcgcggagcacagtggccgagacataacaa

SEQ ID NO: 192627 - DNA, 50 bp, Artificial
  Synthetic oligonucleotide
agctggaatatcgtcccggtgtgaccccctcacccggcctatgcagttgt

SEQ ID NO: 192628 - DNA, 50 bp, Artificial
  Synthetic oligonucleotide
ctaaccggaggtatcttccgtgggcatgttcgcttcgaccggcctggtcg

SEQ ID NO: 192629 - DNA, 50 bp, Artificial
  Synthetic oligonucleotide
aggaagtgaccggtcggagaccccgattcttccgttccgggaccgcctac

SEQ ID NO: 192630 - DNA, 50 bp, Artificial
  Synthetic oligonucleotide
aggacgcatgcacatagggctggcgtcagtgtcggtcttggccggcctgg

SEQ ID NO: 192631 - DNA, 50 bp, Artificial
  Synthetic oligonucleotide
agcgtgggtcggtcttgcgcagaacagcgtggccatagccagggataacc

SEQ ID NO: 192632 - DNA, 50 bp, Artificial
  Synthetic oligonucleotide
agcgtgatcttcaacagcccaagggtgagaaaggaccggcgacggatgcc

SEQ ID NO: 192633 - DNA, 50 bp, Artificial
  Synthetic oligonucleotide
agcgtctcgccgcctttcgtttggcgtctcggtattcgctcaccccctcg

SEQ ID NO: 192634 - DNA, 50 bp, Artificial
  Synthetic oligonucleotide
agcggttcagaacctctgcctgggcaacgggattacaggcgggctcgaac

SEQ ID NO: 192635 - DNA, 50 bp, Artificial
  Synthetic oligonucleotide
agcggtatcggaaattcccacgggatgttgacccggccatcacgaccggt

SEQ ID NO: 192636 - DNA, 57 bp, Artificial
  Synthetic oligonucleotide
gaacctcgaacttggcccggagcaattcgttgagctggccagcattaatttccgtaa

SEQ ID NO: 192637 - DNA, 50 bp, Artificial
  Synthetic oligonucleotide
agcggtactgttttgcggcaggtagagcgtccggcagggggtactgaaat

SEQ ID NO: 192638 - DNA, 50 bp, Artificial
  Synthetic oligonucleotide
agcgggaagtacgcgggtcaagggcatcacgaataccctcccccagcaga

SEQ ID NO: 192639 - DNA, 50 bp, Artificial
  Synthetic oligonucleotide
agcggcctgggagaaggttgggtccttgggacaggtaacaggttgaaggc

SEQ ID NO: 192640 - DNA, 50 bp, Artificial
  Synthetic oligonucleotide
aggagtcgcccaactgatgctcggggtctgcttgacataggccgtcacgg

SEQ ID NO: 192641 - DNA, 50 bp, Artificial
  Synthetic oligonucleotide
aggcattaggcacatgtatgcctcaatcgtcgcagcgcgggagggctccg

SEQ ID NO: 192642 - DNA, 50 bp, Artificial
  Synthetic oligonucleotide
aggcgtattggtcccatgccgtctcaccctattgggatgctctgctggga

SEQ ID NO: 192643 - DNA, 50 bp, Artificial
  Synthetic oligonucleotide
agggtaggccaggagagcatccgtgagacaatgatggcaccgcctgcacc

SEQ ID NO: 192644 - DNA, 50 bp, Artificial
  Synthetic oligonucleotide
agggtggcttggggccggtgtacttggcctctgactcacctttccaggga

SEQ ID NO: 192645 - DNA, 50 bp, Artificial
  Synthetic oligonucleotide
aggtctccgcaaaagtctgcgcggtaggggccccctttgagaagaaggac

SEQ ID NO: 192646 - DNA, 50 bp, Artificial
  Synthetic oligonucleotide
agttggttgcgctcaggataatcagcatttcgcttgagagcctccgcaac

SEQ ID NO: 192647 - DNA, 58 bp, Artificial
  Synthetic oligonucleotide
tcggacggataatcaggcagtgtcgcgacgtcattaccgaaggctgcagacgccaggg

SEQ ID NO: 192648 - DNA, 50 bp, Artificial
  Synthetic oligonucleotide
ggtactggtcgtgccggtaccagctgttcatcagaacggggacggctgcc

SEQ ID NO: 192649 - DNA, 50 bp, Artificial
  Synthetic oligonucleotide
ccgtcagataggaagctccataaccttttacgacacgtgccggtagtgct

SEQ ID NO: 192650 - DNA, 50 bp, Artificial
  Synthetic oligonucleotide
gtagctctttattcgttatctcgatgccaagtttcacggcttcggctgct

SEQ ID NO: 192651 - DNA, 50 bp, Artificial
  Synthetic oligonucleotide
tagccgaagattaccgagacattcttggcaaaggcccaggatacaccgac

SEQ ID NO: 192652 - DNA, 50 bp, Artificial
  Synthetic oligonucleotide
cagcgcatgcatggtatctaggctgattgtgctgttacgtgttgtcacgc

SEQ ID NO: 192653 - DNA, 50 bp, Artificial
  Synthetic oligonucleotide
tgaaaccacaacaccgaatgatgcgagaaagattgaacggctgacggtcc

SEQ ID NO: 192654 - DNA, 50 bp, Artificial
  Synthetic oligonucleotide
tgacaggcggataagctcatgccagatctagagacagtcataaagcagtt

SEQ ID NO: 192655 - DNA, 50 bp, Artificial
  Synthetic oligonucleotide
acaacgccaccgtgtacccggatgcaggcccctccaacatgtgcatgccg

SEQ ID NO: 192656 - DNA, 50 bp, Artificial
  Synthetic oligonucleotide
acaacacgctgcggggcggagggtacctccttttggggcactccgaatcc

SEQ ID NO: 192657 - DNA, 50 bp, Artificial
  Synthetic oligonucleotide
aattccggacctgcatggcactgatcgcttcccgggccagggtatcgcaa

SEQ ID NO: 192658 - DNA, 57 bp, Artificial
  Synthetic oligonucleotide
gggacgctcagcttttgctccgctgagcttgtcttcatggatctgttgacagcccgc

SEQ ID NO: 192659 - DNA, 50 bp, Artificial
  Synthetic oligonucleotide
aatgtcgtcacggcggtcattgcccgcatacactgctggttccgtgctgt

SEQ ID NO: 192660 - DNA, 50 bp, Artificial
  Synthetic oligonucleotide
aatctgctgcgtcagctggaccgttttgaccatgccggcgcacttgagac

SEQ ID NO: 192661 - DNA, 50 bp, Artificial
  Synthetic oligonucleotide
aatctcgttcccaagcccccgctcctaccgcgttgcatccttgcaacgtc

SEQ ID NO: 192662 - DNA, 50 bp, Artificial
  Synthetic oligonucleotide
aatcggcaagtttcaccccgcgtctcaccatctcgtccgtcgactccggc

SEQ ID NO: 192663 - DNA, 50 bp, Artificial
  Synthetic oligonucleotide
aatcgcaggcttgtgccgttcaagccaaacctgccggagcgtctagaccc

SEQ ID NO: 192664 - DNA, 50 bp, Artificial
  Synthetic oligonucleotide
aatccggctgacagggcatggatggggtgtcgcacaaggtgccgtaatgg

SEQ ID NO: 192665 - DNA, 50 bp, Artificial
  Synthetic oligonucleotide
aatccgctgatccctcccagggtgcgcagggttttaaacgcctcccggcg

SEQ ID NO: 192666 - DNA, 50 bp, Artificial
  Synthetic oligonucleotide
aatccgctcgggagatagaactcgcccggcccgttaccaggctttcccac

SEQ ID NO: 192667 - DNA, 50 bp, Artificial
  Synthetic oligonucleotide
aatccgcaggcgtcgtataggtgaactcggttgtaggcgcccctttgccg

SEQ ID NO: 192668 - DNA, 50 bp, Artificial
  Synthetic oligonucleotide
aatcagcgctgccaacccaggtgtcgatgtatgggtccctgaaccgggaa

SEQ ID NO: 192669 - DNA, 57 bp, Artificial
  Synthetic oligonucleotide
tagttaagtttggtttgccgtagattacgggggtaatctatgatggcgaccatgcga

SEQ ID NO: 192670 - DNA, 56 bp, Artificial
  Synthetic oligonucleotide
gcgttgatctccagggggtccaactgggagtagtccatcatgtcggggtattcccg

SEQ ID NO: 192671 - DNA, 50 bp, Artificial
  Synthetic oligonucleotide
aatcactgcacaatgcgccaccatagcatagctccccgcggaagtgggca

SEQ ID NO: 192672 - DNA, 50 bp, Artificial
  Synthetic oligonucleotide
aagttgtctgccgtagctatcccacgcccccagccagagccatccctgtg

SEQ ID NO: 192673 - DNA, 50 bp, Artificial
  Synthetic oligonucleotide
aagtggcacctgcgagcgggataatatctgcggcgttcaccccgtttggc

SEQ ID NO: 192674 - DNA, 50 bp, Artificial
  Synthetic oligonucleotide
aagtgcgcgctggccccgggtccaaatgaggatcgtaacgaacgggatgg

SEQ ID NO: 192675 - DNA, 50 bp, Artificial
  Synthetic oligonucleotide
aagtctcccctcccggtgcagtcgctgatatagccttgtgccgcgcaagg

SEQ ID NO: 192676 - DNA, 50 bp, Artificial
  Synthetic oligonucleotide
aagtcgtccctgaagtcggtaagccaggagtcgacacaggccagggtccc

SEQ ID NO: 192677 - DNA, 50 bp, Artificial
  Synthetic oligonucleotide
aagtccggcagagcgcaatgacgagcgtgtctgaagggacctttctgccc

SEQ ID NO: 192678 - DNA, 50 bp, Artificial
  Synthetic oligonucleotide
aagtcatatgcgccggtcttttggctgcactgctcggggcaggtcccgca

SEQ ID NO: 192679 - DNA, 50 bp, Artificial
  Synthetic oligonucleotide
aaggttactgaagcgctccttcgggctctcacggtagtcaaccagcggcc

SEQ ID NO: 192680 - DNA, 50 bp, Artificial
  Synthetic oligonucleotide
aagggtcgacgcgccggttcattgggtgacgcagccgggttcagtttcta

SEQ ID NO: 192681 - DNA, 56 bp, Artificial
  Synthetic oligonucleotide
attccacgcccgtccggttgtggctgaaccatcacccagtcgcctaccacaggtaa

SEQ ID NO: 192682 - DNA, 50 bp, Artificial
  Synthetic oligonucleotide
aaggggttctacgaccgggcactccatcatttggagggaacaggccggct

SEQ ID NO: 192683 - DNA, 50 bp, Artificial
  Synthetic oligonucleotide
aaggggtgtattcagggtaacggaggtcatccctgaggcgtcctggggga

SEQ ID NO: 192684 - DNA, 50 bp, Artificial
  Synthetic oligonucleotide
aaggggacagggggccgttatttgacgtagaaccaccgagtggtgaggcg

SEQ ID NO: 192685 - DNA, 50 bp, Artificial
  Synthetic oligonucleotide
aagggctgtcggcacatggaaatctatccgcccaaagcccgttgccttga

SEQ ID NO: 192686 - DNA, 50 bp, Artificial
  Synthetic oligonucleotide
aagggaccctcgtactccggcaaccgtgcgctacctgcgaaagctgtacc

SEQ ID NO: 192687 - DNA, 50 bp, Artificial
  Synthetic oligonucleotide
aaggctgtccggtgcgacagttccgtcgggatgccaatcgtttcgtcgta

SEQ ID NO: 192688 - DNA, 50 bp, Artificial
  Synthetic oligonucleotide
aaggctacgccatcactgaggcaaccggcatcgcagaggcaacagaggcg

SEQ ID NO: 192689 - DNA, 50 bp, Artificial
  Synthetic oligonucleotide
aaggcgtacaaccttgccctccacatgtcgacgcgtaacccagttggggg

SEQ ID NO: 192690 - DNA, 50 bp, Artificial
  Synthetic oligonucleotide
aaggcccggggtgttgaggcagaactcacgctgtgaagtgtagcgtgggt

SEQ ID NO: 192691 - DNA, 50 bp, Artificial
  Synthetic oligonucleotide
acccgatggacaattgcccctcttggccgcgcgacgtacgcaacgccctg

SEQ ID NO: 192692 - DNA, 56 bp, Artificial
  Synthetic oligonucleotide
acggttggtgtcccgtccggtgcgctgcccaatagctcgatacagcgtctggttac

SEQ ID NO: 192693 - DNA, 50 bp, Artificial
  Synthetic oligonucleotide
acccctgccccatcggagggattggccggtgtgggagtcgtgggtggatc

SEQ ID NO: 192694 - DNA, 50 bp, Artificial
  Synthetic oligonucleotide
acccctcgccggtccacggtgctctggatggaggcgctcgatatgttcgc

SEQ ID NO: 192695 - DNA, 50 bp, Artificial
  Synthetic oligonucleotide
accccgtgctgcttatcaagggagagaggtcggccgcacaagaggcagtc

SEQ ID NO: 192696 - DNA, 50 bp, Artificial
  Synthetic oligonucleotide
accccgtgatgcgcctcagtatccgcccgatacgaggcagagcagacaat

SEQ ID NO: 192697 - DNA, 50 bp, Artificial
  Synthetic oligonucleotide
accccctggtcccgccatccgttcgttcgacggattctatgatgcccact

SEQ ID NO: 192698 - DNA, 50 bp, Artificial
  Synthetic oligonucleotide
accccctgcacgacgaccaacctcagcgtcacctatgtcaggcccgccgt

SEQ ID NO: 192699 - DNA, 50 bp, Artificial
  Synthetic oligonucleotide
acccacgactcccacaccggccaatccctccgatggggcaggggtgaatc

SEQ ID NO: 192700 - DNA, 50 bp, Artificial
  Synthetic oligonucleotide
acccaccagatggcgttgcagcggtagatgggtatgccgggcaaccacgc

SEQ ID NO: 192701 - DNA, 50 bp, Artificial
  Synthetic oligonucleotide
accattgtccgcacagttgcagccccggaacgtttcaggcacgcacagat

SEQ ID NO: 192702 - DNA, 50 bp, Artificial
  Synthetic oligonucleotide
accatcccgccgaggtaagtagcacctgcgagagacgggacttgccccta

SEQ ID NO: 192703 - DNA, 54 bp, Artificial
  Synthetic oligonucleotide
cggttaaacggcctcttgtttaggccaaacagcctcctgtcttaactcgatgac

SEQ ID NO: 192704 - DNA, 50 bp, Artificial
  Synthetic oligonucleotide
accagcggacgaatggccgtgaccgcctcatccccctgacgctgtatctt

SEQ ID NO: 192705 - DNA, 50 bp, Artificial
  Synthetic oligonucleotide
accactggcgaagccgcactagtgggtgcctaggggcgcgggggaaactc

SEQ ID NO: 192706 - DNA, 50 bp, Artificial
  Synthetic oligonucleotide
accacctggatgtcaaagcctgggctgatagccttggcaccgaagcgcca

SEQ ID NO: 192707 - DNA, 50 bp, Artificial
  Synthetic oligonucleotide
accaccgtcacatcgttccctcgccgcacaagaccgtttgcgtactcgta

SEQ ID NO: 192708 - DNA, 50 bp, Artificial
  Synthetic oligonucleotide
acatgaataaggtatattacgatgtacgtggtaaggttgacacgacaagc

SEQ ID NO: 192709 - DNA, 50 bp, Artificial
  Synthetic oligonucleotide
acatgaaaaagccgtcgccacaaactcccgcacgctgtgggtttcgccgc

SEQ ID NO: 192710 - DNA, 50 bp, Artificial
  Synthetic oligonucleotide
acatcgcggtaaccgatcattcgcaggggctaggagtggcccgcggtctt

SEQ ID NO: 192711 - DNA, 50 bp, Artificial
  Synthetic oligonucleotide
acatcgccccggtcatgagcaccagcttcggcctctgcgaggcgagcctg

SEQ ID NO: 192712 - DNA, 50 bp, Artificial
  Synthetic oligonucleotide
acatccggctaggccgccgccttccgatgcctgcatttggggtggaaggg

SEQ ID NO: 192713 - DNA, 50 bp, Artificial
  Synthetic oligonucleotide
acataaggcgaatcatgctggttcgacccgctttggtccgccacgccgac

SEQ ID NO: 192714 - DNA, 55 bp, Artificial
  Synthetic oligonucleotide
cggttaccagtacggatatccctagcactatcaactgcggtgcaacatgcgacgg

SEQ ID NO: 192715 - DNA, 50 bp, Artificial
  Synthetic oligonucleotide
acagtcgcgacatcgtccgttcgctctgtcgccacagctgcggaccttgc

SEQ ID NO: 192716 - DNA, 50 bp, Artificial
  Synthetic oligonucleotide
acaggggcatgttcctcaacccccgctacggtacggtcggactgttcggg

SEQ ID NO: 192717 - DNA, 50 bp, Artificial
  Synthetic oligonucleotide
acagggagactgtggcgccagcagagaccaaaaacggggccagcctttcg

SEQ ID NO: 192718 - DNA, 50 bp, Artificial
  Synthetic oligonucleotide
acaggaaatggtcaccgcatcccctcccgcagtccggcctctgaccggcg

SEQ ID NO: 192719 - DNA, 50 bp, Artificial
  Synthetic oligonucleotide
acagctggagttctgccggttcactggcgactgcacgcgccgaccacaca

SEQ ID NO: 192720 - DNA, 50 bp, Artificial
  Synthetic oligonucleotide
acagcaacccaaggttgccggaggcaacagcaagtcccggttccttctgc

SEQ ID NO: 192721 - DNA, 50 bp, Artificial
  Synthetic oligonucleotide
acagatgcatgcactcaagccaaggggcagtacccgcaatgggtggtggg

SEQ ID NO: 192722 - DNA, 50 bp, Artificial
  Synthetic oligonucleotide
acacgggtaacccgcccacgattgacagccttgagcccagccgaagacta

SEQ ID NO: 192723 - DNA, 50 bp, Artificial
  Synthetic oligonucleotide
acaccgatgctcatggcgggatgcggtcaccttcagtccaagccgacctt

SEQ ID NO: 192724 - DNA, 50 bp, Artificial
  Synthetic oligonucleotide
acaccccaaaaagccggtccagggtctgaactgcccccgcagtgaggtga

SEQ ID NO: 192725 - DNA, 55 bp, Artificial
  Synthetic oligonucleotide
cggttctctcatttaatatgacgtgcaccggaattgtttgcaccaaagagctgag

SEQ ID NO: 192726 - DNA, 50 bp, Artificial
  Synthetic oligonucleotide
aaccttgcgggttacctcccgggggacattgaggccaacgagggggatgc

SEQ ID NO: 192727 - DNA, 49 bp, Artificial
  Synthetic oligonucleotide
aaccgggctatccgggcaaaccgtcccgtgggtctttttgtcgacgggc

SEQ ID NO: 192728 - DNA, 50 bp, Artificial
  Synthetic oligonucleotide
aaccggagctacatctcgccgccggtcctcgtgaaggcgttccgcatgaa

SEQ ID NO: 192729 - DNA, 49 bp, Artificial
  Synthetic oligonucleotide
aaccgaaactaaagccgagactggccccggagggcttaaagtcgtcccc

SEQ ID NO: 192730 - DNA, 50 bp, Artificial
  Synthetic oligonucleotide
aacccttaccgccgtagccgctaatggctcccccacggtgctgttgaggg

SEQ ID NO: 192731 - DNA, 50 bp, Artificial
  Synthetic oligonucleotide
aacccgcacgcgagctacctttacctcgcaccgtccaggggatacaacgg

SEQ ID NO: 192732 - DNA, 50 bp, Artificial
  Synthetic oligonucleotide
aaccccggtgatccttctcatccgggaccacgcagacaagccgtttgcgc

SEQ ID NO: 192733 - DNA, 50 bp, Artificial
  Synthetic oligonucleotide
aaccccgctcgggtgtaccaatggcagttccgcaaggtccgcaaagacgg

SEQ ID NO: 192734 - DNA, 50 bp, Artificial
  Synthetic oligonucleotide
aaccagttcggccacccttacgagggagccactatgtacgggcttgcgcg

SEQ ID NO: 192735 - DNA, 50 bp, Artificial
  Synthetic oligonucleotide
aaccaggatgtgacccggcgccactgaaacacgccccaaggaggtacgac

SEQ ID NO: 192736 - DNA, 55 bp, Artificial
  Synthetic oligonucleotide
cgggacatgtatacgacataatgctgttgacataccattctgtgtcggttatttg

SEQ ID NO: 192737 - DNA, 50 bp, Artificial
  Synthetic oligonucleotide
aaccagaggttctcggaattgcaagcggggagacgctcaaggatgcgcct

SEQ ID NO: 192738 - DNA, 50 bp, Artificial
  Synthetic oligonucleotide
aaccagaccaccccgcctcgggacgtgctgccggaaccaatcggatgccc

SEQ ID NO: 192739 - DNA, 50 bp, Artificial
  Synthetic oligonucleotide
aaccaccctccccgtgctgtagttaaggtagccccaagcccgggacacct

SEQ ID NO: 192740 - DNA, 50 bp, Artificial
  Synthetic oligonucleotide
aacacctccggctccgaagcagttgactgccccgcctggttttcgctccc

SEQ ID NO: 192741 - DNA, 50 bp, Artificial
  Synthetic oligonucleotide
aacaacctggggcagtacctgccggtggctataccagacaccacgagcta

SEQ ID NO: 192742 - DNA, 50 bp, Artificial
  Synthetic oligonucleotide
aaatgggtcgctttgggctcggatttctgtggggtgtgctgacggccccc

SEQ ID NO: 192743 - DNA, 50 bp, Artificial
  Synthetic oligonucleotide
aaatgatggcgcacttgtcgtagggggtgctgcggaatcttcgcatggcc

SEQ ID NO: 192744 - DNA, 50 bp, Artificial
  Synthetic oligonucleotide
aaataggtggaacgtccgagccaagggccaagctcaaccaacgcaccccg

SEQ ID NO: 192745 - DNA, 50 bp, Artificial
  Synthetic oligonucleotide
aaaggcgctggtcctttcccgcccggagttgtcgcaaagggcttgggcga

SEQ ID NO: 192746 - DNA, 50 bp, Artificial
  Synthetic oligonucleotide
aaagccccaggctaccagttgcggcctccctcccgacggcggtaccttca

SEQ ID NO: 192747 - DNA, 55 bp, Artificial
  Synthetic oligonucleotide
cggctcggtacttcagccggccacgtgctgcctcagattgtgttcgggagtagct

SEQ ID NO: 192748 - DNA, 50 bp, Artificial
  Synthetic oligonucleotide
aaagcacggcgcgaccccgttattaggcgtcgtttcccctcggagtgtca

SEQ ID NO: 192749 - DNA, 50 bp, Artificial
  Synthetic oligonucleotide
aaagcaccgcctctctgggtagtgcaccgctccaggttgcgagcacctgc

SEQ ID NO: 192750 - DNA, 50 bp, Artificial
  Synthetic oligonucleotide
aaagaggtgagctccctgaacggccccatagatggtctggtgccgccact

SEQ ID NO: 192751 - DNA, 50 bp, Artificial
  Synthetic oligonucleotide
aaagaactgggggttgagaaaggcggtaagacgcatgccgtcgggtccgc

SEQ ID NO: 192752 - DNA, 50 bp, Artificial
  Synthetic oligonucleotide
aaacgtccctttcagtagtaccgcaaccagaccaccccgcctcgggacgt

SEQ ID NO: 192753 - DNA, 50 bp, Artificial
  Synthetic oligonucleotide
aaacctccgcgtacaccattgaacagagccgcctcgggcttgtggagtcg

SEQ ID NO: 192754 - DNA, 50 bp, Artificial
  Synthetic oligonucleotide
aaaccgatatgcacggcatcccccaccctctctgcccggaggctttacgt

SEQ ID NO: 192755 - DNA, 50 bp, Artificial
  Synthetic oligonucleotide
aaacccgggctgccttccaagccatgcacaacagccccgttcacgacatg

SEQ ID NO: 192756 - DNA, 50 bp, Artificial
  Synthetic oligonucleotide
aaacccacttgtcgcttcgtagggggatgcggtaacccgcttgtcgcttc

SEQ ID NO: 192757 - DNA, 50 bp, Artificial
  Synthetic oligonucleotide
aaacagcgccggaagctactcctcgccccagagtaacgtgctgaacgcca

SEQ ID NO: 192758 - DNA, 52 bp, Artificial
  Synthetic oligonucleotide
cggcgttccctaccttcttgctcacggtaaacccaaccctagtgcccgtgcc

SEQ ID NO: 192759 - DNA, 50 bp, Artificial
  Synthetic oligonucleotide
aaaaggttacgggcagcaagatccgggacccccaggtagtggtagcgccg

SEQ ID NO: 192760 - DNA, 50 bp, Artificial
  Synthetic oligonucleotide
aaaagggatgggaaaaggtgtggctccccgcttcaacccagggcagcgca

SEQ ID NO: 192761 - DNA, 50 bp, Artificial
  Synthetic oligonucleotide
aaggcagtgatcagatcccggggcggggccgaatccctggcaattctgga

SEQ ID NO: 192762 - DNA, 50 bp, Artificial
  Synthetic oligonucleotide
aaggcacgacgcagcgattacaagtatggccgcgatccgttgcccccagg

SEQ ID NO: 192763 - DNA, 50 bp, Artificial
  Synthetic oligonucleotide
aaggcaaggcgctccaaaacggcctcaaccgaagcgaaagtgagcgctcg

SEQ ID NO: 192764 - DNA, 50 bp, Artificial
  Synthetic oligonucleotide
aagctgctacgctttttaccgtcaagggtgcggtgccgagaccgcaggca

SEQ ID NO: 192765 - DNA, 50 bp, Artificial
  Synthetic oligonucleotide
aagctgcgacagcatgaccgcaagcatctcggaccctccccggaacggaa

SEQ ID NO: 192766 - DNA, 50 bp, Artificial
  Synthetic oligonucleotide
aagctgatctctacccgaggttcgtcgtgtcgggttctctcgccctggct

SEQ ID NO: 192767 - DNA, 50 bp, Artificial
  Synthetic oligonucleotide
aagctcaaccagtcggacccacgggaacgcctcccgaacatattgtcccg

SEQ ID NO: 192768 - DNA, 50 bp, Artificial
  Synthetic oligonucleotide
aagcgggccacagatgcggtcgttcacagctgcgtgccccgagtacccga

SEQ ID NO: 192769 - DNA, 55 bp, Artificial
  Synthetic oligonucleotide
cggcgctacactttcagcgttctgagtcttcccgtcagccggaccagttacctgc

SEQ ID NO: 192770 - DNA, 50 bp, Artificial
  Synthetic oligonucleotide
aagccccgtgagggcaagaagcctcgccttggccggatagagcccccgtt

SEQ ID NO: 192771 - DNA, 50 bp, Artificial
  Synthetic oligonucleotide
aagcagttctccggggccattggaggtcaagccctctcggggactgactg

SEQ ID NO: 192772 - DNA, 50 bp, Artificial
  Synthetic oligonucleotide
aagcaggcagccgacaacctggcgggatggctcaagtcgaagccgattga

SEQ ID NO: 192773 - DNA, 50 bp, Artificial
  Synthetic oligonucleotide
aagagtcaaagagacttcgcgtatgggcgggttgccgacagagcccctgc

SEQ ID NO: 192774 - DNA, 50 bp, Artificial
  Synthetic oligonucleotide
aagaccggagccggcaggggttgtcttttggtacgggactccgtgtccct

SEQ ID NO: 192775 - DNA, 50 bp, Artificial
  Synthetic oligonucleotide
aagaccagcatcactgccagggtcatcagggctgcagaccaggcctcccg

SEQ ID NO: 192776 - DNA, 50 bp, Artificial
  Synthetic oligonucleotide
aagacaggcgtattccccctgagcgcgaaagctgtagggccgccgggctt

SEQ ID NO: 192777 - DNA, 50 bp, Artificial
  Synthetic oligonucleotide
aagaacccgttgtttcccctggctcctttggcccaattgcacgcccgtta

SEQ ID NO: 192778 - DNA, 50 bp, Artificial
  Synthetic oligonucleotide
aacgacccccacctgatacatccggctaggccgccgccttccgatgcctg

SEQ ID NO: 192779 - DNA, 50 bp, Artificial
  Synthetic oligonucleotide
aacgaccgttgctctgcagccccgctcttgatgttgacaacccatgccga

SEQ ID NO: 192780 - DNA, 60 bp, Artificial
  Synthetic oligonucleotide
caacggaatatattgtggcagaccatctagcacagcacaagatatagagtcaagcaactc

SEQ ID NO: 192781 - DNA, 55 bp, Artificial
  Synthetic oligonucleotide
cggccgctccgatagctattcattagcaccccggagtaaacaacccagggtctcc

SEQ ID NO: 192782 - DNA, 50 bp, Artificial
  Synthetic oligonucleotide
aacgatccacccacgactcccacaccggccaatccctccgatggggcagg

SEQ ID NO: 192783 - DNA, 50 bp, Artificial
  Synthetic oligonucleotide
aacgccctgtaaagtgcgcgctggccccgggtccaaatgaggatcgtaac

SEQ ID NO: 192784 - DNA, 50 bp, Artificial
  Synthetic oligonucleotide
aacggcggactggccccaaatcgcggctcttccctggatcatcactccgc

SEQ ID NO: 192785 - DNA, 50 bp, Artificial
  Synthetic oligonucleotide
aacgggagcgtcgtagcgaacggtggcaagcgctttggagagaatcgcct

SEQ ID NO: 192786 - DNA, 50 bp, Artificial
  Synthetic oligonucleotide
aacggggttgaaggtgatcggtcccccattggcgaatgctcccacatgga

SEQ ID NO: 192787 - DNA, 50 bp, Artificial
  Synthetic oligonucleotide
aacggtcaccatggataaccgccaaccacgcccgaccggagtagatgagc

SEQ ID NO: 192788 - DNA, 50 bp, Artificial
  Synthetic oligonucleotide
aacgtcgctgcacgggattgtagagccaccggcgttcagaccgcacctaa

SEQ ID NO: 192789 - DNA, 50 bp, Artificial
  Synthetic oligonucleotide
aacgttatgaggaaggccggatataaggcgcgcggagcacagtggccgag

SEQ ID NO: 192790 - DNA, 50 bp, Artificial
  Synthetic oligonucleotide
aactcacgtgcatcaggaacgcactgccgccacaggggatctcccggctc

SEQ ID NO: 192791 - DNA, 50 bp, Artificial
  Synthetic oligonucleotide
aactggcccttggatacgatccggacgaggctggagtcgtgagaggggag

SEQ ID NO: 192792 - DNA, 55 bp, Artificial
  Synthetic oligonucleotide
cggccctaatgtcttcaaggcgcttctcggccaagtaaatgtcttccaggtcgtc

SEQ ID NO: 192793 - DNA, 50 bp, Artificial
  Synthetic oligonucleotide
aactgtcgcgccccggcttccagagattgggaagatcgctttcggccagg

SEQ ID NO: 192794 - DNA, 50 bp, Artificial
  Synthetic oligonucleotide
aacttcgatgcctcagggaccacaaacgtgcaggggaacacggtgccgac

SEQ ID NO: 192795 - DNA, 50 bp, Artificial
  Synthetic oligonucleotide
aactttcagctctggttccgagagtgccgtcaatggggcgacagggtccc

SEQ ID NO: 192796 - DNA, 50 bp, Artificial
  Synthetic oligonucleotide
agaggtgagccttgcccggtccgagggggtaccgaacctgacagtgggac

SEQ ID NO: 192797 - DNA, 50 bp, Artificial
  Synthetic oligonucleotide
agaggtcggccgcacaagaggcagtccgatttgaggccgctcagccgggc

SEQ ID NO: 192798 - DNA, 50 bp, Artificial
  Synthetic oligonucleotide
agagcctcaacacgggtctttccgggtcgatcgggcacacctccgccctg

SEQ ID NO: 192799 - DNA, 50 bp, Artificial
  Synthetic oligonucleotide
agacgtgaatggggccttctgcaggatgctgggttacagtcccgacgcaa

SEQ ID NO: 192800 - DNA, 50 bp, Artificial
  Synthetic oligonucleotide
agacgggggtatcggctgtgacggtggctacggatgtcccggtttcggct

SEQ ID NO: 192801 - DNA, 50 bp, Artificial
  Synthetic oligonucleotide
agacgggccgcacctgtaaccctgttcccggaatagacgggagcatagcg

SEQ ID NO: 192802 - DNA, 50 bp, Artificial
  Synthetic oligonucleotide
agacggcggagcgcaacggtgtgatgatgagcctggtctaccggtatccg

SEQ ID NO: 192803 - DNA, 55 bp, Artificial
  Synthetic oligonucleotide
cggagtacggcctcccgagggactcatgaaagcgtgtctcatggcggctctgatg

SEQ ID NO: 192804 - DNA, 50 bp, Artificial
  Synthetic oligonucleotide
agacgcagcacagactgacgggcctcgtgactcccctgccgggccagaca

SEQ ID NO: 192805 - DNA, 50 bp, Artificial
  Synthetic oligonucleotide
agaatcccaggacgaaggtcagggagtgggcgagaacgaccagacgcacc

SEQ ID NO: 192806 - DNA, 50 bp, Artificial
  Synthetic oligonucleotide
agaagtgcacggggtgcaacctctgcgtggaatactgcccggccaaggtc

SEQ ID NO: 192807 - DNA, 50 bp, Artificial
  Synthetic oligonucleotide
actttcccctcacgggccccgacagacaggtcaacacacgtgactccgat

SEQ ID NO: 192808 - DNA, 50 bp, Artificial
  Synthetic oligonucleotide
acttcgctgcaccttctgtacggctcgctggacctcggtcagggtaccgc

SEQ ID NO: 192809 - DNA, 50 bp, Artificial
  Synthetic oligonucleotide
acttccggcaagcaatgtccgagcagccaagaatccccacgcgcactctc

SEQ ID NO: 192810 - DNA, 50 bp, Artificial
  Synthetic oligonucleotide
acttattcccgttctgcaacgaggtcttggacccgcctgtggcggcctgc

SEQ ID NO: 192811 - DNA, 50 bp, Artificial
  Synthetic oligonucleotide
actgtcacggatgccgtagggggagggacactggtttcctgcactgcggt

SEQ ID NO: 192812 - DNA, 50 bp, Artificial
  Synthetic oligonucleotide
actggctcaaggcatcgagcgtcttcccccggctgccagaacaccggaaa

SEQ ID NO: 192813 - DNA, 50 bp, Artificial
  Synthetic oligonucleotide
actggcagagagccgcatggaaatcctgcaatgtctgggacgggcagcgg

SEQ ID NO: 192814 - DNA, 55 bp, Artificial
  Synthetic oligonucleotide
cggaggtagcgtttccatccgcgatacctcgacaatccactgcggtgactgccac

SEQ ID NO: 192815 - DNA, 50 bp, Artificial
  Synthetic oligonucleotide
actggactttcaccaggccggtggggaacaaccaatggcggctttcggcg

SEQ ID NO: 192816 - DNA, 50 bp, Artificial
  Synthetic oligonucleotide
actgctcggggcaggtcccgcacaagccgcagaggcacaaccggacaaat

SEQ ID NO: 192817 - DNA, 50 bp, Artificial
  Synthetic oligonucleotide
actgcgtgcgaagtggtagtagagctccgcgcccttaagctcgaaccgct

SEQ ID NO: 192818 - DNA, 50 bp, Artificial
  Synthetic oligonucleotide
actgcgcccagcttggtaagagcccggactttccccctccgggttccctc

SEQ ID NO: 192819 - DNA, 50 bp, Artificial
  Synthetic oligonucleotide
actgcgaggccgtctactacgttgcgcggtgctcgctccttcgcctaacg

SEQ ID NO: 192820 - DNA, 50 bp, Artificial
  Synthetic oligonucleotide
actgccacaactccacgtcgtcgctggcaccgcaactgagcaccataacc

SEQ ID NO: 192821 - DNA, 50 bp, Artificial
  Synthetic oligonucleotide
actctccacaggtctccgacggggttgcagcacccttgggaaacgtgacc

SEQ ID NO: 192822 - DNA, 50 bp, Artificial
  Synthetic oligonucleotide
actcgcccctgatcgtgacgattcccccaccaaagggtgcgtctggaccc

SEQ ID NO: 192823 - DNA, 50 bp, Artificial
  Synthetic oligonucleotide
actccctgggatgagatcggcccgttctaccgccccaacgcccctcttag

SEQ ID NO: 192824 - DNA, 50 bp, Artificial
  Synthetic oligonucleotide
actcaacgcggcctccggaacactgctttcaagcgagcggttcactgcca

SEQ ID NO: 192825 - DNA, 55 bp, Artificial
  Synthetic oligonucleotide
cggaaacgcatgagccgagcagggtcgaaatcacggtcgcatctgtcgccgcatg

SEQ ID NO: 192826 - DNA, 50 bp, Artificial
  Synthetic oligonucleotide
actatggacacaccctccggtcggtgagaaggcacccgcacttccggtct

SEQ ID NO: 192827 - DNA, 50 bp, Artificial
  Synthetic oligonucleotide
actacggacgaggctccggtacagcggaccgccaaaaagctccagctacg

SEQ ID NO: 192828 - DNA, 50 bp, Artificial
  Synthetic oligonucleotide
acgttcctcacggggcttcggcagaccgacacattccgggatgcttccag

SEQ ID NO: 192829 - DNA, 50 bp, Artificial
  Synthetic oligonucleotide
agcgcgtgagtttgtctcgccggttctgcggattactccggtacaggtga

SEQ ID NO: 192830 - DNA, 50 bp, Artificial
  Synthetic oligonucleotide
agcgcgcaccgcttcaatcaggtctcctgtgccgaacactacctcctcac

SEQ ID NO: 192831 - DNA, 50 bp, Artificial
  Synthetic oligonucleotide
agcgcctctggtttcctcagccggggcacagcggagtcccctcacgggcc

SEQ ID NO: 192832 - DNA, 50 bp, Artificial
  Synthetic oligonucleotide
agcgcccggacagggtgagtcaaggtttgtcacgtgtcgctgctggattc

SEQ ID NO: 192833 - DNA, 50 bp, Artificial
  Synthetic oligonucleotide
agcgaggtcagcccgtaatagggaggaaaccccgcctcgcacttcagggc

SEQ ID NO: 192834 - DNA, 50 bp, Artificial
  Synthetic oligonucleotide
agcgaacataacgcgaggactcaccctctcaatggattcggggtccgcgc

SEQ ID NO: 192835 - DNA, 50 bp, Artificial
  Synthetic oligonucleotide
agccttcagcaaattgcagcgtcggctgaggtgcatcacgcaggttccaa

SEQ ID NO: 192836 - DNA, 55 bp, Artificial
  Synthetic oligonucleotide
cgctgattcagaacgttaaagggcacaagggcggaataccccacgggattgcgcc

SEQ ID NO: 192837 - DNA, 50 bp, Artificial
  Synthetic oligonucleotide
agcctcctcacggtttatttagccccggtccgacccggagcaaggagata

SEQ ID NO: 192838 - DNA, 50 bp, Artificial
  Synthetic oligonucleotide
agcctcccgatcagctacgaccgtgttaccgctgcgaccacctataccct

SEQ ID NO: 192839 - DNA, 50 bp, Artificial
  Synthetic oligonucleotide
agcctaccggctggtctgacttcatgaatgccgccgactcaacgcttccc

SEQ ID NO: 192840 - DNA, 50 bp, Artificial
  Synthetic oligonucleotide
agccgtgtcgctaccgcttccgcaagagcgggtcgaaggagagtaggtgc

SEQ ID NO: 192841 - DNA, 50 bp, Artificial
  Synthetic oligonucleotide
agccgagccgtggtttctgagcttcaacgcttcggtccggttccagatcg

SEQ ID NO: 192842 - DNA, 50 bp, Artificial
  Synthetic oligonucleotide
agcccgcagcggttgctgagcgagtaggtcacaaggagctttgcctcgtg

SEQ ID NO: 192843 - DNA, 50 bp, Artificial
  Synthetic oligonucleotide
agccccgctcttgatgttgacaacccatgccgagccctgctatggtgccg

SEQ ID NO: 192844 - DNA, 50 bp, Artificial
  Synthetic oligonucleotide
agccccgcctttgcctcttgtaggccctctgcgaccgagcagccgtcatg

SEQ ID NO: 192845 - DNA, 50 bp, Artificial
  Synthetic oligonucleotide
agccccgcagcgtccgattctcccgggacttctgcaatgtcgtgtcaaat

SEQ ID NO: 192846 - DNA, 50 bp, Artificial
  Synthetic oligonucleotide
agccatggactttggcaaggccctgagcggacgtagcggtacccgtcaga

SEQ ID NO: 192847 - DNA, 55 bp, Artificial
  Synthetic oligonucleotide
cgctcgtctgttgtatctcggacctcttcgttcctatcctccacggcatttggcc

SEQ ID NO: 192848 - DNA, 50 bp, Artificial
  Synthetic oligonucleotide
agccagttttcgccagaaccccgtgcaactcactcggcgctccccgtgac

SEQ ID NO: 192849 - DNA, 50 bp, Artificial
  Synthetic oligonucleotide
agccagcgttatgatgatgtgtggctgtccggttgcgccaggagggctct

SEQ ID NO: 192850 - DNA, 50 bp, Artificial
  Synthetic oligonucleotide
agcatcaactggctgcaaggggcaaggaaaagtcaccttcgccgctgtcc

SEQ ID NO: 192851 - DNA, 50 bp, Artificial
  Synthetic oligonucleotide
agcagttgactgccccgcctggttttcgctccctgccgttggttctccgc

SEQ ID NO: 192852 - DNA, 50 bp, Artificial
  Synthetic oligonucleotide
agcagtgtggtaccacgcaggagataccggtcgggtcggtcttgcttggg

SEQ ID NO: 192853 - DNA, 50 bp, Artificial
  Synthetic oligonucleotide
agcagggtcgaaatcacggtcgcatctgtcgccgcatgatattcgcccgg

SEQ ID NO: 192854 - DNA, 50 bp, Artificial
  Synthetic oligonucleotide
agcacatccacagccgaccgtcttctggagttgaaggcgcgtccactgac

SEQ ID NO: 192855 - DNA, 50 bp, Artificial
  Synthetic oligonucleotide
agattccgtccgctactgacgcagttatcagccaggcgctcacttccggc

SEQ ID NO: 192856 - DNA, 50 bp, Artificial
  Synthetic oligonucleotide
agattaccggacggcccagaacaacgctgtccaccgtatgccccacgtgg

SEQ ID NO: 192857 - DNA, 50 bp, Artificial
  Synthetic oligonucleotide
agatccaacgatctcaggcgccaaggcactgatgccctcgcacggcgaat

SEQ ID NO: 192858 - DNA, 55 bp, Artificial
  Synthetic oligonucleotide
gacggagagcggttgacctgcatcataccctccagggatgtggcatatcaggggc

SEQ ID NO: 192859 - DNA, 50 bp, Artificial
  Synthetic oligonucleotide
agataacgcttggggagatgtaccccgcgctggagtgctgcctgctgggc

SEQ ID NO: 192860 - DNA, 50 bp, Artificial
  Synthetic oligonucleotide
agagttgatttgtccacggagcgatgtcggccccgtatcggccccgaaaa

SEQ ID NO: 192861 - DNA, 50 bp, Artificial
  Synthetic oligonucleotide
agagttatcgactggcccaggcccgttaccacggcggcgtcaccagctat

SEQ ID NO: 192862 - DNA, 50 bp, Artificial
  Synthetic oligonucleotide
agagtggccggctccaactcgttgctgttgccgtacacggtcaccagcga

SEQ ID NO: 192863 - DNA, 50 bp, Artificial
  Synthetic oligonucleotide
agagtcagccatgggcacgcattatctccaagcctaccgccggaggtcca

SEQ ID NO: 192864 - DNA, 50 bp, Artificial
  Synthetic oligonucleotide
acgaaggcagcggtaagcggggcttcccctccgcataggcgcgagatctc

SEQ ID NO: 192865 - DNA, 50 bp, Artificial
  Synthetic oligonucleotide
acgaaacgccgctaggcaaggatgggtgcggcattgcggatgtgctatga

SEQ ID NO: 192866 - DNA, 50 bp, Artificial
  Synthetic oligonucleotide
acctggttgtccgaacacccggaacagtggctggcaaaccgcctatccgg

SEQ ID NO: 192867 - DNA, 50 bp, Artificial
  Synthetic oligonucleotide
acctgcgagacccccggtaccgccagaagtcgcttgcggataacgaagtc

SEQ ID NO: 192868 - DNA, 50 bp, Artificial
  Synthetic oligonucleotide
acctcgcccacattcaccctcacgcaaccgacctttaccatgacgcagcc

SEQ ID NO: 192869 - DNA, 54 bp, Artificial
  Synthetic oligonucleotide
accaatctccgttttgccgaggaccccgagctcctgaaactcgtggcggactcg

SEQ ID NO: 192870 - DNA, 50 bp, Artificial
  Synthetic oligonucleotide
acctcgaaaatgttcacccctcgccggtccacggtgctctggatggaggc

SEQ ID NO: 192871 - DNA, 50 bp, Artificial
  Synthetic oligonucleotide
acctcctgcagggtgcgcataagaccgcatgaatcgcaaaccggggagtt

SEQ ID NO: 192872 - DNA, 50 bp, Artificial
  Synthetic oligonucleotide
acctcctactcggcccggcactctttcgcggcgtggagtctcattatcgg

SEQ ID NO: 192873 - DNA, 50 bp, Artificial
  Synthetic oligonucleotide
acctcccggtccggtcccagcatagacaaggcagcagccgcggtgaagac

SEQ ID NO: 192874 - DNA, 50 bp, Artificial
  Synthetic oligonucleotide
acctcccgcagttttcgcacctgataggcctcgaggtcgctccgcgtcag

SEQ ID NO: 192875 - DNA, 50 bp, Artificial
  Synthetic oligonucleotide
acctccccctacaaggaggacagccctcctcccgatacttccggggccac

SEQ ID NO: 192876 - DNA, 50 bp, Artificial
  Synthetic oligonucleotide
acctcaccgggacggacaataccaccgttcctccgacgctttggtccggc

SEQ ID NO: 192877 - DNA, 50 bp, Artificial
  Synthetic oligonucleotide
accgtggaccagagtaccggttccatcactctgcgggcagtgttccccaa

SEQ ID NO: 192878 - DNA, 50 bp, Artificial
  Synthetic oligonucleotide
accgtcacgtcgacccgtgggctttgtagccgttccactgtccccttcag

SEQ ID NO: 192879 - DNA, 50 bp, Artificial
  Synthetic oligonucleotide
accgtaacgatccctgggccgcttggggcgacctcggtgataataggggg

SEQ ID NO: 192880 - DNA, 55 bp, Artificial
  Synthetic oligonucleotide
gacgctttacgaggagacgccggtcaatacccctgtgctcattgtgagccagccg

SEQ ID NO: 192881 - DNA, 50 bp, Artificial
  Synthetic oligonucleotide
accggttggatcgaagcgtgtccggaaaaggcggaccaattgcagggcca

SEQ ID NO: 192882 - DNA, 50 bp, Artificial
  Synthetic oligonucleotide
accggggcagccagtgggatcgagacggtttatgcccgcaccagatacac

SEQ ID NO: 192883 - DNA, 50 bp, Artificial
  Synthetic oligonucleotide
accggcccaacggggagggcgtctgatgctttggaacacgttgcttctct

SEQ ID NO: 192884 - DNA, 50 bp, Artificial
  Synthetic oligonucleotide
accggagccaagggttacaggggagggtacgagaaagggcctcgctccca

SEQ ID NO: 192885 - DNA, 50 bp, Artificial
  Synthetic oligonucleotide
accgcttggcatgctggattctgtcaggccaccaccagcagtccctctgg

SEQ ID NO: 192886 - DNA, 50 bp, Artificial
  Synthetic oligonucleotide
accgcttccgcaagagcgggtcgaaggagagtaggtgcgggatccatcgg

SEQ ID NO: 192887 - DNA, 50 bp, Artificial
  Synthetic oligonucleotide
accgctcaggcatccgaccgacccgaacctctacaagtgggtgccgccca

SEQ ID NO: 192888 - DNA, 50 bp, Artificial
  Synthetic oligonucleotide
accgcgccgactgttacctgcacttgtccggggagtagggaccgtctccc

SEQ ID NO: 192889 - DNA, 50 bp, Artificial
  Synthetic oligonucleotide
accgcccagtgggggacgaccctgacctgtgtcaactgccattccctcgc

SEQ ID NO: 192890 - DNA, 50 bp, Artificial
  Synthetic oligonucleotide
accgagtgatattcccgctttgtccgcggcactccctctccataggccgc

SEQ ID NO: 192891 - DNA, 60 bp, Artificial
  Synthetic oligonucleotide
tgagcgccgctgctaaaccgggacgctcagcttttgctccgctgagcttgtcttcatgga

SEQ ID NO: 192892 - DNA, 53 bp, Artificial
  Synthetic oligonucleotide
gacgagaggttgacggtacaccgggtaaccccggcctcaaggatgaacagagg

SEQ ID NO: 192893 - DNA, 50 bp, Artificial
  Synthetic oligonucleotide
acccttacgagggagccactatgtacgggcttgcgcgctcatccggtctt

SEQ ID NO: 192894 - DNA, 50 bp, Artificial
  Synthetic oligonucleotide
accctgctccctcgtgtcggtgatgcgatggttccggcgccattatctga

SEQ ID NO: 192895 - DNA, 50 bp, Artificial
  Synthetic oligonucleotide
acccggtgacaacggcggtgtacctcgaacgtgcgctacggaaaagctgc

SEQ ID NO: 192896 - DNA, 50 bp, Artificial
  Synthetic oligonucleotide
acccggccctccgcacggcggtaggacccttgcgactggctccgatcgtg

SEQ ID NO: 192897 - DNA, 50 bp, Artificial
  Synthetic oligonucleotide
acccggatgcaggcccctccaacatgtgcatgccgtgccacacggggagg

SEQ ID NO: 192898 - DNA, 50 bp, Artificial
  Synthetic oligonucleotide
acccgcggggcctaaagggtcactctgctacgttaccgctcgctcgaaac

SEQ ID NO: 192899 - DNA, 50 bp, Artificial
  Synthetic oligonucleotide
acccgccgttggaggaagtaacggtgtagcttgcaccccggtcccccaca

SEQ ID NO: 192900 - DNA, 50 bp, Artificial
  Synthetic oligonucleotide
acgtggccgcacccgtcaagggtgaacgccgtgtctcgcctctcgtacgt

SEQ ID NO: 192901 - DNA, 50 bp, Artificial
  Synthetic oligonucleotide
acgtgcagcgagcgagcggcgagggagacccaggcaaggtacaccccggc

SEQ ID NO: 192902 - DNA, 50 bp, Artificial
  Synthetic oligonucleotide
acgtcgccgcactgtatgtggaccggatctccaaaggggacatgcctccc

SEQ ID NO: 192903 - DNA, 55 bp, Artificial
  Synthetic oligonucleotide
accacgccatggtccccgaaaggagcggcgacgtaaagcatgtcggtgtggaggg

SEQ ID NO: 192904 - DNA, 50 bp, Artificial
  Synthetic oligonucleotide
acgtccgggctcctgcccctggcgtgttaccagtcgatcgctgcgctcgt

SEQ ID NO: 192905 - DNA, 50 bp, Artificial
  Synthetic oligonucleotide
acggtttcctgctcccggggcacctatgtgagaacgctggcacacgacat

SEQ ID NO: 192906 - DNA, 50 bp, Artificial
  Synthetic oligonucleotide
acggttgcgttctgcgggttaagcgccactgcccgattcaggagcgtttc

SEQ ID NO: 192907 - DNA, 50 bp, Artificial
  Synthetic oligonucleotide
acgggagcgatatgggaaatgctgccgcgaaactcgcgtccggacaatcc

SEQ ID NO: 192908 - DNA, 50 bp, Artificial
  Synthetic oligonucleotide
acgggacgtggcaccatgggagcccctatgattcaaccgcttgcagttgg

SEQ ID NO: 192909 - DNA, 50 bp, Artificial
  Synthetic oligonucleotide
acggccaatcttacggaccagggattgcatcggtcgctcctcatggcgcc

SEQ ID NO: 192910 - DNA, 50 bp, Artificial
  Synthetic oligonucleotide
acggcaggttgcctcactgagcgactatgaccgtctggcacggctgcagt

SEQ ID NO: 192911 - DNA, 50 bp, Artificial
  Synthetic oligonucleotide
acggcaggtgaaatacaccctggggagtgaaatgcgtgtcgccgcacagc

SEQ ID NO: 192912 - DNA, 50 bp, Artificial
  Synthetic oligonucleotide
acggcaccgttgcacgacgcacctgataacgcgataacgggctgggattg

SEQ ID NO: 192913 - DNA, 50 bp, Artificial
  Synthetic oligonucleotide
acggacggagaggtggtctgggagaggaacctggatcgttccggcagcta

SEQ ID NO: 192914 - DNA, 55 bp, Artificial
  Synthetic oligonucleotide
gaccgcatcagttgacgaatcctacttcgagcgccgttttgtgggtgcccgacgc

SEQ ID NO: 192915 - DNA, 50 bp, Artificial
  Synthetic oligonucleotide
acggaccgcgtccttcatcggatttgtccccgcagaccgtccccgaatca

SEQ ID NO: 192916 - DNA, 50 bp, Artificial
  Synthetic oligonucleotide
acggaagcgaggctaactggcagaccacgcataggaagcagcttcggggg

SEQ ID NO: 192917 - DNA, 50 bp, Artificial
  Synthetic oligonucleotide
acgctcttttagtaacggccgctcacgcggcagacagaggtgcagcggat

SEQ ID NO: 192918 - DNA, 50 bp, Artificial
  Synthetic oligonucleotide
acgacatgccgagctcccgctgacaccggcgcatgaccgtacgctccgta

SEQ ID NO: 192919 - DNA, 50 bp, Artificial
  Synthetic oligonucleotide
acgaccaacctcagcgtcacctatgtcaggcccgccgttgtgggtgatct

SEQ ID NO: 192920 - DNA, 50 bp, Artificial
  Synthetic oligonucleotide
acgaccgcctggggaaacgcccccggcagagcacagagtatccgctgaag

SEQ ID NO: 192921 - DNA, 50 bp, Artificial
  Synthetic oligonucleotide
acgagcatgtcgttggggcacttgccgcagtgttcacccggatgcgactg

SEQ ID NO: 192922 - DNA, 50 bp, Artificial
  Synthetic oligonucleotide
acgaggaggcccgagctctccttgccacgatcgctgctgcgtagttaggg

SEQ ID NO: 192923 - DNA, 50 bp, Artificial
  Synthetic oligonucleotide
acgagttcagcctggagtactccgcccccacctgaccggttgagtccatg

SEQ ID NO: 192924 - DNA, 50 bp, Artificial
  Synthetic oligonucleotide
acgatcttgctgtggcagccggcagtgaaagcgtcgtcccaactcgcact

SEQ ID NO: 192925 - DNA, 55 bp, Artificial
  Synthetic oligonucleotide
gaccgatgcctatggtcgcgtagactatgtgaaaagctagcgaaacacccataag

SEQ ID NO: 192926 - DNA, 50 bp, Artificial
  Synthetic oligonucleotide
acgcaatgtcagacctgccatcccggtggcatcctccccagccacaagtg

SEQ ID NO: 192927 - DNA, 50 bp, Artificial
  Synthetic oligonucleotide
acgcaccgacggagcaacgacgccgtcaggcaagcacccgcttgagggcc

SEQ ID NO: 192928 - DNA, 50 bp, Artificial
  Synthetic oligonucleotide
acgccaccactagggtagcggccggcattgggcaagtacgggggctggtg

SEQ ID NO: 192929 - DNA, 50 bp, Artificial
  Synthetic oligonucleotide
acgccgtgaaaccggcccaatcagaggcgctgtcagcgtatgcgcccatt

SEQ ID NO: 192930 - DNA, 50 bp, Artificial
  Synthetic oligonucleotide
acgcctgacgcctgggagcgggaatccttgatgcggttcgaagaggggag

SEQ ID NO: 192931 - DNA, 50 bp, Artificial
  Synthetic oligonucleotide
acgccttaccgagaagcacaacctgggagacggggcaggactccatcgca

SEQ ID NO: 192932 - DNA, 50 bp, Artificial
  Synthetic oligonucleotide
acgcgaggcttgtccttgctcttcggcctagcagtgtggacgccccagac

SEQ ID NO: 192933 - DNA, 50 bp, Artificial
  Synthetic oligonucleotide
acgcggcaccctcgcttaccgaggtgacggcagttgacgtgatgcccggc

SEQ ID NO: 192934 - DNA, 50 bp, Artificial
  Synthetic oligonucleotide
acgctccgctcaccgtggagggattcccggaggggaccgtcttcaatgag

SEQ ID NO: 192935 - DNA, 55 bp, Artificial
  Synthetic oligonucleotide
accaggatttatggaaggttgattgggagtaccttacaaatcgcgccaaggagct

SEQ ID NO: 192936 - DNA, 55 bp, Artificial
  Synthetic oligonucleotide
gacccggagcaaggagatacggcactaggccgttctggtgaacgcgtttatttac

SEQ ID NO: 192937 - DNA, 55 bp, Artificial
  Synthetic oligonucleotide
gaatcatgctatcggtacagttgcttgcataagccattctttgatgcctctcgac

SEQ ID NO: 192938 - DNA, 55 bp, Artificial
  Synthetic oligonucleotide
ctttcgttttgcgcatgaccccttgtctgtcacgccaaacccgctcccttctcgg

SEQ ID NO: 192939 - DNA, 55 bp, Artificial
  Synthetic oligonucleotide
accccggttgcagaatgccggactgacccatggggaatcgtccaagaacgggctg

SEQ ID NO: 192940 - DNA, 55 bp, Artificial
  Synthetic oligonucleotide
ctttacaccggattaaggtgttgggtcgagatcttcaggtcaggagtactgctga

SEQ ID NO: 192941 - DNA, 60 bp, Artificial
  Synthetic oligonucleotide
tgattgcttcagactcagacgttacttttggcatcctgcactctcgtatccacgagctct

SEQ ID NO: 192942 - DNA, 55 bp, Artificial
  Synthetic oligonucleotide
cttgcgttgaaaccaactctccggtgatcattcaggtctccaaaggggcccgtag

SEQ ID NO: 192943 - DNA, 55 bp, Artificial
  Synthetic oligonucleotide
cttgaaattatcaagggtcccggcggcgtataatacgtcatgaacactattcacc

SEQ ID NO: 192944 - DNA, 55 bp, Artificial
  Synthetic oligonucleotide
ctgggagagtcgccgtcgcatgtggtgaaggaaccgcgttccatgcggtaatcct

SEQ ID NO: 192945 - DNA, 55 bp, Artificial
  Synthetic oligonucleotide
ctgcggtacggtcatagacaaaccggagaacatcggcagagtgcagtcggtagtc

SEQ ID NO: 192946 - DNA, 55 bp, Artificial
  Synthetic oligonucleotide
ctgcatgacattcagccgttgggtgatccgaaatcccattccaaccgcgaattcc

SEQ ID NO: 192947 - DNA, 55 bp, Artificial
  Synthetic oligonucleotide
ctcgttggccgtaaagaccatcatgaaagcagaattcaacgaataagcgcatact

SEQ ID NO: 192948 - DNA, 55 bp, Artificial
  Synthetic oligonucleotide
ctcgtgtgacttattgaaacagggcctcgcaatacgcccattatgcacgtggttg

SEQ ID NO: 192949 - DNA, 55 bp, Artificial
  Synthetic oligonucleotide
ctccccaacttgttgtcggctatcaaccgctccactttgctggtgacgctctcgg

SEQ ID NO: 192950 - DNA, 55 bp, Artificial
  Synthetic oligonucleotide
ctcccaacaatcgggcgggtctccctggtaattatggacaatcgcagacaggcct

SEQ ID NO: 192951 - DNA, 55 bp, Artificial
  Synthetic oligonucleotide
ctatgcccactccaccagaaccaagcggagtcgctatggcagcaatggtatcacg

SEQ ID NO: 192952 - DNA, 53 bp, Artificial
  Synthetic oligonucleotide
gatccgggtaatccttccccgtaccttgtctcctttggacagagaaacaaaga

SEQ ID NO: 192953 - DNA, 55 bp, Artificial
  Synthetic oligonucleotide
ctactagccttgctgctccgtttccagtaggcctgcatgaaatagttcagtgtcg

SEQ ID NO: 192954 - DNA, 55 bp, Artificial
  Synthetic oligonucleotide
ctacgcggctgacgcttccctttaccgcgccgactgttacctgcacttgtccggg

SEQ ID NO: 192955 - DNA, 55 bp, Artificial
  Synthetic oligonucleotide
cgtgacgttagtctggacataattgtcgcttatcttagctacacgcgcagaagct

SEQ ID NO: 192956 - DNA, 55 bp, Artificial
  Synthetic oligonucleotide
cattggaaatccgctcccagccgtaattcacgttaagatccacatcgccgtaaaa

SEQ ID NO: 192957 - DNA, 55 bp, Artificial
  Synthetic oligonucleotide
catcggattcttcgtcaagaagtcctatccaagccaactggaaacctccatgctc

SEQ ID NO: 192958 - DNA, 55 bp, Artificial
  Synthetic oligonucleotide
cataatcgacagggaaacactggtttcacaggtctatctgccgcatgaggggagg

SEQ ID NO: 192959 - DNA, 55 bp, Artificial
  Synthetic oligonucleotide
cataaccttgccatgatgcgtcataacatgcacattgtggttcggagcacgacgg

SEQ ID NO: 192960 - DNA, 55 bp, Artificial
  Synthetic oligonucleotide
cagcagtcactgctcctcttctttgaaccacttttcgaaccagctccggtggtcc

SEQ ID NO: 192961 - DNA, 55 bp, Artificial
  Synthetic oligonucleotide
cagagggtgcggaaccttcggctaccccttgtgggacttatagttcaggacctgc

SEQ ID NO: 192962 - DNA, 55 bp, Artificial
  Synthetic oligonucleotide
cacgggattgctcccgtggggcttttgttctttgctatgccggcggttcttagtc

SEQ ID NO: 192963 - DNA, 60 bp, Artificial
  Synthetic oligonucleotide
gtcatccaacgatcagtattgcccggcagtgtgagctgcttggagtaagccgctcttgcc

SEQ ID NO: 192964 - DNA, 55 bp, Artificial
  Synthetic oligonucleotide
cacgcttgcttgcgtgaaaatttccatgcgacgttaaaaccgtagataacaaagc

SEQ ID NO: 192965 - DNA, 55 bp, Artificial
  Synthetic oligonucleotide
cacacgatccaggaagacccgtaccaacgagtcggtcatcaggacatcacgagcc

SEQ ID NO: 192966 - DNA, 55 bp, Artificial
  Synthetic oligonucleotide
cacaagtactcctcgcccctaaatgattgccagaactgctaccctggcagagtca

SEQ ID NO: 192967 - DNA, 55 bp, Artificial
  Synthetic oligonucleotide
caagttgggcatggaacaaggtcacgaaactctcggaattctctaggtcctcatt

SEQ ID NO: 192968 - DNA, 55 bp, Artificial
  Synthetic oligonucleotide
caaagtgagaggtagacgtcccgcaaatctccccgatagcgctccaccgtatggc

SEQ ID NO: 192969 - DNA, 54 bp, Artificial
  Synthetic oligonucleotide
caaaggttttcgggtgttttgctgaagaccgacacttcaggaatttcaaagcca

SEQ ID NO: 192970 - DNA, 55 bp, Artificial
  Synthetic oligonucleotide
agactgtttaagcaggggaagcgatgttggttgtccgtcaagaaagagcctgcca

SEQ ID NO: 192971 - DNA, 55 bp, Artificial
  Synthetic oligonucleotide
atgattatcatgccgaacggctctatccgggaataggcaacggactggcgatatg

SEQ ID NO: 192972 - DNA, 55 bp, Artificial
  Synthetic oligonucleotide
agagcggttgatagacttgggtcaagctttcgcatgtgaatgcgagcggctctgg

SEQ ID NO: 192973 - DNA, 55 bp, Artificial
  Synthetic oligonucleotide
atcgtggtggtccagtacatgcacggcatactttacatccgtttcgtaggaactc

SEQ ID NO: 192974 - DNA, 55 bp, Artificial
  Synthetic oligonucleotide
ggtcggtaccctttgattcgtaggtcagggctcctttggagttttcatcctgcca

SEQ ID NO: 192975 - DNA, 53 bp, Artificial
  Synthetic oligonucleotide
atattctcccttggaaggaccgaaaccaatgggaaacgcaatgcccggtacaa

SEQ ID NO: 192976 - DNA, 55 bp, Artificial
  Synthetic oligonucleotide
ataataggcgtaggcgcagaagtcgccgctatccagaagcctcttgatcggcccg

SEQ ID NO: 192977 - DNA, 55 bp, Artificial
  Synthetic oligonucleotide
ataacctcggaagagtgctccgcgcgcttccatgtctcctcgactcaggtaaacg

SEQ ID NO: 192978 - DNA, 55 bp, Artificial
  Synthetic oligonucleotide
ataaccggcactacaagaacgaaaaccgttatcactccatacgcgatcgacgcac

SEQ ID NO: 192979 - DNA, 55 bp, Artificial
  Synthetic oligonucleotide
agcagccaattcgtgcttctggaccttctcaggcacccgcatccactgtgccgcg

SEQ ID NO: 192980 - DNA, 54 bp, Artificial
  Synthetic oligonucleotide
agggttccaggcccattgtcaggacgtgccacaccgggcgaaggggaccacgat

SEQ ID NO: 192981 - DNA, 55 bp, Artificial
  Synthetic oligonucleotide
agccctggcaggacagctagggatattgcgacgcccgaagggccaggagcaaatc

SEQ ID NO: 192982 - DNA, 55 bp, Artificial
  Synthetic oligonucleotide
cgctattattaacggaaggcagcgtaatgaggaccatacatgacgcaagaaaagc

SEQ ID NO: 192983 - DNA, 55 bp, Artificial
  Synthetic oligonucleotide
cgccggttcttgaaccactgctcgattaccgcatagaccgtggaattgatgtaaa

SEQ ID NO: 192984 - DNA, 55 bp, Artificial
  Synthetic oligonucleotide
cgccgacattgtgtttcgatagggcgattctgttcacgacggcacgacacttgta

SEQ ID NO: 192985 - DNA, 52 bp, Artificial
  Synthetic oligonucleotide
agtcgggttgtccacgacggaccggggtagcgcacccgcgacacacccgtcc

SEQ ID NO: 192986 - DNA, 54 bp, Artificial
  Synthetic oligonucleotide
gcggcccacggatataccaaatactgtccgggccctcgagaaatgggttccgga

SEQ ID NO: 192987 - DNA, 55 bp, Artificial
  Synthetic oligonucleotide
gcgacactgacccctcagctgcggtcatgtctgacagtagggagatcgctacggc

SEQ ID NO: 192988 - DNA, 55 bp, Artificial
  Synthetic oligonucleotide
cgggaaacactacccagccgtcatgtatgagcaaccttcgctaggccgttgtcct

SEQ ID NO: 192989 - DNA, 55 bp, Artificial
  Synthetic oligonucleotide
gccgtcagacagtcgatagttcgccttggtcgttacgctggcactgcctcgcaag

SEQ ID NO: 192990 - DNA, 55 bp, Artificial
  Synthetic oligonucleotide
actgaccccgttggtcaccagacgtgcatgaagggccctcaccgggaggtgaggg

SEQ ID NO: 192991 - DNA, 53 bp, Artificial
  Synthetic oligonucleotide
cggggtaatccggacccggaccgtccaagacagggcggaccacgcaaggcaca

SEQ ID NO: 192992 - DNA, 55 bp, Artificial
  Synthetic oligonucleotide
ctctgactagtcagtgagacaacctagtcgggctcgtgtgaccactgtgaccgga

SEQ ID NO: 192993 - DNA, 54 bp, Artificial
  Synthetic oligonucleotide
gagacagcgactagcccaggaaggacgcgtacccgtcgaagacctagcaccgag

SEQ ID NO: 192994 - DNA, 54 bp, Artificial
  Synthetic oligonucleotide
gagcagaggcactgaggcgacgagcggttcgggtgtcgccctactcgacggacg

SEQ ID NO: 192995 - DNA, 53 bp, Artificial
  Synthetic oligonucleotide
ctgaggcatcggtagggcctgagttcggttcgacaacggtcacgctgatcact

SEQ ID NO: 192996 - DNA, 55 bp, Artificial
  Synthetic oligonucleotide
catcgtgagacaggtgtcacacagagtcaccctctgcggatcgcactctcggcgg

SEQ ID NO: 192997 - DNA, 53 bp, Artificial
  Synthetic oligonucleotide
ccctgaccggccgatgaggcaggggaccgtggtcggccgaacctggaggcgag

SEQ ID NO: 192998 - DNA, 53 bp, Artificial
  Synthetic oligonucleotide
ggggctaccagggtgcacggagttgcaccggaggtcccacgcagggcgcacgg

SEQ ID NO: 192999 - DNA, 53 bp, Artificial
  Synthetic oligonucleotide
atcgggttttgttctttcgtagaacataaagcagcgacccggctaacctcaag

SEQ ID NO: 193000 - DNA, 52 bp, Artificial
  Synthetic oligonucleotide
acactagtggacgcggaatcttgcgtttgcgtcggtttggttgctttagtca

SEQ ID NO: 193001 - DNA, 52 bp, Artificial
  Synthetic oligonucleotide
aacccgtcccgctaaccatgcacgaggtcgtaagacctgtcctaaccgtcac

SEQ ID NO: 193002 - DNA, 51 bp, Artificial
  Synthetic oligonucleotide
gcggtaaggctctcagccgcatgctgggatgtagtcgacccctagcacgta

SEQ ID NO: 193003 - DNA, 51 bp, Artificial
  Synthetic oligonucleotide
gcggttggaagccatgccgggagcctaggtggccacagaggcggataaccc

SEQ ID NO: 193004 - DNA, 51 bp, Artificial
  Synthetic oligonucleotide
ggggaacggtccgtcctgggcagaagtagacctatgtagccgtatcgacat

SEQ ID NO: 193005 - DNA, 51 bp, Artificial
  Synthetic oligonucleotide
tgataccggccaggcatcgagtgatgccaaagtgcacttggacgtgcatcg

SEQ ID NO: 193006 - DNA, 50 bp, Artificial
  Synthetic oligonucleotide
acttcagccggttcccctggcacgtatagcggaaggaccccgtcctcctc

SEQ ID NO: 193007 - DNA, 55 bp, Artificial
  Synthetic oligonucleotide
taggcccctgccaggattgcgaccacgtcaacgcgcggtgactcagctctcgtaa

SEQ ID NO: 193008 - DNA, 50 bp, Artificial
  Synthetic oligonucleotide
actagacatggtttgccgggggtgtgctcggctagacgggtgtccttcgg

SEQ ID NO: 193009 - DNA, 50 bp, Artificial
  Synthetic oligonucleotide
acgctcgggactgacccgcacaggcccaggagaaaccgactcccggatct

SEQ ID NO: 193010 - DNA, 50 bp, Artificial
  Synthetic oligonucleotide
acgccgaggaggagcgtcctgcacacgcacgtcggactgtctgccggacc

SEQ ID NO: 193011 - DNA, 50 bp, Artificial
  Synthetic oligonucleotide
acgaccgccccggctagctctccgatgcagtcgttaccaacttgtgacct

SEQ ID NO: 193012 - DNA, 50 bp, Artificial
  Synthetic oligonucleotide
acgacatcctcatgcggtgggacaccaagcccgtgaccccatcaggggga

SEQ ID NO: 193013 - DNA, 50 bp, Artificial
  Synthetic oligonucleotide
accgacacagttacttgacggtgcaagtaccgagcgactactgtcgcttg

SEQ ID NO: 193014 - DNA, 50 bp, Artificial
  Synthetic oligonucleotide
acaacgatcgggttgcgaacagcgatgactcggctcctccgtttcgcggt

SEQ ID NO: 193015 - DNA, 50 bp, Artificial
  Synthetic oligonucleotide
aagtgctccaacgctcgggactgacccgcacaggcccaggagaaaccgac

SEQ ID NO: 193016 - DNA, 50 bp, Artificial
  Synthetic oligonucleotide
aaggcaaaggtaggcccctgccaggattgcgaccacgtcaacgcgcggtg

SEQ ID NO: 193017 - DNA, 50 bp, Artificial
  Synthetic oligonucleotide
aaggagggagaagaccctcgggcgaagaacagtctcccgccctgtagtgc

SEQ ID NO: 193018 - DNA, 55 bp, Artificial
  Synthetic oligonucleotide
gtggacggcgggatcaagaggaccaacgacagagttcgcggagagattccgcgga

SEQ ID NO: 193019 - DNA, 50 bp, Artificial
  Synthetic oligonucleotide
aagcccccacgaggagacgaacgctaaagggcggctcttaagaatcccgc

SEQ ID NO: 193020 - DNA, 50 bp, Artificial
  Synthetic oligonucleotide
aagaggacgtgatccggtgcggttccagcgacgtccagggcccacttcct

SEQ ID NO: 193021 - DNA, 50 bp, Artificial
  Synthetic oligonucleotide
aagacgtccctcctaccgggggtcctgcgccgtctcccctcatgtgctcc

SEQ ID NO: 193022 - DNA, 50 bp, Artificial
  Synthetic oligonucleotide
aacgccacgaatccccacagcgtgtccagaacggctcgtcacgctagcca

SEQ ID NO: 193023 - DNA, 50 bp, Artificial
  Synthetic oligonucleotide
agtagctttggtgtcgatccgacctgagctctcattcaggcgcgctgccc

SEQ ID NO: 193024 - DNA, 49 bp, Artificial
  Synthetic oligonucleotide
agtggccgaattgaggggtgggccgaaaaggacaaacccgggtcagggg

SEQ ID NO: 193025 - DNA, 50 bp, Artificial
  Synthetic oligonucleotide
aggtgtccgcagccatacgcggatgaccgcatcaaccgtcggacctgggt

SEQ ID NO: 193026 - DNA, 50 bp, Artificial
  Synthetic oligonucleotide
atctcccgacccaacagctgccgtgtccgcactgcagatactcggtaccc

SEQ ID NO: 193027 - DNA, 50 bp, Artificial
  Synthetic oligonucleotide
atgcgagccgccccaaggactggtcgcttgttgggcaactcataccgaat

SEQ ID NO: 193028 - DNA, 50 bp, Artificial
  Synthetic oligonucleotide
atgcgggtcaacgctcgcctctacaacccggggatcaacaccgtgcgagt

SEQ ID NO: 193029 - DNA, 55 bp, Artificial
  Synthetic oligonucleotide
ccaatgtgcgaaacggccctgtagcgcagagtagtgacggttccgtgacggagcc

SEQ ID NO: 193030 - DNA, 50 bp, Artificial
  Synthetic oligonucleotide
attggaccgaccactcaccgcttggcgtagccacggacgtatcctggttg

SEQ ID NO: 193031 - DNA, 50 bp, Artificial
  Synthetic oligonucleotide
attgtccggtcgatggaggtcaccgtgagcgatgtcctgaggacgagccc

SEQ ID NO: 193032 - DNA, 50 bp, Artificial
  Synthetic oligonucleotide
cacggaggcctcctcgtcagtgtgtacccccgttccgtggagtacagcgc

SEQ ID NO: 193033 - DNA, 50 bp, Artificial
  Synthetic oligonucleotide
cacggtggctccgaccccctaaccgcggctccctcaacgcacctgcgacc

SEQ ID NO: 193034 - DNA, 50 bp, Artificial
  Synthetic oligonucleotide
cactctaggccggggtgtgagcttggtgacaagtgggcacctgggattgg

SEQ ID NO: 193035 - DNA, 50 bp, Artificial
  Synthetic oligonucleotide
cactgaccgtccatgcgaaaccagtggtcccacggagcaccgtgaatccc

SEQ ID NO: 193036 - DNA, 50 bp, Artificial
  Synthetic oligonucleotide
aggggcgatgcttagactcgcaccctgaccaggttctgccacccggccat

SEQ ID NO: 193037 - DNA, 50 bp, Artificial
  Synthetic oligonucleotide
agcggtgcaactactagatgtaggggaaccctaggccgggccccactaga

SEQ ID NO: 193038 - DNA, 50 bp, Artificial
  Synthetic oligonucleotide
agcgaggctacgagcagcaccgtcgaaggtcggtaggcggacggggtggc

SEQ ID NO: 193039 - DNA, 50 bp, Artificial
  Synthetic oligonucleotide
agccgtcgtgaggtcattgagccattcccagtaacggcttggggctggtt

SEQ ID NO: 193040 - DNA, 55 bp, Artificial
  Synthetic oligonucleotide
ccgctcccctcaccgtcgtgccgtgtggtggagtcagcaaaccagacccgcggat

SEQ ID NO: 193041 - DNA, 50 bp, Artificial
  Synthetic oligonucleotide
acttggggattcgtgctcctccgtagccagcaggtgccgggtcctacgat

SEQ ID NO: 193042 - DNA, 55 bp, Artificial
  Synthetic oligonucleotide
ggccgtcctggatgtctaattacgtatcttttggagtgttgtgtgggactgcccc

SEQ ID NO: 193043 - DNA, 55 bp, Artificial
  Synthetic oligonucleotide
ccgtgttgctcgcacagggcgctcgacgcgtcatcgtgttggacgagtacgccca

SEQ ID NO: 193044 - DNA, 55 bp, Artificial
  Synthetic oligonucleotide
cgaactctgctcctaccgagggagttcgtcaagtgaactcaggccgctatgctgg

SEQ ID NO: 193045 - DNA, 54 bp, Artificial
  Synthetic oligonucleotide
accgtcaccaaaccacccttcggcacgacaccacaacccgcatcgttacctcgc

SEQ ID NO: 193046 - DNA, 55 bp, Artificial
  Synthetic oligonucleotide
cgctggggtcccttcgctgtggtggtgacacgtgtgggtcaacagtagttgaggg

SEQ ID NO: 193047 - DNA, 55 bp, Artificial
  Synthetic oligonucleotide
gactgtgccgtgaactcctgggtctgttcagatccatccgctacgacctccgcca

SEQ ID NO: 193048 - DNA, 55 bp, Artificial
  Synthetic oligonucleotide
gcatcccggacacgtgtgccaatcgcttgtgccccaacgccaccagatagtccac

SEQ ID NO: 193049 - DNA, 55 bp, Artificial
  Synthetic oligonucleotide
gccgaggtatacccgctcatgctccaacatgactgtccacacactacctaacccg

SEQ ID NO: 193050 - DNA, 55 bp, Artificial
  Synthetic oligonucleotide
gcggcaccctcgcaggttcaggtcattgagagcggcttgccgtagattgagctgg

SEQ ID NO: 193051 - DNA, 55 bp, Artificial
  Synthetic oligonucleotide
aagctacggattcgcttggcccgcaacatccccacgcggtggacacttggcggta

SEQ ID NO: 193052 - DNA, 55 bp, Artificial
  Synthetic oligonucleotide
ggagttcaggcattccacatcgcaacgactctgcctggccgcctgatcacccaag

SEQ ID NO: 193053 - DNA, 55 bp, Artificial
  Synthetic oligonucleotide
ggatatccaggcagataggcaccgtagcctgcgatcgtccattgcgatctcgcgt

SEQ ID NO: 193054 - DNA, 55 bp, Artificial
  Synthetic oligonucleotide
ggccggtatgccacgtcgagtcatccatgtgcgacaccttagcgggaggcactga

SEQ ID NO: 193055 - DNA, 55 bp, Artificial
  Synthetic oligonucleotide
ggctgtcgtagcctaccggacatgcgatggttaaatcgattcaattcgtaggtgg

SEQ ID NO: 193056 - DNA, 52 bp, Artificial
  Synthetic oligonucleotide
agaaccctagtgtgtccagtgtgggttttccacaggttgggagtcgtttccg

SEQ ID NO: 193057 - DNA, 53 bp, Artificial
  Synthetic oligonucleotide
ggggaacgagggttacctgccacacgtagaagttaccgcataaccggcgctcg

SEQ ID NO: 193058 - DNA, 54 bp, Artificial
  Synthetic oligonucleotide
ggggtatcagtcgacgcaaccctttcaggggagggtcggtagccgaaaagatga

SEQ ID NO: 193059 - DNA, 54 bp, Artificial
  Synthetic oligonucleotide
ggggtgtaaccgggctcatatgggcttcgtaaccgacgatgttaacggatatcg

SEQ ID NO: 193060 - DNA, 55 bp, Artificial
  Synthetic oligonucleotide
ggtcagagttctcatggcgccctttcgatccgtactcgacgatggactcctgacg

SEQ ID NO: 193061 - DNA, 55 bp, Artificial
  Synthetic oligonucleotide
ttccggccgccaaggggactatcgctgacgtcgtggggtcacagacagtgccgta

SEQ ID NO: 193062 - DNA, 55 bp, Artificial
  Synthetic oligonucleotide
gtgccacggcgtccgaagaaccgtcgcaccaatgccacaaccgcgaggctgaaca

SEQ ID NO: 193063 - DNA, 54 bp, Artificial
  Synthetic oligonucleotide
agtacgatgtgtgagccttcgtctcgcgtttgccgagaccactgtcggctgggg

SEQ ID NO: 193064 - DNA, 53 bp, Artificial
  Synthetic oligonucleotide
acggctcgcaccggagttccaccatcgttaaggagaagcgtggcgctgtatcc

SEQ ID NO: 193065 - DNA, 51 bp, Artificial
  Synthetic oligonucleotide
ttaccgcataaccggcgctcgtatcagcaccgtttcacgtggacagtcgaa

SEQ ID NO: 193066 - DNA, 51 bp, Artificial
  Synthetic oligonucleotide
attggatgacgcagtgctccagggtgtgggtacgaagggtttccagagccc

SEQ ID NO: 193067 - DNA, 55 bp, Artificial
  Synthetic oligonucleotide
atcttcacgcgtccgcaccgtccgtccagtagcgattgtggctttccgcggacca

SEQ ID NO: 193068 - DNA, 50 bp, Artificial
  Synthetic oligonucleotide
acgaagagccgctgagttgcaacggaagtcgccatgagccccgggaggca

SEQ ID NO: 193069 - DNA, 50 bp, Artificial
  Synthetic oligonucleotide
acctactgacccaccgcaaccacgtcaataccccaagcccctcgttcgcc

SEQ ID NO: 193070 - DNA, 50 bp, Artificial
  Synthetic oligonucleotide
accgtatgacgatcccggcccgtgggggttgggcacaactcgaggagacg

SEQ ID NO: 193071 - DNA, 50 bp, Artificial
  Synthetic oligonucleotide
aaacggggatgtcgcgaggactcgtcgtttcgtagggtcggggcagtacc

SEQ ID NO: 193072 - DNA, 50 bp, Artificial
  Synthetic oligonucleotide
aaacgtcgccagcgggactagcgtcgttcggttcctcgtccttccctgaa

SEQ ID NO: 193073 - DNA, 50 bp, Artificial
  Synthetic oligonucleotide
aacaccggtgctccaaggggtgggaggcgtctgaatgtcgcgtgagtata

SEQ ID NO: 193074 - DNA, 50 bp, Artificial
  Synthetic oligonucleotide
aacagcccgattatcgtccgtgatttggcgtgcgtgagcaccctaccgcg

SEQ ID NO: 193075 - DNA, 50 bp, Artificial
  Synthetic oligonucleotide
aacaggatcgactgatcgccgctattcccccgggtacgtcacacccagct

SEQ ID NO: 193076 - DNA, 50 bp, Artificial
  Synthetic oligonucleotide
aacatgcggcacagtatgcccagcgaaagtaacgggagtgagaggggccg

SEQ ID NO: 193077 - DNA, 50 bp, Artificial
  Synthetic oligonucleotide
aacccgcatcgttacctcgcccccgcgtgatgactgccgggcgctgcctt

SEQ ID NO: 193078 - DNA, 54 bp, Artificial
  Synthetic oligonucleotide
ccacctgaacgactggggtggccgggtatggtcgtacgtcggataggcgcgaaa

SEQ ID NO: 193079 - DNA, 50 bp, Artificial
  Synthetic oligonucleotide
aaccggttcagctggcgactatcgggcaatggcgtctacaagacagccgc

SEQ ID NO: 193080 - DNA, 50 bp, Artificial
  Synthetic oligonucleotide
aagcctgtcagacacccgatacgccgcgaaaaggggcttgccaggcgagt

SEQ ID NO: 193081 - DNA, 50 bp, Artificial
  Synthetic oligonucleotide
aagcggcaactcccgcgagtcccgttccatgaggcaccgaaccagattct

SEQ ID NO: 193082 - DNA, 50 bp, Artificial
  Synthetic oligonucleotide
aaggtgcaggggtcatgtcacgactgacacaccgtgacgtcgcgaacgcg

SEQ ID NO: 193083 - DNA, 50 bp, Artificial
  Synthetic oligonucleotide
aaggtggctaccggtaaggacgctcggacgccacatcgcttacgccccaa

SEQ ID NO: 193084 - DNA, 50 bp, Artificial
  Synthetic oligonucleotide
aatgctcggcacgggtgctcccaggtcgtaaatccgttttcggtgtcagt

SEQ ID NO: 193085 - DNA, 50 bp, Artificial
  Synthetic oligonucleotide
acaatccggagctgcccacacaacccactctggacattaccgcgaaggcc

SEQ ID NO: 193086 - DNA, 50 bp, Artificial
  Synthetic oligonucleotide
acaatcgacgtaagggcaccgggagcgcattgggcaaacgactcgcgtcc

SEQ ID NO: 193087 - DNA, 50 bp, Artificial
  Synthetic oligonucleotide
acacggtggcacagctccaaactacggcggtacgccgctatacctcgcac

SEQ ID NO: 193088 - DNA, 50 bp, Artificial
  Synthetic oligonucleotide
accacccttcggcacgacaccacaacccgcatcgttacctcgcccccgcg

SEQ ID NO: 193089 - DNA, 55 bp, Artificial
  Synthetic oligonucleotide
ccccgccagacaccattagcgacacgacaagacgcgtcaagccgtcattgtccat

SEQ ID NO: 193090 - DNA, 50 bp, Artificial
  Synthetic oligonucleotide
accacggtttcaccgcccacgggaggttcggacgatgttcctgtcagtgc

SEQ ID NO: 193091 - DNA, 50 bp, Artificial
  Synthetic oligonucleotide
accagcagatggactgtcgcggttgtcacgtatgcggcggacgggtttcg

SEQ ID NO: 193092 - DNA, 50 bp, Artificial
  Synthetic oligonucleotide
accagctagaccccacgccgcaacgctgctaggttggcgggcgctctcgt

SEQ ID NO: 193093 - DNA, 50 bp, Artificial
  Synthetic oligonucleotide
accaggatcccaaggacggcgcctgagtccgcgtttcccttccgttctct

SEQ ID NO: 193094 - DNA, 50 bp, Artificial
  Synthetic oligonucleotide
acccaactggtcgtacatcccaccccgggccatccgactcgcggtgtgcc

SEQ ID NO: 193095 - DNA, 50 bp, Artificial
  Synthetic oligonucleotide
acccatgacggccaactgcggagcagaaacctcgctatcagccgaaaccc

SEQ ID NO: 193096 - DNA, 50 bp, Artificial
  Synthetic oligonucleotide
acccattgtccggtacccctggtgggggtgtgcttactcaacgcgggtca

SEQ ID NO: 193097 - DNA, 50 bp, Artificial
  Synthetic oligonucleotide
accccttggcgccaccctgcaaatcgagcgtcggtataatcgtgcgctca

SEQ ID NO: 193098 - DNA, 50 bp, Artificial
  Synthetic oligonucleotide
acccggtggccgtccgtctgtaatcctgtaccacgagatggcacatggcg

SEQ ID NO: 193099 - DNA, 50 bp, Artificial
  Synthetic oligonucleotide
accctgtcgcagaacgtccagcgaaactaccccgaacggccaattggcga

SEQ ID NO: 193100 - DNA, 53 bp, Artificial
  Synthetic oligonucleotide
cccggcgatgggtttcggatcggatttgctcgtggaggggacgtcgtaggaac

SEQ ID NO: 193101 - DNA, 50 bp, Artificial
  Synthetic oligonucleotide
accgacgctgtgccacggttacgccgggttccttcaatcggctcccgaca

SEQ ID NO: 193102 - DNA, 50 bp, Artificial
  Synthetic oligonucleotide
accgcatagccccgtcacagtcgcgccgtttaggctggtgccgttcgtat

SEQ ID NO: 193103 - DNA, 50 bp, Artificial
  Synthetic oligonucleotide
accggctccccacggtttccatcgcactgtcaggactcagatcggggccc

SEQ ID NO: 193104 - DNA, 55 bp, Artificial
  Synthetic oligonucleotide
ccgcatcatgccgaagtcgacctgaatacgaacctacacaagtaccccgcatccc

SEQ ID NO: 193105 - DNA, 55 bp, Artificial
  Synthetic oligonucleotide
cgcaccgtgtccgttctcatgacggcaattctcgtcacgacctggcctttgacgt

SEQ ID NO: 193106 - DNA, 54 bp, Artificial
  Synthetic oligonucleotide
cgcgtcaaagcaacaccgaagccgcaacatttcccttaaccccgtatgaaccca

SEQ ID NO: 193107 - DNA, 60 bp, Artificial
  Synthetic oligonucleotide
accacactcatcgttcagtgaaggactggacagacttaccgcatctctacacctcggcga

SEQ ID NO: 193108 - DNA, 60 bp, Artificial
  Synthetic oligonucleotide
agagtgctgcaccttatagggttcacattatgcaccctatggggtacagtcaagtcatga

SEQ ID NO: 193109 - DNA, 52 bp, Artificial
  Synthetic oligonucleotide
gtgtccaatgctacccgagttgtctgaggccggtggaccgcccggttcagcg

SEQ ID NO: 193110 - DNA, 52 bp, Artificial
  Synthetic oligonucleotide
gttgccattccctagcctaacaaccgaacggaaattaatgactcagaacact

SEQ ID NO: 193111 - DNA, 52 bp, Artificial
  Synthetic oligonucleotide
tcgaggcgtgtagtggtccctaggtgtctgtactataacacggtctatactc

SEQ ID NO: 193112 - DNA, 52 bp, Artificial
  Synthetic oligonucleotide
tgtgggcgtaccggtcgcagtggcgctcgacttctcgtccgacagctgtcag

SEQ ID NO: 193113 - DNA, 52 bp, Artificial
  Synthetic oligonucleotide
agtacccgcggtgaccatcgctggggcaatcggtcgagaacgtagggaccca

SEQ ID NO: 193114 - DNA, 51 bp, Artificial
  Synthetic oligonucleotide
ccccagccggtacttccgaacggcagattcgtgtcaccgaggccaatcggg

SEQ ID NO: 193115 - DNA, 51 bp, Artificial
  Synthetic oligonucleotide
cgatcgcctgtgagtgtgctgaacatcgcacttcgacgggtaggctgacca

SEQ ID NO: 193116 - DNA, 51 bp, Artificial
  Synthetic oligonucleotide
tatttgctgccagtctagaacaaactaccctgcttagtagccgaagcctgg

SEQ ID NO: 193117 - DNA, 51 bp, Artificial
  Synthetic oligonucleotide
tagtcgagtgacggactgaggtcggcgtctgtggtgtggtcggcccatcgg

SEQ ID NO: 193118 - DNA, 51 bp, Artificial
  Synthetic oligonucleotide
acaagtggggaatcgcgcgtaaggcagtcgaggcaacgatcccaccgcaca

SEQ ID NO: 193119 - DNA, 57 bp, Artificial
  Synthetic oligonucleotide
gccgagtgggagggttcgacaatcgatgggccgcgtaagagggactcgagctaccga

SEQ ID NO: 193120 - DNA, 51 bp, Artificial
  Synthetic oligonucleotide
ggtggggcacgccgtacccagcgatcgtgacactgtgggagagcgcgtggg

SEQ ID NO: 193121 - DNA, 51 bp, Artificial
  Synthetic oligonucleotide
atcactctcggtaacggcgacgactggtcttgggccgaaccggcactcgtc

SEQ ID NO: 193122 - DNA, 51 bp, Artificial
  Synthetic oligonucleotide
ttgtcctcaggggtggcgttgcgtgccatacgtcgagctcctaccaaagtg

SEQ ID NO: 193123 - DNA, 51 bp, Artificial
  Synthetic oligonucleotide
atctatggatgcgcccagaaactgttgccgcagacaacgcttgaactctac

SEQ ID NO: 193124 - DNA, 51 bp, Artificial
  Synthetic oligonucleotide
gaaacgcccggggcgggttgtggtaaggcgtgcatatcggcaggtcagagg

SEQ ID NO: 193125 - DNA, 51 bp, Artificial
  Synthetic oligonucleotide
tggagttggacaacggtgtcgtctgtgacgagcacctgagaaccagcgttc

SEQ ID NO: 193126 - DNA, 51 bp, Artificial
  Synthetic oligonucleotide
cggtatgcttgcccaccgcggatgaccaatcatctcggaaccggttggcat

SEQ ID NO: 193127 - DNA, 51 bp, Artificial
  Synthetic oligonucleotide
atgcgtgggtgccctccgtgagacgtactgtcacctcgcgaccgagcgagc

SEQ ID NO: 193128 - DNA, 50 bp, Artificial
  Synthetic oligonucleotide
aacaccaggggcccgacaaccgccgacacgcgtcgaacaattgtttgagt

SEQ ID NO: 193129 - DNA, 50 bp, Artificial
  Synthetic oligonucleotide
acacctggccgagtgaaccgagcaacgctccccgcgttccgtcgatcccc

SEQ ID NO: 193130 - DNA, 57 bp, Artificial
  Synthetic oligonucleotide
gcactgcggagcgatagtttgaggtgaggtctgtaaagcggtacccgtccgggagga

SEQ ID NO: 193131 - DNA, 50 bp, Artificial
  Synthetic oligonucleotide
aacagctcggaagggatcccccgtgagcgctatccgaaccccgcaaccat

SEQ ID NO: 193132 - DNA, 50 bp, Artificial
  Synthetic oligonucleotide
aaactgctgcgacgcaggtcacatggggtgtgtcggcgaacacaattgcc

SEQ ID NO: 193133 - DNA, 50 bp, Artificial
  Synthetic oligonucleotide
aacctcccagtgtccgcggctaaccttgggtcgtccttaagtcggcgact

SEQ ID NO: 193134 - DNA, 50 bp, Artificial
  Synthetic oligonucleotide
aactcgaagtagagccgatgcccccaaacgggcgtcacagtgcggaacac

SEQ ID NO: 193135 - DNA, 50 bp, Artificial
  Synthetic oligonucleotide
acaaggcccctcctcccgctccaatgctggcaacctatcacgccgcaaaa

SEQ ID NO: 193136 - DNA, 50 bp, Artificial
  Synthetic oligonucleotide
aatgtcgaagtcaacgtgaggaactacgtgccgttcaccctttccggttt

SEQ ID NO: 193137 - DNA, 50 bp, Artificial
  Synthetic oligonucleotide
aagcgtgcactctgcactgattctggctatctcgcccgaacggtgcgcac

SEQ ID NO: 193138 - DNA, 50 bp, Artificial
  Synthetic oligonucleotide
aaggcctggctgtctctggttcggccactcacgatgactgagggattcgc

SEQ ID NO: 193139 - DNA, 50 bp, Artificial
  Synthetic oligonucleotide
aatcttgggtcgcaacgggcctcacctgggcgtaactgctaacacgcctg

SEQ ID NO: 193140 - DNA, 50 bp, Artificial
  Synthetic oligonucleotide
aagtgaccggtgccatgttctctccgtgggcgaccagcggctaaagtgtt

SEQ ID NO: 193141 - DNA, 58 bp, Artificial
  Synthetic oligonucleotide
agggactgtcctggtagacaggtctcagggtagcgcgcaccctttggtgtccgctaca

SEQ ID NO: 193142 - DNA, 50 bp, Artificial
  Synthetic oligonucleotide
catcaaacgggcgaatccgagcactttgactcgtttcgactcaagttagt

SEQ ID NO: 193143 - DNA, 50 bp, Artificial
  Synthetic oligonucleotide
atccaactcgaacctccgaactcacggcgccccaattctggacgccagac

SEQ ID NO: 193144 - DNA, 50 bp, Artificial
  Synthetic oligonucleotide
agtgacggttctgggtgtcccggtggggcgggtggactccctcgagacca

SEQ ID NO: 193145 - DNA, 50 bp, Artificial
  Synthetic oligonucleotide
gaatcgcgcgtaaggcagtcgaggcaacgatcccaccgcacagccatagg

SEQ ID NO: 193146 - DNA, 50 bp, Artificial
  Synthetic oligonucleotide
agtcggcactccagcaagacccgagtcagtgaggtagacgcgacacgcaa

SEQ ID NO: 193147 - DNA, 50 bp, Artificial
  Synthetic oligonucleotide
aggactcgctcggcataatgcgtcgattgtacgtgcggggccctcgacca

SEQ ID NO: 193148 - DNA, 50 bp, Artificial
  Synthetic oligonucleotide
aggactacgtcgtgaactgctcgccgggtgaactgaacacgggcggtgtg

SEQ ID NO: 193149 - DNA, 50 bp, Artificial
  Synthetic oligonucleotide
gatagagtttctgtacgcgagttcagggtgggtagccatcggagacgctc

SEQ ID NO: 193150 - DNA, 50 bp, Artificial
  Synthetic oligonucleotide
gcccccggttggtacccgagggcgttcgaagtgtgaggggcccgagttgg

SEQ ID NO: 193151 - DNA, 50 bp, Artificial
  Synthetic oligonucleotide
agcacgcgaccaccctaacgaacctccccgcgatcggtttaagctggtac

SEQ ID NO: 193152 - DNA, 58 bp, Artificial
  Synthetic oligonucleotide
gacagtctgtgtcggactggtctcagggtagcgcgtacccttttgttcgcgctagttc

SEQ ID NO: 193153 - DNA, 50 bp, Artificial
  Synthetic oligonucleotide
agacgccacatcgtctactgaccggagcgtccccgtgacagaggttcccg

SEQ ID NO: 193154 - DNA, 50 bp, Artificial
  Synthetic oligonucleotide
gggaacgttgtaggcgtgtaacgttgtcacgtgggaacgttgtgtagtta

SEQ ID NO: 193155 - DNA, 50 bp, Artificial
  Synthetic oligonucleotide
actcgagtccgactgactcccgagctgagaacgacgaagcggcccggttc

SEQ ID NO: 193156 - DNA, 50 bp, Artificial
  Synthetic oligonucleotide
acgtcagaaggggaaccgctcggaccgtgggcgcgtccaagtagacatgc

SEQ ID NO: 193157 - DNA, 50 bp, Artificial
  Synthetic oligonucleotide
acggcacggtggtagcggaactcgtggtcgggggtccattcgattccgta

SEQ ID NO: 193158 - DNA, 50 bp, Artificial
  Synthetic oligonucleotide
acggaccgctcttcgcgcccgtccggttcactaccctccccagagcaacc

SEQ ID NO: 193159 - DNA, 50 bp, Artificial
  Synthetic oligonucleotide
acgcgcaagtcaccactaaggggtgtcgagtagcccgtgaacccttcggc

SEQ ID NO: 193160 - DNA, 50 bp, Artificial
  Synthetic oligonucleotide
acctccgagagtgctgtcctccagtgaatccccggcgacggaacggggtc

SEQ ID NO: 193161 - DNA, 50 bp, Artificial
  Synthetic oligonucleotide
acctcaccgcatgacgctccccgtgcaagaaggtgcaatcgtggcgacca

SEQ ID NO: 193162 - DNA, 50 bp, Artificial
  Synthetic oligonucleotide
accgttgggccccgatttccctccctgcggaccccaggcgaaccacggac

SEQ ID NO: 193163 - DNA, 58 bp, Artificial
  Synthetic oligonucleotide
gacactacgtgcactctcggcaaccgcaaactccctacccatccttgcggcgcttcgt

SEQ ID NO: 193164 - DNA, 50 bp, Artificial
  Synthetic oligonucleotide
accgatgaggccggaagccagtgccatgccccagttgagacccttacgac

SEQ ID NO: 193165 - DNA, 50 bp, Artificial
  Synthetic oligonucleotide
accctggagctcatggctgatagtaagcgcgtccttctcgcgtcgccccg

SEQ ID NO: 193166 - DNA, 50 bp, Artificial
  Synthetic oligonucleotide
acccctgttcagtcagatcgacggcgcacgtaccaagccggacatagccc

SEQ ID NO: 193167 - DNA, 57 bp, Artificial
  Synthetic oligonucleotide
cgtggcccgtcggataccgggatgggcgctctgcgcaggtaggatgtccaaaggtcc

SEQ ID NO: 193168 - DNA, 53 bp, Artificial
  Synthetic oligonucleotide
cgaacgatctaggccaacccattcccggcgtaccacctttgaaggaggttcta

SEQ ID NO: 193169 - DNA, 55 bp, Artificial
  Synthetic oligonucleotide
aaccattcgttcagaccctctaatgcacgggtagatctttgtaacggtaatgttc

SEQ ID NO: 193170 - DNA, 58 bp, Artificial
  Synthetic oligonucleotide
aacacgcatcggcggggattacctgttgggtgtcgccacacggcaatagtgaggtcga

SEQ ID NO: 193171 - DNA, 60 bp, Artificial
  Synthetic oligonucleotide
tcagtatctgtgacccgggtgacataaccgagaatgaacacagtctccctgcgagtcagg

SEQ ID NO: 193172 - DNA, 60 bp, Artificial
  Synthetic oligonucleotide
tgccactaagttaggcacagtagtcacacaagctaacgcggaccgcctcgctagcatcgc

SEQ ID NO: 193173 - DNA, 55 bp, Artificial
  Synthetic oligonucleotide
ttggggcgggaggaccgatcgggcgtaggcgggtacggtcatgacgttgatgaac

SEQ ID NO: 193174 - DNA, 60 bp, Artificial
  Synthetic oligonucleotide
tgaagtttgtgagtgtgagccgggaatctcgcactcaatgaccccgaagggacagtctgt

SEQ ID NO: 193175 - DNA, 56 bp, Artificial
  Synthetic oligonucleotide
tcgtgagttcgccccgcccgtaatacaagtggggaatcgcgcgtaaggcagtcgag

SEQ ID NO: 193176 - DNA, 52 bp, Artificial
  Synthetic oligonucleotide
tccttcgtcctaggtaactactccgttcggtccacaacctttgggaatagtc

SEQ ID NO: 193177 - DNA, 51 bp, Artificial
  Synthetic oligonucleotide
tttgcctgcgtagttaacacgaacgcccccggttggtacccgagggcgttc

SEQ ID NO: 193178 - DNA, 56 bp, Artificial
  Synthetic oligonucleotide
taagtacgagtggccgctatctcccagtgcggatgggtcttagaccaacccctggg

SEQ ID NO: 193179 - DNA, 57 bp, Artificial
  Synthetic oligonucleotide
tgacaacgaatgtgggaggacacgcggaatcgtgccaggtcagggaccccggactcc

SEQ ID NO: 193180 - DNA, 58 bp, Artificial
  Synthetic oligonucleotide
tacccctagacccgctatcgaccattacacacaacgtctgacagtctggggtgcgctt

SEQ ID NO: 193181 - DNA, 57 bp, Artificial
  Synthetic oligonucleotide
agctagggccaatacctagtcggtgacctgcgagtatggccaggtgccgattgatct

SEQ ID NO: 193182 - DNA, 54 bp, Artificial
  Synthetic oligonucleotide
acctaaacattagagcttgggaacgttaggcgatggaaacgttagacgctggga

SEQ ID NO: 193183 - DNA, 57 bp, Artificial
  Synthetic oligonucleotide
ccttggttcaaccacccaccgcacctgctgtggggacacttctaccgcgcagcgtgt

SEQ ID NO: 193184 - DNA, 57 bp, Artificial
  Synthetic oligonucleotide
cacacgtgttgacctagttgacctaaaggtcgctgcgtgtggggagcgcaccccata

SEQ ID NO: 193185 - DNA, 56 bp, Artificial
  Synthetic oligonucleotide
ccagattggggtgcttcagtctcactatttggccgcgcgaatgagtgctggtgggc

SEQ ID NO: 193186 - DNA, 55 bp, Artificial
  Synthetic oligonucleotide
ccgggaatctcgcactcaatgaccccgaagggacagtctgtgtcggactggtctc

SEQ ID NO: 193187 - DNA, 55 bp, Artificial
  Synthetic oligonucleotide
gaccccgatgcggccagtgtagacccgatatcagcccctcctaagaatccggcac

SEQ ID NO: 193188 - DNA, 55 bp, Artificial
  Synthetic oligonucleotide
ttcctcctggtggtccgagtaccgtcgaatccaggctgctcggtgcaagacgtcg

SEQ ID NO: 193189 - DNA, 55 bp, Artificial
  Synthetic oligonucleotide
cctagttaggacaggcttacctgtaccctggctgtcgtggcatcgagtgaggtct

SEQ ID NO: 193190 - DNA, 55 bp, Artificial
  Synthetic oligonucleotide
cttgctgttcatgcctgcgactcagtacccgatccccggaatcacaagcacgccg

SEQ ID NO: 193191 - DNA, 55 bp, Artificial
  Synthetic oligonucleotide
cttccattactggggagtcccggacccggtggatttcgagccaatcccatggcgc

SEQ ID NO: 193192 - DNA, 55 bp, Artificial
  Synthetic oligonucleotide
ctctaatgcacgggtagatctttgtaacggtaatgttccgagtcaatcgttgcgc

SEQ ID NO: 193193 - DNA, 56 bp, Artificial
  Synthetic oligonucleotide
gttgcacgggtcaaaggtttcagatttacaacgttgcaccgttgtgccgctacaaa

SEQ ID NO: 193194 - DNA, 55 bp, Artificial
  Synthetic oligonucleotide
cctgcgatcgggagtcgtcatagctccatcgtgacatgagagaatggatcgcgtg

SEQ ID NO: 193195 - DNA, 55 bp, Artificial
  Synthetic oligonucleotide
ctcgtgatcgttcgcactacgagagcttccgaccctttcaccaatccctctaccg

SEQ ID NO: 193196 - DNA, 53 bp, Artificial
  Synthetic oligonucleotide
ctccgttcggtccacaacctttgggaatagtcgaggcgtgtagtggtccctag

SEQ ID NO: 193197 - DNA, 55 bp, Artificial
  Synthetic oligonucleotide
cggcgcttcggacaccgctggaagattcgctctgtgaggcaacgggcacgtaaac

SEQ ID NO: 193198 - DNA, 55 bp, Artificial
  Synthetic oligonucleotide
cgtcaattaggtaggcgaccagcagaattagtccagttagcgcagcagcgagtgc

SEQ ID NO: 193199 - DNA, 55 bp, Artificial
  Synthetic oligonucleotide
cggcgtcacgaggtgccgtagatcgcgtaccctcgaccgctcatcgcagagcatt

SEQ ID NO: 193200 - DNA, 55 bp, Artificial
  Synthetic oligonucleotide
cggctagcgtgggtgacgatgacttatccgagtgacgagagcagtccttcgggcc

SEQ ID NO: 193201 - DNA, 55 bp, Artificial
  Synthetic oligonucleotide
cggggattacctgttgggtgtcgccacacggcaatagtgaggtcgacgtggtggc

SEQ ID NO: 193202 - DNA, 55 bp, Artificial
  Synthetic oligonucleotide
tccgacgttgctcatagccttcgctttcgttagtactgctcgatcgcagtgcttt

SEQ ID NO: 193203 - DNA, 55 bp, Artificial
  Synthetic oligonucleotide
tcatgccctaacggtagcgttcatccctcgtaacgacaggtgagcatgcctgaag

SEQ ID NO: 193204 - DNA, 60 bp, Artificial
  Synthetic oligonucleotide
gtgcacgttcgacgaagaggtagttgtatccgacggtggcaagtccgcccaatgtcatga

SEQ ID NO: 193205 - DNA, 55 bp, Artificial
  Synthetic oligonucleotide
tcctcatccgagcacggggatcaggggaatcatgtcagcggaccagaggtctcag

SEQ ID NO: 193206 - DNA, 55 bp, Artificial
  Synthetic oligonucleotide
tcagagtgatgacgaaccaggttgcacaacgatcaattttgtaggaaccctacaa

SEQ ID NO: 193207 - DNA, 55 bp, Artificial
  Synthetic oligonucleotide
tcagaaccctcgaaacactgggcatatcgatccgagctcatcgcagtgttaccga

SEQ ID NO: 193208 - DNA, 55 bp, Artificial
  Synthetic oligonucleotide
tcgccctcatacaacggcggccttgatacaacggggaaggccctgactccgcgga

SEQ ID NO: 193209 - DNA, 55 bp, Artificial
  Synthetic oligonucleotide
gtggtaccggggagtaaccaaatcggagcgcactacgctgggccgcatgtacgtg

SEQ ID NO: 193210 - DNA, 55 bp, Artificial
  Synthetic oligonucleotide
gtgcacttaggattctctcagccccgcgtgatcagagcttcctccccttcggttc

SEQ ID NO: 193211 - DNA, 55 bp, Artificial
  Synthetic oligonucleotide
tcttctacgggctggggttccactggttggtccggcatggaatcgcctctggtcg

SEQ ID NO: 193212 - DNA, 55 bp, Artificial
  Synthetic oligonucleotide
gtcgaactactcactgttgaatactcacttctcgatgacctacggctgggttgtc

SEQ ID NO: 193213 - DNA, 55 bp, Artificial
  Synthetic oligonucleotide
tctttccactacccgaggagcactgactatggcacggcaggcgaagaccattccc

SEQ ID NO: 193214 - DNA, 55 bp, Artificial
  Synthetic oligonucleotide
ggtgcgcaccttgctatggaagccgaagtccggcaagcctttccacacggcgaga

SEQ ID NO: 193215 - DNA, 57 bp, Artificial
  Synthetic oligonucleotide
acgcggcccatcgattgtggcgaaccctctcactcggcgcctggactaggtttacta

SEQ ID NO: 193216 - DNA, 55 bp, Artificial
  Synthetic oligonucleotide
ggtcgtgatactcatggtacgagaagagtatcgtgcgtctcatcgatcgcgcagg

SEQ ID NO: 193217 - DNA, 55 bp, Artificial
  Synthetic oligonucleotide
gggacccctcttctctgtgtgacacagtctgccattcccgcggcggtagattcgg

SEQ ID NO: 193218 - DNA, 55 bp, Artificial
  Synthetic oligonucleotide
ggagcccggacttcacatactgggtgaccgctgaacggccgcagtcgaccatgta

SEQ ID NO: 193219 - DNA, 55 bp, Artificial
  Synthetic oligonucleotide
ggactcatcgttgtgagaaaccctgccataccgtggaactcggggtatgaggggt

SEQ ID NO: 193220 - DNA, 50 bp, Artificial
  Synthetic oligonucleotide
ggaacccgtcttcgggtaccgggtcgtaaccaggtttgtgccaaggtcca

SEQ ID NO: 193221 - DNA, 55 bp, Artificial
  Synthetic oligonucleotide
tggatccctctctatagaacttctctttaagaagctcctgtgcacagtgcctccc

SEQ ID NO: 193222 - DNA, 55 bp, Artificial
  Synthetic oligonucleotide
gcagactccacgattccgcgttaccgccgagaacagttgtcgcttccttcgcagc

SEQ ID NO: 193223 - DNA, 55 bp, Artificial
  Synthetic oligonucleotide
tggcataccgatactatgcaccgacgaatgaatactatgcaacgcctccggctgc

SEQ ID NO: 193224 - DNA, 55 bp, Artificial
  Synthetic oligonucleotide
gactcatgcctccgagttatgacgaagtggcctcatgggagcccgaggtcatggc

SEQ ID NO: 193225 - DNA, 55 bp, Artificial
  Synthetic oligonucleotide
gacgtcacgtattcattcaatcatccgggtgcgacgctccgaaggagctccgtcc

SEQ ID NO: 193226 - DNA, 56 bp, Artificial
  Synthetic oligonucleotide
gtcccttcttggttgctcggcgggagtccattgcttcggcccggtaattgatacga

SEQ ID NO: 193227 - DNA, 55 bp, Artificial
  Synthetic oligonucleotide
gacgcggcccataccgccattgaaacaaatggtcgtatctgtgtctatagctcgt

SEQ ID NO: 193228 - DNA, 55 bp, Artificial
  Synthetic oligonucleotide
cccggttgggcgtctacctcagattacacgatgttaaccattcgttcagaccctc

SEQ ID NO: 193229 - DNA, 55 bp, Artificial
  Synthetic oligonucleotide
cccgcccgtaatacaagtggggaatcgcgcgtaaggcagtcgaggcaacgatccc

SEQ ID NO: 193230 - DNA, 55 bp, Artificial
  Synthetic oligonucleotide
acccaccctacagctagactcgaatagatgttcgaggagtggtctgatcggagga

SEQ ID NO: 193231 - DNA, 54 bp, Artificial
  Synthetic oligonucleotide
atcaagactccgatttaactcctacgacacgtagtaggtctagggaccttcgtc

SEQ ID NO: 193232 - DNA, 55 bp, Artificial
  Synthetic oligonucleotide
acgctatgcgtcaacaccagagggtgacactagatagcgcttaaacgtggctcat

SEQ ID NO: 193233 - DNA, 55 bp, Artificial
  Synthetic oligonucleotide
actcgcaggtcatcgccacccgaactcgtcggtaagtgacccttctcacggacaa

SEQ ID NO: 193234 - DNA, 55 bp, Artificial
  Synthetic oligonucleotide
actcgcgtggttcttactggccgccacccgctatacgcctgcccggctctatgcg

SEQ ID NO: 193235 - DNA, 55 bp, Artificial
  Synthetic oligonucleotide
cacctccggactcacattcgggccaccgaatgctcccaccgatcagtggtcctgg

SEQ ID NO: 193236 - DNA, 54 bp, Artificial
  Synthetic oligonucleotide
ctgcgcaaacgccgttgtgatctacgctgatcgggtgcatcaaccgtacgggga

SEQ ID NO: 193237 - DNA, 57 bp, Artificial
  Synthetic oligonucleotide
gtataggtcgaggtaagccgtggctgggctctgggtcactaggggacggcggagatg

SEQ ID NO: 193238 - DNA, 54 bp, Artificial
  Synthetic oligonucleotide
ctgtacgtggaacaccgacccctgttcgaatcccgcgcccatcttgtgaacgct

SEQ ID NO: 193239 - DNA, 54 bp, Artificial
  Synthetic oligonucleotide
ttggcgtactggtctgactcgatccaaccaggagagtcatcggcgattcggcaa

SEQ ID NO: 193240 - DNA, 54 bp, Artificial
  Synthetic oligonucleotide
gcactgttgatcacccctcgggctgggccgtataccgagttaggcacgacctct

SEQ ID NO: 193241 - DNA, 54 bp, Artificial
  Synthetic oligonucleotide
gctagttctgatggacgcgtgtcggatcacgactcggttactgagtcgcggtgg

SEQ ID NO: 193242 - DNA, 54 bp, Artificial
  Synthetic oligonucleotide
tgctggactatttgtccggcaaccgctgtcacggggacgcttaggtcagtaagc

SEQ ID NO: 193243 - DNA, 54 bp, Artificial
  Synthetic oligonucleotide
ggccaccacctcgttgttcccggttgtcgacacccagagcaggtttcgggtgtc

SEQ ID NO: 193244 - DNA, 54 bp, Artificial
  Synthetic oligonucleotide
gtgattcactcgacttcttttcgaccactgtgaggcgaacgatcgcatgtccga

SEQ ID NO: 193245 - DNA, 54 bp, Artificial
  Synthetic oligonucleotide
tcgatcggttcatcaagagtgctcattgcgatcagatcctcaccaagtcgaacg

SEQ ID NO: 193246 - DNA, 54 bp, Artificial
  Synthetic oligonucleotide
accatcgattccgtcgtaattcccgcacaccgatgtccccagtgcacagcgatc

SEQ ID NO: 193247 - DNA, 54 bp, Artificial
  Synthetic oligonucleotide
acatctcactccgtccgacaggggtgggcgcgagcacgcgactctgaccgtcct

SEQ ID NO: 193248 - DNA, 56 bp, Artificial
  Synthetic oligonucleotide
gggctatctttgccacccggttgggcgtctacctcagattacacgatgttaaccat

SEQ ID NO: 193249 - DNA, 54 bp, Artificial
  Synthetic oligonucleotide
cactcaatgaccccgaagggacagtctgtgtcggactggtctcagggtagcgcg

SEQ ID NO: 193250 - DNA, 54 bp, Artificial
  Synthetic oligonucleotide
caggttccagtttcgaccgaggctgatgtgacgtacggtgcagaagatacttca

SEQ ID NO: 193251 - DNA, 53 bp, Artificial
  Synthetic oligonucleotide
gagggccagagccctcttgcctaccggcgcaaccacgcaaccccctgcaattc

SEQ ID NO: 193252 - DNA, 53 bp, Artificial
  Synthetic oligonucleotide
atcgggaaccaaaccgtcgggaaacaaggcagtcaacgcgatcgacattcctt

SEQ ID NO: 193253 - DNA, 53 bp, Artificial
  Synthetic oligonucleotide
cccacagacatctgtcgtctctccgtccgctgcctctacgaaatccggtgcta

SEQ ID NO: 193254 - DNA, 52 bp, Artificial
  Synthetic oligonucleotide
tttcagctccctcgctgcgcgtggtcttgcgtgtcttgagtctcgctatccc

SEQ ID NO: 193255 - DNA, 52 bp, Artificial
  Synthetic oligonucleotide
tgagcttcgccgaatatcgtccgaacggactagcacgaccgtctggagtgga

SEQ ID NO: 193256 - DNA, 52 bp, Artificial
  Synthetic oligonucleotide
gctccccgtgcagcacactcggccacaaacaggactccatgaaggccgaaac

SEQ ID NO: 193257 - DNA, 52 bp, Artificial
  Synthetic oligonucleotide
gcgcgcaccctttggtgtccgctacacctgcttctagtgtgtcggatcacga

SEQ ID NO: 193258 - DNA, 52 bp, Artificial
  Synthetic oligonucleotide
agcagcgaggtttaagcgaggtttgtcgtagggttagcgataggtcgcacac

SEQ ID NO: 193259 - DNA, 55 bp, Artificial
  Synthetic oligonucleotide
cctcatggcgcttagccgaaggtttacatcgttcctaagtctatctcaattcgcc

SEQ ID NO: 193260 - DNA, 55 bp, Artificial
  Synthetic oligonucleotide
gcgtgcccgcaacgattttgggattgatgtaatggatagcctggcagtggccgca

SEQ ID NO: 193261 - DNA, 55 bp, Artificial
  Synthetic oligonucleotide
ggccgtaagtaaaggaatgcgcctgaaaatagaggtaacgcactttgagcgctac

SEQ ID NO: 193262 - DNA, 55 bp, Artificial
  Synthetic oligonucleotide
ggctgtgcgcgtatttaaccgtttccgctatggagcgaagtaagcttaccgccac

SEQ ID NO: 193263 - DNA, 55 bp, Artificial
  Synthetic oligonucleotide
gtaacacttgccaacgggctagcctcgacagccacattagcagcttggctcattg

SEQ ID NO: 193264 - DNA, 55 bp, Artificial
  Synthetic oligonucleotide
gtagggatgtctacgggaggcgaataagcgttttagcatagaatatttgacgtta

SEQ ID NO: 193265 - DNA, 55 bp, Artificial
  Synthetic oligonucleotide
gtgaacgccatgactgttcattatccaccgccccatacaaagtggagacgccccg

SEQ ID NO: 193266 - DNA, 55 bp, Artificial
  Synthetic oligonucleotide
gtgtgccaggcgcgcatgctatggttgctgggagacatgttgtttgaccgttgcc

SEQ ID NO: 193267 - DNA, 55 bp, Artificial
  Synthetic oligonucleotide
gtgtggcgtgtacgatatctatcaggagttgagttatgaggtgtgggacctcccg

SEQ ID NO: 193268 - DNA, 55 bp, Artificial
  Synthetic oligonucleotide
gttctgaccaacgataatttcggactgcagattgtccatagtgataatgctgggg

SEQ ID NO: 193269 - DNA, 55 bp, Artificial
  Synthetic oligonucleotide
tatctccagtctgaagctggatacctctgcgagattactgttatttcacgggaat

SEQ ID NO: 193270 - DNA, 55 bp, Artificial
  Synthetic oligonucleotide
cctgagtgatatctacggcgtaggagccaatcttcgtgtttatcccggcgctgac

SEQ ID NO: 193271 - DNA, 55 bp, Artificial
  Synthetic oligonucleotide
ccagcggttggctagtcactgacgataattggagcgtttggttttcgtcagtgtg

SEQ ID NO: 193272 - DNA, 55 bp, Artificial
  Synthetic oligonucleotide
cacgcgatagggcacttcgatacgcgagcgcaattcaaaagctcccatccggatc

SEQ ID NO: 193273 - DNA, 55 bp, Artificial
  Synthetic oligonucleotide
atcgccccaaggcttaatgcggcgggacgtctggaagatatgactgtggggattg

SEQ ID NO: 193274 - DNA, 55 bp, Artificial
  Synthetic oligonucleotide
aatttctctaacgcgtctgtaacggagtgtgcgcggctacccacgaggataagtc

SEQ ID NO: 193275 - DNA, 54 bp, Artificial
  Synthetic oligonucleotide
ccccatcgatacatctccttacgggtttcgccgttgctcgcctccattctatgc

SEQ ID NO: 193276 - DNA, 53 bp, Artificial
  Synthetic oligonucleotide
gtacttgtaccgcagactccaattcgccaaactcatctagaaacagagtcccc

SEQ ID NO: 193277 - DNA, 51 bp, Artificial
  Synthetic oligonucleotide
tattctggttctgacacaggggacaacgcagttcataagtcagtgtttgat

SEQ ID NO: 193278 - DNA, 51 bp, Artificial
  Synthetic oligonucleotide
tcaagctggcggaatagtcctgcagtgtgcttcgcactgagctctatgggg

SEQ ID NO: 193279 - DNA, 51 bp, Artificial
  Synthetic oligonucleotide
tgtttcggctgcgctaaagcaaagcgttaagcccaatgaggtgaatcgatg

SEQ ID NO: 193280 - DNA, 50 bp, Artificial
  Synthetic oligonucleotide
cgagcataaataacgacgaaccacttacttggcctcatttcgaatagcgc

SEQ ID NO: 193281 - DNA, 55 bp, Artificial
  Synthetic oligonucleotide
cgccattatcgtggctgggatacgctacgcttcagtcgccccaatgctttgcggt

SEQ ID NO: 193282 - DNA, 50 bp, Artificial
  Synthetic oligonucleotide
tcttagcagacgacggacggtaagataactccctcgcaggaatccatact

SEQ ID NO: 193283 - DNA, 50 bp, Artificial
  Synthetic oligonucleotide
acaccggacctgagggaccggctagaacgtcgtgaatcgccagagagcct

SEQ ID NO: 193284 - DNA, 50 bp, Artificial
  Synthetic oligonucleotide
acacccaggtagagtcgagctggcgcccctgacccctccccttgggctga

SEQ ID NO: 193285 - DNA, 50 bp, Artificial
  Synthetic oligonucleotide
acaagtgggtggccttggacgctgtgaaaatgacggaacgccgacgcgct

SEQ ID NO: 193286 - DNA, 50 bp, Artificial
  Synthetic oligonucleotide
aaaacaccccgttgggcccctctccgcccccatcttccgtgtcagttgca

SEQ ID NO: 193287 - DNA, 50 bp, Artificial
  Synthetic oligonucleotide
aaaaccctggccgaatacagcccgcaagccagttagcccaccgtcgtccg

SEQ ID NO: 193288 - DNA, 50 bp, Artificial
  Synthetic oligonucleotide
aaacagggtgcgtgacaaggtcaccaccgcttgcggcgacagtacgtggc

SEQ ID NO: 193289 - DNA, 50 bp, Artificial
  Synthetic oligonucleotide
aaaccgcccggcaagcatcctctggggacaacgccgacttttactccgcg

SEQ ID NO: 193290 - DNA, 50 bp, Artificial
  Synthetic oligonucleotide
aaagcgccttatgacctgtggaatcgggaagcgccacggggcctgaaact

SEQ ID NO: 193291 - DNA, 50 bp, Artificial
  Synthetic oligonucleotide
aaaggccgccaaccctctcggtcccaaaggcatgtccggaattccctcaa

SEQ ID NO: 193292 - DNA, 55 bp, Artificial
  Synthetic oligonucleotide
ctttccaaccaggcggatcaaggaggcgccatgaacagttttaacactctctccg

SEQ ID NO: 193293 - DNA, 50 bp, Artificial
  Synthetic oligonucleotide
aaaggctgggttgcgaaatgtagcgcgagccttttggtaggcggcgtcca

SEQ ID NO: 193294 - DNA, 50 bp, Artificial
  Synthetic oligonucleotide
aaagtaggcggaaacctgctcgttaaccgggctgatctgagggaggccgg

SEQ ID NO: 193295 - DNA, 50 bp, Artificial
  Synthetic oligonucleotide
aacaaccgcatcagcccgctaaactcatgccgtttgtgggtcctcagcga

SEQ ID NO: 193296 - DNA, 50 bp, Artificial
  Synthetic oligonucleotide
aacaggtcctgaggctcgcaaaccgattgcataggcaggttcgcgcgctg

SEQ ID NO: 193297 - DNA, 50 bp, Artificial
  Synthetic oligonucleotide
aaccgcttaagcaagtcggaacggtgatgcgtgaggccacagcggaggtg

SEQ ID NO: 193298 - DNA, 50 bp, Artificial
  Synthetic oligonucleotide
aaccgtctggcgactctgtggcggaaggggcgaatagggtgctccgaggt

SEQ ID NO: 193299 - DNA, 50 bp, Artificial
  Synthetic oligonucleotide
aaccgtggagccgcccaacgccacattaccagtaaaagccccctgggtcg

SEQ ID NO: 193300 - DNA, 50 bp, Artificial
  Synthetic oligonucleotide
aacctacgccagcgtctcccgtgacgattcctccgactactccgagcctg

SEQ ID NO: 193301 - DNA, 50 bp, Artificial
  Synthetic oligonucleotide
aacctgcagtgcgcccttgggaagagcggttgaattctccacgcctgcat

SEQ ID NO: 193302 - DNA, 50 bp, Artificial
  Synthetic oligonucleotide
aacgccgcgatggtgagagaagtctcccgcgttcatggtggtttcggtcg

SEQ ID NO: 193303 - DNA, 55 bp, Artificial
  Synthetic oligonucleotide
gaatcagaccgacaaagatggcgtggagacctccttggagcggttccgcaaagac

SEQ ID NO: 193304 - DNA, 50 bp, Artificial
  Synthetic oligonucleotide
acaaccgaggggtccgccagtgtggaggtatcccccagggaatccgtctc

SEQ ID NO: 193305 - DNA, 50 bp, Artificial
  Synthetic oligonucleotide
aattttgacgaatctggcctcccgggaagcgttccaacgcgccaacctgg

SEQ ID NO: 193306 - DNA, 50 bp, Artificial
  Synthetic oligonucleotide
aattgccgcagttcgcaaacgcaggcaaggaacgcagtggctaaccacga

SEQ ID NO: 193307 - DNA, 50 bp, Artificial
  Synthetic oligonucleotide
aatgctcggactctgaaggtccgttgttccccgcggacaggctctgtggt

SEQ ID NO: 193308 - DNA, 50 bp, Artificial
  Synthetic oligonucleotide
aatcagccatggacgctctggtatgcgccgccatctccgagcaagaggcg

SEQ ID NO: 193309 - DNA, 50 bp, Artificial
  Synthetic oligonucleotide
aatcaaagcgatgacgctcactctgctgacctcgggggtacaggctgggg

SEQ ID NO: 193310 - DNA, 50 bp, Artificial
  Synthetic oligonucleotide
aagtccagggttcctgcggtctccggcgcatatttccatacgctggagga

SEQ ID NO: 193311 - DNA, 50 bp, Artificial
  Synthetic oligonucleotide
aagtataggtctgctcccccacgtatccgcgcttaccgccctgccccaca

SEQ ID NO: 193312 - DNA, 50 bp, Artificial
  Synthetic oligonucleotide
aaggtttgcgccgccgattgatcgccatgtgtcgggatgggcaattggtg

SEQ ID NO: 193313 - DNA, 50 bp, Artificial
  Synthetic oligonucleotide
aaggtcgtccgaaaccctgtcggggattccatcagggactccgtcgggac

SEQ ID NO: 193314 - DNA, 55 bp, Artificial
  Synthetic oligonucleotide
gcaaagacgaccactatctggtttacacagggagtctagacgcctttcagcgaat

SEQ ID NO: 193315 - DNA, 50 bp, Artificial
  Synthetic oligonucleotide
aaggctgccacagagcggccagctccccgtgcgacaacacatatccgccc

SEQ ID NO: 193316 - DNA, 50 bp, Artificial
  Synthetic oligonucleotide
aagcaggctcgccactggagagtctggcggacgtatgcatttgcgctccc

SEQ ID NO: 193317 - DNA, 50 bp, Artificial
  Synthetic oligonucleotide
aacggtattgctgggcgatctgaacgctatccctgggagcgggccggtga

SEQ ID NO: 193318 - DNA, 50 bp, Artificial
  Synthetic oligonucleotide
aacggcgtggggtggcgactcagctctatcagcggcttgaacgggaggcg

SEQ ID NO: 193319 - DNA, 50 bp, Artificial
  Synthetic oligonucleotide
aacggcatacagattcgcggctccacccgcactaccgtcgaaagctccgt

SEQ ID NO: 193320 - DNA, 50 bp, Artificial
  Synthetic oligonucleotide
aacgcggactctctctcgcgtcgcgcgaacctcccgttttaccctgacat

SEQ ID NO: 193321 - DNA, 50 bp, Artificial
  Synthetic oligonucleotide
aacgcgcgccctggagtgtgcgaagcagcatcctgttcacagcgtcgtcg

SEQ ID NO: 193322 - DNA, 55 bp, Artificial
  Synthetic oligonucleotide
gcaacgcaatactcacgacacgcaaaggaacccgacctatcgccaaacgtgtacg

SEQ ID NO: 193323 - DNA, 55 bp, Artificial
  Synthetic oligonucleotide
gcgcgctaacttattgtccagccgagactattgggatagtccgctaagggttgac

SEQ ID NO: 193324 - DNA, 55 bp, Artificial
  Synthetic oligonucleotide
gcgcttttgttctctcacaagcggtaggcaatgaatcagtctgacacgtccctta

SEQ ID NO: 193325 - DNA, 60 bp, Artificial
  Synthetic oligonucleotide
gcataataaattcccagattcagagatggtctgtaccaaaactctctataattatataga

SEQ ID NO: 193326 - DNA, 55 bp, Artificial
  Synthetic oligonucleotide
ctcttctgtcacgtaagtaatagaggcgtgatcttcttacatcaccacgtcttac

SEQ ID NO: 193327 - DNA, 55 bp, Artificial
  Synthetic oligonucleotide
ctggccgccctttccacttatatagtgaccccaggttcttatgagcgggtgatag

SEQ ID NO: 193328 - DNA, 55 bp, Artificial
  Synthetic oligonucleotide
ctaaagtaatgaccatagttggagggcttctaatctcaattggctggtttatctc

SEQ ID NO: 193329 - DNA, 55 bp, Artificial
  Synthetic oligonucleotide
cttagcctgagccgcatttgacatattatcaggtgctactgccatccctactgtc

SEQ ID NO: 193330 - DNA, 55 bp, Artificial
  Synthetic oligonucleotide
cttcccgataatcaagtgctttaaccccgtacatttgcgatacatatggatcccc

SEQ ID NO: 193331 - DNA, 55 bp, Artificial
  Synthetic oligonucleotide
gaaacactatctctgctgtagaacatactttaggtctcatgttagctcttgcccg

SEQ ID NO: 193332 - DNA, 53 bp, Artificial
  Synthetic oligonucleotide
gacttaacctttcgctacgattggtaactcgccggtccgtgatacaaaagtac

SEQ ID NO: 193333 - DNA, 55 bp, Artificial
  Synthetic oligonucleotide
gatctcatatttagcgctcttccccatggcgtatcacaggacattagctcccagt

SEQ ID NO: 193334 - DNA, 55 bp, Artificial
  Synthetic oligonucleotide
gatgcaatccgatatgcttcattccaggtggtttccatatcgagcactactggat

SEQ ID NO: 193335 - DNA, 55 bp, Artificial
  Synthetic oligonucleotide
gatgtatgccagaggtctatccactcgtgatatcgctaattcgattgatcaaatg

SEQ ID NO: 193336 - DNA, 60 bp, Artificial
  Synthetic oligonucleotide
gacatgttcagcagaatgatagtcgcctatgaagtctgggaaactgaaaacgccgaatac

SEQ ID NO: 193337 - DNA, 52 bp, Artificial
  Synthetic oligonucleotide
gcaggtagtgaccctcggtaaataccccagaataaagatagaccggggtaag

SEQ ID NO: 193338 - DNA, 55 bp, Artificial
  Synthetic oligonucleotide
gcgtataacgtcccgagcatttgcgacgtggctgtcctgttctttaggttggcgc

SEQ ID NO: 193339 - DNA, 55 bp, Artificial
  Synthetic oligonucleotide
gctcctgtataaccatttccaccatcaagcctaattccataacctgaaccagttc

SEQ ID NO: 193340 - DNA, 55 bp, Artificial
  Synthetic oligonucleotide
ggaggccaaattactggctgctagaggtcatgaaatagaactcagtctcgattcc

SEQ ID NO: 193341 - DNA, 54 bp, Artificial
  Synthetic oligonucleotide
ggccgaattccccggctccgaaatctctaccatagaggagttctcctttaataa

SEQ ID NO: 193342 - DNA, 55 bp, Artificial
  Synthetic oligonucleotide
ggtcctgagctccgaaaccaattgccacactcacaataccggctccggccagtaa

SEQ ID NO: 193343 - DNA, 54 bp, Artificial
  Synthetic oligonucleotide
ggttgtccggaaacctgaccgctacactctcaagaccggctgtagtcaccccgg

SEQ ID NO: 193344 - DNA, 52 bp, Artificial
  Synthetic oligonucleotide
gtacagggttcccgaaaggatataaccggggtcaggattatttacaattatc

SEQ ID NO: 193345 - DNA, 54 bp, Artificial
  Synthetic oligonucleotide
gtgcagtggggttaaaccctgaagcctcacgttatggaggaattaacgtcggta

SEQ ID NO: 193346 - DNA, 55 bp, Artificial
  Synthetic oligonucleotide
tacttactggaatcgatttaagcttctgctctaaggaactaagtccattccgcag

SEQ ID NO: 193347 - DNA, 57 bp, Artificial
  Synthetic oligonucleotide
taggagtgatccgctcttctccgggtaaggacgcttgagggttcaggcaactgttcc

SEQ ID NO: 193348 - DNA, 55 bp, Artificial
  Synthetic oligonucleotide
tagttgtgagcatctggggtttgagattggcctatcatataatgaagcgaaactg

SEQ ID NO: 193349 - DNA, 55 bp, Artificial
  Synthetic oligonucleotide
tatgggaatttgcgtagcttgctttatccgagatattgctggtgcggttggatta

SEQ ID NO: 193350 - DNA, 55 bp, Artificial
  Synthetic oligonucleotide
tccattaaggagcgatatttagactgcagcagtagaccgacattggtgattcccg

SEQ ID NO: 193351 - DNA, 55 bp, Artificial
  Synthetic oligonucleotide
tgcacagatcagggccagacttcgcaaatttaaggcccagttagatggaatcgac

SEQ ID NO: 193352 - DNA, 55 bp, Artificial
  Synthetic oligonucleotide
ttacacctgttcctggaggagtaggcacagttactaatcaggtgttaatgcgtaa

SEQ ID NO: 193353 - DNA, 55 bp, Artificial
  Synthetic oligonucleotide
atgggcacctactgctgggataataaccccttgggaatttgctttagctatggcc

SEQ ID NO: 193354 - DNA, 52 bp, Artificial
  Synthetic oligonucleotide
atggagtatgcccctcgtattatcgggaaaataccgggtaccctggtttcgc

SEQ ID NO: 193355 - DNA, 55 bp, Artificial
  Synthetic oligonucleotide
cagcactgtctagtgcttcatcccgtgacttgataccaatctgattaccctcggg

SEQ ID NO: 193356 - DNA, 55 bp, Artificial
  Synthetic oligonucleotide
cagtgacgaaggaacgaaaccggcaatatattgttatatgatgttgcacgcgggc

SEQ ID NO: 193357 - DNA, 55 bp, Artificial
  Synthetic oligonucleotide
catctaacaaacctgtcataccctgatctctaacatatcttttcatctgaggctc

SEQ ID NO: 193358 - DNA, 56 bp, Artificial
  Synthetic oligonucleotide
tccctgggatttgcgctcgtgactggttccgtaggaactggcgtaaagcttgcgtt

SEQ ID NO: 193359 - DNA, 55 bp, Artificial
  Synthetic oligonucleotide
agttgcttgtgtatcctgaccccgatacttttatcgaccttgtagaggggagccg

SEQ ID NO: 193360 - DNA, 52 bp, Artificial
  Synthetic oligonucleotide
agttagtctcgatgaccttaaatcattccgtcagttaggttccaaaaccccg

SEQ ID NO: 193361 - DNA, 55 bp, Artificial
  Synthetic oligonucleotide
ccatctactccaaccaaacttcctttaccaagatgcctagcacaattttcggcca

SEQ ID NO: 193362 - DNA, 55 bp, Artificial
  Synthetic oligonucleotide
cccgaaagctctttaggtggcaggtcagtagctctatcataaacaacgggactta

SEQ ID NO: 193363 - DNA, 53 bp, Artificial
  Synthetic oligonucleotide
ccgatagtatagaggattaagtctttaccacttacccagggctgtagttcccc

SEQ ID NO: 193364 - DNA, 50 bp, Artificial
  Synthetic oligonucleotide
ccggttaatcttaaacctcccctaccatgacctgaccggaggatttaagg

SEQ ID NO: 193365 - DNA, 55 bp, Artificial
  Synthetic oligonucleotide
cgaaccctcgagggtcctattgcaccgaccgactgtgttctcgataatgacgaag

SEQ ID NO: 193366 - DNA, 55 bp, Artificial
  Synthetic oligonucleotide
cggccacatatagacctgtcaccgggcatccgtatacatataacctgtattcggg

SEQ ID NO: 193367 - DNA, 55 bp, Artificial
  Synthetic oligonucleotide
aactgtgggtaagcatcgccaggtctagttactgtcgaagcactcctgttagccc

SEQ ID NO: 193368 - DNA, 55 bp, Artificial
  Synthetic oligonucleotide
aactaagggtattttagcagtcattgcctgagttggagttaactgatatttaccc

SEQ ID NO: 193369 - DNA, 56 bp, Artificial
  Synthetic oligonucleotide
ttccgataacgtccctgggatttgcgctcgtgactggttccgtaggaactggcgta

SEQ ID NO: 193370 - DNA, 54 bp, Artificial
  Synthetic oligonucleotide
agagtagccctactgactgttgaacctgcaagttctactggatctaaaatggct

SEQ ID NO: 193371 - DNA, 54 bp, Artificial
  Synthetic oligonucleotide
atatcatacccagttagcgctaatgctctgttatgtgctgtaataacttgcctc

SEQ ID NO: 193372 - DNA, 54 bp, Artificial
  Synthetic oligonucleotide
aacattgcttttatgcaggtttataggaatcggagaggggacatagggtcttcg

SEQ ID NO: 193373 - DNA, 53 bp, Artificial
  Synthetic oligonucleotide
ggtaattttgcgactcatggcccttcttacctcttcgctaacttcagttggac

SEQ ID NO: 193374 - DNA, 53 bp, Artificial
  Synthetic oligonucleotide
tatgctggtacagcatcttatagctacacaacagggccggataataggcgtta

SEQ ID NO: 193375 - DNA, 52 bp, Artificial
  Synthetic oligonucleotide
agggcgccggttggacaggataaaatacactgcccacaatttgtgcactcta

SEQ ID NO: 193376 - DNA, 52 bp, Artificial
  Synthetic oligonucleotide
cggcggccgaagactgctatatgaggacgattggccctgggtgtctgctgca

SEQ ID NO: 193377 - DNA, 52 bp, Artificial
  Synthetic oligonucleotide
cggtggtgtcaggacccttgaatatgcagccgaactggggcttggctcccgt

SEQ ID NO: 193378 - DNA, 52 bp, Artificial
  Synthetic oligonucleotide
ccagtttagcaaaggacaaccagcgcagtcgaagttgaagataatacaggag

SEQ ID NO: 193379 - DNA, 52 bp, Artificial
  Synthetic oligonucleotide
gccaggggttacgttccccaacctctcatggtcgggggccttgacaatggtc

SEQ ID NO: 193380 - DNA, 59 bp, Artificial
  Synthetic oligonucleotide
ttctgacagctccggctttgggatcactggctccataaacaaggcgtttaattcttgac

SEQ ID NO: 193381 - DNA, 52 bp, Artificial
  Synthetic oligonucleotide
gccgacattaccccggttgtgaccaaagcctcggccggagctgttaatcacc

SEQ ID NO: 193382 - DNA, 51 bp, Artificial
  Synthetic oligonucleotide
cgatttaagggatgaaagtgaccaggagggtttaaggattgtcgttgagtt

SEQ ID NO: 193383 - DNA, 51 bp, Artificial
  Synthetic oligonucleotide
aagctccagcgggggcttctcattcaggggcccatcgggtcaggtaaatcc

SEQ ID NO: 193384 - DNA, 51 bp, Artificial
  Synthetic oligonucleotide
tagaagcgagtcgaggagttcctttcactcgttaaacactgggaactataa

SEQ ID NO: 193385 - DNA, 51 bp, Artificial
  Synthetic oligonucleotide
cggttgtgaccaaagcctcggccggagctgttaatcacctgcctctggcta

SEQ ID NO: 193386 - DNA, 51 bp, Artificial
  Synthetic oligonucleotide
ccagtaccgacggtggtgtcaggacccttgaatatgcagccgaactggggc

SEQ ID NO: 193387 - DNA, 51 bp, Artificial
  Synthetic oligonucleotide
atcgatggcctggggagctattataggtggtataactacttatcttggtgg

SEQ ID NO: 193388 - DNA, 51 bp, Artificial
  Synthetic oligonucleotide
gatgaaaacttatgcagataagtacggtattggaccctgggttgtttatga

SEQ ID NO: 193389 - DNA, 51 bp, Artificial
  Synthetic oligonucleotide
gggttaccctcaatacgaccgggaatcaggtccattttctcgggaataccg

SEQ ID NO: 193390 - DNA, 51 bp, Artificial
  Synthetic oligonucleotide
gccggctatgtttcagcggtcccaccttttacccggctggaccagaagact

SEQ ID NO: 193391 - DNA, 53 bp, Artificial
  Synthetic oligonucleotide
gggcaacgaaaaatgctccggttttagggatcgtgggccgactgggtggtata

SEQ ID NO: 193392 - DNA, 51 bp, Artificial
  Synthetic oligonucleotide
ggctacccagggcacaggactcaaggtgattccataccctccgggccgggt

SEQ ID NO: 193393 - DNA, 51 bp, Artificial
  Synthetic oligonucleotide
atgtccacactatgcaagttaagaaaacccgtccccatttataatggagac

SEQ ID NO: 193394 - DNA, 51 bp, Artificial
  Synthetic oligonucleotide
gctgttggttggccggctatgtttcagcggtcccaccttttacccggctgg

SEQ ID NO: 193395 - DNA, 50 bp, Artificial
  Synthetic oligonucleotide
tgatcccttaactagagcaaggatcaaagctccattgtctttgggagtca

SEQ ID NO: 193396 - DNA, 50 bp, Artificial
  Synthetic oligonucleotide
aagccggggttaacaccccgaccattccctactccaccggaacccagatg

SEQ ID NO: 193397 - DNA, 50 bp, Artificial
  Synthetic oligonucleotide
aaccgatgctgtccttatggccagtggtagtgaggtttccctggctgtag

SEQ ID NO: 193398 - DNA, 50 bp, Artificial
  Synthetic oligonucleotide
agagctggatcctggtattcttatggagatgttcgtttaggccaaggtag

SEQ ID NO: 193399 - DNA, 50 bp, Artificial
  Synthetic oligonucleotide
ccctttattgggcgagttctaccccgggtggagtacctactataccagct

SEQ ID NO: 193400 - DNA, 50 bp, Artificial
  Synthetic oligonucleotide
cccggagatgaataccggggcagttctgccgctaattttaaggcctgtaa

SEQ ID NO: 193401 - DNA, 50 bp, Artificial
  Synthetic oligonucleotide
gcgaaaaaatggatacagaggctgaattaactagccgccaatgtctttta

SEQ ID NO: 193402 - DNA, 55 bp, Artificial
  Synthetic oligonucleotide
ctatcttactgcaacagcgacatgctacggtaacaatgtgtcactctagaactag

SEQ ID NO: 193403 - DNA, 50 bp, Artificial
  Synthetic oligonucleotide
gataagacgggccaggggttacgttccccaacctctcatggtcgggggcc

SEQ ID NO: 193404 - DNA, 50 bp, Artificial
  Synthetic oligonucleotide
gtaggttctcgcttttccctatcttctaccattattgtatacccctctcg

SEQ ID NO: 193405 - DNA, 50 bp, Artificial
  Synthetic oligonucleotide
gatcgatgagattacaagaatttcggttgagggcaatgaacatataagcg

SEQ ID NO: 193406 - DNA, 50 bp, Artificial
  Synthetic oligonucleotide
cagaggcccagacttttctttatgcgagtcgggttattggtcctgccagg

SEQ ID NO: 193407 - DNA, 50 bp, Artificial
  Synthetic oligonucleotide
atggtgggctcgtcaccgattcaggatggtcgggccaagatcatggcagg

SEQ ID NO: 193408 - DNA, 50 bp, Artificial
  Synthetic oligonucleotide
atgtatagagacaacccatccgactacccatgacaaacctacatttatcg

SEQ ID NO: 193409 - DNA, 55 bp, Artificial
  Synthetic oligonucleotide
ctcggttttgggtgtggcaccatggctaccattgcaaccagggtcctggagcgta

SEQ ID NO: 193410 - DNA, 55 bp, Artificial
  Synthetic oligonucleotide
gatctgaaatgtaaccggactacccagcgtctgattggccctaataccggataga

SEQ ID NO: 193411 - DNA, 55 bp, Artificial
  Synthetic oligonucleotide
cacttcgaaccgatctgacaataattctctacagctactccccgacctataatcg

SEQ ID NO: 193412 - DNA, 55 bp, Artificial
  Synthetic oligonucleotide
gctcgtagtgctgctatggcttggaatcgattgaccgactggaaggtagatgctg

SEQ ID NO: 193413 - DNA, 55 bp, Artificial
  Synthetic oligonucleotide
ggagataccgcctcaagaattagctgctaatagcggagcagatttccaatccgac

SEQ ID NO: 193414 - DNA, 55 bp, Artificial
  Synthetic oligonucleotide
ggcggctagtcctctgaaaccggagaatgtaaagacaggagcttatccactggct

SEQ ID NO: 193415 - DNA, 55 bp, Artificial
  Synthetic oligonucleotide
ggctgcattacataaactacagacggaaggtcagatgtcttatcatcacgcttag

SEQ ID NO: 193416 - DNA, 55 bp, Artificial
  Synthetic oligonucleotide
gggcccattccggcgtcggtttaggcgatgattttctgcgtcatctagagcggac

SEQ ID NO: 193417 - DNA, 55 bp, Artificial
  Synthetic oligonucleotide
aggacgtatctttgatgccggtggtttagagattctaacgccgaagaatattgag

SEQ ID NO: 193418 - DNA, 54 bp, Artificial
  Synthetic oligonucleotide
agagatggctaaacgggtgggagcaacagggattctagttctgaccggttacgg

SEQ ID NO: 193419 - DNA, 55 bp, Artificial
  Synthetic oligonucleotide
agactgtatggttaatcgttcctagattcggccgagctaccacaacaactggcag

SEQ ID NO: 193420 - DNA, 55 bp, Artificial
  Synthetic oligonucleotide
ggggaagccggaagcagttctagtacgggcagtagaaccgattgaaggctgggat

SEQ ID NO: 193421 - DNA, 55 bp, Artificial
  Synthetic oligonucleotide
gatactaaaccagttaactgcggctgatttaacccacggttatgatatagctggt

SEQ ID NO: 193422 - DNA, 55 bp, Artificial
  Synthetic oligonucleotide
gttacttctttagcggcaaacttgtaagctatagcccagcggggtgctcgagcag

SEQ ID NO: 193423 - DNA, 54 bp, Artificial
  Synthetic oligonucleotide
taaagcatctgctccgttcgctctatattagcttctactggtagatgttccaac

SEQ ID NO: 193424 - DNA, 54 bp, Artificial
  Synthetic oligonucleotide
tgctgcgtagtaggatgagcagttggaacacatcctaatcgagctaccctttct

SEQ ID NO: 193425 - DNA, 54 bp, Artificial
  Synthetic oligonucleotide
attggttaggtgtctatattctccaggtgataatccggttaaatccaatggacc

SEQ ID NO: 193426 - DNA, 53 bp, Artificial
  Synthetic oligonucleotide
aatcttgatgagctgccaaccggtgctcgaattggaaccggaagtctgcggcg

SEQ ID NO: 193427 - DNA, 53 bp, Artificial
  Synthetic oligonucleotide
taagcgctgaaggatagatcaaagttattaacgcgccgcttggtaaccttcac

SEQ ID NO: 193428 - DNA, 52 bp, Artificial
  Synthetic oligonucleotide
tgacccgaaactagatggccgcctaatctatcctgcagccgcagtgcccgtt

SEQ ID NO: 193429 - DNA, 52 bp, Artificial
  Synthetic oligonucleotide
aattccgatatcaggtacaattccgtaggtgctggtagttgctcctctgact

SEQ ID NO: 193430 - DNA, 52 bp, Artificial
  Synthetic oligonucleotide
agggagccgttatggaacaaaatcagttcaggactgtttagaaatggcccgg

SEQ ID NO: 193431 - DNA, 52 bp, Artificial
  Synthetic oligonucleotide
gggagttagaccggcttcacggattaagcctccttatccggcccaggacgga

SEQ ID NO: 193432 - DNA, 55 bp, Artificial
  Synthetic oligonucleotide
gaggggacttcaaaagatagtcggaacctgtggagcggacaagatttccgaagta

SEQ ID NO: 193433 - DNA, 52 bp, Artificial
  Synthetic oligonucleotide
atgcgcgctaccaggtctccggcagtacgtactccgcccatgcccgaagcta

SEQ ID NO: 193434 - DNA, 52 bp, Artificial
  Synthetic oligonucleotide
ggcccggcagtgcttcgagagtaattcgggccggctgacccaaggataactg

SEQ ID NO: 193435 - DNA, 52 bp, Artificial
  Synthetic oligonucleotide
ggccaatggtgcacgaaagacaaaaagccgtttggctggcagcgtggagctg

SEQ ID NO: 193436 - DNA, 52 bp, Artificial
  Synthetic oligonucleotide
caagggcgaacttatcgattaaagggatatcagattcccgacgcaagtcgac

SEQ ID NO: 193437 - DNA, 52 bp, Artificial
  Synthetic oligonucleotide
ctgccaaccggtgctcgaattggaaccggaagtctgcggcgaacttcacagc

SEQ ID NO: 193438 - DNA, 52 bp, Artificial
  Synthetic oligonucleotide
gaggcacgatcggctaacagcagcttagcggtgcgtcttggcagggcgtgtg

SEQ ID NO: 193439 - DNA, 51 bp, Artificial
  Synthetic oligonucleotide
actgacaaagacaatccgtgaccaatcatataaggggagtctactctgggt

SEQ ID NO: 193440 - DNA, 51 bp, Artificial
  Synthetic oligonucleotide
gcccccatactattcaacacggcacgggagctggacaagtagggaccgggg

SEQ ID NO: 193441 - DNA, 51 bp, Artificial
  Synthetic oligonucleotide
tccgctggctttcagtcagtaggaatgcagcctcctcagcccggggaacta

SEQ ID NO: 193442 - DNA, 51 bp, Artificial
  Synthetic oligonucleotide
gatggttatcctgatttaaattccgatggagcagtagtaggcggctggtta

SEQ ID NO: 193443 - DNA, 55 bp, Artificial
  Synthetic oligonucleotide
gccatctatacttgccccttaatttagccaatggtgccggaataggtcctaacag

SEQ ID NO: 193444 - DNA, 50 bp, Artificial
  Synthetic oligonucleotide
attaccggacgtccccacataccgggaccagccatagcatcaccgcggtg

SEQ ID NO: 193445 - DNA, 50 bp, Artificial
  Synthetic oligonucleotide
agaagagttggggccgacatttattaagttagggcaattattgagtacac

SEQ ID NO: 193446 - DNA, 55 bp, Artificial
  Synthetic oligonucleotide
ctgttcgacctgtgatggactaggaacaaaacgggagtttgatccggatttaatc

SEQ ID NO: 193447 - DNA, 55 bp, Artificial
  Synthetic oligonucleotide
gctaactattgagctacaattacaaccttgcgataagggtcctgtccttcactat

SEQ ID NO: 193448 - DNA, 55 bp, Artificial
  Synthetic oligonucleotide
ctctatgtctaggattatccctcggatactctttctgggctacttgataagcttc

SEQ ID NO: 193449 - DNA, 55 bp, Artificial
  Synthetic oligonucleotide
cgccgtgccgccttaattctcatttccgacttatgttcccgggctggatagccag

SEQ ID NO: 193450 - DNA, 54 bp, Artificial
  Synthetic oligonucleotide
ccgggatgagtccgcgataccaagatattcggcccctttgtcgtctgtttaacc

SEQ ID NO: 193451 - DNA, 55 bp, Artificial
  Synthetic oligonucleotide
ctgggtgctgacatggtatccattcgtcgtgcctcgtaagctagggagtcgatat

SEQ ID NO: 193452 - DNA, 55 bp, Artificial
  Synthetic oligonucleotide
cgctaccgcgaataaacgcatcacgcaaaacattacccacccgtcatattcatga

SEQ ID NO: 193453 - DNA, 50 bp, Artificial
  Synthetic oligonucleotide
aagcaaccccttccgcctggctgtcttaccggtatctggcgtgaccctca

SEQ ID NO: 193454 - DNA, 50 bp, Artificial
  Synthetic oligonucleotide
aagccgctaccaggctacccgcgaccgttctccgttggttacaaggctcg

SEQ ID NO: 193455 - DNA, 50 bp, Artificial
  Synthetic oligonucleotide
aagcgatgctcacggcgtgttacaggtacgtagcactggagcgcaggggt

SEQ ID NO: 193456 - DNA, 50 bp, Artificial
  Synthetic oligonucleotide
aagcgccgatccatgagtcagcacgatttgctgctgcgctcgcgacgtaa

SEQ ID NO: 193457 - DNA, 50 bp, Artificial
  Synthetic oligonucleotide
aagcgtcggtggcaggtcgcgtcatgcgtaagcgtggcccctttatcgtg

SEQ ID NO: 193458 - DNA, 50 bp, Artificial
  Synthetic oligonucleotide
aaggcactacggagcagcaagcagaggcttggtcggtagcgttccggtgc

SEQ ID NO: 193459 - DNA, 50 bp, Artificial
  Synthetic oligonucleotide
aagggatcgaccaaggcacacctcgccacacatcaggatcggggaacgca

SEQ ID NO: 193460 - DNA, 50 bp, Artificial
  Synthetic oligonucleotide
aagggctcaagctgcgagtacgttactccagcgcctacccaccaacctgg

SEQ ID NO: 193461 - DNA, 50 bp, Artificial
  Synthetic oligonucleotide
aaggggtgggtgtcggtgtcatacgtggcggtaacggccaagcattgggg

SEQ ID NO: 193462 - DNA, 50 bp, Artificial
  Synthetic oligonucleotide
aagggttagtgggcgcatacggtaggcaaggggcacgtcttcgctcgtgg

SEQ ID NO: 193463 - DNA, 55 bp, Artificial
  Synthetic oligonucleotide
cgcgggcgcattaaatctatccataaacggctagataaagtacgcagccagcgtg

SEQ ID NO: 193464 - DNA, 50 bp, Artificial
  Synthetic oligonucleotide
aaggtagggaaccccggcgccatggatacccccgttactcaggaccatcc

SEQ ID NO: 193465 - DNA, 50 bp, Artificial
  Synthetic oligonucleotide
aagtcatcgggagccctgctcccctaaggagtcccctccatgaccacgat

SEQ ID NO: 193466 - DNA, 50 bp, Artificial
  Synthetic oligonucleotide
aagtgcttgcccgttgtgggctattagaaggctaccgcgccacgctaccc

SEQ ID NO: 193467 - DNA, 50 bp, Artificial
  Synthetic oligonucleotide
aatagggttgatcgcgggtgggctatgtgccggggagttaggcgctgcag

SEQ ID NO: 193468 - DNA, 50 bp, Artificial
  Synthetic oligonucleotide
aatcaccgccatcccgttactcctcggcctctcgtcgcgtgttacacgct

SEQ ID NO: 193469 - DNA, 50 bp, Artificial
  Synthetic oligonucleotide
aatgagctacgcttgttggcgccgaatcgctttgtgcgcgactgggtgag

SEQ ID NO: 193470 - DNA, 50 bp, Artificial
  Synthetic oligonucleotide
aatgcaatgatggccaccgggccaaccgccagggtgcggcttgtgcctaa

SEQ ID NO: 193471 - DNA, 50 bp, Artificial
  Synthetic oligonucleotide
aatgcgtctcctgactgtcgtcgaggtcacgcccctacctgtaggcgcat

SEQ ID NO: 193472 - DNA, 50 bp, Artificial
  Synthetic oligonucleotide
aaaactagcgcgcttagtaccatcgcgccccctagggagccgctgcccac

SEQ ID NO: 193473 - DNA, 50 bp, Artificial
  Synthetic oligonucleotide
aaaagggtgcaccggggcaggcatccatcgctagccgtgggtcgctatta

SEQ ID NO: 193474 - DNA, 55 bp, Artificial
  Synthetic oligonucleotide
cgcgccgctcttggtcaaccctcgccctagttggcacaaactcagctggtttgca

SEQ ID NO: 193475 - DNA, 50 bp, Artificial
  Synthetic oligonucleotide
aaacccttgggggccgacgaaatagcagcgtgccttgaggccaggcaagt

SEQ ID NO: 193476 - DNA, 50 bp, Artificial
  Synthetic oligonucleotide
aaaccgacgagcgcccactgcactagcgactgatgtggccactgagtgtc

SEQ ID NO: 193477 - DNA, 50 bp, Artificial
  Synthetic oligonucleotide
aaacgtgctgcgacaccccgttctacaggtgcagcgcccaagggtaagcg

SEQ ID NO: 193478 - DNA, 50 bp, Artificial
  Synthetic oligonucleotide
aaactccgaccgtggcccagccaccgatcaggcgaagcacgaaccaggcc

SEQ ID NO: 193479 - DNA, 50 bp, Artificial
  Synthetic oligonucleotide
aaactgattagccacgaggacaacaaaggcacagccgcttgcgccccctt

SEQ ID NO: 193480 - DNA, 50 bp, Artificial
  Synthetic oligonucleotide
aaactgggcggcaacgcatccctaccgccttcattcacccccaggactag

SEQ ID NO: 193481 - DNA, 50 bp, Artificial
  Synthetic oligonucleotide
aacagagcgaatccagtcaaggtcgccagaggcgcggtcaccacatcccc

SEQ ID NO: 193482 - DNA, 50 bp, Artificial
  Synthetic oligonucleotide
aaccaaccgacacgggtatccctgtccactgccgcacagtcttgcgtaga

SEQ ID NO: 193483 - DNA, 50 bp, Artificial
  Synthetic oligonucleotide
aaccaggacgttcggagagcgatatccagtcctcgccgaagggtcgccgt

SEQ ID NO: 193484 - DNA, 50 bp, Artificial
  Synthetic oligonucleotide
aaccccactgctgtcgaatgacttcgtgcccgctgatgcgccccagttct

SEQ ID NO: 193485 - DNA, 55 bp, Artificial
  Synthetic oligonucleotide
cgcgactcctcgcgtgcggcatacgcacctgaacgtctatgcttcaggcacgtca

SEQ ID NO: 193486 - DNA, 50 bp, Artificial
  Synthetic oligonucleotide
aaccccggcgccatggatacccccgttactcaggaccatccgtccgtctc

SEQ ID NO: 193487 - DNA, 50 bp, Artificial
  Synthetic oligonucleotide
aaccggggtaaggctgttccaatccgtgcggaagcgccgtttacgggctt

SEQ ID NO: 193488 - DNA, 50 bp, Artificial
  Synthetic oligonucleotide
aacgcccgcttagtgtctgcgaaccagctaaccgcgctacctaacgccct

SEQ ID NO: 193489 - DNA, 50 bp, Artificial
  Synthetic oligonucleotide
aacgccgcgtaatcctgctgccatgcatcggcattaggcactggccccgc

SEQ ID NO: 193490 - DNA, 50 bp, Artificial
  Synthetic oligonucleotide
aacgcgaggtgggcgttactccaggccaattagtcgcctatgcccgacta

SEQ ID NO: 193491 - DNA, 50 bp, Artificial
  Synthetic oligonucleotide
aacgcggcggcctagtggacttcggtgaactgctactgcgcagcctagaa

SEQ ID NO: 193492 - DNA, 50 bp, Artificial
  Synthetic oligonucleotide
aacgctgagtaccgcttgcactgcttcagtcgccaagcccatgccccagt

SEQ ID NO: 193493 - DNA, 50 bp, Artificial
  Synthetic oligonucleotide
aacggagtccgggcaaagcgcgtcctttccttgacggggacgcagtcggt

SEQ ID NO: 193494 - DNA, 50 bp, Artificial
  Synthetic oligonucleotide
aacggcagccaatctaggtgatgcggcgacacacaccgcgtttggtcggt

SEQ ID NO: 193495 - DNA, 50 bp, Artificial
  Synthetic oligonucleotide
aacggcaggccatttaccggctagcatacgcgaaagcatggcacgacgtg

SEQ ID NO: 193496 - DNA, 55 bp, Artificial
  Synthetic oligonucleotide
cgcaacaataacaaggtcggtcaaatatcgacacggatagcggagattgcccatg

SEQ ID NO: 193497 - DNA, 50 bp, Artificial
  Synthetic oligonucleotide
aacggggctggcaggtattcttcctggcgtctcgtttggctttccgcgat

SEQ ID NO: 193498 - DNA, 50 bp, Artificial
  Synthetic oligonucleotide
acgccccacagacgacgcggtctagcctttccatcgcccgaccactatca

SEQ ID NO: 193499 - DNA, 50 bp, Artificial
  Synthetic oligonucleotide
acgctgccagcaaagtccgaatcccacgcactgggtcgccagtctaggta

SEQ ID NO: 193500 - DNA, 50 bp, Artificial
  Synthetic oligonucleotide
acggcacctcggttcgacgtggatcgccctttcgggctcgccccacatgc

SEQ ID NO: 193501 - DNA, 50 bp, Artificial
  Synthetic oligonucleotide
acggcgtttcacgggcttcctccgtcgtgggcgtcataccaaggtctagg

SEQ ID NO: 193502 - DNA, 50 bp, Artificial
  Synthetic oligonucleotide
acgggaggtagcaacatggtggcaacctcgcatctcaccgcacggcctcg

SEQ ID NO: 193503 - DNA, 50 bp, Artificial
  Synthetic oligonucleotide
acgggggcgagttcacgaatcggggcaggccattccgtgtgcatgcggtc

SEQ ID NO: 193504 - DNA, 50 bp, Artificial
  Synthetic oligonucleotide
acgtcggttacgcctcctgcccatccgcgaacccggaccgatggaactca

SEQ ID NO: 193505 - DNA, 50 bp, Artificial
  Synthetic oligonucleotide
acgtgaccaggctccgacgctcagcactcaagcaatcggcgctcgggacc

SEQ ID NO: 193506 - DNA, 50 bp, Artificial
  Synthetic oligonucleotide
acgttttccctgcatgctcgaggggctccgtggcgccatgaaaggtgttg

SEQ ID NO: 193507 - DNA, 55 bp, Artificial
  Synthetic oligonucleotide
cctgggtaatgcgcataggctcgagggactataacgactggcgaacaccccaggg

SEQ ID NO: 193508 - DNA, 50 bp, Artificial
  Synthetic oligonucleotide
actggcagtcacggcgtccgctggagagcacgcaacttgcggcacggctc

SEQ ID NO: 193509 - DNA, 50 bp, Artificial
  Synthetic oligonucleotide
actggtcggcgctctggctctcggagtaggcattgaccctggcccgtaca

SEQ ID NO: 193510 - DNA, 50 bp, Artificial
  Synthetic oligonucleotide
agaacttcgccatgggcggctcctaggcggtattcggatagacggtggta

SEQ ID NO: 193511 - DNA, 50 bp, Artificial
  Synthetic oligonucleotide
agaagcgtccgcgctgcatggacggaaagccccgggaaggccaaaatcaa

SEQ ID NO: 193512 - DNA, 50 bp, Artificial
  Synthetic oligonucleotide
agacgacgcggtctagcctttccatcgcccgaccactatcatcggggacc

SEQ ID NO: 193513 - DNA, 50 bp, Artificial
  Synthetic oligonucleotide
agagccaccgcttccctgacacaaggaggctcccggcgccttagcgtcgc

SEQ ID NO: 193514 - DNA, 50 bp, Artificial
  Synthetic oligonucleotide
agaggcatggcggacattaggggagctcagtacaggcgagacaccaccga

SEQ ID NO: 193515 - DNA, 50 bp, Artificial
  Synthetic oligonucleotide
agcactcaagcaatcggcgctcgggaccgcgactaaagactaagcgctgg

SEQ ID NO: 193516 - DNA, 50 bp, Artificial
  Synthetic oligonucleotide
agcaggttggcgtggagtgcctggagacgagagtggcatggctgtcatcc

SEQ ID NO: 193517 - DNA, 50 bp, Artificial
  Synthetic oligonucleotide
agcatagcggtaggatgccgcctggtcattggagcataccgccgggccgt

SEQ ID NO: 193518 - DNA, 55 bp, Artificial
  Synthetic oligonucleotide
cccttctatacatgtcagtccggcgacaatacacccggcaagaaagccgttcgag

SEQ ID NO: 193519 - DNA, 50 bp, Artificial
  Synthetic oligonucleotide
agcatgtcagggccttcaagcgaccgcatgtcagcgagcctttccatgga

SEQ ID NO: 193520 - DNA, 50 bp, Artificial
  Synthetic oligonucleotide
agccaaaggcacgttccgccctggctccgatatcgacctggcactgtatg

SEQ ID NO: 193521 - DNA, 50 bp, Artificial
  Synthetic oligonucleotide
agcgaggtgtgacggttgcgtgtcagcgatatgacagtggcgcccgggac

SEQ ID NO: 193522 - DNA, 50 bp, Artificial
  Synthetic oligonucleotide
aatgcgtggcgttacctcggttagggatgtgggtgggccgtcgtttgcgt

SEQ ID NO: 193523 - DNA, 50 bp, Artificial
  Synthetic oligonucleotide
aatggtagggccaccgcaagaattaccggggtttgcttggcttgaggcgc

SEQ ID NO: 193524 - DNA, 50 bp, Artificial
  Synthetic oligonucleotide
aatgtattcggaaaccccgcgccccctgcgataggccagcccccgtcagt

SEQ ID NO: 193525 - DNA, 50 bp, Artificial
  Synthetic oligonucleotide
aatgtcccgctggtgatgcttggtcattcgtgcaaggcgggctaaacgct

SEQ ID NO: 193526 - DNA, 50 bp, Artificial
  Synthetic oligonucleotide
aattcgcgactggtgcacgtaagggtcaccgccgataatctgccgggcag

SEQ ID NO: 193527 - DNA, 50 bp, Artificial
  Synthetic oligonucleotide
aatttgccaccgtactgtcgcttggcggtgcacgcatcccgttggaagaa

SEQ ID NO: 193528 - DNA, 50 bp, Artificial
  Synthetic oligonucleotide
acaccctccctcgaccatgcaaccctactcaggccgataccccacctcga

SEQ ID NO: 193529 - DNA, 55 bp, Artificial
  Synthetic oligonucleotide
cccgggagttcatcagccgacgttcctgtgggaagtggttgtgcgccaggagaca

SEQ ID NO: 193530 - DNA, 50 bp, Artificial
  Synthetic oligonucleotide
acacgctgcgctgtgatgtatttgcgcacttactgcatttgcccgggcgg

SEQ ID NO: 193531 - DNA, 50 bp, Artificial
  Synthetic oligonucleotide
acacgggccaaacggatggccgcttctactgcgttagtacctgtcgggcc

SEQ ID NO: 193532 - DNA, 50 bp, Artificial
  Synthetic oligonucleotide
acactgatctagccccgcacctgcctgctcacgggtggaatcctgggtta

SEQ ID NO: 193533 - DNA, 50 bp, Artificial
  Synthetic oligonucleotide
acacttgcggtcgcgtctcgccgggaagtcgctctgggacttcgcgctcg

SEQ ID NO: 193534 - DNA, 50 bp, Artificial
  Synthetic oligonucleotide
acagcccccaaccgaggccaaacagtgcgccacctagcaatgtgaggagt

SEQ ID NO: 193535 - DNA, 50 bp, Artificial
  Synthetic oligonucleotide
acaggccttgccacatgctggattcctcgacgacgttgtgtctgccgagc

SEQ ID NO: 193536 - DNA, 50 bp, Artificial
  Synthetic oligonucleotide
acatacgtctcgcgcactcacggctccgctcgatcgttgtccgttcgctc

SEQ ID NO: 193537 - DNA, 50 bp, Artificial
  Synthetic oligonucleotide
acatcccgcgctgtactggggcaaggactcccacttcgatacgccggccc

SEQ ID NO: 193538 - DNA, 50 bp, Artificial
  Synthetic oligonucleotide
acccacccctagggcatgctgcttcagaaactcgagctcacgggcggttt

SEQ ID NO: 193539 - DNA, 50 bp, Artificial
  Synthetic oligonucleotide
acccagccacggtacctaccgggggcatgacatctacgccatgagcccgc

SEQ ID NO: 193540 - DNA, 55 bp, Artificial
  Synthetic oligonucleotide
ccccttgctcgggatcagctgcgattagtcggtcatgttctaacataaggtgcgc

SEQ ID NO: 193541 - DNA, 50 bp, Artificial
  Synthetic oligonucleotide
acccatcgccttgggctctgttgccactatcaatgatgcgacgacggccc

SEQ ID NO: 193542 - DNA, 50 bp, Artificial
  Synthetic oligonucleotide
accctactcaggccgataccccacctcgatatgcgtctgccccgacagcc

SEQ ID NO: 193543 - DNA, 50 bp, Artificial
  Synthetic oligonucleotide
accgccatgatttcggcctacactggtcgacccgtgcgttgtgacgtcgc

SEQ ID NO: 193544 - DNA, 50 bp, Artificial
  Synthetic oligonucleotide
accgtcgagagccggccagtgcttgtggtggggctgaggaccgtgatacc

SEQ ID NO: 193545 - DNA, 50 bp, Artificial
  Synthetic oligonucleotide
accgttacgctgacacacggcatagcgcacgggaaggatcggtagtccct

SEQ ID NO: 193546 - DNA, 50 bp, Artificial
  Synthetic oligonucleotide
acgactccctgtgtgcgggtcacactgaactatgccccttgccgcgatct

SEQ ID NO: 193547 - DNA, 55 bp, Artificial
  Synthetic oligonucleotide
cccctgaatggtgtctggcaggccttgcgatgtcagaaatagggccatgtcgtgc

SEQ ID NO: 193548 - DNA, 55 bp, Artificial
  Synthetic oligonucleotide
ctcacacgacctatgtctaacgcaaaacagccactctaagccttgagtcggatcc

SEQ ID NO: 193549 - DNA, 55 bp, Artificial
  Synthetic oligonucleotide
cccctcgacccacagaatggcgaaccacagaatggcgaaagcacccatgagccgg

SEQ ID NO: 193550 - DNA, 54 bp, Artificial
  Synthetic oligonucleotide
cccctcgaccattttgggagttttgccgcctgggtgacgcaaggtattctcgtg

SEQ ID NO: 193551 - DNA, 55 bp, Artificial
  Synthetic oligonucleotide
ccatgactgactccttgcttgaaagcggaactagccgaatacggccaatgcgacg

SEQ ID NO: 193552 - DNA, 55 bp, Artificial
  Synthetic oligonucleotide
acactctctaacgcttggggtcgctatactgccagggcagttcactacagggtcg

SEQ ID NO: 193553 - DNA, 55 bp, Artificial
  Synthetic oligonucleotide
caggaagcgctatcgagtcgatccaccctcggtaagaggaagcaagttcccctgg

SEQ ID NO: 193554 - DNA, 55 bp, Artificial
  Synthetic oligonucleotide
cagcgcgggagtccctcgattagtccaatgaggtagatccacattgcgatgatcg

SEQ ID NO: 193555 - DNA, 55 bp, Artificial
  Synthetic oligonucleotide
cagcacctagtagcaagaagagaacaatgtgtccccactggttgccaaaagtggc

SEQ ID NO: 193556 - DNA, 55 bp, Artificial
  Synthetic oligonucleotide
cactcctcctgccgagcgtctaaccgctgccgctggcatacttggcgttgatcta

SEQ ID NO: 193557 - DNA, 55 bp, Artificial
  Synthetic oligonucleotide
cacccttgtcgtgctgagtgtctttctttacaggcgataccatgtcttcttcccg

SEQ ID NO: 193558 - DNA, 55 bp, Artificial
  Synthetic oligonucleotide
caatggtggcatctcgttcggtgccatggtcgagtccttctcgctcactgtgcgt

SEQ ID NO: 193559 - DNA, 55 bp, Artificial
  Synthetic oligonucleotide
aaggcgaatctaagactctaggcgctccagaggctaacccatacacgtggcagcg

SEQ ID NO: 193560 - DNA, 55 bp, Artificial
  Synthetic oligonucleotide
caaccgaggccaaacagtgcgccacctagcaatgtgaggagtgtcgcgccgggta

SEQ ID NO: 193561 - DNA, 55 bp, Artificial
  Synthetic oligonucleotide
aggtttccagccacttaatcgactctgccccacgaatgaccactaggagattcgt

SEQ ID NO: 193562 - DNA, 55 bp, Artificial
  Synthetic oligonucleotide
tttcaacaccaccctcggtacggcgattggcgacaattaaagcgtcatcgcctaa

SEQ ID NO: 193563 - DNA, 55 bp, Artificial
  Synthetic oligonucleotide
ttcgaagagtgtggctggccggtattctactcgaccaagctgtaagccttaagct

SEQ ID NO: 193564 - DNA, 55 bp, Artificial
  Synthetic oligonucleotide
tgggaaccgcctagctcaggcaagtcaataatggttgcagtttctaccacgtgcc

SEQ ID NO: 193565 - DNA, 55 bp, Artificial
  Synthetic oligonucleotide
tctcgctacaacgtcaaggcactgcatggtaatacggcggtgctgcatgagccat

SEQ ID NO: 193566 - DNA, 55 bp, Artificial
  Synthetic oligonucleotide
tattccgagctatgacccgctccttcgtcaacacgtaagctttgctcccttaact

SEQ ID NO: 193567 - DNA, 55 bp, Artificial
  Synthetic oligonucleotide
gtgtgttatcagccaatagactctaggcgtggcagaaaaccgtaatgcgcggcta

SEQ ID NO: 193568 - DNA, 55 bp, Artificial
  Synthetic oligonucleotide
gtgtgtcggtattaatcctcctcatggcatttgggcgcatatttgcggatccgac

SEQ ID NO: 193569 - DNA, 55 bp, Artificial
  Synthetic oligonucleotide
gtgactgatggttttgtgctagccgctattcactacggccgccaggaaccagacg

SEQ ID NO: 193570 - DNA, 55 bp, Artificial
  Synthetic oligonucleotide
cgtgcctcatgatgcgtgacacacaagtaggcataatcggtcgtatcgtaataga

SEQ ID NO: 193571 - DNA, 55 bp, Artificial
  Synthetic oligonucleotide
gtctcttctatcacgcccattgtgtaagtcaatacctcctgttcgtcaaacgcgt

SEQ ID NO: 193572 - DNA, 55 bp, Artificial
  Synthetic oligonucleotide
gtccacgccagtgactgagggaaatggtgcaggccccatgaaaacctatcctccg

SEQ ID NO: 193573 - DNA, 55 bp, Artificial
  Synthetic oligonucleotide
ggtgcatctcgcttccattgcaacggctccgaagccctctacaatcgtcttcccg

SEQ ID NO: 193574 - DNA, 55 bp, Artificial
  Synthetic oligonucleotide
gggtccccgcaggggcttgcgaattgtcctggtgggccatattgctacctgtaag

SEQ ID NO: 193575 - DNA, 55 bp, Artificial
  Synthetic oligonucleotide
ggagtaagcgctacacgcgcttctccttgagctgtctctttcggtgcgcctattt

SEQ ID NO: 193576 - DNA, 55 bp, Artificial
  Synthetic oligonucleotide
ggaccttcaagacgaattactgtggtgatgcctgggccctctatccaccgacccg

SEQ ID NO: 193577 - DNA, 55 bp, Artificial
  Synthetic oligonucleotide
gctctgaagcgccccatgtcgccacatccacaggaggtcagtcatcatgagtcca

SEQ ID NO: 193578 - DNA, 55 bp, Artificial
  Synthetic oligonucleotide
ctgttaccggtgccatttcagccgctaagtggccgttattggtggcgtccatggc

SEQ ID NO: 193579 - DNA, 55 bp, Artificial
  Synthetic oligonucleotide
gaactcaacggtttgcccgccgcagaggtttatgcagcgttagtcgactgtcctg

SEQ ID NO: 193580 - DNA, 55 bp, Artificial
  Synthetic oligonucleotide
gaagcgtcaatcttatacaacgtgaacttgatcagcgactaggcgtcacactacc

SEQ ID NO: 193581 - DNA, 55 bp, Artificial
  Synthetic oligonucleotide
cgtcgctagctttcaacgttaacgaaggctcaaagtattgcatagcgtcataacc

SEQ ID NO: 193582 - DNA, 55 bp, Artificial
  Synthetic oligonucleotide
gacccggactctcgaatgactcatactgacgttcgcatgacccatactaggggag

SEQ ID NO: 193583 - DNA, 55 bp, Artificial
  Synthetic oligonucleotide
gaccgctagaatacaccccacacggtaatggcaccgccatgctgatagcgacatc

SEQ ID NO: 193584 - DNA, 55 bp, Artificial
  Synthetic oligonucleotide
gacgtccacttagggtctcccgtcagcgcgtcttcatggattgtggggcatggcc

SEQ ID NO: 193585 - DNA, 55 bp, Artificial
  Synthetic oligonucleotide
gaggtcgcctccacacggggtgcctgtaccgaggaatgcgccttcttgggcaaat

SEQ ID NO: 193586 - DNA, 55 bp, Artificial
  Synthetic oligonucleotide
gcgcccgtttagacgcttgaaaggcccacggtcgagcgacaactcgatccgttcg

SEQ ID NO: 193587 - DNA, 55 bp, Artificial
  Synthetic oligonucleotide
gcacgtgccaacaccccggttcaaacatcgtcgttgcgccgaattacctcttgga

SEQ ID NO: 193588 - DNA, 55 bp, Artificial
  Synthetic oligonucleotide
gcgcatgactggggtatcctgacggcctgatatatcacacagacaacgtccgttc

SEQ ID NO: 193589 - DNA, 54 bp, Artificial
  Synthetic oligonucleotide
actgacgggacgattcggtgacatgggcgcagtctaacagcttgtcgtatcgat

SEQ ID NO: 193590 - DNA, 54 bp, Artificial
  Synthetic oligonucleotide
atagttagtctatgactacgcacctgcgtcacccataacgactcccgcgtagct

SEQ ID NO: 193591 - DNA, 54 bp, Artificial
  Synthetic oligonucleotide
cgagaaagcaagattcgccgtgaccgctttgaggttttccacgctgtcgataat

SEQ ID NO: 193592 - DNA, 55 bp, Artificial
  Synthetic oligonucleotide
cgggagtgttgacctgtcatcacatctcgctggaggtcatgcagcgacgagcgaa

SEQ ID NO: 193593 - DNA, 54 bp, Artificial
  Synthetic oligonucleotide
gatttcacatcgtcgctggaataaaaggtttcgccacgcgagtggtcggataca

SEQ ID NO: 193594 - DNA, 54 bp, Artificial
  Synthetic oligonucleotide
aactgaggctagatgtgcgcagggaagccatacgcccgaatagcgttctcgtca

SEQ ID NO: 193595 - DNA, 54 bp, Artificial
  Synthetic oligonucleotide
caggggaacgtagggtcgttgaccgtccctgtatcttcgatggtgcgtgacagg

SEQ ID NO: 193596 - DNA, 53 bp, Artificial
  Synthetic oligonucleotide
ccccatgctttgtatcagcggactatcaagcatcatgctagcggtcatctgac

SEQ ID NO: 193597 - DNA, 53 bp, Artificial
  Synthetic oligonucleotide
aaagcgataagccgttaatcgacacgttaactgatgacgaagtgctagggccg

SEQ ID NO: 193598 - DNA, 53 bp, Artificial
  Synthetic oligonucleotide
ccatagcggcgtgatccgggcagtacctcgtagatcagccgagcaatcatgca

SEQ ID NO: 193599 - DNA, 53 bp, Artificial
  Synthetic oligonucleotide
tagatgcaggatgagtagaaagggcagcatcgtgactggaaacgccgctaggg

SEQ ID NO: 193600 - DNA, 52 bp, Artificial
  Synthetic oligonucleotide
gctggcgtccccgatgtgtggacaatctgtccccgtggttggcggcccggtt

SEQ ID NO: 193601 - DNA, 52 bp, Artificial
  Synthetic oligonucleotide
ctcattgatacgccgtcatgtttagacccgtaatttaattcacactctacgc

SEQ ID NO: 193602 - DNA, 52 bp, Artificial
  Synthetic oligonucleotide
agtccgagtcactgcatgaggagtaaagagtgaacatgaggaatcgtggctc

SEQ ID NO: 193603 - DNA, 55 bp, Artificial
  Synthetic oligonucleotide
cgggacttttccccgctcacaccatcagccgataactcggggattgtgaagcccc

SEQ ID NO: 193604 - DNA, 52 bp, Artificial
  Synthetic oligonucleotide
gcgagcaagtggttgcgcccgctacctcgttcacccatcagcctaaaggcta

SEQ ID NO: 193605 - DNA, 52 bp, Artificial
  Synthetic oligonucleotide
agagattcgtgaagcgtgatatcaagggcattgcctgctaacaactcaccct

SEQ ID NO: 193606 - DNA, 51 bp, Artificial
  Synthetic oligonucleotide
atggttctatatgccgaagtcgtaggggtattacgtctaatcacaacggcg

SEQ ID NO: 193607 - DNA, 51 bp, Artificial
  Synthetic oligonucleotide
acgtattcgagacgagacccgagcatgtctgaacgatcggaaaagacacgt

SEQ ID NO: 193608 - DNA, 50 bp, Artificial
  Synthetic oligonucleotide
aggtgcctgttccatgagcgggcggactcgagagaagcgaatcgactgca

SEQ ID NO: 193609 - DNA, 50 bp, Artificial
  Synthetic oligonucleotide
aggtcgagacctccagcttgagttgctggccatgcctgacccacgcacat

SEQ ID NO: 193610 - DNA, 50 bp, Artificial
  Synthetic oligonucleotide
aggggcgatgccaggttgcttgtcagtcccttcggcctttggcgtggcag

SEQ ID NO: 193611 - DNA, 50 bp, Artificial
  Synthetic oligonucleotide
agggcatccgtcttggtggtccatgcggttcgctcactacggagagcggc

SEQ ID NO: 193612 - DNA, 50 bp, Artificial
  Synthetic oligonucleotide
aggcgccgattcaactgggtgtcacggatcggcaggtcacgtggcagatg

SEQ ID NO: 193613 - DNA, 50 bp, Artificial
  Synthetic oligonucleotide
aggcgatgcatcgatagagcccctcgatcaagtcgcgggggttgccatct

SEQ ID NO: 193614 - DNA, 55 bp, Artificial
  Synthetic oligonucleotide
cggcgcatatatcgaagtgacgccggcttacgagcgcacaacacatgcacccgca

SEQ ID NO: 193615 - DNA, 50 bp, Artificial
  Synthetic oligonucleotide
aggcagcactggcctgccgcccttggcgtggcatgatggcatctacgctt

SEQ ID NO: 193616 - DNA, 50 bp, Artificial
  Synthetic oligonucleotide
agcgtgcctccggggtgctgagtgccaccgtcaggcgatgtcggaagtgc

SEQ ID NO: 193617 - DNA, 50 bp, Artificial
  Synthetic oligonucleotide
agcgtcgcggaacctaacagagcgaatccagtcaaggtcgccagaggcgc

SEQ ID NO: 193618 - DNA, 50 bp, Artificial
  Synthetic oligonucleotide
agcgtcaggaaccgagggtcccggtcacgcagggtagcgaacacatcgcc

SEQ ID NO: 193619 - DNA, 50 bp, Artificial
  Synthetic oligonucleotide
agtagaacccccggggaaccgagtcgaaggtcagaaggcgcgtgttgctc

SEQ ID NO: 193620 - DNA, 50 bp, Artificial
  Synthetic oligonucleotide
agtctcgtttggggcccgcccctctctacagccagccactcgacctggaa

SEQ ID NO: 193621 - DNA, 50 bp, Artificial
  Synthetic oligonucleotide
agtgcgcaggtcctgttgacccacgacgacctttccaaccgcaagcgata

SEQ ID NO: 193622 - DNA, 50 bp, Artificial
  Synthetic oligonucleotide
agtggcacgggcgtcgctatgacccgactcaatgggatgcttccgatgtg

SEQ ID NO: 193623 - DNA, 50 bp, Artificial
  Synthetic oligonucleotide
ataacgagagcggggcccggtgtcccgagcgaaggtacctatgagcacac

SEQ ID NO: 193624 - DNA, 50 bp, Artificial
  Synthetic oligonucleotide
atacacgcttctctgttcagaggctcgctgcgacgcccgtctagccccac

SEQ ID NO: 193625 - DNA, 55 bp, Artificial
  Synthetic oligonucleotide
cggagggactcgcccctttgttcacgcttgatcgccactatctctcaattgcacc

SEQ ID NO: 193626 - DNA, 50 bp, Artificial
  Synthetic oligonucleotide
atagtccggcgggatgacatacggccagcgactcaccagcagccccatgt

SEQ ID NO: 193627 - DNA, 50 bp, Artificial
  Synthetic oligonucleotide
atatacggacgccccacagacgacgcggtctagcctttccatcgcccgac

SEQ ID NO: 193628 - DNA, 50 bp, Artificial
  Synthetic oligonucleotide
atcagccgacgttcctgtgggaagtggttgtgcgccaggagacatgggat

SEQ ID NO: 193629 - DNA, 50 bp, Artificial
  Synthetic oligonucleotide
atccagagggagtgactctgcgctgggcgctacggtcgaatggggagagc

SEQ ID NO: 193630 - DNA, 50 bp, Artificial
  Synthetic oligonucleotide
atcccgcgagtgccctgggcgaggcttgaaacaaggtagcgacatgcgag

SEQ ID NO: 193631 - DNA, 50 bp, Artificial
  Synthetic oligonucleotide
ctactggcttgatccgagttggcttgtttgcctattaaacaggcgtatta

SEQ ID NO: 193632 - DNA, 50 bp, Artificial
  Synthetic oligonucleotide
aacgtgtccgataccgctactgtgcgcaggccgccaaatagcgcgtacac

SEQ ID NO: 193633 - DNA, 50 bp, Artificial
  Synthetic oligonucleotide
aagactccatcggcatggctcaagcagggtgcccagacaccgcccgagtc

SEQ ID NO: 193634 - DNA, 50 bp, Artificial
  Synthetic oligonucleotide
aagagctgcgctaccatcgcgggtgccttatggctcgtccctcgccaagc

SEQ ID NO: 193635 - DNA, 50 bp, Artificial
  Synthetic oligonucleotide
aagaggcaccccacgaggtcgttctattccggcgttgacacggtgggcgt

SEQ ID NO: 193636 - DNA, 59 bp, Artificial
  Synthetic oligonucleotide
agccagcacgggaaacaacgtgaacacagtcgggacgatgtgtgtatcgggtatgcgag

SEQ ID NO: 193637 - DNA, 55 bp, Artificial
  Synthetic oligonucleotide
cttatagtccgtttaagacgactggatctacagaacgacccgatatagtcgcagc

SEQ ID NO: 193638 - DNA, 55 bp, Artificial
  Synthetic oligonucleotide
gcaccagctattagcggagtacccgtttcgaatttatacggtgcatctttccaag

SEQ ID NO: 193639 - DNA, 55 bp, Artificial
  Synthetic oligonucleotide
gcagtggtgcgattagaaatcctgcgattagtccactaagatggccttctagact

SEQ ID NO: 193640 - DNA, 55 bp, Artificial
  Synthetic oligonucleotide
gcgctttatcgcagcgatacggaaatctctttcgagttctgcttcgagggagtaa

SEQ ID NO: 193641 - DNA, 55 bp, Artificial
  Synthetic oligonucleotide
gctaacctccatgcaaatacgagctcaaccatctgactacataacgactatttct

SEQ ID NO: 193642 - DNA, 55 bp, Artificial
  Synthetic oligonucleotide
ggtctctttaacccagtcaggccctgtaaacctatcgatatcattcaagaatggg

SEQ ID NO: 193643 - DNA, 55 bp, Artificial
  Synthetic oligonucleotide
tacattttcagtagctgcactaccgttagctggtctaccttacaagttggtttca

SEQ ID NO: 193644 - DNA, 55 bp, Artificial
  Synthetic oligonucleotide
tatcagcacctagttatggcatacacggcaccaatacaccagaatcaattggtac

SEQ ID NO: 193645 - DNA, 55 bp, Artificial
  Synthetic oligonucleotide
tcgatcaaataaaactttctgacaccaatacgggctagggcgctaacaactaaac

SEQ ID NO: 193646 - DNA, 55 bp, Artificial
  Synthetic oligonucleotide
agacacgtgccgttaaatcaggtgtataccataatcctgatgagagaattcgcga

SEQ ID NO: 193647 - DNA, 60 bp, Artificial
  Synthetic oligonucleotide
agcgtgcctatcttcgcggggcattcttagcgggaggatctgtcaataatccgagcacct

SEQ ID NO: 193648 - DNA, 55 bp, Artificial
  Synthetic oligonucleotide
agtgccagttattgtatcatatgcatctaagaagtcaccactcgcaacttgctgt

SEQ ID NO: 193649 - DNA, 55 bp, Artificial
  Synthetic oligonucleotide
ataagccaggtcactccataatctctttaggaacgtttggttgtaatatgacgtg

SEQ ID NO: 193650 - DNA, 55 bp, Artificial
  Synthetic oligonucleotide
cacctaaagacttcccctatgaatggataccttatggtagggattatccgtggtc

SEQ ID NO: 193651 - DNA, 55 bp, Artificial
  Synthetic oligonucleotide
catcgtaaaatggtcaagtggcaaccctttgctgcattaacggaacagtctcagt

SEQ ID NO: 193652 - DNA, 55 bp, Artificial
  Synthetic oligonucleotide
ccatcactcctaattagcaaggtcagcgtatcgtttgaagttccaccattccgaa

SEQ ID NO: 193653 - DNA, 55 bp, Artificial
  Synthetic oligonucleotide
ccgcgtgatctttagctaacatagcacgattaattgccccttgtatggtttcgtc

SEQ ID NO: 193654 - DNA, 55 bp, Artificial
  Synthetic oligonucleotide
cctacgactatgcttagttcttcgttcgatgtagttaacttattgttcattcgag

SEQ ID NO: 193655 - DNA, 55 bp, Artificial
  Synthetic oligonucleotide
cctccaaattgactgacacggtcaagatactcaacacctagatagtctcgcgacc

SEQ ID NO: 193656 - DNA, 53 bp, Artificial
  Synthetic oligonucleotide
cgccgtagttacagcggtcggaaaacaagttgccggtagactattattaatcc

SEQ ID NO: 193657 - DNA, 55 bp, Artificial
  Synthetic oligonucleotide
cgctgtcaacatttcacgcctaagacttcccgttaggcctactgcaactccaata

SEQ ID NO: 193658 - DNA, 58 bp, Artificial
  Synthetic oligonucleotide
aggacgggggtcagctgccggttcactggtatcatatgtgctgggtattacgaacgtg

SEQ ID NO: 193659 - DNA, 54 bp, Artificial
  Synthetic oligonucleotide
tcgaattgtcagttaaatgtgcaagcggtagaattcccataatagcaggtactg

SEQ ID NO: 193660 - DNA, 53 bp, Artificial
  Synthetic oligonucleotide
ctgagaaatgctcgaacaacgaaggcggggcgttggtggtcttaggcccccgc

SEQ ID NO: 193661 - DNA, 53 bp, Artificial
  Synthetic oligonucleotide
gtcggtccaggacgggggtcagctgccggttcactggtatcatatgtgctggg

SEQ ID NO: 193662 - DNA, 53 bp, Artificial
  Synthetic oligonucleotide
cacaacataatccgctaagtttgttactagtttcccaataatcgggcgcttta

SEQ ID NO: 193663 - DNA, 52 bp, Artificial
  Synthetic oligonucleotide
acaagtagttgtatccaagcatgtgctacaacgcagtggtaaacgaatattg

SEQ ID NO: 193664 - DNA, 51 bp, Artificial
  Synthetic oligonucleotide
cggcaacctgtacaccatgtccagctactacagttgtatgtaccgtaagtc

SEQ ID NO: 193665 - DNA, 50 bp, Artificial
  Synthetic oligonucleotide
cgaccagtcttcaacggactcgtcattcaactcggtgatacgatcgccac

SEQ ID NO: 193666 - DNA, 57 bp, Artificial
  Synthetic oligonucleotide
gtggggtcatgcctgtctctttaaccctagcattcgggtctgccccagcgttaagaa

SEQ ID NO: 193667 - DNA, 56 bp, Artificial
  Synthetic oligonucleotide
tacgctgccccgagttctacaggttgtcctggcctacctagtggagttgaacttcc

SEQ ID NO: 193668 - DNA, 58 bp, Artificial
  Synthetic oligonucleotide
ctgagtatatgaaaatgcctgcagaaaattgtattattaacgaccctacagtagatcc

SEQ ID NO: 193669 - DNA, 55 bp, Artificial
  Synthetic oligonucleotide
cgcttagccgctcgtcctgtaggagctactaatccaatgttctcagacctgtccg

SEQ ID NO: 193670 - DNA, 55 bp, Artificial
  Synthetic oligonucleotide
cggaactgcgtcgcacatcactgtatcaactcatgtaagaaaggtgcaatacgga

SEQ ID NO: 193671 - DNA, 53 bp, Artificial
  Synthetic oligonucleotide
cggagagaacccaaaacgtgtttataatagtaagggacaaactccaatgacgc

SEQ ID NO: 193672 - DNA, 55 bp, Artificial
  Synthetic oligonucleotide
cccgccacggtgtaggtaaccgccatcgcgagtacatatacgactgagagaacga

SEQ ID NO: 193673 - DNA, 55 bp, Artificial
  Synthetic oligonucleotide
gatccccgaaacccacatggacacgatatacagaacgataccgactgtcgcgatc

SEQ ID NO: 193674 - DNA, 55 bp, Artificial
  Synthetic oligonucleotide
gcggatcaaaccccttatattcatgccaattgttattacaatcagctgtgccacc

SEQ ID NO: 193675 - DNA, 55 bp, Artificial
  Synthetic oligonucleotide
ggatatcggcacaaatacagtggcagcccggtgcctggagaaatagatggttcgt

SEQ ID NO: 193676 - DNA, 55 bp, Artificial
  Synthetic oligonucleotide
atcgcttaattggcagtgcaatcgcgctacttagttgatctccactatctagccc

SEQ ID NO: 193677 - DNA, 55 bp, Artificial
  Synthetic oligonucleotide
ggccctgttggctagtgtactgtttcgctcttggaggtactttcagagccctccg

SEQ ID NO: 193678 - DNA, 52 bp, Artificial
  Synthetic oligonucleotide
gtcgcgataggtaactggggatttccccaagcaaccgtaggtaaaacacgtg

SEQ ID NO: 193679 - DNA, 55 bp, Artificial
  Synthetic oligonucleotide
taccgatgaacaaccggacaacaacgcggttgccagcaaaacgacaaccggccac

SEQ ID NO: 193680 - DNA, 55 bp, Artificial
  Synthetic oligonucleotide
atccgcgcgcccgattcgcagatacacgcccttgatcgtcttgcgagtaagcttg

SEQ ID NO: 193681 - DNA, 55 bp, Artificial
  Synthetic oligonucleotide
tgggctcaacggccaattgggtttggctgcacggtagcgaccaagtgcccaagcg

SEQ ID NO: 193682 - DNA, 55 bp, Artificial
  Synthetic oligonucleotide
ttacctggaactgcgcaacaagcaatttcgggctggtcattctggaaccgctcgt

SEQ ID NO: 193683 - DNA, 55 bp, Artificial
  Synthetic oligonucleotide
cccttgcgccccaattgtccgtggatatgcagtttcatcccgggcacaagtccgg

SEQ ID NO: 193684 - DNA, 55 bp, Artificial
  Synthetic oligonucleotide
ttcctaataacggccttccatataggcccttttactccatgatctgttgccgcac

SEQ ID NO: 193685 - DNA, 55 bp, Artificial
  Synthetic oligonucleotide
ttgatcaacgatgcgagctagccctgaaggcacttgaatgctatcccaatattcg

SEQ ID NO: 193686 - DNA, 55 bp, Artificial
  Synthetic oligonucleotide
agttcggcacaggacagccgcgcttgatcgggcgaaacgacgcgtccgatacgat

SEQ ID NO: 193687 - DNA, 55 bp, Artificial
  Synthetic oligonucleotide
tttcacgacctggtgaggcagtttatggccattggttggtagacatacttccacg

SEQ ID NO: 193688 - DNA, 54 bp, Artificial
  Synthetic oligonucleotide
cgcaacgcaactgacgttagccgaagtgaaggatcagattgcgacgactctgaa

SEQ ID NO: 193689 - DNA, 54 bp, Artificial
  Synthetic oligonucleotide
ttgtgctcagtgcgagcggcgcgtaagagcccaaaactactcgctagaatgcga

SEQ ID NO: 193690 - DNA, 53 bp, Artificial
  Synthetic oligonucleotide
tcaataccgctgtgggtgtagcagccatttcgcaagatttgaccaatgtgtcg

SEQ ID NO: 193691 - DNA, 52 bp, Artificial
  Synthetic oligonucleotide
aagtcggttgggttgggaagcgattcggatgggttgccgatacagcctcccc

SEQ ID NO: 193692 - DNA, 52 bp, Artificial
  Synthetic oligonucleotide
agactcttagaccatacattagctactgcgggtgtcgagcaaagctcatgaa

SEQ ID NO: 193693 - DNA, 51 bp, Artificial
  Synthetic oligonucleotide
ctacctaacccacccgacatcgaattagagccttttatgccgaacatgacc

SEQ ID NO: 193694 - DNA, 55 bp, Artificial
  Synthetic oligonucleotide
ccggctcggtggtgtctacatgcacagaaagtaatgcgaattgtgccctaggagg

SEQ ID NO: 193695 - DNA, 50 bp, Artificial
  Synthetic oligonucleotide
aggcggtagttgcgtttatggctggtgcgcgttctggcaccaagcgtcaa

SEQ ID NO: 193696 - DNA, 50 bp, Artificial
  Synthetic oligonucleotide
agcttccgagccaaatcgctgcacaaccatggagctgtcgcgacgcggag

SEQ ID NO: 193697 - DNA, 50 bp, Artificial
  Synthetic oligonucleotide
agctcccgggaatcacatcatccccacgcaacaaacgcggcggttgaacg

SEQ ID NO: 193698 - DNA, 50 bp, Artificial
  Synthetic oligonucleotide
agcgtggatgacaattcacccgagcccccagccggaatagtcgtgaccgg

SEQ ID NO: 193699 - DNA, 50 bp, Artificial
  Synthetic oligonucleotide
agcgcacgagccggaatgagagtttgggtgccgctgggtaaggggcaacg

SEQ ID NO: 193700 - DNA, 50 bp, Artificial
  Synthetic oligonucleotide
aaaagatgggttcataccggcacggcgttttgggcgtcacgcacgagtcg

SEQ ID NO: 193701 - DNA, 50 bp, Artificial
  Synthetic oligonucleotide
aaacaaacatcggggccggtgcttgagcgtccgggtgacttggcggcgct

SEQ ID NO: 193702 - DNA, 50 bp, Artificial
  Synthetic oligonucleotide
aaagcaccagtgaggttttgtccgcacccgagggcggtactgtgtcccga

SEQ ID NO: 193703 - DNA, 50 bp, Artificial
  Synthetic oligonucleotide
aaagccgtgcgcaagctaagcctcggacacgaataggcccacgcgaagtg

SEQ ID NO: 193704 - DNA, 50 bp, Artificial
  Synthetic oligonucleotide
aacctcaccggatcgcatcaccccaccctgcccgcactttgaccaatgtg

SEQ ID NO: 193705 - DNA, 55 bp, Artificial
  Synthetic oligonucleotide
ccgtgcagagtttgctcggtggggatgcgtcgttggcccaacgctttgaacaggg

SEQ ID NO: 193706 - DNA, 50 bp, Artificial
  Synthetic oligonucleotide
aacgatgccgccacgcgcttaaatatcgccccgcatgaattgccggaaca

SEQ ID NO: 193707 - DNA, 50 bp, Artificial
  Synthetic oligonucleotide
aacgcagcccgtgtgcggggtccctatctcgatcgggtatcggcaatccg

SEQ ID NO: 193708 - DNA, 50 bp, Artificial
  Synthetic oligonucleotide
aacgcccaggcaaatcgcgtcaagcggatgctgattggtcacgctactga

SEQ ID NO: 193709 - DNA, 50 bp, Artificial
  Synthetic oligonucleotide
aagccactcagatccagtagattaccgagaacgcgcagtaccttccaacc

SEQ ID NO: 193710 - DNA, 50 bp, Artificial
  Synthetic oligonucleotide
aagggcgcatccgcaaaatcggttggaatggcaggcgccatgtacgcgcg

SEQ ID NO: 193711 - DNA, 50 bp, Artificial
  Synthetic oligonucleotide
aatgccccgaccacccagtgagccggcgaggtatcgcacattcgcttcga

SEQ ID NO: 193712 - DNA, 50 bp, Artificial
  Synthetic oligonucleotide
aatgcgtgcccgcccaacacgaaagaccccgcaacgggagagtgcgtgta

SEQ ID NO: 193713 - DNA, 50 bp, Artificial
  Synthetic oligonucleotide
aatgcgtttgtaccgagccagtgaacaccgaggcgtgcgccgttgtctcc

SEQ ID NO: 193714 - DNA, 50 bp, Artificial
  Synthetic oligonucleotide
aatgtcttcaaagcgggtgcccggagcgatgccactatccggatcgccct

SEQ ID NO: 193715 - DNA, 50 bp, Artificial
  Synthetic oligonucleotide
acaagccagccgagccgcacatatgccctccgctgccgtccgctggggtt

SEQ ID NO: 193716 - DNA, 55 bp, Artificial
  Synthetic oligonucleotide
cgactacaaatcgaggacgctgtagccgagtgggaaatttccgcccaacatcgag

SEQ ID NO: 193717 - DNA, 50 bp, Artificial
  Synthetic oligonucleotide
acacctcggcatttggctcgtcacccaaatgtccgtccgcccgtaaacga

SEQ ID NO: 193718 - DNA, 50 bp, Artificial
  Synthetic oligonucleotide
agcgaacgaggtgcgttgctgacggggcaaattgttcttgggggccgaat

SEQ ID NO: 193719 - DNA, 50 bp, Artificial
  Synthetic oligonucleotide
agcccggatagccgcgtgaaggcccttgggtgaaaataagtggccccgtg

SEQ ID NO: 193720 - DNA, 50 bp, Artificial
  Synthetic oligonucleotide
agcagaacccaggtcggaacctagggcggaatgttgggtcatgcgctcac

SEQ ID NO: 193721 - DNA, 50 bp, Artificial
  Synthetic oligonucleotide
agatgagcccacgctcacttgagaggacttgctcgccactaaagccgcgg

SEQ ID NO: 193722 - DNA, 50 bp, Artificial
  Synthetic oligonucleotide
agaggctactgaggcggagtcaaagcgcggtatttacggcaacccaccgc

SEQ ID NO: 193723 - DNA, 50 bp, Artificial
  Synthetic oligonucleotide
agaacccgcaatcaagtcgctgacgccagctgaggtcgcctcgggcgctt

SEQ ID NO: 193724 - DNA, 50 bp, Artificial
  Synthetic oligonucleotide
agaaacgcgctggccgctatggtcatgtcttgtgggtcgcggacgtagcg

SEQ ID NO: 193725 - DNA, 50 bp, Artificial
  Synthetic oligonucleotide
actgtgggttcggcaccagaatcaataccgcccccgatgggagggcgtcc

SEQ ID NO: 193726 - DNA, 50 bp, Artificial
  Synthetic oligonucleotide
actggcagccgacttcctacaatgcactgcacggtggcatgttgcgccgg

SEQ ID NO: 193727 - DNA, 55 bp, Artificial
  Synthetic oligonucleotide
cagtcgctggaccgtaccctggcttgaacgcgtattacggagaacccgcgtagat

SEQ ID NO: 193728 - DNA, 50 bp, Artificial
  Synthetic oligonucleotide
acggttgagggtgcaacgcccaagctctcggctaacgcccggacactcaa

SEQ ID NO: 193729 - DNA, 50 bp, Artificial
  Synthetic oligonucleotide
acgctgggcgctgttactccgtcgcggtcaatacctaaaagccgtgcgca

SEQ ID NO: 193730 - DNA, 50 bp, Artificial
  Synthetic oligonucleotide
acgatccacttgcgtgcccgtaacagatccgccggatagggtgtgaccgg

SEQ ID NO: 193731 - DNA, 50 bp, Artificial
  Synthetic oligonucleotide
accgccagcaaaaggcgtactggactgacggacgagagagcaactcgccc

SEQ ID NO: 193732 - DNA, 50 bp, Artificial
  Synthetic oligonucleotide
accacatggttcctcgcctatggggaacccgcctgtactccacgcgtctg

SEQ ID NO: 193733 - DNA, 50 bp, Artificial
  Synthetic oligonucleotide
accaatcctcgggaatgtcttcaaagcgggtgcccggagcgatgccacta

SEQ ID NO: 193734 - DNA, 50 bp, Artificial
  Synthetic oligonucleotide
acagaaccggtcgaagcgccaagcaccatcgaacccgagcctcttcccgc

SEQ ID NO: 193735 - DNA, 55 bp, Artificial
  Synthetic oligonucleotide
cgccacgcgcttaaatatcgccccgcatgaattgccggaacacacaggatacccc

SEQ ID NO: 193736 - DNA, 55 bp, Artificial
  Synthetic oligonucleotide
cacaaggtaagtgattcgcattggtcaggatagataagtttgattcgtgacaggc

SEQ ID NO: 193737 - DNA, 55 bp, Artificial
  Synthetic oligonucleotide
ctggatgcgctcgaatagggcatgggcaggtgcattgccgagttctgaatcgtgc

SEQ ID NO: 193738 - DNA, 55 bp, Artificial
  Synthetic oligonucleotide
gtttctgtttcgctaattttccaaaaatcagcggttttaatgctatcccatagct

SEQ ID NO: 193739 - DNA, 57 bp, Artificial
  Synthetic oligonucleotide
agggcattttcaaagctttccataagctcgtattttaggctctcattaatgttaggc

SEQ ID NO: 193740 - DNA, 55 bp, Artificial
  Synthetic oligonucleotide
cctaattttgtaggtgatagcgccacaacaagaccccaattagttgaaagcgaat

SEQ ID NO: 193741 - DNA, 52 bp, Artificial
  Synthetic oligonucleotide
tcgtaagactttgtgcatacaaaatccaatcaagcgtcattgccttaggtcg

SEQ ID NO: 193742 - DNA, 52 bp, Artificial
  Synthetic oligonucleotide
gcacgaagtgcagaccttgtaaagcgttgtagggggtgagcggcacgactgc

SEQ ID NO: 193743 - DNA, 52 bp, Artificial
  Synthetic oligonucleotide
ctatgatggagcataatggcgtgggattagccgcgatacaagtagcaaagcc

SEQ ID NO: 193744 - DNA, 52 bp, Artificial
  Synthetic oligonucleotide
ctatctggtaggtgggtcttgctactcttaaaatcccttagctgtggggagc

SEQ ID NO: 193745 - DNA, 52 bp, Artificial
  Synthetic oligonucleotide
gctatgattgcggggaatgcattgcggtatgccctgtgggcgctttgagcta

SEQ ID NO: 193746 - DNA, 52 bp, Artificial
  Synthetic oligonucleotide
tcgctgcgcttatctcttgggtgcgtccagatccttacaatcctattgtgca

SEQ ID NO: 193747 - DNA, 52 bp, Artificial
  Synthetic oligonucleotide
gaacgctagttttaggcttcaatcctcacttggcgcaataaacaccgactcc

SEQ ID NO: 193748 - DNA, 52 bp, Artificial
  Synthetic oligonucleotide
gttaaggggagtagagagttgcggtatgctatgttctacaactgaactcgga

SEQ ID NO: 193749 - DNA, 52 bp, Artificial
  Synthetic oligonucleotide
gcagtgcgttttgaatgccttgtgctactgccaatgcacttgagtgatcccc

SEQ ID NO: 193750 - DNA, 52 bp, Artificial
  Synthetic oligonucleotide
atagcgagcatgatcactctaagtatttccgtgagggtgagaaaatacgggg

SEQ ID NO: 193751 - DNA, 60 bp, Artificial
  Synthetic oligonucleotide
ggcaattgtcgcgatggagctggggcacacgtcaaccaatacgacgttcagtgcttatgt

SEQ ID NO: 193752 - DNA, 52 bp, Artificial
  Synthetic oligonucleotide
atagctatcaatacttgcttaacaatctaggaatggggcaatacacttcttt

SEQ ID NO: 193753 - DNA, 52 bp, Artificial
  Synthetic oligonucleotide
tactagctctactacgataagcgctggggcatgtagtgggagtgggctaagt

SEQ ID NO: 193754 - DNA, 52 bp, Artificial
  Synthetic oligonucleotide
ccgtcgcattaagagctaaagagacggcttgatacgccggggagttggtttt

SEQ ID NO: 193755 - DNA, 52 bp, Artificial
  Synthetic oligonucleotide
gcgtgtgtgtagcgatcagcggaggggtggggtatttgggcgctgagacctt

SEQ ID NO: 193756 - DNA, 52 bp, Artificial
  Synthetic oligonucleotide
tgtgcgtgagccgagcgggtgctagcagcgtgtgggaattgtgcgccaatgg

SEQ ID NO: 193757 - DNA, 52 bp, Artificial
  Synthetic oligonucleotide
agcacggcgcgaaaatggaacacgtccccgatatgattctgaccctgccgag

SEQ ID NO: 193758 - DNA, 52 bp, Artificial
  Synthetic oligonucleotide
tagcgcgctcctgcttccacagtgtcaaagtgttgggtgaaatactccgctc

SEQ ID NO: 193759 - DNA, 52 bp, Artificial
  Synthetic oligonucleotide
ggggcgtgagcggagggttgagctaccatcatttaggcgtttctaacacaag

SEQ ID NO: 193760 - DNA, 52 bp, Artificial
  Synthetic oligonucleotide
ggggcgtggattctacggtggtcgctacgctattacacagagccattaagga

SEQ ID NO: 193761 - DNA, 52 bp, Artificial
  Synthetic oligonucleotide
cgtgtgctagatgcgcagaaatctgccccatagaagctaatctttcgcgtcg

SEQ ID NO: 193762 - DNA, 56 bp, Artificial
  Synthetic oligonucleotide
ggcgaagcgactatcaattaccaactcaacgactgcctaaaaccctacttgctagg

SEQ ID NO: 193763 - DNA, 52 bp, Artificial
  Synthetic oligonucleotide
agaatgcgtggtggaagcggggtgaatgattaaagactttgaatccccgata

SEQ ID NO: 193764 - DNA, 52 bp, Artificial
  Synthetic oligonucleotide
tttacgatcacttatgatagtaaccccacttttacgggattagggtttcgct

SEQ ID NO: 193765 - DNA, 52 bp, Artificial
  Synthetic oligonucleotide
tttgataaatccgctcttataactgacaaacacgaaaatattagacttgatg

SEQ ID NO: 193766 - DNA, 52 bp, Artificial
  Synthetic oligonucleotide
tatgccgtgcattaaatctagcgcaatgcgcaattacacagccttatgattt

SEQ ID NO: 193767 - DNA, 52 bp, Artificial
  Synthetic oligonucleotide
cgtgcggggagtatcattgtccgccaaagaggcacgaaagtgcatccgggcg

SEQ ID NO: 193768 - DNA, 52 bp, Artificial
  Synthetic oligonucleotide
ggtgaatgtatagaaatcaggccattttcaggctcactctccaataccccgc

SEQ ID NO: 193769 - DNA, 52 bp, Artificial
  Synthetic oligonucleotide
cgcggcagtcatggtaaccgcttccctaccgccatttgcaagacagggcgat

SEQ ID NO: 193770 - DNA, 52 bp, Artificial
  Synthetic oligonucleotide
gcgaagaataatatctactcctgcgagatttacgcccatatcgcgtgtaagt

SEQ ID NO: 193771 - DNA, 52 bp, Artificial
  Synthetic oligonucleotide
ctggggaaggtgcggcgacatagctatataatagtgcgtttgataaagggcg

SEQ ID NO: 193772 - DNA, 52 bp, Artificial
  Synthetic oligonucleotide
acaatctcgcggagttgaattgatacgagttttacaggttgattaggcgtag

SEQ ID NO: 193773 - DNA, 60 bp, Artificial
  Synthetic oligonucleotide
gcagaacgagaaagaaagcttactgcaagcaaagaacagcgagatagcaagtttagagaa

SEQ ID NO: 193774 - DNA, 52 bp, Artificial
  Synthetic oligonucleotide
attcaatgtgtgaatagcggtggaactcctccatgtgttcaagccaatattc

SEQ ID NO: 193775 - DNA, 52 bp, Artificial
  Synthetic oligonucleotide
aatgagcgtcccatcgcccccaagactcataaagccatcgcattgcgaggcg

SEQ ID NO: 193776 - DNA, 52 bp, Artificial
  Synthetic oligonucleotide
gcttccgtctgtgttcattgtttggaggtatggtgtaggtcctcctgtaaaa

SEQ ID NO: 193777 - DNA, 52 bp, Artificial
  Synthetic oligonucleotide
tgagtctcggttatggtgcagcgggattgggtaatgctcttgtgagctacca

SEQ ID NO: 193778 - DNA, 52 bp, Artificial
  Synthetic oligonucleotide
ctagactatcagttcagcaagcatgttaaagcgggtctcaaactcgtgtggt

SEQ ID NO: 193779 - DNA, 52 bp, Artificial
  Synthetic oligonucleotide
tctctatgcccttattccctgccccactcacggcttgataggtgctaacaat

SEQ ID NO: 193780 - DNA, 52 bp, Artificial
  Synthetic oligonucleotide
aaatgcgaaacatcgatcaaaaagtcttaaccccagctctcaaagaactcag

SEQ ID NO: 193781 - DNA, 52 bp, Artificial
  Synthetic oligonucleotide
cagctcctaacacaacaccaagagctacacaatctctcatacaagagcttag

SEQ ID NO: 193782 - DNA, 52 bp, Artificial
  Synthetic oligonucleotide
aaacgacacgcatgcattaagccaagtgctagccaagcaccccatcttaggc

SEQ ID NO: 193783 - DNA, 52 bp, Artificial
  Synthetic oligonucleotide
cgatgcggcgacccctactagcatgctagagcttaaatccattaaggttacc

SEQ ID NO: 193784 - DNA, 60 bp, Artificial
  Synthetic oligonucleotide
gcaagtttggcttaacccacgcgattctgtgccttgtagctcaatgcctccattcgcgct

SEQ ID NO: 193785 - DNA, 52 bp, Artificial
  Synthetic oligonucleotide
aatttgatggcggatctccacgctttgggcattatccgttttgattttagcc

SEQ ID NO: 193786 - DNA, 52 bp, Artificial
  Synthetic oligonucleotide
gccctacaaaaacaaggaattagagcttttacggaaagaaaatttgcaattc

SEQ ID NO: 193787 - DNA, 52 bp, Artificial
  Synthetic oligonucleotide
acgcgaactttgaaccaatttgatgttagtgtagctattcctccttttggcg

SEQ ID NO: 193788 - DNA, 52 bp, Artificial
  Synthetic oligonucleotide
ccctactaatccggttgcacttgatcctatgcatgtagaagagcctacgctt

SEQ ID NO: 193789 - DNA, 51 bp, Artificial
  Synthetic oligonucleotide
actttaggcaatcagatgctctataacacttatgcgagaacggctggaatg

SEQ ID NO: 193790 - DNA, 51 bp, Artificial
  Synthetic oligonucleotide
acctctttaacgagttgagcgcccatgttagccaccgggcaacttaattca

SEQ ID NO: 193791 - DNA, 51 bp, Artificial
  Synthetic oligonucleotide
aattcaccttcacccttttggtttggcgtccagattcttagcttatcatag

SEQ ID NO: 193792 - DNA, 51 bp, Artificial
  Synthetic oligonucleotide
tgaccactcaaactttcgcttccggttgtgcctatgtggggcaaaccataa

SEQ ID NO: 193793 - DNA, 51 bp, Artificial
  Synthetic oligonucleotide
aaaactcctaaataaaactaaaatcccaagatatgtagcgcgtcatgcgcg

SEQ ID NO: 193794 - DNA, 51 bp, Artificial
  Synthetic oligonucleotide
tcatgcaatgagggggtgccaaaccaggctaagaaccccaagcccggccaa

SEQ ID NO: 193795 - DNA, 57 bp, Artificial
  Synthetic oligonucleotide
cctgatcacccaagacaaccgcttcatttacgctaaatacggcgatacgaccgctaa

SEQ ID NO: 193796 - DNA, 51 bp, Artificial
  Synthetic oligonucleotide
taataagatctactgagtaggcaaattttgatgatattagaatctactagt

SEQ ID NO: 193797 - DNA, 51 bp, Artificial
  Synthetic oligonucleotide
aaatcatgcccacaagccaaactttcgctcccctacccacccataaaatcc

SEQ ID NO: 193798 - DNA, 51 bp, Artificial
  Synthetic oligonucleotide
tgattgtcataaggaattaggtctatcgcgccctactattgataaatggtg

SEQ ID NO: 193799 - DNA, 51 bp, Artificial
  Synthetic oligonucleotide
actcaaattgcagggcaaacttggagcactaatgtaacgaacttgttgagc

SEQ ID NO: 193800 - DNA, 51 bp, Artificial
  Synthetic oligonucleotide
accggttcttgtgaagtgcaagtggcgttattgaatgaaaggattaagctt

SEQ ID NO: 193801 - DNA, 51 bp, Artificial
  Synthetic oligonucleotide
tgagaagcaaattgtggcgagataaactcattgaatctcgcttgggattct

SEQ ID NO: 193802 - DNA, 51 bp, Artificial
  Synthetic oligonucleotide
tttggcaagtaactagctcattgccataatgccctgccattttcctaccct

SEQ ID NO: 193803 - DNA, 51 bp, Artificial
  Synthetic oligonucleotide
aacattagagtgagtaatgttgaacccggtttgtgcggcgaaaccgaattc

SEQ ID NO: 193804 - DNA, 51 bp, Artificial
  Synthetic oligonucleotide
aggggcctcaggatcccccttgatggcaacaattgatccatcctgggtggc

SEQ ID NO: 193805 - DNA, 51 bp, Artificial
  Synthetic oligonucleotide
tgccattttcgccccctgcaccatagctccgggtgccgttacagtgattgc

SEQ ID NO: 193806 - DNA, 56 bp, Artificial
  Synthetic oligonucleotide
cctgcctgattttggaaaattcaaaaccacttataatgagatcataggggctaaaa

SEQ ID NO: 193807 - DNA, 49 bp, Artificial
  Synthetic oligonucleotide
aaaccttagcgttttaataacccttataagtccgccaagacttcttaag

SEQ ID NO: 193808 - DNA, 51 bp, Artificial
  Synthetic oligonucleotide
ttatcgcatcgcctttataggccctagagttgaagcgagcgtgttgagtta

SEQ ID NO: 193809 - DNA, 51 bp, Artificial
  Synthetic oligonucleotide
taggaggcgcggcttctttcccgttagggctagtgcctatcccgctaaacc

SEQ ID NO: 193810 - DNA, 51 bp, Artificial
  Synthetic oligonucleotide
aatggcgcaatcactgtaacggcacccggagctatggtgcagggggcgaaa

SEQ ID NO: 193811 - DNA, 51 bp, Artificial
  Synthetic oligonucleotide
tgaaggtggggcactggatgtgagtggtggggcgatctctcgcatcctcgt

SEQ ID NO: 193812 - DNA, 51 bp, Artificial
  Synthetic oligonucleotide
tagcattggcaagtgccagtagtgccactcccacatcgccaaataccgcct

SEQ ID NO: 193813 - DNA, 51 bp, Artificial
  Synthetic oligonucleotide
aaaagaactctcccgcgcaagtcacgctcttgccttggcgcttctctaggc

SEQ ID NO: 193814 - DNA, 51 bp, Artificial
  Synthetic oligonucleotide
tagggcgggggccagtagtgtttgggaattggcagctagtgggatcccctg

SEQ ID NO: 193815 - DNA, 51 bp, Artificial
  Synthetic oligonucleotide
aaaacgctacgttcctctcggcactactgccttcggaacagctctacgtat

SEQ ID NO: 193816 - DNA, 51 bp, Artificial
  Synthetic oligonucleotide
ttttgcgcgaatagacctcttgggccttaagaagcgtctcgtgaacctttt

SEQ ID NO: 193817 - DNA, 52 bp, Artificial
  Synthetic oligonucleotide
ggaacggcttgttccctaactactatccggctaacgcctacttgcctggggg

SEQ ID NO: 193818 - DNA, 51 bp, Artificial
  Synthetic oligonucleotide
agagatgtgcgaggtaagtagcgcagggagagatggggtggcactagcgcg

SEQ ID NO: 193819 - DNA, 51 bp, Artificial
  Synthetic oligonucleotide
tccccacaggcttttgactactcccgccacttggtcctgcaatgccgcttg

SEQ ID NO: 193820 - DNA, 51 bp, Artificial
  Synthetic oligonucleotide
tgcgaatgcgtcttgccgaaaaccgttccgccccgacagacattatacaaa

SEQ ID NO: 193821 - DNA, 51 bp, Artificial
  Synthetic oligonucleotide
tttacctagtgttgtgcttaaacactcaagcgaagggattagcttttgtag

SEQ ID NO: 193822 - DNA, 51 bp, Artificial
  Synthetic oligonucleotide
tactagccttagcgcaactcccattgagccacaccgcccccacattgcaca

SEQ ID NO: 193823 - DNA, 51 bp, Artificial
  Synthetic oligonucleotide
tgcctatccaagtgctaaagacacttttgccagacccagcttccttagcac

SEQ ID NO: 193824 - DNA, 51 bp, Artificial
  Synthetic oligonucleotide
acgttcctaggcgattttactgaccacaaagcctatgcagtaggcgcacgc

SEQ ID NO: 193825 - DNA, 51 bp, Artificial
  Synthetic oligonucleotide
ttggcgtagcaatcgccacagaagttttaaagcacgacaacgcccaagatt

SEQ ID NO: 193826 - DNA, 51 bp, Artificial
  Synthetic oligonucleotide
gaccaagtcatggggcatgagcgaatcaaaagtcccgctcatggtagtgag

SEQ ID NO: 193827 - DNA, 51 bp, Artificial
  Synthetic oligonucleotide
gacgctcactgctgcaccattcctatagcctccgcttgcctgcaccacccc

SEQ ID NO: 193828 - DNA, 60 bp, Artificial
  Synthetic oligonucleotide
cacactttaggcaagaagatcgctcgtctttagcgggtgggtgattcattgccatgcgct

SEQ ID NO: 193829 - DNA, 51 bp, Artificial
  Synthetic oligonucleotide
gtggagttccacactggggtgtatgcgaatttgcacaatgctctatattct

SEQ ID NO: 193830 - DNA, 51 bp, Artificial
  Synthetic oligonucleotide
gactctttggcatcatctctgcgggggcgagccttggtagtgtcttgggcg

SEQ ID NO: 193831 - DNA, 51 bp, Artificial
  Synthetic oligonucleotide
gagatacatgctggatattgaatatcataatttgtttagaaaagactacaa

SEQ ID NO: 193832 - DNA, 51 bp, Artificial
  Synthetic oligonucleotide
atcccactgtttgggcatcgcccctagggcttttggtcacacgtgcatcga

SEQ ID NO: 193833 - DNA, 51 bp, Artificial
  Synthetic oligonucleotide
gatagcgcgaacgctagggtgcaattcaaccgtgcgaatgaacgccagcgc

SEQ ID NO: 193834 - DNA, 51 bp, Artificial
  Synthetic oligonucleotide
gtctagcaaaaggaggtagcttagcggttaccattactgctgcgacatttt

SEQ ID NO: 193835 - DNA, 51 bp, Artificial
  Synthetic oligonucleotide
gtccgctgcctgcccccttacaggtatctaccccgttgcagccatccgccc

SEQ ID NO: 193836 - DNA, 51 bp, Artificial
  Synthetic oligonucleotide
atgcacttctattgtggaatcgggcatccatttgcctaacgctaacacgat

SEQ ID NO: 193837 - DNA, 51 bp, Artificial
  Synthetic oligonucleotide
atttgtcgccatgggtgagtgtactaactgtgctcgctgtatcgaagtgtg

SEQ ID NO: 193838 - DNA, 51 bp, Artificial
  Synthetic oligonucleotide
gcaggcaagcggaggctataggaatggtgcagcagtgagcgtcaatcccgc

SEQ ID NO: 193839 - DNA, 54 bp, Artificial
  Synthetic oligonucleotide
ccttgatcgaggacgaccgaaagctctttcggtcacgattaaactcgtacaaaa

SEQ ID NO: 193840 - DNA, 51 bp, Artificial
  Synthetic oligonucleotide
gccaaagctattccaggatttataggaggctcggcagatttaagcccgtct

SEQ ID NO: 193841 - DNA, 51 bp, Artificial
  Synthetic oligonucleotide
ccgctgagtcgtcgcgccccattttacggttccctgatcaggcgctatctc

SEQ ID NO: 193842 - DNA, 51 bp, Artificial
  Synthetic oligonucleotide
gccactgggcggatggctgcaacggggtagatacctgtaagggggcaggca

SEQ ID NO: 193843 - DNA, 51 bp, Artificial
  Synthetic oligonucleotide
gccagcatctgggaggcggtatttggcgatgtgggagtggcactactggca

SEQ ID NO: 193844 - DNA, 51 bp, Artificial
  Synthetic oligonucleotide
gcggggtggattctagtgtcgtggcgaccttgctttatcgtgccatcgggg

SEQ ID NO: 193845 - DNA, 51 bp, Artificial
  Synthetic oligonucleotide
gcgggattgaacgcgcttgattatgacaccttagacccaaaatactacaag

SEQ ID NO: 193846 - DNA, 51 bp, Artificial
  Synthetic oligonucleotide
ccaccgatcggaatgcagcaactaagtatgcgtttaattcatttgcatctg

SEQ ID NO: 193847 - DNA, 51 bp, Artificial
  Synthetic oligonucleotide
gcgctttgcagagcgatggccccgcttacgatgaaggtggtcagagttgcg

SEQ ID NO: 193848 - DNA, 51 bp, Artificial
  Synthetic oligonucleotide
ccaagcgtatcataagatcgttaaacctaatggaggtgcctattatcgaga

SEQ ID NO: 193849 - DNA, 51 bp, Artificial
  Synthetic oligonucleotide
gctagccccgggcatttgcgtataaccacctgtcccaagatacgctccaaa

SEQ ID NO: 193850 - DNA, 53 bp, Artificial
  Synthetic oligonucleotide
agggagagccttgatgttttaccaaacgatacaatacgatttaacgccctttg

SEQ ID NO: 193851 - DNA, 54 bp, Artificial
  Synthetic oligonucleotide
caattcaccttaataacgcaattttaaaggatagtcatgcctaaaattaataac

SEQ ID NO: 193852 - DNA, 51 bp, Artificial
  Synthetic oligonucleotide
gcgcagtggcaaaattttaggtctagaagcgcttgttaggtgggagcatcc

SEQ ID NO: 193853 - DNA, 51 bp, Artificial
  Synthetic oligonucleotide
caggaccagagctcgctgtcatagactttgtcccgctcatgcttgccccta

SEQ ID NO: 193854 - DNA, 51 bp, Artificial
  Synthetic oligonucleotide
cactcttgcaagcagagatgcacgcattcctcgcgccaagcacagggacca

SEQ ID NO: 193855 - DNA, 51 bp, Artificial
  Synthetic oligonucleotide
ggcaaagacactctgatactccacctcatctaaggcagtgtcggtgcgttt

SEQ ID NO: 193856 - DNA, 51 bp, Artificial
  Synthetic oligonucleotide
cccctgtattgactccattatccccttctaataagcgtttgtagttttggc

SEQ ID NO: 193857 - DNA, 51 bp, Artificial
  Synthetic oligonucleotide
ccccttccaatcttagcgcccgggtggatttctatcccagtgataaaacgc

SEQ ID NO: 193858 - DNA, 51 bp, Artificial
  Synthetic oligonucleotide
cacgctttaagtggaacatacaaaggctgtagagagtgccacattaaacct

SEQ ID NO: 193859 - DNA, 51 bp, Artificial
  Synthetic oligonucleotide
ggcagcaagatagccgtagcacaggcggggagaaaatgcatagcgcgcggg

SEQ ID NO: 193860 - DNA, 51 bp, Artificial
  Synthetic oligonucleotide
ggcgtatgggttgattttagaatcttccccacttgcagggttactcactcg

SEQ ID NO: 193861 - DNA, 51 bp, Artificial
  Synthetic oligonucleotide
gccccctgcaccatagctccgggtgccgttacagtgattgcgccattttct

SEQ ID NO: 193862 - DNA, 58 bp, Artificial
  Synthetic oligonucleotide
caattaaccattttcagctacaataacagcgtgccaatagtttcacaagtgcggtatt

SEQ ID NO: 193863 - DNA, 51 bp, Artificial
  Synthetic oligonucleotide
agtgcgcgcatagcattggcaagtgccagtagtgccactcccacatcgcca

SEQ ID NO: 193864 - DNA, 51 bp, Artificial
  Synthetic oligonucleotide
agtgtcgccgcaaaattgggtggcgcactaagcgtctcaaatatagacatg

SEQ ID NO: 193865 - DNA, 50 bp, Artificial
  Synthetic oligonucleotide
agttattcagtaaccaaccgaaaaacggtaaaaacagacctccgcaaata

SEQ ID NO: 193866 - DNA, 51 bp, Artificial
  Synthetic oligonucleotide
cttgcttctttactggacgattgaggcgtttggtgccaaggagttttgggg

SEQ ID NO: 193867 - DNA, 51 bp, Artificial
  Synthetic oligonucleotide
ctactccctatatctactatcaactactctgtggatattttacgcctatgg

SEQ ID NO: 193868 - DNA, 51 bp, Artificial
  Synthetic oligonucleotide
cgtgagattaaacacgaatatggaatagaacgcgtgattagtgtgcatgta

SEQ ID NO: 193869 - DNA, 51 bp, Artificial
  Synthetic oligonucleotide
ctttgactcttcccgacagaatgataaagactgtgttacgtacttctgacg

SEQ ID NO: 193870 - DNA, 51 bp, Artificial
  Synthetic oligonucleotide
agtagctgcacttttggagggcaaacgctctaattttgactctagcatttt

SEQ ID NO: 193871 - DNA, 51 bp, Artificial
  Synthetic oligonucleotide
gttatcttgccctgccattttcgccccctgcaccatagctccgggtgccgt

SEQ ID NO: 193872 - DNA, 51 bp, Artificial
  Synthetic oligonucleotide
cgtattacgaatttcccgaatctttgtccgtagccatgtatgatttgaacc

SEQ ID NO: 193873 - DNA, 60 bp, Artificial
  Synthetic oligonucleotide
gattttagagacaacgctcaagcaagagctagaacaatcctacacaacatttatgcaaga

SEQ ID NO: 193874 - DNA, 51 bp, Artificial
  Synthetic oligonucleotide
ctagcaaaatcatctactgtctcaatattgataccaaatctactagaaaga

SEQ ID NO: 193875 - DNA, 51 bp, Artificial
  Synthetic oligonucleotide
ctcaaagatcatcaaagtctctacacactccttgtgtagatcctagtctca

SEQ ID NO: 193876 - DNA, 51 bp, Artificial
  Synthetic oligonucleotide
taaaaccttgcaggctaaacatatccacgcagtcatcgacctagccaacgc

SEQ ID NO: 193877 - DNA, 51 bp, Artificial
  Synthetic oligonucleotide
atagttatctagcttaccccgtgggctagcatcttgggttgttgccactct

SEQ ID NO: 193878 - DNA, 51 bp, Artificial
  Synthetic oligonucleotide
ctagggcttacaatcctacctcctacaaaacctcacaagcaaagcgttagc

SEQ ID NO: 193879 - DNA, 50 bp, Artificial
  Synthetic oligonucleotide
ctgcaagcctgtagcagaagggggaataagttgcgccgtccctgctcgct

SEQ ID NO: 193880 - DNA, 50 bp, Artificial
  Synthetic oligonucleotide
aatgggggcctgcaagcctgtagcagaagggggaataagttgcgccgtcc

SEQ ID NO: 193881 - DNA, 50 bp, Artificial
  Synthetic oligonucleotide
acagggagcgtctctagggctagtgtgccaagcgcttccgtgtccacggg

SEQ ID NO: 193882 - DNA, 50 bp, Artificial
  Synthetic oligonucleotide
ccataggcgagtaaaagacatgcaaggattgtaacgataatcttttgtcg

SEQ ID NO: 193883 - DNA, 50 bp, Artificial
  Synthetic oligonucleotide
aaaaggtcgcgttcagcccatagccataagagacgctcccctttaacact

SEQ ID NO: 193884 - DNA, 59 bp, Artificial
  Synthetic oligonucleotide
ccttgtggtgtcaaataagtgcataattgagcttccttgaaaggatcgttttgagacaa

SEQ ID NO: 193885 - DNA, 50 bp, Artificial
  Synthetic oligonucleotide
ctgcgcgcagcggaggtacgctctaccccattgtctctagcatccctcct

SEQ ID NO: 193886 - DNA, 50 bp, Artificial
  Synthetic oligonucleotide
cgtttcggctgcgcacacgactcgctcggatcgattacgacagcggcagt

SEQ ID NO: 193887 - DNA, 50 bp, Artificial
  Synthetic oligonucleotide
cccgcactcaagagcggagcgcttcttgtgagccttcgagggggagatta

SEQ ID NO: 193888 - DNA, 50 bp, Artificial
  Synthetic oligonucleotide
aaaccctatgcgagtgccagctcacctacggacggaatggcgcggtttta

SEQ ID NO: 193889 - DNA, 50 bp, Artificial
  Synthetic oligonucleotide
aatgctccccagggctagccgctcacctccaaagagcgcaagggcttagg

SEQ ID NO: 193890 - DNA, 50 bp, Artificial
  Synthetic oligonucleotide
cccgtctggctttctagcatgatccgtcttccccgtgctccgccgacatc

SEQ ID NO: 193891 - DNA, 50 bp, Artificial
  Synthetic oligonucleotide
tgcgtgtgtagggcgggggccagtagtgtttgggaattggcagctagtgg

SEQ ID NO: 193892 - DNA, 50 bp, Artificial
  Synthetic oligonucleotide
accaactagacccgtctagggtgcccgtgcctaggacattgcccgctgat

SEQ ID NO: 193893 - DNA, 50 bp, Artificial
  Synthetic oligonucleotide
cgttgcaacgacttctggctgtggcaccggggctgcatcgtcttggactg

SEQ ID NO: 193894 - DNA, 50 bp, Artificial
  Synthetic oligonucleotide
accaccttatagcccctttggtgcaagccctgtaccacttcgtgcgcccc

SEQ ID NO: 193895 - DNA, 60 bp, Artificial
  Synthetic oligonucleotide
gtcagtagatcatatagactagcttagtatttaggagcatgactgtacgtttaatgagca

SEQ ID NO: 193896 - DNA, 50 bp, Artificial
  Synthetic oligonucleotide
ccctcatagagtgcgcccaaaccagcgtagcctcttgtatcgcccgcgtt

SEQ ID NO: 193897 - DNA, 50 bp, Artificial
  Synthetic oligonucleotide
gccccgcgcgctatgcattttctccccgcctgtgctacggctatcttgct

SEQ ID NO: 193898 - DNA, 50 bp, Artificial
  Synthetic oligonucleotide
tgcttctatgggtagagcggtgctaatccctaaaggctctaaggttatag

SEQ ID NO: 193899 - DNA, 50 bp, Artificial
  Synthetic oligonucleotide
ttttagaacgcttgggatataagaatggtacacgcccgcactcggatccg

SEQ ID NO: 193900 - DNA, 50 bp, Artificial
  Synthetic oligonucleotide
cccaatcggaattgccactacccttgggcggtatggtgctgcgccgttcc

SEQ ID NO: 193901 - DNA, 50 bp, Artificial
  Synthetic oligonucleotide
cccacgcctttggacgacccgattgagcatcgccgtgcctgagtacacgc

SEQ ID NO: 193902 - DNA, 50 bp, Artificial
  Synthetic oligonucleotide
ccccaaaggggtgcgatgtgacactttcgtgcgaacgggggtggaggtct

SEQ ID NO: 193903 - DNA, 50 bp, Artificial
  Synthetic oligonucleotide
ctctaaagagggcgcgttggtggcggttgaatcggacatcttgcccgggc

SEQ ID NO: 193904 - DNA, 50 bp, Artificial
  Synthetic oligonucleotide
ccccaagccttccagccctcgaacgcgtttaagagcgttttacgcgtttt

SEQ ID NO: 193905 - DNA, 50 bp, Artificial
  Synthetic oligonucleotide
acaagccctacgccccaatgccgggcttgcccccaaagatttaccccttg

SEQ ID NO: 193906 - DNA, 60 bp, Artificial
  Synthetic oligonucleotide
atgatttttaagcactgtatagctttcattcgccacgacaccataatcaagtgtgtacgc

SEQ ID NO: 193907 - DNA, 50 bp, Artificial
  Synthetic oligonucleotide
gcggaattactaaattctatgaataccttacgcataaaaatcaccccaat

SEQ ID NO: 193908 - DNA, 50 bp, Artificial
  Synthetic oligonucleotide
tttgtcaagggttctttttaggtttgcccgcataagcagggttgcttgga

SEQ ID NO: 193909 - DNA, 50 bp, Artificial
  Synthetic oligonucleotide
ccccagagtgccgatcgactcttagaggacgcgctagccctgcaagaggc

SEQ ID NO: 193910 - DNA, 50 bp, Artificial
  Synthetic oligonucleotide
ccccattttaaacagcgttaaagtcgccgcgcttaaagcttgtctgttta

SEQ ID NO: 193911 - DNA, 50 bp, Artificial
  Synthetic oligonucleotide
tgcaagggtgtctatgagatgtgcactcttttggctgagcggctaggagg

SEQ ID NO: 193912 - DNA, 50 bp, Artificial
  Synthetic oligonucleotide
acaccccatcggggagcaaaaacgcccctctagggtagcgaaaagcgcag

SEQ ID NO: 193913 - DNA, 50 bp, Artificial
  Synthetic oligonucleotide
cccaagcgctcgtgagagtgccttgatggctgtggttttagccaaccccg

SEQ ID NO: 193914 - DNA, 50 bp, Artificial
  Synthetic oligonucleotide
tgcagtgcattccttacacaggatttccaaaggtgcttaatgcggtgttt

SEQ ID NO: 193915 - DNA, 50 bp, Artificial
  Synthetic oligonucleotide
ccccgccactacaatcgcagcaatcacggggcccagctctcttagcgtga

SEQ ID NO: 193916 - DNA, 50 bp, Artificial
  Synthetic oligonucleotide
ccccgctcgctttggctagcaatctcagcgcgcaacagatcgcctgtaga

SEQ ID NO: 193917 - DNA, 56 bp, Artificial
  Synthetic oligonucleotide
cgcctaaaatcctctccgattcaaaaggtccgtaagcctcagctgtgtcaaataaa

SEQ ID NO: 193918 - DNA, 50 bp, Artificial
  Synthetic oligonucleotide
ccccgggtgtcttgtgttgctgaaaacatgccatcttgtgttagactaat

SEQ ID NO: 193919 - DNA, 50 bp, Artificial
  Synthetic oligonucleotide
aatttcgcacacgaaagtgcggaggatgctgggacgctttgggggttgga

SEQ ID NO: 193920 - DNA, 50 bp, Artificial
  Synthetic oligonucleotide
cccctccgggaagtgcataggagctgtgcggccactgtccgctaaagagg

SEQ ID NO: 193921 - DNA, 50 bp, Artificial
  Synthetic oligonucleotide
ctgaggaggattactgctaaagctcattaatcccatagatgggaacgtta

SEQ ID NO: 193922 - DNA, 50 bp, Artificial
  Synthetic oligonucleotide
cgatcggaaaacgtaaagggttcagcgtccacggcgcacacgacccccat

SEQ ID NO: 193923 - DNA, 50 bp, Artificial
  Synthetic oligonucleotide
cgtccgtgctggaagcgagggtttgtacccccagcgacgcgggtagatcg

SEQ ID NO: 193924 - DNA, 50 bp, Artificial
  Synthetic oligonucleotide
aagagcatccgtcccaagcagttgcgaatctcgccgctatccgctcgctt

SEQ ID NO: 193925 - DNA, 50 bp, Artificial
  Synthetic oligonucleotide
aaagcagggtttgggcggatgcttttggcgggatgcaagcattggcgcac

SEQ ID NO: 193926 - DNA, 50 bp, Artificial
  Synthetic oligonucleotide
cgcatgtcacccctccgggaagtgcataggagctgtgcggccactgtccg

SEQ ID NO: 193927 - DNA, 50 bp, Artificial
  Synthetic oligonucleotide
aacgccccactgctgatcgcatccactccactttgggcgtaggcacgcac

SEQ ID NO: 193928 - DNA, 60 bp, Artificial
  Synthetic oligonucleotide
cgcctatgctttcaaactgcgatgcgcttttgtctagctcgctaacgcttcgcttattgg

SEQ ID NO: 193929 - DNA, 50 bp, Artificial
  Synthetic oligonucleotide
cgcccctctcggatagcggatcgaacacggatggtcataccctgcggcat

SEQ ID NO: 193930 - DNA, 50 bp, Artificial
  Synthetic oligonucleotide
gagcggtgggcgggggcttgagagtgggcactagaatacgaaaacgctcg

SEQ ID NO: 193931 - DNA, 50 bp, Artificial
  Synthetic oligonucleotide
cgcgttaaagccatcgatcgcaaccggggtcttgcgttgctctccaccca

SEQ ID NO: 193932 - DNA, 50 bp, Artificial
  Synthetic oligonucleotide
cgggcttggggttcttagcctggtttggcaccccctcattgcatgaaggc

SEQ ID NO: 193933 - DNA, 50 bp, Artificial
  Synthetic oligonucleotide
cggctcggtaaaagtgacgttcgtcccctcacttgtcccgatgacgcggg

SEQ ID NO: 193934 - DNA, 50 bp, Artificial
  Synthetic oligonucleotide
ttgcccatccgcgaacctcagggtagcttgattgtggacattggcggggg

SEQ ID NO: 193935 - DNA, 50 bp, Artificial
  Synthetic oligonucleotide
gaagtgcgcacgcccaagcccacctcaattccattgggggacttggtggt

SEQ ID NO: 193936 - DNA, 50 bp, Artificial
  Synthetic oligonucleotide
gactatctgcttcccatttccaactattccgcccaacccaagtttaaaag

SEQ ID NO: 193937 - DNA, 50 bp, Artificial
  Synthetic oligonucleotide
cggagcgggatacgggcgatccattgtgccagagccacacgggtattgga

SEQ ID NO: 193938 - DNA, 50 bp, Artificial
  Synthetic oligonucleotide
aaccccgcccatgtggtgcccggtgtgggttatagccctgatcgcatgct

SEQ ID NO: 193939 - DNA, 56 bp, Artificial
  Synthetic oligonucleotide
atgaaaccaccgcgactcttcgcccaaagactccgccacactcgtggtaaaggcga

SEQ ID NO: 193940 - DNA, 50 bp, Artificial
  Synthetic oligonucleotide
aaccagcaccccgctatccccgacaattttacgcccgggctcacagatga

SEQ ID NO: 193941 - DNA, 50 bp, Artificial
  Synthetic oligonucleotide
cgcttgtggtggtttagctcctgggggcgagctttctccacagggccttt

SEQ ID NO: 193942 - DNA, 50 bp, Artificial
  Synthetic oligonucleotide
gaatgtgtaggtcatttaatggagcgaacttattggttcatactacgtga

SEQ ID NO: 193943 - DNA, 50 bp, Artificial
  Synthetic oligonucleotide
cggaccgtaggcagagaactccgcaccgtagcctaacgcgtcaccgacgt

SEQ ID NO: 193944 - DNA, 50 bp, Artificial
  Synthetic oligonucleotide
ttgttacaagaaacctttacgcatagcatccaccctatcactaacgaacc

SEQ ID NO: 193945 - DNA, 50 bp, Artificial
  Synthetic oligonucleotide
aaatcgccgccttttctgtgacgcaggcacgctcgcaaagtccgcaaccc

SEQ ID NO: 193946 - DNA, 50 bp, Artificial
  Synthetic oligonucleotide
cggacggatggggtttccgggaggaaccgtcaatgagggggagactctct

SEQ ID NO: 193947 - DNA, 50 bp, Artificial
  Synthetic oligonucleotide
aaaggacaagggatgcccgcctatgagccccgcgctgtcaaaggacaagg

SEQ ID NO: 193948 - DNA, 50 bp, Artificial
  Synthetic oligonucleotide
cttgcgcattggagggattgggataagccgcttgcacgcccccaaagcta

SEQ ID NO: 193949 - DNA, 50 bp, Artificial
  Synthetic oligonucleotide
cgtgccacgacctgtggggtcatcgccgattggtccatttggctaggcac

SEQ ID NO: 193950 - DNA, 60 bp, Artificial
  Synthetic oligonucleotide
gagtgacagtggcggtagaggttgctattgccctctacaaccttatgacttccgtcattg

SEQ ID NO: 193951 - DNA, 50 bp, Artificial
  Synthetic oligonucleotide
gccacgactctcgtttctagcaatagcactctcgactataaagcctgagt

SEQ ID NO: 193952 - DNA, 50 bp, Artificial
  Synthetic oligonucleotide
aataaagggtggatagaatagacacaccgctggagagtttcgccataggg

SEQ ID NO: 193953 - DNA, 50 bp, Artificial
  Synthetic oligonucleotide
aagtgacgttcgtcccctcacttgtcccgatgacgcggggaatgctcgcg

SEQ ID NO: 193954 - DNA, 50 bp, Artificial
  Synthetic oligonucleotide
ccgtcgatgcattgggaggagacgatacggtgattacgggtacggccgcc

SEQ ID NO: 193955 - DNA, 50 bp, Artificial
  Synthetic oligonucleotide
aagggtccagccgtgcgtgggacacgggcgcaaattgacatggatgctta

SEQ ID NO: 193956 - DNA, 50 bp, Artificial
  Synthetic oligonucleotide
tgtgtcctgattgtggataaagaacacagagatattaacgctgcgaacaa

SEQ ID NO: 193957 - DNA, 50 bp, Artificial
  Synthetic oligonucleotide
aagggcggggcgtgtgcggtcttagccacgatcaatgctctagcgcattt

SEQ ID NO: 193958 - DNA, 50 bp, Artificial
  Synthetic oligonucleotide
aagggcgagcgagtggagttgagcgggagtaagaatgccccctgctagct

SEQ ID NO: 193959 - DNA, 50 bp, Artificial
  Synthetic oligonucleotide
gcacttagcgcgcacaaagggcttctttctcctatgggagtgggggcgct

SEQ ID NO: 193960 - DNA, 50 bp, Artificial
  Synthetic oligonucleotide
cctccccggtgaatgcaccctctagggcggggtaagcgttttgtgcgccc

SEQ ID NO: 193961 - DNA, 60 bp, Artificial
  Synthetic oligonucleotide
aggctttgcggtaccggtagcaagcttggctatccatttggcaggactcgcacctataga

SEQ ID NO: 193962 - DNA, 60 bp, Artificial
  Synthetic oligonucleotide
ccgctgcgtgattcaagccgtcttttatcgcgcaagctccagtcccacaagaactcgtct

SEQ ID NO: 193963 - DNA, 50 bp, Artificial
  Synthetic oligonucleotide
cctccctgccgtgcgtgcaatggcttttcgcctcaaagagcggctcccta

SEQ ID NO: 193964 - DNA, 50 bp, Artificial
  Synthetic oligonucleotide
gcaactctgaccaccttcatcgtaagcggggccatcgctctgcaaagcgc

SEQ ID NO: 193965 - DNA, 50 bp, Artificial
  Synthetic oligonucleotide
ttacaaaaggcctctatccctagacccgcatcggcgcatagagcaccgct

SEQ ID NO: 193966 - DNA, 50 bp, Artificial
  Synthetic oligonucleotide
cgaacacgcaccctcggagctgaccatacaactccccacagggctcgtcg

SEQ ID NO: 193967 - DNA, 50 bp, Artificial
  Synthetic oligonucleotide
aagctgggttccgttgcaaccgcaccgaaaaatgatgcaacgcatgcgcg

SEQ ID NO: 193968 - DNA, 50 bp, Artificial
  Synthetic oligonucleotide
cgactccgaggtgtttgcgcagttcggatacgacccaccgctcattgccc

SEQ ID NO: 193969 - DNA, 50 bp, Artificial
  Synthetic oligonucleotide
gatgttggctaaaggcgtgatcagagatgtcgcaagggttttggacatgc

SEQ ID NO: 193970 - DNA, 50 bp, Artificial
  Synthetic oligonucleotide
cgaggtaagtagcgcagggagagatggggtggcactagcgcgcatctgct

SEQ ID NO: 193971 - DNA, 50 bp, Artificial
  Synthetic oligonucleotide
cgatcatgtatgcggccggacggggagtcgacgtggatgagggtaaagcg

SEQ ID NO: 193972 - DNA, 50 bp, Artificial
  Synthetic oligonucleotide
agccctagcacggcgcacaaaagccacgctagtttgccgcaattcccaag

SEQ ID NO: 193973 - DNA, 51 bp, Artificial
  Synthetic oligonucleotide
atctccggggaagctttgagggtaacttcgaaaggttctttgtcgggttca

SEQ ID NO: 193974 - DNA, 50 bp, Artificial
  Synthetic oligonucleotide
agcccgatcggcggacgtagctttcggtcatattcccgaatgcccggtta

SEQ ID NO: 193975 - DNA, 50 bp, Artificial
  Synthetic oligonucleotide
atatcggttatacgagttggcgttacaaaaatgaacgagaattcctataa

SEQ ID NO: 193976 - DNA, 50 bp, Artificial
  Synthetic oligonucleotide
gtgtagctattaatgaatctttcgtgcatattgcttatactcacggacgc

SEQ ID NO: 193977 - DNA, 50 bp, Artificial
  Synthetic oligonucleotide
agcatgcgttagtgtttaacagcgcgacttcagcccttttaacgctctat

SEQ ID NO: 193978 - DNA, 50 bp, Artificial
  Synthetic oligonucleotide
agcagcgatcttaaagcgagccctcatcgcaccaaaccccatctccccgc

SEQ ID NO: 193979 - DNA, 50 bp, Artificial
  Synthetic oligonucleotide
atcaaaactcccggtcgcatagagcccccgcccggaaaccccaatggaaa

SEQ ID NO: 193980 - DNA, 50 bp, Artificial
  Synthetic oligonucleotide
gtggttgggcgtagagaaacacgccggaaagggctatccaagtaagccat

SEQ ID NO: 193981 - DNA, 50 bp, Artificial
  Synthetic oligonucleotide
agcacttactgttgcaaccagacacatttattccacactctgcgatccgt

SEQ ID NO: 193982 - DNA, 50 bp, Artificial
  Synthetic oligonucleotide
atcagaagtccctgcggccacaatagtgatgtgcgtagggggcggggtga

SEQ ID NO: 193983 - DNA, 50 bp, Artificial
  Synthetic oligonucleotide
agcaatgggcgaaccacaagagatcaaccccctagccgggtcgctctcca

SEQ ID NO: 193984 - DNA, 55 bp, Artificial
  Synthetic oligonucleotide
gtgatagtaaggagtaaaggctttttaggttatcaagtcaattctgggtataaca

SEQ ID NO: 193985 - DNA, 50 bp, Artificial
  Synthetic oligonucleotide
atcattgcggtagaacccgcccaatcgcccatcttaagcggaggcacgca

SEQ ID NO: 193986 - DNA, 50 bp, Artificial
  Synthetic oligonucleotide
atccacgcgggaggggattccacagggcgtgcgttgcattcgcatttaat

SEQ ID NO: 193987 - DNA, 50 bp, Artificial
  Synthetic oligonucleotide
atccactccggacctgtaagcggagtgagcgcgtcccaacacctctcaga

SEQ ID NO: 193988 - DNA, 50 bp, Artificial
  Synthetic oligonucleotide
taggctagaggtaagcacccctgcgtcatagggtttaatgccaaattctc

SEQ ID NO: 193989 - DNA, 50 bp, Artificial
  Synthetic oligonucleotide
atccgaccaattcgcagggtggctagactcatcgtggctccgctgtgacc

SEQ ID NO: 193990 - DNA, 50 bp, Artificial
  Synthetic oligonucleotide
atccgatgtggcgagccgatgcagagagttgggagcggacgtggaaacac

SEQ ID NO: 193991 - DNA, 50 bp, Artificial
  Synthetic oligonucleotide
atccgcgcactccaagaccaactcgcatggcaagcacgagcctaagccct

SEQ ID NO: 193992 - DNA, 50 bp, Artificial
  Synthetic oligonucleotide
atcttagccgcttgatcactgatagcacgagctaagcggcagtttccatg

SEQ ID NO: 193993 - DNA, 50 bp, Artificial
  Synthetic oligonucleotide
atcttggcagggaatgggtgggtcttctagctcatgccccctaccccgca

SEQ ID NO: 193994 - DNA, 50 bp, Artificial
  Synthetic oligonucleotide
agatcttagatcatgattctatcgctgtgatcggtgtgattaaagcgaag

SEQ ID NO: 193995 - DNA, 53 bp, Artificial
  Synthetic oligonucleotide
gtgatagtaagggttaaacgctttctgtctccctaagtcaattttgggtataa

SEQ ID NO: 193996 - DNA, 50 bp, Artificial
  Synthetic oligonucleotide
gtatagaaatcattgtctagcggtgcatatcgttgggctgcaccctctaa

SEQ ID NO: 193997 - DNA, 50 bp, Artificial
  Synthetic oligonucleotide
atgggcggctctgagcaactcgtattcgcaatcgcaaggcggatggcaaa

SEQ ID NO: 193998 - DNA, 50 bp, Artificial
  Synthetic oligonucleotide
atgtggccgatagcttgagcggacaggatggagtgcgaagtgcagagcga

SEQ ID NO: 193999 - DNA, 50 bp, Artificial
  Synthetic oligonucleotide
atgtggtgcccggtgtgggttatagccctgatcgcatgctacaagggcga

SEQ ID NO: 194000 - DNA, 50 bp, Artificial
  Synthetic oligonucleotide
agaggaggggaggcgaatcggttgcgtgtgcgtgggactaagcggacgcg

SEQ ID NO: 194001 - DNA, 50 bp, Artificial
  Synthetic oligonucleotide
ggtttacttggccgggcttggggttcttagcctggtttggcaccccctca

SEQ ID NO: 194002 - DNA, 50 bp, Artificial
  Synthetic oligonucleotide
agagcggttctcaagccgccgatatggagattccccgtaggagagggggc

SEQ ID NO: 194003 - DNA, 50 bp, Artificial
  Synthetic oligonucleotide
agggtgtgggcgtgataatggtagcacccaaagccccgggtcatacggtt

SEQ ID NO: 194004 - DNA, 50 bp, Artificial
  Synthetic oligonucleotide
aggggggtcaaggggggtttgccccacttgcgagctaaagcgattttata

SEQ ID NO: 194005 - DNA, 50 bp, Artificial
  Synthetic oligonucleotide
agtagagctggggcgagcagcgtgtgggaattgtgcgccaatggcttacc

SEQ ID NO: 194006 - DNA, 57 bp, Artificial
  Synthetic oligonucleotide
atcgggcgggcggttgtcctcactcacgagactcaaaagtacctagttgatatcggc

SEQ ID NO: 194007 - DNA, 50 bp, Artificial
  Synthetic oligonucleotide
agggcaaagcgcgtggggttgcctgagcgggagtattcatagcccttagg

SEQ ID NO: 194008 - DNA, 50 bp, Artificial
  Synthetic oligonucleotide
aggctttaaggagcccgtgattcttggagcgaccgatggcgtggggacta

SEQ ID NO: 194009 - DNA, 50 bp, Artificial
  Synthetic oligonucleotide
aggctggcaaaaggacggctacgcaaacaccccaatacgacccacaccta

SEQ ID NO: 194010 - DNA, 50 bp, Artificial
  Synthetic oligonucleotide
aggctacgcaggcggtgtgttctaaaatgttgcccggctttggggagctg

SEQ ID NO: 194011 - DNA, 50 bp, Artificial
  Synthetic oligonucleotide
gtttgataccactgcacaaataacctttcttgaataactaactctactcc

SEQ ID NO: 194012 - DNA, 50 bp, Artificial
  Synthetic oligonucleotide
aggcgtcccttcgataggggcgataacggtgagagcgttgtcgcgcattc

SEQ ID NO: 194013 - DNA, 50 bp, Artificial
  Synthetic oligonucleotide
agtctgcgtacccaaacggagcgccattcgcaccaaacctacggttcgct

SEQ ID NO: 194014 - DNA, 50 bp, Artificial
  Synthetic oligonucleotide
aggcagcacggcgcgttgggttggcatcaacctcgctaaagtcgctttga

SEQ ID NO: 194015 - DNA, 50 bp, Artificial
  Synthetic oligonucleotide
agtgagcgcaacctgtgtccgaatcccgacacttcgcggtcatgccgaaa

SEQ ID NO: 194016 - DNA, 50 bp, Artificial
  Synthetic oligonucleotide
agtgcccgcaacttgtttggtgcccttaatttgggctgccccacccacac

SEQ ID NO: 194017 - DNA, 57 bp, Artificial
  Synthetic oligonucleotide
gaggcttttaagccgaagagaggaacgaagtgacgggagcttatcttaacgcagtga

SEQ ID NO: 194018 - DNA, 50 bp, Artificial
  Synthetic oligonucleotide
agtgccttgcctcgtggtgatcttggtcggtcaagacccagcaagcgtgc

SEQ ID NO: 194019 - DNA, 50 bp, Artificial
  Synthetic oligonucleotide
aggagctaaggcaggggcgggcacgatcataagccctaaagctctcaccc

SEQ ID NO: 194020 - DNA, 50 bp, Artificial
  Synthetic oligonucleotide
aggagcattgaggccacatgggtgaagccgctaccgctaagccagctagg

SEQ ID NO: 194021 - DNA, 50 bp, Artificial
  Synthetic oligonucleotide
agctgggtgctctatttggggcgcatgtttggctcaggagcggtgggcat

SEQ ID NO: 194022 - DNA, 50 bp, Artificial
  Synthetic oligonucleotide
agcgtgcaacgcactgggcggaatcaatatggcgcagggggtatgcgatc

SEQ ID NO: 194023 - DNA, 50 bp, Artificial
  Synthetic oligonucleotide
agcgtgacgggcaatggcgtaaccgccactataggcgcaggtcttcctgt

SEQ ID NO: 194024 - DNA, 50 bp, Artificial
  Synthetic oligonucleotide
agcggcggtgatggggcagacatcctctatggggataacggcaacgacac

SEQ ID NO: 194025 - DNA, 50 bp, Artificial
  Synthetic oligonucleotide
agcgcgagtgtctccaaggagcgttcatcaaatacccctcccaacgcccc

SEQ ID NO: 194026 - DNA, 50 bp, Artificial
  Synthetic oligonucleotide
agttggccccacgcagacgcaatcatcccccattaaagccgcggggagtg

SEQ ID NO: 194027 - DNA, 50 bp, Artificial
  Synthetic oligonucleotide
atagcacgcaacctacgctttatgcgattacgacataccgcgttgcctac

SEQ ID NO: 194028 - DNA, 60 bp, Artificial
  Synthetic oligonucleotide
cgcgctaaaatggacatcaagcttgtggcatgggatattcacaaccaaatcgctaaaaga

SEQ ID NO: 194029 - DNA, 50 bp, Artificial
  Synthetic oligonucleotide
ataggggcgtgcatgccagctgccaagtgatctcctttgccacgcacttg

SEQ ID NO: 194030 - DNA, 50 bp, Artificial
  Synthetic oligonucleotide
agcgagggggcgtgtgcggcctattacaaatatggtcgggagcacctgaa

SEQ ID NO: 194031 - DNA, 50 bp, Artificial
  Synthetic oligonucleotide
agccgcgggtgttaaaggagaggatcgaatcaaggcgggcgcttggatta

SEQ ID NO: 194032 - DNA, 50 bp, Artificial
  Synthetic oligonucleotide
atatcatttcaccgtcaatccaacggcagtttggaaagccgagtatcatg

SEQ ID NO: 194033 - DNA, 50 bp, Artificial
  Synthetic oligonucleotide
agccctttttgagtcgcctctagcggagcaaccacgcttcgcaccaccca

SEQ ID NO: 194034 - DNA, 50 bp, Artificial
  Synthetic oligonucleotide
ggcaaagaggtacaaataaacgtattggtatgctaggaagcgtgcatatc

SEQ ID NO: 194035 - DNA, 50 bp, Artificial
  Synthetic oligonucleotide
acgtctccggagggtcgagttcagggtcagcattggccgtgactgcgggg

SEQ ID NO: 194036 - DNA, 50 bp, Artificial
  Synthetic oligonucleotide
tcccggctgatcctaacgggcctggcacacagcctttaacgcacaatgtg

SEQ ID NO: 194037 - DNA, 50 bp, Artificial
  Synthetic oligonucleotide
cactgtaacggcacccggagctatggtgcagggggcgaaaatggcagggc

SEQ ID NO: 194038 - DNA, 50 bp, Artificial
  Synthetic oligonucleotide
ggacaagcaaagtattagccgtcaagagctcgccccgcttatctttaata

SEQ ID NO: 194039 - DNA, 60 bp, Artificial
  Synthetic oligonucleotide
atccccttacagcacattttgcccataagaagcggttatgcaatccgcatctaccaaatg

SEQ ID NO: 194040 - DNA, 50 bp, Artificial
  Synthetic oligonucleotide
cacttcgcactgtggtctgaggtgcgccataggccccacatcgcttcgaa

SEQ ID NO: 194041 - DNA, 50 bp, Artificial
  Synthetic oligonucleotide
acgccccaaacatggtcttatgcagcaccattacggctaaatacagcgcg

SEQ ID NO: 194042 - DNA, 50 bp, Artificial
  Synthetic oligonucleotide
acgcccacccctgccgcacttccgaagctgatgagcgatcctcctacccc

SEQ ID NO: 194043 - DNA, 50 bp, Artificial
  Synthetic oligonucleotide
cactttgggggcaaggtagagacctttttagggctatccggggcggggga

SEQ ID NO: 194044 - DNA, 50 bp, Artificial
  Synthetic oligonucleotide
tcgatgcacgtgtgaccaaaagccctaggggcgatgcccaaacagtggga

SEQ ID NO: 194045 - DNA, 50 bp, Artificial
  Synthetic oligonucleotide
acgcacgggagagggcacgaaaggtccctccgactccgatgagggcttcg

SEQ ID NO: 194046 - DNA, 50 bp, Artificial
  Synthetic oligonucleotide
caggtttcacccctgtaatagattcagcaccattgacgcttgctcgaaaa

SEQ ID NO: 194047 - DNA, 50 bp, Artificial
  Synthetic oligonucleotide
catgcaccaaatcgcaccctgcgtcacaaatggctcggacatcacgggct

SEQ ID NO: 194048 - DNA, 50 bp, Artificial
  Synthetic oligonucleotide
ccaaacgctaaagcgattgggcttcctcggctgatgttgcccatagggaa

SEQ ID NO: 194049 - DNA, 50 bp, Artificial
  Synthetic oligonucleotide
acgattccttaagcagggcatggcgtccaaggcgggggcttgtgggggtg

SEQ ID NO: 194050 - DNA, 54 bp, Artificial
  Synthetic oligonucleotide
ccaactcaacgactgcctaaaaccctacttgctagggcttaggaagaatttcac

SEQ ID NO: 194051 - DNA, 50 bp, Artificial
  Synthetic oligonucleotide
ccaaagaggacgcgcaggtctatcaaggggtcacttcagggggcgggaga

SEQ ID NO: 194052 - DNA, 50 bp, Artificial
  Synthetic oligonucleotide
acgattccctccgagaagctcccgccctttgggatcaccaccacggcatt

SEQ ID NO: 194053 - DNA, 50 bp, Artificial
  Synthetic oligonucleotide
acgaagtagggcaggcggtgaaataccgcactcagcgcggtacggtcgtc

SEQ ID NO: 194054 - DNA, 50 bp, Artificial
  Synthetic oligonucleotide
gctaataccgtgggtggcactttgggtaaaatgataagccctcaaagtat

SEQ ID NO: 194055 - DNA, 50 bp, Artificial
  Synthetic oligonucleotide
acctgtaggtcttagcaattcaatggtctcattagctcttagagagttgg

SEQ ID NO: 194056 - DNA, 50 bp, Artificial
  Synthetic oligonucleotide
ccacccgcacagcattcacgctgtaactatagggtaggaccagcccgccg

SEQ ID NO: 194057 - DNA, 50 bp, Artificial
  Synthetic oligonucleotide
gcgtataacacgaattctaacaacatgaatggcgttggcgtgaaaatggg

SEQ ID NO: 194058 - DNA, 50 bp, Artificial
  Synthetic oligonucleotide
acccttccattttcccggctgattagagcggtgggcgggggcttgagagt

SEQ ID NO: 194059 - DNA, 50 bp, Artificial
  Synthetic oligonucleotide
acccgcataaacgagggagggcggtcgacccagttaaacggctgaaccgg

SEQ ID NO: 194060 - DNA, 50 bp, Artificial
  Synthetic oligonucleotide
ccagctgacgcagcctggccaacgcagatggtagcaacatcgggacgaat

SEQ ID NO: 194061 - DNA, 58 bp, Artificial
  Synthetic oligonucleotide
gctaccactacctgctcaacaatctaggcatgggcggtcaatacacttcctttaaact

SEQ ID NO: 194062 - DNA, 50 bp, Artificial
  Synthetic oligonucleotide
ccagtagtgccactcccacatcgccaaataccgcctcccagatgctggcc

SEQ ID NO: 194063 - DNA, 50 bp, Artificial
  Synthetic oligonucleotide
tctgcatcaccatccaagatgtggacaagcctgacaagcttctcaaacct

SEQ ID NO: 194064 - DNA, 50 bp, Artificial
  Synthetic oligonucleotide
attcccgtggcatttgcctttgggggagcggctttgctagtcgcactcct

SEQ ID NO: 194065 - DNA, 50 bp, Artificial
  Synthetic oligonucleotide
attgctagcatacatggcattgacccctcctctgaaatgttgcgtctagc

SEQ ID NO: 194066 - DNA, 50 bp, Artificial
  Synthetic oligonucleotide
attttcccggctgattagagcggtgggcgggggcttgagagtgggcacta

SEQ ID NO: 194067 - DNA, 50 bp, Artificial
  Synthetic oligonucleotide
ggtaattggcaacttagggcgtaaagatgtggtttcttgttaccagcacc

SEQ ID NO: 194068 - DNA, 50 bp, Artificial
  Synthetic oligonucleotide
caaatcgcaatgcaaaatccgtgggttatttcgacgtttgcactcctttt

SEQ ID NO: 194069 - DNA, 50 bp, Artificial
  Synthetic oligonucleotide
tatgattcgccgataaaccgtcgcgcaaggcattaatgatcggaatcccc

SEQ ID NO: 194070 - DNA, 50 bp, Artificial
  Synthetic oligonucleotide
caacagctatagccaacgcataagaatgagagccactcgcttgaaacagc

SEQ ID NO: 194071 - DNA, 50 bp, Artificial
  Synthetic oligonucleotide
agaccccctcctctgaagctttggtttccgcgcccaaagagggcgaatcg

SEQ ID NO: 194072 - DNA, 52 bp, Artificial
  Synthetic oligonucleotide
taacacagccactatattaaaaccttagcgttttaataacccttataagtcc

SEQ ID NO: 194073 - DNA, 60 bp, Artificial
  Synthetic oligonucleotide
gagccacacttaaaataagcgtttttgtctagtttgctatggcaagccatagagaacaca

SEQ ID NO: 194074 - DNA, 50 bp, Artificial
  Synthetic oligonucleotide
agaccccctagaagtggggcaaacttacgaccccaccaagcaccaacgcc

SEQ ID NO: 194075 - DNA, 50 bp, Artificial
  Synthetic oligonucleotide
caaccgcttgggaggcaactcggtaagtgaggcagtggtcgctgggatga

SEQ ID NO: 194076 - DNA, 50 bp, Artificial
  Synthetic oligonucleotide
agaccaactaagcgggcaaacgctgcgcacagacccccaaaccggggttt

SEQ ID NO: 194077 - DNA, 50 bp, Artificial
  Synthetic oligonucleotide
ggggtgattcgcgatgtggcacgggtgctagacatgccctataaagaggc

SEQ ID NO: 194078 - DNA, 50 bp, Artificial
  Synthetic oligonucleotide
agaatcccgtcccatttctgaggacattaaagagggcttgattgcagttg

SEQ ID NO: 194079 - DNA, 50 bp, Artificial
  Synthetic oligonucleotide
caagcacacccctattttagtgctgggcacacgcgcgaccattgcctcgg

SEQ ID NO: 194080 - DNA, 50 bp, Artificial
  Synthetic oligonucleotide
caagcgctttaagggctgggagtgcagtgcgggagcaaaaagctttggcg

SEQ ID NO: 194081 - DNA, 50 bp, Artificial
  Synthetic oligonucleotide
caagggctccatgcgtggctcgttaagcgagtaaagcggggctagaggga

SEQ ID NO: 194082 - DNA, 50 bp, Artificial
  Synthetic oligonucleotide
ggggatcccactagctgccaattcccaaacactactggcccccgccctac

SEQ ID NO: 194083 - DNA, 50 bp, Artificial
  Synthetic oligonucleotide
caatgttggaccagcagttggctcccacgcaattacacttgtaggggcga

SEQ ID NO: 194084 - DNA, 60 bp, Artificial
  Synthetic oligonucleotide
ccaatacttaggctttctaacggacgcacattgtctggtactgcttgcagctgaaagcca

SEQ ID NO: 194085 - DNA, 50 bp, Artificial
  Synthetic oligonucleotide
tcacagcgaatctgcgttctggcaatcgtataggcacgggtggggcagct

SEQ ID NO: 194086 - DNA, 50 bp, Artificial
  Synthetic oligonucleotide
tcacaggcttgcatcacggccccattggcttccccacagaagacgccaaa

SEQ ID NO: 194087 - DNA, 50 bp, Artificial
  Synthetic oligonucleotide
cacccacactagcgtgcaagctctgcatggtcgaggctgatggcaagcgt

SEQ ID NO: 194088 - DNA, 50 bp, Artificial
  Synthetic oligonucleotide
cacccgcacaaatgcgctcaaccacgccgtgctagtcccgctagaagtgc

SEQ ID NO: 194089 - DNA, 50 bp, Artificial
  Synthetic oligonucleotide
tcactctgctgaagcgctcatccgatggcagaatccaacgcttggtaatg

SEQ ID NO: 194090 - DNA, 50 bp, Artificial
  Synthetic oligonucleotide
acttccccaaggcttgcgttgtggtgattagcggcacagggagcgtggat

SEQ ID NO: 194091 - DNA, 50 bp, Artificial
  Synthetic oligonucleotide
caccttgaatgcctctaagggtccagccgtgcgtgggacacgggcgcaaa

SEQ ID NO: 194092 - DNA, 50 bp, Artificial
  Synthetic oligonucleotide
ggcgatgtgggagtggcactactggcacttgccaatgctatgcgcgcact

SEQ ID NO: 194093 - DNA, 50 bp, Artificial
  Synthetic oligonucleotide
cacgaggatgcgagagatcgccccaccactcacatccagtgccccacctt

SEQ ID NO: 194094 - DNA, 50 bp, Artificial
  Synthetic oligonucleotide
cacgcgtttttgatcgcctaaaggcgtgttgggtgggcggatacccgggg

SEQ ID NO: 194095 - DNA, 59 bp, Artificial
  Synthetic oligonucleotide
gagcaataagggtgttaaaatggcgtgtggcaaagactgggcaataacaagtagcatcg

SEQ ID NO: 194096 - DNA, 50 bp, Artificial
  Synthetic oligonucleotide
acgttttgcggtgcttcacatccgacacactgcggagacggtgcatcgcc

SEQ ID NO: 194097 - DNA, 54 bp, Artificial
  Synthetic oligonucleotide
caaagagccacaaactacccccacaccatgcaaagatttagtggttacaacccc

SEQ ID NO: 194098 - DNA, 60 bp, Artificial
  Synthetic oligonucleotide
atttgtgcgtgcgggacaagctaccacgcaggacttagcgccaaatacctcctagagcga

SEQ ID NO: 194099 - DNA, 56 bp, Artificial
  Synthetic oligonucleotide
ggtcgccctctatggcttggtaatagccctctctgtttggaatcggactaaagagt

SEQ ID NO: 194100 - DNA, 60 bp, Artificial
  Synthetic oligonucleotide
gctgacaagcaaacacagataggcgaagcgttagcaagcctagacaaaagcgcatcgcag

SEQ ID NO: 194101 - DNA, 58 bp, Artificial
  Synthetic oligonucleotide
attccttgtatccaacaaaacattcgctttagaactactgtttgtgaatggatacagc

SEQ ID NO: 194102 - DNA, 60 bp, Artificial
  Synthetic oligonucleotide
cgccactcggacagagcgacacacatacatcgcacgctttacaacgtgtctcatcgaccc

SEQ ID NO: 194103 - DNA, 58 bp, Artificial
  Synthetic oligonucleotide
ggttccataaggctttgcggtaccggtagcaagcttggctatccatttggcaggactc

SEQ ID NO: 194104 - DNA, 60 bp, Artificial
  Synthetic oligonucleotide
taaccatttagccaatctaactagtttagcatctaaaagcgcatatgacttcggcttcca

SEQ ID NO: 194105 - DNA, 60 bp, Artificial
  Synthetic oligonucleotide
attatgagcagcaacggtttcgtgccagcggtttgacattagtgactgccgcgattgttc

SEQ ID NO: 194106 - DNA, 56 bp, Artificial
  Synthetic oligonucleotide
attactaatactagaactaatacgacaaatactttcacattgatacctcctaacga

SEQ ID NO: 194107 - DNA, 59 bp, Artificial
  Synthetic oligonucleotide
gatagccaatcttactagtttaggatctaaaagcgcatctaactagggttatcaatcta

SEQ ID NO: 194108 - DNA, 50 bp, Artificial
  Synthetic oligonucleotide
gtacttttttgcccgtacttgggcgtacttttttcccgtccgagaagatc

SEQ ID NO: 194109 - DNA, 56 bp, Artificial
  Synthetic oligonucleotide
atggtatgggtaccgttttgaataaggagattgccggtagtgaatccatccgtatc

SEQ ID NO: 194110 - DNA, 60 bp, Artificial
  Synthetic oligonucleotide
gatactcttcgttcgagatctttttagcttcgagatctttagaggcaagatgttcttgat

SEQ ID NO: 194111 - DNA, 57 bp, Artificial
  Synthetic oligonucleotide
ccaaagaccattcataagtggtgggacacttacacaccaaactagaattagtctcaa

SEQ ID NO: 194112 - DNA, 59 bp, Artificial
  Synthetic oligonucleotide
gtagtgtcttgcgagtggtaggtgtagtgtcttgcgagtggtaggtgtagtgtctttta

SEQ ID NO: 194113 - DNA, 60 bp, Artificial
  Synthetic oligonucleotide
gtatgcccccactaatattgctcccatgatgaatagacccatgatgaaagttaggggcat

SEQ ID NO: 194114 - DNA, 59 bp, Artificial
  Synthetic oligonucleotide
gtatttgcaagatatattgtgcgtgccaaaaagtttttatgcgtggatagacttcaaac

SEQ ID NO: 194115 - DNA, 60 bp, Artificial
  Synthetic oligonucleotide
taaccattttcagctacaataacagcgcgtgaagatactttcacagcggtatttcctatg

SEQ ID NO: 194116 - DNA, 49 bp, Artificial
  Synthetic oligonucleotide
atgcctaaagttaataacgaacctaaacccaataagcgccctaaaaagt

SEQ ID NO: 194117 - DNA, 60 bp, Artificial
  Synthetic oligonucleotide
tgtggatcaatgccatgatgggatcagcaactacctgaaaatcactcggatcgtgaaact

SEQ ID NO: 194118 - DNA, 58 bp, Artificial
  Synthetic oligonucleotide
tgttaaatagctttcctaagttgtcttgtatgagcttgtctagtttttcataggttgc

SEQ ID NO: 194119 - DNA, 60 bp, Artificial
  Synthetic oligonucleotide
gcgatggcaatggtagagtggggcgattagtcatgtttaaagagtgtttgagaaacaata

SEQ ID NO: 194120 - DNA, 58 bp, Artificial
  Synthetic oligonucleotide
ccccctttaagtgccagctttggctggcgggaaatatgtagctagagcgtagctatag

SEQ ID NO: 194121 - DNA, 59 bp, Artificial
  Synthetic oligonucleotide
tgtttttactcgcatgcgcgcgcgtgagggattgtgggttggaatagcctaaataacga

SEQ ID NO: 194122 - DNA, 55 bp, Artificial
  Synthetic oligonucleotide
ctgataacaaaaacataaccaaacgcttacgactaaatcaaacagaatggcaaac

SEQ ID NO: 194123 - DNA, 60 bp, Artificial
  Synthetic oligonucleotide
ttagtgggttggaggatagagagagcgacatctcgttaggaggtatcaatgtgaaagtat

SEQ ID NO: 194124 - DNA, 60 bp, Artificial
  Synthetic oligonucleotide
gcctagaatgaattttcaattctaatccaacctaatcatcagtttgcgaatgaaacgatg

SEQ ID NO: 194125 - DNA, 54 bp, Artificial
  Synthetic oligonucleotide
ttattggtggtttcaaaaaacaccctaattttgtaggtgatagtgccacaacaa

SEQ ID NO: 194126 - DNA, 54 bp, Artificial
  Synthetic oligonucleotide
taactccaatcgtattgagggaagcggtttaacctacgaacaaaccgctcatat

SEQ ID NO: 194127 - DNA, 60 bp, Artificial
  Synthetic oligonucleotide
aagcgaagcgttagcgagctagacaaaagcgcatcgcagtttgaaatcgtaggcgttagc

SEQ ID NO: 194128 - DNA, 58 bp, Artificial
  Synthetic oligonucleotide
aagcctcagctgtgtcaaataaagttacgccctcctcaaaagcccggcggatcacagc

SEQ ID NO: 194129 - DNA, 57 bp, Artificial
  Synthetic oligonucleotide
ctctaatttcaagtaatcgttgcttagcctttgaaattctgctgtaactttctctag

SEQ ID NO: 194130 - DNA, 53 bp, Artificial
  Synthetic oligonucleotide
aagaactacccttatcgttggcaagaactacccttatcgttggcaagaactac

SEQ ID NO: 194131 - DNA, 59 bp, Artificial
  Synthetic oligonucleotide
ttcggtatagagagtttgttccccttcaatttcatatctctcctcaacagagtcatacc

SEQ ID NO: 194132 - DNA, 59 bp, Artificial
  Synthetic oligonucleotide
aacgctctgtaattcttgctgtaaaatctgttcgcacattgtctgtaaatcgtttttga

SEQ ID NO: 194133 - DNA, 60 bp, Artificial
  Synthetic oligonucleotide
aacgcccgataatcaataagcagagcgcaacgcaaatttatgcgttgcagcgtcgcgcca

SEQ ID NO: 194134 - DNA, 56 bp, Artificial
  Synthetic oligonucleotide
ttctaacaccacacgcaacccaatacgcccgataaactctttagacaagccacaac

SEQ ID NO: 194135 - DNA, 54 bp, Artificial
  Synthetic oligonucleotide
ttcttacgagtgataagggaacttcttacgagtgataagggaacttcttacgag

SEQ ID NO: 194136 - DNA, 60 bp, Artificial
  Synthetic oligonucleotide
tgagttagtgggtttgaggatagagagggcgacacctcgttaggaggtatcgtgctatga

SEQ ID NO: 194137 - DNA, 58 bp, Artificial
  Synthetic oligonucleotide
aggcgcaggagtgcttaattccttgcgtttaggctctgaagcggtgggagtaagcctc

SEQ ID NO: 194138 - DNA, 55 bp, Artificial
  Synthetic oligonucleotide
acaagccccatttctgacacgactatactatcggctacgggggcagggtgttcgg

SEQ ID NO: 194139 - DNA, 60 bp, Artificial
  Synthetic oligonucleotide
tgatctttgtgattctaattgatcaaattccactctatactccttatcttttggtgtata

SEQ ID NO: 194140 - DNA, 49 bp, Artificial
  Synthetic oligonucleotide
acaaagaccttgtttagggcgttgccctaaaaccctttagtgggggaca

SEQ ID NO: 194141 - DNA, 59 bp, Artificial
  Synthetic oligonucleotide
ccccactaatattgcccccatgatgactaatcccatgatgaaagttaggggcattagta

SEQ ID NO: 194142 - DNA, 54 bp, Artificial
  Synthetic oligonucleotide
aatttcaaaaactaagcaacgattacttgaaattagaggcagaaatcttgaact

SEQ ID NO: 194143 - DNA, 60 bp, Artificial
  Synthetic oligonucleotide
tgccctgaggggatcaacaactatttaaagatcactaggatcgccaaactgaatgacaat

SEQ ID NO: 194144 - DNA, 53 bp, Artificial
  Synthetic oligonucleotide
aattattggtggtttcaaaaaacgccctaattttgtaggcaatagcgccacaa

SEQ ID NO: 194145 - DNA, 59 bp, Artificial
  Synthetic oligonucleotide
ctacatcactatctcggagtccttcttggagacgcgtagcggtctcttggaggattaag

SEQ ID NO: 194146 - DNA, 57 bp, Artificial
  Synthetic oligonucleotide
aatgggaagtgtaggtcatttaatgggatttagcgatatgtgtaggtcatttaatgg

SEQ ID NO: 194147 - DNA, 58 bp, Artificial
  Synthetic oligonucleotide
tgcgtgaattatttgcttgaaagctatagagaacctttgagtttagaataccttaaga

SEQ ID NO: 194148 - DNA, 60 bp, Artificial
  Synthetic oligonucleotide
cggattgactcccagtttcatgatggtatgactccagtgtctcaccataatgtgtatccg

SEQ ID NO: 194149 - DNA, 60 bp, Artificial
  Synthetic oligonucleotide
aatgatgaggaagtatgcccctactaatattgcccccatgatgactaatcccatgatgaa

SEQ ID NO: 194150 - DNA, 60 bp, Artificial
  Synthetic oligonucleotide
tgcgtggatagacttcaaacgcaatgttttagagccaagcctcaaagaaatcaacgctac

SEQ ID NO: 194151 - DNA, 60 bp, Artificial
  Synthetic oligonucleotide
ctgcgatatcagaaccgctaatctccacgccttgcgcacgcaaaaacttcgctagcgcag

SEQ ID NO: 194152 - DNA, 60 bp, Artificial
  Synthetic oligonucleotide
aatagagcttttacaagcgagtaattatgagattactagacaaggcaaggattatatcag

SEQ ID NO: 194153 - DNA, 60 bp, Artificial
  Synthetic oligonucleotide
tggctaaccctgcgcaaaagcgcgcaagcccgtagcttcacgttagcagtcttatggata

SEQ ID NO: 194154 - DNA, 51 bp, Artificial
  Synthetic oligonucleotide
tggttttaaaaaacaccctaattttgtaggtgatagcgttacaacaaggcc

SEQ ID NO: 194155 - DNA, 60 bp, Artificial
  Synthetic oligonucleotide
tgtaggcggtatgcatggcagtgtcttttttgtgtcaaatttggagcaattagcttgatt

SEQ ID NO: 194156 - DNA, 57 bp, Artificial
  Synthetic oligonucleotide
aaggtcactctagggggtgtggtactcacgcccgtcctgttgtcgcgatttgtcaga

SEQ ID NO: 194157 - DNA, 60 bp, Artificial
  Synthetic oligonucleotide
tttagaccgattgtttgctgacaagcaaacaccaacaagcgaagcgatagcgagcatagg

SEQ ID NO: 194158 - DNA, 60 bp, Artificial
  Synthetic oligonucleotide
aaagacccctatcaagtcggtgagcttagatgaagtgcatgagatagaaaattatcgcaa

SEQ ID NO: 194159 - DNA, 58 bp, Artificial
  Synthetic oligonucleotide
gcccaatccctccatcaagcacccacaaatccggtggagaatcggtgctaaaatccgc

SEQ ID NO: 194160 - DNA, 60 bp, Artificial
  Synthetic oligonucleotide
tttagcaactaagagagcatgtaactagggcttgctaacaacaaaaccgcatagcgaagc

SEQ ID NO: 194161 - DNA, 59 bp, Artificial
  Synthetic oligonucleotide
aaacgagtgggacatcgtggagtttacgctatcggcggatgattttgcgaaatattgca

SEQ ID NO: 194162 - DNA, 54 bp, Artificial
  Synthetic oligonucleotide
cccctaaagataaaacctatatcacctaccacaataacgctaataaggtcaatc

SEQ ID NO: 194163 - DNA, 58 bp, Artificial
  Synthetic oligonucleotide
tttcgttgtgatagtttcactagttgtagtggttcttttgacacagccactacactaa

SEQ ID NO: 194164 - DNA, 60 bp, Artificial
  Synthetic oligonucleotide
tttgcaccgattgtttgctaacaagcaaacacagataggcgaagcgttagcaagcctaga

SEQ ID NO: 194165 - DNA, 52 bp, Artificial
  Synthetic oligonucleotide
aaaccccaattagttgaaaaggaattaaccaatcttttgcaacgctaccaca

SEQ ID NO: 194166 - DNA, 60 bp, Artificial
  Synthetic oligonucleotide
aaacatagatatttctaacgagcgcttatcagaagttgttattaagctatgggatagcat

SEQ ID NO: 194167 - DNA, 60 bp, Artificial
  Synthetic oligonucleotide
aaacaaatctagatcaaaactcaagcgatgctggaaataatacatcgctaaggctgtccc

SEQ ID NO: 194168 - DNA, 59 bp, Artificial
  Synthetic oligonucleotide
aaacaaaacattcgctttggaactgctatatgtcaatggatacagcctgaaaaaagata

SEQ ID NO: 194169 - DNA, 56 bp, Artificial
  Synthetic oligonucleotide
aaaagtggctgtgggggactttatggcgttggactagcggcactttagccaatgaa

SEQ ID NO: 194170 - DNA, 58 bp, Artificial
  Synthetic oligonucleotide
gtttcttttagcgatttggttattgatatcccatgcgacaagcttgatgtccctttta

SEQ ID NO: 194171 - DNA, 56 bp, Artificial
  Synthetic oligonucleotide
gccaacgataagggtagttcttgccaacgataagggtagttcttgccaacgatata

SEQ ID NO: 194172 - DNA, 55 bp, Artificial
  Synthetic oligonucleotide
tttgggtgttctcgttggatctttcgctgtctaacttcgctaagttgttctttaa

SEQ ID NO: 194173 - DNA, 56 bp, Artificial
  Synthetic oligonucleotide
aaaagcgagatcagcttttcatacgtcattaacaaggggtacaactctccccttga

SEQ ID NO: 194174 - DNA, 56 bp, Artificial
  Synthetic oligonucleotide
tttggttaggctcggtagtcatagtgagttgttttagaatagacatacttcaaaaa

SEQ ID NO: 194175 - DNA, 57 bp, Artificial
  Synthetic oligonucleotide
tttgtatcacttgctttaattcggctctctctgtcgtttctaaggattgaaatttct

SEQ ID NO: 194176 - DNA, 60 bp, Artificial
  Synthetic oligonucleotide
ttttagagcgagtgcctacatacaacttcagcacacacgctataagtccagcacacaggg

SEQ ID NO: 194177 - DNA, 55 bp, Artificial
  Synthetic oligonucleotide
ttttaggttcgttgggtagcttgacactgatgtaatccttaccttgtctagtaac

SEQ ID NO: 194178 - DNA, 55 bp, Artificial
  Synthetic oligonucleotide
ttcttggagcttccccaattttcatacccgagtgagaaatgaaacgtcgtcggat

SEQ ID NO: 194179 - DNA, 59 bp, Artificial
  Synthetic oligonucleotide
aacgagaaagagatcttgctcaaagaaaagaacagcgagatagcaagtttagagaacga

SEQ ID NO: 194180 - DNA, 47 bp, Artificial
  Synthetic oligonucleotide
aacgaccaaaaccgttttttagagacctttttatattaaggtcgctt

SEQ ID NO: 194181 - DNA, 54 bp, Artificial
  Synthetic oligonucleotide
aacctggtgctagccctatgagtttgaaaaaactcatgcggtgtttagggcgtt

SEQ ID NO: 194182 - DNA, 58 bp, Artificial
  Synthetic oligonucleotide
atatggggtgagcaaagtgcaaatgtatgggggctgtgggaatcaaagtggcggtagg

SEQ ID NO: 194183 - DNA, 53 bp, Artificial
  Synthetic oligonucleotide
ctcgtatcccatacccgaggttgggaacataagggatcgtatctatttaaagg

SEQ ID NO: 194184 - DNA, 55 bp, Artificial
  Synthetic oligonucleotide
ttggagttgaattttgttatacctagaattgatttgataactcaaaaagccttta

SEQ ID NO: 194185 - DNA, 53 bp, Artificial
  Synthetic oligonucleotide
ttggcgattttaaaaaacaccctaattttgtaggtgatagcgccacaacaaaa

SEQ ID NO: 194186 - DNA, 54 bp, Artificial
  Synthetic oligonucleotide
aaccaacaaaaactctcaaaaattccttgtgtccaacaagacattcgctttaga

SEQ ID NO: 194187 - DNA, 60 bp, Artificial
  Synthetic oligonucleotide
gccttattattacatgccttattattacatgccttattattacatgccttatgggtcagg

SEQ ID NO: 194188 - DNA, 60 bp, Artificial
  Synthetic oligonucleotide
aacacagataggcgaagcgttagcaagcctagacaaaagcgcatcgcagtttgaaagcgt

SEQ ID NO: 194189 - DNA, 56 bp, Artificial
  Synthetic oligonucleotide
aacacaaccctcaaaaattccttgtatccaacaaaacattcgctctagaactgcta

SEQ ID NO: 194190 - DNA, 58 bp, Artificial
  Synthetic oligonucleotide
ttgggcttcctcggctgatgttgcccatagggaaagtttggttctcactctgtgtccc

SEQ ID NO: 194191 - DNA, 60 bp, Artificial
  Synthetic oligonucleotide
aaattcactccgttatttgagtttcacagctgatcattttttttcacagcacaacgcatg

SEQ ID NO: 194192 - DNA, 60 bp, Artificial
  Synthetic oligonucleotide
ttgtgattgaagtaactgctagaagcgaatacatgaatgctatgagagaacaagacgcta

SEQ ID NO: 194193 - DNA, 56 bp, Artificial
  Synthetic oligonucleotide
cgctagaaaacacctttggaggcgggctaaacgcgctaggcggcacatcaaacaaa

SEQ ID NO: 194194 - DNA, 58 bp, Artificial
  Synthetic oligonucleotide
aaatcttccttgcgcgtcttgggctaccaatgctttagatcttgcccctccggcactc

SEQ ID NO: 194195 - DNA, 60 bp, Artificial
  Synthetic oligonucleotide
ttgtttgctgacaagcaaacactaacaagcgaagcgttagcgagcatagacaaaagcgca

SEQ ID NO: 194196 - DNA, 53 bp, Artificial
  Synthetic oligonucleotide
tttaaacttttagaattccaaagggtgaggggcaaatacgccaagacgctcta

SEQ ID NO: 194197 - DNA, 57 bp, Artificial
  Synthetic oligonucleotide
aaatatgacaatcattacgctaacctacaagacgctttaaaagatctcgccgaagaa

SEQ ID NO: 194198 - DNA, 53 bp, Artificial
  Synthetic oligonucleotide
tttaaagctaaaaaatgtggtgtttgttgtagaattaagctcggtgtttgaaa

SEQ ID NO: 194199 - DNA, 58 bp, Artificial
  Synthetic oligonucleotide
tttaagcgttcagagccacaataatttagggtatggatgctaaggcgcacgggttata

SEQ ID NO: 194200 - DNA, 57 bp, Artificial
  Synthetic oligonucleotide
ctaatcgcattgaaggaagcggtttgacctacggacaaaccgctcatatttttgata

SEQ ID NO: 194201 - DNA, 60 bp, Artificial
  Synthetic oligonucleotide
tcttgcaccactggatcgatttggctaaaagcacctgagagatcacgcaaatagttatct

SEQ ID NO: 194202 - DNA, 58 bp, Artificial
  Synthetic oligonucleotide
cttcttgccaacgataacagaacttcttgccaacgataacagaacttcttgccaacga

SEQ ID NO: 194203 - DNA, 56 bp, Artificial
  Synthetic oligonucleotide
tcctcaaacaaagcacccaagaaatgacccaacgaaaaaaggtgcaagacattgag

SEQ ID NO: 194204 - DNA, 60 bp, Artificial
  Synthetic oligonucleotide
ccgcctagcgagctttagcgagcattcaagcggttttagaccgattgtttgctgacaagc

SEQ ID NO: 194205 - DNA, 60 bp, Artificial
  Synthetic oligonucleotide
gcgcattcacgccatatctatcggcattcgcacgaagcaccctcaaacgatactcgggca

SEQ ID NO: 194206 - DNA, 57 bp, Artificial
  Synthetic oligonucleotide
cgtttctgtagatgtctttaattgcgttaattgcgtctcgtgttcttgcataaaggt

SEQ ID NO: 194207 - DNA, 59 bp, Artificial
  Synthetic oligonucleotide
acgcattccctacaggtctcacacatcatatctccaaaggcgtaactttgcgtacttcc

SEQ ID NO: 194208 - DNA, 60 bp, Artificial
  Synthetic oligonucleotide
tccttgcgtttaggctctgaagcggtgggagtaagcctctatggcgcacttatggtggtg

SEQ ID NO: 194209 - DNA, 58 bp, Artificial
  Synthetic oligonucleotide
cttcttacgagtgataacataacttcttacgagtgataacataacttcttacgagtga

SEQ ID NO: 194210 - DNA, 60 bp, Artificial
  Synthetic oligonucleotide
accctagcttaccccactgatccgctagatgaaaacgctatcatcgcattagtgtatcgt

SEQ ID NO: 194211 - DNA, 60 bp, Artificial
  Synthetic oligonucleotide
tctcacttgagtttccaatctaatctctactaaaaccgcctagcgagctttagcgagcat

SEQ ID NO: 194212 - DNA, 60 bp, Artificial
  Synthetic oligonucleotide
tcgccaaactgaacgacaatcggatctgttgtttcagtccaagatgtggataagcctgag

SEQ ID NO: 194213 - DNA, 60 bp, Artificial
  Synthetic oligonucleotide
tcgccccagccattttctgctgcaaccctaaccatagtgcgatatgcttggcggagcttt

SEQ ID NO: 194214 - DNA, 60 bp, Artificial
  Synthetic oligonucleotide
accgccactcacaaagatagtcggcacattcacacgcaatgcccccataagcattccggg

SEQ ID NO: 194215 - DNA, 51 bp, Artificial
  Synthetic oligonucleotide
gacttatcccttaattttgatttatggggggttctagggggtgtcccacta

SEQ ID NO: 194216 - DNA, 58 bp, Artificial
  Synthetic oligonucleotide
tctcactagtttaggatctaaaagcgcatctaactagggcttacaatccaaccaccta

SEQ ID NO: 194217 - DNA, 56 bp, Artificial
  Synthetic oligonucleotide
ctaaatcacgaaagaaagaatgctagtgaagcaccaaaacgctaaagcggttgggc

SEQ ID NO: 194218 - DNA, 60 bp, Artificial
  Synthetic oligonucleotide
tcgctggcacaccaatctctcttgctacaatagccgcatgacaagtcctacccccacgat

SEQ ID NO: 194219 - DNA, 60 bp, Artificial
  Synthetic oligonucleotide
tcgttataagcatactgatacgatcacacttattatacaccaaaagataaggagtataga

SEQ ID NO: 194220 - DNA, 60 bp, Artificial
  Synthetic oligonucleotide
gccctgctttcataggaccgccactcacaaagatagtcggcacattcacacgcaatgccc

SEQ ID NO: 194221 - DNA, 59 bp, Artificial
  Synthetic oligonucleotide
acgagtgataacataacttcttacgagtgataacataacttcttacgagtgataacata

SEQ ID NO: 194222 - DNA, 54 bp, Artificial
  Synthetic oligonucleotide
actacactaaaaatacccctagagttaccgctctatggggtttggctatcgcta

SEQ ID NO: 194223 - DNA, 57 bp, Artificial
  Synthetic oligonucleotide
tcgtgcgcccgactaagatagggtggcaaattcagcttagtttttgaggcgaaagac

SEQ ID NO: 194224 - DNA, 58 bp, Artificial
  Synthetic oligonucleotide
acgagcttatggaaagctttgaaaatgctttactcacacaagaaatgcaagggcgtta

SEQ ID NO: 194225 - DNA, 60 bp, Artificial
  Synthetic oligonucleotide
tgagtagttcttgcgaacactatgagtagttcttgcgaacactatgagtagttcttgcga

SEQ ID NO: 194226 - DNA, 59 bp, Artificial
  Synthetic oligonucleotide
ataggcgaagcgttagcaagcctagacaaaagcgcatcgcagtttgaaagcgtaggcgt

SEQ ID NO: 194227 - DNA, 58 bp, Artificial
  Synthetic oligonucleotide
tcccgcaagtcccaagagaaacgccgtatcaatgagcttaagcaagagctccaaaagg

SEQ ID NO: 194228 - DNA, 60 bp, Artificial
  Synthetic oligonucleotide
tgagcctgagcaacttccaattatcaatcctataaaactgatttggcgacttttagcaat

SEQ ID NO: 194229 - DNA, 60 bp, Artificial
  Synthetic oligonucleotide
acaccacaactccgctatggagggaacaaactcactttgggcagagcatgagtatgttaa

SEQ ID NO: 194230 - DNA, 58 bp, Artificial
  Synthetic oligonucleotide
tcaatcgtttggctttaggttcgttgggtagcttgacactgatgtaatccttgccttg

SEQ ID NO: 194231 - DNA, 60 bp, Artificial
  Synthetic oligonucleotide
tgacaagcaaacaccaataagcgaagcgtaagcgaagcatggacaaaagcgcatcgcagt

SEQ ID NO: 194232 - DNA, 56 bp, Artificial
  Synthetic oligonucleotide
acggctaaatagtgctgaaacgcactcaaaatacgctaaatacaacgctaaaaatc

SEQ ID NO: 194233 - DNA, 56 bp, Artificial
  Synthetic oligonucleotide
acacctatatcacttaccacaataacgctaacaaggttaatctagggaaattgagc

SEQ ID NO: 194234 - DNA, 57 bp, Artificial
  Synthetic oligonucleotide
cgtggaaacctacttgtatgagaatgggttgaagctttccaatcgtttgtatgaaca

SEQ ID NO: 194235 - DNA, 60 bp, Artificial
  Synthetic oligonucleotide
tccggcacacggattattccaatgtgcaagacaatcgttgatatgatccgaaactacata

SEQ ID NO: 194236 - DNA, 60 bp, Artificial
  Synthetic oligonucleotide
tgaagctctcttgtttcttgttccatcgttttgaaagtggttcatctgctcgttgaaaga

SEQ ID NO: 194237 - DNA, 58 bp, Artificial
  Synthetic oligonucleotide
gtgtgttctacccataaaatgttataacgcccttgcatttcttgtgtgagtaaagcat

SEQ ID NO: 194238 - DNA, 51 bp, Artificial
  Synthetic oligonucleotide
tcttttaacgggtgaattgtcgtattttaacgggtgaattgtcgtatttta

SEQ ID NO: 194239 - DNA, 59 bp, Artificial
  Synthetic oligonucleotide
acatacctgatgcgtatatgcttcggaaacatttcaaaactatgcacgaaataacttgg

SEQ ID NO: 194240 - DNA, 55 bp, Artificial
  Synthetic oligonucleotide
acgccctaattttgtaggcaatagcgccacaacaagaccccaattagttgaaagc

SEQ ID NO: 194241 - DNA, 60 bp, Artificial
  Synthetic oligonucleotide
tcagagcctacatatcacaccaccgacacacggagacttgagtggttgggcaaggcaagg

SEQ ID NO: 194242 - DNA, 59 bp, Artificial
  Synthetic oligonucleotide
cccctagagtgtggcgtgtgcgataagagcggggagtgcgaattgcaagacatgacgca

SEQ ID NO: 194243 - DNA, 57 bp, Artificial
  Synthetic oligonucleotide
cgcacacctagccccacttcaatccccgttgggcttagcgttgtttcacttgtgcta

SEQ ID NO: 194244 - DNA, 58 bp, Artificial
  Synthetic oligonucleotide
ctaacagattgaaagaagtgtattgacccatgcctaaattgttaagcaagtattggta

SEQ ID NO: 194245 - DNA, 59 bp, Artificial
  Synthetic oligonucleotide
agcgctgttttggcgagcgtgattgtttttagcttgtggggtggcgctgaaatgatgga

SEQ ID NO: 194246 - DNA, 53 bp, Artificial
  Synthetic oligonucleotide
gcgactatgggtttagccaccttgcgtttagggcgtatcaagggggttgaaag

SEQ ID NO: 194247 - DNA, 59 bp, Artificial
  Synthetic oligonucleotide
tttgcgctggtatgtgagcgggcattcgccttggagcaacgcttatgagtccatgcttt

SEQ ID NO: 194248 - DNA, 60 bp, Artificial
  Synthetic oligonucleotide
gctaaaacgctctatcgcttgctcaagcaatacaaaagcacagggattttgagcgtggaa

SEQ ID NO: 194249 - DNA, 59 bp, Artificial
  Synthetic oligonucleotide
aagccacagcggaattgtatgcagcgcgcgataggctaaatgtgcaagcaacagggata

SEQ ID NO: 194250 - DNA, 54 bp, Artificial
  Synthetic oligonucleotide
ggtttttttggttggattgtaagccgaagttatatgcgcttttatttgctgaac

SEQ ID NO: 194251 - DNA, 51 bp, Artificial
  Synthetic oligonucleotide
ggaaacccaaacagggggcggtgaaacgactgtaaccccgaccagttctca

SEQ ID NO: 194252 - DNA, 59 bp, Artificial
  Synthetic oligonucleotide
tatgactcacaggtacatcctagataccaatgttcttattcagtaccccgaggtcttcg

SEQ ID NO: 194253 - DNA, 59 bp, Artificial
  Synthetic oligonucleotide
cggggacaaaaagtgctaggctacacatttgaagtcattccaaatcctatcatcgttga

SEQ ID NO: 194254 - DNA, 59 bp, Artificial
  Synthetic oligonucleotide
aggcggaagtaactcatctcgcctgcgcggaataaatggtgcaaatacgcacgcgtgtg

SEQ ID NO: 194255 - DNA, 59 bp, Artificial
  Synthetic oligonucleotide
tcccttgatacgcgagcggggtgtggcatagtgttaaggagagagcaggtttgacacgg

SEQ ID NO: 194256 - DNA, 59 bp, Artificial
  Synthetic oligonucleotide
tccgtgagggtgagaaaatacgggggatcgttaccactgcaagctatgaggcacgccaa

SEQ ID NO: 194257 - DNA, 59 bp, Artificial
  Synthetic oligonucleotide
ccttgcagatgagttgatcccttagggcgcgtgtgatccgcactaagagttgttgctct

SEQ ID NO: 194258 - DNA, 59 bp, Artificial
  Synthetic oligonucleotide
atggctcaatagggacaggttggtttttagcggagggcatgcgagcgcgttagcgtata

SEQ ID NO: 194259 - DNA, 56 bp, Artificial
  Synthetic oligonucleotide
ccacaagaacctagccaagaaatccttactaatgcccctaactttcatcatgggat

SEQ ID NO: 194260 - DNA, 59 bp, Artificial
  Synthetic oligonucleotide
atcctttacgttttgatgctggcagtgtaaaggagctgttggacagcatcgtgtccgtt

SEQ ID NO: 194261 - DNA, 51 bp, Artificial
  Synthetic oligonucleotide
gttcgttttttagccacctgcaaggtcaaattaacttcaatttttacggaa

SEQ ID NO: 194262 - DNA, 59 bp, Artificial
  Synthetic oligonucleotide
tccaaactataaagaccacatattaaaaggcgagtggtatccttgtagagaatgccaca

SEQ ID NO: 194263 - DNA, 58 bp, Artificial
  Synthetic oligonucleotide
gtgtcgatcgcgatatttttgggcgtagctgacccccgctaaaaagtgctagctagcc

SEQ ID NO: 194264 - DNA, 54 bp, Artificial
  Synthetic oligonucleotide
gctagaaaacgatttaacgctatgtagcggcttaagttataggggtaggtataa

SEQ ID NO: 194265 - DNA, 59 bp, Artificial
  Synthetic oligonucleotide
tgaacgcgatgataaacggcgaactcatctcgaaatcatcgctgtaatgcgatagtacc

SEQ ID NO: 194266 - DNA, 59 bp, Artificial
  Synthetic oligonucleotide
gccaacccaaactatagaatacttagatgtccaactcaataatagctatcaatacttgc

SEQ ID NO: 194267 - DNA, 59 bp, Artificial
  Synthetic oligonucleotide
taatggcacatgttggggaacatcctgtagtcgtgatatcctcaaaatggtcgggagat

SEQ ID NO: 194268 - DNA, 55 bp, Artificial
  Synthetic oligonucleotide
gccccctcaatcatcacgggttctaaaatcgccacaggggtaacaacgcctgtcc

SEQ ID NO: 194269 - DNA, 58 bp, Artificial
  Synthetic oligonucleotide
tcgcttcattggctaaagtgccgctagtccaacgccataaagtcccccacagccactt

SEQ ID NO: 194270 - DNA, 56 bp, Artificial
  Synthetic oligonucleotide
atagacccaaagaccattcataagtggtgggacacttacacaccaaactagaatta

SEQ ID NO: 194271 - DNA, 59 bp, Artificial
  Synthetic oligonucleotide
tctcataatgggcatgggcttaggggagagcgtggcgttaatcaccgatgggcgattta

SEQ ID NO: 194272 - DNA, 58 bp, Artificial
  Synthetic oligonucleotide
tttgagtgccttgacccacgcaatcacttcattcttactcggtcgctcctctatagca

SEQ ID NO: 194273 - DNA, 57 bp, Artificial
  Synthetic oligonucleotide
cctttcagttctaaactcgtaaatgtcggcatacgagattcaacctacgtgcttgac

SEQ ID NO: 194274 - DNA, 58 bp, Artificial
  Synthetic oligonucleotide
gctcattctatggggcttgttttgcgctggtatgtgagcgggcattcgccttggagca

SEQ ID NO: 194275 - DNA, 58 bp, Artificial
  Synthetic oligonucleotide
taggtttcttgaattgaaaaccttgatcggctatcagttcaggcacaatgacagtggg

SEQ ID NO: 194276 - DNA, 58 bp, Artificial
  Synthetic oligonucleotide
agccacgcttctagactctcaatctgggcttgcgtagcttgtgtggaagtgcccccat

SEQ ID NO: 194277 - DNA, 52 bp, Artificial
  Synthetic oligonucleotide
cgcaattttaaaggatagtcatgcctaaaattaataacgaacccaaacccaa

SEQ ID NO: 194278 - DNA, 51 bp, Artificial
  Synthetic oligonucleotide
tagagttccaaattcgtgcgggttacaaccctggaaccggtttccttgggc

SEQ ID NO: 194279 - DNA, 58 bp, Artificial
  Synthetic oligonucleotide
ctatcgcttactcaagcaatacaaaagcacagggattttgagcgtggaatgggatcaa

SEQ ID NO: 194280 - DNA, 53 bp, Artificial
  Synthetic oligonucleotide
gggttagggtttgctaatagtgaaacccgaccgtatggtagcacgggagtgta

SEQ ID NO: 194281 - DNA, 57 bp, Artificial
  Synthetic oligonucleotide
agtcaggcttggcagtcatagcgagttattttagacgaatttctttctaaaatcgcc

SEQ ID NO: 194282 - DNA, 59 bp, Artificial
  Synthetic oligonucleotide
atacttaaacaagctacagagcgctttaatcagcgaagtagagaacttacagaacgaga

SEQ ID NO: 194283 - DNA, 58 bp, Artificial
  Synthetic oligonucleotide
cataagcgttgctccaaggcgaatgcccgctcacataccagcgcaaaacaagccccat

SEQ ID NO: 194284 - DNA, 58 bp, Artificial
  Synthetic oligonucleotide
gaggcataaacttcgctcgcttgcatgcccgcataataactcccgctcgccataaccc

SEQ ID NO: 194285 - DNA, 58 bp, Artificial
  Synthetic oligonucleotide
taatcggcatggaatacgagcaggagaagtgaataccacgatatacagatgagtttag

SEQ ID NO: 194286 - DNA, 54 bp, Artificial
  Synthetic oligonucleotide
cgcccgtgtaaatccctgcggtaagccccaatatcgatagggcgtagtcggtat

SEQ ID NO: 194287 - DNA, 58 bp, Artificial
  Synthetic oligonucleotide
gttcgtagagttttgtcagggtgctaagactcttatcgcacacaacataacgtttgaa

SEQ ID NO: 194288 - DNA, 58 bp, Artificial
  Synthetic oligonucleotide
aagttgcggacctgtaaccatacttgccatcacttctcgtagtaaattgagatattgt

SEQ ID NO: 194289 - DNA, 57 bp, Artificial
  Synthetic oligonucleotide
ggtaaaacagggacaagcggtcatcctgtatcgccttggggcactccagctaagggc

SEQ ID NO: 194290 - DNA, 57 bp, Artificial
  Synthetic oligonucleotide
cgcgtgcaacgaagccctcctctggattacctgtaccgtctaacgcaccaccgacta

SEQ ID NO: 194291 - DNA, 54 bp, Artificial
  Synthetic oligonucleotide
aggatagtaaaattgacaaggtttgagcgaactctgtttaaaataccaatttca

SEQ ID NO: 194292 - DNA, 57 bp, Artificial
  Synthetic oligonucleotide
tgtgaaatctatcttgaagatcgactctcaacgcttaatgcacgatttttaactgtg

SEQ ID NO: 194293 - DNA, 55 bp, Artificial
  Synthetic oligonucleotide
atacgccatcttttggtttgaatttagggatttttggacgcgctagaaagctaga

SEQ ID NO: 194294 - DNA, 57 bp, Artificial
  Synthetic oligonucleotide
cttattctatggacttaaatggcataaaatgacgggttggagagcatagtatgtatg

SEQ ID NO: 194295 - DNA, 57 bp, Artificial
  Synthetic oligonucleotide
taagcccctgaatctgtgcattcctgacaatacgggctagttttttaaacagctcgt

SEQ ID NO: 194296 - DNA, 54 bp, Artificial
  Synthetic oligonucleotide
agattcaagccccaaagggtgtgggcgtgataatggtagcacccaaagccccgg

SEQ ID NO: 194297 - DNA, 57 bp, Artificial
  Synthetic oligonucleotide
taggttgtgcatcacttagcgaatcagcccctgcggtcgcatagcgattatgcccta

SEQ ID NO: 194298 - DNA, 57 bp, Artificial
  Synthetic oligonucleotide
tgcggttttagttgcttactagttagcaaatctcactagtttaggatctaaaagcgc

SEQ ID NO: 194299 - DNA, 56 bp, Artificial
  Synthetic oligonucleotide
cgtattagagtgccctgggcctcccgcaccaaaccccctaatggaaatgctaggca

SEQ ID NO: 194300 - DNA, 57 bp, Artificial
  Synthetic oligonucleotide
gcccttagctggagtgccccaaggcgatacaggatgaccgcttgtccctgttttacc

SEQ ID NO: 194301 - DNA, 57 bp, Artificial
  Synthetic oligonucleotide
ccacattaacagccgcgctcgcttcattggctaaagtgccgctagtccaacgccata

SEQ ID NO: 194302 - DNA, 57 bp, Artificial
  Synthetic oligonucleotide
gccgcactcgcttcattagctaaagtgccgctagtccaacgccataaagtccgagac

SEQ ID NO: 194303 - DNA, 57 bp, Artificial
  Synthetic oligonucleotide
cgccgaaccctctgcgtttggagcaggtgaccttactgcagccagtccgtatggact

SEQ ID NO: 194304 - DNA, 57 bp, Artificial
  Synthetic oligonucleotide
ataagtgtggctataaaatgtacagcgataactatagtcggagaaaaaataagtagc

SEQ ID NO: 194305 - DNA, 57 bp, Artificial
  Synthetic oligonucleotide
atgctcgcaaaccctccaatccctacaggacaaatggtggattccgctcccacgact

SEQ ID NO: 194306 - DNA, 57 bp, Artificial
  Synthetic oligonucleotide
atgcgcatgcagcattacacgcttagcgcgacgtccgccgtactgttcatcaccgac

SEQ ID NO: 194307 - DNA, 57 bp, Artificial
  Synthetic oligonucleotide
cctgagtctagagcgtttgataacccataaatgccccatgctagaaccataccaaca

SEQ ID NO: 194308 - DNA, 57 bp, Artificial
  Synthetic oligonucleotide
gtctgatctttgtgattctaattgatcaaattccactatatactccttgtttcggta

SEQ ID NO: 194309 - DNA, 55 bp, Artificial
  Synthetic oligonucleotide
cccgtgccagggcctatgaatttagccgcataatccccaaaactgcccgtagtgg

SEQ ID NO: 194310 - DNA, 57 bp, Artificial
  Synthetic oligonucleotide
ttgcttgtgagtgctggtagtgggttagcgacttttggttctccaagctccccggga

SEQ ID NO: 194311 - DNA, 57 bp, Artificial
  Synthetic oligonucleotide
gagtatataggcactaacaaatagcaatatgttcatacttagcaacagtgcactagc

SEQ ID NO: 194312 - DNA, 52 bp, Artificial
  Synthetic oligonucleotide
caaacgcccccaaaagactcgcaataagaacgcttttccccaccccactagc

SEQ ID NO: 194313 - DNA, 54 bp, Artificial
  Synthetic oligonucleotide
aacccacccaacccgcaaacaaaatgcctacgcggctagaagccttgagtgtcc

SEQ ID NO: 194314 - DNA, 56 bp, Artificial
  Synthetic oligonucleotide
gacataatttaggggacggatgtatagaccgttatggatagcgttaagcttaatag

SEQ ID NO: 194315 - DNA, 50 bp, Artificial
  Synthetic oligonucleotide
ataacttgggaaaactcaaaaaataagcgaaaggaggaaaaatgctaacc

SEQ ID NO: 194316 - DNA, 56 bp, Artificial
  Synthetic oligonucleotide
aactgcccgctatgcgatcgttgcaccaccacccctttaagcgcatgtgagaaacc

SEQ ID NO: 194317 - DNA, 56 bp, Artificial
  Synthetic oligonucleotide
gattcaaatctctgactgagggaatggatacttccagcccatccggtgaactactc

SEQ ID NO: 194318 - DNA, 56 bp, Artificial
  Synthetic oligonucleotide
gcttttagttagattagcatcgccctttaaaactttagctgtgccttgctccactc

SEQ ID NO: 194319 - DNA, 56 bp, Artificial
  Synthetic oligonucleotide
gaatgccctatcggccgggcctattaggacgctcgcttctagcgggatcgctgatt

SEQ ID NO: 194320 - DNA, 56 bp, Artificial
  Synthetic oligonucleotide
tatacccagcataaagagaaaaatcttggaatatggcactcatttgttggtggtag

SEQ ID NO: 194321 - DNA, 56 bp, Artificial
  Synthetic oligonucleotide
ccctctatcgactggcatagctcaatcagatgtccgcatacgtagtgatgggatct

SEQ ID NO: 194322 - DNA, 55 bp, Artificial
  Synthetic oligonucleotide
gttagcaactagtttgaagaaaaaatcagtcttttttagtcagattgcaagtctt

SEQ ID NO: 194323 - DNA, 56 bp, Artificial
  Synthetic oligonucleotide
gggcagaaataatagagcttttacaagcgagtaattatgagattactagacaaggc

SEQ ID NO: 194324 - DNA, 56 bp, Artificial
  Synthetic oligonucleotide
ataagcagtgatgctgcgatcaaagttaatgtactcagtaaacgtgttttattcat

SEQ ID NO: 194325 - DNA, 56 bp, Artificial
  Synthetic oligonucleotide
cgagcattggacaaaagcgcatcgcagtttgaaagcgtaggcgttagccgaagctg

SEQ ID NO: 194326 - DNA, 57 bp, Artificial
  Synthetic oligonucleotide
gacgctactaaggtcactctagggggtgtggtactcacgcccgtcctgttgtcgcga

SEQ ID NO: 194327 - DNA, 56 bp, Artificial
  Synthetic oligonucleotide
tagaccctcgcctgccaacctttatcgtatcccccgcaaacttcgtgcttgtaggc

SEQ ID NO: 194328 - DNA, 56 bp, Artificial
  Synthetic oligonucleotide
ttgaccccgctcagcctaccgaacatctcatttgtgatagtggggcgttcccgggt

SEQ ID NO: 194329 - DNA, 56 bp, Artificial
  Synthetic oligonucleotide
tcattgtgcgttgcgtgtcgtaagtgtatcctgcgtgcagggcgagtgtgtcttga

SEQ ID NO: 194330 - DNA, 56 bp, Artificial
  Synthetic oligonucleotide
gtcatttgccgccgaaccctctgcgtttggagcaggtgaccttactgcagccagtc

SEQ ID NO: 194331 - DNA, 54 bp, Artificial
  Synthetic oligonucleotide
taccctctacacccgtattggcgatcagagtttactcggaacgggaggacggta

SEQ ID NO: 194332 - DNA, 50 bp, Artificial
  Synthetic oligonucleotide
gggttaaacgctttctgtctccctaagtcaattttgggtataacaaagtt

SEQ ID NO: 194333 - DNA, 56 bp, Artificial
  Synthetic oligonucleotide
aacacgtgtcgatgcaccaccgcttagcgcaccttgtgaaggtcctattggcgaga

SEQ ID NO: 194334 - DNA, 55 bp, Artificial
  Synthetic oligonucleotide
gcctgataaatcgcgcattcaaccgctctagcgttgctcttgccatggctaatga

SEQ ID NO: 194335 - DNA, 55 bp, Artificial
  Synthetic oligonucleotide
gcacttgctggcagagctttgaatacagcgataatggaggttgtaaggataagga

SEQ ID NO: 194336 - DNA, 55 bp, Artificial
  Synthetic oligonucleotide
gcactggcttaaaatgatgcgcgcttcagggtagccgatttgtttgactgaaaac

SEQ ID NO: 194337 - DNA, 53 bp, Artificial
  Synthetic oligonucleotide
gttaccagttagaacaaataagatccaagtatgttggttaaattttggggcat

SEQ ID NO: 194338 - DNA, 55 bp, Artificial
  Synthetic oligonucleotide
gccctgcaagattgacgctcactaacgcgcctgtaatgacccaaccaataggccc

SEQ ID NO: 194339 - DNA, 55 bp, Artificial
  Synthetic oligonucleotide
gcaggacgatttgtaagagatactcaaacaggagatgtatattacaccacagacc

SEQ ID NO: 194340 - DNA, 55 bp, Artificial
  Synthetic oligonucleotide
gccactatcacagacgctaacctcaattatataggctcgatcaccatagatgagg

SEQ ID NO: 194341 - DNA, 55 bp, Artificial
  Synthetic oligonucleotide
gccatcagcccctctaatgatcaaaaccgtatcaagcttgttttcacccaaagtg

SEQ ID NO: 194342 - DNA, 55 bp, Artificial
  Synthetic oligonucleotide
gccattcaaaaggtggataactcagggcttaacgctagtcaagacgcttccacct

SEQ ID NO: 194343 - DNA, 55 bp, Artificial
  Synthetic oligonucleotide
gccatttaccgctaccacaccaccatatgcactcacgctatcacacgcaagtgcg

SEQ ID NO: 194344 - DNA, 55 bp, Artificial
  Synthetic oligonucleotide
gccgcgtggcacatgttgaagttggctacgctagcgattctagcgtgcttgttaa

SEQ ID NO: 194345 - DNA, 55 bp, Artificial
  Synthetic oligonucleotide
gccgacaagaggcgattaacaacgcaatcatcgaggctctaggtaagcttaatgg

SEQ ID NO: 194346 - DNA, 55 bp, Artificial
  Synthetic oligonucleotide
gccgtagcgtttatcgctcaacgccattaacacacaaaggggtaaggacgctgtt

SEQ ID NO: 194347 - DNA, 55 bp, Artificial
  Synthetic oligonucleotide
gcctaaggcttcaaaattagagttaggatctaattcggcatggcttagcacgatc

SEQ ID NO: 194348 - DNA, 59 bp, Artificial
  Synthetic oligonucleotide
gttcctccccgaatatgaacgggtgagagtgatcgacattgacaccctcatcgagaacg

SEQ ID NO: 194349 - DNA, 55 bp, Artificial
  Synthetic oligonucleotide
gccaacatgtggtatttgctagcgatgcggggtgtccttgtgtgagcgatccggg

SEQ ID NO: 194350 - DNA, 55 bp, Artificial
  Synthetic oligonucleotide
gcctacgcttgtgtaaaagccgtcgtcttcagcgctcaatgcggaaactaaaagc

SEQ ID NO: 194351 - DNA, 55 bp, Artificial
  Synthetic oligonucleotide
gccccaagcttctacctgattctaactgaatcctccctactgattctagccctgc

SEQ ID NO: 194352 - DNA, 55 bp, Artificial
  Synthetic oligonucleotide
gccaaagccactatggaagctaggtttcttgaattgaaaaccttgatcggctatc

SEQ ID NO: 194353 - DNA, 55 bp, Artificial
  Synthetic oligonucleotide
gcctcaatagatgcggtggtttctagcgagtttaggaagcaattgccctacatta

SEQ ID NO: 194354 - DNA, 54 bp, Artificial
  Synthetic oligonucleotide
gcctcttgagattttagaggcgcgttttattctaccaatttcggcagttacggg

SEQ ID NO: 194355 - DNA, 55 bp, Artificial
  Synthetic oligonucleotide
gcattcttagagcgttgaatcttactcatctcgtattgatcacccggtgccaata

SEQ ID NO: 194356 - DNA, 55 bp, Artificial
  Synthetic oligonucleotide
gcattaaggggcccaatctctccagcgttactgcctgcgcggctggtacccatgc

SEQ ID NO: 194357 - DNA, 55 bp, Artificial
  Synthetic oligonucleotide
gccctttgagtagttctccactctcattagcaaagctactgcattgtgtgcggaa

SEQ ID NO: 194358 - DNA, 55 bp, Artificial
  Synthetic oligonucleotide
gcatgtaactagggcttgctaacaacaaaaccgcatagcgaagcgtaagcgggca

SEQ ID NO: 194359 - DNA, 55 bp, Artificial
  Synthetic oligonucleotide
gttcttgccaacgataagggtagttcttgccaacgataagggtagttcttgccaa

SEQ ID NO: 194360 - DNA, 55 bp, Artificial
  Synthetic oligonucleotide
gcatggtggctctttggatcgcgttagaatcgcgcatgccgttatctagcggccg

SEQ ID NO: 194361 - DNA, 55 bp, Artificial
  Synthetic oligonucleotide
gcatgaacgacaccttattaaacgcttatagcgggattaagacccaccagtttgg

SEQ ID NO: 194362 - DNA, 55 bp, Artificial
  Synthetic oligonucleotide
gcatcacttgatctaattcggctctctctgctctctctaaagcttgaaatttggc

SEQ ID NO: 194363 - DNA, 55 bp, Artificial
  Synthetic oligonucleotide
gcccgttccaatagcctttggaagtgtgtcggtactaacttgcaagactctctca

SEQ ID NO: 194364 - DNA, 55 bp, Artificial
  Synthetic oligonucleotide
gccctcacgctctagttctatcacacagcctttgtgaattttgatgtttagttcg

SEQ ID NO: 194365 - DNA, 55 bp, Artificial
  Synthetic oligonucleotide
cttctgtcatggcgttaggcacgcatgcggttttgagcgggaatgcgatcaagcg

SEQ ID NO: 194366 - DNA, 54 bp, Artificial
  Synthetic oligonucleotide
cttgattcccctcacggtaaactccccaagggcacgcttcatcttgttaacggc

SEQ ID NO: 194367 - DNA, 55 bp, Artificial
  Synthetic oligonucleotide
cttggaacggcacttacatcagaacatctacccattttgcgaaaaggtgagccta

SEQ ID NO: 194368 - DNA, 55 bp, Artificial
  Synthetic oligonucleotide
cttgtacgagatccacgccattattcccaaaagttacaatgcacacatccgcggc

SEQ ID NO: 194369 - DNA, 55 bp, Artificial
  Synthetic oligonucleotide
ctttctttaatgcgcttgatcgcattcccgctcaaaaccgcatgcgtgcctaacg

SEQ ID NO: 194370 - DNA, 60 bp, Artificial
  Synthetic oligonucleotide
gcgttagcgagcattcaagcggttttgcaccgattgtttgctgacaagcaaacacagata

SEQ ID NO: 194371 - DNA, 55 bp, Artificial
  Synthetic oligonucleotide
cttttagaagacagaagcctattggatttagcggtgggttatatccatagtgggg

SEQ ID NO: 194372 - DNA, 55 bp, Artificial
  Synthetic oligonucleotide
gaaatgtcaataacagtgcgagcgataccgtgttctatctcaacggcatgacgac

SEQ ID NO: 194373 - DNA, 55 bp, Artificial
  Synthetic oligonucleotide
gaaatttcaatagacacgcccgtgcggcttggcacatcataaagcatgacaggga

SEQ ID NO: 194374 - DNA, 55 bp, Artificial
  Synthetic oligonucleotide
gaacgctttaatcaacgaaatagagaacttacagaacgagaaagagatcttgctc

SEQ ID NO: 194375 - DNA, 55 bp, Artificial
  Synthetic oligonucleotide
gaagagttgcctgtgattccgggtattttggagatacattccttagcaagcggga

SEQ ID NO: 194376 - DNA, 55 bp, Artificial
  Synthetic oligonucleotide
gaagcatgccacttcgaaccatgactataagcggaatcgaactctcggctccgct

SEQ ID NO: 194377 - DNA, 55 bp, Artificial
  Synthetic oligonucleotide
gaagctttgactatctattgcaattcctatggaagtcccgtgaatgatccgcaag

SEQ ID NO: 194378 - DNA, 55 bp, Artificial
  Synthetic oligonucleotide
gaaggggcgtttgtgccattagttccaccactagacttcgctatcaacatggggc

SEQ ID NO: 194379 - DNA, 55 bp, Artificial
  Synthetic oligonucleotide
gaagtgagcgcgctttgtgagccgttgtatctcgttcatagcgaacttttagagc

SEQ ID NO: 194380 - DNA, 55 bp, Artificial
  Synthetic oligonucleotide
gaatagacactctctcaaaacgcgcaagcgcaagcaataacgcgcttgtgcaggc

SEQ ID NO: 194381 - DNA, 60 bp, Artificial
  Synthetic oligonucleotide
gcggcacgataatcgccccagccattttctgctgcaaccctaaccatagtgcgatatgct

SEQ ID NO: 194382 - DNA, 55 bp, Artificial
  Synthetic oligonucleotide
gaatagcgcatttatttcggcttggcactcgctgtgtaacttgcccagaggctcg

SEQ ID NO: 194383 - DNA, 55 bp, Artificial
  Synthetic oligonucleotide
gaatgaaacgacactcgaagatgtttatttgacactcaaggctatagatgagggt

SEQ ID NO: 194384 - DNA, 55 bp, Artificial
  Synthetic oligonucleotide
gaattttgggaacgggagcgctcaattaggctggaatggctcaccagtggatcct

SEQ ID NO: 194385 - DNA, 55 bp, Artificial
  Synthetic oligonucleotide
ctcatattggcacactggatttgtgtcatagcgctgggttaaacattatcgcccc

SEQ ID NO: 194386 - DNA, 55 bp, Artificial
  Synthetic oligonucleotide
ctccactggtgaggcgttgtagagtgatcatagccccaatgttcttcgcccgcac

SEQ ID NO: 194387 - DNA, 55 bp, Artificial
  Synthetic oligonucleotide
ctccatggggagcgcgaaacgcttgaaccctaaacacatccaagtagggagcgtg

SEQ ID NO: 194388 - DNA, 55 bp, Artificial
  Synthetic oligonucleotide
ctcctaacttgcacccttcggctagcatttctatcggctagcttgtcttgaccct

SEQ ID NO: 194389 - DNA, 55 bp, Artificial
  Synthetic oligonucleotide
ctcgtgcattctatcgaactggcggataattcgagtgtcatatcatatagaggaa

SEQ ID NO: 194390 - DNA, 55 bp, Artificial
  Synthetic oligonucleotide
ctctatcgagctctccaaggagctaggggcggatatggtggaacttcacacgggc

SEQ ID NO: 194391 - DNA, 54 bp, Artificial
  Synthetic oligonucleotide
ctctattatttctgcccttgaatttaacaagccttgtgttacggcgttgtaaag

SEQ ID NO: 194392 - DNA, 59 bp, Artificial
  Synthetic oligonucleotide
agtatgttaatagaacgaaagagccctatgaagtgggtgagcttagaggaagtgcacga

SEQ ID NO: 194393 - DNA, 59 bp, Artificial
  Synthetic oligonucleotide
tataacggtcgaagagggtattgtgatcgttccgagatcaagatacgactacaccacaa

SEQ ID NO: 194394 - DNA, 55 bp, Artificial
  Synthetic oligonucleotide
ctgacaagcaaacaccaacaagtgaagcgttagtaagctagacaaaagcgcatcg

SEQ ID NO: 194395 - DNA, 55 bp, Artificial
  Synthetic oligonucleotide
ctgacaggttagcggtctctagcgtgctggctaagattgagtctctttaagggga

SEQ ID NO: 194396 - DNA, 55 bp, Artificial
  Synthetic oligonucleotide
ctgatgagcctgagcttgctacaatgctaacaactattatgcaaaatcaaagcgc

SEQ ID NO: 194397 - DNA, 55 bp, Artificial
  Synthetic oligonucleotide
ctgcaagaggacacgcctgaatttaaccctctgtggcgttatgaagtcgggcaaa

SEQ ID NO: 194398 - DNA, 55 bp, Artificial
  Synthetic oligonucleotide
ctgcaccacttcagaagcaaagctaggaccgcacaaatacgcaagattcttatgc

SEQ ID NO: 194399 - DNA, 55 bp, Artificial
  Synthetic oligonucleotide
ctgccggtaacagctctcaagtgaatgcgtttaacgggtttatcactaaaatcgg

SEQ ID NO: 194400 - DNA, 55 bp, Artificial
  Synthetic oligonucleotide
ctggctacttcacttgttatagggcttttaggacttattgcatttctttggggtc

SEQ ID NO: 194401 - DNA, 55 bp, Artificial
  Synthetic oligonucleotide
ctgggtagccaaccctgcgctcttaatttgttcatctacgagtgcctgaatatca

SEQ ID NO: 194402 - DNA, 55 bp, Artificial
  Synthetic oligonucleotide
ctgtataacgggtggcaagcacatcgctaggtacagtaaattcgtctctatgggc

SEQ ID NO: 194403 - DNA, 55 bp, Artificial
  Synthetic oligonucleotide
cttaagcgctaccagtataaggatagtgagaatatcgttagcgctactatccaaa

SEQ ID NO: 194404 - DNA, 57 bp, Artificial
  Synthetic oligonucleotide
gaaagacgaggaaaacggtcattgcagatacgggagtaaatgcaatgaaagcttaat

SEQ ID NO: 194405 - DNA, 55 bp, Artificial
  Synthetic oligonucleotide
cttacgcgcccttagatattttcgtgcagggtaatagcctggacactagaaatgt

SEQ ID NO: 194406 - DNA, 55 bp, Artificial
  Synthetic oligonucleotide
cttcaaacgcaatgttttagagccaagcctcaaagaaatcaacgctaccaccgac

SEQ ID NO: 194407 - DNA, 55 bp, Artificial
  Synthetic oligonucleotide
cttctacgactgtgatcacgcatgttccgcactcgccatctcgacagccaaaggg

SEQ ID NO: 194408 - DNA, 52 bp, Artificial
  Synthetic oligonucleotide
cttctgtaacgttcgtagaacgggacaacaaaggacgtataacggtcgaaga

SEQ ID NO: 194409 - DNA, 55 bp, Artificial
  Synthetic oligonucleotide
gatccacttaccaatcccaggccatgagaaaaccgtttcagttatcatgctcccc

SEQ ID NO: 194410 - DNA, 55 bp, Artificial
  Synthetic oligonucleotide
gatctcccatgggctaccattacccgcattgttttcatcatgcgtagagcgcact

SEQ ID NO: 194411 - DNA, 55 bp, Artificial
  Synthetic oligonucleotide
gatctgccgcctaattaactcgcaagaccctatttgttgtagctttagtcgggct

SEQ ID NO: 194412 - DNA, 55 bp, Artificial
  Synthetic oligonucleotide
gatctgtgtgagggttcttcctcgatagctcaaggagggttacttttcgatgact

SEQ ID NO: 194413 - DNA, 55 bp, Artificial
  Synthetic oligonucleotide
gatgattctctaacttactctaacatttaatttccctcggcaagaagcccacgac

SEQ ID NO: 194414 - DNA, 55 bp, Artificial
  Synthetic oligonucleotide
gatgcactattactggttgatcgcgatgcttgcgaacatcacggttaatcgtcaa

SEQ ID NO: 194415 - DNA, 60 bp, Artificial
  Synthetic oligonucleotide
agagtggcatcaatggtacctgagtctagagcgtttgataacccataaataccccatgct

SEQ ID NO: 194416 - DNA, 55 bp, Artificial
  Synthetic oligonucleotide
gatgctcttagcgtctaagcgtgtgagagaaagccttccgtagttagtagaacct

SEQ ID NO: 194417 - DNA, 55 bp, Artificial
  Synthetic oligonucleotide
gatgtctttaattgcgttaattgcatctcgtgttcttgcataaaggttgtgtagg

SEQ ID NO: 194418 - DNA, 55 bp, Artificial
  Synthetic oligonucleotide
gatgtgttcattaatgtgagcggagggattaagattagcgagccggcttgcgatt

SEQ ID NO: 194419 - DNA, 55 bp, Artificial
  Synthetic oligonucleotide
gattaagccagagggcttgtccttatacacgcgatttacccttgcgattgcttgc

SEQ ID NO: 194420 - DNA, 55 bp, Artificial
  Synthetic oligonucleotide
gattgccggcagtttgtaagcacacaatcccgctcgctaaaacaaacaacgctcc

SEQ ID NO: 194421 - DNA, 55 bp, Artificial
  Synthetic oligonucleotide
gcaaacacgtaattcaaatacacgctataaagcctgcggtattggagttgagtgc

SEQ ID NO: 194422 - DNA, 55 bp, Artificial
  Synthetic oligonucleotide
gcaaacccacagcgcaagcctccatgcgcttagatgtgcgcgccctagaggtgct

SEQ ID NO: 194423 - DNA, 55 bp, Artificial
  Synthetic oligonucleotide
gcaagaagaatggggtttaatcttctgcaatggcttggtagggagttagggcgga

SEQ ID NO: 194424 - DNA, 55 bp, Artificial
  Synthetic oligonucleotide
gcaaggggcaagtatcgtgcctaatggttctttagagttcatgtttaaccgaaaa

SEQ ID NO: 194425 - DNA, 55 bp, Artificial
  Synthetic oligonucleotide
gcaattgagagctagagtgtaaagaaatcgtggtgttgcccttaaaatgcgcgtt

SEQ ID NO: 194426 - DNA, 55 bp, Artificial
  Synthetic oligonucleotide
cgtcccacgctatcttagtcgggcgttagccagacacccccctagagggcaacgc

SEQ ID NO: 194427 - DNA, 55 bp, Artificial
  Synthetic oligonucleotide
gcacaaacaaatccctgcaacgtgtgcccactgttctgcgggatgtcagctcagc

SEQ ID NO: 194428 - DNA, 55 bp, Artificial
  Synthetic oligonucleotide
gcaccacatcctttgcatccctcatggcatgatcggacgcttctttgggatcctt

SEQ ID NO: 194429 - DNA, 55 bp, Artificial
  Synthetic oligonucleotide
gcacggagataggtactttagaaccttcatgcccgtccatagtgagcatggggct

SEQ ID NO: 194430 - DNA, 55 bp, Artificial
  Synthetic oligonucleotide
gcacggtaagctcaatagacacaggcaaaccacgagaatccataacgctaatcgc

SEQ ID NO: 194431 - DNA, 55 bp, Artificial
  Synthetic oligonucleotide
gcactctctaaaggctctaaaggcagatcgcccaattctgttacttgagcgtcca

SEQ ID NO: 194432 - DNA, 55 bp, Artificial
  Synthetic oligonucleotide
gaccaatactcaaatggccacagtcctaagccttggcgaggggaaggtttctact

SEQ ID NO: 194433 - DNA, 55 bp, Artificial
  Synthetic oligonucleotide
gacgccttgagtggcaagcaggtttaattctaggcttgaaaacgcactataagcc

SEQ ID NO: 194434 - DNA, 55 bp, Artificial
  Synthetic oligonucleotide
gacgctaagcggtgaatgtgtttacgatagcgggtggacgatacccgatacgaga

SEQ ID NO: 194435 - DNA, 55 bp, Artificial
  Synthetic oligonucleotide
gactagcttagtatttaggagcatgactgtacgtttaatgagcaaagacagagat

SEQ ID NO: 194436 - DNA, 55 bp, Artificial
  Synthetic oligonucleotide
gactcttttgatacacttctctcttagcgaccttcctggtgtgtcggtcgctttt

SEQ ID NO: 194437 - DNA, 60 bp, Artificial
  Synthetic oligonucleotide
ctttgtgattgaagtaagcgctagaagcaaatacatgcatgctatgagagaacaagacgc

SEQ ID NO: 194438 - DNA, 55 bp, Artificial
  Synthetic oligonucleotide
gagagggtgatcgtttaaacaggggcaaactaaatattcaggcacggctaggcgc

SEQ ID NO: 194439 - DNA, 55 bp, Artificial
  Synthetic oligonucleotide
gagatcgaggtgtgggatggcaacatggccagctctaacgctttaagacaggctc

SEQ ID NO: 194440 - DNA, 55 bp, Artificial
  Synthetic oligonucleotide
gagcacaccacagcttgatatactccaaatcaagcgaagcaaaggcgtgaagcat

SEQ ID NO: 194441 - DNA, 55 bp, Artificial
  Synthetic oligonucleotide
gagcgattccacctctattggctgggcgtatcaatacgctctgtctagcgatagc

SEQ ID NO: 194442 - DNA, 55 bp, Artificial
  Synthetic oligonucleotide
gagcgtaatatttatctgatcaactctggggtgaatgtcaaggtccagcacccca

SEQ ID NO: 194443 - DNA, 55 bp, Artificial
  Synthetic oligonucleotide
gagcttgcgaaaacttcaagcaaacaccttgatacaagacgcatagataaggaca

SEQ ID NO: 194444 - DNA, 55 bp, Artificial
  Synthetic oligonucleotide
gaggcactcatatcatgttggtgtttagctaggggacataatcgttttatctgcg

SEQ ID NO: 194445 - DNA, 55 bp, Artificial
  Synthetic oligonucleotide
gagggagagcgggagttttatcgcctacgcgagcttgacctcccctcctatgact

SEQ ID NO: 194446 - DNA, 55 bp, Artificial
  Synthetic oligonucleotide
gagtatgccctattcgcttaatccgaacgattactggcaatctcaaagctacgga

SEQ ID NO: 194447 - DNA, 55 bp, Artificial
  Synthetic oligonucleotide
gagtgtggattccttcttggcttagaatctccacattgggtttgcaaaagcgtaa

SEQ ID NO: 194448 - DNA, 56 bp, Artificial
  Synthetic oligonucleotide
agagcggtaactctagggggtttggctatcgctacgatcatatcgtcttttgcctt

SEQ ID NO: 194449 - DNA, 55 bp, Artificial
  Synthetic oligonucleotide
gagtttgagtgattcctctatcgtgtttaagggagcggtctctttaggagggcag

SEQ ID NO: 194450 - DNA, 53 bp, Artificial
  Synthetic oligonucleotide
gatagaataagggcgtttcacccttgtaacgagtttaaaatccgaatggctaa

SEQ ID NO: 194451 - DNA, 55 bp, Artificial
  Synthetic oligonucleotide
gatagtcaatagcagtctaaaagcacttattctagccaacagaatgccacccaac

SEQ ID NO: 194452 - DNA, 55 bp, Artificial
  Synthetic oligonucleotide
gatcaaatgtcaaaatttcgcttatgggaaattcatcagctctatggggagcgcg

SEQ ID NO: 194453 - DNA, 55 bp, Artificial
  Synthetic oligonucleotide
gatcacgcacgctttagagaacgccctagaaaatcttaaaacatgcgcatcttgt

SEQ ID NO: 194454 - DNA, 55 bp, Artificial
  Synthetic oligonucleotide
gatcacgcttagcacaaaccacaccccaagtgctaagtttctgcgataaaggctt

SEQ ID NO: 194455 - DNA, 55 bp, Artificial
  Synthetic oligonucleotide
gtgtttcagtccaagatgtggataagcctgagaaactattgaagcctttcatcgc

SEQ ID NO: 194456 - DNA, 55 bp, Artificial
  Synthetic oligonucleotide
gttaatgtcggaggggtcggatacaattttgcgtacgatgatacgacaaccctag

SEQ ID NO: 194457 - DNA, 55 bp, Artificial
  Synthetic oligonucleotide
gttgctaaagcctatcaagctgaggcgttttctaaattgcccactagtttacggg

SEQ ID NO: 194458 - DNA, 55 bp, Artificial
  Synthetic oligonucleotide
gttggcgtatcttgatgtctgattctttggatagcactcaacttaatgttcctac

SEQ ID NO: 194459 - DNA, 56 bp, Artificial
  Synthetic oligonucleotide
agagcgatgaacgcctaataaacaactctgagtgcccaaaaagggttgcgagcgtt

SEQ ID NO: 194460 - DNA, 54 bp, Artificial
  Synthetic oligonucleotide
gtttgccccacatacgcgcaaccggctccccaagtgttagaagtaaccgttcca

SEQ ID NO: 194461 - DNA, 55 bp, Artificial
  Synthetic oligonucleotide
gtttgtagagtgtagcgccgattacaagcgtgtcataggtcataaacttattgac

SEQ ID NO: 194462 - DNA, 55 bp, Artificial
  Synthetic oligonucleotide
gttttacaaaattccgtgattaaaacgagagtgaatgccctcattcgtaacgctg

SEQ ID NO: 194463 - DNA, 55 bp, Artificial
  Synthetic oligonucleotide
taaagagactcaatcttagccagcacgctagagaccgctaacctgtcagagcttg

SEQ ID NO: 194464 - DNA, 55 bp, Artificial
  Synthetic oligonucleotide
taaagcgcatctaacttcggcttacaatccaactttactaaaaccgcctagcgag

SEQ ID NO: 194465 - DNA, 55 bp, Artificial
  Synthetic oligonucleotide
taaagtcatagcttaagaggttgttgagctgtaagcgcacgttcaaacgctccgt

SEQ ID NO: 194466 - DNA, 55 bp, Artificial
  Synthetic oligonucleotide
taaatctgtcggcgaaataaagcaataacctgcatcggtgtctatggtgttagca

SEQ ID NO: 194467 - DNA, 55 bp, Artificial
  Synthetic oligonucleotide
taaatgcgcgggttgttagcaatcacgcggttagccagatttaaaatagcccctg

SEQ ID NO: 194468 - DNA, 55 bp, Artificial
  Synthetic oligonucleotide
taacacgctggaattaagggctttaaggcatgagtttaacgctaatattaacgtc

SEQ ID NO: 194469 - DNA, 55 bp, Artificial
  Synthetic oligonucleotide
taaggttgtcccactcccgctaaatggatctagaaccacatcgcccacgcaacta

SEQ ID NO: 194470 - DNA, 60 bp, Artificial
  Synthetic oligonucleotide
tatccgaagcgcaattatcagagataatttccatggatagctacaaatttgcaacacctt

SEQ ID NO: 194471 - DNA, 55 bp, Artificial
  Synthetic oligonucleotide
taatagcccacctagcgcactaaagaactggcgatacgccatagtcttgccacga

SEQ ID NO: 194472 - DNA, 55 bp, Artificial
  Synthetic oligonucleotide
tacattgccttatagcggagaatcttttggtgtgccaagaaacctctatatcgtc

SEQ ID NO: 194473 - DNA, 55 bp, Artificial
  Synthetic oligonucleotide
tacgacaaatactttcacattgatacctcctaacgaggtgtcgccctctctatcc

SEQ ID NO: 194474 - DNA, 55 bp, Artificial
  Synthetic oligonucleotide
tactagatgaatcggaatttgattattcgcgtacggatcgtttacataagcgatg

SEQ ID NO: 194475 - DNA, 55 bp, Artificial
  Synthetic oligonucleotide
tactagggcttgtccgtttgctactccataagcagcttctttgaggtgtgctgtg

SEQ ID NO: 194476 - DNA, 55 bp, Artificial
  Synthetic oligonucleotide
tagaatatggcattaaggggcccaatctctccagcgttactgcctgcgcggctgg

SEQ ID NO: 194477 - DNA, 55 bp, Artificial
  Synthetic oligonucleotide
tagcacactacagccctatgcccctagggtattagatgttggttgctagctacct

SEQ ID NO: 194478 - DNA, 55 bp, Artificial
  Synthetic oligonucleotide
tagcctatagagatctaagccccgacttagtcaagcaagagatcattcgacgctt

SEQ ID NO: 194479 - DNA, 55 bp, Artificial
  Synthetic oligonucleotide
gtatcattgctataagatccgtcattcaggctatgaggccgtaaggattgcaacg

SEQ ID NO: 194480 - DNA, 55 bp, Artificial
  Synthetic oligonucleotide
gtcccctatacgttgcgacatgaaacaacattggatgcaaatgtgaagacattat

SEQ ID NO: 194481 - DNA, 60 bp, Artificial
  Synthetic oligonucleotide
tatcgatgcacgtcatatctttaagcaggtcactcgatcggtgcgtgattacagctctga

SEQ ID NO: 194482 - DNA, 53 bp, Artificial
  Synthetic oligonucleotide
gtccctctaaccgccggccctttagaagcgtttaacacacgatattgcaaacc

SEQ ID NO: 194483 - DNA, 53 bp, Artificial
  Synthetic oligonucleotide
gtccgtttgagcgggagggactaatacccaaggggcagttctagtcctttcca

SEQ ID NO: 194484 - DNA, 55 bp, Artificial
  Synthetic oligonucleotide
gtcgtgaatatatggctgattctggagcggcttatcttatgggagatagtatgcc

SEQ ID NO: 194485 - DNA, 55 bp, Artificial
  Synthetic oligonucleotide
gtgatccatttcctataaaagcaatccccagacttgccgatacattgagtgtgag

SEQ ID NO: 194486 - DNA, 55 bp, Artificial
  Synthetic oligonucleotide
gtgatccttatttaacgcatggcttcctgtagcgtccttatgtttaggaatgcca

SEQ ID NO: 194487 - DNA, 55 bp, Artificial
  Synthetic oligonucleotide
gtgatggcgttaggcacgcatgcggttttgagcgggaatgcgatcaagcgcatta

SEQ ID NO: 194488 - DNA, 55 bp, Artificial
  Synthetic oligonucleotide
gtgcaatccgatatagatactgatcaacagcgtcgtcatggtcagaaaaggggcc

SEQ ID NO: 194489 - DNA, 55 bp, Artificial
  Synthetic oligonucleotide
gtgcactgagtgaggccagttgttccataacaagtctaagcattacgcttcacag

SEQ ID NO: 194490 - DNA, 55 bp, Artificial
  Synthetic oligonucleotide
gtgcagccttagaaatcaaaagcgacaatcactatttcctaggctcatttgccgg

SEQ ID NO: 194491 - DNA, 55 bp, Artificial
  Synthetic oligonucleotide
gtgccattagccgcattgagggttaaagagagcatgttcttatagggcgaagcgc

SEQ ID NO: 194492 - DNA, 60 bp, Artificial
  Synthetic oligonucleotide
agagaacgacagaaacgagctattgatcaagctagagaaagttacagcagaatttcaaaa

SEQ ID NO: 194493 - DNA, 55 bp, Artificial
  Synthetic oligonucleotide
gtgcgacaaaatttggagcaattagcttgacttggttgagttagtgggtttgagg

SEQ ID NO: 194494 - DNA, 55 bp, Artificial
  Synthetic oligonucleotide
gtgcgcatctttgggtaatccttatgtgttgttagggataatcgtgttagtgggc

SEQ ID NO: 194495 - DNA, 55 bp, Artificial
  Synthetic oligonucleotide
gtgcgggtattccggctagggaggtgcagggttttgagttagggcatcagttggc

SEQ ID NO: 194496 - DNA, 55 bp, Artificial
  Synthetic oligonucleotide
gtgctccgaaaatcccgatggagagtgccactacttgtctagttgagacctttgt

SEQ ID NO: 194497 - DNA, 55 bp, Artificial
  Synthetic oligonucleotide
gtggattgtgggctaaagtgtagcgtgcgtgggagaaatttcctaaaacacagcc

SEQ ID NO: 194498 - DNA, 55 bp, Artificial
  Synthetic oligonucleotide
gtgtaacctatagagaagcggtgaatgccactaagttttgcaccaaagagagcct

SEQ ID NO: 194499 - DNA, 55 bp, Artificial
  Synthetic oligonucleotide
gtgtagaactatggcgatttatcaacgcgcttgggattgaacatatcggagaggg

SEQ ID NO: 194500 - DNA, 55 bp, Artificial
  Synthetic oligonucleotide
gtgtcgcactctcacgtcttatagataaaatggtacgtcatgtacaatcatcagg

SEQ ID NO: 194501 - DNA, 55 bp, Artificial
  Synthetic oligonucleotide
gtgtgcatgcaggctctaaaagtccgcaatctctttctaatcgcaaacgcatgag

SEQ ID NO: 194502 - DNA, 55 bp, Artificial
  Synthetic oligonucleotide
gtgtggctagtgatattagcgtctataaaagtgtaagccgcatggaaattaagcc

SEQ ID NO: 194503 - DNA, 55 bp, Artificial
  Synthetic oligonucleotide
gacaactctaaatgataccgataaaccagctttaaaacgccgtataatgcttaaa

SEQ ID NO: 194504 - DNA, 59 bp, Artificial
  Synthetic oligonucleotide
gcggaatgagtgcaacgaatggagggtaaggatgatttgccccggcacgcccggagaga

SEQ ID NO: 194505 - DNA, 55 bp, Artificial
  Synthetic oligonucleotide
gtgttactagccccaccgcatgggcgtttaacgcattgatattcgtgttaacctg

SEQ ID NO: 194506 - DNA, 55 bp, Artificial
  Synthetic oligonucleotide
gtgttggccgggctcaaggggcaatacacactccctttaagcgaaattttgccca

SEQ ID NO: 194507 - DNA, 55 bp, Artificial
  Synthetic oligonucleotide
tcttctatacccctccgctctatcgtagaaatttgctcctcttcagcgatcacaa

SEQ ID NO: 194508 - DNA, 55 bp, Artificial
  Synthetic oligonucleotide
tctttgcgatcatcaagatttagccacacgccttaaaacaatccgccacacggct

SEQ ID NO: 194509 - DNA, 55 bp, Artificial
  Synthetic oligonucleotide
tgagtgctacttgtgtgcaaggtcctccacttataggaggattaggacaacctac

SEQ ID NO: 194510 - DNA, 55 bp, Artificial
  Synthetic oligonucleotide
tgccacacaatagccggattctccggtccccaaatctcattcatagctcaatacc

SEQ ID NO: 194511 - DNA, 55 bp, Artificial
  Synthetic oligonucleotide
tgccgcagttggcgaacgcagattcgccgatttatcgctcaatactgaatacccc

SEQ ID NO: 194512 - DNA, 55 bp, Artificial
  Synthetic oligonucleotide
tgctcaccgtgcatttaagcagcgctaaaagcgcgctaaccattttaatgcaacg

SEQ ID NO: 194513 - DNA, 55 bp, Artificial
  Synthetic oligonucleotide
tggagtcaagtgatgatacctttataatcgttcatgggactgatactatgcttct

SEQ ID NO: 194514 - DNA, 55 bp, Artificial
  Synthetic oligonucleotide
tgtttaggttgaggtgcccggctaaagaagcgctctcataactaatgccttcttg

SEQ ID NO: 194515 - DNA, 56 bp, Artificial
  Synthetic oligonucleotide
tattataaacccctattatggcgatgccgtagggtttataatgcggtaacataata

SEQ ID NO: 194516 - DNA, 55 bp, Artificial
  Synthetic oligonucleotide
tgttttgagcgaaagccctatcagaagaggtgtaagggttgaaatcttgcggcgc

SEQ ID NO: 194517 - DNA, 55 bp, Artificial
  Synthetic oligonucleotide
tgtttttacagtgcaggggcgaggggtggctgtaagtggcacggtgcttggaggc

SEQ ID NO: 194518 - DNA, 55 bp, Artificial
  Synthetic oligonucleotide
ttaaccagctcgcattttcaaaacgccgtgatccaatccattgacacccaacgca

SEQ ID NO: 194519 - DNA, 55 bp, Artificial
  Synthetic oligonucleotide
ttaacttgtcttatcaaggggagatgaacgataaatacggcgtgaatgcccctag

SEQ ID NO: 194520 - DNA, 55 bp, Artificial
  Synthetic oligonucleotide
ttatcagcaggcttaaccgagtcgattctcatatgaaagtcaatgtataccggag

SEQ ID NO: 194521 - DNA, 55 bp, Artificial
  Synthetic oligonucleotide
ttatggcgttggactagcggcactttagccaatgaagcgagcgcggctgttaatg

SEQ ID NO: 194522 - DNA, 55 bp, Artificial
  Synthetic oligonucleotide
ttcaaaccccgcatgcgatttaaagacttccaactccgctaaatgcgtctccatc

SEQ ID NO: 194523 - DNA, 55 bp, Artificial
  Synthetic oligonucleotide
ttccacttccgcaattacaattaagttgagataagtctcttacccaaccttgcac

SEQ ID NO: 194524 - DNA, 55 bp, Artificial
  Synthetic oligonucleotide
ttccatcacacccataccttcactcactgaacgcttataagctatcctttcgctt

SEQ ID NO: 194525 - DNA, 55 bp, Artificial
  Synthetic oligonucleotide
ttcgcgaggtggtcaaatatcggggtaacatcacggtggtctcgcacgaatcaag

SEQ ID NO: 194526 - DNA, 60 bp, Artificial
  Synthetic oligonucleotide
tattgctcccatgatgactaatcccatgatgaaagttaggggcattagtaaggatttctt

SEQ ID NO: 194527 - DNA, 55 bp, Artificial
  Synthetic oligonucleotide
ttgcccgctttctagggcgttaaaacaagtttcactcagcgttgcacccacaaag

SEQ ID NO: 194528 - DNA, 55 bp, Artificial
  Synthetic oligonucleotide
ttggctaaaagcacctgagagatcacgcaaatagttatctagcttaccccgtggg

SEQ ID NO: 194529 - DNA, 55 bp, Artificial
  Synthetic oligonucleotide
tttactagtatgcttattggaacacgattcattgatctttcaggtttgagcgcga

SEQ ID NO: 194530 - DNA, 55 bp, Artificial
  Synthetic oligonucleotide
tttaggcggtgcgtttaggaaagatataggtggacacaatccactagaacctgcc

SEQ ID NO: 194531 - DNA, 55 bp, Artificial
  Synthetic oligonucleotide
tttgggacatttccagcatgccatcatcatctcactctatgcactcatcttcatc

SEQ ID NO: 194532 - DNA, 55 bp, Artificial
  Synthetic oligonucleotide
ttttgtcaaaattcgtgtgcatgctgatgacttgattagcgctagtggtgtctaa

SEQ ID NO: 194533 - DNA, 55 bp, Artificial
  Synthetic oligonucleotide
tagcttgatttttgagttaatgggtggggagtgcagtgggtggcactctgttagg

SEQ ID NO: 194534 - DNA, 55 bp, Artificial
  Synthetic oligonucleotide
taggggaggggatgacttcagttgggaagggcttgaatatctattgtccacctcg

SEQ ID NO: 194535 - DNA, 53 bp, Artificial
  Synthetic oligonucleotide
tataagtagggctatttctggtgcctctaaaagggtgtggggttaaatagggc

SEQ ID NO: 194536 - DNA, 55 bp, Artificial
  Synthetic oligonucleotide
tataccactccggcgtgttagacgatcgcgccctgcaagctggatcgatcacggg

SEQ ID NO: 194537 - DNA, 58 bp, Artificial
  Synthetic oligonucleotide
tcaaagaatcgcaaaccacgatcacaccatgcaaagatttagtggttacaacccctaa

SEQ ID NO: 194538 - DNA, 55 bp, Artificial
  Synthetic oligonucleotide
tatactcccttcttccaatccgagctgtatagggtggagagataactcattgggg

SEQ ID NO: 194539 - DNA, 55 bp, Artificial
  Synthetic oligonucleotide
tatagaggcgttctttgagtccaaaggtggcgatacaaataagtcccgcaatgag

SEQ ID NO: 194540 - DNA, 55 bp, Artificial
  Synthetic oligonucleotide
tatagcagcgttaagaatagaagcggcttatacaaggggtgtgtttaagcgcgcc

SEQ ID NO: 194541 - DNA, 55 bp, Artificial
  Synthetic oligonucleotide
tatcccgcccaaagaattgtaagctgtggataacgaatgagttttgaataagcta

SEQ ID NO: 194542 - DNA, 55 bp, Artificial
  Synthetic oligonucleotide
tatgtgctaaggaattaagcgagtttggcattaccataaatgccgttggtcccac

SEQ ID NO: 194543 - DNA, 55 bp, Artificial
  Synthetic oligonucleotide
tcaagcaacattctatgatgatttgcaagccgctaaaactagaggcgaattgagc

SEQ ID NO: 194544 - DNA, 55 bp, Artificial
  Synthetic oligonucleotide
tcaaggctctatgatagggcagttagccttattgtttggagcgaatgatttaggg

SEQ ID NO: 194545 - DNA, 55 bp, Artificial
  Synthetic oligonucleotide
tcaatagtaacgatgtgtctgcgaacgctcttttaagtggtgcggtaggcagtgg

SEQ ID NO: 194546 - DNA, 55 bp, Artificial
  Synthetic oligonucleotide
tcacactgggaagcagcggaaaactcacggcacaaatacacaacggtgcgcctta

SEQ ID NO: 194547 - DNA, 55 bp, Artificial
  Synthetic oligonucleotide
tcacgctagacaaacttgatggcttgtaaatcacccgattgccagcggctagggg

SEQ ID NO: 194548 - DNA, 59 bp, Artificial
  Synthetic oligonucleotide
gcgcttatcagaagttgttattaagctatgggatagcattaaaaccgctgatttttgga

SEQ ID NO: 194549 - DNA, 55 bp, Artificial
  Synthetic oligonucleotide
tcagctcaggagaaattggcattaagatcaccgctgggaaatacgaacccacccc

SEQ ID NO: 194550 - DNA, 55 bp, Artificial
  Synthetic oligonucleotide
tcatacctgccaattgtctgcatacatctcgtagagattcgctgctctcgcccag

SEQ ID NO: 194551 - DNA, 55 bp, Artificial
  Synthetic oligonucleotide
tcatctaggttaaattccaccaagcctttaggggtttgcgcgtgcaaatgcaagc

SEQ ID NO: 194552 - DNA, 54 bp, Artificial
  Synthetic oligonucleotide
tcatctttaggcgtaaccgatccgttcctaaagcctctcaccgtggttacaccc

SEQ ID NO: 194553 - DNA, 55 bp, Artificial
  Synthetic oligonucleotide
tccgcacaattggcacagatattcgggaaatcggtagaataaacgtcactggcgg

SEQ ID NO: 194554 - DNA, 55 bp, Artificial
  Synthetic oligonucleotide
tccttactagattctagccctatgctcagtctaatcgtgcaaggtgtgatacccc

SEQ ID NO: 194555 - DNA, 55 bp, Artificial
  Synthetic oligonucleotide
tcgctatttatgagcgcttgagtaatttagtcgctcccatgaaggctttaaggga

SEQ ID NO: 194556 - DNA, 55 bp, Artificial
  Synthetic oligonucleotide
tctagcgcattgcctttacttgaagccaatataactcgttccactttggcttccg

SEQ ID NO: 194557 - DNA, 55 bp, Artificial
  Synthetic oligonucleotide
tctcaatcgctttcttaacggactgctcgctccctgaataagtttgtatggcata

SEQ ID NO: 194558 - DNA, 55 bp, Artificial
  Synthetic oligonucleotide
tctgtaaagacggcagtgaagccattaaaccaggttcacgcggaaattaagtttc

SEQ ID NO: 194559 - DNA, 60 bp, Artificial
  Synthetic oligonucleotide
gcgctccaacactccttaccggtatgccttcaacgctgcacagaacgctcttctaccact

SEQ ID NO: 194560 - DNA, 55 bp, Artificial
  Synthetic oligonucleotide
tcttacccactaaaatcatgccagcgctcacataagtgcctactttaacgatccc

SEQ ID NO: 194561 - DNA, 55 bp, Artificial
  Synthetic oligonucleotide
gcgttccttaaagcttaaccaacgctctaattaacgctctattcaatactactct

SEQ ID NO: 194562 - DNA, 55 bp, Artificial
  Synthetic oligonucleotide
gctacaataacaacctaaggcggtataacatggttgctaatcctagtgttaacaa

SEQ ID NO: 194563 - DNA, 55 bp, Artificial
  Synthetic oligonucleotide
gctacaataacagcgtgccaatagtttcacaagtgcggtatttcctatgtgcgac

SEQ ID NO: 194564 - DNA, 55 bp, Artificial
  Synthetic oligonucleotide
gctaccggactctagcttgccacgatacacgcgcacaaaagtcaattgccccaca

SEQ ID NO: 194565 - DNA, 55 bp, Artificial
  Synthetic oligonucleotide
gctagacatgcttatagatgactagagatgcctagagattactagagatgcctgg

SEQ ID NO: 194566 - DNA, 55 bp, Artificial
  Synthetic oligonucleotide
gctaggctaatccatgttttgtaacgccgtgccacgacctgtggggtcatcgccg

SEQ ID NO: 194567 - DNA, 55 bp, Artificial
  Synthetic oligonucleotide
gctcaaagaaaagaacagcgagatagcaagtttagagaacgacagaaacgagcta

SEQ ID NO: 194568 - DNA, 55 bp, Artificial
  Synthetic oligonucleotide
gctcaaagcagtgggccaaccactcaatcccctaacagcacggtgatgggagctt

SEQ ID NO: 194569 - DNA, 55 bp, Artificial
  Synthetic oligonucleotide
gctcattcccaaaacgctttaaggggtgtgactagcgataacacgatcgcaagca

SEQ ID NO: 194570 - DNA, 55 bp, Artificial
  Synthetic oligonucleotide
gcgcgcgcgtgagggattgggggttgcaaccccctaaataccgaagctgtagagt

SEQ ID NO: 194571 - DNA, 55 bp, Artificial
  Synthetic oligonucleotide
gctccaaacaataaagctaactgccctatcatagagccttgagtaacccatgagc

SEQ ID NO: 194572 - DNA, 55 bp, Artificial
  Synthetic oligonucleotide
gctcttaaagggcgattagcgttatctctagtcatgttataactgagcgttaagg

SEQ ID NO: 194573 - DNA, 55 bp, Artificial
  Synthetic oligonucleotide
gctgatgcgttagtttctgccgggcatagtggggctactatggggctagccacgc

SEQ ID NO: 194574 - DNA, 55 bp, Artificial
  Synthetic oligonucleotide
gctgtccccttttatagctatggtggaagctcactcgtagccaactgcctcgcga

SEQ ID NO: 194575 - DNA, 55 bp, Artificial
  Synthetic oligonucleotide
gcttattacagcgggttgcaaagcgctttagggtatcaaacgcaagcgacaactc

SEQ ID NO: 194576 - DNA, 55 bp, Artificial
  Synthetic oligonucleotide
gctttaggcttcctgtaatgattgccctagtaaaagctggacacgaagtcttagc

SEQ ID NO: 194577 - DNA, 55 bp, Artificial
  Synthetic oligonucleotide
ggaaagagcgataatgcgcctaaaactttagaatgggcgtctcaaatcactggag

SEQ ID NO: 194578 - DNA, 55 bp, Artificial
  Synthetic oligonucleotide
ggaagtggggtttgggacgcagttttgctatgcccatgaggcacatttggacgag

SEQ ID NO: 194579 - DNA, 55 bp, Artificial
  Synthetic oligonucleotide
ggaatttcgctgccggtaacagctctcaagtgaatgcgtttaacgggtttatcac

SEQ ID NO: 194580 - DNA, 55 bp, Artificial
  Synthetic oligonucleotide
ggacgtgcaagatatgatgctctcccttgttgctaaaggcatagagtgggatttc

SEQ ID NO: 194581 - DNA, 56 bp, Artificial
  Synthetic oligonucleotide
agaaacaatatcatgccctttatcatagaaaacgaacacaaagctttttactatag

SEQ ID NO: 194582 - DNA, 55 bp, Artificial
  Synthetic oligonucleotide
ggagggcgattggcgctttatctaaaatagggcttacacactctttcacgccctc

SEQ ID NO: 194583 - DNA, 55 bp, Artificial
  Synthetic oligonucleotide
ggagtccttcttggagacgcgtagcggtctcttggaggattaagtctccgatagc

SEQ ID NO: 194584 - DNA, 53 bp, Artificial
  Synthetic oligonucleotide
ggagtttgacggactttggaatctacccacccattaatatcctaaactccgct

SEQ ID NO: 194585 - DNA, 55 bp, Artificial
  Synthetic oligonucleotide
ggatgtaaaagctaaactcgtagagtattacctcaaagctcttaatgtcagagtc

SEQ ID NO: 194586 - DNA, 55 bp, Artificial
  Synthetic oligonucleotide
ggcaagggagtcaactccaatgctctaatgcccagcttcacttcgcctaactcag

SEQ ID NO: 194587 - DNA, 55 bp, Artificial
  Synthetic oligonucleotide
gcctgcgcataatcgtacggttcaatcgtcgtttcattatcgtatcgtaccccta

SEQ ID NO: 194588 - DNA, 55 bp, Artificial
  Synthetic oligonucleotide
gcgaaatctttatagctcaaagcgcccacagggcataccgcaatgcattccccac

SEQ ID NO: 194589 - DNA, 55 bp, Artificial
  Synthetic oligonucleotide
gcgactagaacgccttgtgctaccctgctccataaaaggattatggcgttggact

SEQ ID NO: 194590 - DNA, 55 bp, Artificial
  Synthetic oligonucleotide
gcgagcatggtattagcttaccccaataaaacccttttaatggcgcccacttcca

SEQ ID NO: 194591 - DNA, 55 bp, Artificial
  Synthetic oligonucleotide
gcgagtgcggctgttaatgtgggctataagatcagtaagagtttgacagcgagcg

SEQ ID NO: 194592 - DNA, 60 bp, Artificial
  Synthetic oligonucleotide
taatcctttattgagcaataatggtgttaaaatggcgtgtggcaaagactgggcaatgac

SEQ ID NO: 194593 - DNA, 55 bp, Artificial
  Synthetic oligonucleotide
gcgatcattgaaaccttaaaactcgccaaagagcttaaggagccggtgctaatcc

SEQ ID NO: 194594 - DNA, 55 bp, Artificial
  Synthetic oligonucleotide
gcgatcctaaacgccattaaagtgaaatcataggcttcttgagggttgcatgtgc

SEQ ID NO: 194595 - DNA, 55 bp, Artificial
  Synthetic oligonucleotide
gcgatttacgagaaataggggcttccaacgaaatgctcaattttcggcaggtcgt

SEQ ID NO: 194596 - DNA, 55 bp, Artificial
  Synthetic oligonucleotide
gcgattttcagcggcttgatgcgtgtagctgccaataggtcctaggaaagctatc

SEQ ID NO: 194597 - DNA, 55 bp, Artificial
  Synthetic oligonucleotide
gcgcaaagacccttattggaatacccacaccccgccactagattggggctgtagg

SEQ ID NO: 194598 - DNA, 55 bp, Artificial
  Synthetic oligonucleotide
gcgccagtagtccaactagaaacccataaaccaccaatgcccgcaaacattcccc

SEQ ID NO: 194599 - DNA, 55 bp, Artificial
  Synthetic oligonucleotide
gcgcccaaaccagcgtagcctcttgtatcgcccgcgttgatggcacgcctgtagt

SEQ ID NO: 194600 - DNA, 55 bp, Artificial
  Synthetic oligonucleotide
gcgcgatcgcacaaatcccagatgcaagcccgttaaacccgtcaatgatattaat

SEQ ID NO: 194601 - DNA, 55 bp, Artificial
  Synthetic oligonucleotide
gcgcgcatgataagtggctcaaagctagataaacacgccctaagctatgcagaaa

SEQ ID NO: 194602 - DNA, 55 bp, Artificial
  Synthetic oligonucleotide
gcgcgcatttggcgtaattcgtataaatccttagccgaattcctgtttatagcga

SEQ ID NO: 194603 - DNA, 60 bp, Artificial
  Synthetic oligonucleotide
agcttgacactgatataatccttgccttgtctagtaatctcataattactcgcttgtaaa

SEQ ID NO: 194604 - DNA, 55 bp, Artificial
  Synthetic oligonucleotide
gcggatcgcccaagcattaaaacgaggcaacttactccatcggatcgcataattt

SEQ ID NO: 194605 - DNA, 55 bp, Artificial
  Synthetic oligonucleotide
gcggatttgatcaaagggacggtgagagtcgtgtttgctcagacgccgaaactgc

SEQ ID NO: 194606 - DNA, 51 bp, Artificial
  Synthetic oligonucleotide
gcggggagcgtaaaacggtgtaacgcttattcttagtcggtaaagggatag

SEQ ID NO: 194607 - DNA, 55 bp, Artificial
  Synthetic oligonucleotide
gcggtgtgataatggggagtaacagcgtctatgcaggttttacaggtacagccct

SEQ ID NO: 194608 - DNA, 55 bp, Artificial
  Synthetic oligonucleotide
gcgtacctattaccatcgcttcatcccactacctagtgaggtcctgcatgcagtc

SEQ ID NO: 194609 - DNA, 55 bp, Artificial
  Synthetic oligonucleotide
gcgtatggaccttcttatatggacgttcatgcacagattccagcttattggacta

SEQ ID NO: 194610 - DNA, 55 bp, Artificial
  Synthetic oligonucleotide
gcgtcattagcgttgcggatcgcttgacccaaattcgcgctttgactccttaagc

SEQ ID NO: 194611 - DNA, 55 bp, Artificial
  Synthetic oligonucleotide
gcgtgcatatcccgtcgttccgagtgtgttctcgacaccccatagcggtaatatt

SEQ ID NO: 194612 - DNA, 55 bp, Artificial
  Synthetic oligonucleotide
gcgtggggattttagcgacaatccttctagccatagtctggtaatcttcttcggt

SEQ ID NO: 194613 - DNA, 55 bp, Artificial
  Synthetic oligonucleotide
gcgtgtcttgggctttagtgagcgcaaaacctaccggcataagctgactcatcag

SEQ ID NO: 194614 - DNA, 55 bp, Artificial
  Synthetic oligonucleotide
taaaaagatcctcgatttaatcctcgaagtagaggaacggttcacaaccatagac

SEQ ID NO: 194615 - DNA, 60 bp, Artificial
  Synthetic oligonucleotide
taattgcgtctcgtgttcttgcataaaggttgtgtaggattgttctaactcttgcttgag

SEQ ID NO: 194616 - DNA, 55 bp, Artificial
  Synthetic oligonucleotide
ggggtccaaagtcgcgcgtccaagtgtcgttgcactccaccaagacaatttgcac

SEQ ID NO: 194617 - DNA, 55 bp, Artificial
  Synthetic oligonucleotide
ggggtgcgtgactctattgagtgagccatacttaagcggtctagtttagtgagat

SEQ ID NO: 194618 - DNA, 55 bp, Artificial
  Synthetic oligonucleotide
ggggtgtcctacaccgaaatcactaacaaattagacggagtgcctgatagcgctc

SEQ ID NO: 194619 - DNA, 55 bp, Artificial
  Synthetic oligonucleotide
ggggtgttaggaggcatagcgggcggtttaggctctttgatcgtgggagccttgc

SEQ ID NO: 194620 - DNA, 55 bp, Artificial
  Synthetic oligonucleotide
gggtagcaacctattttgaacattccaacgaagcgactgccgttttggtgcacac

SEQ ID NO: 194621 - DNA, 53 bp, Artificial
  Synthetic oligonucleotide
gggtataacaaaatttaactccaaactccccttgtctgtgtgttctacccata

SEQ ID NO: 194622 - DNA, 55 bp, Artificial
  Synthetic oligonucleotide
gggtgcaagacaatggaggggtatgctaaaacgcatggagcacccctaggcgagg

SEQ ID NO: 194623 - DNA, 54 bp, Artificial
  Synthetic oligonucleotide
gggtttgttagggcgtttgacttatgggcctagggctaatgaacaagtcctatc

SEQ ID NO: 194624 - DNA, 55 bp, Artificial
  Synthetic oligonucleotide
ggtaacgattacctatgctctcttgcgtagaagccccactagaaataagtccttg

SEQ ID NO: 194625 - DNA, 55 bp, Artificial
  Synthetic oligonucleotide
ggtagggaatatcttatgcgcttgcattgcaccctagaagaattacaatgcgtgc

SEQ ID NO: 194626 - DNA, 60 bp, Artificial
  Synthetic oligonucleotide
agctccttgtgttaaacaacattgtagtcccattatatctaaaactcagtcaatctatgc

SEQ ID NO: 194627 - DNA, 55 bp, Artificial
  Synthetic oligonucleotide
ggtcccgcaagtcagttcaatcaatataggagagcatagcgagttattacggccc

SEQ ID NO: 194628 - DNA, 55 bp, Artificial
  Synthetic oligonucleotide
ggtgacatatggggacataaattaaggttctctcatactgtgggaggaagcgtcg

SEQ ID NO: 194629 - DNA, 55 bp, Artificial
  Synthetic oligonucleotide
ggtgcaacttatgcgagtatgaaagattctaaatctgcagcgattttggagaatc

SEQ ID NO: 194630 - DNA, 55 bp, Artificial
  Synthetic oligonucleotide
ggtgcttattggtggcattaaatcccttatggctagctaaactcctagcttacgg

SEQ ID NO: 194631 - DNA, 55 bp, Artificial
  Synthetic oligonucleotide
ggtggcaaccaaaacgcatgcgggcacggttaccctataagccggccctgcaata

SEQ ID NO: 194632 - DNA, 55 bp, Artificial
  Synthetic oligonucleotide
ggtgtgctctgtctgtgggcacaacccaaaagctatcttttagggatagggcgaa

SEQ ID NO: 194633 - DNA, 52 bp, Artificial
  Synthetic oligonucleotide
ggtgtttagccgtaaagccatttcggtgtctatcaaccaaacgaatttaccg

SEQ ID NO: 194634 - DNA, 55 bp, Artificial
  Synthetic oligonucleotide
ggttaagctcttgtccgtagaagttgctaacatcttggacctctttggctacgcg

SEQ ID NO: 194635 - DNA, 55 bp, Artificial
  Synthetic oligonucleotide
ggttttacaaagcgcggggcacagtgtagaggtgctaggcattgccaaggcgaag

SEQ ID NO: 194636 - DNA, 55 bp, Artificial
  Synthetic oligonucleotide
gtaaggcggtttagattcggtaaagcggcattaatttggactagatttgagcgac

SEQ ID NO: 194637 - DNA, 59 bp, Artificial
  Synthetic oligonucleotide
agcgttagcaagcctagacaaaagcgcatcgcagtttgaaatcgtaggcgttagccgga

SEQ ID NO: 194638 - DNA, 52 bp, Artificial
  Synthetic oligonucleotide
gtacaaaggtaacggtgcacttaaacccgtttgtagagtcggttattatctc

SEQ ID NO: 194639 - DNA, 53 bp, Artificial
  Synthetic oligonucleotide
gtagtaaaatcctttcaatcgtttggctttagattcgttgggtaacttgacac

SEQ ID NO: 194640 - DNA, 55 bp, Artificial
  Synthetic oligonucleotide
gtagtgcgtgatgaggcaaaagctcacgcaaagcttaagaatctaaacgccactg

SEQ ID NO: 194641 - DNA, 55 bp, Artificial
  Synthetic oligonucleotide
gtatcaaacgcaagcgacaactcaaagcgggagcaatggtgggaacagcatcacc

SEQ ID NO: 194642 - DNA, 55 bp, Artificial
  Synthetic oligonucleotide
ggcaagtgtattgccgccgcgttatcattggtgtaatatggcgtctttggggcgt

SEQ ID NO: 194643 - DNA, 55 bp, Artificial
  Synthetic oligonucleotide
ggccctccacgcacttgcgaagtgtaagtggaagtcttagtgccatagcccccac

SEQ ID NO: 194644 - DNA, 55 bp, Artificial
  Synthetic oligonucleotide
ggcctcaccgatttgatagcctacgcttgtgtaaaagccgtcgtcttcagcgctc

SEQ ID NO: 194645 - DNA, 55 bp, Artificial
  Synthetic oligonucleotide
ggcgcatcataactccgctatggagggtaatagcttgactttgggcgatacgata

SEQ ID NO: 194646 - DNA, 55 bp, Artificial
  Synthetic oligonucleotide
ggcgcgcccattggagaggtcaatcaaggcgtggatttgttctaccaagccgtga

SEQ ID NO: 194647 - DNA, 55 bp, Artificial
  Synthetic oligonucleotide
ggcggagccacgctcactaccatgattaagggcgtagaaaattaccccatttctt

SEQ ID NO: 194648 - DNA, 55 bp, Artificial
  Synthetic oligonucleotide
tacctcctaacgaggtgtcgccctctctatcctccaacccactaactcaacaaag

SEQ ID NO: 194649 - DNA, 55 bp, Artificial
  Synthetic oligonucleotide
ggcgtcattcttggcgatataggcattaacgctcattcttacgctcgatcttatg

SEQ ID NO: 194650 - DNA, 55 bp, Artificial
  Synthetic oligonucleotide
ggctagattttgcagtagcgtggggagctatgagcctttcgcctactcgttgctc

SEQ ID NO: 194651 - DNA, 55 bp, Artificial
  Synthetic oligonucleotide
ggctgtatcacccaagaaggcatcgctaaaactttcaatctagcgttcaaatcgc

SEQ ID NO: 194652 - DNA, 55 bp, Artificial
  Synthetic oligonucleotide
ggcttaggggatttagccattaggattggctatcaaagttataggggcgatgtgc

SEQ ID NO: 194653 - DNA, 55 bp, Artificial
  Synthetic oligonucleotide
ggctttattagagccaagcgtgatgtatcttaccgaaaggtatcaatactcccgt

SEQ ID NO: 194654 - DNA, 53 bp, Artificial
  Synthetic oligonucleotide
gggaacttcttacgagtgataagggaacttcttacgagtgataagggaacttc

SEQ ID NO: 194655 - DNA, 55 bp, Artificial
  Synthetic oligonucleotide
gggaatctctgtagcgcttggagcatctatgagcggcacaaaagcaatgactgca

SEQ ID NO: 194656 - DNA, 55 bp, Artificial
  Synthetic oligonucleotide
gggagtgtaggcactagctggatagtagtttgggaaaagcccgttccactcaccc

SEQ ID NO: 194657 - DNA, 55 bp, Artificial
  Synthetic oligonucleotide
gggccactaaaggcagtctgtagcttgggttttcaatcaagccggctaaatgcat

SEQ ID NO: 194658 - DNA, 55 bp, Artificial
  Synthetic oligonucleotide
gggcgaatcgcgccctcacttcagtaacccgagtagagccattagtaaccactaa

SEQ ID NO: 194659 - DNA, 58 bp, Artificial
  Synthetic oligonucleotide
cggggttgaaaataacaccactggaaactattgtacctgagaatgcacagacattgat

SEQ ID NO: 194660 - DNA, 55 bp, Artificial
  Synthetic oligonucleotide
gggcttaatgggcggattgataagcaagcggatcagatcaaagacttagagggca

SEQ ID NO: 194661 - DNA, 55 bp, Artificial
  Synthetic oligonucleotide
gggcttagtggcggacattttcattcgccctcaccagatgcgaacaacattgcgc

SEQ ID NO: 194662 - DNA, 55 bp, Artificial
  Synthetic oligonucleotide
gggcttatggaatcctatacgatcaagaagtgcctatcagcgatagtgaggtggc

SEQ ID NO: 194663 - DNA, 55 bp, Artificial
  Synthetic oligonucleotide
ggggaacttaactgccacaaatggaggtactgctactttggtgctacgaaacacc

SEQ ID NO: 194664 - DNA, 55 bp, Artificial
  Synthetic oligonucleotide
ggggcaactattctaaaacagcccatatcctagaggtgagtcgagcctatgtagg

SEQ ID NO: 194665 - DNA, 54 bp, Artificial
  Synthetic oligonucleotide
ggggcgattttctttatagcgtttagtgaaatcgtccctttctaacattctagc

SEQ ID NO: 194666 - DNA, 55 bp, Artificial
  Synthetic oligonucleotide
ggggcgcgaatcatccccatcatagacctgccaataggagcgctgggtgtaggcg

SEQ ID NO: 194667 - DNA, 55 bp, Artificial
  Synthetic oligonucleotide
ggggcgggcaatatgaagcccttgcacatccatgagcgcagcggttacatcgtgc

SEQ ID NO: 194668 - DNA, 55 bp, Artificial
  Synthetic oligonucleotide
ggggcttactttaacctggctctcgcgctttgtaactaacatgtattacgagggc

SEQ ID NO: 194669 - DNA, 55 bp, Artificial
  Synthetic oligonucleotide
ccacaccatcacgaatgaacccatcaaggaatttgcagaatacatcggcaaaacg

SEQ ID NO: 194670 - DNA, 59 bp, Artificial
  Synthetic oligonucleotide
tactcataaaatgttataacgcccttgcatttcttgtgtgagtaaagcattttcaaagc

SEQ ID NO: 194671 - DNA, 55 bp, Artificial
  Synthetic oligonucleotide
acctagccatacctttaacacatcaagactaggtgccataacttgtgaagcaagc

SEQ ID NO: 194672 - DNA, 55 bp, Artificial
  Synthetic oligonucleotide
ccactgaagtctacattgaattgcaatgtcggaagagacaaggcatagcgtaaga

SEQ ID NO: 194673 - DNA, 55 bp, Artificial
  Synthetic oligonucleotide
ccactttatgagcgtctagtagatgaagctcaacccctaaaatgcaccttaagcc

SEQ ID NO: 194674 - DNA, 55 bp, Artificial
  Synthetic oligonucleotide
ccagccgttacgatcaaaccttcaccggctaaggcttcagtagcaggacccacgc

SEQ ID NO: 194675 - DNA, 55 bp, Artificial
  Synthetic oligonucleotide
ccagtactgccaaagcccgcatgccataggtgtaaatagcggattagacgcgctg

SEQ ID NO: 194676 - DNA, 55 bp, Artificial
  Synthetic oligonucleotide
acatggaatgccgcttaatggaaatagagaggagcttaatacgcgtggttgtatc

SEQ ID NO: 194677 - DNA, 55 bp, Artificial
  Synthetic oligonucleotide
ccatgtgcctttaggggcggtttctcaactcatccaagtggaatcgttagtccgg

SEQ ID NO: 194678 - DNA, 55 bp, Artificial
  Synthetic oligonucleotide
ccatttcttatgtcttaggcactaacattttagggcttattggggtggctatcgg

SEQ ID NO: 194679 - DNA, 55 bp, Artificial
  Synthetic oligonucleotide
cccaagatgctagcccacggggtaagctagataactatttgcgtgatctctcagg

SEQ ID NO: 194680 - DNA, 55 bp, Artificial
  Synthetic oligonucleotide
cccaggggctaagaatctaagaattgatgaggatactttaggcagagtctatgag

SEQ ID NO: 194681 - DNA, 57 bp, Artificial
  Synthetic oligonucleotide
tactcgcttgtaaaagctctattatttctgcccttgaatttaacaagccttgtgtta

SEQ ID NO: 194682 - DNA, 55 bp, Artificial
  Synthetic oligonucleotide
cccataagcccactctcgcggcgctgagcaatggccactccactttgtctattta

SEQ ID NO: 194683 - DNA, 52 bp, Artificial
  Synthetic oligonucleotide
acaatatagagggtttagttggaaaattttaggtcgttggacggatagccca

SEQ ID NO: 194684 - DNA, 55 bp, Artificial
  Synthetic oligonucleotide
ccccaataacacatgcggatcgccaaaatcgcctaaggttacaagcgtagcctta

SEQ ID NO: 194685 - DNA, 55 bp, Artificial
  Synthetic oligonucleotide
ccccacatagcctaaaacatgcgaagctaaagcgttattagggtagtagcgcttg

SEQ ID NO: 194686 - DNA, 55 bp, Artificial
  Synthetic oligonucleotide
ccccaccttacaaagcgtgatctggtttgggagagacgataacacgcctattggc

SEQ ID NO: 194687 - DNA, 55 bp, Artificial
  Synthetic oligonucleotide
catacacattctgcaaacccataggcaccatttgcattttgtgcgacgcaccaag

SEQ ID NO: 194688 - DNA, 53 bp, Artificial
  Synthetic oligonucleotide
catacccgtccttaaaataccccacacgattattagtccaagtgttacccgca

SEQ ID NO: 194689 - DNA, 55 bp, Artificial
  Synthetic oligonucleotide
catacgctagggcgagaagttttagcattgactatcacagcaatagattgctcta

SEQ ID NO: 194690 - DNA, 55 bp, Artificial
  Synthetic oligonucleotide
catacgtcattaacaaggggtacaactctccccttgatcgaggacgaccgaaagc

SEQ ID NO: 194691 - DNA, 55 bp, Artificial
  Synthetic oligonucleotide
catatcacgctttatagcgattcgcaatacgtgtgccaagcgatcaatgtgtggc

SEQ ID NO: 194692 - DNA, 60 bp, Artificial
  Synthetic oligonucleotide
tagaagctaatttgttagccaatctaactaatttagtatctaaaagagcatctcacttga

SEQ ID NO: 194693 - DNA, 55 bp, Artificial
  Synthetic oligonucleotide
catctgagatgcgtttagttcttggtgagtgtatggctactgttggcgctgtagg

SEQ ID NO: 194694 - DNA, 55 bp, Artificial
  Synthetic oligonucleotide
cattcgctccaaacaataaggctaactgccctatcatagagccttgagtaaccca

SEQ ID NO: 194695 - DNA, 55 bp, Artificial
  Synthetic oligonucleotide
ccaaaatgcatcgggaatcggttactatattgaatcagcaagggcttaatgccct

SEQ ID NO: 194696 - DNA, 55 bp, Artificial
  Synthetic oligonucleotide
ccaaactatagaatacttagaagtccaactcaacgatagctaccactacctgctc

SEQ ID NO: 194697 - DNA, 53 bp, Artificial
  Synthetic oligonucleotide
ccaaagcgggtcagcgtttcgctaaagtacgaataggtgcctccgaacaaccc

SEQ ID NO: 194698 - DNA, 55 bp, Artificial
  Synthetic oligonucleotide
ccaaattagtggaggcatcgtattttaacgcgctctcaggactagccccaaagag

SEQ ID NO: 194699 - DNA, 55 bp, Artificial
  Synthetic oligonucleotide
ccaaccctaacaaggattaagagcgtttcttcatcgtgcgtagcgtagaagcagc

SEQ ID NO: 194700 - DNA, 55 bp, Artificial
  Synthetic oligonucleotide
accttgcgatcaaatctcccacttcttaatagcgcctcatctaacacctcgacct

SEQ ID NO: 194701 - DNA, 55 bp, Artificial
  Synthetic oligonucleotide
ccaagtggtaaatcctatgcaccctactcacacccttagccactaaagcggctaa

SEQ ID NO: 194702 - DNA, 55 bp, Artificial
  Synthetic oligonucleotide
ccaatagcgtcattagcgttgcggatcgcttgacccaaattcgcgctttgactcc

SEQ ID NO: 194703 - DNA, 58 bp, Artificial
  Synthetic oligonucleotide
agcccttaggctatgagctgattctctcccccgtcccctattatgtgacctattataa

SEQ ID NO: 194704 - DNA, 55 bp, Artificial
  Synthetic oligonucleotide
ccaatcgcacacaatcccaatccccttaggtgtggcttgtaatctacggcttaac

SEQ ID NO: 194705 - DNA, 55 bp, Artificial
  Synthetic oligonucleotide
ccaatctaatctctactaaaaccgcctagcgagctttagcgagcattcaagcggt

SEQ ID NO: 194706 - DNA, 55 bp, Artificial
  Synthetic oligonucleotide
aatacccctagagttaccgctctatggggtttggctatcgctacgatcatatcgt

SEQ ID NO: 194707 - DNA, 53 bp, Artificial
  Synthetic oligonucleotide
ccgcccctttctaaagcaaggagcttcctaatttaaggcgttcccattgaata

SEQ ID NO: 194708 - DNA, 55 bp, Artificial
  Synthetic oligonucleotide
ccgcctttgttcgccgtgctgagttcctctaaactaacgccgcatttacgtgcaa

SEQ ID NO: 194709 - DNA, 55 bp, Artificial
  Synthetic oligonucleotide
ccgctaactgaactcaaagacaaaaccctagcttaccccactgatccgctagatg

SEQ ID NO: 194710 - DNA, 54 bp, Artificial
  Synthetic oligonucleotide
ccgcttaaatgtccgctcgcttatcccttacttgcttttaggggtgttgctttg

SEQ ID NO: 194711 - DNA, 55 bp, Artificial
  Synthetic oligonucleotide
ccgcttagcctgtgaaacccgcttgaaacattgtatcgaaccactaccgcagggc

SEQ ID NO: 194712 - DNA, 55 bp, Artificial
  Synthetic oligonucleotide
ccggggtctattattttgagcgcggaaatgatgttaaggcatatgggttgggtgg

SEQ ID NO: 194713 - DNA, 55 bp, Artificial
  Synthetic oligonucleotide
ccggtatcaattcctaaagggcatagcatagagcacatatgacacaccgcgcaag

SEQ ID NO: 194714 - DNA, 60 bp, Artificial
  Synthetic oligonucleotide
tagaatttcaaagagtgagaggtaaatacgctaaaacgctctatcgcttgctcaagcaat

SEQ ID NO: 194715 - DNA, 55 bp, Artificial
  Synthetic oligonucleotide
ccgttggcacaggtgtgggaccaacggcatttatggtaatgccaaactcgcttag

SEQ ID NO: 194716 - DNA, 54 bp, Artificial
  Synthetic oligonucleotide
cctaaaacatccttcggggttaagttatatgcagccattttatcgggacggagc

SEQ ID NO: 194717 - DNA, 55 bp, Artificial
  Synthetic oligonucleotide
cctaaagacattgcctatagcgtagcgtttgaagggcatgcctaatatttggtgg

SEQ ID NO: 194718 - DNA, 55 bp, Artificial
  Synthetic oligonucleotide
cctaaccacgcgattaagcccagctgctcctacaaagtcttcacgcataagcttt

SEQ ID NO: 194719 - DNA, 54 bp, Artificial
  Synthetic oligonucleotide
cctaagctccgttttagcgatggttgttgagccgattagtgccccgtttaaagc

SEQ ID NO: 194720 - DNA, 55 bp, Artificial
  Synthetic oligonucleotide
cctagttacccaaggcaacgagtttatctatgccaaatatggcgatacaaccgct

SEQ ID NO: 194721 - DNA, 55 bp, Artificial
  Synthetic oligonucleotide
cctcaacgcttttcaaaatcaatcctagggtcaatcaccacacagagcaaatcgc

SEQ ID NO: 194722 - DNA, 55 bp, Artificial
  Synthetic oligonucleotide
cctctttgacgcactcgctgatttcaaacttgcccttaccatcactcacccatgc

SEQ ID NO: 194723 - DNA, 55 bp, Artificial
  Synthetic oligonucleotide
ccccattgatattgctcccatgatgactaatcccatgaggaaacttaaaggcatc

SEQ ID NO: 194724 - DNA, 55 bp, Artificial
  Synthetic oligonucleotide
ccccgataagatggatgtccccgtttgcttcggccacaggtataatagtgtccgg

SEQ ID NO: 194725 - DNA, 59 bp, Artificial
  Synthetic oligonucleotide
gaattccaaagggtgaggggcaaatacgccaagacgctctatcgcttactcaagcaata

SEQ ID NO: 194726 - DNA, 58 bp, Artificial
  Synthetic oligonucleotide
gcggtatttcctatgtgcgacaaaatttggagcaattagcttgacttggttgagttag

SEQ ID NO: 194727 - DNA, 55 bp, Artificial
  Synthetic oligonucleotide
ccccgccatcaatgaaagcgtggcttactgcgtttcgcacttcttcaaagctccc

SEQ ID NO: 194728 - DNA, 55 bp, Artificial
  Synthetic oligonucleotide
ccccgggaaaacgacgcacagcgtttaacatgtgtgccatagtgagctccacagc

SEQ ID NO: 194729 - DNA, 55 bp, Artificial
  Synthetic oligonucleotide
ccccgtttgagcgtcatctctaatcacaggcccaatagcccaagcgagcgttaag

SEQ ID NO: 194730 - DNA, 55 bp, Artificial
  Synthetic oligonucleotide
ccccttcaatttcatatctctcctcaacagagtcataccgcattatcgcgtcacg

SEQ ID NO: 194731 - DNA, 54 bp, Artificial
  Synthetic oligonucleotide
cccctttaaagcgagcaagacctttgccccgctttgttggcgcacgatttctaa

SEQ ID NO: 194732 - DNA, 55 bp, Artificial
  Synthetic oligonucleotide
cccgaaataggatcatacgcgctcgccatcgtaagccccatagaaaagctgatgc

SEQ ID NO: 194733 - DNA, 55 bp, Artificial
  Synthetic oligonucleotide
cccgatggcacgataaagcaaggtcgccacgacactagaatccaccccgccactc

SEQ ID NO: 194734 - DNA, 55 bp, Artificial
  Synthetic oligonucleotide
cccgcacccataaagaacccattcacttcgccagcaagtgctaaactcgtgctca

SEQ ID NO: 194735 - DNA, 55 bp, Artificial
  Synthetic oligonucleotide
cccgcataccctaaaggttacaagcaccacataaaggatcataactgccacttga

SEQ ID NO: 194736 - DNA, 55 bp, Artificial
  Synthetic oligonucleotide
cccgcgcattgccctctcacaaatcaacacccattacattaaggacatgagctac

SEQ ID NO: 194737 - DNA, 59 bp, Artificial
  Synthetic oligonucleotide
agcattcaagcggttttagaccgattgtttgctgacaagcaaacaccaacaagcgaagc

SEQ ID NO: 194738 - DNA, 55 bp, Artificial
  Synthetic oligonucleotide
ccctaatattcaaagaaccacatccatagacgaagggttgttgtaagcgttttga

SEQ ID NO: 194739 - DNA, 55 bp, Artificial
  Synthetic oligonucleotide
aatcaaacggaagccgagctgtgcaaattccacataaataccgcttatcaatccc

SEQ ID NO: 194740 - DNA, 53 bp, Artificial
  Synthetic oligonucleotide
ccctcggatacggtgtaactcttttaagaacggttgtgcccgcttgcttccga

SEQ ID NO: 194741 - DNA, 55 bp, Artificial
  Synthetic oligonucleotide
ccctgtattcaagcgatcttctttagatcttgcactcgtaggcacacatacaacc

SEQ ID NO: 194742 - DNA, 55 bp, Artificial
  Synthetic oligonucleotide
cccttcgtttagcgtgccttgcaataagggttgcaccactttagagatagcaaac

SEQ ID NO: 194743 - DNA, 55 bp, Artificial
  Synthetic oligonucleotide
ccgagttccataatcccctcactatccaaacagcacggtacgactctgccgtcgg

SEQ ID NO: 194744 - DNA, 55 bp, Artificial
  Synthetic oligonucleotide
agatctctttctcgttctgtaagttctctacttcgctgattaaagcgctctgcaa

SEQ ID NO: 194745 - DNA, 55 bp, Artificial
  Synthetic oligonucleotide
atgctagcggcggagagtgaagcgccctgccgtaatgctagcggcggagagtgaa

SEQ ID NO: 194746 - DNA, 55 bp, Artificial
  Synthetic oligonucleotide
atggagggtaaggatgatttgccccggcacgcccggagagagcaacgcgaacgga

SEQ ID NO: 194747 - DNA, 55 bp, Artificial
  Synthetic oligonucleotide
atggcgcttgcacacctcaacccctaaattcacatgatctctcccaagctcttgg

SEQ ID NO: 194748 - DNA, 57 bp, Artificial
  Synthetic oligonucleotide
ccataagccaacccaaactatagaatacttagaagtccaactcaacgatagctacca

SEQ ID NO: 194749 - DNA, 55 bp, Artificial
  Synthetic oligonucleotide
atggcttgggaatttcgctgccggtaacagctctcaagtgaatgcgtttaacggg

SEQ ID NO: 194750 - DNA, 55 bp, Artificial
  Synthetic oligonucleotide
agagtgaggcttggggatatatgcgaatttggcaacggagaagcttatgaaaccc

SEQ ID NO: 194751 - DNA, 55 bp, Artificial
  Synthetic oligonucleotide
atgtttaaggcgaaacatcaaagatcctaaattggctgacattgctattgagggg

SEQ ID NO: 194752 - DNA, 55 bp, Artificial
  Synthetic oligonucleotide
attacagtccatttcataggcgataatgtggcttagtgtcgttttgccaagcccg

SEQ ID NO: 194753 - DNA, 55 bp, Artificial
  Synthetic oligonucleotide
attccctagcgttttcatctatgaccccataaagtccctcacccacgatcctgtg

SEQ ID NO: 194754 - DNA, 55 bp, Artificial
  Synthetic oligonucleotide
attcgttacgagtgagacccaaccacctatccacgcaccggtttgtgcggcgttc

SEQ ID NO: 194755 - DNA, 55 bp, Artificial
  Synthetic oligonucleotide
attgcgttaattgcgtctcgtgttcttgcataaaggttgtgtaggattgttctag

SEQ ID NO: 194756 - DNA, 55 bp, Artificial
  Synthetic oligonucleotide
agagcatggcgggctagattgtgggctaaactttctctagtgtgtgggggcgcgt

SEQ ID NO: 194757 - DNA, 55 bp, Artificial
  Synthetic oligonucleotide
atttagacgctcattacgacactattgcaacacgatgcgatcaaggagacacccc

SEQ ID NO: 194758 - DNA, 55 bp, Artificial
  Synthetic oligonucleotide
atttagcgaccatgtgcctttaggggcggtttctcagctcattcaagtgggagcg

SEQ ID NO: 194759 - DNA, 60 bp, Artificial
  Synthetic oligonucleotide
tagcgagcgttagcgagcattcaagcggttttgcacctatttgtttgctgtcaagcaaac

SEQ ID NO: 194760 - DNA, 55 bp, Artificial
  Synthetic oligonucleotide
agagcaggggggctgagtctagcgtactttgggattgagacggggaataatgaac

SEQ ID NO: 194761 - DNA, 55 bp, Artificial
  Synthetic oligonucleotide
agagacagcatgaacgacaccttattaaacgcttatagcgggattaagacccacc

SEQ ID NO: 194762 - DNA, 55 bp, Artificial
  Synthetic oligonucleotide
caaataacccgctcctataaacacgccattactatccatcgccaatagcgtattc

SEQ ID NO: 194763 - DNA, 55 bp, Artificial
  Synthetic oligonucleotide
aggctatttcgtggggtttgagcaggtatgcgaataaaacggtgtggcttgtgtt

SEQ ID NO: 194764 - DNA, 55 bp, Artificial
  Synthetic oligonucleotide
agtgcagacacgaaagattacagcggtttgtaaagttccatatagcaatgctccc

SEQ ID NO: 194765 - DNA, 55 bp, Artificial
  Synthetic oligonucleotide
aggcaacccttatctcatcgctcaacttttggcactcggaggggattcttcagtg

SEQ ID NO: 194766 - DNA, 53 bp, Artificial
  Synthetic oligonucleotide
aggattttattcggtgggattgtcagcgttaagccttatcgttccttttagcg

SEQ ID NO: 194767 - DNA, 55 bp, Artificial
  Synthetic oligonucleotide
aggacctgcgagcgccgatagagttgactatcctgactacgcccacgagctctgc

SEQ ID NO: 194768 - DNA, 55 bp, Artificial
  Synthetic oligonucleotide
agtttggctttcactttgtgtccctataattggattttacagagcttgagcgtcc

SEQ ID NO: 194769 - DNA, 55 bp, Artificial
  Synthetic oligonucleotide
ataaaagagagactgagccacactatgacacctgtaagcagtgagataagtgcct

SEQ ID NO: 194770 - DNA, 60 bp, Artificial
  Synthetic oligonucleotide
gaaattgaatgacaatcggatctgtgtttcagtccaagatgtggataagcctgagaaact

SEQ ID NO: 194771 - DNA, 55 bp, Artificial
  Synthetic oligonucleotide
ataaagcgcgggagatttactacagcctccttggaatcttcttgacctacggacg

SEQ ID NO: 194772 - DNA, 55 bp, Artificial
  Synthetic oligonucleotide
agccgcgctcgcttcattggctaaagtgccactagtccaacgccataaagtcccc

SEQ ID NO: 194773 - DNA, 55 bp, Artificial
  Synthetic oligonucleotide
agccgattctagtgatgaagcgcaactaggcgaacttaaagtgttgggcgaactc

SEQ ID NO: 194774 - DNA, 55 bp, Artificial
  Synthetic oligonucleotide
agcccctaatgcatgcattgcgccttgcgatgctttgatcactgaatgcgctttt

SEQ ID NO: 194775 - DNA, 55 bp, Artificial
  Synthetic oligonucleotide
atcacctaccacaataacgctaataaggtcaatctagggaaattgagcgaaaggg

SEQ ID NO: 194776 - DNA, 55 bp, Artificial
  Synthetic oligonucleotide
atcatgcgagaatacgataaaagcgtgtttgtagggcatgacgccagggtgcatg

SEQ ID NO: 194777 - DNA, 55 bp, Artificial
  Synthetic oligonucleotide
atccacgaccaacaagcgcccatctagcatggggaacaccacgaccgtatccata

SEQ ID NO: 194778 - DNA, 55 bp, Artificial
  Synthetic oligonucleotide
agattttgccctaacaagccctaacctctattttgcgatacaaactaatgagggc

SEQ ID NO: 194779 - DNA, 55 bp, Artificial
  Synthetic oligonucleotide
atctggtgcgagtgcgaagggtgcggttacttggcttaccaccgagcttttggga

SEQ ID NO: 194780 - DNA, 55 bp, Artificial
  Synthetic oligonucleotide
agatggggttgccgtttgggtgaatgaagacaggtgtaagggttgtgatatttgc

SEQ ID NO: 194781 - DNA, 56 bp, Artificial
  Synthetic oligonucleotide
tagggcttacaatcccaccccctataaaaccgcacaagcgagcgttagcgaagcat

SEQ ID NO: 194782 - DNA, 54 bp, Artificial
  Synthetic oligonucleotide
atgataccgataaaccagctttaaaacgccgtataatgcttaaagacacttggg

SEQ ID NO: 194783 - DNA, 55 bp, Artificial
  Synthetic oligonucleotide
caccaacgctagtggcgaagcgattgtgggcaacccagattctcaaggattgggc

SEQ ID NO: 194784 - DNA, 55 bp, Artificial
  Synthetic oligonucleotide
acttgaccaggatcttacaatggttgtcaacggacgcgaccaggtagaaggactg

SEQ ID NO: 194785 - DNA, 55 bp, Artificial
  Synthetic oligonucleotide
cacccgctcatatcgctcgctcctgcgctcaaagcgctaatgatagggcccatgg

SEQ ID NO: 194786 - DNA, 53 bp, Artificial
  Synthetic oligonucleotide
caccctaattttgtaggtgatagcgttacaacaaggccccaattagttgaaaa

SEQ ID NO: 194787 - DNA, 55 bp, Artificial
  Synthetic oligonucleotide
caccgctattaacacccctgtgtatgcgagtgcaagcggggtagtggggttagcg

SEQ ID NO: 194788 - DNA, 55 bp, Artificial
  Synthetic oligonucleotide
cacgagataacgctacacgccctttaaggagtaacgctatagggttagcctatcc

SEQ ID NO: 194789 - DNA, 55 bp, Artificial
  Synthetic oligonucleotide
cacgaggattaagatgagaagtaagcgcttttatcgtgccacctttaccagcacc

SEQ ID NO: 194790 - DNA, 55 bp, Artificial
  Synthetic oligonucleotide
cacgctaaaggcgttacaccagcccaactggccctatcatggattttgcacacgc

SEQ ID NO: 194791 - DNA, 55 bp, Artificial
  Synthetic oligonucleotide
cacggccgtccgtacacacttacactgaccttgcctccgttaggggtactctatc

SEQ ID NO: 194792 - DNA, 60 bp, Artificial
  Synthetic oligonucleotide
gcagtgatttaaacacgatcagctctttcgtggggtcgaagtattggcgaagcaatggaa

SEQ ID NO: 194793 - DNA, 55 bp, Artificial
  Synthetic oligonucleotide
cactaatcccggcgttacaatgactttacgcccttcatacaaactcgctaaacga

SEQ ID NO: 194794 - DNA, 55 bp, Artificial
  Synthetic oligonucleotide
cactcactggggcatgcgttgtgggattaggcgaattcacttcagcgatcatggg

SEQ ID NO: 194795 - DNA, 55 bp, Artificial
  Synthetic oligonucleotide
cactgagggctacctacgaaaatctgtcgttggcgaacctctctttaaccgagct

SEQ ID NO: 194796 - DNA, 52 bp, Artificial
  Synthetic oligonucleotide
acggataaaccaggccgaaaacttcacggcatagggtttcgggagaagataa

SEQ ID NO: 194797 - DNA, 55 bp, Artificial
  Synthetic oligonucleotide
acgcatgcgggaaaattccgtaacaattaagcgttatttcagggaagtgttgcgc

SEQ ID NO: 194798 - DNA, 55 bp, Artificial
  Synthetic oligonucleotide
cagctctttcgtggggtcgaagtattggcgaagcaatggaagattaacccctcgt

SEQ ID NO: 194799 - DNA, 55 bp, Artificial
  Synthetic oligonucleotide
caggtctcacacatcatatctccaaaggcgtaactttgcgtacttcctacgctag

SEQ ID NO: 194800 - DNA, 55 bp, Artificial
  Synthetic oligonucleotide
acgcaccgcttgggggagttggttgcaagctagcgcgccttatgctatcgctcct

SEQ ID NO: 194801 - DNA, 55 bp, Artificial
  Synthetic oligonucleotide
caaatattggctcttctcccttgcaggcggaatgaacgccgtcctagaagtggtc

SEQ ID NO: 194802 - DNA, 53 bp, Artificial
  Synthetic oligonucleotide
caacacgctataacacccctcaaagagtttggaacaaattaccccgagtttgc

SEQ ID NO: 194803 - DNA, 56 bp, Artificial
  Synthetic oligonucleotide
cgaattaaccaatcttttgcaacgctaccacagcctaactgcaacaagtttagaaa

SEQ ID NO: 194804 - DNA, 55 bp, Artificial
  Synthetic oligonucleotide
caacagctatcggggtcttagttgtgaggtaaaataggtgagtagattaagcccc

SEQ ID NO: 194805 - DNA, 55 bp, Artificial
  Synthetic oligonucleotide
caacccttacacctgtcttcattcacccaaacggcaaccccatctggagcgctca

SEQ ID NO: 194806 - DNA, 55 bp, Artificial
  Synthetic oligonucleotide
caagcaaacactaacaagcgaagcgttagcgagcatagacaaaagcgcatcgcag

SEQ ID NO: 194807 - DNA, 55 bp, Artificial
  Synthetic oligonucleotide
agaagagcgttctgtgcagcgttgaaggcataccggtaaggagtgttggagcgca

SEQ ID NO: 194808 - DNA, 55 bp, Artificial
  Synthetic oligonucleotide
caaggcgctatgaagtttataaagcgaatcttacctatgatagcgacagagtcca

SEQ ID NO: 194809 - DNA, 55 bp, Artificial
  Synthetic oligonucleotide
caaggctaactaatacttgcgttggcggggactgctgtgtgcctaatgcagtgcg

SEQ ID NO: 194810 - DNA, 55 bp, Artificial
  Synthetic oligonucleotide
agaactgtatgccagcatacgcttcacatctgtttgtaccagcgcccacatgttt

SEQ ID NO: 194811 - DNA, 55 bp, Artificial
  Synthetic oligonucleotide
actttgcctatcaacaaactcgcatggcaacaagcccaaatcccttttgtggggc

SEQ ID NO: 194812 - DNA, 55 bp, Artificial
  Synthetic oligonucleotide
caagtctatgagcaataggcgcataaacgactagggtttcttctgagattcggcg

SEQ ID NO: 194813 - DNA, 55 bp, Artificial
  Synthetic oligonucleotide
caagtgcgaatctcccatcactcaacacatttaaagaccttgacccaaatgcacg

SEQ ID NO: 194814 - DNA, 58 bp, Artificial
  Synthetic oligonucleotide
gattacaaaatgcctaatattgacaaatttgtcctaaaaatcgctctcaaagaactca

SEQ ID NO: 194815 - DNA, 55 bp, Artificial
  Synthetic oligonucleotide
caatagggaatgctacccttttgtttgatgtgccgcctagcgcgtttagcccgcc

SEQ ID NO: 194816 - DNA, 55 bp, Artificial
  Synthetic oligonucleotide
caatatgccgcagtagcgtacttcttcctactctaaatctattggcaacttgtcg

SEQ ID NO: 194817 - DNA, 54 bp, Artificial
  Synthetic oligonucleotide
caatctacttccgttcaatcttcggtacaaaataccgtagccgtacctaatatc

SEQ ID NO: 194818 - DNA, 55 bp, Artificial
  Synthetic oligonucleotide
caatctccttagccttgtatttagctccctgtaagtgtgtgatgagttgtttagg

SEQ ID NO: 194819 - DNA, 55 bp, Artificial
  Synthetic oligonucleotide
caatttttagctataataacaacctaaggcggtataacatggttgctaatcctag

SEQ ID NO: 194820 - DNA, 55 bp, Artificial
  Synthetic oligonucleotide
cacaatggggagtgcggatgctgggcagatgaaagccttagccacaggcaatccc

SEQ ID NO: 194821 - DNA, 55 bp, Artificial
  Synthetic oligonucleotide
cacaccgatcacagcgatagaatcatgatctaagatcttaacattctcgtgtttt

SEQ ID NO: 194822 - DNA, 55 bp, Artificial
  Synthetic oligonucleotide
cgcgatctctaaagcggacaatacgagtgataaagtcttatgccctgattgcttg

SEQ ID NO: 194823 - DNA, 55 bp, Artificial
  Synthetic oligonucleotide
cggtcggggcaatatatgctatgttcggttcaaaagaggggatataccataatta

SEQ ID NO: 194824 - DNA, 55 bp, Artificial
  Synthetic oligonucleotide
cgtagggatcaagggtgttgagttctagggtattgcgaccagagtatctcacgcc

SEQ ID NO: 194825 - DNA, 55 bp, Artificial
  Synthetic oligonucleotide
caagggaatacccttattcgttttgaaccgcaagatttaaagcgcatgctaaaca

SEQ ID NO: 194826 - DNA, 55 bp, Artificial
  Synthetic oligonucleotide
aaagcgcatctaactagggcttacaatccaaccacctaacaaaaccgcctagcga

SEQ ID NO: 194827 - DNA, 55 bp, Artificial
  Synthetic oligonucleotide
cgcgatacaagatccaagagccttagtggtaaagattagcgacaggttgcacaac

SEQ ID NO: 194828 - DNA, 52 bp, Artificial
  Synthetic oligonucleotide
aaagacggacagagtaaagacgatttgccagaaaatttacgccccaaaagcg

SEQ ID NO: 194829 - DNA, 55 bp, Artificial
  Synthetic oligonucleotide
cgcctgacccagaatgcgatttggattatatccctaatgcggctagagaaaagca

SEQ ID NO: 194830 - DNA, 55 bp, Artificial
  Synthetic oligonucleotide
cgtctacgacggcaaatatacgtgcactgtatgggatctcttctccggctaaatg

SEQ ID NO: 194831 - DNA, 55 bp, Artificial
  Synthetic oligonucleotide
cgtctctcccaaaccagatcacgctttgtaaggtaggggtaaagccaatgaacca

SEQ ID NO: 194832 - DNA, 55 bp, Artificial
  Synthetic oligonucleotide
cgtgattatcgctatctctttgataatttgggcattctctttggctctctcgctg

SEQ ID NO: 194833 - DNA, 55 bp, Artificial
  Synthetic oligonucleotide
aaacctatgtgaatccacggcacatcccagcttgtatgtggatataccgcacttg

SEQ ID NO: 194834 - DNA, 55 bp, Artificial
  Synthetic oligonucleotide
cgtggtgtgtatagcgtggtatggatagtttggttagtgtgatatcgtggtgtgg

SEQ ID NO: 194835 - DNA, 55 bp, Artificial
  Synthetic oligonucleotide
cgttcgctagattctcaatcgctttcttaacggactgctcgctccctgaataagt

SEQ ID NO: 194836 - DNA, 60 bp, Artificial
  Synthetic oligonucleotide
gaatgacaatcggatctgtgtttcagtccaagatgtggataagcctgagaaactattgaa

SEQ ID NO: 194837 - DNA, 58 bp, Artificial
  Synthetic oligonucleotide
cgacagaaacgagctattaaccaagctagagaaagttacagcagaatttcaaacgcta

SEQ ID NO: 194838 - DNA, 55 bp, Artificial
  Synthetic oligonucleotide
cgtttcccctgtaagagtgtgacaggttgtgtgcattgacgtgctgatgcgcggg

SEQ ID NO: 194839 - DNA, 55 bp, Artificial
  Synthetic oligonucleotide
cgcccatgccatatcacgctttatagcgattcgcaatatgtgtgccaagcgatca

SEQ ID NO: 194840 - DNA, 55 bp, Artificial
  Synthetic oligonucleotide
cgtttctttagtgaggaatcaaagcgtagcctatgaaattttatgcgaaaaccag

SEQ ID NO: 194841 - DNA, 55 bp, Artificial
  Synthetic oligonucleotide
cgccatttactcgctttgagcttgcccttactctcttatgcgaatggctttaaaa

SEQ ID NO: 194842 - DNA, 55 bp, Artificial
  Synthetic oligonucleotide
cgccatctcttgccaaagcgttacagcgtgcaagaaagcgtatttaacctttcgc

SEQ ID NO: 194843 - DNA, 55 bp, Artificial
  Synthetic oligonucleotide
aactctgtcacttcagggtaatcgcttggggcttgcccgcaaatcccgcaatatt

SEQ ID NO: 194844 - DNA, 55 bp, Artificial
  Synthetic oligonucleotide
cgccataatctcgtgattttgcggtgcgaaacctagttcaaaacgcgccttaatc

SEQ ID NO: 194845 - DNA, 55 bp, Artificial
  Synthetic oligonucleotide
ctaagcgttctagctcatcaggttttagcatgttcgccccatcgcttagagcgtt

SEQ ID NO: 194846 - DNA, 55 bp, Artificial
  Synthetic oligonucleotide
cgcattgtagctaaaagccacgagggtgtgaaatctaagccaacacaaggcatta

SEQ ID NO: 194847 - DNA, 54 bp, Artificial
  Synthetic oligonucleotide
ctacacgccctttaaggagtaacgctatagggttagcctatccttgtgaagccc

SEQ ID NO: 194848 - DNA, 60 bp, Artificial
  Synthetic oligonucleotide
gcttcatctcaaagtcgtttcgcagttaccagctttgctatgggtatcgttgcctcgcta

SEQ ID NO: 194849 - DNA, 55 bp, Artificial
  Synthetic oligonucleotide
cgctcgatatgacaagctgttttggactctagaccccaaaccctgcacctatcta

SEQ ID NO: 194850 - DNA, 55 bp, Artificial
  Synthetic oligonucleotide
cgctctaagttgagcttgtgcggaatgaagctgggcttgaaatttagcaatctgt

SEQ ID NO: 194851 - DNA, 55 bp, Artificial
  Synthetic oligonucleotide
cgctgaagtgaattcgcctaagcccacaacgcatgccccagtaagggtcgcaaaa

SEQ ID NO: 194852 - DNA, 55 bp, Artificial
  Synthetic oligonucleotide
cgctgacaaactagcaggtacttgtttcgcgctttcaacccatagattcatggga

SEQ ID NO: 194853 - DNA, 55 bp, Artificial
  Synthetic oligonucleotide
cgctaagagagggtgatttgtcaatctccaaaagatatggggtgagcaaagtgca

SEQ ID NO: 194854 - DNA, 55 bp, Artificial
  Synthetic oligonucleotide
cgcgttactatcattgcaaccggtgctgaaagaaacagcggtggagcgagtttgg

SEQ ID NO: 194855 - DNA, 55 bp, Artificial
  Synthetic oligonucleotide
cgcttgatcgcattcccgctcaaaaccgcatgcgtgcctaacgccatgacagaag

SEQ ID NO: 194856 - DNA, 55 bp, Artificial
  Synthetic oligonucleotide
cgcttgcgatattcctagcgggatcgattctaaaggcagggtggataagagagcg

SEQ ID NO: 194857 - DNA, 55 bp, Artificial
  Synthetic oligonucleotide
cgcttgctctaccatgggctagtcgctaaagaacgcgattcgcataatctcttag

SEQ ID NO: 194858 - DNA, 55 bp, Artificial
  Synthetic oligonucleotide
cgcttttcaaaatcaatcctagggtcaatcaccacgcagagcaaatcgcttatca

SEQ ID NO: 194859 - DNA, 60 bp, Artificial
  Synthetic oligonucleotide
caaggcaacactgagtatataggcactaacaaatagcaatatgttcatacttagcaacag

SEQ ID NO: 194860 - DNA, 55 bp, Artificial
  Synthetic oligonucleotide
cggaacagttaccctataagcggccctgcaagactaatacttaccagtgtgcctg

SEQ ID NO: 194861 - DNA, 55 bp, Artificial
  Synthetic oligonucleotide
cgcgtctagcaagattgccgtgtcctagctctctacgccctacactgcctatcat

SEQ ID NO: 194862 - DNA, 54 bp, Artificial
  Synthetic oligonucleotide
cgcgtaatttagcacctagggttggaattagtatcccgcggaatcttacacaag

SEQ ID NO: 194863 - DNA, 55 bp, Artificial
  Synthetic oligonucleotide
aaagctttataatcgttgggatagccttgcgacattcatctgtatcactcacgcc

SEQ ID NO: 194864 - DNA, 55 bp, Artificial
  Synthetic oligonucleotide
cggatcaatcacttgagcgttagcgacaatttcgcttaaatccacgatcctcgct

SEQ ID NO: 194865 - DNA, 55 bp, Artificial
  Synthetic oligonucleotide
cgcgcttcagccgaagagattcaagatcatgaatgcgcgattttgcgctaaagcg

SEQ ID NO: 194866 - DNA, 55 bp, Artificial
  Synthetic oligonucleotide
cgggactcgcaccactgtacacatcagtaacataaaggtcgtttcctgagagctg

SEQ ID NO: 194867 - DNA, 55 bp, Artificial
  Synthetic oligonucleotide
cggggttttctacctctgcccagccacgatagttagtcgcataatagggcatggc

SEQ ID NO: 194868 - DNA, 55 bp, Artificial
  Synthetic oligonucleotide
cgcgctgagagtacttctcaacaactccaaggtgaggcacaggagagggttattg

SEQ ID NO: 194869 - DNA, 55 bp, Artificial
  Synthetic oligonucleotide
cgcgcacaatttggctaaatccactaaactatggctcgtatcataaaggtgggcg

SEQ ID NO: 194870 - DNA, 60 bp, Artificial
  Synthetic oligonucleotide
cgagcattcaagcggttttgcaccgattgtttgctgacaagcaaacacagataggcgaag

SEQ ID NO: 194871 - DNA, 55 bp, Artificial
  Synthetic oligonucleotide
cgggtgagagtgatcgacattgacaccctcatcgagaacgtaaagacaacgggca

SEQ ID NO: 194872 - DNA, 55 bp, Artificial
  Synthetic oligonucleotide
cggtaagcggcacgaatgacggtgtgagcgtgagtgcgagtgcaggtagccagat

SEQ ID NO: 194873 - DNA, 55 bp, Artificial
  Synthetic oligonucleotide
cgcgcaaccggctccccaagtgttgttagtaaccccttgattaggcaatgtgcca

SEQ ID NO: 194874 - DNA, 55 bp, Artificial
  Synthetic oligonucleotide
cggtacgggtatggagtcttatcaattcaatgcggaaacaccgccgtacagttca

SEQ ID NO: 194875 - DNA, 55 bp, Artificial
  Synthetic oligonucleotide
aagagctgtggtaactctcaaggatctaacctttaatatagtggtgttgcgagta

SEQ ID NO: 194876 - DNA, 55 bp, Artificial
  Synthetic oligonucleotide
cgatcaaactaggcaaaagagtcttgttttggcaatctagcaccatctcttgggg

SEQ ID NO: 194877 - DNA, 55 bp, Artificial
  Synthetic oligonucleotide
cgatagaacccaaaacaacgatttatgagcgtaatatcaggagcggggaagagat

SEQ ID NO: 194878 - DNA, 55 bp, Artificial
  Synthetic oligonucleotide
cgatactaaagcttgcgcttgcgattccatataacacgcctgcatttgcaagttt

SEQ ID NO: 194879 - DNA, 55 bp, Artificial
  Synthetic oligonucleotide
cgagatcatcaatcgtagcgtaaatgggttcagggctatctaatcgccctgctcc

SEQ ID NO: 194880 - DNA, 55 bp, Artificial
  Synthetic oligonucleotide
ctagccgatagaaatgctagccgaagggtgcaagttaggagattggcaaatccgc

SEQ ID NO: 194881 - DNA, 59 bp, Artificial
  Synthetic oligonucleotide
gcatactaatacgatcacacttattatacaccaaaagataaggagtatagagtggaatt

SEQ ID NO: 194882 - DNA, 55 bp, Artificial
  Synthetic oligonucleotide
ctagcgctctctaagctagggcgttcaaacttagagccttcatgcgggttgaata

SEQ ID NO: 194883 - DNA, 55 bp, Artificial
  Synthetic oligonucleotide
ctagtcgccttgagtgtgaaagagcagtatttgcccgcaagcgaaaacgctccct

SEQ ID NO: 194884 - DNA, 55 bp, Artificial
  Synthetic oligonucleotide
ctagtttagcatctaaaagcgcatatgacttcggcttccaatccaaccctactaa

SEQ ID NO: 194885 - DNA, 55 bp, Artificial
  Synthetic oligonucleotide
cgacaacgctttagaaggtgcgcaccggtttatcaagcgcttatgcgacaaagcg

SEQ ID NO: 194886 - DNA, 55 bp, Artificial
  Synthetic oligonucleotide
cgaacatgtttgcctaccatattgattaagcgtgccataaaagtgtggttatggg

SEQ ID NO: 194887 - DNA, 55 bp, Artificial
  Synthetic oligonucleotide
ccttgcttggggccactaaaggcagtctgtagcttgggttttcaatcaagccggc

SEQ ID NO: 194888 - DNA, 55 bp, Artificial
  Synthetic oligonucleotide
ccttgcgttgttgatagcgttggggtcggaggactgcctgatgagggtgtttagg

SEQ ID NO: 194889 - DNA, 55 bp, Artificial
  Synthetic oligonucleotide
ccttatgcaagcaatcgcaagggtaaatcgcgtgtataaggacaagccctctggc

SEQ ID NO: 194890 - DNA, 55 bp, Artificial
  Synthetic oligonucleotide
aagcttgattagaatcgtttgggtttccattctgtcaaggttagaataagcgaac

SEQ ID NO: 194891 - DNA, 55 bp, Artificial
  Synthetic oligonucleotide
aaaacactagagggcaagggagcgttttcgcttgcgggcaaatactgctctttca

SEQ ID NO: 194892 - DNA, 57 bp, Artificial
  Synthetic oligonucleotide
gcttaaacaagttgcagaacgctttaatcaacgaaatagagaacttacagaacgaga

SEQ ID NO: 194893 - DNA, 55 bp, Artificial
  Synthetic oligonucleotide
cctgcttactttgcctttgacacagacgagccctattatcttgcagccgttaggg

SEQ ID NO: 194894 - DNA, 55 bp, Artificial
  Synthetic oligonucleotide
aagagcgcggcgtatttgttccctaaaccagacgaaaccgtgcatctaaagatcc

SEQ ID NO: 194895 - DNA, 55 bp, Artificial
  Synthetic oligonucleotide
ctaccacaacaacgctaataaggtcaatctagggaaattgagcgaaagggaagcc

SEQ ID NO: 194896 - DNA, 55 bp, Artificial
  Synthetic oligonucleotide
cgatgcgaagctctctattgtctatcgctatgagaaaagtctctctcaccgttta

SEQ ID NO: 194897 - DNA, 55 bp, Artificial
  Synthetic oligonucleotide
ctagaagcgaatacatgaatgctatgagagaacaagacgctaacgctttagtcgg

SEQ ID NO: 194898 - DNA, 55 bp, Artificial
  Synthetic oligonucleotide
ctagaagcatcaaaacagacacgggtccaagaggtgcgcaaaatacaaagagccc

SEQ ID NO: 194899 - DNA, 55 bp, Artificial
  Synthetic oligonucleotide
cgcataaaagaattatccagggtgaagtggtaagtaaagccggcgaaaagagcat

SEQ ID NO: 194900 - DNA, 55 bp, Artificial
  Synthetic oligonucleotide
cgcataggtatcactaggcacaagctgcgtatctgctagcttagttagtgcgtcc

SEQ ID NO: 194901 - DNA, 55 bp, Artificial
  Synthetic oligonucleotide
aaaagggcgagctaattacccgtatcactaatgacatcgctttagtacgtgccag

SEQ ID NO: 194902 - DNA, 55 bp, Artificial
  Synthetic oligonucleotide
cgatgtttgctatgattcaaaacttgctagataagaaaatcgcctaccaaacacc

SEQ ID NO: 194903 - DNA, 60 bp, Artificial
  Synthetic oligonucleotide
gatgctctattcataacagtgtcagtgttggtgctgtttaacatagagatgtcaggtata

SEQ ID NO: 194904 - DNA, 54 bp, Artificial
  Synthetic oligonucleotide
acgggcgtgaaagagccttgctcatgcgaaataaagacctgagcgatttgaggg

SEQ ID NO: 194905 - DNA, 54 bp, Artificial
  Synthetic oligonucleotide
acggaaaatagcttggtggagatcgtgcaaaattaccgccacaacgggatagag

SEQ ID NO: 194906 - DNA, 54 bp, Artificial
  Synthetic oligonucleotide
agcgatagctgtaaaaaccgccgtagggtgcgcgtgaaatgcattctgttgcct

SEQ ID NO: 194907 - DNA, 54 bp, Artificial
  Synthetic oligonucleotide
tcgatcagcttcataaatcctaacaccaaccgtccatttagaaaactcgcagat

SEQ ID NO: 194908 - DNA, 50 bp, Artificial
  Synthetic oligonucleotide
ctaaccggtggtgggtcgcgccttacatgggggggtgtcgtagtaaaacc

SEQ ID NO: 194909 - DNA, 54 bp, Artificial
  Synthetic oligonucleotide
taatcgtgtcagccgtggtatggatcgccccagaaaccatcgcatgcgcatagc

SEQ ID NO: 194910 - DNA, 54 bp, Artificial
  Synthetic oligonucleotide
ctcaagcatattgggcacagcattataggcgataggctttatggtggcatgagt

SEQ ID NO: 194911 - DNA, 54 bp, Artificial
  Synthetic oligonucleotide
gctgcgtttaattcaatcttgcgattagaacggaatgcaatcatctcccctgtt

SEQ ID NO: 194912 - DNA, 54 bp, Artificial
  Synthetic oligonucleotide
agagcgtatggatatccgcataggtgatcaagtgataattttgcgaagcgggga

SEQ ID NO: 194913 - DNA, 54 bp, Artificial
  Synthetic oligonucleotide
taagctatcctatcacaatgcgttttggtgtgccacacggcttggcgtgtagct

SEQ ID NO: 194914 - DNA, 56 bp, Artificial
  Synthetic oligonucleotide
caacagtataaaaaaaacgagtgggacatcgtggagtttacgctatcggcggatga

SEQ ID NO: 194915 - DNA, 54 bp, Artificial
  Synthetic oligonucleotide
gctcttttactacccctatgctagaaaatgtcgccttatggcatgaaagggaca

SEQ ID NO: 194916 - DNA, 54 bp, Artificial
  Synthetic oligonucleotide
tcgcctaagggcacgggtaaggcggtgcgtgagacttatcaacaaggtagcggg

SEQ ID NO: 194917 - DNA, 54 bp, Artificial
  Synthetic oligonucleotide
tcgcgcccctttggcgtgccaaaatagattcctccaattagctcacgcaccact

SEQ ID NO: 194918 - DNA, 54 bp, Artificial
  Synthetic oligonucleotide
taagcaatgccccactattccccatgataaagcgtccgggctcacagatggcgg

SEQ ID NO: 194919 - DNA, 54 bp, Artificial
  Synthetic oligonucleotide
taaacccatagccacggtttggaaattcgtataattcaacccgtcagcgttcaa

SEQ ID NO: 194920 - DNA, 54 bp, Artificial
  Synthetic oligonucleotide
tttcaagccaagctagttagccatgacatgaaactctttgtcgtgtgtgctaag

SEQ ID NO: 194921 - DNA, 54 bp, Artificial
  Synthetic oligonucleotide
atgcccttaaattttctcatggggttagtcgtaatgggagcaatatcaatgggg

SEQ ID NO: 194922 - DNA, 54 bp, Artificial
  Synthetic oligonucleotide
atctcaaagccctcttttaatacgggcgcttgtctgaagtgctctaaactgact

SEQ ID NO: 194923 - DNA, 54 bp, Artificial
  Synthetic oligonucleotide
tattgctccaccgtcccaatcacttttcggagtttgttataagaatctaaacgc

SEQ ID NO: 194924 - DNA, 54 bp, Artificial
  Synthetic oligonucleotide
atcgctccccaagtagaatacgctacacttagtggcatactctcaagtgctaaa

SEQ ID NO: 194925 - DNA, 59 bp, Artificial
  Synthetic oligonucleotide
gctgttcttttctttgagtaagatctctttctcgttctgtaagttctctacttcgctga

SEQ ID NO: 194926 - DNA, 54 bp, Artificial
  Synthetic oligonucleotide
taggggctagcatgagtggggttaaatccatgacagcaagttcgggcccgggga

SEQ ID NO: 194927 - DNA, 54 bp, Artificial
  Synthetic oligonucleotide
tcacataactagctccgggcatttgcgtatagccaccactgccaagatacgcac

SEQ ID NO: 194928 - DNA, 54 bp, Artificial
  Synthetic oligonucleotide
agcaagctcaactccatcagcgacaaagactttgaactccatgaagtgcctatc

SEQ ID NO: 194929 - DNA, 54 bp, Artificial
  Synthetic oligonucleotide
taggcaacgctccttggaaagactcccgcatagaatctgacgctcacacccgta

SEQ ID NO: 194930 - DNA, 54 bp, Artificial
  Synthetic oligonucleotide
caaatacaacactatgaggattccctataaaatcactgcttacgccttgtttgg

SEQ ID NO: 194931 - DNA, 54 bp, Artificial
  Synthetic oligonucleotide
ctctcgctcattagttttatgagtcttctaacccgctcgcaatagcgcgtttag

SEQ ID NO: 194932 - DNA, 54 bp, Artificial
  Synthetic oligonucleotide
caaagcgtgtccccagttagcgtgtctttcaagcccacaaacgcgcaaatctcg

SEQ ID NO: 194933 - DNA, 54 bp, Artificial
  Synthetic oligonucleotide
tcagtacctctgcgattgagggggaaatgcttaaccgcgacagtgttaaagcct

SEQ ID NO: 194934 - DNA, 54 bp, Artificial
  Synthetic oligonucleotide
actcgctttggtgggtggctaaaagagcactcaccggcgggctagaagccacac

SEQ ID NO: 194935 - DNA, 54 bp, Artificial
  Synthetic oligonucleotide
tagcatacatatcagctaagtggattttcacaagctccacatcactaagagaag

SEQ ID NO: 194936 - DNA, 58 bp, Artificial
  Synthetic oligonucleotide
caacactaacagaacttcttgccaacactaacagaacttcttgccaacactaacagaa

SEQ ID NO: 194937 - DNA, 54 bp, Artificial
  Synthetic oligonucleotide
actccctgtcattcccataaggcgtcccagctaacgccccactgccaagcggac

SEQ ID NO: 194938 - DNA, 54 bp, Artificial
  Synthetic oligonucleotide
ctacttagcaactctatcgtgttttaatgcgcaaggctttcacactcctagaga

SEQ ID NO: 194939 - DNA, 54 bp, Artificial
  Synthetic oligonucleotide
agagtaggtattgggtgaagagggattggatatcaatgtcataatcactgcgca

SEQ ID NO: 194940 - DNA, 54 bp, Artificial
  Synthetic oligonucleotide
ctcctttcgttccattgaggatgcacatgttttgagcgcgcatgcttagttggc

SEQ ID NO: 194941 - DNA, 54 bp, Artificial
  Synthetic oligonucleotide
ggagttttagcccttgaaccaacccgaagctaaaataagctgacagccctaatc

SEQ ID NO: 194942 - DNA, 54 bp, Artificial
  Synthetic oligonucleotide
acaagagcgcatcgcagtttgaaatcgtaggcgttagccgtagatggttttgcg

SEQ ID NO: 194943 - DNA, 54 bp, Artificial
  Synthetic oligonucleotide
gaggcttaagcattcaaagcgggcagattgtgagtgtggataaaggcgcgtggg

SEQ ID NO: 194944 - DNA, 54 bp, Artificial
  Synthetic oligonucleotide
aacgcattgttttattgagtagcgctgggatcttagagccaaaacccttaaaag

SEQ ID NO: 194945 - DNA, 54 bp, Artificial
  Synthetic oligonucleotide
acacaacccttgcttacgcgcaaatttagcgtcccttttgcgcaaataaatcgc

SEQ ID NO: 194946 - DNA, 54 bp, Artificial
  Synthetic oligonucleotide
gcgaaaccccatcaagtttgggcgagcacacgaatgaagcactaggataggctt

SEQ ID NO: 194947 - DNA, 50 bp, Artificial
  Synthetic oligonucleotide
ccactacctaaccgccaaaacacgggggcgggggctaactatcacaaaaa

SEQ ID NO: 194948 - DNA, 60 bp, Artificial
  Synthetic oligonucleotide
gatgagactttagtagtcatagattctggtgggtacgatgcagacttaaaccgtcttgct

SEQ ID NO: 194949 - DNA, 54 bp, Artificial
  Synthetic oligonucleotide
gcgaaaattatacataccaaaggcgctattgcacacaaatgccagagtgctttt

SEQ ID NO: 194950 - DNA, 54 bp, Artificial
  Synthetic oligonucleotide
aacgcacgggctttgagacattcccacgcataccaagcccattccacacgccct

SEQ ID NO: 194951 - DNA, 54 bp, Artificial
  Synthetic oligonucleotide
cccgccgtctgaacactcggatgatgctccgctaagagctgtcaacgaatctca

SEQ ID NO: 194952 - DNA, 54 bp, Artificial
  Synthetic oligonucleotide
aagaaagggactcgctcgtggcgttactgcccacgccggctaacactttcatgc

SEQ ID NO: 194953 - DNA, 54 bp, Artificial
  Synthetic oligonucleotide
aatgaccgagccgacactgcagactcccgcaaaagcccgcaagagacaacgcag

SEQ ID NO: 194954 - DNA, 54 bp, Artificial
  Synthetic oligonucleotide
cccttcatatagcagccaatatgcgtttgcccctttgtgcgagaggctagacta

SEQ ID NO: 194955 - DNA, 54 bp, Artificial
  Synthetic oligonucleotide
accatagatccaactaacacgctggttttagtggcggctcatgtgggtaaaacc

SEQ ID NO: 194956 - DNA, 54 bp, Artificial
  Synthetic oligonucleotide
ccgctgtatacaggttgcatgtattgatatcacgatagaataatgggacaagtc

SEQ ID NO: 194957 - DNA, 54 bp, Artificial
  Synthetic oligonucleotide
aagcctatcctaacgcttcgtttgtgtgttcgcctaaacttgatggggtttcgc

SEQ ID NO: 194958 - DNA, 54 bp, Artificial
  Synthetic oligonucleotide
ccggtgcgacacctattcgccccggttgtgctactttgccattacccggaatta

SEQ ID NO: 194959 - DNA, 55 bp, Artificial
  Synthetic oligonucleotide
caaattgaagtcatcaaaccgctaactgaactcaaagacaaaaccctagcttacc

SEQ ID NO: 194960 - DNA, 54 bp, Artificial
  Synthetic oligonucleotide
cctgctccataggtgtacatatccaccttagcatcgttaagataaaacacactc

SEQ ID NO: 194961 - DNA, 54 bp, Artificial
  Synthetic oligonucleotide
aaggcttggcgcgctaagcgggatcattaaggattacgggagtattacgcatgc

SEQ ID NO: 194962 - DNA, 54 bp, Artificial
  Synthetic oligonucleotide
aagctttgccagcaggtgcgaatggcgtgagcgcagatggtgagtgaggtgtgt

SEQ ID NO: 194963 - DNA, 53 bp, Artificial
  Synthetic oligonucleotide
aaggaactagtcccttttgctccgctagccgctacgtcactgaagcttgacac

SEQ ID NO: 194964 - DNA, 53 bp, Artificial
  Synthetic oligonucleotide
ggtgcagattacgcattagctacttcacacggtacttccgcacttcatttagc

SEQ ID NO: 194965 - DNA, 53 bp, Artificial
  Synthetic oligonucleotide
gccgttgtagaggcacgcctcgcattgctttgcgcttacttagacgcgtacgc

SEQ ID NO: 194966 - DNA, 53 bp, Artificial
  Synthetic oligonucleotide
ctaaccacgcatcaaatacagaggaagttttgacaatcataggcatggacacc

SEQ ID NO: 194967 - DNA, 53 bp, Artificial
  Synthetic oligonucleotide
tgcgcctaaaaagctccagacactcttggggttcaagcttttgggctagggcg

SEQ ID NO: 194968 - DNA, 53 bp, Artificial
  Synthetic oligonucleotide
ggtaagcgtaggcggtgtgatagccataagcgaagctggaaatatagatgcgc

SEQ ID NO: 194969 - DNA, 53 bp, Artificial
  Synthetic oligonucleotide
cttcgttatttacggggttctaacccccaatccctcgcatgcgcgcgcgttgt

SEQ ID NO: 194970 - DNA, 60 bp, Artificial
  Synthetic oligonucleotide
gatgagaaagtatgcccccattgatattgctcccatgatgactagacccatgatgaaagt

SEQ ID NO: 194971 - DNA, 53 bp, Artificial
  Synthetic oligonucleotide
aaaatcccccttgtaagacttatgggtttctcatctacccagaaagtgcagac

SEQ ID NO: 194972 - DNA, 53 bp, Artificial
  Synthetic oligonucleotide
gataataggctttgggattagtgcagtatacggcgtagtcgaccaaacaattc

SEQ ID NO: 194973 - DNA, 53 bp, Artificial
  Synthetic oligonucleotide
ggggtgtggtactcacgcccgtcctgttgtcgcgatttgtcagagattgagac

SEQ ID NO: 194974 - DNA, 53 bp, Artificial
  Synthetic oligonucleotide
taacgactgactttatgttacaccgtatgaataacgttatagcgaacctgacc

SEQ ID NO: 194975 - DNA, 53 bp, Artificial
  Synthetic oligonucleotide
caactcgtttaatggcgtgccgctcccaagcctagctagattggatcaacaag

SEQ ID NO: 194976 - DNA, 53 bp, Artificial
  Synthetic oligonucleotide
agtcccattatatctaaaactcagtcaatctatgctaaactacaattaaaagg

SEQ ID NO: 194977 - DNA, 53 bp, Artificial
  Synthetic oligonucleotide
tcaaggctctgttttaaagctcccctctagtttgttgtttgaaaacgccactt

SEQ ID NO: 194978 - DNA, 53 bp, Artificial
  Synthetic oligonucleotide
agtaggggtattcggttcgggtcaatatacgattcatgaaggttacgctgcac

SEQ ID NO: 194979 - DNA, 53 bp, Artificial
  Synthetic oligonucleotide
ctttagctatatggagcgatccgttgctaaatcgatacataatatggcttcgt

SEQ ID NO: 194980 - DNA, 53 bp, Artificial
  Synthetic oligonucleotide
tgcatccctatttaatgcttaatcacacaaatcgtaggcgcgatgctttcaca

SEQ ID NO: 194981 - DNA, 60 bp, Artificial
  Synthetic oligonucleotide
caaagtgatggattattagtgaagcacccaatcgctttagcgtttgggtgcttcactgcc

SEQ ID NO: 194982 - DNA, 53 bp, Artificial
  Synthetic oligonucleotide
gggatgtgccctttacatttaccgcatagcccttgcactcttgcttagacacc

SEQ ID NO: 194983 - DNA, 53 bp, Artificial
  Synthetic oligonucleotide
gcgattgttacaagcgctcataggatcttgcgcatgaaattgtggtggtctaa

SEQ ID NO: 194984 - DNA, 53 bp, Artificial
  Synthetic oligonucleotide
tgatggatcttccttgggaaatccaggttatggtggttggtgtggaatcttgc

SEQ ID NO: 194985 - DNA, 52 bp, Artificial
  Synthetic oligonucleotide
agccccaggcatttgggtataacctccggtccctaaatacgccccaaagcgc

SEQ ID NO: 194986 - DNA, 53 bp, Artificial
  Synthetic oligonucleotide
tgtgcttcacgtttgatacactctaccccctctaacgccaacgcaatgatctg

SEQ ID NO: 194987 - DNA, 53 bp, Artificial
  Synthetic oligonucleotide
taggcattgccgatcaaatgttgccaccgacactgcaaggcagcgggaagatt

SEQ ID NO: 194988 - DNA, 53 bp, Artificial
  Synthetic oligonucleotide
ctatactaacctatgtattctccttctcgtatgctcttcaatccgcctctttt

SEQ ID NO: 194989 - DNA, 53 bp, Artificial
  Synthetic oligonucleotide
atcgcacgcagttgtcttgcaccatttgcttacttgcctcgtttgcactaaga

SEQ ID NO: 194990 - DNA, 53 bp, Artificial
  Synthetic oligonucleotide
taggtctctaacagatcgccctactctaaaacatgaagatttgtggatgcgct

SEQ ID NO: 194991 - DNA, 53 bp, Artificial
  Synthetic oligonucleotide
atgaagctctcttgtttcttgctccattcgccttgaaagtcgttcatctgatc

SEQ ID NO: 194992 - DNA, 57 bp, Artificial
  Synthetic oligonucleotide
gctgacagatcgagacctcgaaatgatcaaatttacgaacatttacgggcgtacttt

SEQ ID NO: 194993 - DNA, 53 bp, Artificial
  Synthetic oligonucleotide
aaaagaactacacctagtgttggcaagaactacacctagtgttggcaagaact

SEQ ID NO: 194994 - DNA, 53 bp, Artificial
  Synthetic oligonucleotide
ccgacattttagccagttataggacgaaaaaagaacgccaaaagatcactcaa

SEQ ID NO: 194995 - DNA, 53 bp, Artificial
  Synthetic oligonucleotide
atgctagattttatgccctagcggccacagcttatgctctaggatcgcgacat

SEQ ID NO: 194996 - DNA, 53 bp, Artificial
  Synthetic oligonucleotide
gtatggaccatacgttgaaaaccaagcatgagaacgtgtatagtactccattt

SEQ ID NO: 194997 - DNA, 53 bp, Artificial
  Synthetic oligonucleotide
ctagagcatagctctagtcttaatattatcgccagctaaagctggcattgggg

SEQ ID NO: 194998 - DNA, 53 bp, Artificial
  Synthetic oligonucleotide
atggagtttctctagtaatcgtgccactacgattagttgctcactggattgga

SEQ ID NO: 194999 - DNA, 53 bp, Artificial
  Synthetic oligonucleotide
ttacttgaaccacgctgccaatattgttagggccaaacccagcttcaaactgc

SEQ ID NO: 195000 - DNA, 53 bp, Artificial
  Synthetic oligonucleotide
tataagcgcaaaacggagtcatacgttcaccctcccgaaagaacactggcatg

SEQ ID NO: 195001 - DNA, 53 bp, Artificial
  Synthetic oligonucleotide
tacgcaccatatagcgcacgatttcgcgtggcgtgtagtagctccctgtggct

SEQ ID NO: 195002 - DNA, 53 bp, Artificial
  Synthetic oligonucleotide
agagttaccgctctagggggtttggctatcgctacgatcatatcgtcttttgc

SEQ ID NO: 195003 - DNA, 53 bp, Artificial
  Synthetic oligonucleotide
cactctaaaagaagaacccataccaacaaaagagccacaaaccacccccacac

SEQ ID NO: 195004 - DNA, 53 bp, Artificial
  Synthetic oligonucleotide
tgctctaaagggttgagcgttgggtttaatgtgggattgagtgttgggttaag

SEQ ID NO: 195005 - DNA, 53 bp, Artificial
  Synthetic oligonucleotide
ctatcgttcaatcggtggaaatccctgtcatgctttatgatgtgccaagtaga

SEQ ID NO: 195006 - DNA, 53 bp, Artificial
  Synthetic oligonucleotide
tatatctcgtggggcaagtccgctaccactacaagcccctgcggcaatggtgc

SEQ ID NO: 195007 - DNA, 52 bp, Artificial
  Synthetic oligonucleotide
cctaccctaaaactcactcttgaaggcaagttggttttaatcaagccggtta

SEQ ID NO: 195008 - DNA, 52 bp, Artificial
  Synthetic oligonucleotide
ctaattgacttcaaaaaaactccatttaccttttagtcgttagccatttagc

SEQ ID NO: 195009 - DNA, 53 bp, Artificial
  Synthetic oligonucleotide
ggcagaacgatttgactttacctcatcctaaatggagtaaaagggattcggtg

SEQ ID NO: 195010 - DNA, 53 bp, Artificial
  Synthetic oligonucleotide
tcccttagcacatctggggcgattcgtgtcgcaagtgaagggggcatcacaga

SEQ ID NO: 195011 - DNA, 53 bp, Artificial
  Synthetic oligonucleotide
tttaagaagtgtgcatgactacttagaatccagaggtgctaatgttaaccgga

SEQ ID NO: 195012 - DNA, 53 bp, Artificial
  Synthetic oligonucleotide
gcggcggctcatatgcctgattgccttgagatgccctaccgccctaccctttg

SEQ ID NO: 195013 - DNA, 53 bp, Artificial
  Synthetic oligonucleotide
gaatcgataatgaaccgactgaggagtatgacctttctcatctgcgccttatt

SEQ ID NO: 195014 - DNA, 60 bp, Artificial
  Synthetic oligonucleotide
ggatctaacgattcgtatggcgcatcataactccgctatggagggtaatagcttgacttt

SEQ ID NO: 195015 - DNA, 53 bp, Artificial
  Synthetic oligonucleotide
acacgctataaagcctgcggtattctagttgagtgcctagcaaagagtagtaa

SEQ ID NO: 195016 - DNA, 53 bp, Artificial
  Synthetic oligonucleotide
gaatcgtactgatgtgcaaactcgataagaggggtcaatgcttcgccatagga

SEQ ID NO: 195017 - DNA, 53 bp, Artificial
  Synthetic oligonucleotide
gagccaagcatgaaagagattaacgctaccaccgacattgtagctagttacag

SEQ ID NO: 195018 - DNA, 53 bp, Artificial
  Synthetic oligonucleotide
tctcgcaccgcagatagaatcatacgccgagagttgcttttggctccgggcga

SEQ ID NO: 195019 - DNA, 53 bp, Artificial
  Synthetic oligonucleotide
gacaagcaacgcgctcaaagggatattaagcttgtagcgtgggatattaacaa

SEQ ID NO: 195020 - DNA, 53 bp, Artificial
  Synthetic oligonucleotide
gagcaccgcattgatcctaaagacattacccttttatgcaccactaatgacga

SEQ ID NO: 195021 - DNA, 53 bp, Artificial
  Synthetic oligonucleotide
ttgacacagcgagacaagaatcgggtgagataactcccaagcaactcaaagag

SEQ ID NO: 195022 - DNA, 53 bp, Artificial
  Synthetic oligonucleotide
cgctgcatttagctcataagttccctaatggcgattttcctatgacaccttat

SEQ ID NO: 195023 - DNA, 53 bp, Artificial
  Synthetic oligonucleotide
cgctatgcatgagtagccctagccaaactacccaagtaagcgggacggtcttt

SEQ ID NO: 195024 - DNA, 53 bp, Artificial
  Synthetic oligonucleotide
ttgagtaattggggcaaactcctatcatacatgcctaacccaaaacccacgcg

SEQ ID NO: 195025 - DNA, 59 bp, Artificial
  Synthetic oligonucleotide
cctagccaagaaatccttactaatgcccctaactttcatcataggtctagtcatcatgg

SEQ ID NO: 195026 - DNA, 53 bp, Artificial
  Synthetic oligonucleotide
tcgtggtgttctaacaagctaatcgttccgctatttggttttagcatggtggc

SEQ ID NO: 195027 - DNA, 53 bp, Artificial
  Synthetic oligonucleotide
cgcgatagaaagtcgtgaagccttctttattttgcgtgatactcgtatcggtt

SEQ ID NO: 195028 - DNA, 53 bp, Artificial
  Synthetic oligonucleotide
actctgtaattcttgttgtaaaatccgctcgcacattgtctttgactgggttt

SEQ ID NO: 195029 - DNA, 53 bp, Artificial
  Synthetic oligonucleotide
ccccacaacattactgcgcaccacactcatgcgccttgaattttcgcgcacga

SEQ ID NO: 195030 - DNA, 53 bp, Artificial
  Synthetic oligonucleotide
gcgcgttattgagcatgttttgagcgaaagccctatcagaagcggtgtaagga

SEQ ID NO: 195031 - DNA, 52 bp, Artificial
  Synthetic oligonucleotide
aagcggcagtttgcgttagggcttgggcttgttgcgttgtgccttctgtgag

SEQ ID NO: 195032 - DNA, 52 bp, Artificial
  Synthetic oligonucleotide
catcagcctgtttgacgctacccatgcggtgtgtaatgattaaagcaatctt

SEQ ID NO: 195033 - DNA, 52 bp, Artificial
  Synthetic oligonucleotide
gtgcattacatccactgcaatacggcactctagacatttaaaccgatgcgac

SEQ ID NO: 195034 - DNA, 52 bp, Artificial
  Synthetic oligonucleotide
gacataagagagttgcaatccttctttagccctagtgatcgctacgtaagcc

SEQ ID NO: 195035 - DNA, 52 bp, Artificial
  Synthetic oligonucleotide
ctcttggatgctctgcaatataagtgggagtatgtttagggtaatagcccat

SEQ ID NO: 195036 - DNA, 56 bp, Artificial
  Synthetic oligonucleotide
cactaaccccttaactaagcgagatgtttatagtgcgttagagagctacgataagg

SEQ ID NO: 195037 - DNA, 52 bp, Artificial
  Synthetic oligonucleotide
aaggtttgagcagtttctcaggcttgtccacatcttggactgagatacagat

SEQ ID NO: 195038 - DNA, 52 bp, Artificial
  Synthetic oligonucleotide
aaacgcatggagcatgagtaatggggcgtgattttcacgcttcaattgaagg

SEQ ID NO: 195039 - DNA, 52 bp, Artificial
  Synthetic oligonucleotide
tgtataagcgagcgctcgaactgtgccaatgctccgaacacatgaaataata

SEQ ID NO: 195040 - DNA, 52 bp, Artificial
  Synthetic oligonucleotide
tggtaagaatagatcgtatcgtctttagaagggacgcttattcgctctttca

SEQ ID NO: 195041 - DNA, 52 bp, Artificial
  Synthetic oligonucleotide
atctcaataccgcaacatgcaagaccataagtcattgcccaaagtgagtttg

SEQ ID NO: 195042 - DNA, 52 bp, Artificial
  Synthetic oligonucleotide
gtgaaaacataatccacataccaagaatagtagcggataagccccacatctt

SEQ ID NO: 195043 - DNA, 52 bp, Artificial
  Synthetic oligonucleotide
ctgaaccgaattttgaaccgaaagataggcgatcgttttgtgatcgaaaccg

SEQ ID NO: 195044 - DNA, 52 bp, Artificial
  Synthetic oligonucleotide
tagggggtagagctctgattgggctagggctgctcaccgcggtaccaacccc

SEQ ID NO: 195045 - DNA, 52 bp, Artificial
  Synthetic oligonucleotide
gctgtaatctgctaccaactcaacgactgcctaaaaccctacttgctagggc

SEQ ID NO: 195046 - DNA, 52 bp, Artificial
  Synthetic oligonucleotide
taggttgagcgagcaccgtgacgctacgctggcggttgtaacgagagatgct

SEQ ID NO: 195047 - DNA, 60 bp, Artificial
  Synthetic oligonucleotide
cctaccccaccgatccgctagatgaaaacgctatcatcgcattagtgtatcgtggcatgc

SEQ ID NO: 195048 - DNA, 52 bp, Artificial
  Synthetic oligonucleotide
gggcgtgtagcggctgtgcgagtggggcaaccggcacattgtatgccataga

SEQ ID NO: 195049 - DNA, 52 bp, Artificial
  Synthetic oligonucleotide
atgagttttatacacgaagaggatctatcggttgcagatacggaagtgttcg

SEQ ID NO: 195050 - DNA, 52 bp, Artificial
  Synthetic oligonucleotide
tggatggggtgggcgggatttccttgaagggagtcttttaacttgtctcact

SEQ ID NO: 195051 - DNA, 52 bp, Artificial
  Synthetic oligonucleotide
cgcctagattccccagcggccaataaaacaacgctcgtttgtttaacgagcg

SEQ ID NO: 195052 - DNA, 52 bp, Artificial
  Synthetic oligonucleotide
aaattccgattgtgcattcccgccattttgggcaatttggggcacataacgc

SEQ ID NO: 195053 - DNA, 52 bp, Artificial
  Synthetic oligonucleotide
agggtaagggtgcggtccggcggctgtgcctagcaaatagtgcgtgtctttg

SEQ ID NO: 195054 - DNA, 52 bp, Artificial
  Synthetic oligonucleotide
agtaaagacatacgcccagccccatgcgattgcactaccgattgctacttgc

SEQ ID NO: 195055 - DNA, 52 bp, Artificial
  Synthetic oligonucleotide
aaccgctctaggctggtggaacgatccgattaaattcttaccataaggcgta

SEQ ID NO: 195056 - DNA, 52 bp, Artificial
  Synthetic oligonucleotide
cgctatggtagaggcttcatcgtactttccggtattcataagcccgacgatt

SEQ ID NO: 195057 - DNA, 52 bp, Artificial
  Synthetic oligonucleotide
cacaaatgctgtgggttgtcgcgaagtggtaagcaatggtgaaaatgggttt

SEQ ID NO: 195058 - DNA, 55 bp, Artificial
  Synthetic oligonucleotide
cccgcgagccccttgggaggatgatcggatcagggttgctttcgtggaagagcca

SEQ ID NO: 195059 - DNA, 55 bp, Artificial
  Synthetic oligonucleotide
ggatagcctcccgtagcactgtcgtgtccggatatttgtgacccagttcgatggg

SEQ ID NO: 195060 - DNA, 55 bp, Artificial
  Synthetic oligonucleotide
ggcgccgttactctttggagcacaagccaggtagatagtggcttcggccagaggg

SEQ ID NO: 195061 - DNA, 55 bp, Artificial
  Synthetic oligonucleotide
gggacaggttagaatcgtcacagattaaaatacgcgccatggcttacgaacctcc

SEQ ID NO: 195062 - DNA, 55 bp, Artificial
  Synthetic oligonucleotide
ggtacaggcaatattgctccacaccttgttattattaacgccggtggctttaggt

SEQ ID NO: 195063 - DNA, 55 bp, Artificial
  Synthetic oligonucleotide
gtgaacatccgatgggactttagccacggtgtcgaagcccgaaaagggatgtagc

SEQ ID NO: 195064 - DNA, 55 bp, Artificial
  Synthetic oligonucleotide
gttcaaccgcactccagcagcgggattgagtaaccagtactattctcgaggaggc

SEQ ID NO: 195065 - DNA, 55 bp, Artificial
  Synthetic oligonucleotide
tcggatatcatatagctgtgtgtctcaccgataatcaatctcttttgtccctttc

SEQ ID NO: 195066 - DNA, 55 bp, Artificial
  Synthetic oligonucleotide
ttacacgattccctaaggcccaacgggtatgacatgacgcaatccttgtatagcc

SEQ ID NO: 195067 - DNA, 55 bp, Artificial
  Synthetic oligonucleotide
attcacacattcaccaaagcggctattggttcgtcgaggagcccacagactatca

SEQ ID NO: 195068 - DNA, 54 bp, Artificial
  Synthetic oligonucleotide
tgccatcgctacgggcatctttgccactaccaccgtcaactcggccggcgcaga

SEQ ID NO: 195069 - DNA, 55 bp, Artificial
  Synthetic oligonucleotide
ccgcaggggacatattgtagaggctgccgtggattcgcctctggttataaaagtc

SEQ ID NO: 195070 - DNA, 53 bp, Artificial
  Synthetic oligonucleotide
aaaatcgaagcgtgacaagagataactcttgacgactactgccagttgcgggt

SEQ ID NO: 195071 - DNA, 52 bp, Artificial
  Synthetic oligonucleotide
accaccccttgtagaaaatatccctcaggtggtggctttacacaactacttc

SEQ ID NO: 195072 - DNA, 52 bp, Artificial
  Synthetic oligonucleotide
acccatgacgacccttcaaggaatccctttggcggtgataggaggggacgcg

SEQ ID NO: 195073 - DNA, 52 bp, Artificial
  Synthetic oligonucleotide
gccttggcccgtaccttaatgaaggagggcttgttgggcgcagtcccgaaga

SEQ ID NO: 195074 - DNA, 52 bp, Artificial
  Synthetic oligonucleotide
tggttgccgatcgggtctaccggaagggctacctcccctatcaggcccatga

SEQ ID NO: 195075 - DNA, 52 bp, Artificial
  Synthetic oligonucleotide
actatgaccgcaaagagagacggctatccaatctgcggttacctcgaaaagg

SEQ ID NO: 195076 - DNA, 52 bp, Artificial
  Synthetic oligonucleotide
agacaccctgcatcaacttgccgatctcgggtatgaagcgtatagaaggacc

SEQ ID NO: 195077 - DNA, 51 bp, Artificial
  Synthetic oligonucleotide
ttatgagcacccgcttcaggatatcgagccgttccttcgatatggtatcaa

SEQ ID NO: 195078 - DNA, 50 bp, Artificial
  Synthetic oligonucleotide
gcgggtcttgtagaggagtagtcgagttgtcgatattttcactgcgcgga

SEQ ID NO: 195079 - DNA, 50 bp, Artificial
  Synthetic oligonucleotide
atgtaggtgcgcatctttttgcccgtgtgggcatccgtgtagatggccga

SEQ ID NO: 195080 - DNA, 55 bp, Artificial
  Synthetic oligonucleotide
cgaatatcataatcaggcgcaatagagagcagtatggtaccgcatagccgcttct

SEQ ID NO: 195081 - DNA, 50 bp, Artificial
  Synthetic oligonucleotide
atctgagcggagcagtgaacaggcccatgcgtccccgacacctacaggat

SEQ ID NO: 195082 - DNA, 50 bp, Artificial
  Synthetic oligonucleotide
atctcctacccgacgggaggttgtcctgccggaagcatcggtcgccgaga

SEQ ID NO: 195083 - DNA, 50 bp, Artificial
  Synthetic oligonucleotide
atcgccccggtcgggagaacgggtggtgaggcttattgccgttgcgctgc

SEQ ID NO: 195084 - DNA, 50 bp, Artificial
  Synthetic oligonucleotide
atccccgactccacatcccatcgaccacgagcatcggccactctgcgcaa

SEQ ID NO: 195085 - DNA, 50 bp, Artificial
  Synthetic oligonucleotide
atcaccgggtttcgatggggtgcctgaccgcttagtactgctcccccatg

SEQ ID NO: 195086 - DNA, 50 bp, Artificial
  Synthetic oligonucleotide
agttcgaggcgctctgtattcagcggcacgggccaacggtaaaaggcgta

SEQ ID NO: 195087 - DNA, 50 bp, Artificial
  Synthetic oligonucleotide
aaaaccaaccttccgagactggccgaagcagcgggtctgggcaacctgtc

SEQ ID NO: 195088 - DNA, 50 bp, Artificial
  Synthetic oligonucleotide
aaacggctgcccccggccacacgaaaggacgagcactgttgacataccgc

SEQ ID NO: 195089 - DNA, 50 bp, Artificial
  Synthetic oligonucleotide
aaactgttgccgccatcgccacagtgagatgggtctgatcgctcccgggg

SEQ ID NO: 195090 - DNA, 50 bp, Artificial
  Synthetic oligonucleotide
aaaggcgacctctgccgaagcggctgttcaaggcagtcaactcgggaata

SEQ ID NO: 195091 - DNA, 55 bp, Artificial
  Synthetic oligonucleotide
ctacgccagttcaccctccaatagcttttccccgaaggataaggtgacatgcccg

SEQ ID NO: 195092 - DNA, 50 bp, Artificial
  Synthetic oligonucleotide
aacctcaccggcaagtgctccgaatgtcccatggccccctggtgctacac

SEQ ID NO: 195093 - DNA, 50 bp, Artificial
  Synthetic oligonucleotide
aacgcgggggtacggttcgtgtctactccggcaacagcaacacactccgg

SEQ ID NO: 195094 - DNA, 50 bp, Artificial
  Synthetic oligonucleotide
aacggcagaagtcgcccgcagcctcgtcaacatcaccgaacggaacggcc

SEQ ID NO: 195095 - DNA, 50 bp, Artificial
  Synthetic oligonucleotide
aacgggatcccgctgcaaagtcggtttgggaggtcgtcctctgttacccg

SEQ ID NO: 195096 - DNA, 50 bp, Artificial
  Synthetic oligonucleotide
aacgggtgagggaatgggttaggcctggctttgaacgggagttcgcgctg

SEQ ID NO: 195097 - DNA, 50 bp, Artificial
  Synthetic oligonucleotide
aactcggaccggcgttcgggggcctttttcaggaccttgcccagcgagtt

SEQ ID NO: 195098 - DNA, 50 bp, Artificial
  Synthetic oligonucleotide
aatacttccacgctccgcccctctgtacccgccttcgtccctacgtcgat

SEQ ID NO: 195099 - DNA, 50 bp, Artificial
  Synthetic oligonucleotide
accccgataacaggcggcgatctcagaacgctcgtccaccaaccctaccg

SEQ ID NO: 195100 - DNA, 50 bp, Artificial
  Synthetic oligonucleotide
accctacgtgcttccttgcggagcgacaatctggagtgcaccaggctgct

SEQ ID NO: 195101 - DNA, 50 bp, Artificial
  Synthetic oligonucleotide
accgccacagaaaggcgacctctgccgaagcggctgttcaaggcagtcaa

SEQ ID NO: 195102 - DNA, 55 bp, Artificial
  Synthetic oligonucleotide
gagacacctccttcgatcgtcaggttgctcgactccgctctcgctgtcgagggac

SEQ ID NO: 195103 - DNA, 50 bp, Artificial
  Synthetic oligonucleotide
acctcaatcgtctgtacatcgcagcgacagacctccctcaatgatgtccg

SEQ ID NO: 195104 - DNA, 50 bp, Artificial
  Synthetic oligonucleotide
acgctcagttcgctcgtcgccccctggataaaggttccgccagccatgat

SEQ ID NO: 195105 - DNA, 50 bp, Artificial
  Synthetic oligonucleotide
acggacgttaaagatgcggagtggattgcgagcttgatgcggcacgggca

SEQ ID NO: 195106 - DNA, 50 bp, Artificial
  Synthetic oligonucleotide
acgtcatcggaatgccctttgaggctgtcgtccccaagtgccgcctccgg

SEQ ID NO: 195107 - DNA, 50 bp, Artificial
  Synthetic oligonucleotide
actgagacatagccttgtcacccacgtcatcatagagccaggagatgcgc

SEQ ID NO: 195108 - DNA, 50 bp, Artificial
  Synthetic oligonucleotide
agcacctccctgacgggcaaatcgcgcggatctaggaaagcaaaccctcc

SEQ ID NO: 195109 - DNA, 50 bp, Artificial
  Synthetic oligonucleotide
agccacggggctccagacaccgggcctctctacgtcctcaaaacggaccc

SEQ ID NO: 195110 - DNA, 50 bp, Artificial
  Synthetic oligonucleotide
agccgctccggccgtgtgacccgcctggaagtcgtaggatcccgcggaac

SEQ ID NO: 195111 - DNA, 50 bp, Artificial
  Synthetic oligonucleotide
aggggccaggggagtcgcttgttccggtattgacgcagacggccgaagcg

SEQ ID NO: 195112 - DNA, 50 bp, Artificial
  Synthetic oligonucleotide
agggtgttgccaccgcctcccctagcaaagatagggaagtccaccacagc

SEQ ID NO: 195113 - DNA, 55 bp, Artificial
  Synthetic oligonucleotide
gagaggggacgagacctatgacccaccctccggctttatcagagcgggatagttg

SEQ ID NO: 195114 - DNA, 50 bp, Artificial
  Synthetic oligonucleotide
aggtccgcagggtgatccgagaagtgatgcacgggtaggtggaagggcat

SEQ ID NO: 195115 - DNA, 50 bp, Artificial
  Synthetic oligonucleotide
aggtccgggcgggacagcccttgaccggctatgtagaaggagtcgagttt

SEQ ID NO: 195116 - DNA, 50 bp, Artificial
  Synthetic oligonucleotide
aggtcttatggacctccgccacagtccgaccatcgctgttcacccccgtg

SEQ ID NO: 195117 - DNA, 50 bp, Artificial
  Synthetic oligonucleotide
aggttgccggaggtgggcatactttacggcgacagtcgggataccaacgc

SEQ ID NO: 195118 - DNA, 50 bp, Artificial
  Synthetic oligonucleotide
agtcctgcatgccgaaccctgtccctgcggtcggactcatgtccgcatgg

SEQ ID NO: 195119 - DNA, 50 bp, Artificial
  Synthetic oligonucleotide
agtctaccaccgttgccgctgggagcgtccctggcgcgatctgctcacag

SEQ ID NO: 195120 - DNA, 50 bp, Artificial
  Synthetic oligonucleotide
agtggaccgtcggtgaaacggcagaagtcgcccgcagcctcgtcaacatc

SEQ ID NO: 195121 - DNA, 55 bp, Artificial
  Synthetic oligonucleotide
gcaccaagtctttgagaagcgttggacgcacctcctaaagaatgccgaacatagt

SEQ ID NO: 195122 - DNA, 55 bp, Artificial
  Synthetic oligonucleotide
caaaacgtcccggcttggcattgatctccagaagccataaacgttcgcccctctg

SEQ ID NO: 195123 - DNA, 55 bp, Artificial
  Synthetic oligonucleotide
ggagcgaggagcgacaagaaaatattaggcgaatcacagtcaggtcttgcagttg

SEQ ID NO: 195124 - DNA, 59 bp, Artificial
  Synthetic oligonucleotide
atggtcgcacacgttgtggaggattaacccagctcagctcgcccaaaaacgtgtattga

SEQ ID NO: 195125 - DNA, 55 bp, Artificial
  Synthetic oligonucleotide
ccggctatatcacagggacttcgcaagtattgtatattcaactgcgcaccattcc

SEQ ID NO: 195126 - DNA, 50 bp, Artificial
  Synthetic oligonucleotide
aaaggctacgcctgccaaatagcgcaacggcatcaaacctgccagcccgc

SEQ ID NO: 195127 - DNA, 50 bp, Artificial
  Synthetic oligonucleotide
gtaccgtcatacgcagcacccagccactccgcaaacgacgcacgatcacc

SEQ ID NO: 195128 - DNA, 50 bp, Artificial
  Synthetic oligonucleotide
ggtgcggctagccatacgggattgcgcatgacctccgccccaccgctcgg

SEQ ID NO: 195129 - DNA, 50 bp, Artificial
  Synthetic oligonucleotide
ggtgcccgcgttgtgatgccctacctatggaatccgagcgatgggacggt

SEQ ID NO: 195130 - DNA, 50 bp, Artificial
  Synthetic oligonucleotide
aaatcgccacggctatagtgcagcaaacgagcgggggctagcggctccaa

SEQ ID NO: 195131 - DNA, 50 bp, Artificial
  Synthetic oligonucleotide
aaccagtttgcctcatggctcgggctgtgtcctgggacgaaggtgtctgg

SEQ ID NO: 195132 - DNA, 50 bp, Artificial
  Synthetic oligonucleotide
aacccagataccaacgggccgagcctggaatgctgcgcggtagcgtaatc

SEQ ID NO: 195133 - DNA, 50 bp, Artificial
  Synthetic oligonucleotide
aacgggctaggctgctaggtaaagcggcgcggttacgggttgaaaccgaa

SEQ ID NO: 195134 - DNA, 50 bp, Artificial
  Synthetic oligonucleotide
acacatggtgtattgccgccaaaccccacagtatccgacccgggaaccgg

SEQ ID NO: 195135 - DNA, 50 bp, Artificial
  Synthetic oligonucleotide
accaatcgggcataaacgtcgccacgctcttgggttacacggctgggtgg

SEQ ID NO: 195136 - DNA, 55 bp, Artificial
  Synthetic oligonucleotide
ccgacgaaaacttggcgatggtgctcaagccaatgggtcgcgaaggagccgaacc

SEQ ID NO: 195137 - DNA, 50 bp, Artificial
  Synthetic oligonucleotide
accacagtggcctgctcaagtagggtgtcaagcacagccaacgtgcggtt

SEQ ID NO: 195138 - DNA, 50 bp, Artificial
  Synthetic oligonucleotide
acccacttattcacggagtgcgcaacccaccatccccatcaggccaccag

SEQ ID NO: 195139 - DNA, 50 bp, Artificial
  Synthetic oligonucleotide
accccaaacgacaaagcgacttgggccaaccgtggcgtgagcgagatcca

SEQ ID NO: 195140 - DNA, 50 bp, Artificial
  Synthetic oligonucleotide
accccaacgaccgcaacctttagccgccaattcaccactggaacgcgctt

SEQ ID NO: 195141 - DNA, 50 bp, Artificial
  Synthetic oligonucleotide
accccgccaaaagtcaagcggcgtgggccaactttggggtaaagtcgcgc

SEQ ID NO: 195142 - DNA, 50 bp, Artificial
  Synthetic oligonucleotide
accccttgggtggcgacgtttggttctttggtggccctttgtcagccgaa

SEQ ID NO: 195143 - DNA, 50 bp, Artificial
  Synthetic oligonucleotide
acccgccgatgtttgctgccaccgaccatggggtggtcgatttgacccaa

SEQ ID NO: 195144 - DNA, 50 bp, Artificial
  Synthetic oligonucleotide
cacccgccaacctgataacggcccgcagggatgtagcgccaataatggtt

SEQ ID NO: 195145 - DNA, 50 bp, Artificial
  Synthetic oligonucleotide
acccgcgattatcggttggcctagtgctacggcgctgttttacgccgctg

SEQ ID NO: 195146 - DNA, 50 bp, Artificial
  Synthetic oligonucleotide
accgttcacgccacagggccataccgggcagttctttggtcgcgatgacc

SEQ ID NO: 195147 - DNA, 54 bp, Artificial
  Synthetic oligonucleotide
cccgccgctggtacattaagttttgcgcctggtgaacttagcaaaaccgtgacc

SEQ ID NO: 195148 - DNA, 50 bp, Artificial
  Synthetic oligonucleotide
caacgctatccagtgcgccacacgccgcttggccaaccagccctaaacca

SEQ ID NO: 195149 - DNA, 50 bp, Artificial
  Synthetic oligonucleotide
agcacctgtggtatccaatggcgggcttcatggtactcaccgcgccagcg

SEQ ID NO: 195150 - DNA, 50 bp, Artificial
  Synthetic oligonucleotide
aggcactgctgcgatcacggctaatgatggcaacactgggatgggcatgg

SEQ ID NO: 195151 - DNA, 50 bp, Artificial
  Synthetic oligonucleotide
atccatgcccgtgcgtgtggatcacggatcgctgcgaggaagggtggcat

SEQ ID NO: 195152 - DNA, 49 bp, Artificial
  Synthetic oligonucleotide
aggggtttaaaaccatcgcacgaccaactcttcccccacgacggagggg

SEQ ID NO: 195153 - DNA, 50 bp, Artificial
  Synthetic oligonucleotide
atagccctgaaacatgcgtccggttaaggtcacgccatagccgcgtggga

SEQ ID NO: 195154 - DNA, 50 bp, Artificial
  Synthetic oligonucleotide
atacgcttacccctggcctcgtatccgtagcggaggtaggtatggccgct

SEQ ID NO: 195155 - DNA, 50 bp, Artificial
  Synthetic oligonucleotide
agtgcgccacacgccgcttggccaaccagccctaaaccaacggataaggg

SEQ ID NO: 195156 - DNA, 50 bp, Artificial
  Synthetic oligonucleotide
aagtttgctggggcaactgtgaaccatgggccgcaacggattgggcctat

SEQ ID NO: 195157 - DNA, 50 bp, Artificial
  Synthetic oligonucleotide
aatatcgtggggttgccgaagcacggggtgatgtctacgctttgggcgca

SEQ ID NO: 195158 - DNA, 54 bp, Artificial
  Synthetic oligonucleotide
cccacttggattgtggcatgcgtttaatccgttccaaggtaatcccaaagaggt

SEQ ID NO: 195159 - DNA, 50 bp, Artificial
  Synthetic oligonucleotide
gaaacatgcgtccggttaaggtcacgccatagccgcgtgggatatgcgcg

SEQ ID NO: 195160 - DNA, 50 bp, Artificial
  Synthetic oligonucleotide
aatccttgcgaacgccctaccttcctcattcggtggagccgcaccctcga

SEQ ID NO: 195161 - DNA, 50 bp, Artificial
  Synthetic oligonucleotide
ctgcggagggtggcaaccccggcttgtggcccacgtttgaggccatggcg

SEQ ID NO: 195162 - DNA, 50 bp, Artificial
  Synthetic oligonucleotide
ctgacgacccgtcatcgtgttccatccgcagcctccttacacccgcagca

SEQ ID NO: 195163 - DNA, 50 bp, Artificial
  Synthetic oligonucleotide
aatcgccaaagtagcggcgtgggttgcgtccagtcaaggcgcgaatcgta

SEQ ID NO: 195164 - DNA, 50 bp, Artificial
  Synthetic oligonucleotide
cgtggtgtgtaccgtcatacgcagcacccagccactccgcaaacgacgca

SEQ ID NO: 195165 - DNA, 50 bp, Artificial
  Synthetic oligonucleotide
aatgcagcctgcctatgcccacccaaaaatggggttcggccaatgttcgc

SEQ ID NO: 195166 - DNA, 50 bp, Artificial
  Synthetic oligonucleotide
aatgctttgcgtcgcagcccagcctatagcacggtgcgggtgcaagtgag

SEQ ID NO: 195167 - DNA, 50 bp, Artificial
  Synthetic oligonucleotide
aattcgatagcgccacactgccacgctagccgtccacaagcccaatgcca

SEQ ID NO: 195168 - DNA, 50 bp, Artificial
  Synthetic oligonucleotide
aattggcgtgcccattggctgcggattaaccccacttgccacgttgtcgc

SEQ ID NO: 195169 - DNA, 55 bp, Artificial
  Synthetic oligonucleotide
cccaacgctggcctgtccctacggaaacaaccatggtcgaaaccacctatgggca

SEQ ID NO: 195170 - DNA, 50 bp, Artificial
  Synthetic oligonucleotide
aattgggcgtggaatgcggcaacggagctaattgggcgggtccacttctc

SEQ ID NO: 195171 - DNA, 50 bp, Artificial
  Synthetic oligonucleotide
cgaggcacatgacatgccgtcacggttaccagttgacaagcccatgcccg

SEQ ID NO: 195172 - DNA, 50 bp, Artificial
  Synthetic oligonucleotide
acaattggctcggttaggctactgccaggctcgcccgcccgactaaagcc

SEQ ID NO: 195173 - DNA, 50 bp, Artificial
  Synthetic oligonucleotide
ccgttgccccgacgtgttgtaaggaaataggcagaacgcagcgccgctct

SEQ ID NO: 195174 - DNA, 50 bp, Artificial
  Synthetic oligonucleotide
ccgtcatcgtgttccatccgcagcctccttacacccgcagcacgctatgc

SEQ ID NO: 195175 - DNA, 50 bp, Artificial
  Synthetic oligonucleotide
acacactgcgtcgtgctcgccccaacaccaaggctgcactcaaacccgcc

SEQ ID NO: 195176 - DNA, 50 bp, Artificial
  Synthetic oligonucleotide
ccggagcgacaatttaatggtgtacgtcgcccacgggaggtcggtgaggg

SEQ ID NO: 195177 - DNA, 50 bp, Artificial
  Synthetic oligonucleotide
ccgcagcctccttacacccgcagcacgctatgccatcccctgatgaaagc

SEQ ID NO: 195178 - DNA, 55 bp, Artificial
  Synthetic oligonucleotide
ccatcagacacaacccaaccctcattacatattgtttcagcgttacgaataaaac

SEQ ID NO: 195179 - DNA, 55 bp, Artificial
  Synthetic oligonucleotide
ccaacccaacgccctcgatccctagcattctcagcgctagccaaggagcttaacc

SEQ ID NO: 195180 - DNA, 55 bp, Artificial
  Synthetic oligonucleotide
catttcggatcacagggcggcatgtgtggtggttgcggcataaacagcgcgggga

SEQ ID NO: 195181 - DNA, 55 bp, Artificial
  Synthetic oligonucleotide
cattcaacagcccgagggcatcacatacgagcttcactttgttatagggagcgcc

SEQ ID NO: 195182 - DNA, 55 bp, Artificial
  Synthetic oligonucleotide
cagattgctggctgatgcaacactctctagtaccattttggctcctgtaacacgc

SEQ ID NO: 195183 - DNA, 60 bp, Artificial
  Synthetic oligonucleotide
caatcgtgatcgtgcggagtggtatgatgcgtatgtgttggttaacgatcacttggcgtt

SEQ ID NO: 195184 - DNA, 55 bp, Artificial
  Synthetic oligonucleotide
caatttgcccgattggctcaaagatttcgataccgagccacctgtggtgcaatta

SEQ ID NO: 195185 - DNA, 55 bp, Artificial
  Synthetic oligonucleotide
caatattcgtttgcagcacggcaaactgggcacgaatcccgtcaaaggctcgcgc

SEQ ID NO: 195186 - DNA, 55 bp, Artificial
  Synthetic oligonucleotide
caacattggtcgcaacgcgcggggcataaatcatgatgccctttgcgcctttctt

SEQ ID NO: 195187 - DNA, 55 bp, Artificial
  Synthetic oligonucleotide
attgatcaacggtcaccataaatcgtccgacccagtaggatggaagttcgacggt

SEQ ID NO: 195188 - DNA, 55 bp, Artificial
  Synthetic oligonucleotide
agcctaccgagactataaacggttcccgcgtgatcagaccctcgatccaattcaa

SEQ ID NO: 195189 - DNA, 55 bp, Artificial
  Synthetic oligonucleotide
atgctctattacagctatgtactcaccgtcgttttgttatgacgttgccttggag

SEQ ID NO: 195190 - DNA, 55 bp, Artificial
  Synthetic oligonucleotide
atcagtagcgctacgccagctccaagcgagccagttgccgtaactccaagcgagc

SEQ ID NO: 195191 - DNA, 55 bp, Artificial
  Synthetic oligonucleotide
tagctattagcctgtgtaccattggtgctagctgggccatactcgttggttgtgc

SEQ ID NO: 195192 - DNA, 55 bp, Artificial
  Synthetic oligonucleotide
tacgactaggagtacctccggttttcacttgtgtgaaggagtcaatccgttgacg

SEQ ID NO: 195193 - DNA, 55 bp, Artificial
  Synthetic oligonucleotide
gtgtgtcattccaaccgagcaagcccgtatggtggttaatctgatccaacccacg

SEQ ID NO: 195194 - DNA, 60 bp, Artificial
  Synthetic oligonucleotide
gatgccgtggtcctacgacccgctcatagatcccaatcgcctgctccaagatgggctgcg

SEQ ID NO: 195195 - DNA, 55 bp, Artificial
  Synthetic oligonucleotide
gtgaccacatcagactctagaaggagttcgtcaatgtcatacagaacgtttgtcc

SEQ ID NO: 195196 - DNA, 53 bp, Artificial
  Synthetic oligonucleotide
ggggtttccaaccctgtatagtcgggttccgcacagccaactgtggggttatc

SEQ ID NO: 195197 - DNA, 55 bp, Artificial
  Synthetic oligonucleotide
ggctagcccataccacgataaccagtgttcctacatggttatttgaagaggtggc

SEQ ID NO: 195198 - DNA, 55 bp, Artificial
  Synthetic oligonucleotide
ggcgacccaaaaccatcagttcgcagctggtcaacgaaacagtcagaacgcccga

SEQ ID NO: 195199 - DNA, 55 bp, Artificial
  Synthetic oligonucleotide
ggcacaccagccatgtcgaatgcgctgcaactagctggcactgaaatgtttcagg

SEQ ID NO: 195200 - DNA, 55 bp, Artificial
  Synthetic oligonucleotide
ggagtgatcgggtacaattaaggcatcgattgttaaggagctttcctagcgatct

SEQ ID NO: 195201 - DNA, 55 bp, Artificial
  Synthetic oligonucleotide
gcgggaggcaaccagtgcgtccctaacgggtcagtcatgcagacctcaatagacg

SEQ ID NO: 195202 - DNA, 55 bp, Artificial
  Synthetic oligonucleotide
gcggcaacctgatcgctcgcagttgcgactactgcattacttttcagccacgtat

SEQ ID NO: 195203 - DNA, 55 bp, Artificial
  Synthetic oligonucleotide
gccttggatttggatcgcgggcgtgagagtgccatcaacgcgggacaatcgaccg

SEQ ID NO: 195204 - DNA, 55 bp, Artificial
  Synthetic oligonucleotide
gcagccataatagtagcgcgtggtgaactctggcttgatgattgcctcccagact

SEQ ID NO: 195205 - DNA, 55 bp, Artificial
  Synthetic oligonucleotide
cgggcattcgggatacggtatatcattgcaacgcaaaccgccagtaacttcagta

SEQ ID NO: 195206 - DNA, 55 bp, Artificial
  Synthetic oligonucleotide
gcacattaagtggaaaaccgtctcatgcagtcatccagcccaaacgagtcatcct

SEQ ID NO: 195207 - DNA, 55 bp, Artificial
  Synthetic oligonucleotide
gatcgggcagctgtgataaccctaggaacaatgcttacaacaaccgaccttgatc

SEQ ID NO: 195208 - DNA, 55 bp, Artificial
  Synthetic oligonucleotide
gatcagcgcatcttggacatcgctggtacaacgggttaattcttcaaaccgaccc

SEQ ID NO: 195209 - DNA, 55 bp, Artificial
  Synthetic oligonucleotide
gacctataccgcgccttacgaaagcccagtgactaacccacgtttggctgagcgc

SEQ ID NO: 195210 - DNA, 55 bp, Artificial
  Synthetic oligonucleotide
aagtgctaaactatcgatcgtctcgttgggacgcgagccaagcactatcacgatg

SEQ ID NO: 195211 - DNA, 55 bp, Artificial
  Synthetic oligonucleotide
gacaaagggtcgctcagcattaccagatagataatcactccaaacctgccataaa

SEQ ID NO: 195212 - DNA, 55 bp, Artificial
  Synthetic oligonucleotide
ctggttgaactacaataggtataattggcactagcagcatcgggcgcatagccat

SEQ ID NO: 195213 - DNA, 54 bp, Artificial
  Synthetic oligonucleotide
aatacggttgtactgggctgacagcgtatcgcgtaactccaaaatataggtgat

SEQ ID NO: 195214 - DNA, 54 bp, Artificial
  Synthetic oligonucleotide
caattcgttgccacggctgactcacagggtcgggcgagtaatatacaccgtcct

SEQ ID NO: 195215 - DNA, 54 bp, Artificial
  Synthetic oligonucleotide
cgctacgagcatccctttgggagtcggcagttaatgctgtgggatgtgattgaa

SEQ ID NO: 195216 - DNA, 55 bp, Artificial
  Synthetic oligonucleotide
cgcagcaatccgtgtcgcaagtacgtggtatgctgccgcctgataggtatgccga

SEQ ID NO: 195217 - DNA, 54 bp, Artificial
  Synthetic oligonucleotide
tacgcggcacttggatctgattacccaagtgggagcgacggtcacgcatattaa

SEQ ID NO: 195218 - DNA, 53 bp, Artificial
  Synthetic oligonucleotide
tttcggggtcgcccgcacaccctaccccacgccatgctcgatcttccctccaa

SEQ ID NO: 195219 - DNA, 53 bp, Artificial
  Synthetic oligonucleotide
tgatcacacgaccaaagcgctgcaccgtaattccgccattctttcgtcgcatt

SEQ ID NO: 195220 - DNA, 53 bp, Artificial
  Synthetic oligonucleotide
atggggcgaatggtctcatagcggcgttgttcaggccagaccagccgaaatga

SEQ ID NO: 195221 - DNA, 53 bp, Artificial
  Synthetic oligonucleotide
ctcaatggaacgattattcgctttgagagcgctaccaatccaattgctagccc

SEQ ID NO: 195222 - DNA, 53 bp, Artificial
  Synthetic oligonucleotide
gaatctctaaacagagctgtgcggcattcaggcatcccgtattccatcgttca

SEQ ID NO: 195223 - DNA, 53 bp, Artificial
  Synthetic oligonucleotide
ggttcgtgtgttgagcgaaagctactccgcgccttcttcggttggcagcgagg

SEQ ID NO: 195224 - DNA, 52 bp, Artificial
  Synthetic oligonucleotide
gagcacttccgcttggcacatgccgtactcccttgagtccataccaacgccc

SEQ ID NO: 195225 - DNA, 52 bp, Artificial
  Synthetic oligonucleotide
atcaatcggctgggggagcgtcaccgtgacatgcacctgatttccggcattg

SEQ ID NO: 195226 - DNA, 52 bp, Artificial
  Synthetic oligonucleotide
cgcgtcgtccaaacacgggatagagcacttccgcttggcacatgccgtactc

SEQ ID NO: 195227 - DNA, 55 bp, Artificial
  Synthetic oligonucleotide
cgattttctcataggaatggtacggttttcgtttgcctgagtagcgtgcttggct

SEQ ID NO: 195228 - DNA, 52 bp, Artificial
  Synthetic oligonucleotide
ccgtgcgtgtggatcacggatcgctgcgaggaagggtggcatgaagcgatag

SEQ ID NO: 195229 - DNA, 52 bp, Artificial
  Synthetic oligonucleotide
aaatcgatccagctccagcttgactaataaccacacgggcctgttgaagcat

SEQ ID NO: 195230 - DNA, 52 bp, Artificial
  Synthetic oligonucleotide
agcacttaacgggcaacgcgcccagtccctcaacggtctcgcgggtgtttca

SEQ ID NO: 195231 - DNA, 52 bp, Artificial
  Synthetic oligonucleotide
cgtcaacggatcacggcgaggggtcgttgcggtgtcaatcgtcgatacgtgc

SEQ ID NO: 195232 - DNA, 52 bp, Artificial
  Synthetic oligonucleotide
cgcaaccatgggtcgtctatcgttggcattcaatgagaaagcgcgtgtatga

SEQ ID NO: 195233 - DNA, 52 bp, Artificial
  Synthetic oligonucleotide
tcccgccaatcttctgccattctgtcccaatccgcagcggatgcactgcctc

SEQ ID NO: 195234 - DNA, 52 bp, Artificial
  Synthetic oligonucleotide
caatacgctccacgcctattcaagtctgtcgcgggcactccagcacgcacca

SEQ ID NO: 195235 - DNA, 52 bp, Artificial
  Synthetic oligonucleotide
acggtggcgctatcaatctccttggtcacaggccgatgggtgaggctcgccg

SEQ ID NO: 195236 - DNA, 52 bp, Artificial
  Synthetic oligonucleotide
acgacccgctcatagatcccaatcgcctgctccaagatgggctgcgcctccg

SEQ ID NO: 195237 - DNA, 51 bp, Artificial
  Synthetic oligonucleotide
gtcaaaagccttcgcacggcccttggttctggctcggttggcgggactgta

SEQ ID NO: 195238 - DNA, 55 bp, Artificial
  Synthetic oligonucleotide
cgatccgattagaggatactgaaacttatctagcgctagggcaatgcctagacgt

SEQ ID NO: 195239 - DNA, 51 bp, Artificial
  Synthetic oligonucleotide
gtgacaatgtaggctcgcgtttgggcggtgtttgcccatacgccgtaatgg

SEQ ID NO: 195240 - DNA, 51 bp, Artificial
  Synthetic oligonucleotide
gcctgtgaggtagtatttctagcgggccgcctctgtcatcatcctatcatt

SEQ ID NO: 195241 - DNA, 51 bp, Artificial
  Synthetic oligonucleotide
tcagtccgcgaatgcgggcatatactaacaacagaccactgagccgaaagg

SEQ ID NO: 195242 - DNA, 51 bp, Artificial
  Synthetic oligonucleotide
agatcggttcccatccatgcccgtgcgtgtggatcacggatcgctgcgagg

SEQ ID NO: 195243 - DNA, 51 bp, Artificial
  Synthetic oligonucleotide
tcctccacatacaatgaattaatcctgtccaacgcgacctgtggggcgata

SEQ ID NO: 195244 - DNA, 51 bp, Artificial
  Synthetic oligonucleotide
agccaagaacatattgacgtgcgcatatttcaattactcgatccgattaga

SEQ ID NO: 195245 - DNA, 51 bp, Artificial
  Synthetic oligonucleotide
ttcggtttcgacaggctccgtgccattaacaaaatattccgtgcgaatgtt

SEQ ID NO: 195246 - DNA, 51 bp, Artificial
  Synthetic oligonucleotide
acaaatcaagccgtggtataatcgccctaaatcagaatctggttcgcggga

SEQ ID NO: 195247 - DNA, 50 bp, Artificial
  Synthetic oligonucleotide
gcttccgtgacctccaacgcccgttcatacaagcctcgggcctccgaata

SEQ ID NO: 195248 - DNA, 50 bp, Artificial
  Synthetic oligonucleotide
aactccagttaccgcagctcccaacgcggttggttggggccaagctcaac

SEQ ID NO: 195249 - DNA, 55 bp, Artificial
  Synthetic oligonucleotide
cgacagcggatgaccgctggtgctttcgggtgcaacaagcgctcttgattgccgg

SEQ ID NO: 195250 - DNA, 50 bp, Artificial
  Synthetic oligonucleotide
aacgtttgcccagccatgccaccaacgagctagcgccaatcggccagtga

SEQ ID NO: 195251 - DNA, 50 bp, Artificial
  Synthetic oligonucleotide
aagcaacgggtcaacggctgagctatcaacggcttgcggcgatgttggtt

SEQ ID NO: 195252 - DNA, 50 bp, Artificial
  Synthetic oligonucleotide
aagcctgggggaaaccaacgcgccgtttgttgggttgtgagccacgttaa

SEQ ID NO: 195253 - DNA, 50 bp, Artificial
  Synthetic oligonucleotide
aagcgcttgaccggcttccaagagcaccgacaattcgccaactttgcggc

SEQ ID NO: 195254 - DNA, 50 bp, Artificial
  Synthetic oligonucleotide
aagcggcacgctacccttgctcaatttgccaaccgaccatgcgcgaccag

SEQ ID NO: 195255 - DNA, 50 bp, Artificial
  Synthetic oligonucleotide
aaggccctggcaaccaacccaacgagcgggatcaagcagagcagtgcgcg

SEQ ID NO: 195256 - DNA, 50 bp, Artificial
  Synthetic oligonucleotide
gatccgattagaggatactgaaacgctagtacaaacaccaataaacagag

SEQ ID NO: 195257 - DNA, 50 bp, Artificial
  Synthetic oligonucleotide
aaggctggcacttgatgccaaccacgttcgctggctagctcgatgccccg

SEQ ID NO: 195258 - DNA, 50 bp, Artificial
  Synthetic oligonucleotide
aaggggcaggcaatcaaccagggagtaccgaggtgcgcgtgacccatctg

SEQ ID NO: 195259 - DNA, 50 bp, Artificial
  Synthetic oligonucleotide
aaaccttacgggtcgcgttcgaggcattctgggcgcaagctcagccctat

SEQ ID NO: 195260 - DNA, 55 bp, Artificial
  Synthetic oligonucleotide
cctgcggggtccccggaattgacataatgttgcgacggcgcagaatagttctggt

SEQ ID NO: 195261 - DNA, 50 bp, Artificial
  Synthetic oligonucleotide
ttggctgacgattatcaatcgctacccgagcaccgccaatcgtccggttt

SEQ ID NO: 195262 - DNA, 50 bp, Artificial
  Synthetic oligonucleotide
ttgccatcgttgcgttgcaccacagcggtcaataatcgcgcttgggcata

SEQ ID NO: 195263 - DNA, 50 bp, Artificial
  Synthetic oligonucleotide
aaacggcttgagccacgcctcccaccagcgaataaacgggctaggctcaa

SEQ ID NO: 195264 - DNA, 50 bp, Artificial
  Synthetic oligonucleotide
tctgagtcatgtcattattctatccaagggccaactttggacgcaagtcg

SEQ ID NO: 195265 - DNA, 50 bp, Artificial
  Synthetic oligonucleotide
tatcaatctccttggtcacaggccgatgggtgaggctcgccgcactcgct

SEQ ID NO: 195266 - DNA, 50 bp, Artificial
  Synthetic oligonucleotide
aaagaccgcatgaacctgtgcattggccaagtccaatcggggactcgcgc

SEQ ID NO: 195267 - DNA, 50 bp, Artificial
  Synthetic oligonucleotide
aaagatcgcaaggccagggatgagaaacagcccaaggatcgcccccagta

SEQ ID NO: 195268 - DNA, 50 bp, Artificial
  Synthetic oligonucleotide
aaagcggccacgttgtgcgtcgaaactccctgaataacgccaaacccgct

SEQ ID NO: 195269 - DNA, 50 bp, Artificial
  Synthetic oligonucleotide
aaagcttcgctgaccgcatgatccgaagcgccaaagcgatagcgcaccgc

SEQ ID NO: 195270 - DNA, 50 bp, Artificial
  Synthetic oligonucleotide
gtgctaagggttcttcggggcgcatcccaatcaaggcacgaccagcagga

SEQ ID NO: 195271 - DNA, 55 bp, Artificial
  Synthetic oligonucleotide
cgtgcatgaacccataatcgccccacatgagcgtctcccgccgccgtttccttcg

SEQ ID NO: 195272 - DNA, 55 bp, Artificial
  Synthetic oligonucleotide
acgcgcatcgctccatccgttcgcggctcgctttgctcccagcataggccgtttt

SEQ ID NO: 195273 - DNA, 52 bp, Artificial
  Synthetic oligonucleotide
aatcatccccgtcccgtccggacttaagtaagggtcgttcggcttcgcatac

SEQ ID NO: 195274 - DNA, 55 bp, Artificial
  Synthetic oligonucleotide
ccgcaaccgtggtccttacaatcgtctcaagttcgaggtggcaaacgtgatcgcc

SEQ ID NO: 195275 - DNA, 55 bp, Artificial
  Synthetic oligonucleotide
aagcttacccgcacgctgttccgtaccctgatggtctcaggggcgctgagcgttg

SEQ ID NO: 195276 - DNA, 55 bp, Artificial
  Synthetic oligonucleotide
ccaaacggatcgagatccactaggcacgcggctaccggccacgcgtcgctaggtg

SEQ ID NO: 195277 - DNA, 54 bp, Artificial
  Synthetic oligonucleotide
taggggcggtgtctccttaacggccccatcgaatgcgaattacccgataccacg

SEQ ID NO: 195278 - DNA, 55 bp, Artificial
  Synthetic oligonucleotide
tatggttatcgtctccgcaatggcaggccctccgctttcgtcccgcggaagccct

SEQ ID NO: 195279 - DNA, 55 bp, Artificial
  Synthetic oligonucleotide
cattccgttgcaaagccacaagactcatctagacatccccacatgacgtttcggg

SEQ ID NO: 195280 - DNA, 55 bp, Artificial
  Synthetic oligonucleotide
aacggttcatcagttccccggcgactggaaggtgcagcgatcccttgagccggga

SEQ ID NO: 195281 - DNA, 55 bp, Artificial
  Synthetic oligonucleotide
tgctggtaaccggacgaatcctaataatgactgaggctagccatgtctaaccgcg

SEQ ID NO: 195282 - DNA, 55 bp, Artificial
  Synthetic oligonucleotide
atacctgcacgtctgagctaccggggacatctgggttctcgatcctgacccgggg

SEQ ID NO: 195283 - DNA, 55 bp, Artificial
  Synthetic oligonucleotide
tgtgaatgccgagctcatttggtgggtccctttcgtttactgggttggctacgaa

SEQ ID NO: 195284 - DNA, 55 bp, Artificial
  Synthetic oligonucleotide
cagcttgcgagacgacgaaaacatcgcgcactcctcatatcggacatagtgttgg

SEQ ID NO: 195285 - DNA, 54 bp, Artificial
  Synthetic oligonucleotide
aataagcagagaaccgggagataactcgaatggatctgaaaaccctgacctaca

SEQ ID NO: 195286 - DNA, 54 bp, Artificial
  Synthetic oligonucleotide
gcatgtgcccacgtccgttggtgtaattcgcgcgcgccacaactggtgacgggt

SEQ ID NO: 195287 - DNA, 53 bp, Artificial
  Synthetic oligonucleotide
cgcactcttgctctccaccgtttggattccagggacggcataagcgcagtttt

SEQ ID NO: 195288 - DNA, 53 bp, Artificial
  Synthetic oligonucleotide
gtgactcccggtggcgcggccatatcgcacgacccatcgaactgagtttgggg

SEQ ID NO: 195289 - DNA, 53 bp, Artificial
  Synthetic oligonucleotide
ttgtaaagcttagcgtcgaagttaactcggcgcgtttggtccaggtcctgttc

SEQ ID NO: 195290 - DNA, 52 bp, Artificial
  Synthetic oligonucleotide
gtcaggggtatgaggccactcacgaatctcgggcgcattgaagcgagagggg

SEQ ID NO: 195291 - DNA, 51 bp, Artificial
  Synthetic oligonucleotide
gtcaaactgcctacaatccagaacgtaacgccccaacgataagaggagagt

SEQ ID NO: 195292 - DNA, 50 bp, Artificial
  Synthetic oligonucleotide
cccggtcgttcgcgaattttccgagccatcccaaacgcaccccggctccg

SEQ ID NO: 195293 - DNA, 55 bp, Artificial
  Synthetic oligonucleotide
gataagggataagaccgtttcgccatgcacacctcgcgaccgcttcactcaagtc

SEQ ID NO: 195294 - DNA, 50 bp, Artificial
  Synthetic oligonucleotide
cccgcatgcgagggcacgcggtctagaggccgaaaacccccagagattcg

SEQ ID NO: 195295 - DNA, 50 bp, Artificial
  Synthetic oligonucleotide
cccgacctacttatccagcggcacagtcagcaggggacagacaccgccca

SEQ ID NO: 195296 - DNA, 50 bp, Artificial
  Synthetic oligonucleotide
ccactcgctgatgctcgattacgcaccgtcggagttttcccgtctgcggc

SEQ ID NO: 195297 - DNA, 50 bp, Artificial
  Synthetic oligonucleotide
tcagtctcaacttcgttagggataggctgccttcgagacattccgtcgtc

SEQ ID NO: 195298 - DNA, 50 bp, Artificial
  Synthetic oligonucleotide
catggggccttccctcacgcacctttccgtgtattgaagagcgcggccgc

SEQ ID NO: 195299 - DNA, 50 bp, Artificial
  Synthetic oligonucleotide
aaaagacacgcgcatcgctccatccgttcgcggctcgctttgctcccagc

SEQ ID NO: 195300 - DNA, 50 bp, Artificial
  Synthetic oligonucleotide
aactcgccggattttaacggatttcagggattgaggcgcagccaatcgcg

SEQ ID NO: 195301 - DNA, 50 bp, Artificial
  Synthetic oligonucleotide
aagaaccgagcgacgctgcacaaccggcttacccgattacgggcgaacgc

SEQ ID NO: 195302 - DNA, 50 bp, Artificial
  Synthetic oligonucleotide
aagcccatggtcacagcctcgtaatagagccgttcagcacgggtagcccc

SEQ ID NO: 195303 - DNA, 50 bp, Artificial
  Synthetic oligonucleotide
aagcgactacaagccgacccgccactcgctgatgctcgattacgcaccgt

SEQ ID NO: 195304 - DNA, 55 bp, Artificial
  Synthetic oligonucleotide
gccacaagcctttctatcgcttgttatgtgatttgcggattactcaactaccgcc

SEQ ID NO: 195305 - DNA, 50 bp, Artificial
  Synthetic oligonucleotide
aaggcatcccaccgcccgtgagcttcgcaagcgccaccgtgatataggcg

SEQ ID NO: 195306 - DNA, 50 bp, Artificial
  Synthetic oligonucleotide
aattcgggtggcgcggtcaaccccaagatatggggcgctaggtaggactg

SEQ ID NO: 195307 - DNA, 50 bp, Artificial
  Synthetic oligonucleotide
acgctctaggggtatacccttcgcaccgccggagtagatcgcggatcggc

SEQ ID NO: 195308 - DNA, 50 bp, Artificial
  Synthetic oligonucleotide
acggtccgctggaatgacgcgttgggcctagcctcatgggcctactgagc

SEQ ID NO: 195309 - DNA, 50 bp, Artificial
  Synthetic oligonucleotide
agaacggctctagcgcccatcaatgctagcccacggctgtttgcgtccag

SEQ ID NO: 195310 - DNA, 50 bp, Artificial
  Synthetic oligonucleotide
agcgcaacacgtcaggatattcgagccgggcccctttgattcgtcgccga

SEQ ID NO: 195311 - DNA, 50 bp, Artificial
  Synthetic oligonucleotide
agcgtaggcgatgcggtacaacatcggccgcagggcttcaagagtgggtc

SEQ ID NO: 195312 - DNA, 50 bp, Artificial
  Synthetic oligonucleotide
agtcgggcgcgtcatgatgtcttgcgtctccttggtcagacttgcgagcg

SEQ ID NO: 195313 - DNA, 50 bp, Artificial
  Synthetic oligonucleotide
agtggatcgcaaaggcatgggaaacctccattggttgctccgcgggaacc

SEQ ID NO: 195314 - DNA, 50 bp, Artificial
  Synthetic oligonucleotide
atagcgtttgatgctgggcctagcttcgccggtcggaccccaccaaatcc

SEQ ID NO: 195315 - DNA, 55 bp, Artificial
  Synthetic oligonucleotide
gcgaaaacgcagggcggaatgtagaagtttcatgtgtcggatcggtgaaaagctg

SEQ ID NO: 195316 - DNA, 50 bp, Artificial
  Synthetic oligonucleotide
atgctgggcctagcttcgccggtcggaccccaccaaatccggccgtcgtc

SEQ ID NO: 195317 - DNA, 50 bp, Artificial
  Synthetic oligonucleotide
atggtcggtcattcccccaggttggccggaaggcagcgggactgaaagtt

SEQ ID NO: 195318 - DNA, 50 bp, Artificial
  Synthetic oligonucleotide
atgtctacggtcggaatgggcgtcgtatcgccccgcacctaaggcgatta

SEQ ID NO: 195319 - DNA, 50 bp, Artificial
  Synthetic oligonucleotide
atgtgcgagcaaaccccggatatgggcagccaacgtggtagccggtagcg

SEQ ID NO: 195320 - DNA, 50 bp, Artificial
  Synthetic oligonucleotide
atttcgacgcccggtcgccccataactcagcgtggtgtacctcagcaagc

SEQ ID NO: 195321 - DNA, 50 bp, Artificial
  Synthetic oligonucleotide
caagccgacccgccactcgctgatgctcgattacgcaccgtcggagtttt

SEQ ID NO: 195322 - DNA, 50 bp, Artificial
  Synthetic oligonucleotide
cacatggccactcgcgtccggcaactacctcgcactgtatggcgtgcggt

SEQ ID NO: 195323 - DNA, 50 bp, Artificial
  Synthetic oligonucleotide
cacgcgagagcggtttacctctggttctcggtcctccgtacgaggcgcgc

SEQ ID NO: 195324 - DNA, 50 bp, Artificial
  Synthetic oligonucleotide
cagcgagacccggtcgttcgcgaattttccgagccatcccaaacgcaccc

SEQ ID NO: 195325 - DNA, 50 bp, Artificial
  Synthetic oligonucleotide
cagggacgctcaaaatagccggcttcgccagctgtttgggtgcccgttac

SEQ ID NO: 195326 - DNA, 55 bp, Artificial
  Synthetic oligonucleotide
gcggtcccggatttcgtgctcgtgagatcccgtaccgatcccacaggtgcgcagt

SEQ ID NO: 195327 - DNA, 55 bp, Artificial
  Synthetic oligonucleotide
gcgtaaggggaaacggatatgtcacgtgtagcgaataatcccattacggtcccga

SEQ ID NO: 195328 - DNA, 55 bp, Artificial
  Synthetic oligonucleotide
gcgtcttcccgtagttgtaccccaatcggagggtcagatccggtgttgcggcata

SEQ ID NO: 195329 - DNA, 55 bp, Artificial
  Synthetic oligonucleotide
ggggcttcacctttgccggacttaatgccgaaataccagacgcctggttgatact

SEQ ID NO: 195330 - DNA, 56 bp, Artificial
  Synthetic oligonucleotide
atttgggtggaaagtctccaatcgggattgcatcccaagccacagggtaggaaaga

SEQ ID NO: 195331 - DNA, 55 bp, Artificial
  Synthetic oligonucleotide
ccttgcagggtttaaacctgtgtttacacctactataattgatctcaaattactc

SEQ ID NO: 195332 - DNA, 52 bp, Artificial
  Synthetic oligonucleotide
ccgtgagttcctgggtgtagtggtccccagtttaacactatctgggaagttt

SEQ ID NO: 195333 - DNA, 54 bp, Artificial
  Synthetic oligonucleotide
tatgtttgtgtcatatccccagttgcagtgatatatttgcattgtagctccgtt

SEQ ID NO: 195334 - DNA, 53 bp, Artificial
  Synthetic oligonucleotide
gagtttcttatgattaactccgaaaacttccctggaacggtagtaagagatag

SEQ ID NO: 195335 - DNA, 54 bp, Artificial
  Synthetic oligonucleotide
acgaagtaatggtagttcgggacatcatccaggacccttgctatccagtaaacc

SEQ ID NO: 195336 - DNA, 54 bp, Artificial
  Synthetic oligonucleotide
acttcaacgcctctaacaagaccatcggtaggaccatatgcgattgttcttact

SEQ ID NO: 195337 - DNA, 53 bp, Artificial
  Synthetic oligonucleotide
ggaaaatggacgcatgactatccgcttacctacgattatctaaaatctttggg

SEQ ID NO: 195338 - DNA, 53 bp, Artificial
  Synthetic oligonucleotide
tagaattcgtgaaagatgggaaggaatgacgggagatttacttgatagatggt

SEQ ID NO: 195339 - DNA, 53 bp, Artificial
  Synthetic oligonucleotide
cttttgacacaaagttaagacttatggctgtcgtcgttaaatcagatgtgggt

SEQ ID NO: 195340 - DNA, 53 bp, Artificial
  Synthetic oligonucleotide
gaggaccaaagattgcatagtacacaaggggtgcatctacaaagtcccagtag

SEQ ID NO: 195341 - DNA, 53 bp, Artificial
  Synthetic oligonucleotide
cacacctaataggtgagttatgggttgaaggatacgttggagtatacttcaga

SEQ ID NO: 195342 - DNA, 58 bp, Artificial
  Synthetic oligonucleotide
tacgaagctcgaaggtcttacagtgcgaccacccacttattggggctgtgctcagagc

SEQ ID NO: 195343 - DNA, 53 bp, Artificial
  Synthetic oligonucleotide
agggtctattatagcagttagaacggttgcgtacttagaggctggattcgagc

SEQ ID NO: 195344 - DNA, 52 bp, Artificial
  Synthetic oligonucleotide
ccccattctatagcgggtataggtggtgcaagaacgagctgtgagagcagct

SEQ ID NO: 195345 - DNA, 52 bp, Artificial
  Synthetic oligonucleotide
ctttcgtatatgaaccctgcagcaaggaacagagctccagatgttaaaccgt

SEQ ID NO: 195346 - DNA, 52 bp, Artificial
  Synthetic oligonucleotide
gtcgtattcaaagtcatagtcctgccaagatgggtcaaatgcatccttgtcc

SEQ ID NO: 195347 - DNA, 51 bp, Artificial
  Synthetic oligonucleotide
ggaggttggaaaggctctatcccgtatgtcttacgccctatcccagcctac

SEQ ID NO: 195348 - DNA, 51 bp, Artificial
  Synthetic oligonucleotide
ccgaggtcatctaaaaccagaataggaacttctaagatttctttcagtagg

SEQ ID NO: 195349 - DNA, 51 bp, Artificial
  Synthetic oligonucleotide
gccatcgtgcgtcgaagcaggaaaacccctccttccataagatgggttagt

SEQ ID NO: 195350 - DNA, 51 bp, Artificial
  Synthetic oligonucleotide
gatacatttccaccttttaggctcacatcttcccaagttttacatctacta

SEQ ID NO: 195351 - DNA, 51 bp, Artificial
  Synthetic oligonucleotide
acttgagagattgtgtctgtaaactcaacgctaactacgtaggcttgaatt

SEQ ID NO: 195352 - DNA, 51 bp, Artificial
  Synthetic oligonucleotide
gtttagtccaactataccggttcttggaatatttccgaccttaacttctgc

SEQ ID NO: 195353 - DNA, 57 bp, Artificial
  Synthetic oligonucleotide
ggtatcctcttgactatataggttaaagttcttcgtgtctataaggcatattactcc

SEQ ID NO: 195354 - DNA, 50 bp, Artificial
  Synthetic oligonucleotide
ctttgccccaaacatctttaagaacctcttttgttatatccttgcctcca

SEQ ID NO: 195355 - DNA, 50 bp, Artificial
  Synthetic oligonucleotide
tcggttgtgattactataaccggtatcataagcaatgcaagcgctacaga

SEQ ID NO: 195356 - DNA, 50 bp, Artificial
  Synthetic oligonucleotide
gttgtaaaggtagcccttactatccctattctgggtaagtctttaagtag

SEQ ID NO: 195357 - DNA, 50 bp, Artificial
  Synthetic oligonucleotide
catagtatttgattggataccagacttcttaggttggttgtctgtagtgg

SEQ ID NO: 195358 - DNA, 50 bp, Artificial
  Synthetic oligonucleotide
ccctagaacaattactgtcgctatgattaaaactgctgccggataccaag

SEQ ID NO: 195359 - DNA, 50 bp, Artificial
  Synthetic oligonucleotide
taattacaaggtggtccatcggaaccaaaggctaatttgtatgcaactac

SEQ ID NO: 195360 - DNA, 49 bp, Artificial
  Synthetic oligonucleotide
gttcccctgtatccagtttttcgttagtgtgtaaaagtttccccaaggg

SEQ ID NO: 195361 - DNA, 56 bp, Artificial
  Synthetic oligonucleotide
gacctgcttcaaaaacagggcagattgaaagactactggtattacgatgttatgct

SEQ ID NO: 195362 - DNA, 55 bp, Artificial
  Synthetic oligonucleotide
ggaagccccgcagcctgtgtcatcttctctcccataacctctttagtccttctgt

SEQ ID NO: 195363 - DNA, 55 bp, Artificial
  Synthetic oligonucleotide
gctatgcttccatctggacaggttgcttggtttgaattatcgggacaatcaactt

SEQ ID NO: 195364 - DNA, 55 bp, Artificial
  Synthetic oligonucleotide
gagttagaagatagtttacgtgtagacggcagaaggacagttaacatagacccgg

SEQ ID NO: 195365 - DNA, 55 bp, Artificial
  Synthetic oligonucleotide
ggatagttaactgcgtctgtaaatttgtatgctattagctttctaccaagcaacg

SEQ ID NO: 195366 - DNA, 55 bp, Artificial
  Synthetic oligonucleotide
gagtatagaagaatcgtagagttaataagaagagagcctaacgaagttgagctgg

SEQ ID NO: 195367 - DNA, 60 bp, Artificial
  Synthetic oligonucleotide
gtgcaattactactaaaggatgaacagcttgaagtgtcaattgtatctgtataacatctg

SEQ ID NO: 195368 - DNA, 55 bp, Artificial
  Synthetic oligonucleotide
gacgggtatcaggctccaagtatcttacaggttgagggagcaaaggatatagctg

SEQ ID NO: 195369 - DNA, 55 bp, Artificial
  Synthetic oligonucleotide
ggctggacaaaggtttgcaccgatactggagagtgtttcaagtttcctacttggc

SEQ ID NO: 195370 - DNA, 55 bp, Artificial
  Synthetic oligonucleotide
gacgacccaagctatacaacaggctacgttgcaaccaaaactacatactaccgta

SEQ ID NO: 195371 - DNA, 55 bp, Artificial
  Synthetic oligonucleotide
gaccgggtagcttctctacgaagctcgaaggtcttacagtgcgaccacccactta

SEQ ID NO: 195372 - DNA, 54 bp, Artificial
  Synthetic oligonucleotide
gaatataaacggagcaaacaacgacacgagagttaaaacagacgataaccctac

SEQ ID NO: 195373 - DNA, 55 bp, Artificial
  Synthetic oligonucleotide
gaaggttctgatgctgctcttgtgccgattgtatcttctgcaagggctttaaggg

SEQ ID NO: 195374 - DNA, 55 bp, Artificial
  Synthetic oligonucleotide
cttggtcgtagatgtactttgctacgttttcagcacttggagaaaagtcgtatat

SEQ ID NO: 195375 - DNA, 55 bp, Artificial
  Synthetic oligonucleotide
cttcctgtcctacaaattgacttcccatagaacctactaatgcactaattccatg

SEQ ID NO: 195376 - DNA, 55 bp, Artificial
  Synthetic oligonucleotide
cttcctctgatgcttatcattcaacttttcgctgtcatcctgaggacataagtcc

SEQ ID NO: 195377 - DNA, 55 bp, Artificial
  Synthetic oligonucleotide
cttccgatgaggtcgtgtttccacctataactgaaaatccgtatctatcaagggc

SEQ ID NO: 195378 - DNA, 53 bp, Artificial
  Synthetic oligonucleotide
acgcggtataaacccgcagggaccgacgggatactgagccctttctggaccca

SEQ ID NO: 195379 - DNA, 55 bp, Artificial
  Synthetic oligonucleotide
ctgtaaaaggctgaaagagacacagttcccaatcacaatagagggtcacacagac

SEQ ID NO: 195380 - DNA, 55 bp, Artificial
  Synthetic oligonucleotide
ctgattaaaatgagtagctatgttaactgcggcattatctacctgaccctgaacc

SEQ ID NO: 195381 - DNA, 54 bp, Artificial
  Synthetic oligonucleotide
ttcggtccaaacgtcgttgtttacccggatgctatatggtacggcaatgtaacc

SEQ ID NO: 195382 - DNA, 55 bp, Artificial
  Synthetic oligonucleotide
ttattcctttgcctatccagttcagtatgttagggcttcactggaagtatcagac

SEQ ID NO: 195383 - DNA, 55 bp, Artificial
  Synthetic oligonucleotide
tgttcccgaatggtactctgtatataagatggctgtgttctcaacactcggatac

SEQ ID NO: 195384 - DNA, 55 bp, Artificial
  Synthetic oligonucleotide
tgggtggctacttggcacacttatatgctgacccagcccatagttggataattcc

SEQ ID NO: 195385 - DNA, 55 bp, Artificial
  Synthetic oligonucleotide
tgcaacaatcctgtaagcaagttcagtagctctcattaagtcattctcagctccg

SEQ ID NO: 195386 - DNA, 54 bp, Artificial
  Synthetic oligonucleotide
tcgatggtatttcaagagccatcggcagttttaaaccctttactaaccgtagga

SEQ ID NO: 195387 - DNA, 55 bp, Artificial
  Synthetic oligonucleotide
tcatccgtttgtagcggactataatatcttgcagtgtagcgttaagagcatgtcc

SEQ ID NO: 195388 - DNA, 55 bp, Artificial
  Synthetic oligonucleotide
tcaccctccacggtgaggtctaccatatacagatcgcaggtgttggaagtccagt

SEQ ID NO: 195389 - DNA, 56 bp, Artificial
  Synthetic oligonucleotide
tcctgtttattagagtaaatgtcctgtttattagagtaaatgtcctgtttattaga

SEQ ID NO: 195390 - DNA, 55 bp, Artificial
  Synthetic oligonucleotide
tatgggtttcccagtaggaaggctgtggacaggattgggtaacctccgcctgtgc

SEQ ID NO: 195391 - DNA, 55 bp, Artificial
  Synthetic oligonucleotide
tagacagttatgtatagactttgagggtgttgacccaatagaagagccaatcccg

SEQ ID NO: 195392 - DNA, 55 bp, Artificial
  Synthetic oligonucleotide
gtttatcagctcttatgaaaagctcgaccatccaagtatgcccgtgtaatggctc

SEQ ID NO: 195393 - DNA, 55 bp, Artificial
  Synthetic oligonucleotide
gtgtctgcaaagaaagaccagtcaaccgttgaaatcggattaatacaaggtggtg

SEQ ID NO: 195394 - DNA, 55 bp, Artificial
  Synthetic oligonucleotide
gtgctattggtctggtgtctgcgtatcctacagccgtaaacattgcaggtgggag

SEQ ID NO: 195395 - DNA, 55 bp, Artificial
  Synthetic oligonucleotide
gtgcagaaaggggcttttccccgtagtatatctccgtgtaacactcatcagagca

SEQ ID NO: 195396 - DNA, 55 bp, Artificial
  Synthetic oligonucleotide
gtattgaccctaaaggagataatgaagtttctcttgcctgtatagacctgcttca

SEQ ID NO: 195397 - DNA, 55 bp, Artificial
  Synthetic oligonucleotide
gtaccggtgattcactaatcgctcctagttactcttcacttattatgtccgtgca

SEQ ID NO: 195398 - DNA, 55 bp, Artificial
  Synthetic oligonucleotide
gtacacggtggagttatatcaagtttagcggataatactggatggtatgcggtta

SEQ ID NO: 195399 - DNA, 55 bp, Artificial
  Synthetic oligonucleotide
gtaagggctacctttacaacttgccacagtttatagcttgtccaatacaagcccc

SEQ ID NO: 195400 - DNA, 56 bp, Artificial
  Synthetic oligonucleotide
gctttctaccacgtggggctggcttaatgccacggctgggggcgtttagtccataa

SEQ ID NO: 195401 - DNA, 55 bp, Artificial
  Synthetic oligonucleotide
gggtgctatggggatactcactggctttcggaacggatattggaggaataatagg

SEQ ID NO: 195402 - DNA, 54 bp, Artificial
  Synthetic oligonucleotide
gggtcttttgggctgtaaaaccaaaccttttattcgctgtcatctggagagtgg

SEQ ID NO: 195403 - DNA, 55 bp, Artificial
  Synthetic oligonucleotide
ggggaataatgggttacggtgcttcaagcagaattcatacagcctctatactcac

SEQ ID NO: 195404 - DNA, 55 bp, Artificial
  Synthetic oligonucleotide
gggctgaaacagcattctactgtgattatatacttccaatgggattagccggaga

SEQ ID NO: 195405 - DNA, 55 bp, Artificial
  Synthetic oligonucleotide
ggcttccagttccacctaattgcaagtcaacccagtttgtatttccgcttccata

SEQ ID NO: 195406 - DNA, 55 bp, Artificial
  Synthetic oligonucleotide
ggctgtggcgtacccatcaacagtctggtagtatttatccgttagatttacaacc

SEQ ID NO: 195407 - DNA, 55 bp, Artificial
  Synthetic oligonucleotide
cccagaatagggatagtaagggctacctttacaacttgccacagtttatagcttg

SEQ ID NO: 195408 - DNA, 55 bp, Artificial
  Synthetic oligonucleotide
ccagcttcattgataatctcctcggctctttgaaaatcccaacaaatgcctccag

SEQ ID NO: 195409 - DNA, 55 bp, Artificial
  Synthetic oligonucleotide
ccacttgaagttggcacttggacataaccacatgtagttccataggcatcacagg

SEQ ID NO: 195410 - DNA, 55 bp, Artificial
  Synthetic oligonucleotide
ccaatcgggattgcatcccaagccacagggtaggaaagattaagccagtattggc

SEQ ID NO: 195411 - DNA, 53 bp, Artificial
  Synthetic oligonucleotide
aactggaaggtcacgcggtataaacccgcagggaccgacgggatactgagccc

SEQ ID NO: 195412 - DNA, 55 bp, Artificial
  Synthetic oligonucleotide
ccaaccttggctttagccagtgaacatataagcagatagttttccatgccactgg

SEQ ID NO: 195413 - DNA, 55 bp, Artificial
  Synthetic oligonucleotide
catgtcctatacccagtatagaactgcaacctgttaagaatggaactacaaagat

SEQ ID NO: 195414 - DNA, 55 bp, Artificial
  Synthetic oligonucleotide
catataactgccggcgttccgcctacaatcagagttgacggaaaattaatgccaa

SEQ ID NO: 195415 - DNA, 55 bp, Artificial
  Synthetic oligonucleotide
caggttaaacacctcctctggatttactttgatagttgcaaattcagcccctaca

SEQ ID NO: 195416 - DNA, 55 bp, Artificial
  Synthetic oligonucleotide
cagctcccatatatccttatctttaggtatcctgataccaaacttttcagacaga

SEQ ID NO: 195417 - DNA, 55 bp, Artificial
  Synthetic oligonucleotide
cacttgggatacatatagccgaggaatctcacgagaaatcagaggcaagacatat

SEQ ID NO: 195418 - DNA, 55 bp, Artificial
  Synthetic oligonucleotide
cacttgcccttatggctatagagtcagctgccaagataatagcttcacatgtaag

SEQ ID NO: 195419 - DNA, 55 bp, Artificial
  Synthetic oligonucleotide
cacaggcatcgtgagatacggaaaggcgatagcaaacccttgttacgtatgccac

SEQ ID NO: 195420 - DNA, 55 bp, Artificial
  Synthetic oligonucleotide
caattatgggacggcgatactttacttggacaagctacatttacaccgggttctc

SEQ ID NO: 195421 - DNA, 55 bp, Artificial
  Synthetic oligonucleotide
atgctctgggttatctgcacttataaacagatacatggaagcactataaggaact

SEQ ID NO: 195422 - DNA, 60 bp, Artificial
  Synthetic oligonucleotide
ctatcttcagtgcataggtattgtagtctgtatcttcatgtaaaacttctcttatttggc

SEQ ID NO: 195423 - DNA, 55 bp, Artificial
  Synthetic oligonucleotide
aggaatgtcagcgtaagcgtcggtagatatctcacctgctatatggacaagaccc

SEQ ID NO: 195424 - DNA, 55 bp, Artificial
  Synthetic oligonucleotide
acttggattgtatgcagggctaacatcagaccagaaaagctatttcgttattggc

SEQ ID NO: 195425 - DNA, 55 bp, Artificial
  Synthetic oligonucleotide
acgcctcgtcaacgacaaggaattttcttgagtagtctttccttaaatgtgcaag

SEQ ID NO: 195426 - DNA, 55 bp, Artificial
  Synthetic oligonucleotide
acccggtttgcctgtaggctgggatagggcgtaagacatacaggataggaggttg

SEQ ID NO: 195427 - DNA, 55 bp, Artificial
  Synthetic oligonucleotide
acagagagacagattacctttactacttctcacctgacggaaagagacacatttt

SEQ ID NO: 195428 - DNA, 55 bp, Artificial
  Synthetic oligonucleotide
acaatcagaatgggcaggggcccaatcgtttagctcattcgacacatatcttgct

SEQ ID NO: 195429 - DNA, 55 bp, Artificial
  Synthetic oligonucleotide
aagatacacgatctttgttgctgttcctataaccgggatatgtgatatacctctg

SEQ ID NO: 195430 - DNA, 55 bp, Artificial
  Synthetic oligonucleotide
aacttggtgtttatggtggtatagttcttgcacttggaagggctttaggtgagac

SEQ ID NO: 195431 - DNA, 55 bp, Artificial
  Synthetic oligonucleotide
aactgttatcgttacagactgtggggagtttgatccgattgatagtacaccgggt

SEQ ID NO: 195432 - DNA, 55 bp, Artificial
  Synthetic oligonucleotide
aactgactatgcaatcgacgtaacatctcaaaccgcagctaacgcatcagtatca

SEQ ID NO: 195433 - DNA, 52 bp, Artificial
  Synthetic oligonucleotide
cctcccagtaactggaaggtcacgcggtataaacccgcagggaccgacggga

SEQ ID NO: 195434 - DNA, 55 bp, Artificial
  Synthetic oligonucleotide
aaagttagtatcaagccaatccttgtaaacttcatctggagctgggatatagaca

SEQ ID NO: 195435 - DNA, 55 bp, Artificial
  Synthetic oligonucleotide
aaaggcttcaagtgcgtactctccgtaagcagttgcaaagacgatgtaagggttt

SEQ ID NO: 195436 - DNA, 55 bp, Artificial
  Synthetic oligonucleotide
aaacctatctgaatccctgccgggactctattctgagttgagcttaaaacacccg

SEQ ID NO: 195437 - DNA, 55 bp, Artificial
  Synthetic oligonucleotide
cggttgtgtcctgacttcctactgttaacacctgaggctcgacgtacattcccgg

SEQ ID NO: 195438 - DNA, 54 bp, Artificial
  Synthetic oligonucleotide
cgggtggagccaagcagtactaatcgcccgtttggcttggccttttactaccta

SEQ ID NO: 195439 - DNA, 55 bp, Artificial
  Synthetic oligonucleotide
cgggaagtgcccgcacggcttaaactgcaccgacccggatacagctcttgaagct

SEQ ID NO: 195440 - DNA, 55 bp, Artificial
  Synthetic oligonucleotide
cggctgctaaaagtctctatgcaagtagagatatagaagaaccagagtgtagtgt

SEQ ID NO: 195441 - DNA, 55 bp, Artificial
  Synthetic oligonucleotide
cgagacagtataagatgttgttacttctggtgctaatctttgtattgccgtcaca

SEQ ID NO: 195442 - DNA, 55 bp, Artificial
  Synthetic oligonucleotide
ccttgcacctgggtatgtaacaggctgtgcgttccacaccataccgaatgtgtag

SEQ ID NO: 195443 - DNA, 55 bp, Artificial
  Synthetic oligonucleotide
cctgcgatacttctacttagctggttaagcatcgcaagtgcaacgggtctggtta

SEQ ID NO: 195444 - DNA, 58 bp, Artificial
  Synthetic oligonucleotide
gctctgagcacagccccaataagtgggtggtcgcactgtaagaccttcgagcttcgta

SEQ ID NO: 195445 - DNA, 55 bp, Artificial
  Synthetic oligonucleotide
cctgaacatgcctccttctaaaattaccatcctgacggtgttgaaaatgaactgc

SEQ ID NO: 195446 - DNA, 55 bp, Artificial
  Synthetic oligonucleotide
cctcatagttcattcccggtcccttacgaacattcagattagccgttgtgcagta

SEQ ID NO: 195447 - DNA, 55 bp, Artificial
  Synthetic oligonucleotide
ccgaaacgtggtacggttttagacctgctactcctgatgaattgccaatacttgg

SEQ ID NO: 195448 - DNA, 55 bp, Artificial
  Synthetic oligonucleotide
cccttgcagaagatacaatcggcacaagagcagcatcagaaccttccgcatattc

SEQ ID NO: 195449 - DNA, 55 bp, Artificial
  Synthetic oligonucleotide
cccagtacaaggatagatgccctcatcttatttactaaatcgtatggagcggtgt

SEQ ID NO: 195450 - DNA, 55 bp, Artificial
  Synthetic oligonucleotide
cccgccgttggctataggtgatatgatctttataccgtcaaagggtgtgatagcg

SEQ ID NO: 195451 - DNA, 54 bp, Artificial
  Synthetic oligonucleotide
ctctgctggaagggtgtctaagaagttcgttacagcttccacacttgctaacgc

SEQ ID NO: 195452 - DNA, 54 bp, Artificial
  Synthetic oligonucleotide
tcgtgtcaacaccaaacggttctaccgcatacgctttgtcggcaggtggtccga

SEQ ID NO: 195453 - DNA, 54 bp, Artificial
  Synthetic oligonucleotide
gcccatcctaagtcatagcccaccgcatctatatccatcaatgcctgtggtcca

SEQ ID NO: 195454 - DNA, 54 bp, Artificial
  Synthetic oligonucleotide
tcatcacaaggttcatatccacctgcgcgtttgagtcttctgcataattaaggt

SEQ ID NO: 195455 - DNA, 55 bp, Artificial
  Synthetic oligonucleotide
cgatgaattctgtcgcctagaaacactcgcggacgtcggctcttcaagaattgga

SEQ ID NO: 195456 - DNA, 55 bp, Artificial
  Synthetic oligonucleotide
cggcctaaccgatttcggatgtgcggccaagtgcgcttcgcgttatgccaagggg

SEQ ID NO: 195457 - DNA, 51 bp, Artificial
  Synthetic oligonucleotide
tatccaaactgccgatccccacttggctaatgccggttgagtccattaccc

SEQ ID NO: 195458 - DNA, 51 bp, Artificial
  Synthetic oligonucleotide
taggcgtcggcgttacgtacccgcactgcgtcagggcacgcgaaagaggct

SEQ ID NO: 195459 - DNA, 51 bp, Artificial
  Synthetic oligonucleotide
tacggaacgacgctggagtagaacgatttggcatttgagtcctgatcgccg

SEQ ID NO: 195460 - DNA, 51 bp, Artificial
  Synthetic oligonucleotide
cggttgtgcgtcaatacgtaccgcctagtcgtaaacgaagccgaacggatt

SEQ ID NO: 195461 - DNA, 51 bp, Artificial
  Synthetic oligonucleotide
ccgattgtgacgatggggccgaataggctggattcggcatcgcggtttgag

SEQ ID NO: 195462 - DNA, 50 bp, Artificial
  Synthetic oligonucleotide
acggttagttactccccacggccatcaatcgggcgggtccgctctcgcca

SEQ ID NO: 195463 - DNA, 50 bp, Artificial
  Synthetic oligonucleotide
acggtaccacgccgagacataatagaggcgcgagcttcgctccaccacgc

SEQ ID NO: 195464 - DNA, 50 bp, Artificial
  Synthetic oligonucleotide
acgggggttggggccgataaggtcatcccactccacgcgatacaggcctt

SEQ ID NO: 195465 - DNA, 50 bp, Artificial
  Synthetic oligonucleotide
acggcgttcacgggtcacgactccgttcgtcacttcgagacggatcaggc

SEQ ID NO: 195466 - DNA, 50 bp, Artificial
  Synthetic oligonucleotide
acggcgctggagtgtctgttacggctccaatagatgcgcggaggcactct

SEQ ID NO: 195467 - DNA, 55 bp, Artificial
  Synthetic oligonucleotide
cgggagcaccttggtggaagtccgcgtcaacttacacgcagtttatgatcaacgc

SEQ ID NO: 195468 - DNA, 50 bp, Artificial
  Synthetic oligonucleotide
acggcctttgggtctatgggccggaagagttccttgcgtcgcgtccgcgt

SEQ ID NO: 195469 - DNA, 50 bp, Artificial
  Synthetic oligonucleotide
acggagcccatgtcgcatcggcctccgggcatttcgatcccaaccgacag

SEQ ID NO: 195470 - DNA, 50 bp, Artificial
  Synthetic oligonucleotide
acgcttcgtgacaaggggcgccggccaaagctgattgtacccgggctaga

SEQ ID NO: 195471 - DNA, 50 bp, Artificial
  Synthetic oligonucleotide
acgcgtcgaggcctttctggagttggtcaaaggtcgctcggcggcactgg

SEQ ID NO: 195472 - DNA, 50 bp, Artificial
  Synthetic oligonucleotide
acgcgaggaacgatagccgcatgcctcatgacacgccgctcattgcaacc

SEQ ID NO: 195473 - DNA, 50 bp, Artificial
  Synthetic oligonucleotide
acgcctccatcctgtggggaaagctctgtccagccgacagcggagacggt

SEQ ID NO: 195474 - DNA, 50 bp, Artificial
  Synthetic oligonucleotide
acgccgctaacctcgaccgctcacagcgaataccgggccagtccggttaa

SEQ ID NO: 195475 - DNA, 50 bp, Artificial
  Synthetic oligonucleotide
acgtttgcgcccaccttacaacggttcgccgctccggcctatggtcgcgt

SEQ ID NO: 195476 - DNA, 50 bp, Artificial
  Synthetic oligonucleotide
actctgggcgaccatccccatgacagttcgctgcgaggtgccttagcgtg

SEQ ID NO: 195477 - DNA, 50 bp, Artificial
  Synthetic oligonucleotide
actgaccaaccgacgcaggagaccgctcgggtggcgcgaaatgactggac

SEQ ID NO: 195478 - DNA, 55 bp, Artificial
  Synthetic oligonucleotide
cgggcggcttgcgaccgaaacgggagcgttttggaagagcgatatagggcagagg

SEQ ID NO: 195479 - DNA, 50 bp, Artificial
  Synthetic oligonucleotide
actggcccctcggttatggctgggcgggagcgctaatcgcattcgagcat

SEQ ID NO: 195480 - DNA, 50 bp, Artificial
  Synthetic oligonucleotide
actgtgcccgggacgcaccggtctggaatcgtatcaggcgatggcaaggc

SEQ ID NO: 195481 - DNA, 50 bp, Artificial
  Synthetic oligonucleotide
acttgagccgcccgggcataaacatcctcgcgcgtgaagcctgatttggc

SEQ ID NO: 195482 - DNA, 50 bp, Artificial
  Synthetic oligonucleotide
agaatcagtgcgcattgctggctccgctctttccatgcggtattggcggg

SEQ ID NO: 195483 - DNA, 50 bp, Artificial
  Synthetic oligonucleotide
agaatcgctcgcctttttgtgaccgccgtcgacccttgcgtcggctatga

SEQ ID NO: 195484 - DNA, 50 bp, Artificial
  Synthetic oligonucleotide
agaccgccatgggtcgcgtttcgggttgcaggaacgagcggcgaacgatg

SEQ ID NO: 195485 - DNA, 50 bp, Artificial
  Synthetic oligonucleotide
agacctgccggcaaggcgtaaagtgccccgagtgcaaggcggatgatcgg

SEQ ID NO: 195486 - DNA, 50 bp, Artificial
  Synthetic oligonucleotide
ctagaagtcgtttcgttcgcatgtgagacccacttcctctgtactagggt

SEQ ID NO: 195487 - DNA, 50 bp, Artificial
  Synthetic oligonucleotide
ttcgacgaacgtgtggccctccgggctgatctcatagatcgcgatgtttt

SEQ ID NO: 195488 - DNA, 50 bp, Artificial
  Synthetic oligonucleotide
aacggtcgtcccctctacgcctccatcctgtggggaaagctctgtccagc

SEQ ID NO: 195489 - DNA, 55 bp, Artificial
  Synthetic oligonucleotide
cggggatgggcaatcaccttattcaagacatgagcagacagggcgagtctgcgcc

SEQ ID NO: 195490 - DNA, 50 bp, Artificial
  Synthetic oligonucleotide
aacggttaagccgggacggtattcgtagctgcctcagccagggccattgc

SEQ ID NO: 195491 - DNA, 50 bp, Artificial
  Synthetic oligonucleotide
aacggttcatcgcgtgacgctgcgacgatcaacgagggcctttcgttgcc

SEQ ID NO: 195492 - DNA, 50 bp, Artificial
  Synthetic oligonucleotide
aacgtgcggcacccgtgatcactcttgacgcccgctgacttctcttgacg

SEQ ID NO: 195493 - DNA, 50 bp, Artificial
  Synthetic oligonucleotide
aagaccgccccgtgatgcacgacatggacacgcttcccttcgttacgccg

SEQ ID NO: 195494 - DNA, 50 bp, Artificial
  Synthetic oligonucleotide
aagacctggactgaattaccggcggatttagccgatagccacggggccgc

SEQ ID NO: 195495 - DNA, 50 bp, Artificial
  Synthetic oligonucleotide
aagagacggcgatatgcgcccctcatggcttgagagaccggcccctcatg

SEQ ID NO: 195496 - DNA, 50 bp, Artificial
  Synthetic oligonucleotide
aagagcgcctatagtgcacacacgatagtagcccctcggccctgtgccgc

SEQ ID NO: 195497 - DNA, 50 bp, Artificial
  Synthetic oligonucleotide
aagagtggcctcgggtgagacttttgcccgtattccgctcgtgcctcaga

SEQ ID NO: 195498 - DNA, 50 bp, Artificial
  Synthetic oligonucleotide
aagcatgtcggcgcacgatgcgaacgtatcctgctgagccaggatccggt

SEQ ID NO: 195499 - DNA, 50 bp, Artificial
  Synthetic oligonucleotide
aagccggacacgaagttcaagaggttctgggcgcttgtcgttgcagcgcc

SEQ ID NO: 195500 - DNA, 55 bp, Artificial
  Synthetic oligonucleotide
cgtggctctatggaagcgctctccaaacgaaatacctagtgacggcgaacggcgg

SEQ ID NO: 195501 - DNA, 50 bp, Artificial
  Synthetic oligonucleotide
aagccgtcgcggacgctcgagaatttgagagcccatcccttcgcggttgc

SEQ ID NO: 195502 - DNA, 50 bp, Artificial
  Synthetic oligonucleotide
aagcgccagactacaacgcgccttaatccgcgctgttccaattccgtcgc

SEQ ID NO: 195503 - DNA, 50 bp, Artificial
  Synthetic oligonucleotide
aagcgccgcgcattgaggtgcacaggggccatgtccggatcatctagccg

SEQ ID NO: 195504 - DNA, 50 bp, Artificial
  Synthetic oligonucleotide
aagcggcctgagctttttgcgtccgagggaagttgcgtttgtagcgtggc

SEQ ID NO: 195505 - DNA, 50 bp, Artificial
  Synthetic oligonucleotide
aagctaagcttgctcttcgcaccctttatcaagccgaccggcgcacgcag

SEQ ID NO: 195506 - DNA, 50 bp, Artificial
  Synthetic oligonucleotide
aagctccggcgattattaggcccgccccagagggctatacgtgcaacgcc

SEQ ID NO: 195507 - DNA, 50 bp, Artificial
  Synthetic oligonucleotide
aagctggtcgatgcaaggatttcgcccacgtgacggttacatcgcggcgg

SEQ ID NO: 195508 - DNA, 50 bp, Artificial
  Synthetic oligonucleotide
aaggaacgccgcgtacttatgcaggctctctcgcgggcacgccggtattc

SEQ ID NO: 195509 - DNA, 50 bp, Artificial
  Synthetic oligonucleotide
aaggcccaatccattgcctgccgtggtccggctcttttccagccgataca

SEQ ID NO: 195510 - DNA, 50 bp, Artificial
  Synthetic oligonucleotide
aaggccccgcgttaggccgcctttgcgtcgattcttggactttcggccgc

SEQ ID NO: 195511 - DNA, 55 bp, Artificial
  Synthetic oligonucleotide
ctgcttcctggggcgcccggatttgacgaattatcggcgggatttgtggtcgtgc

SEQ ID NO: 195512 - DNA, 50 bp, Artificial
  Synthetic oligonucleotide
aaggccgcccccaatggaagatcaggtgtaacccggcaccgatccgtgca

SEQ ID NO: 195513 - DNA, 50 bp, Artificial
  Synthetic oligonucleotide
aagggacaaacactatctcttggcggacggtacgcggtgcgactcgcgca

SEQ ID NO: 195514 - DNA, 50 bp, Artificial
  Synthetic oligonucleotide
aaggtccggcaatttaacaccgttaggaccggcatgcgagcggcgtgctg

SEQ ID NO: 195515 - DNA, 50 bp, Artificial
  Synthetic oligonucleotide
aaggtcgcgggagtttgcgccccgattagccctgtagcttcttagacgcc

SEQ ID NO: 195516 - DNA, 50 bp, Artificial
  Synthetic oligonucleotide
aagtatggccgcaacgaagagcatggtcctcacaccctgattgccgggga

SEQ ID NO: 195517 - DNA, 50 bp, Artificial
  Synthetic oligonucleotide
aagtcccgcgacgtctcagcggacgttttcaggaggggccgacatgttca

SEQ ID NO: 195518 - DNA, 50 bp, Artificial
  Synthetic oligonucleotide
aagtgcacgcacgggcgtatccctcccctcctacggaatgccgcggatta

SEQ ID NO: 195519 - DNA, 50 bp, Artificial
  Synthetic oligonucleotide
aagtgtgcgatgcatgctgcacctcctcgtttgtaccagttggccccgcc

SEQ ID NO: 195520 - DNA, 50 bp, Artificial
  Synthetic oligonucleotide
aaaacgaccccgcctctttccccgaccgccacgcacccgatttgcggcag

SEQ ID NO: 195521 - DNA, 50 bp, Artificial
  Synthetic oligonucleotide
aaaacgctcctatagcacctttggccggcagtcagagaggcccgaggtcg

SEQ ID NO: 195522 - DNA, 55 bp, Artificial
  Synthetic oligonucleotide
ctgtcgtgaaggcttaactttgcatacagtttatcggagaacgcttcggaagccg

SEQ ID NO: 195523 - DNA, 50 bp, Artificial
  Synthetic oligonucleotide
aaaagacgaaacaacgcgcgcccctttctcgcagcactcgatcgcccgtc

SEQ ID NO: 195524 - DNA, 50 bp, Artificial
  Synthetic oligonucleotide
aaagcccggaaggcagcctctacgcgaactacgtgatttccggacgcctt

SEQ ID NO: 195525 - DNA, 50 bp, Artificial
  Synthetic oligonucleotide
aaagcgtccctgcggcgtccgatgtgtctcctcgcattgaggcatgtgcg

SEQ ID NO: 195526 - DNA, 50 bp, Artificial
  Synthetic oligonucleotide
aaagcgtgattcgggtggcgttcgtaagtccgggcggttcagctttccga

SEQ ID NO: 195527 - DNA, 50 bp, Artificial
  Synthetic oligonucleotide
aaagctcgttcgctcggcatcatgcctccgggccgtcccaacggacgcga

SEQ ID NO: 195528 - DNA, 50 bp, Artificial
  Synthetic oligonucleotide
aaatccattgcgaggtatgccggagacgtgtcgagcgcccagcgtcccat

SEQ ID NO: 195529 - DNA, 50 bp, Artificial
  Synthetic oligonucleotide
aaatccgtgcccgtctgtcattcggagaacgcgcccatgccatgagcgtt

SEQ ID NO: 195530 - DNA, 50 bp, Artificial
  Synthetic oligonucleotide
aaatcgcagctttgtgcgcgtcgctatttcccgtccggctttctcgccgt

SEQ ID NO: 195531 - DNA, 50 bp, Artificial
  Synthetic oligonucleotide
aacaaaggtgccggctgtagagccgcgtgtaagccgcagcgatagtgtcc

SEQ ID NO: 195532 - DNA, 50 bp, Artificial
  Synthetic oligonucleotide
aacactatctcttggcggacggtacgcggtgcgactcgcgcaagggacga

SEQ ID NO: 195533 - DNA, 55 bp, Artificial
  Synthetic oligonucleotide
cttggcttctactttgcatagaagcgactatggaacttggagcgaccctaatggc

SEQ ID NO: 195534 - DNA, 50 bp, Artificial
  Synthetic oligonucleotide
aacccagcaagacctgccggcaaggcgtaaagtgccccgagtgcaaggcg

SEQ ID NO: 195535 - DNA, 50 bp, Artificial
  Synthetic oligonucleotide
aacccccgaggtttttggcgatccggagagcagcggaaatgccccaaaca

SEQ ID NO: 195536 - DNA, 50 bp, Artificial
  Synthetic oligonucleotide
aacccgattccgcgacaccgagagtcgggcatcggtcagatatcaggcgg

SEQ ID NO: 195537 - DNA, 50 bp, Artificial
  Synthetic oligonucleotide
aacccggcagcgtagaaacgcgacgtcccctgggcccgaaaactcacaag

SEQ ID NO: 195538 - DNA, 50 bp, Artificial
  Synthetic oligonucleotide
aaccgaaggccgggaaaagcatgtcggcgcacgatgcgaacgtatcctgc

SEQ ID NO: 195539 - DNA, 50 bp, Artificial
  Synthetic oligonucleotide
aaccgccgggctatcgacgagcacttccgtttgcgagcgctggtaggcgt

SEQ ID NO: 195540 - DNA, 50 bp, Artificial
  Synthetic oligonucleotide
aaccgcgatgcgtcacccagccactgacctaagcttggtccgaaccgaga

SEQ ID NO: 195541 - DNA, 50 bp, Artificial
  Synthetic oligonucleotide
aaccgctgtaacggcctgagagcagtctacccaatcgctgcagcagaccc

SEQ ID NO: 195542 - DNA, 50 bp, Artificial
  Synthetic oligonucleotide
aaccgttctcgtgcgctcacggccgacatttgccgaggcgttgatgtcag

SEQ ID NO: 195543 - DNA, 50 bp, Artificial
  Synthetic oligonucleotide
aacctcgctagccatgctccgtctgtcggtcatagccaaccctggcgctt

SEQ ID NO: 195544 - DNA, 55 bp, Artificial
  Synthetic oligonucleotide
gaccgatgtaaagtgcgccatcgtctcgcaacatgcgcgccaatcgtccccagat

SEQ ID NO: 195545 - DNA, 50 bp, Artificial
  Synthetic oligonucleotide
aacctgccggcgcttgattgccaaacggctctaaatcccgctaccactgg

SEQ ID NO: 195546 - DNA, 50 bp, Artificial
  Synthetic oligonucleotide
aacctggacagaaccttggcgacaacgcgagtattacctggcgccggcac

SEQ ID NO: 195547 - DNA, 50 bp, Artificial
  Synthetic oligonucleotide
aacgcgcgcccctttctcgcagcactcgatcgcccgtcaaaggctagtcg

SEQ ID NO: 195548 - DNA, 50 bp, Artificial
  Synthetic oligonucleotide
aacggagacgctcgcccatactcaacgccatgtctttcggcccctgttcg

SEQ ID NO: 195549 - DNA, 50 bp, Artificial
  Synthetic oligonucleotide
aacggcatccgggcgcctcgtgtagctctcgcttgcgatccagatttgcg

SEQ ID NO: 195550 - DNA, 50 bp, Artificial
  Synthetic oligonucleotide
aacggctttgaggcggggatttggcctgttacacgcaccggctggtcatg

SEQ ID NO: 195551 - DNA, 50 bp, Artificial
  Synthetic oligonucleotide
aacgggatagccgtggggccggagctgaagcgtagccagaatcgcgctag

SEQ ID NO: 195552 - DNA, 50 bp, Artificial
  Synthetic oligonucleotide
aacggtccgtcaggcgaggggaccgaactgtcatcctctttgatccgccc

SEQ ID NO: 195553 - DNA, 50 bp, Artificial
  Synthetic oligonucleotide
acacgcggagggtggcggcgtaagctttgcccctttataggtgcgcaagt

SEQ ID NO: 195554 - DNA, 50 bp, Artificial
  Synthetic oligonucleotide
acactgcgatctgcggacgtcatccactcattttgggtgcccgcgctgtc

SEQ ID NO: 195555 - DNA, 55 bp, Artificial
  Synthetic oligonucleotide
gactttacgagggtggcaatggacaaatatcgcgtcgtcgtctggtgtgaatcct

SEQ ID NO: 195556 - DNA, 50 bp, Artificial
  Synthetic oligonucleotide
acagcgtccttggacgtgtccaatgtgctcatttcgccgatcctcccgcg

SEQ ID NO: 195557 - DNA, 50 bp, Artificial
  Synthetic oligonucleotide
acaggaggttgggtgctgggtgcaagtcgacgatgcgacttctccgctta

SEQ ID NO: 195558 - DNA, 50 bp, Artificial
  Synthetic oligonucleotide
acaggcgtgccattctgctcgccgtattaatcgcagcccgtgagcagtcg

SEQ ID NO: 195559 - DNA, 50 bp, Artificial
  Synthetic oligonucleotide
acagtccccggccgcattgcacagcgagatttccaaccgtccgttggcgc

SEQ ID NO: 195560 - DNA, 50 bp, Artificial
  Synthetic oligonucleotide
accaagtcccggcctcgcatcgtcgcagcttcagttcagtcgggtcatcg

SEQ ID NO: 195561 - DNA, 50 bp, Artificial
  Synthetic oligonucleotide
accacatcagagaatccgacaggcgttgactctcccggactcgggcgggt

SEQ ID NO: 195562 - DNA, 50 bp, Artificial
  Synthetic oligonucleotide
accactgcaaacggccatctcgtgaaccgctgtctctcgggcgaggtggt

SEQ ID NO: 195563 - DNA, 50 bp, Artificial
  Synthetic oligonucleotide
accatcctcatgcttggctgcatggtacggggcatgtagaggcgctgagc

SEQ ID NO: 195564 - DNA, 50 bp, Artificial
  Synthetic oligonucleotide
accccattatcgtgtcgcttggccagtgaacgccgaccaattgccgggat

SEQ ID NO: 195565 - DNA, 50 bp, Artificial
  Synthetic oligonucleotide
accgagttctcgggcagttgcgaaaagcggggttgaaggtctgacgcgga

SEQ ID NO: 195566 - DNA, 55 bp, Artificial
  Synthetic oligonucleotide
cgatgtttcaaggcgactgcggggcatagctgcctgacgtccgttggcgctaagg

SEQ ID NO: 195567 - DNA, 55 bp, Artificial
  Synthetic oligonucleotide
gaggcttgaccttctgtcgaaccgcgctctaatgaggctacggtcctcgtagctt

SEQ ID NO: 195568 - DNA, 50 bp, Artificial
  Synthetic oligonucleotide
accgattggccttgaccatatgggccggtaggggcaaccttccgcaggta

SEQ ID NO: 195569 - DNA, 50 bp, Artificial
  Synthetic oligonucleotide
accgctgaacggcgcaagaaccgtcgcactctttccgccaatgacaggcg

SEQ ID NO: 195570 - DNA, 50 bp, Artificial
  Synthetic oligonucleotide
accggactacttggcagcgcccgaaacggaagacgctccgctcgcgacga

SEQ ID NO: 195571 - DNA, 50 bp, Artificial
  Synthetic oligonucleotide
accggtgacaggtcgaaggtaggatgctgcggggattgctgcatggggcg

SEQ ID NO: 195572 - DNA, 50 bp, Artificial
  Synthetic oligonucleotide
acctcagattgcgggctggcggaattctcgcgcatgagcgttggtcgggc

SEQ ID NO: 195573 - DNA, 50 bp, Artificial
  Synthetic oligonucleotide
acctctcgcgtgatccctcggaggataccagactccgcagagcgcgtcac

SEQ ID NO: 195574 - DNA, 50 bp, Artificial
  Synthetic oligonucleotide
acctgtcgaagctgcgcggttgggtcgaagcgagatcggcctcattcctg

SEQ ID NO: 195575 - DNA, 50 bp, Artificial
  Synthetic oligonucleotide
accttggagccaagactacggagagggccgaaggacgcccaacctggcag

SEQ ID NO: 195576 - DNA, 50 bp, Artificial
  Synthetic oligonucleotide
acgaaccgagttcgtcggaagaccgttgacgtcaccccaggttcccgtgc

SEQ ID NO: 195577 - DNA, 50 bp, Artificial
  Synthetic oligonucleotide
acgaccccaccgttttcgtgcacgtccctacaacatggcgcgaaatggct

SEQ ID NO: 195578 - DNA, 55 bp, Artificial
  Synthetic oligonucleotide
gatcgaattcctgatagcgaaacaccggctggaacttacctggcccaactttctg

SEQ ID NO: 195579 - DNA, 50 bp, Artificial
  Synthetic oligonucleotide
acgaccgcaatattatccccggcttgacgccactgggctacttgcgccct

SEQ ID NO: 195580 - DNA, 50 bp, Artificial
  Synthetic oligonucleotide
acgacctacgtgacgaactaccttgatccgcgtggggcggaagcgctagc

SEQ ID NO: 195581 - DNA, 50 bp, Artificial
  Synthetic oligonucleotide
acgagatcgtgtgcggagtggtcgatcggtgcgtgcaaacaatgaggggc

SEQ ID NO: 195582 - DNA, 50 bp, Artificial
  Synthetic oligonucleotide
acgatcaagtcagccgaaccgaaggccgggaaaagcatgtcggcgcacga

SEQ ID NO: 195583 - DNA, 50 bp, Artificial
  Synthetic oligonucleotide
acgcaatatccgggctcggtgtcaccaacaccttggacgaccaccaagcc

SEQ ID NO: 195584 - DNA, 50 bp, Artificial
  Synthetic oligonucleotide
acgcagcccgtgtgcggagcattgtggcagaccagcctcgatgcatcggt

SEQ ID NO: 195585 - DNA, 50 bp, Artificial
  Synthetic oligonucleotide
acgcatcaattacgctaccgtggcacagacgctcgtgggcgcatcgttgc

SEQ ID NO: 195586 - DNA, 50 bp, Artificial
  Synthetic oligonucleotide
aagttgcacgccggcaacttaacgcgcacgtctcgtctgcttagcggctg

SEQ ID NO: 195587 - DNA, 50 bp, Artificial
  Synthetic oligonucleotide
aatagcctcgctagcgcttgccgggcggcgacagaatgcctgacacaaaa

SEQ ID NO: 195588 - DNA, 50 bp, Artificial
  Synthetic oligonucleotide
aatccacccggcctatagtcggcgcgtctgcctacaccacatgccagttt

SEQ ID NO: 195589 - DNA, 55 bp, Artificial
  Synthetic oligonucleotide
gccgatgtccggataaacgctcatcgtctccccgtgcgacggagaattcctgcca

SEQ ID NO: 195590 - DNA, 50 bp, Artificial
  Synthetic oligonucleotide
aatccagacactgaagccagcgcgcaacagacctgcggcggtttgcaaaa

SEQ ID NO: 195591 - DNA, 50 bp, Artificial
  Synthetic oligonucleotide
aatcccgtcaagcagtcgttgggcctcgtgtctggtcgggtttgcctccg

SEQ ID NO: 195592 - DNA, 50 bp, Artificial
  Synthetic oligonucleotide
aatccgatctccaaccgcccaacgcccgtcctggataaagcctgcgatct

SEQ ID NO: 195593 - DNA, 50 bp, Artificial
  Synthetic oligonucleotide
aatcgatcgaccggccgaaacccatgcgagcaagtcctggcggcgagatg

SEQ ID NO: 195594 - DNA, 50 bp, Artificial
  Synthetic oligonucleotide
aatcgcgcagcttgcaacccgtgaccgttttgataggccattcggcggga

SEQ ID NO: 195595 - DNA, 50 bp, Artificial
  Synthetic oligonucleotide
aatcggacctccgccagaaccgagcgaaacgcgaaagccccctatgttcg

SEQ ID NO: 195596 - DNA, 50 bp, Artificial
  Synthetic oligonucleotide
aatcggcctctttcgacctttgccccgagatccgtgagcgccgcttttga

SEQ ID NO: 195597 - DNA, 50 bp, Artificial
  Synthetic oligonucleotide
aatcggcgatcacagtgacaaatccgcgtgaggcgaaagcgcgacccaca

SEQ ID NO: 195598 - DNA, 50 bp, Artificial
  Synthetic oligonucleotide
aatctctgaattgccgggctgagacttggcgggctgagtacgtgcggtga

SEQ ID NO: 195599 - DNA, 50 bp, Artificial
  Synthetic oligonucleotide
aatgcctgcgctaggaacagcccttccgggcgactgaggtcgagtcgata

SEQ ID NO: 195600 - DNA, 55 bp, Artificial
  Synthetic oligonucleotide
gcgaaattgcatcagtgacttaagcgagagtttcgctaccgccaaatagccggag

SEQ ID NO: 195601 - DNA, 50 bp, Artificial
  Synthetic oligonucleotide
aatgctcaggcgcgatgcctggaccgttatccgtgatcgagacgtgagcg

SEQ ID NO: 195602 - DNA, 50 bp, Artificial
  Synthetic oligonucleotide
aatggcatgccgggccgaatttgccggacctcgtctccgactgcaggatc

SEQ ID NO: 195603 - DNA, 50 bp, Artificial
  Synthetic oligonucleotide
aatgggggtggagagccaagccagcgttggcgagccgacaatctcgtgaa

SEQ ID NO: 195604 - DNA, 50 bp, Artificial
  Synthetic oligonucleotide
aatggtccgtcgtctcggcatcgggttccaactcagccgtcgtcagcatg

SEQ ID NO: 195605 - DNA, 50 bp, Artificial
  Synthetic oligonucleotide
aatgttcgcggcgcttggaccagcttaagacgcacccgaagctgccttcc

SEQ ID NO: 195606 - DNA, 50 bp, Artificial
  Synthetic oligonucleotide
aattatgcggctgtgatgtcgtggcgtagcttgggctcgggtcgccgtag

SEQ ID NO: 195607 - DNA, 50 bp, Artificial
  Synthetic oligonucleotide
aattcgagtttgcgtaggtccctcgacccgttgccgcacagttctgcgga

SEQ ID NO: 195608 - DNA, 50 bp, Artificial
  Synthetic oligonucleotide
aattcgttcgcctacaacggcgttcccggcacgcaccaatggtatgacgg

SEQ ID NO: 195609 - DNA, 50 bp, Artificial
  Synthetic oligonucleotide
aattcttttccgagacgtgccaacttgcgcccgccgttaggccagcaccg

SEQ ID NO: 195610 - DNA, 50 bp, Artificial
  Synthetic oligonucleotide
acaaaaacgggctaaccgggcgtgacgcgtaggggtttccaaccagtgga

SEQ ID NO: 195611 - DNA, 55 bp, Artificial
  Synthetic oligonucleotide
agacttactcgcgccctgacgcagacttggtcgcgctttggcgcagacttgctcg

SEQ ID NO: 195612 - DNA, 50 bp, Artificial
  Synthetic oligonucleotide
acaactcactcgcgagcactggacgcacggacacgcaccggctgaagatc

SEQ ID NO: 195613 - DNA, 50 bp, Artificial
  Synthetic oligonucleotide
acacatctgcttcggcattgctcttccgtcgccattccggccgacagcgt

SEQ ID NO: 195614 - DNA, 50 bp, Artificial
  Synthetic oligonucleotide
acaccattgcggggcgaccgcgtcacaccagaggggctgcaagaaagatt

SEQ ID NO: 195615 - DNA, 50 bp, Artificial
  Synthetic oligonucleotide
acaccctgtagcgttcgattcggccacgtggagcatagctcggccccacc

SEQ ID NO: 195616 - DNA, 50 bp, Artificial
  Synthetic oligonucleotide
acaccgccttcgttgttgttgatcgtagcgcctgatgccgtagcgagcgc

SEQ ID NO: 195617 - DNA, 50 bp, Artificial
  Synthetic oligonucleotide
acacctccggcgcgcatacgcgattcggtcagccgagacgtgtcgttaag

SEQ ID NO: 195618 - DNA, 50 bp, Artificial
  Synthetic oligonucleotide
acaccttagcgcggttgcatgtcagcggccacacaccttcccgacacggg

SEQ ID NO: 195619 - DNA, 55 bp, Artificial
  Synthetic oligonucleotide
agcatcaggagtccatctctcgcctggaaccgcacatgaattatatgctcgctgc

SEQ ID NO: 195620 - DNA, 55 bp, Artificial
  Synthetic oligonucleotide
atcgtgccacagatacatcaggatggcgctggttatgatcgtcacgacggacaat

SEQ ID NO: 195621 - DNA, 55 bp, Artificial
  Synthetic oligonucleotide
atgtagtttcgtgaaacgtggcgctacgtctatcagccgtagtgcggacttgaac

SEQ ID NO: 195622 - DNA, 55 bp, Artificial
  Synthetic oligonucleotide
atgtgatgctcattataccaagcgttgaaacgatcctccatgtcagcgggcggtg

SEQ ID NO: 195623 - DNA, 55 bp, Artificial
  Synthetic oligonucleotide
cacacttccatagctgaggataaatatgcgtctcgagatcgaacgtggggaactc

SEQ ID NO: 195624 - DNA, 55 bp, Artificial
  Synthetic oligonucleotide
cgcaccccatttccgctattcacggcctgtcacccttgggaacgaattatgtcac

SEQ ID NO: 195625 - DNA, 55 bp, Artificial
  Synthetic oligonucleotide
cacctctcgaccgcgcagcattaggtcgggtaactcgcctcacgggcattccagt

SEQ ID NO: 195626 - DNA, 55 bp, Artificial
  Synthetic oligonucleotide
cagacggtcgtcatgtcaattgcggcgggtaagacgattgcgagcttcgagaggc

SEQ ID NO: 195627 - DNA, 55 bp, Artificial
  Synthetic oligonucleotide
cattctcgctaggcaactgctcgttgttcgctgccaccgcactcaccagcgtcgt

SEQ ID NO: 195628 - DNA, 55 bp, Artificial
  Synthetic oligonucleotide
ccaaccttcgcccctgactcttatccctcacgacaaacaaccgcacgcgtaagtg

SEQ ID NO: 195629 - DNA, 55 bp, Artificial
  Synthetic oligonucleotide
ccaacgggctgttcatgcggtatcattggtttcggtgcggcctcagtataccgcg

SEQ ID NO: 195630 - DNA, 55 bp, Artificial
  Synthetic oligonucleotide
ccatttgaagcccttgccattgctgcgccccatagcaccgaaccggcgccaacct

SEQ ID NO: 195631 - DNA, 55 bp, Artificial
  Synthetic oligonucleotide
cccaattttcgagtgtctggtatcggcggccggagccgttttctctggcgaagac

SEQ ID NO: 195632 - DNA, 55 bp, Artificial
  Synthetic oligonucleotide
cccatcttcatatcgtcgcgagacgacctttgctacgacaacggtcaagtggccg

SEQ ID NO: 195633 - DNA, 55 bp, Artificial
  Synthetic oligonucleotide
ccgcatgtgcttgaggaataagctccgagcagatgagttcaatgaaatcctcggg

SEQ ID NO: 195634 - DNA, 55 bp, Artificial
  Synthetic oligonucleotide
ccgccgaaccatggcggtaagttcgcttgttggtaggatctctagcggtccctca

SEQ ID NO: 195635 - DNA, 55 bp, Artificial
  Synthetic oligonucleotide
cgccgcgactatcgtcggggatgacattaatgcatggctaatgcaccttcccagc

SEQ ID NO: 195636 - DNA, 55 bp, Artificial
  Synthetic oligonucleotide
ccgtattgcaaaaggatactcccgtcgtgatcgtttcggggcgattggatgaggc

SEQ ID NO: 195637 - DNA, 55 bp, Artificial
  Synthetic oligonucleotide
aatgtaagcggccatgcccgtgattggcaggcagatacgatcatgctaagcccga

SEQ ID NO: 195638 - DNA, 55 bp, Artificial
  Synthetic oligonucleotide
ccgtctcccgaattgccgtcgctccggcctcttatcaataggcaagacaccctcg

SEQ ID NO: 195639 - DNA, 55 bp, Artificial
  Synthetic oligonucleotide
cctcccaaagggagaggtgaagtccgcacttgtcttgcttcggtgaagacctgaa

SEQ ID NO: 195640 - DNA, 55 bp, Artificial
  Synthetic oligonucleotide
cgaaaggcacgcatgggctgtcccctatccggcgagccgaacccttacatactct

SEQ ID NO: 195641 - DNA, 55 bp, Artificial
  Synthetic oligonucleotide
cgaagggaccagctcaagacacctgagcgcacgcaaatatcgtggtccgacctta

SEQ ID NO: 195642 - DNA, 55 bp, Artificial
  Synthetic oligonucleotide
cgagaagtcgctccggtttcacattaaccgcgtgcggacggtttggctttcgcca

SEQ ID NO: 195643 - DNA, 55 bp, Artificial
  Synthetic oligonucleotide
gggaagctctgtgattcgtccctttgcaacaattacggtttgcaaattcgccgtg

SEQ ID NO: 195644 - DNA, 55 bp, Artificial
  Synthetic oligonucleotide
ggggcgcgcacaagaacggcgcgtttatcgatagtcgcaataattttcgacacgt

SEQ ID NO: 195645 - DNA, 55 bp, Artificial
  Synthetic oligonucleotide
gggtggtttaagttgacttgacagtaggcgttgaccagtttaatggcgcgtcttg

SEQ ID NO: 195646 - DNA, 55 bp, Artificial
  Synthetic oligonucleotide
cgcgcatgtctcccacgccgtttcgagcttacactgacggtcgtaaaacgatagc

SEQ ID NO: 195647 - DNA, 55 bp, Artificial
  Synthetic oligonucleotide
ggtggcgtcgcctgaccgacttggagcttatctactcgcaaggcgcaggagtggt

SEQ ID NO: 195648 - DNA, 55 bp, Artificial
  Synthetic oligonucleotide
ggttttgtatggcgctcttcgaggggtgccgcgtcgttatgggtgtatccatgat

SEQ ID NO: 195649 - DNA, 55 bp, Artificial
  Synthetic oligonucleotide
gtctactaagagcgtatatttccttcgatgtgcctatagaacgttcggccgcggt

SEQ ID NO: 195650 - DNA, 55 bp, Artificial
  Synthetic oligonucleotide
gtggtccgatccgacgtttacgtttgcagcaccctcccgagcagatgtcggaagc

SEQ ID NO: 195651 - DNA, 55 bp, Artificial
  Synthetic oligonucleotide
tagatgaccggacccactccgagcgttccgccaagcctctcaaggatcgtcgttg

SEQ ID NO: 195652 - DNA, 55 bp, Artificial
  Synthetic oligonucleotide
ttgggcggtgcgggaatgtgcagtgccaacccatcgggagcggcctgacaattgc

SEQ ID NO: 195653 - DNA, 55 bp, Artificial
  Synthetic oligonucleotide
tataattccagtgtcagtgcagcatccgtcaataatctaacaagtgactcggaca

SEQ ID NO: 195654 - DNA, 54 bp, Artificial
  Synthetic oligonucleotide
aaagaggtgtccgcaacccgccgggacggtgtcaggtatgccgccaacgttgct

SEQ ID NO: 195655 - DNA, 55 bp, Artificial
  Synthetic oligonucleotide
ttgctaggtgtctcgctcacttcaccgctccattagtagaggggcgcacgaccgc

SEQ ID NO: 195656 - DNA, 55 bp, Artificial
  Synthetic oligonucleotide
tcgccataggttccgtacgctgccgttctttcgtacgatctaagattcgctgggg

SEQ ID NO: 195657 - DNA, 55 bp, Artificial
  Synthetic oligonucleotide
cgcggcatgaggtaaagcctccgttcgcacctaccaagaaccattgggacttaaa

SEQ ID NO: 195658 - DNA, 55 bp, Artificial
  Synthetic oligonucleotide
tgagcaatctggcgtcaccgaacgctcaactccataccttttgccgccattgttt

SEQ ID NO: 195659 - DNA, 55 bp, Artificial
  Synthetic oligonucleotide
ttctgtgaggtgagctgcagtgacgacggtgtattgcagacagcattggcgtagg

SEQ ID NO: 195660 - DNA, 55 bp, Artificial
  Synthetic oligonucleotide
ttattactcttgagcaaactcccgttctacgcgtccccgatgtcgggtgcaccgt

SEQ ID NO: 195661 - DNA, 55 bp, Artificial
  Synthetic oligonucleotide
ttatattcgcgtggcgggttattcgcgtgaagttcgcggaaggatcgaaggatgc

SEQ ID NO: 195662 - DNA, 55 bp, Artificial
  Synthetic oligonucleotide
gcgattcgacgcagagaactcgaccccaaccgaaattggtccgcaatctaagcgc

SEQ ID NO: 195663 - DNA, 55 bp, Artificial
  Synthetic oligonucleotide
gcgcagcttccgatcttctacagtgtaggttgacacaggcccgcggctgttactc

SEQ ID NO: 195664 - DNA, 55 bp, Artificial
  Synthetic oligonucleotide
gcgcctaatgttacagcgcttgcgtcgctagcaacgatacaccgtattaagcgga

SEQ ID NO: 195665 - DNA, 55 bp, Artificial
  Synthetic oligonucleotide
gcgcgcatcgaaggacttaaggattgcaagtgtcttcgcgtccatgcccttaccg

SEQ ID NO: 195666 - DNA, 55 bp, Artificial
  Synthetic oligonucleotide
tttggtctctggcgtccgattggctggacaggcagcgttggatcattcgcaagct

SEQ ID NO: 195667 - DNA, 55 bp, Artificial
  Synthetic oligonucleotide
gcggtctgatcgtcgaaacagcgccggtaatcgccgagcgggttttcttagacgc

SEQ ID NO: 195668 - DNA, 55 bp, Artificial
  Synthetic oligonucleotide
cgcgtatcaccaaagtctcgtttcctacgttacgtgcgtatcgtaaacgacgtca

SEQ ID NO: 195669 - DNA, 55 bp, Artificial
  Synthetic oligonucleotide
gcgtagtgacgccgagctaatcatcggatcggttggtcttctggcgagctgcgtc

SEQ ID NO: 195670 - DNA, 55 bp, Artificial
  Synthetic oligonucleotide
ggatggcagcggggtaaagcggtcgttcgcactggtaagttcggcgagcgtagca

SEQ ID NO: 195671 - DNA, 55 bp, Artificial
  Synthetic oligonucleotide
ggatcgcgggttgatggcatcgtggcgaaacagcggtgacaattacgtatgattt

SEQ ID NO: 195672 - DNA, 55 bp, Artificial
  Synthetic oligonucleotide
tttcgttgcgtgtcatggagggttggtcggtgacgtgtaatcgccgaagccattt

SEQ ID NO: 195673 - DNA, 55 bp, Artificial
  Synthetic oligonucleotide
gcttacgacaatacgctcgtctataccgatcacgtcttggcgcggcttatcgggg

SEQ ID NO: 195674 - DNA, 55 bp, Artificial
  Synthetic oligonucleotide
gctattccgaaccggacgacattcggactataggcgcttctcgtagcgccagacc

SEQ ID NO: 195675 - DNA, 55 bp, Artificial
  Synthetic oligonucleotide
aagaagcgccatgagtgcccaatttctgactgagaaggcatgccaattagatcgc

SEQ ID NO: 195676 - DNA, 55 bp, Artificial
  Synthetic oligonucleotide
gcgtttcatcctggggcagatcagcgattacgcaggtaacgccacaaagaagtat

SEQ ID NO: 195677 - DNA, 54 bp, Artificial
  Synthetic oligonucleotide
gactgttcattgggcgttcgcaacagcggtcctacctcgttagcgctctcgcat

SEQ ID NO: 195678 - DNA, 54 bp, Artificial
  Synthetic oligonucleotide
ataagcgctgctttgccgtctccgtgttgaagcactacgacggttacgtctttt

SEQ ID NO: 195679 - DNA, 55 bp, Artificial
  Synthetic oligonucleotide
cgctcttggccattggtgtccgttggcctgattacggtttcgtgatatttgaggc

SEQ ID NO: 195680 - DNA, 54 bp, Artificial
  Synthetic oligonucleotide
gatggaatgcgtaagtagatgtgcgcgcctccagacggagtacggacggtgcga

SEQ ID NO: 195681 - DNA, 54 bp, Artificial
  Synthetic oligonucleotide
tgcgtttcatgcgtcatatgtatcgcgtcagttaagctcttgctgtcaggatgc

SEQ ID NO: 195682 - DNA, 53 bp, Artificial
  Synthetic oligonucleotide
cgatgacccttgatgcttgggtcgccaatttctgcacattaccgtgatgaaaa

SEQ ID NO: 195683 - DNA, 53 bp, Artificial
  Synthetic oligonucleotide
acagttcacggcagatgatcgctcgcgcggtctcataattctggcccgtctat

SEQ ID NO: 195684 - DNA, 53 bp, Artificial
  Synthetic oligonucleotide
tgccatgtgttgaagtcgtcggatcggtacacgatggcgccttgccaattgaa

SEQ ID NO: 195685 - DNA, 53 bp, Artificial
  Synthetic oligonucleotide
ttagcgtgcgaaagcacccgtcgcgctgggctgaatgcgcttatgcgatcgac

SEQ ID NO: 195686 - DNA, 52 bp, Artificial
  Synthetic oligonucleotide
aaaacgctgtcgcgaaccacactcttgtccccggccagataggaacacagcg

SEQ ID NO: 195687 - DNA, 52 bp, Artificial
  Synthetic oligonucleotide
acatatgtcgtacttctgaggggcgctgtcgtaccatggggaccatccttcc

SEQ ID NO: 195688 - DNA, 52 bp, Artificial
  Synthetic oligonucleotide
cacctgcaaatcaggggcgatgattgagtgttactcctcgcagatggcctgt

SEQ ID NO: 195689 - DNA, 52 bp, Artificial
  Synthetic oligonucleotide
aaaggttgatgacggatcgctgtattccgatcagctaccctccatttggggc

SEQ ID NO: 195690 - DNA, 55 bp, Artificial
  Synthetic oligonucleotide
cggccgcattcggtatccgttccgtgtttattgcgagcggcatctccgtacgggc

SEQ ID NO: 195691 - DNA, 52 bp, Artificial
  Synthetic oligonucleotide
ataagatcagggcatgttttgcgggctcggctcaggacgcgcctcaacgggg

SEQ ID NO: 195692 - DNA, 52 bp, Artificial
  Synthetic oligonucleotide
gcggaggctaagtcgcgctaagactctagcagtagcaaagcggtcgcgaggg

SEQ ID NO: 195693 - DNA, 52 bp, Artificial
  Synthetic oligonucleotide
gagataggtccaacaccagccgagcgtgatgcgcaagttgtcgaataggctc

SEQ ID NO: 195694 - DNA, 52 bp, Artificial
  Synthetic oligonucleotide
tagcgaagccggaatatgtcaagcgctcggttgcagggcactcgagtgctgg

SEQ ID NO: 195695 - DNA, 52 bp, Artificial
  Synthetic oligonucleotide
cgatgtacgcaagtgatcgaaccttgctgggaatggaaggggtcaacttttg

SEQ ID NO: 195696 - DNA, 52 bp, Artificial
  Synthetic oligonucleotide
tgctctggtgcctgtcgtaaaacggctgtccgagggcgataattaacccgga

SEQ ID NO: 195697 - DNA, 52 bp, Artificial
  Synthetic oligonucleotide
tgtggcgcgacacactcaggctcgttcgcagtcgagctgtattctatggggc

SEQ ID NO: 195698 - DNA, 52 bp, Artificial
  Synthetic oligonucleotide
ttaagagcgttgagcaacgattcacccgtcgggtgcacaccgcacacggtaa

SEQ ID NO: 195699 - DNA, 51 bp, Artificial
  Synthetic oligonucleotide
ttgcgggaacgtcaggattgccagagaggcggtcggaaatttgtcttcgag

SEQ ID NO: 195700 - DNA, 51 bp, Artificial
  Synthetic oligonucleotide
tccggcgcgagcttgcaaaagtcgcttgagcctttggcagagcaaattgca

SEQ ID NO: 195701 - DNA, 60 bp, Artificial
  Synthetic oligonucleotide
atatgtttggccgttcagcaacatgtgccatctcgggtgatgattatcactcttgggacc

SEQ ID NO: 195702 - DNA, 57 bp, Artificial
  Synthetic oligonucleotide
cctggttcagaaaccacaagaatggcactttgaagagctatataagtataatctaac

SEQ ID NO: 195703 - DNA, 53 bp, Artificial
  Synthetic oligonucleotide
cacttcggcctctccagctacacgggccgcttcaagacggttgacgcgacact

SEQ ID NO: 195704 - DNA, 53 bp, Artificial
  Synthetic oligonucleotide
ccggaggggcagtcgctgtcttatgtatggcgccttgtctcccaacctgggtt

SEQ ID NO: 195705 - DNA, 53 bp, Artificial
  Synthetic oligonucleotide
ctttccaaatagggaaacttgcaaggacggcaggatcagttgaacggcctccc

SEQ ID NO: 195706 - DNA, 53 bp, Artificial
  Synthetic oligonucleotide
acccgaggatagcgagtcttgtcactcaaccgctgtcgtccgcgcaatcgatg

SEQ ID NO: 195707 - DNA, 53 bp, Artificial
  Synthetic oligonucleotide
aaaggtcagaacccagcttgttcccaccggacgcacatcggtctgggtggaag

SEQ ID NO: 195708 - DNA, 53 bp, Artificial
  Synthetic oligonucleotide
tttccacgccttgcctgacttaccgcgaaagctcacttgaccgaacatgttcc

SEQ ID NO: 195709 - DNA, 53 bp, Artificial
  Synthetic oligonucleotide
agatagattcacgcatccgggttccaagcctcgtaatcagagtctgagcgttg

SEQ ID NO: 195710 - DNA, 52 bp, Artificial
  Synthetic oligonucleotide
caaaccgaatcgatactgacctcgacgctatccagccccgagtcagtgagcg

SEQ ID NO: 195711 - DNA, 52 bp, Artificial
  Synthetic oligonucleotide
gcggagattgaatccgatgtcggtggtcagactttcatccgtcttgccccgt

SEQ ID NO: 195712 - DNA, 52 bp, Artificial
  Synthetic oligonucleotide
ggattgacatggtgtaagcctcaaacgacaagcggcccaaagacttaagcca

SEQ ID NO: 195713 - DNA, 55 bp, Artificial
  Synthetic oligonucleotide
gatctaccgatgcacagatattctgaaggtatgaaagcgagagtttcatttgcgc

SEQ ID NO: 195714 - DNA, 52 bp, Artificial
  Synthetic oligonucleotide
atgcacggttatgaccaacctcttcctgatttaagtttagcgcaggatggag

SEQ ID NO: 195715 - DNA, 52 bp, Artificial
  Synthetic oligonucleotide
agatccgtagcgttcctcgaaagcgggagcacatgcaaggccttcgaggcaa

SEQ ID NO: 195716 - DNA, 52 bp, Artificial
  Synthetic oligonucleotide
aaaacagatatcgcattgccatgcttgtcacgcgttgattcacccgaagagc

SEQ ID NO: 195717 - DNA, 52 bp, Artificial
  Synthetic oligonucleotide
acctgtcccgatagcgccgtagaaagagcctgaaagggtgtgatcgcactcg

SEQ ID NO: 195718 - DNA, 51 bp, Artificial
  Synthetic oligonucleotide
tatacgccgccgctcacggatttagccgggaagtctgtcccgggcgcataa

SEQ ID NO: 195719 - DNA, 51 bp, Artificial
  Synthetic oligonucleotide
taactctgctctggttgtctgtggacacgtttatcagatctatgcgccgtg

SEQ ID NO: 195720 - DNA, 51 bp, Artificial
  Synthetic oligonucleotide
cccagtatctatcgagtgaggattttgtgacagcacgtattagcgccacag

SEQ ID NO: 195721 - DNA, 51 bp, Artificial
  Synthetic oligonucleotide
actatcccgatcgcgcgactagattgttttctgaggttgcgcgctgatgca

SEQ ID NO: 195722 - DNA, 51 bp, Artificial
  Synthetic oligonucleotide
gtccctgcttagattgggaatcactgcttatctggctatcctcgcacttga

SEQ ID NO: 195723 - DNA, 51 bp, Artificial
  Synthetic oligonucleotide
atgctgatctcacgcatattgtcttctcaacacgtggggatagtcatacac

SEQ ID NO: 195724 - DNA, 55 bp, Artificial
  Synthetic oligonucleotide
gatcgacttggagaaatctccacgggaaactgcctcaacaacgtcctgaacttcg

SEQ ID NO: 195725 - DNA, 51 bp, Artificial
  Synthetic oligonucleotide
ttcgcgaaggaaatccactaatgtgagagcagggggatttgattgggcggc

SEQ ID NO: 195726 - DNA, 50 bp, Artificial
  Synthetic oligonucleotide
aatccacccccgtcccgacactgtcagatgccaggcctgtgagtatgtgc

SEQ ID NO: 195727 - DNA, 50 bp, Artificial
  Synthetic oligonucleotide
aataccaacgcacagcctcggctatgttcggctcagtaccgcggcccgtc

SEQ ID NO: 195728 - DNA, 50 bp, Artificial
  Synthetic oligonucleotide
aatcccgccgtcaaggtcgccccctctcgcaagtcaaaggcatctgatcg

SEQ ID NO: 195729 - DNA, 50 bp, Artificial
  Synthetic oligonucleotide
aagtgtcacgtatggccgttatcgcccgcattccaagcggggcgcagggg

SEQ ID NO: 195730 - DNA, 50 bp, Artificial
  Synthetic oligonucleotide
aagtgactgagctcgtgcctcccgtcccgaaaaccgagggcagtctccca

SEQ ID NO: 195731 - DNA, 50 bp, Artificial
  Synthetic oligonucleotide
aatgaagatcctcagagttggccctccggggcgcgaaaagccggcagttc

SEQ ID NO: 195732 - DNA, 50 bp, Artificial
  Synthetic oligonucleotide
aatgtggcgtggggctcgcagggcgattgtgtctaatcccgctgttgcta

SEQ ID NO: 195733 - DNA, 50 bp, Artificial
  Synthetic oligonucleotide
aaggtgtactgatcctgttctggcgtgtgagcgcgttccgtagcgggcct

SEQ ID NO: 195734 - DNA, 50 bp, Artificial
  Synthetic oligonucleotide
aattctcctggttcctgccggaacccaaccgcaccatcctacgaccgcgt

SEQ ID NO: 195735 - DNA, 55 bp, Artificial
  Synthetic oligonucleotide
gataatgccattggctcctcccgacgcggtccagctaacaccagtccggcacacg

SEQ ID NO: 195736 - DNA, 50 bp, Artificial
  Synthetic oligonucleotide
aattgagcgcgtgctgggaccgagggatgcctggcgcacccgaatacggc

SEQ ID NO: 195737 - DNA, 50 bp, Artificial
  Synthetic oligonucleotide
aagggttcggggagtgtcccctaccatttccatagcggcgggtccggata

SEQ ID NO: 195738 - DNA, 50 bp, Artificial
  Synthetic oligonucleotide
aattgggtgtggatccgcgcgaagagcgaaaccgtgccagaaccgagctt

SEQ ID NO: 195739 - DNA, 50 bp, Artificial
  Synthetic oligonucleotide
aaggcgtgcgtggggcgtttctcgtctatccctatgtcagcgggccgtcc

SEQ ID NO: 195740 - DNA, 50 bp, Artificial
  Synthetic oligonucleotide
accgtgtgatggctgtaagctggggcatgggattgagtcgctccgtgggt

SEQ ID NO: 195741 - DNA, 50 bp, Artificial
  Synthetic oligonucleotide
accgcagatttgcacggacatccgctacagtcagccgggcaaaaccgctc

SEQ ID NO: 195742 - DNA, 50 bp, Artificial
  Synthetic oligonucleotide
acccgttggccggatttcgacccaagtctgcctccaaggccatccgtgat

SEQ ID NO: 195743 - DNA, 50 bp, Artificial
  Synthetic oligonucleotide
acccggggtgtgggcagggcgtgaccggttagcgacggatcaaggtcatg

SEQ ID NO: 195744 - DNA, 50 bp, Artificial
  Synthetic oligonucleotide
acccgctaacctcgccgcaaaagaacctcgggaggaaatcagatggccgc

SEQ ID NO: 195745 - DNA, 50 bp, Artificial
  Synthetic oligonucleotide
gaagagctttcagtacgaataccagggagctgtcttagaacttcagctgt

SEQ ID NO: 195746 - DNA, 55 bp, Artificial
  Synthetic oligonucleotide
gagatcggcttatttgcctcgataaacctttacgccaactaaacctgcaaagacg

SEQ ID NO: 195747 - DNA, 50 bp, Artificial
  Synthetic oligonucleotide
acccgatcacgacgaagaggccatgacgcccgcactgtcggaccagcccg

SEQ ID NO: 195748 - DNA, 50 bp, Artificial
  Synthetic oligonucleotide
acccctagccctctagcaaatgcgaccccaacccgcacacccgtaaacga

SEQ ID NO: 195749 - DNA, 50 bp, Artificial
  Synthetic oligonucleotide
accattatcggcagagaacacgtcccgaccgttcagctcactgcgggcga

SEQ ID NO: 195750 - DNA, 50 bp, Artificial
  Synthetic oligonucleotide
accaggatcggccgccttaagcccggttcccctgacaatgccggctcgca

SEQ ID NO: 195751 - DNA, 50 bp, Artificial
  Synthetic oligonucleotide
accacttgtcaccggctatcccccgtttctcacacctgcgcccctgttgc

SEQ ID NO: 195752 - DNA, 50 bp, Artificial
  Synthetic oligonucleotide
accaagtgcgtccgaatgcaactccatcaggggaaacccttggcgtgccg

SEQ ID NO: 195753 - DNA, 50 bp, Artificial
  Synthetic oligonucleotide
acattggagccggggcgcgcaagcaccctatcctgcaagctctgcgacat

SEQ ID NO: 195754 - DNA, 50 bp, Artificial
  Synthetic oligonucleotide
acagtcagccgggcaaaaccgctcaccctcagcagatttcagccccgccg

SEQ ID NO: 195755 - DNA, 50 bp, Artificial
  Synthetic oligonucleotide
acaggacatgccaggtgcttctgagttcgcggaagacgggagcgccgcct

SEQ ID NO: 195756 - DNA, 50 bp, Artificial
  Synthetic oligonucleotide
acacttccatagctaggcaccggcaaggcacctcgcacccctctactgcc

SEQ ID NO: 195757 - DNA, 55 bp, Artificial
  Synthetic oligonucleotide
gagacatcctgactgacgggctcatgtgggtcgttatcgccaggtagattttcgg

SEQ ID NO: 195758 - DNA, 50 bp, Artificial
  Synthetic oligonucleotide
acactgtttgacacggccctgcatcagctgtcctatccggcgacctggta

SEQ ID NO: 195759 - DNA, 50 bp, Artificial
  Synthetic oligonucleotide
acaccgcgtgcgaaacggcacagtgtgaatggggacgggacgcattacgg

SEQ ID NO: 195760 - DNA, 50 bp, Artificial
  Synthetic oligonucleotide
acaatcggtgcccaatggcacgaaaacagcgttgcggctatggcagagcg

SEQ ID NO: 195761 - DNA, 50 bp, Artificial
  Synthetic oligonucleotide
acaaccgcccggaatcgccatccgaccaatagacggtgccgccgagttct

SEQ ID NO: 195762 - DNA, 50 bp, Artificial
  Synthetic oligonucleotide
aatttacgcttcagggccccgaccgcactcttggccttctctggaccgag

SEQ ID NO: 195763 - DNA, 50 bp, Artificial
  Synthetic oligonucleotide
aaccgctcaccctcagcagatttcagccccgccggacgctcgagtgcgtc

SEQ ID NO: 195764 - DNA, 50 bp, Artificial
  Synthetic oligonucleotide
tcgcggcaagcatcgatcaagattgtccaccaccacaacgagcgttttgc

SEQ ID NO: 195765 - DNA, 50 bp, Artificial
  Synthetic oligonucleotide
aaccgccggcgcgggttgtgtagcgtgtttgcgtacagcccatcagcgta

SEQ ID NO: 195766 - DNA, 50 bp, Artificial
  Synthetic oligonucleotide
aaccgcagccgcgaaacatattcggcagggggcacacgctcaggttcatg

SEQ ID NO: 195767 - DNA, 50 bp, Artificial
  Synthetic oligonucleotide
aaccgaggcggcgagatcaatgggcggcatcagagtttcggctccgcagc

SEQ ID NO: 195768 - DNA, 55 bp, Artificial
  Synthetic oligonucleotide
caaagcggtaggtaagcgaatctacaacgctgcggtcactggttcatccgtgagc

SEQ ID NO: 195769 - DNA, 50 bp, Artificial
  Synthetic oligonucleotide
aaccctgcttggatacccgaactgtcctgtcctgcgggggcaaacgagca

SEQ ID NO: 195770 - DNA, 50 bp, Artificial
  Synthetic oligonucleotide
aacccgtgcggccaacctcttatcgctcagcccctccgctgtcagtcatg

SEQ ID NO: 195771 - DNA, 50 bp, Artificial
  Synthetic oligonucleotide
aacccgggcaaccctgaaactgtaaggaacctacggtatacgccgcccga

SEQ ID NO: 195772 - DNA, 50 bp, Artificial
  Synthetic oligonucleotide
aacagcgaccgtgtgaccggcgtgcccagtcgtttcggccactgcgactt

SEQ ID NO: 195773 - DNA, 50 bp, Artificial
  Synthetic oligonucleotide
ttatagatctgacatcacctgactggttgacagtgacagctagttctaat

SEQ ID NO: 195774 - DNA, 50 bp, Artificial
  Synthetic oligonucleotide
aaatccttcccgccattcccgcaggacttgaccgcaaagcgcttatgccg

SEQ ID NO: 195775 - DNA, 50 bp, Artificial
  Synthetic oligonucleotide
aaagttgtgtcggcaaggcttgttcctgttcgcaggggcgcacatgagcc

SEQ ID NO: 195776 - DNA, 50 bp, Artificial
  Synthetic oligonucleotide
aaacctctaacacgcacaggaaattcgcgcacagtgaggcgccgggacgg

SEQ ID NO: 195777 - DNA, 50 bp, Artificial
  Synthetic oligonucleotide
ttctcaagccccatatcgagaagctgttcagccgtcgggatgtcggtaaa

SEQ ID NO: 195778 - DNA, 50 bp, Artificial
  Synthetic oligonucleotide
aaaccgggttccgggctcgcagatgtctcaactgtgacggggtacagccc

SEQ ID NO: 195779 - DNA, 55 bp, Artificial
  Synthetic oligonucleotide
gaccggataagtgactgagtcagattcaataaacgccttccaacgctccgcacct

SEQ ID NO: 195780 - DNA, 50 bp, Artificial
  Synthetic oligonucleotide
ttggaatcgcttcataagcgaaattccatctttgcctagccgcagtcaat

SEQ ID NO: 195781 - DNA, 50 bp, Artificial
  Synthetic oligonucleotide
aaacacgtgcaacgctggctgtgcgtctggtaacattggtgcgcggttgg

SEQ ID NO: 195782 - DNA, 50 bp, Artificial
  Synthetic oligonucleotide
aaaagagtggaggtccgtccagatgatcattgcgcgccggtcctgcccag

SEQ ID NO: 195783 - DNA, 50 bp, Artificial
  Synthetic oligonucleotide
agacgtcctcagaccctctcgaccaaccgtggcgtctacacgtgaacgcg

SEQ ID NO: 195784 - DNA, 50 bp, Artificial
  Synthetic oligonucleotide
aaggcgcggttaccagcgcattctgacgggtccgggggcaaacatgcggt

SEQ ID NO: 195785 - DNA, 50 bp, Artificial
  Synthetic oligonucleotide
aaggcgccttactgggacggcacagaccccgggagactgcgtggaaagac

SEQ ID NO: 195786 - DNA, 50 bp, Artificial
  Synthetic oligonucleotide
aaggccggggtaagtgcgagtcaggcttgcgcgccgaaaggcggtatttg

SEQ ID NO: 195787 - DNA, 50 bp, Artificial
  Synthetic oligonucleotide
ggggttgtgcaatattggtgccgaaatagactctaaaacgttgccaccac

SEQ ID NO: 195788 - DNA, 50 bp, Artificial
  Synthetic oligonucleotide
aagctgtcatctgaccgataggtgcgcccattgctacggacgtctcgggc

SEQ ID NO: 195789 - DNA, 50 bp, Artificial
  Synthetic oligonucleotide
aagcggctcacgcccgtgtatggcgatcccttaccgatacaccagcctca

SEQ ID NO: 195790 - DNA, 55 bp, Artificial
  Synthetic oligonucleotide
caaccatctacacattttcgtagacccctccccagacactgcaacgagttatgca

SEQ ID NO: 195791 - DNA, 50 bp, Artificial
  Synthetic oligonucleotide
aagcgctcgacgcggtcaattgtagtctcgttcagcgcctcagacgccat

SEQ ID NO: 195792 - DNA, 50 bp, Artificial
  Synthetic oligonucleotide
aagcgcggctcagtgaaagcctcaggcggccttcagccctgtaatctcct

SEQ ID NO: 195793 - DNA, 50 bp, Artificial
  Synthetic oligonucleotide
gtatttgagccgtcgaagcggccataagacgcgcacaaagcctcttggaa

SEQ ID NO: 195794 - DNA, 50 bp, Artificial
  Synthetic oligonucleotide
aagcgcggaattcagccgaccagtgtcacgctgccatcaccggacgacac

SEQ ID NO: 195795 - DNA, 50 bp, Artificial
  Synthetic oligonucleotide
aagccgcgctagtttgcctgaatggtaatttcgagcggacccggcccccg

SEQ ID NO: 195796 - DNA, 50 bp, Artificial
  Synthetic oligonucleotide
aagccgcagagcgcttggaaatcggacgccctgccttgtcgcgtatgctg

SEQ ID NO: 195797 - DNA, 50 bp, Artificial
  Synthetic oligonucleotide
aagcccatttccgtgcggaatttgcggcgtagcaggtcaatcggggcaag

SEQ ID NO: 195798 - DNA, 50 bp, Artificial
  Synthetic oligonucleotide
aagacggcggggcgaattggggaaagcgcggttataatgctgcaggtcat

SEQ ID NO: 195799 - DNA, 50 bp, Artificial
  Synthetic oligonucleotide
aactgcggccgacgtttcgccccgcgtcaccttgcggagctgaatggcaa

SEQ ID NO: 195800 - DNA, 50 bp, Artificial
  Synthetic oligonucleotide
aacgtctggcacctcaacagcgaccgtgtgaccggcgtgcccagtcgttt

SEQ ID NO: 195801 - DNA, 55 bp, Artificial
  Synthetic oligonucleotide
gcagaagaacatgcgtgccaataacgttgacatcgtgataatcaatggcacggac

SEQ ID NO: 195802 - DNA, 50 bp, Artificial
  Synthetic oligonucleotide
aacggacgcccggtgtttaatgactgcccggccgagttgtcaggctttct

SEQ ID NO: 195803 - DNA, 50 bp, Artificial
  Synthetic oligonucleotide
aacgcgccatagacctaagggaaccaatccccgaggcaggacgtcgcgtg

SEQ ID NO: 195804 - DNA, 50 bp, Artificial
  Synthetic oligonucleotide
aaccggcggaatgacatgcgcgagcctttgggtctcatcgcaggattggg

SEQ ID NO: 195805 - DNA, 50 bp, Artificial
  Synthetic oligonucleotide
agggcgatccagatttttgggcgtgagagcgaacgggaatcagcctggca

SEQ ID NO: 195806 - DNA, 50 bp, Artificial
  Synthetic oligonucleotide
agggtgcgcctgactcgttgatccatcccgaaaagaggtacagccgtggc

SEQ ID NO: 195807 - DNA, 50 bp, Artificial
  Synthetic oligonucleotide
agtcggcgacgtctgccccgtcctgaccttcagcacgccatcctctatga

SEQ ID NO: 195808 - DNA, 50 bp, Artificial
  Synthetic oligonucleotide
atacgcgctgatgcttaaggcccggtttgcgacgcgttaggagctgggaa

SEQ ID NO: 195809 - DNA, 50 bp, Artificial
  Synthetic oligonucleotide
agacaacggccgagagacgtcggtccgcaagtgtcattctgcctggacgt

SEQ ID NO: 195810 - DNA, 50 bp, Artificial
  Synthetic oligonucleotide
atagggcgtgtgccggtgtcactgcgttgtgcgaagacgcgcaatgatcc

SEQ ID NO: 195811 - DNA, 50 bp, Artificial
  Synthetic oligonucleotide
agaactgtcttgggtccgtgccttgctctgcgcgtcattcccgatgcgtg

SEQ ID NO: 195812 - DNA, 59 bp, Artificial
  Synthetic oligonucleotide
tcgtctgcgagtaccagtcttaaattgccacctccctcaataatctaattggaccatcg

SEQ ID NO: 195813 - DNA, 55 bp, Artificial
  Synthetic oligonucleotide
gccgcaagatttcagacctgccctggcgatggggcagccatggagccaattgggc

SEQ ID NO: 195814 - DNA, 50 bp, Artificial
  Synthetic oligonucleotide
atcgctagacccatcgtcaggcgtaccctgccctttggcggtcgctagcc

SEQ ID NO: 195815 - DNA, 50 bp, Artificial
  Synthetic oligonucleotide
atcgctcagcccctccgctgtcagtcatgccttgcgccgcctaagagccc

SEQ ID NO: 195816 - DNA, 50 bp, Artificial
  Synthetic oligonucleotide
atctttcgcttgaccactgagcaagcccgtcgcaaatgcagccccgtggt

SEQ ID NO: 195817 - DNA, 50 bp, Artificial
  Synthetic oligonucleotide
actggcgacgttctgatcctgtcggctggccctgacttcggtagtcgtga

SEQ ID NO: 195818 - DNA, 50 bp, Artificial
  Synthetic oligonucleotide
atgcgagacgcgccctaggcgtgtgcagcgggctttttccgttcacgtcc

SEQ ID NO: 195819 - DNA, 50 bp, Artificial
  Synthetic oligonucleotide
actgctcagaccccggatggaaaccgccagtccggatacagccgtatgga

SEQ ID NO: 195820 - DNA, 50 bp, Artificial
  Synthetic oligonucleotide
atgcttgcacccatggtcgttgcttcagcagctggcatcagcccttaccc

SEQ ID NO: 195821 - DNA, 50 bp, Artificial
  Synthetic oligonucleotide
atggcccgtttcgtgagacatcgcgttatggcgcgcgaattgacccgttc

SEQ ID NO: 195822 - DNA, 50 bp, Artificial
  Synthetic oligonucleotide
atggccgtgtcttatatggcttcacaggtataatggaatgtgaggatggt

SEQ ID NO: 195823 - DNA, 50 bp, Artificial
  Synthetic oligonucleotide
atggcgaggagaccgtgcagtattcccaggaaacgcccgggccctacgac

SEQ ID NO: 195824 - DNA, 55 bp, Artificial
  Synthetic oligonucleotide
gccggttatcggcgggacgctccctcgaatcagaaggctcccctgcgctggcgtc

SEQ ID NO: 195825 - DNA, 50 bp, Artificial
  Synthetic oligonucleotide
atggcttggacctcctcgcgcctaggaccggctcggataaatgccgtaca

SEQ ID NO: 195826 - DNA, 50 bp, Artificial
  Synthetic oligonucleotide
atgggaagcccgtcgacagaaaacgcgcaccaacccacaacgccatgccc

SEQ ID NO: 195827 - DNA, 50 bp, Artificial
  Synthetic oligonucleotide
agagccagtgttggacgattggccggtttggtcggtgatcgatcccgcat

SEQ ID NO: 195828 - DNA, 50 bp, Artificial
  Synthetic oligonucleotide
agacctttccatcgccaggatagcagttgcagtgcgaaaaccggccccga

SEQ ID NO: 195829 - DNA, 50 bp, Artificial
  Synthetic oligonucleotide
agatagcgcatcgaggggcgaggatagcgaggcgacgcagtcggatggtg

SEQ ID NO: 195830 - DNA, 50 bp, Artificial
  Synthetic oligonucleotide
agaccgaagggtggatcaaccggtcgcgtcagttcggcaagtgcccccga

SEQ ID NO: 195831 - DNA, 50 bp, Artificial
  Synthetic oligonucleotide
agcaggcaccctgaccgggagtgattcggcaggaggcacgggacagatgg

SEQ ID NO: 195832 - DNA, 50 bp, Artificial
  Synthetic oligonucleotide
agcatcaccagcgagacactcagcgggataccgcaagtccaagccagcat

SEQ ID NO: 195833 - DNA, 50 bp, Artificial
  Synthetic oligonucleotide
agcccgtccgacacgaccattaccatcttcgaacgggtggacgctctcga

SEQ ID NO: 195834 - DNA, 50 bp, Artificial
  Synthetic oligonucleotide
agccttgaagccgttttcaccccggttcgtctgttggcgcgtgacgcgga

SEQ ID NO: 195835 - DNA, 55 bp, Artificial
  Synthetic oligonucleotide
acacgtcgatccggaaccttctggtgcgccgatttggcgacgcagggcgcacgac

SEQ ID NO: 195836 - DNA, 50 bp, Artificial
  Synthetic oligonucleotide
agcgcatagacgtgtcataggggagcgccggtaggtgggcatatacgcta

SEQ ID NO: 195837 - DNA, 50 bp, Artificial
  Synthetic oligonucleotide
agcgccgggtgggcgtgtgtcgcaagtcaggactgttgaggacaagcatg

SEQ ID NO: 195838 - DNA, 50 bp, Artificial
  Synthetic oligonucleotide
agcgctcttttcccacagccgtcgtggggaaccacctgtcagcaaccatc

SEQ ID NO: 195839 - DNA, 50 bp, Artificial
  Synthetic oligonucleotide
agcggccagtcagttgggtgggtatcgtgtgtggatcagttcccgcggtt

SEQ ID NO: 195840 - DNA, 50 bp, Artificial
  Synthetic oligonucleotide
agctgggaaagactctgcgtccgactcacgcatagccgccctgctctcat

SEQ ID NO: 195841 - DNA, 50 bp, Artificial
  Synthetic oligonucleotide
aggatagcgaggcgacgcagtcggatggtgaaacgactactggccggacc

SEQ ID NO: 195842 - DNA, 50 bp, Artificial
  Synthetic oligonucleotide
aggcccggtttgcgacgcgttaggagctgggaaagactctgcgtccgact

SEQ ID NO: 195843 - DNA, 50 bp, Artificial
  Synthetic oligonucleotide
aggcgtggggatccagacgatgccgtcagaggttggccgctcacgagaca

SEQ ID NO: 195844 - DNA, 50 bp, Artificial
  Synthetic oligonucleotide
aggctagccctgcgacaaggcccccaaatgcagatcttccctgagaccag

SEQ ID NO: 195845 - DNA, 50 bp, Artificial
  Synthetic oligonucleotide
aggcttcaggttaacgtctttgcgcccggatgcgagcgtcaagcgctgca

SEQ ID NO: 195846 - DNA, 55 bp, Artificial
  Synthetic oligonucleotide
gcgaatgcatatatcgttattcggtaataacgggacagcgcactggcaaagttcc

SEQ ID NO: 195847 - DNA, 50 bp, Artificial
  Synthetic oligonucleotide
aggcttcgagtggtggtacgccaatcccaggtggggcaaatgcttcacca

SEQ ID NO: 195848 - DNA, 50 bp, Artificial
  Synthetic oligonucleotide
ccacctgtttgggcctctataagggccggggcatgtaaatgggcgttgcg

SEQ ID NO: 195849 - DNA, 50 bp, Artificial
  Synthetic oligonucleotide
acgggccaattgtcggcttgggaccaaacgcaccgccatcatttaggggc

SEQ ID NO: 195850 - DNA, 50 bp, Artificial
  Synthetic oligonucleotide
acgggaggcacgagctcagtcacttgtgcccggaaacgagcggagcctgt

SEQ ID NO: 195851 - DNA, 50 bp, Artificial
  Synthetic oligonucleotide
acgggaatgcgccattgtgaaccggactgaatttccgacccgatggggcg

SEQ ID NO: 195852 - DNA, 50 bp, Artificial
  Synthetic oligonucleotide
cccgatcaaaacacggggtgccagcggtaagtaggccgcaaataagcgcg

SEQ ID NO: 195853 - DNA, 50 bp, Artificial
  Synthetic oligonucleotide
acggcggggccgatgttttgcggcggtgtcactgtgtttaatccgcttgt

SEQ ID NO: 195854 - DNA, 50 bp, Artificial
  Synthetic oligonucleotide
acggatgacaggtttgccagatcgaccaggccaaaccgtacccgggcgct

SEQ ID NO: 195855 - DNA, 50 bp, Artificial
  Synthetic oligonucleotide
acggaactaaggctcggcgaggtttctgcggtggcagatcgcgatgggtt

SEQ ID NO: 195856 - DNA, 50 bp, Artificial
  Synthetic oligonucleotide
acgcgttaggagctgggaaagactctgcgtccgactcacgcatagccgcc

SEQ ID NO: 195857 - DNA, 55 bp, Artificial
  Synthetic oligonucleotide
gcgatcagtccgcacgcgctattgcatctcctgagtagtcagaaatggcggcggt

SEQ ID NO: 195858 - DNA, 50 bp, Artificial
  Synthetic oligonucleotide
acgcgggtgatcccctcttccctttcaggcggacttgtgaggcacgctgt

SEQ ID NO: 195859 - DNA, 50 bp, Artificial
  Synthetic oligonucleotide
acgcggattcgcgccaaaggcttcaggttaacgtctttgcgcccggatgc

SEQ ID NO: 195860 - DNA, 50 bp, Artificial
  Synthetic oligonucleotide
acgccggtgaatgctcgctcgacgcatccgctgagaccgcgaaatcagag

SEQ ID NO: 195861 - DNA, 50 bp, Artificial
  Synthetic oligonucleotide
acgcccgcactgtcggaccagcccgtgcaaatggcgctcaatcgcggggt

SEQ ID NO: 195862 - DNA, 50 bp, Artificial
  Synthetic oligonucleotide
cgccgatctgctattgggccattctggattagtatctctatggcgatcat

SEQ ID NO: 195863 - DNA, 50 bp, Artificial
  Synthetic oligonucleotide
acgcagcgtcgagcaagtcccgtatcggcaggttcagatcgcgtctcagc

SEQ ID NO: 195864 - DNA, 50 bp, Artificial
  Synthetic oligonucleotide
acctgtcgccgcgtgatctgaaatctgtcacgggttgcggtccggaagcg

SEQ ID NO: 195865 - DNA, 50 bp, Artificial
  Synthetic oligonucleotide
agactggctctaccggaaggctggctacgggttcgttcaatggtcgggca

SEQ ID NO: 195866 - DNA, 50 bp, Artificial
  Synthetic oligonucleotide
acctctcagcgcgttttccattggtcagcccgcccggtcgtttggagcta

SEQ ID NO: 195867 - DNA, 50 bp, Artificial
  Synthetic oligonucleotide
acctcaataggttggggcatcggctctgcgacaggtggaagggtctcggc

SEQ ID NO: 195868 - DNA, 55 bp, Artificial
  Synthetic oligonucleotide
gcgcacggctccgcctagaatatccgttacgaaaacaagggcgcatttataccca

SEQ ID NO: 195869 - DNA, 50 bp, Artificial
  Synthetic oligonucleotide
actgccccacaataggaactggttggcccagtgactcctgcagcgcctga

SEQ ID NO: 195870 - DNA, 50 bp, Artificial
  Synthetic oligonucleotide
actgagggtcggtcgtttagtgcccctggacctgatcgcacgccctgccg

SEQ ID NO: 195871 - DNA, 50 bp, Artificial
  Synthetic oligonucleotide
atttcgtcactggccgaattggcacctgacgaggcaattgttcggcgggg

SEQ ID NO: 195872 - DNA, 50 bp, Artificial
  Synthetic oligonucleotide
actgaccgagagccgtccatgggaaaccgaagaggccccgtccgacacgt

SEQ ID NO: 195873 - DNA, 50 bp, Artificial
  Synthetic oligonucleotide
actgacaggcgggccgttcgctaactcgcggtcctcaaagaccaagggtg

SEQ ID NO: 195874 - DNA, 50 bp, Artificial
  Synthetic oligonucleotide
actcgcaagtccagcatgacagcctcccaaggtcagcctgcgaccccgtg

SEQ ID NO: 195875 - DNA, 50 bp, Artificial
  Synthetic oligonucleotide
caacctcttatcgctcagcccctccgctgtcagtcatgccttgcgccgcc

SEQ ID NO: 195876 - DNA, 50 bp, Artificial
  Synthetic oligonucleotide
caagtcgtcaatgccagcccaaccgaccttacggccctttctgccgttcg

SEQ ID NO: 195877 - DNA, 50 bp, Artificial
  Synthetic oligonucleotide
actccggcgggctggtataggtcgcgggatcatagagctttggcgctcgc

SEQ ID NO: 195878 - DNA, 50 bp, Artificial
  Synthetic oligonucleotide
caatgggcttgggatgtaggcgtgtgcggtcgcccacaccaattgggaaa

SEQ ID NO: 195879 - DNA, 55 bp, Artificial
  Synthetic oligonucleotide
attcgtctcatcgaaaattgcccaagggcataacgattactttctggcgcatgcg

SEQ ID NO: 195880 - DNA, 50 bp, Artificial
  Synthetic oligonucleotide
cacacgagcaccccgcgtggatgtaatgacagctcatttgtttcacctgt

SEQ ID NO: 195881 - DNA, 50 bp, Artificial
  Synthetic oligonucleotide
caccccgccccaattgcaatcgcatacgtgctcgctcgatgtctgcacta

SEQ ID NO: 195882 - DNA, 50 bp, Artificial
  Synthetic oligonucleotide
actccgaacaccttcaaggtcccccgccagcccaacagtccgctagcatt

SEQ ID NO: 195883 - DNA, 50 bp, Artificial
  Synthetic oligonucleotide
acgggggtccgtggccggtaaaacgtcagatttcagctatgcaggcccgt

SEQ ID NO: 195884 - DNA, 50 bp, Artificial
  Synthetic oligonucleotide
acgggctcttcattgcggtagcgaccacgggtgattaagcgagaacgcgc

SEQ ID NO: 195885 - DNA, 50 bp, Artificial
  Synthetic oligonucleotide
catccatctcgccaagcgggccacgcgcatgctcgggtaaatgcgatgct

SEQ ID NO: 195886 - DNA, 50 bp, Artificial
  Synthetic oligonucleotide
acgggcccatggcgttctcgcgttggttcggcctcaccgaaaccctgcct

SEQ ID NO: 195887 - DNA, 50 bp, Artificial
  Synthetic oligonucleotide
cattacagccctacgttttatccgcccctccaaagccgctctgaccgtaa

SEQ ID NO: 195888 - DNA, 50 bp, Artificial
  Synthetic oligonucleotide
cattcaacacccccaatgggcttgggatgtaggcgtgtgcggtcgcccac

SEQ ID NO: 195889 - DNA, 55 bp, Artificial
  Synthetic oligonucleotide
gcggggcgttgaacacagggcttcaacaacagtacacgctttagtcagatgtcgc

SEQ ID NO: 195890 - DNA, 55 bp, Artificial
  Synthetic oligonucleotide
gcgtagagctctgacccctatgatttgcccattcggagccctcagcaagcgagag

SEQ ID NO: 195891 - DNA, 55 bp, Artificial
  Synthetic oligonucleotide
cacgtttagcaatgattcacgacgtaacgtacttcactatgcatacttccgatac

SEQ ID NO: 195892 - DNA, 60 bp, Artificial
  Synthetic oligonucleotide
ggtcattttcgggcgcatatccagaggtgactttataggccacttcaacattgggtgtca

SEQ ID NO: 195893 - DNA, 55 bp, Artificial
  Synthetic oligonucleotide
cagagacgcttcttcgcaaacgctcttcccgaaccggatttaagataggtctcaa

SEQ ID NO: 195894 - DNA, 51 bp, Artificial
  Synthetic oligonucleotide
acgggcggggcccctggttcagcggattttatgtttaccgttccgcgcgag

SEQ ID NO: 195895 - DNA, 55 bp, Artificial
  Synthetic oligonucleotide
catcgtgatcatgctcagtcggttacatttgtgactggccatgcgaaattaggcg

SEQ ID NO: 195896 - DNA, 53 bp, Artificial
  Synthetic oligonucleotide
ccacgtgagggatgtgcccgcggcttacgtaaacctaccaacgaagaggtttg

SEQ ID NO: 195897 - DNA, 54 bp, Artificial
  Synthetic oligonucleotide
cccgaagaacgaacgctgacccactcgaatgcattaccaacggtcgggacgtcg

SEQ ID NO: 195898 - DNA, 55 bp, Artificial
  Synthetic oligonucleotide
cccgtcaatcagacagcaggacgattgatcgcacgcgaacggctaggtcgctccg

SEQ ID NO: 195899 - DNA, 55 bp, Artificial
  Synthetic oligonucleotide
ccgccatttggttaggtcctcataagaagggccacccagaacaaattgtacaggc

SEQ ID NO: 195900 - DNA, 55 bp, Artificial
  Synthetic oligonucleotide
cacggtgactctccagaggtgagaatcctgcaattgtgagtcgcctgtgaatccc

SEQ ID NO: 195901 - DNA, 55 bp, Artificial
  Synthetic oligonucleotide
ccttggctcgcgctatataggtatgcatttggataagctgtaagccgtgtaagcg

SEQ ID NO: 195902 - DNA, 55 bp, Artificial
  Synthetic oligonucleotide
cgaccggcaagatccaagatgtcgagcgtttctgcaaagcgttgccccggcttgt

SEQ ID NO: 195903 - DNA, 60 bp, Artificial
  Synthetic oligonucleotide
tctgacgccacattatgatatctttgctgcgagggtctggtttttcgcgtaagcatttaa

SEQ ID NO: 195904 - DNA, 55 bp, Artificial
  Synthetic oligonucleotide
cgaggactttcgcttattgcattgtcagtcgtgctcaacatggctgcctgtgctc

SEQ ID NO: 195905 - DNA, 55 bp, Artificial
  Synthetic oligonucleotide
cgatcgcttcggtgtaaaaggattacgcaccactcgcttacaaaactatcgcgcc

SEQ ID NO: 195906 - DNA, 55 bp, Artificial
  Synthetic oligonucleotide
cgcgctgagactggacccaactgtctgcatgcggcattgcgccacctactggtca

SEQ ID NO: 195907 - DNA, 55 bp, Artificial
  Synthetic oligonucleotide
cggagagttctgagactggccggctccaatatatattaggatctaacccaagttg

SEQ ID NO: 195908 - DNA, 55 bp, Artificial
  Synthetic oligonucleotide
cggccataacaggttcctgcatgctgtgacgtcattattgcgcgcacatctaggc

SEQ ID NO: 195909 - DNA, 55 bp, Artificial
  Synthetic oligonucleotide
cgggcacgaagtccgtactgggcgtctgactcaccatcaccataccgccgctcat

SEQ ID NO: 195910 - DNA, 55 bp, Artificial
  Synthetic oligonucleotide
cgtcccggaatagtttcatgatagctaaatgttgcaagcgaccaaattggtcctg

SEQ ID NO: 195911 - DNA, 55 bp, Artificial
  Synthetic oligonucleotide
cgttctgatcctgtcggctggccctgacttcggtagtcgtgacaatgtccgaccg

SEQ ID NO: 195912 - DNA, 55 bp, Artificial
  Synthetic oligonucleotide
ctgaatggcaacatcagtattccgcagtgcttcccgataactggtcgcatccacg

SEQ ID NO: 195913 - DNA, 55 bp, Artificial
  Synthetic oligonucleotide
ctgcacaagttcaaccctgcgcgactgacctatatccgcgacatattgagccggc

SEQ ID NO: 195914 - DNA, 55 bp, Artificial
  Synthetic oligonucleotide
gcaactgaatcccacgcccaaccgcgaattgtgacacccgaaggttcacccttaa

SEQ ID NO: 195915 - DNA, 55 bp, Artificial
  Synthetic oligonucleotide
caatagatgcaccggtctcggacacagtcctaactaaagtttctggatattactt

SEQ ID NO: 195916 - DNA, 55 bp, Artificial
  Synthetic oligonucleotide
gtttgtggaaccgcttattggtgcaatgggtgccccagtttcaagcgcaaatgcc

SEQ ID NO: 195917 - DNA, 55 bp, Artificial
  Synthetic oligonucleotide
gttttcatcatatgggacaagatgttcgggacgtttgtgcccgagcgggaagatg

SEQ ID NO: 195918 - DNA, 55 bp, Artificial
  Synthetic oligonucleotide
taaagggcgctcaagcgcgacgcaatctatgcactgttatgagcaaatgccgggc

SEQ ID NO: 195919 - DNA, 55 bp, Artificial
  Synthetic oligonucleotide
taaccgctgactcttgcctaaagcgcagggtagcgagactttaaggcatgcgtcg

SEQ ID NO: 195920 - DNA, 55 bp, Artificial
  Synthetic oligonucleotide
taatctcgatgggtttgcgaccaaagttttctctatcagggtaagatggatgtgc

SEQ ID NO: 195921 - DNA, 55 bp, Artificial
  Synthetic oligonucleotide
tacctgcggccgatacgctttcccgtgcgctctggcgcactagctgctagggaaa

SEQ ID NO: 195922 - DNA, 55 bp, Artificial
  Synthetic oligonucleotide
tcaaggtaatgcttccacaggcttgggcataccaccgtcagaacgtgatcttacc

SEQ ID NO: 195923 - DNA, 55 bp, Artificial
  Synthetic oligonucleotide
tcacatccaaggcgcggacaggctccgctcgtttccgggcacaagtgactgagct

SEQ ID NO: 195924 - DNA, 55 bp, Artificial
  Synthetic oligonucleotide
tgcgtgggggtggccaaagcattggggcgtcaaattattggttgtgtatggggtg

SEQ ID NO: 195925 - DNA, 58 bp, Artificial
  Synthetic oligonucleotide
gcaggtgctagcaaggtgatcattttggggccaacgttggaatataccaccaacctac

SEQ ID NO: 195926 - DNA, 55 bp, Artificial
  Synthetic oligonucleotide
tgttcccacttagatcccgttatttggtctggcaggatatacatatcaccttcag

SEQ ID NO: 195927 - DNA, 55 bp, Artificial
  Synthetic oligonucleotide
ttaagcaagtctgcttgttcgtttctcttcaaggtgtggaggtctgacgcctggc

SEQ ID NO: 195928 - DNA, 55 bp, Artificial
  Synthetic oligonucleotide
ttagcccggagacaggtgagggcacaagcgcgccccgctgacgccttgcagtcga

SEQ ID NO: 195929 - DNA, 55 bp, Artificial
  Synthetic oligonucleotide
aacccgataggctcacgaccgcaactataggggattagatatggttccgtcctgg

SEQ ID NO: 195930 - DNA, 55 bp, Artificial
  Synthetic oligonucleotide
ttatactcttgtgctggagagatgaccatgacgtccagattgacctttatggccc

SEQ ID NO: 195931 - DNA, 54 bp, Artificial
  Synthetic oligonucleotide
aaattgctccgcttttagcccggaacacccaagcgtccagcaagcggtcgtccc

SEQ ID NO: 195932 - DNA, 55 bp, Artificial
  Synthetic oligonucleotide
ttcggagaaggtgatacccagcgtgaggggtccggaatagggcgacagggaccag

SEQ ID NO: 195933 - DNA, 55 bp, Artificial
  Synthetic oligonucleotide
atagccgtcgcttgtacgcagaatcagcatggacccgtagctgcggaagggccgg

SEQ ID NO: 195934 - DNA, 55 bp, Artificial
  Synthetic oligonucleotide
ttcgggcccttatccacgggattggcccggcgctattcaactaggttcggcaggc

SEQ ID NO: 195935 - DNA, 55 bp, Artificial
  Synthetic oligonucleotide
ttgcttctacacccgaaatcaccctagctggaggtccgaccggatgatgagtcat

SEQ ID NO: 195936 - DNA, 60 bp, Artificial
  Synthetic oligonucleotide
ttcccgtgctgctaactcacgacgatcaatccagacacggagtgcataatttctagcacc

SEQ ID NO: 195937 - DNA, 55 bp, Artificial
  Synthetic oligonucleotide
ttgtcgcccgatctggaaaggcttttctgcgtcttcattgcagccggatgacccc

SEQ ID NO: 195938 - DNA, 55 bp, Artificial
  Synthetic oligonucleotide
agaccctctcgaccaaccgtggcgtctacacgtgaacgcgtcacgcgcacgcaaa

SEQ ID NO: 195939 - DNA, 55 bp, Artificial
  Synthetic oligonucleotide
gcgtatcgattatttgtgggtatactctcgaacatctgttagccgattggacaat

SEQ ID NO: 195940 - DNA, 55 bp, Artificial
  Synthetic oligonucleotide
gcgtgccagagttagtccttccgtcttcagatattctgacagccccatgttggac

SEQ ID NO: 195941 - DNA, 55 bp, Artificial
  Synthetic oligonucleotide
gcttcatattcgcaaatgagggcagcctctaactgcgtagagtacgaagagagcc

SEQ ID NO: 195942 - DNA, 55 bp, Artificial
  Synthetic oligonucleotide
aatgcgctgcaaagtcctgcgatgcatattcagacgtctagctgtttcagacacg

SEQ ID NO: 195943 - DNA, 55 bp, Artificial
  Synthetic oligonucleotide
gcttgtgcatatgcagaggttgatatcgcacttaggctgatagctaggattggcg

SEQ ID NO: 195944 - DNA, 55 bp, Artificial
  Synthetic oligonucleotide
ggaattcatgtcgcacccaatattattgacgtgctccactcctctcacttctgag

SEQ ID NO: 195945 - DNA, 55 bp, Artificial
  Synthetic oligonucleotide
ggaccaacttgggtgttgacgaatgagcatctgccgtgtaattcccgcccttcga

SEQ ID NO: 195946 - DNA, 55 bp, Artificial
  Synthetic oligonucleotide
ggactaattcaggaacaaaaggcgctcactcacggaacgccacatgacgaccctt

SEQ ID NO: 195947 - DNA, 59 bp, Artificial
  Synthetic oligonucleotide
acacggagtgcataatttctagcaccaccggttctaactcgcgccacgccatccaacgc

SEQ ID NO: 195948 - DNA, 55 bp, Artificial
  Synthetic oligonucleotide
ggaggttgatcgtggcaaattcttattccctagcaaacaaacgctataagcgtga

SEQ ID NO: 195949 - DNA, 55 bp, Artificial
  Synthetic oligonucleotide
attcaataaggtcacccaactcgcttggacgatctgtgagcaatgcctgtaggcg

SEQ ID NO: 195950 - DNA, 55 bp, Artificial
  Synthetic oligonucleotide
ggcctgacgacgatttcaggacagggacgcattgactctgtccgctcgtttcgcc

SEQ ID NO: 195951 - DNA, 55 bp, Artificial
  Synthetic oligonucleotide
ggcgcaaatctgggtgtccggagaacaatacaccatacatgtcgaatgcttcacg

SEQ ID NO: 195952 - DNA, 55 bp, Artificial
  Synthetic oligonucleotide
ggcgcggtttataggtacacggagataggcagttgaacgcgatacttggcctggt

SEQ ID NO: 195953 - DNA, 55 bp, Artificial
  Synthetic oligonucleotide
aaggctagccgcaagcccctgctttacaagtgcccgtgaaagcgctcacagcggc

SEQ ID NO: 195954 - DNA, 55 bp, Artificial
  Synthetic oligonucleotide
ggctaacggatgaattagtcgaaaagtgatattgaagcgacaaaacagcagggcc

SEQ ID NO: 195955 - DNA, 55 bp, Artificial
  Synthetic oligonucleotide
ggctatatttgcgctaggccttgaaacagatgtacgtaaattatcaggtggtcct

SEQ ID NO: 195956 - DNA, 55 bp, Artificial
  Synthetic oligonucleotide
gggactcaatctctaggctgccatacctatgaggaggtagaggcctattggcccc

SEQ ID NO: 195957 - DNA, 55 bp, Artificial
  Synthetic oligonucleotide
ggggtgaaggtttaaagtcaatcagcctacatttatgcggataaacataacagct

SEQ ID NO: 195958 - DNA, 52 bp, Artificial
  Synthetic oligonucleotide
ccacgcccaaccgcgaattgtgacacccgaaggttcacccttaaaacggctc

SEQ ID NO: 195959 - DNA, 55 bp, Artificial
  Synthetic oligonucleotide
gggttcaggtcatgattggccaaggccttataccccaatcctatcacgcaatggc

SEQ ID NO: 195960 - DNA, 55 bp, Artificial
  Synthetic oligonucleotide
ggtgtcaaagtgagttgggccgaaattcgctgtgtaagttcgggacttgagtgga

SEQ ID NO: 195961 - DNA, 55 bp, Artificial
  Synthetic oligonucleotide
gtaccagacgcacgcctacgcttaacttttcgtgcttcaaatcccgccacgcgcg

SEQ ID NO: 195962 - DNA, 55 bp, Artificial
  Synthetic oligonucleotide
gtgtgatcgacaatggcatttaacaaactggctgtttccgaggcgaacaccgcaa

SEQ ID NO: 195963 - DNA, 54 bp, Artificial
  Synthetic oligonucleotide
atgcgctactctcctctacaaactcaagggataaggtaagcggtcagtcccgcc

SEQ ID NO: 195964 - DNA, 54 bp, Artificial
  Synthetic oligonucleotide
agcacgctctctagtagcgccacccaatccaagtagtgctcgttcactacgggc

SEQ ID NO: 195965 - DNA, 54 bp, Artificial
  Synthetic oligonucleotide
gaaactgcatctatctgatttgtgacgaaagcccacgtcttcggacttgcgacc

SEQ ID NO: 195966 - DNA, 54 bp, Artificial
  Synthetic oligonucleotide
tatcaggctatcgacgtagaattctccatttacacgtccatctcgcgcgatgag

SEQ ID NO: 195967 - DNA, 54 bp, Artificial
  Synthetic oligonucleotide
tcattccatccgctccctgaggcttcgcatcagagtgtgctgagtccgccccgc

SEQ ID NO: 195968 - DNA, 54 bp, Artificial
  Synthetic oligonucleotide
ttttacaggcgcaaatgacgctccctcactagcggtagagaagttagcgctgag

SEQ ID NO: 195969 - DNA, 57 bp, Artificial
  Synthetic oligonucleotide
agcgactaacaagtgtgttaaaagcgctagctttccccaccagacggcgtcactgcc

SEQ ID NO: 195970 - DNA, 55 bp, Artificial
  Synthetic oligonucleotide
cgccacagttaccgatactggcgatgtgtattatgagtgcgtaaccatgttcgca

SEQ ID NO: 195971 - DNA, 50 bp, Artificial
  Synthetic oligonucleotide
acgtggcgagcaacttcgcccgacgctccagcagactgcagacactcgtc

SEQ ID NO: 195972 - DNA, 50 bp, Artificial
  Synthetic oligonucleotide
agagttatcgaactccccgccattaggcccagtttccgacgcgcgggtca

SEQ ID NO: 195973 - DNA, 50 bp, Artificial
  Synthetic oligonucleotide
agcaagggcgagccccgatccgtccatacggttttgtaagcttccgcaga

SEQ ID NO: 195974 - DNA, 50 bp, Artificial
  Synthetic oligonucleotide
agcagcccgccttggttgcgcacacgaacttcgggtaggccggtgatagg

SEQ ID NO: 195975 - DNA, 50 bp, Artificial
  Synthetic oligonucleotide
agcccctacggcggtggagtggtttgctgaggcgtcgccaaagttacaaa

SEQ ID NO: 195976 - DNA, 50 bp, Artificial
  Synthetic oligonucleotide
agcccggaagcgtttggtaaggcatgcgatccagcacaatccagtcagcc

SEQ ID NO: 195977 - DNA, 50 bp, Artificial
  Synthetic oligonucleotide
agcccgttactgcccgatctacagcaagcggcacccttggtgggtcaaag

SEQ ID NO: 195978 - DNA, 50 bp, Artificial
  Synthetic oligonucleotide
agccggtccccctagcctccatggcatctcgccaaccgcctaaccattga

SEQ ID NO: 195979 - DNA, 50 bp, Artificial
  Synthetic oligonucleotide
agcctggttgcgctccccaggttaaatcagcggtggtattcaggcggccg

SEQ ID NO: 195980 - DNA, 50 bp, Artificial
  Synthetic oligonucleotide
agcgacgcccaatagcgcgttggctgaccctcgccttagcggcagctcaa

SEQ ID NO: 195981 - DNA, 55 bp, Artificial
  Synthetic oligonucleotide
gacaaggtgatcaccctaataaccgaaaggactatgatgagcagcggagcgcaca

SEQ ID NO: 195982 - DNA, 50 bp, Artificial
  Synthetic oligonucleotide
aacaccagctactgtgcgcatttcgcccaagtggcgagcgtttagggcaa

SEQ ID NO: 195983 - DNA, 50 bp, Artificial
  Synthetic oligonucleotide
aacagtcagtagagcgacgcccaatagcgcgttggctgaccctcgcctta

SEQ ID NO: 195984 - DNA, 50 bp, Artificial
  Synthetic oligonucleotide
aacccggcgtgttcagattcgctcaagtccaccatagagcgcgttcccga

SEQ ID NO: 195985 - DNA, 50 bp, Artificial
  Synthetic oligonucleotide
aaccctgtcctgaggcatcggtagcaatcatgccgccaagggtgcaacga

SEQ ID NO: 195986 - DNA, 50 bp, Artificial
  Synthetic oligonucleotide
aaccgactcgctccagaatgccgactagcccttgcagccgcataggatga

SEQ ID NO: 195987 - DNA, 50 bp, Artificial
  Synthetic oligonucleotide
aacgtctcgggagtggataaggagcgcttggaaggcgacccacggttccc

SEQ ID NO: 195988 - DNA, 50 bp, Artificial
  Synthetic oligonucleotide
aagccgtcaaaccaacgcgcggttacatctaccgaggttccaagcccgct

SEQ ID NO: 195989 - DNA, 50 bp, Artificial
  Synthetic oligonucleotide
aagggcgccgtcccagtttttcgagcgcagctcacccatccgaagcacag

SEQ ID NO: 195990 - DNA, 50 bp, Artificial
  Synthetic oligonucleotide
aatcagggcagtggacgttcatttgagcccgccgtaggccggcaggcaag

SEQ ID NO: 195991 - DNA, 50 bp, Artificial
  Synthetic oligonucleotide
aatcccgacgataagttgctgcccggttcgcgcttaggtgcttgtgctgc

SEQ ID NO: 195992 - DNA, 55 bp, Artificial
  Synthetic oligonucleotide
cgcgaagtcaacttgaggttcgtgggcacacagtttgggcgtcatacgtggatca

SEQ ID NO: 195993 - DNA, 50 bp, Artificial
  Synthetic oligonucleotide
aatgcgccaagcggccatcaaagcacaacggggatatgacgtaccgcgag

SEQ ID NO: 195994 - DNA, 50 bp, Artificial
  Synthetic oligonucleotide
aatggcaggctttgcggggttaagctggtttccgaccgaagctccctggc

SEQ ID NO: 195995 - DNA, 50 bp, Artificial
  Synthetic oligonucleotide
aatggtcatgggcgtgcaagcgataagccgatgagttttggtccggcgga

SEQ ID NO: 195996 - DNA, 50 bp, Artificial
  Synthetic oligonucleotide
acaactgaccgtgacgaagtggcctgcccggctgactggctgcccggaga

SEQ ID NO: 195997 - DNA, 50 bp, Artificial
  Synthetic oligonucleotide
acaagcattagcgccaatgacacggcttgcccaacgctaccggcgaccca

SEQ ID NO: 195998 - DNA, 50 bp, Artificial
  Synthetic oligonucleotide
acaccgcacagctgtcgttatccgcccaggtaccggcgccaataatgggg

SEQ ID NO: 195999 - DNA, 50 bp, Artificial
  Synthetic oligonucleotide
acacgcagccgactcaccccctgactcgagagcacctctgccatccgaac

SEQ ID NO: 196000 - DNA, 50 bp, Artificial
  Synthetic oligonucleotide
acacgctcgttcgcatcttgcgggccaaacaaacggataacccggccgtt

SEQ ID NO: 196001 - DNA, 50 bp, Artificial
  Synthetic oligonucleotide
acagccgctgggcctttgggcttagagctaaccgggtaaggcagcgtgac

SEQ ID NO: 196002 - DNA, 50 bp, Artificial
  Synthetic oligonucleotide
atccctacatggcgcaaggggcgttagtgccgatgtgcttcgggatgctt

SEQ ID NO: 196003 - DNA, 55 bp, Artificial
  Synthetic oligonucleotide
cgcgtcactgcagctataaactgagcagggagactaagtacggagaagccagggg

SEQ ID NO: 196004 - DNA, 50 bp, Artificial
  Synthetic oligonucleotide
atcgctcgggcttacaggagcgcttttgggtcgtccgcgtgttacccgga

SEQ ID NO: 196005 - DNA, 50 bp, Artificial
  Synthetic oligonucleotide
atgagctggcactgactgagcgttggcaagtcaccgcaggggcacggctt

SEQ ID NO: 196006 - DNA, 50 bp, Artificial
  Synthetic oligonucleotide
atggaccacgcagcccagcaaacggagctactcggcatacttgcaagcgg

SEQ ID NO: 196007 - DNA, 50 bp, Artificial
  Synthetic oligonucleotide
atggccacggccatactggtggcttacgagcgtgcataacaaccaaccga

SEQ ID NO: 196008 - DNA, 50 bp, Artificial
  Synthetic oligonucleotide
atggttcagggcttgcacaagcttttaggcgaacgctgtactttgcgctt

SEQ ID NO: 196009 - DNA, 50 bp, Artificial
  Synthetic oligonucleotide
attcaccagtcctggtcccagaggcatcctaacggaggcgccaaccacgg

SEQ ID NO: 196010 - DNA, 50 bp, Artificial
  Synthetic oligonucleotide
attcatgctcactacttggcgatcggggagcacgcgatttgggtgtgcgc

SEQ ID NO: 196011 - DNA, 50 bp, Artificial
  Synthetic oligonucleotide
caacgctgtgccccatttaccgagtgccctaccgcgagaacagccagcaa

SEQ ID NO: 196012 - DNA, 50 bp, Artificial
  Synthetic oligonucleotide
caatttgctgggatgcgcaccacgttggactttcaacccgtgggacgccc

SEQ ID NO: 196013 - DNA, 50 bp, Artificial
  Synthetic oligonucleotide
cacaggttgcttctgcaggctacggccaataaccactccgccccagagca

SEQ ID NO: 196014 - DNA, 55 bp, Artificial
  Synthetic oligonucleotide
gaagtgactgaatatcaacgcgcgttagtgttcgtgcgtacgcgtcaagatacta

SEQ ID NO: 196015 - DNA, 50 bp, Artificial
  Synthetic oligonucleotide
caccaagaccatgcgccacccaaccgacaggggcacatacgtaaccgcca

SEQ ID NO: 196016 - DNA, 50 bp, Artificial
  Synthetic oligonucleotide
cacgcacctccgtcacgcccgtgagatcttgagcaaagtgtgcggtaggc

SEQ ID NO: 196017 - DNA, 50 bp, Artificial
  Synthetic oligonucleotide
cacgtacggcttcaatctcgccccgcgtaaccggttgtcgccaagcaatt

SEQ ID NO: 196018 - DNA, 50 bp, Artificial
  Synthetic oligonucleotide
cacgtatggcgaaacttccgggtgccgcaaataggctagggtgccagtgc

SEQ ID NO: 196019 - DNA, 50 bp, Artificial
  Synthetic oligonucleotide
cagcggcctggcttatcgttacccacttggcaaatcgccgtggccccggt

SEQ ID NO: 196020 - DNA, 50 bp, Artificial
  Synthetic oligonucleotide
cagcgttgctgtacgccaaccgatacgtccagtttgaagccccacccgga

SEQ ID NO: 196021 - DNA, 50 bp, Artificial
  Synthetic oligonucleotide
caggcccgggtggatgctaagaatgcggtgctaagcgcgaccattccgga

SEQ ID NO: 196022 - DNA, 50 bp, Artificial
  Synthetic oligonucleotide
caggtatagctcgtaccgtgcgaggcccctcgatgagtgccggcccgggg

SEQ ID NO: 196023 - DNA, 50 bp, Artificial
  Synthetic oligonucleotide
agcgccaatgacacggcttgcccaacgctaccggcgacccaaaaccactt

SEQ ID NO: 196024 - DNA, 50 bp, Artificial
  Synthetic oligonucleotide
agcgcgtgagatggtcgtcactgggcaatggttctttcctgcccgtggtg

SEQ ID NO: 196025 - DNA, 55 bp, Artificial
  Synthetic oligonucleotide
cttggtggtacaagctggcataaaggtaagcgacacccgacattgaaagacggtg

SEQ ID NO: 196026 - DNA, 50 bp, Artificial
  Synthetic oligonucleotide
agctaaagcaagcgcatcactattgcaccctaacgcgcgccaggcttcga

SEQ ID NO: 196027 - DNA, 50 bp, Artificial
  Synthetic oligonucleotide
agctgtgagcctcggcacgttcacggccctcggcactgctacggtagagg

SEQ ID NO: 196028 - DNA, 50 bp, Artificial
  Synthetic oligonucleotide
agcttcgcaggtccaggcaagcttcgctccaggccctaacaagccacggg

SEQ ID NO: 196029 - DNA, 50 bp, Artificial
  Synthetic oligonucleotide
aggaaagtgtgcggcttaaggtgttgctacgccccgtgaatgttggggcg

SEQ ID NO: 196030 - DNA, 50 bp, Artificial
  Synthetic oligonucleotide
aggagcgcttttgggtcgtccgcgtgttacccggattgtcgttaggcgcg

SEQ ID NO: 196031 - DNA, 50 bp, Artificial
  Synthetic oligonucleotide
aggatagccaagtaatattccgtgccgcaccggctaaacggggcagcgcc

SEQ ID NO: 196032 - DNA, 50 bp, Artificial
  Synthetic oligonucleotide
aggcgcaccttgtagcgtcagtagctggcgcatgtctcgacaagcggtac

SEQ ID NO: 196033 - DNA, 50 bp, Artificial
  Synthetic oligonucleotide
aggctaatgttgctgttgggcggtgacttgccgtggtggttggttgcagc

SEQ ID NO: 196034 - DNA, 50 bp, Artificial
  Synthetic oligonucleotide
agggcaccacccgaggttggcgtgagcttgtgcgcaactacatcaatcgc

SEQ ID NO: 196035 - DNA, 50 bp, Artificial
  Synthetic oligonucleotide
agggtgtttgcagttgtggcagcatctgggcagtaacgtgccgggcagcg

SEQ ID NO: 196036 - DNA, 55 bp, Artificial
  Synthetic oligonucleotide
cgcgtcttcatcggagttaaataaccaggtttgtatggcggagtttgattctatc

SEQ ID NO: 196037 - DNA, 50 bp, Artificial
  Synthetic oligonucleotide
aggtccaggcaagcttcgctccaggccctaacaagccacgggcactgtca

SEQ ID NO: 196038 - DNA, 50 bp, Artificial
  Synthetic oligonucleotide
agtaggcaacgtggcgagcaacttcgcccgacgctccagcagactgcaga

SEQ ID NO: 196039 - DNA, 50 bp, Artificial
  Synthetic oligonucleotide
agtcgcgacagccacaagcattagcgccaatgacacggcttgcccaacgc

SEQ ID NO: 196040 - DNA, 50 bp, Artificial
  Synthetic oligonucleotide
agtggcagcggatgttaaccgttgcaggcgaaccctgtgtgcgcattcgc

SEQ ID NO: 196041 - DNA, 50 bp, Artificial
  Synthetic oligonucleotide
agtgggctagcggctgcaaaaactgaggtccccgctcgtgccagcctgta

SEQ ID NO: 196042 - DNA, 50 bp, Artificial
  Synthetic oligonucleotide
agtgtggttgactcccccgttgtgcctaccgcgacaattgcgtctgtccc

SEQ ID NO: 196043 - DNA, 50 bp, Artificial
  Synthetic oligonucleotide
ataagcggttgggcctcacattagccgcagctcccgctgaagggttggtg

SEQ ID NO: 196044 - DNA, 50 bp, Artificial
  Synthetic oligonucleotide
atacgcccatgcaggggtaagatgattgtgcccggcggcattcgctgact

SEQ ID NO: 196045 - DNA, 55 bp, Artificial
  Synthetic oligonucleotide
ctggggcaattttactgcgcttgggtgcattgcgaagctcgctaagcatgctccg

SEQ ID NO: 196046 - DNA, 55 bp, Artificial
  Synthetic oligonucleotide
ctggaaatctcagcgaatggcagacttatgtcggtcagctatgccgaggcaaccc

SEQ ID NO: 196047 - DNA, 55 bp, Artificial
  Synthetic oligonucleotide
ctgctgattaaccggtaacgagcgcgcgaaactagtaattttgccttgcggcact

SEQ ID NO: 196048 - DNA, 55 bp, Artificial
  Synthetic oligonucleotide
atagccatggtatcaagctgcgagttaaggaagcggcgaacgaagtggcacgacc

SEQ ID NO: 196049 - DNA, 55 bp, Artificial
  Synthetic oligonucleotide
ctgacgtagcaatagttacggtaagccaaggcgatagtaagcagcaagtgctaga

SEQ ID NO: 196050 - DNA, 55 bp, Artificial
  Synthetic oligonucleotide
cgcgttgactaatgtccgtgctggccgatgtatgtcctgatagaccggatacgcg

SEQ ID NO: 196051 - DNA, 55 bp, Artificial
  Synthetic oligonucleotide
cggctagatggccgttaatgctcatatctaagttgcgatggtattctgctaccgg

SEQ ID NO: 196052 - DNA, 55 bp, Artificial
  Synthetic oligonucleotide
cgggttggcgaagtgattctgcgtagcctcccagatacaacaaccgcgaacgccg

SEQ ID NO: 196053 - DNA, 55 bp, Artificial
  Synthetic oligonucleotide
agcttaagtaggtactcactattgtccccgcttgggcctcgacttttagcaatat

SEQ ID NO: 196054 - DNA, 55 bp, Artificial
  Synthetic oligonucleotide
cataaccagacaggtgcaataaggagtaaattagcattgacccgtgtccgttcga

SEQ ID NO: 196055 - DNA, 52 bp, Artificial
  Synthetic oligonucleotide
ttttcgactcgacttttaaatttctgaccaggtttgaaggtgacaacccgac

SEQ ID NO: 196056 - DNA, 55 bp, Artificial
  Synthetic oligonucleotide
cataccgggcgctaagggtgtttcgtctccgcccactagataaggccattcgtgt

SEQ ID NO: 196057 - DNA, 55 bp, Artificial
  Synthetic oligonucleotide
tgaaaacgccgacacattttcggagatcctcgaagtcacgccgaaaataacactc

SEQ ID NO: 196058 - DNA, 55 bp, Artificial
  Synthetic oligonucleotide
cattaggacgtaagtcacgatccaacatacgttttacgagtgtctcacggtccag

SEQ ID NO: 196059 - DNA, 55 bp, Artificial
  Synthetic oligonucleotide
gccaatttggaacctctaacacatgtcagaacgagcctctttaagagcccttagc

SEQ ID NO: 196060 - DNA, 55 bp, Artificial
  Synthetic oligonucleotide
cccaggctgacacgaaatagtgctcaagcattccgacccaaccagtttgcgaagt

SEQ ID NO: 196061 - DNA, 55 bp, Artificial
  Synthetic oligonucleotide
atttagctctaaccacgcaaagaaattactatcggccatcacgccatatttgatt

SEQ ID NO: 196062 - DNA, 55 bp, Artificial
  Synthetic oligonucleotide
ccctcggtgaatgagctgccgtaacaccgaaaaccagtgctcctgagtttccgac

SEQ ID NO: 196063 - DNA, 55 bp, Artificial
  Synthetic oligonucleotide
ccgtagcaccggttgagtccttgatattaatcttcacgttttgtgcagactgggg

SEQ ID NO: 196064 - DNA, 55 bp, Artificial
  Synthetic oligonucleotide
gttacttgggcaacctcagcaccattatgtagtactgcaaacgtgctaccggcgg

SEQ ID NO: 196065 - DNA, 55 bp, Artificial
  Synthetic oligonucleotide
gttaagcgcggcaggataaacgccgaaatctggtctaagttagccaccatatttc

SEQ ID NO: 196066 - DNA, 52 bp, Artificial
  Synthetic oligonucleotide
ccgttcgctcgggtaccaacgcaaccctgtaaagtactcaagattcgtaccc

SEQ ID NO: 196067 - DNA, 55 bp, Artificial
  Synthetic oligonucleotide
gtctggcgatacggctgatattttactcgaccaactggagcggttccaacaagga

SEQ ID NO: 196068 - DNA, 55 bp, Artificial
  Synthetic oligonucleotide
ggtcaatagcgccggttagcgcaactgattgcttgaaggggacatcagcaagcgc

SEQ ID NO: 196069 - DNA, 55 bp, Artificial
  Synthetic oligonucleotide
cctatagccgcaaatacccgtgaaacataacgacgactaagtggcctagccgctg

SEQ ID NO: 196070 - DNA, 55 bp, Artificial
  Synthetic oligonucleotide
agttggatgaacaacccaacagggccggtccatataaactgcatgtaggtcgtgt

SEQ ID NO: 196071 - DNA, 55 bp, Artificial
  Synthetic oligonucleotide
cctcaggtcgttggcttggtactagtccacaaccctcgcgataacaccactggcc

SEQ ID NO: 196072 - DNA, 55 bp, Artificial
  Synthetic oligonucleotide
ggctacttggcttatggtgagcgttctatacttgatttcgtggctaccctttcgc

SEQ ID NO: 196073 - DNA, 55 bp, Artificial
  Synthetic oligonucleotide
ggcacgtttgcacgcattagaaagcgggcgtcaaatcgactaccaatgcattgct

SEQ ID NO: 196074 - DNA, 55 bp, Artificial
  Synthetic oligonucleotide
ggcaccgtctaaatcaccgttgttaatcgccacttgggctaattgcataaacgct

SEQ ID NO: 196075 - DNA, 55 bp, Artificial
  Synthetic oligonucleotide
gctgcaaaggcgctagtcgaagagcttaattacgttactattcatttgatgccca

SEQ ID NO: 196076 - DNA, 55 bp, Artificial
  Synthetic oligonucleotide
gcgtgttcatgcaacccctagtcaacattggtctggtcgaagtctttgggatcgt

SEQ ID NO: 196077 - DNA, 55 bp, Artificial
  Synthetic oligonucleotide
gcgcttagcccctggtaacgaatgatggcagcgcctaagactgagatggcggctg

SEQ ID NO: 196078 - DNA, 55 bp, Artificial
  Synthetic oligonucleotide
gcccgtcgttttatagctctggtcgatgagtgctatgaccgaaagtgtcacttat

SEQ ID NO: 196079 - DNA, 55 bp, Artificial
  Synthetic oligonucleotide
gccagccgtttagcagcaagtaccggactcaactatggcacattacccacagggc

SEQ ID NO: 196080 - DNA, 55 bp, Artificial
  Synthetic oligonucleotide
gccacgctcattaacagcaccataacgataagagctcgttctatcacccgcgcat

SEQ ID NO: 196081 - DNA, 53 bp, Artificial
  Synthetic oligonucleotide
ccttcgggtttactggaccaaagcacctaatttcacttacgagaaccacacca

SEQ ID NO: 196082 - DNA, 54 bp, Artificial
  Synthetic oligonucleotide
tagcaccaccagtttctcgacgacgttcaagctgagggtcaatgccattcttaa

SEQ ID NO: 196083 - DNA, 54 bp, Artificial
  Synthetic oligonucleotide
acggaaacgctcatttcattacagcagccaattaaccgggacatacagccatga

SEQ ID NO: 196084 - DNA, 54 bp, Artificial
  Synthetic oligonucleotide
gccaaccagcggcatacgttacccatgctaacaatgtaattgccatcgttatgg

SEQ ID NO: 196085 - DNA, 54 bp, Artificial
  Synthetic oligonucleotide
agcactgtcgcacgagtccagtaagtatccgtcgacaacgctaataccgcactg

SEQ ID NO: 196086 - DNA, 54 bp, Artificial
  Synthetic oligonucleotide
ttttgaatattgtccacgtacgacgttcagctcatagcttcaaataatagccgg

SEQ ID NO: 196087 - DNA, 54 bp, Artificial
  Synthetic oligonucleotide
cgttccaactatcgtcgaactgataaaccaacacgcgctcataaccactcaact

SEQ ID NO: 196088 - DNA, 53 bp, Artificial
  Synthetic oligonucleotide
tcaatcaccacaggattacaatcgatgtgcttacttagctctgctaacacgac

SEQ ID NO: 196089 - DNA, 53 bp, Artificial
  Synthetic oligonucleotide
gtggtttgtaccagttgcatagtcgccacccgattcaggggtatagtgaccga

SEQ ID NO: 196090 - DNA, 52 bp, Artificial
  Synthetic oligonucleotide
gaatagacgcggtgaatgaccagattattcgttcaggactcgattttgtgtt

SEQ ID NO: 196091 - DNA, 52 bp, Artificial
  Synthetic oligonucleotide
gagaaaagttaccaacccgtccaagaattaatgccaacacgacacaacttga

SEQ ID NO: 196092 - DNA, 55 bp, Artificial
  Synthetic oligonucleotide
gcattgagtcaccgaaacaggtgtcggataagttatgggtgatgggcacaccatc

SEQ ID NO: 196093 - DNA, 52 bp, Artificial
  Synthetic oligonucleotide
gatcggcaagcttcataatctcccgcatggccttagaaaactcgcgctcttc

SEQ ID NO: 196094 - DNA, 52 bp, Artificial
  Synthetic oligonucleotide
caaaggcctaatacgtttgcgtgcttcattgttgttcacgccccataaccgt

SEQ ID NO: 196095 - DNA, 52 bp, Artificial
  Synthetic oligonucleotide
ttttacggttgctcgcttgaatagcgaagttcggcggcttttggaatcgcag

SEQ ID NO: 196096 - DNA, 52 bp, Artificial
  Synthetic oligonucleotide
cctgagggctctaccatcgagtttacctctcaggaagacagtgccacggtta

SEQ ID NO: 196097 - DNA, 52 bp, Artificial
  Synthetic oligonucleotide
acgctgtggttgaccttagcctactgcggtccccttttatcctcgctaaacg

SEQ ID NO: 196098 - DNA, 52 bp, Artificial
  Synthetic oligonucleotide
aacggtagacacggcaacagggcctatggtgccttattgggcaggatctgat

SEQ ID NO: 196099 - DNA, 51 bp, Artificial
  Synthetic oligonucleotide
attgtgtgagcaaggtggcgcgtgtgattatgattcatcatggtaggcctc

SEQ ID NO: 196100 - DNA, 51 bp, Artificial
  Synthetic oligonucleotide
tagcctcgcccggtaaccgaaaacagctccaacccaagctcttctagttta

SEQ ID NO: 196101 - DNA, 51 bp, Artificial
  Synthetic oligonucleotide
agaagtaacaggtggctgttccagtgctttaaaatgcgactgctgctcctt

SEQ ID NO: 196102 - DNA, 50 bp, Artificial
  Synthetic oligonucleotide
ccccaaaccgcatttagatcagctttcgaccaacgctcggcacgcccacg

SEQ ID NO: 196103 - DNA, 55 bp, Artificial
  Synthetic oligonucleotide
gcatcgctcgttatcgcgctatcgacatgttacgtgcaaccaaaactcgagccat

SEQ ID NO: 196104 - DNA, 50 bp, Artificial
  Synthetic oligonucleotide
cccatagtctgacgaccgtatcaaccggcgggttttcgccctacgacgcc

SEQ ID NO: 196105 - DNA, 50 bp, Artificial
  Synthetic oligonucleotide
cccagcccatgagccataacggtgctggcctgagtgtgctcgggtaaata

SEQ ID NO: 196106 - DNA, 50 bp, Artificial
  Synthetic oligonucleotide
ccatgatggcgacttagccgacgtggttgggcaggagcaggcaaaacgag

SEQ ID NO: 196107 - DNA, 50 bp, Artificial
  Synthetic oligonucleotide
cattatgccgggttcaacactgcacgagctttggcgcacgctaagcggct

SEQ ID NO: 196108 - DNA, 50 bp, Artificial
  Synthetic oligonucleotide
cattagtttgagccatcctggtccggtctcgcagacaaagcgccggggga

SEQ ID NO: 196109 - DNA, 50 bp, Artificial
  Synthetic oligonucleotide
catcctggtccggtctcgcagacaaagcgccgggggatgggcttagcggg

SEQ ID NO: 196110 - DNA, 50 bp, Artificial
  Synthetic oligonucleotide
catggtagggggaggctgattgatctgcgaattcggcacccaaagcggga

SEQ ID NO: 196111 - DNA, 50 bp, Artificial
  Synthetic oligonucleotide
ccgaagcaccgtaaggcatcagagctagcgggtttacgggcggggcaatt

SEQ ID NO: 196112 - DNA, 50 bp, Artificial
  Synthetic oligonucleotide
gttgggtctgttaccggaacgtggcagagcaatgattctaactccacccc

SEQ ID NO: 196113 - DNA, 50 bp, Artificial
  Synthetic oligonucleotide
ccgttagcagccctgcataatcgtgttgcttaatctggccccggcgctga

SEQ ID NO: 196114 - DNA, 55 bp, Artificial
  Synthetic oligonucleotide
cgcactgataacttgccgcaaaaccaagaacgcgtagcaatgattacccgacacc

SEQ ID NO: 196115 - DNA, 50 bp, Artificial
  Synthetic oligonucleotide
gggtttacttaaccatgatgagctcggtgacttagacgcgcgtatgttac

SEQ ID NO: 196116 - DNA, 50 bp, Artificial
  Synthetic oligonucleotide
ggggcttgcacaagtaccacgctatgcaatggagcttatagcattcggtg

SEQ ID NO: 196117 - DNA, 50 bp, Artificial
  Synthetic oligonucleotide
cctccaaccgagagctgccttgaagggcctaacctcagaaccgccgcacc

SEQ ID NO: 196118 - DNA, 50 bp, Artificial
  Synthetic oligonucleotide
cctgccactcacgccaattcgggtgcccatgcttgcgagttaactcggct

SEQ ID NO: 196119 - DNA, 50 bp, Artificial
  Synthetic oligonucleotide
cgagtggcctcagccgaacttccccaattcgcggtaagggttaggcctga

SEQ ID NO: 196120 - DNA, 50 bp, Artificial
  Synthetic oligonucleotide
cgccgcttaaccgcatcaggccaatacgatagccgctcgatcggtagccg

SEQ ID NO: 196121 - DNA, 50 bp, Artificial
  Synthetic oligonucleotide
cttacggccattatgccgggttcaacactgcacgagctttggcgcacgct

SEQ ID NO: 196122 - DNA, 50 bp, Artificial
  Synthetic oligonucleotide
ctactgtgcgcatttcgcccaagtggcgagcgtttagggcaaggctccat

SEQ ID NO: 196123 - DNA, 50 bp, Artificial
  Synthetic oligonucleotide
cggcacggtaacgactaagcggcacatcttggtccgttgccatctgggct

SEQ ID NO: 196124 - DNA, 50 bp, Artificial
  Synthetic oligonucleotide
cggcagcgaacccggttaactcgccaggtagatcgcctacgccgtgattt

SEQ ID NO: 196125 - DNA, 55 bp, Artificial
  Synthetic oligonucleotide
cgcagcaatgcttcgtcgagtacgtaacaaggcgagggtatatcctcacgcaggt

SEQ ID NO: 196126 - DNA, 50 bp, Artificial
  Synthetic oligonucleotide
cgtagtgcgcatcccccaccacgcactcgtgagtgtggatcaggcaagct

SEQ ID NO: 196127 - DNA, 50 bp, Artificial
  Synthetic oligonucleotide
acatgtgtcacgcgcctcaatggccttacccgccgcaactcgacgcttag

SEQ ID NO: 196128 - DNA, 50 bp, Artificial
  Synthetic oligonucleotide
acccggctcacacccgcgtttaagtagcgctctccgtctgcatggctgcc

SEQ ID NO: 196129 - DNA, 50 bp, Artificial
  Synthetic oligonucleotide
accggagaccgtgtttggtacgcgggggacttgacccgaccaggttgtaa

SEQ ID NO: 196130 - DNA, 50 bp, Artificial
  Synthetic oligonucleotide
acgccctggctggtaaactgagcagagcctaagaccgactcagccgcacc

SEQ ID NO: 196131 - DNA, 50 bp, Artificial
  Synthetic oligonucleotide
acgcgtgcatacgtgggagtacccagccgcaggcctgaacagcattagct

SEQ ID NO: 196132 - DNA, 50 bp, Artificial
  Synthetic oligonucleotide
acgctttagccttagcgcgtcgctcagtagcccgccttaaccgcggtgaa

SEQ ID NO: 196133 - DNA, 50 bp, Artificial
  Synthetic oligonucleotide
acggtccggctttagcgcgcacagtcagcccttcagggcatgaaatacgg

SEQ ID NO: 196134 - DNA, 50 bp, Artificial
  Synthetic oligonucleotide
acgtccaagcactgccaaatagcgacccgaagcttcagccacccgagcta

SEQ ID NO: 196135 - DNA, 50 bp, Artificial
  Synthetic oligonucleotide
acgtccactttcggccgttacaaacggcgccagccgtgccttattcgcta

SEQ ID NO: 196136 - DNA, 55 bp, Artificial
  Synthetic oligonucleotide
acctcctagctcgaaaccaatgggctcacgagagagaggagcgctcaggcggacg

SEQ ID NO: 196137 - DNA, 55 bp, Artificial
  Synthetic oligonucleotide
gagccgaagagttgtcgatcggaagcgtcacatagaccgatcaccagaagggccc

SEQ ID NO: 196138 - DNA, 50 bp, Artificial
  Synthetic oligonucleotide
actgcacactcgaggggaagcgagctcagcggcatacggcacgaactgca

SEQ ID NO: 196139 - DNA, 50 bp, Artificial
  Synthetic oligonucleotide
actcgagactacgaggggcaccttacggaacgctttggcagcggctgctc

SEQ ID NO: 196140 - DNA, 50 bp, Artificial
  Synthetic oligonucleotide
actcctcgtgggggctgtggttcggcagagtgcttgccaagtgcaatcac

SEQ ID NO: 196141 - DNA, 50 bp, Artificial
  Synthetic oligonucleotide
actccgtcgggcccagggtgccggaccaacggtgatcatctcgcccctgt

SEQ ID NO: 196142 - DNA, 50 bp, Artificial
  Synthetic oligonucleotide
actcaggtcgctgggggcctcatcgctggtccagagcggaaggacgatgt

SEQ ID NO: 196143 - DNA, 50 bp, Artificial
  Synthetic oligonucleotide
actcacgatcaacccccgattccgcgccgttcccccgacgtggcatctgg

SEQ ID NO: 196144 - DNA, 50 bp, Artificial
  Synthetic oligonucleotide
acggagtgtcaattcaccggcctttcgcgtgcccccggcagaagtaacag

SEQ ID NO: 196145 - DNA, 50 bp, Artificial
  Synthetic oligonucleotide
acccgaccagcgtaggcgagcgacttcgcccgacctcccgtcacgtgtca

SEQ ID NO: 196146 - DNA, 55 bp, Artificial
  Synthetic oligonucleotide
gcccacaggagttccacaccccgttcatgcacaccgacgtgccacgatgcgcgtt

SEQ ID NO: 196147 - DNA, 55 bp, Artificial
  Synthetic oligonucleotide
ggcggacgaactgctctttcgatgtggggcggacgaactgctctttcgatggggt

SEQ ID NO: 196148 - DNA, 55 bp, Artificial
  Synthetic oligonucleotide
ggggagccgtggggttgtgaggtcacgcagaaagtgcgtagctgctcagacgtga

SEQ ID NO: 196149 - DNA, 55 bp, Artificial
  Synthetic oligonucleotide
gtagactggggcactcacccaagactttgcaaggtcgacacattctcggcgcccc

SEQ ID NO: 196150 - DNA, 55 bp, Artificial
  Synthetic oligonucleotide
ttcctaccagggacacttggcggcgcctacggagacacaggctcacgcaactgga

SEQ ID NO: 196151 - DNA, 55 bp, Artificial
  Synthetic oligonucleotide
tgcgatctccgatgtcagagccgcgctacccgggatcagtgatccgaccatccga

SEQ ID NO: 196152 - DNA, 55 bp, Artificial
  Synthetic oligonucleotide
tgccgcgacccgctagcactcgactcacggaagacccggacggatctttcgaagt

SEQ ID NO: 196153 - DNA, 55 bp, Artificial
  Synthetic oligonucleotide
tctcgttcgttgatgatgcatgcccgccgagggtcctgtgaacgacgagcccgtg

SEQ ID NO: 196154 - DNA, 52 bp, Artificial
  Synthetic oligonucleotide
tcgtctaccaggtggcgacggttttccggactcccgttcgtcaggggaggga

SEQ ID NO: 196155 - DNA, 55 bp, Artificial
  Synthetic oligonucleotide
agcgatgaaccacacgtgggcgtgagacccaccgtctccccagcgactcacatga

SEQ ID NO: 196156 - DNA, 55 bp, Artificial
  Synthetic oligonucleotide
tcgagcaggagttgtggttcgggcaccgggagtccggctcgggacagctcgtcat

SEQ ID NO: 196157 - DNA, 55 bp, Artificial
  Synthetic oligonucleotide
tccaagcgataccgcatggtcgtctttgtgctcaggcacggtaaaggaggtcagg

SEQ ID NO: 196158 - DNA, 55 bp, Artificial
  Synthetic oligonucleotide
tccaaagcacgcgacaggcccacctctgggcccaccaacaagggagttcacgcat

SEQ ID NO: 196159 - DNA, 55 bp, Artificial
  Synthetic oligonucleotide
tatgccgctgagttcgctcccgacagagcctccagtaccagccctcccgtcacca

SEQ ID NO: 196160 - DNA, 55 bp, Artificial
  Synthetic oligonucleotide
taggatcggtttagccagacagcaccgtccgcctgtccaacggtccctgacggtg

SEQ ID NO: 196161 - DNA, 55 bp, Artificial
  Synthetic oligonucleotide
gtggtgggagaacgagacgcgggcacccacgcacgcacccggcatacccgatcga

SEQ ID NO: 196162 - DNA, 54 bp, Artificial
  Synthetic oligonucleotide
cgtgggttccgctgttgtcgtgtccatgtcgacgacgctagaagtccttccggt

SEQ ID NO: 196163 - DNA, 53 bp, Artificial
  Synthetic oligonucleotide
gcagtccgatcgacggccatcgtttgggaccgaagacgggtgcgacagtgact

SEQ ID NO: 196164 - DNA, 53 bp, Artificial
  Synthetic oligonucleotide
aacgatcggccctgagtgccgcagcctgtctctttcacggattctcagacccc

SEQ ID NO: 196165 - DNA, 53 bp, Artificial
  Synthetic oligonucleotide
cggggtccaggttgccagtgtccgcagtcacgtccgcaaagacaacgttagcc

SEQ ID NO: 196166 - DNA, 55 bp, Artificial
  Synthetic oligonucleotide
ccacccaggggtgaatcgcaacacgttcgtggcttatagccgaccgctttacgcc

SEQ ID NO: 196167 - DNA, 53 bp, Artificial
  Synthetic oligonucleotide
cccatcgcgagtccgcggtggggccctctcgcgtttctgagcagagccacatg

SEQ ID NO: 196168 - DNA, 52 bp, Artificial
  Synthetic oligonucleotide
gacgtctgaggggtggagtcgccacttgaggctggtccgtgaccgtctcagg

SEQ ID NO: 196169 - DNA, 52 bp, Artificial
  Synthetic oligonucleotide
gaactggtccagtgtgccgtagacacgcgcctgtctccaaatgggtccctca

SEQ ID NO: 196170 - DNA, 52 bp, Artificial
  Synthetic oligonucleotide
tcgaactcgtcagggatccgatccttcccactttggccagggaacgattcat

SEQ ID NO: 196171 - DNA, 52 bp, Artificial
  Synthetic oligonucleotide
ggatcgcggcagaagggtgcgtcgctaggttcgactcgtgaccaaacgtcct

SEQ ID NO: 196172 - DNA, 51 bp, Artificial
  Synthetic oligonucleotide
gttgtatgccgctgggctcctctgtgacgcaggcttcgcttgcgttgtggt

SEQ ID NO: 196173 - DNA, 51 bp, Artificial
  Synthetic oligonucleotide
tgcgcgctcctacgcattgctgacctctcgaacactccaccccttcgttcc

SEQ ID NO: 196174 - DNA, 51 bp, Artificial
  Synthetic oligonucleotide
acggacgagtagtcgtcggtccatgtcacctgacggtccatcgacaggggt

SEQ ID NO: 196175 - DNA, 50 bp, Artificial
  Synthetic oligonucleotide
aagtatgacgccgtgaggcccattgacgacgggtccgagtgcgaggaaca

SEQ ID NO: 196176 - DNA, 50 bp, Artificial
  Synthetic oligonucleotide
aagtcagtggaggctggctccgcaccttggcacagtgggcgtgtgccgct

SEQ ID NO: 196177 - DNA, 55 bp, Artificial
  Synthetic oligonucleotide
ccagatgtgtggaccgaacacgacatcacctgtgtggaaccacggctcagggtcc

SEQ ID NO: 196178 - DNA, 50 bp, Artificial
  Synthetic oligonucleotide
aatcagccccttcaggcctcgcctgatccgattggcccagtggagccacg

SEQ ID NO: 196179 - DNA, 50 bp, Artificial
  Synthetic oligonucleotide
aatctaccgctgtgtgtgtcatgggcggaggtcccgaaacggggtacggg

SEQ ID NO: 196180 - DNA, 50 bp, Artificial
  Synthetic oligonucleotide
acaacgcagctgtacgtgaggagtggggtcgccgcttccaagtgtcagca

SEQ ID NO: 196181 - DNA, 50 bp, Artificial
  Synthetic oligonucleotide
acaactcgatgcgaccgacggtgtggggagactgcgtgcgcggctctggg

SEQ ID NO: 196182 - DNA, 50 bp, Artificial
  Synthetic oligonucleotide
acacgaccgacggtgaatctaccgctgtgtgtgtcatgggcggaggtccc

SEQ ID NO: 196183 - DNA, 50 bp, Artificial
  Synthetic oligonucleotide
acactcggaaactgggcgggagagcccggttactcggcactgcgacgaca

SEQ ID NO: 196184 - DNA, 50 bp, Artificial
  Synthetic oligonucleotide
acagacgtcgacacccgttctctcgcaggcgcgttcaagagcgtgccaga

SEQ ID NO: 196185 - DNA, 50 bp, Artificial
  Synthetic oligonucleotide
acagaggcgggcggacggcatacccgcaggtagttccacgtgtgagggac

SEQ ID NO: 196186 - DNA, 50 bp, Artificial
  Synthetic oligonucleotide
acaggcagacgcggggtggaccttacccggtgacacaggtcacatgaacc

SEQ ID NO: 196187 - DNA, 50 bp, Artificial
  Synthetic oligonucleotide
acagggggccttcccgaggcggagcagtgatgtgagcgtaccgagacggg

SEQ ID NO: 196188 - DNA, 55 bp, Artificial
  Synthetic oligonucleotide
ccgttcggcgcgaatccgtgcaagcgccccaagcacattgtgcgatcgaaagcca

SEQ ID NO: 196189 - DNA, 50 bp, Artificial
  Synthetic oligonucleotide
acaggggtgcgatccgggacatacgttcctcgccgtagggcgacacatcg

SEQ ID NO: 196190 - DNA, 50 bp, Artificial
  Synthetic oligonucleotide
acagtcgttccaggagcgagcacggctctttgcgctgccacgttcatcgt

SEQ ID NO: 196191 - DNA, 50 bp, Artificial
  Synthetic oligonucleotide
accaagtggtccctggcgagttgtcgcgatccagaggcaacgcagtcctt

SEQ ID NO: 196192 - DNA, 50 bp, Artificial
  Synthetic oligonucleotide
aggcgctgatagaatcgtgcggtccgtctccgagcattccggaaccttgg

SEQ ID NO: 196193 - DNA, 50 bp, Artificial
  Synthetic oligonucleotide
aggcccgacacgagcgtcgtcgagtggacctgcagcggtcccaccttgac

SEQ ID NO: 196194 - DNA, 50 bp, Artificial
  Synthetic oligonucleotide
aggcaacactatgtggcatgagcacaagacccccacgaagagcggccgtc

SEQ ID NO: 196195 - DNA, 50 bp, Artificial
  Synthetic oligonucleotide
aaaaccctgtggcgaattggaccccgcgctgccaagccgactcacgtggc

SEQ ID NO: 196196 - DNA, 50 bp, Artificial
  Synthetic oligonucleotide
aaacatcgacggaacgtaagggcgagagttgccaagagcggccggtggta

SEQ ID NO: 196197 - DNA, 50 bp, Artificial
  Synthetic oligonucleotide
aaactctcgccccacctctccctccgacggcccagaatgcccatacgggg

SEQ ID NO: 196198 - DNA, 50 bp, Artificial
  Synthetic oligonucleotide
aaactgggcgggagagcccggttactcggcactgcgacgacaaacgaggc

SEQ ID NO: 196199 - DNA, 55 bp, Artificial
  Synthetic oligonucleotide
cgatgcgcgcagtgcctcataggggtcaggtccgttgacgagcaggtcaaccaca

SEQ ID NO: 196200 - DNA, 50 bp, Artificial
  Synthetic oligonucleotide
aaagtcggacgagcgtagccgtcctccacgcggcaaagtcggacgagcgt

SEQ ID NO: 196201 - DNA, 50 bp, Artificial
  Synthetic oligonucleotide
aaattggcccccagaggccgctgagaggcacgttcaggctccgcagaccg

SEQ ID NO: 196202 - DNA, 50 bp, Artificial
  Synthetic oligonucleotide
aaccagccgtcgatctaccgttcggcgcgaatccgtgcaagcgccccaag

SEQ ID NO: 196203 - DNA, 50 bp, Artificial
  Synthetic oligonucleotide
aaccccctgttgggtcacccctcaccgcaaggacccctgccgatgttcta

SEQ ID NO: 196204 - DNA, 50 bp, Artificial
  Synthetic oligonucleotide
aacccgcaccaggacatgagcgagcaactgaagaccgaaccagtcccgtc

SEQ ID NO: 196205 - DNA, 50 bp, Artificial
  Synthetic oligonucleotide
aacgacgcgccaactccactgccaagcgatgctccgcccacgtctcaagt

SEQ ID NO: 196206 - DNA, 50 bp, Artificial
  Synthetic oligonucleotide
aacggccttgggacatagcgaccctggaggagaccccgatgcagcagtca

SEQ ID NO: 196207 - DNA, 50 bp, Artificial
  Synthetic oligonucleotide
aactcatgaccgccacgctagctctcagatgcggtggtggacccacacac

SEQ ID NO: 196208 - DNA, 50 bp, Artificial
  Synthetic oligonucleotide
aactggcgccatctcatccacccctgagcggacggcatacccaacgcatg

SEQ ID NO: 196209 - DNA, 50 bp, Artificial
  Synthetic oligonucleotide
aactggctcctcgtggctcgtttcgttgcaggtatgccgcacggggcctt

SEQ ID NO: 196210 - DNA, 54 bp, Artificial
  Synthetic oligonucleotide
ctcgggagatcgagagcgttacacctctcggcgaaatcttttcggggcctccgg

SEQ ID NO: 196211 - DNA, 50 bp, Artificial
  Synthetic oligonucleotide
aagcgccgctgagaggcgaactccatgccaaggacacagcctgagagctc

SEQ ID NO: 196212 - DNA, 50 bp, Artificial
  Synthetic oligonucleotide
aaggtttggcctaccatgcgagggtgacccacactcttgcgacgccgacc

SEQ ID NO: 196213 - DNA, 50 bp, Artificial
  Synthetic oligonucleotide
acgctaacaagggggtgagcccgcggcaagccgaaacagtctgcggagcc

SEQ ID NO: 196214 - DNA, 50 bp, Artificial
  Synthetic oligonucleotide
acgcggggtggaccttacccggtgacacaggtcacatgaaccctcagtgg

SEQ ID NO: 196215 - DNA, 50 bp, Artificial
  Synthetic oligonucleotide
acgccgacagggggctgggagggtgctcagcggcatacggccggttggct

SEQ ID NO: 196216 - DNA, 50 bp, Artificial
  Synthetic oligonucleotide
acgcccgaccctcttcgctcgagctcggttcacccaacctcgattcgacg

SEQ ID NO: 196217 - DNA, 50 bp, Artificial
  Synthetic oligonucleotide
acgcccagtacggttcggtaatccaccgggcgagtcccgttgagggccat

SEQ ID NO: 196218 - DNA, 50 bp, Artificial
  Synthetic oligonucleotide
acgcactgcggttggatccacgactcgcctcaggatcacgctcgagtctg

SEQ ID NO: 196219 - DNA, 50 bp, Artificial
  Synthetic oligonucleotide
acgcaacgcccgtgaaaccagttcgggtgcctcccttccgcgagtgatac

SEQ ID NO: 196220 - DNA, 50 bp, Artificial
  Synthetic oligonucleotide
acgatcagtcgcgggccatcacccgagaccgaaatgaagttgcgccgctc

SEQ ID NO: 196221 - DNA, 54 bp, Artificial
  Synthetic oligonucleotide
ctctcgggcgaaccccttgcggcgaggtgaaacggtagcacgggacctgaccaa

SEQ ID NO: 196222 - DNA, 50 bp, Artificial
  Synthetic oligonucleotide
acgagagccacacgcgggagtgagctcagcggcatacgacatcgtccgta

SEQ ID NO: 196223 - DNA, 50 bp, Artificial
  Synthetic oligonucleotide
acgacatcacctgtgtggaaccacggctcagggtccttggaaacgcggca

SEQ ID NO: 196224 - DNA, 50 bp, Artificial
  Synthetic oligonucleotide
acgaactgcacactcgaccgggcggtttcaaggggtcgacgcaacaccgg

SEQ ID NO: 196225 - DNA, 50 bp, Artificial
  Synthetic oligonucleotide
acctgttccgcgcagcctcagagcgagtcacgaagcgtgcgcaggcgact

SEQ ID NO: 196226 - DNA, 50 bp, Artificial
  Synthetic oligonucleotide
acctgaacacgccggcaccacatcccaccattccggaggacgctcgagac

SEQ ID NO: 196227 - DNA, 50 bp, Artificial
  Synthetic oligonucleotide
acccgtgacgcccgtgcttgacccacccgtcatcgagccgtgaaggagca

SEQ ID NO: 196228 - DNA, 50 bp, Artificial
  Synthetic oligonucleotide
accgtcaggggacccgcctgaggagaaccgacataggtcctcagggctcg

SEQ ID NO: 196229 - DNA, 50 bp, Artificial
  Synthetic oligonucleotide
accgcgactccctcgtctaccaggtggcgacggttttccggactcccgtt

SEQ ID NO: 196230 - DNA, 50 bp, Artificial
  Synthetic oligonucleotide
acccgttgcggcacagtcgttccaggagcgagcacggctctttgcgctgc

SEQ ID NO: 196231 - DNA, 50 bp, Artificial
  Synthetic oligonucleotide
agcttatgacgatcgctagccgcagtcaccacaacccgggcgtcaggctt

SEQ ID NO: 196232 - DNA, 55 bp, Artificial
  Synthetic oligonucleotide
ctgggcctagccagacacggtgctcaacgataccggtatgccggtagggcaccaa

SEQ ID NO: 196233 - DNA, 50 bp, Artificial
  Synthetic oligonucleotide
agcggcatacggggataggctcgacgcgactcaaccacagcgcagccgag

SEQ ID NO: 196234 - DNA, 50 bp, Artificial
  Synthetic oligonucleotide
agcggcatacggcttattcctccggctcgggaggggtgtcctgacccgcc

SEQ ID NO: 196235 - DNA, 50 bp, Artificial
  Synthetic oligonucleotide
agcggaaccctgggacgctcccgacttcagcccagacgcataaatggcat

SEQ ID NO: 196236 - DNA, 50 bp, Artificial
  Synthetic oligonucleotide
agcgcatacgtggcccacacgatggcatggtcagtcccgtggatcgcggt

SEQ ID NO: 196237 - DNA, 50 bp, Artificial
  Synthetic oligonucleotide
accacggtcggagcttatgacgatcgctagccgcagtcaccacaacccgg

SEQ ID NO: 196238 - DNA, 50 bp, Artificial
  Synthetic oligonucleotide
agcgagctcagcggcatacggcacgaactgcacactcgaccgggcggttt

SEQ ID NO: 196239 - DNA, 50 bp, Artificial
  Synthetic oligonucleotide
agccacccgcagcctcacggtgatctggtcagactcggctgttgtgtctc

SEQ ID NO: 196240 - DNA, 50 bp, Artificial
  Synthetic oligonucleotide
agcacagagcaccgttggggtccgagccccttccactacacggacgcggc

SEQ ID NO: 196241 - DNA, 50 bp, Artificial
  Synthetic oligonucleotide
agaggagaacggctcgcctaggactttcaccctagtggggccaaggggcc

SEQ ID NO: 196242 - DNA, 50 bp, Artificial
  Synthetic oligonucleotide
agaaggtcagacggtgcatgcgcgggtggccctcagtagtcctgcgtcgt

SEQ ID NO: 196243 - DNA, 55 bp, Artificial
  Synthetic oligonucleotide
aaggtagggtgacaccttcacgtcccagcgtccaagccgttggctgaacgcgatg

SEQ ID NO: 196244 - DNA, 55 bp, Artificial
  Synthetic oligonucleotide
cgggcagcaagtccgtgacccaaatctggcgaatggtgctggttaccagggctac

SEQ ID NO: 196245 - DNA, 55 bp, Artificial
  Synthetic oligonucleotide
ctccacgcccattatgcgtcgaggtggtgacatttccccacaccactcagcgtac

SEQ ID NO: 196246 - DNA, 55 bp, Artificial
  Synthetic oligonucleotide
gcaacaacaactgctacgagcggcgcatcgctacgtgggatcgcatcgacacggg

SEQ ID NO: 196247 - DNA, 55 bp, Artificial
  Synthetic oligonucleotide
gcgcaacccatcggtagcccagggttcactgtgactgtgacccgtaaagtcaccg

SEQ ID NO: 196248 - DNA, 55 bp, Artificial
  Synthetic oligonucleotide
gcgggctgaccgttccaccataacgccgagacagcacgttagcgcgaagactcac

SEQ ID NO: 196249 - DNA, 55 bp, Artificial
  Synthetic oligonucleotide
ggcagaatggactcccctgctgtacttgtccgccgaccaagcaaagttctgggtc

SEQ ID NO: 196250 - DNA, 55 bp, Artificial
  Synthetic oligonucleotide
ggtgaatgattgtcagtgcccacgcagtgatgagtgcaggtagggccccgcgtgt

SEQ ID NO: 196251 - DNA, 55 bp, Artificial
  Synthetic oligonucleotide
ggtgagcgggattattcgggcggtgatatcggtcacctggggtccatctggcctg

SEQ ID NO: 196252 - DNA, 55 bp, Artificial
  Synthetic oligonucleotide
ggtggtcgggttcgcgttgccgaagcacgagacctaacgattcaagtccaggacg

SEQ ID NO: 196253 - DNA, 55 bp, Artificial
  Synthetic oligonucleotide
gtaataacaggtcggaatcgccacaacgcaacgttctcgagtgctgactcccacc

SEQ ID NO: 196254 - DNA, 55 bp, Artificial
  Synthetic oligonucleotide
atccgtttgctcccagtgcagcggcaatccccgggtcccggtatgaagaagacgc

SEQ ID NO: 196255 - DNA, 55 bp, Artificial
  Synthetic oligonucleotide
gtctgcaaggccacgtggaggtagtagtcgagttgatcactggtggccccgtcac

SEQ ID NO: 196256 - DNA, 55 bp, Artificial
  Synthetic oligonucleotide
tatggtcaatgcgctccccgcgtatgctacgggaaaacggtgtgttgtcgtgcgg

SEQ ID NO: 196257 - DNA, 55 bp, Artificial
  Synthetic oligonucleotide
tcaaccacagtgtgggcgttcttcacacccgcgcataaaggatcgtcgtgacgac

SEQ ID NO: 196258 - DNA, 55 bp, Artificial
  Synthetic oligonucleotide
tggcgttggtggatcaggaggttgtggcttattcgacgtggtcgcgtgatgtcac

SEQ ID NO: 196259 - DNA, 54 bp, Artificial
  Synthetic oligonucleotide
attgtccggtgagtaatggttgcgcagtcagttgcgtggccgcaacatcgtcag

SEQ ID NO: 196260 - DNA, 53 bp, Artificial
  Synthetic oligonucleotide
agcggcggtctgaggggtcccgggttacaggtttcctaccggcagcattgtgg

SEQ ID NO: 196261 - DNA, 54 bp, Artificial
  Synthetic oligonucleotide
gagtacaaccggatggcaataccttcagccacacgaccacacctgcccgagcgt

SEQ ID NO: 196262 - DNA, 54 bp, Artificial
  Synthetic oligonucleotide
aacattcaggacaggcgttgctcacggctaccggtgtggcgtcaatgacggtga

SEQ ID NO: 196263 - DNA, 53 bp, Artificial
  Synthetic oligonucleotide
gttcctcacgctacaacgcagcattgacggcagcccttgggtaaccctcgcgg

SEQ ID NO: 196264 - DNA, 53 bp, Artificial
  Synthetic oligonucleotide
gcttaatctatcgaagcgactcgacattcttgctcaacgaaagcgtttcaccc

SEQ ID NO: 196265 - DNA, 55 bp, Artificial
  Synthetic oligonucleotide
caactcgacgtactggagccgttggagggtgacgagcaaggaaccgtgctggatg

SEQ ID NO: 196266 - DNA, 50 bp, Artificial
  Synthetic oligonucleotide
aacgttgctgggtgcctcacctaccaggtgcgttcagcctaaccgtgctt

SEQ ID NO: 196267 - DNA, 50 bp, Artificial
  Synthetic oligonucleotide
aacgtcccgcagacgccaccgaggcactgaccctactccgatctaccctg

SEQ ID NO: 196268 - DNA, 50 bp, Artificial
  Synthetic oligonucleotide
aacgacggccacgtatcctcagccatggggtttgggtcccccgacggcaa

SEQ ID NO: 196269 - DNA, 50 bp, Artificial
  Synthetic oligonucleotide
aaccgccctcattcaaccaacgctccacagcgctcttacggcggcacttg

SEQ ID NO: 196270 - DNA, 50 bp, Artificial
  Synthetic oligonucleotide
aacccggcagattgacgcacatccgcgagtcctctccgtttggatcccta

SEQ ID NO: 196271 - DNA, 50 bp, Artificial
  Synthetic oligonucleotide
aaccccaggagtaaagcgaggttgatggcagcggtcaccccgtttgtgcc

SEQ ID NO: 196272 - DNA, 50 bp, Artificial
  Synthetic oligonucleotide
aacccaccgtccacagcgactgtgtcgttgacagtgcgtgacaccggggt

SEQ ID NO: 196273 - DNA, 50 bp, Artificial
  Synthetic oligonucleotide
aacccaaacgtcagtgcccccgaactggtgtcgcgaacaaacgcacggcg

SEQ ID NO: 196274 - DNA, 50 bp, Artificial
  Synthetic oligonucleotide
aaattcgcggactgtgtctgcgtcgaatgtcgctgccaggccaaggagcg

SEQ ID NO: 196275 - DNA, 50 bp, Artificial
  Synthetic oligonucleotide
aaagcccgcatagaggtcaactggtatccgcgctcccccacaagcgccgt

SEQ ID NO: 196276 - DNA, 55 bp, Artificial
  Synthetic oligonucleotide
caccatgactgggaacacccggttgtgcccgtgaagtgaaggatagcgtgtggct

SEQ ID NO: 196277 - DNA, 50 bp, Artificial
  Synthetic oligonucleotide
aaagaacggttctatgtggtgtcagcccacctccccaactccagcgcccc

SEQ ID NO: 196278 - DNA, 50 bp, Artificial
  Synthetic oligonucleotide
aaacgtgcgctgaggcgttaacggccatagctcacccccgtgtcgcttcg

SEQ ID NO: 196279 - DNA, 50 bp, Artificial
  Synthetic oligonucleotide
aaacgggatcctctcgcaaccgccatccgggcacccacataagccccgca

SEQ ID NO: 196280 - DNA, 50 bp, Artificial
  Synthetic oligonucleotide
aaacggccagggcccgcatggacaaactttgccgggggaagcccggtgta

SEQ ID NO: 196281 - DNA, 50 bp, Artificial
  Synthetic oligonucleotide
aaacccgtcccctacaagacaccgcgtgatcgcacgtcaggcttccgcgt

SEQ ID NO: 196282 - DNA, 50 bp, Artificial
  Synthetic oligonucleotide
aaacccatccccacgcaacctcggcacacactcagggaactccccgcaaa

SEQ ID NO: 196283 - DNA, 50 bp, Artificial
  Synthetic oligonucleotide
aaaacagagggagccagccgtcacacaactcggcagcaagcgcgatgttt

SEQ ID NO: 196284 - DNA, 50 bp, Artificial
  Synthetic oligonucleotide
aagcagcgatgtcaaattcttcgccgttgtcgtgtgcgcgagtgcgtgcg

SEQ ID NO: 196285 - DNA, 50 bp, Artificial
  Synthetic oligonucleotide
aagccctgattggcccaggggagtggtggcaaggaaccgcagcacaccgt

SEQ ID NO: 196286 - DNA, 50 bp, Artificial
  Synthetic oligonucleotide
aagcgaggttgatggcagcggtcaccccgtttgtgccttgtcgcgactgt

SEQ ID NO: 196287 - DNA, 55 bp, Artificial
  Synthetic oligonucleotide
ccctcgacaccgacggacagttttacgtactcagcgtgcaaggatccctccttgc

SEQ ID NO: 196288 - DNA, 50 bp, Artificial
  Synthetic oligonucleotide
aagcgcatcgtgccagttcgctggtagttcacgagcctggagccggtcga

SEQ ID NO: 196289 - DNA, 50 bp, Artificial
  Synthetic oligonucleotide
aagcgctgtggccggagcatactgcgatcctcacctcagcaacgttggct

SEQ ID NO: 196290 - DNA, 50 bp, Artificial
  Synthetic oligonucleotide
aaggaccaccaacaaattccccgtgacttccggggcgtagcccagcgatg

SEQ ID NO: 196291 - DNA, 50 bp, Artificial
  Synthetic oligonucleotide
aaggaggggccgcctatggtgagttgacccgctcgtttacgcaaatccgg

SEQ ID NO: 196292 - DNA, 50 bp, Artificial
  Synthetic oligonucleotide
aaggcacctgggaacgtgaccttgaccgcgccaacactctcctggacgac

SEQ ID NO: 196293 - DNA, 50 bp, Artificial
  Synthetic oligonucleotide
aagggtgcgtcgtgcaaaacgctgatgtgttggcccgggtagagtcccat

SEQ ID NO: 196294 - DNA, 50 bp, Artificial
  Synthetic oligonucleotide
aagcacgagggcacgcatgatacggacggtgtatgtggtgagtcgtgcga

SEQ ID NO: 196295 - DNA, 50 bp, Artificial
  Synthetic oligonucleotide
aagtcactgttccattgtggcggtggtgtgtgacatccgcactgggcgga

SEQ ID NO: 196296 - DNA, 50 bp, Artificial
  Synthetic oligonucleotide
aagtctgcgctatgggctgggtgaggttttcccaaccagtgtgggtgcgt

SEQ ID NO: 196297 - DNA, 50 bp, Artificial
  Synthetic oligonucleotide
aagtgtggccacggttatccgaactactgtccaccccgtggcgtctcggg

SEQ ID NO: 196298 - DNA, 54 bp, Artificial
  Synthetic oligonucleotide
ccctgccacatccacggtcccactgacgtccccgttaacagttgtccgttgacc

SEQ ID NO: 196299 - DNA, 50 bp, Artificial
  Synthetic oligonucleotide
aatcagggtgggttgcccacgtgctataagggggaggggccacgccgaag

SEQ ID NO: 196300 - DNA, 50 bp, Artificial
  Synthetic oligonucleotide
aatccccgggtcccggtatgaagaagacgcccggtcacagggcattgaac

SEQ ID NO: 196301 - DNA, 50 bp, Artificial
  Synthetic oligonucleotide
aagatgtcggtgtggcaggtagcgcccggttgggtgtgagcagaccttag

SEQ ID NO: 196302 - DNA, 50 bp, Artificial
  Synthetic oligonucleotide
attcgtgtgtctcgggtcatcaccgtatctacagtgagacgtggtcactc

SEQ ID NO: 196303 - DNA, 50 bp, Artificial
  Synthetic oligonucleotide
aagatcatgagcaatcgttgcccgcccccgctcacaccgcacccgacgaa

SEQ ID NO: 196304 - DNA, 50 bp, Artificial
  Synthetic oligonucleotide
aagaggccgcacacgcactaagcgcgttcatgggaacgggacgccgattc

SEQ ID NO: 196305 - DNA, 50 bp, Artificial
  Synthetic oligonucleotide
aagagctctacgctcacggcaccaacgcacccaaagatgccacagacgcc

SEQ ID NO: 196306 - DNA, 55 bp, Artificial
  Synthetic oligonucleotide
ccggtgtcagcgagttctggacctgcaacagtgtcttgatcgttggcagggttgt

SEQ ID NO: 196307 - DNA, 55 bp, Artificial
  Synthetic oligonucleotide
cgagaacaccatacgcccgctaacaccagtagcgagccaagagaacgcggggaac

SEQ ID NO: 196308 - DNA, 55 bp, Artificial
  Synthetic oligonucleotide
cgcaggacctgacgatttgttgttagtcgagcgtgccatgatccccgtcgggtac

SEQ ID NO: 196309 - DNA, 52 bp, Artificial
  Synthetic oligonucleotide
atcttgtgccggttttccacacgaccccgtaagggtagtgtccaagtacctg

SEQ ID NO: 196310 - DNA, 60 bp, Artificial
  Synthetic oligonucleotide
gcaacgcatcgcggcatttgaagctcgctgggtccttgtgtcatggttgatctcgcgacg

SEQ ID NO: 196311 - DNA, 50 bp, Artificial
  Synthetic oligonucleotide
cctcgctcgcacggaggccggtgttagaccctggggtacagaatacgccg

SEQ ID NO: 196312 - DNA, 50 bp, Artificial
  Synthetic oligonucleotide
gcacggtgtcgagcctgcgttggtctctgccccatccaagctctcgtcca

SEQ ID NO: 196313 - DNA, 50 bp, Artificial
  Synthetic oligonucleotide
gcacggatgtctgtgcggttcgtgcgtctcgttcgttggccatgcctaca

SEQ ID NO: 196314 - DNA, 50 bp, Artificial
  Synthetic oligonucleotide
ccgtacggctagccctacaacgttggatcatggcccgactgcgtgtgcgc

SEQ ID NO: 196315 - DNA, 50 bp, Artificial
  Synthetic oligonucleotide
agacgtgcacatcccgtacggctagccctacaacgttggatcatggcccg

SEQ ID NO: 196316 - DNA, 50 bp, Artificial
  Synthetic oligonucleotide
agcactctggacgagagcttggatggggcagagaccaacgcaggctcgac

SEQ ID NO: 196317 - DNA, 50 bp, Artificial
  Synthetic oligonucleotide
ccgacgtggctaaggagcggacggctccctctgagacaggggagaacgag

SEQ ID NO: 196318 - DNA, 50 bp, Artificial
  Synthetic oligonucleotide
cccgatgacagtcatccgcatggagcgcacagtagcgacacggacgcgat

SEQ ID NO: 196319 - DNA, 50 bp, Artificial
  Synthetic oligonucleotide
gatgccctcacgattaactccccagttgcgtggagacggtccgtgtcccc

SEQ ID NO: 196320 - DNA, 50 bp, Artificial
  Synthetic oligonucleotide
cgcgtcatgccaccccgtccgtcccacctcgtgtcctcccaactgtggca

SEQ ID NO: 196321 - DNA, 60 bp, Artificial
  Synthetic oligonucleotide
gcccatgcagcgcgtgactggacggtggcatgtagtcacagaatgagcaaccccgtctgg

SEQ ID NO: 196322 - DNA, 50 bp, Artificial
  Synthetic oligonucleotide
gaggcggagtcgaacatcaggggtctcgaggcgctgggtggttgcagctt

SEQ ID NO: 196323 - DNA, 50 bp, Artificial
  Synthetic oligonucleotide
catcccagacgtgcacatcccagacgtgcacatcccgtacggctagccct

SEQ ID NO: 196324 - DNA, 50 bp, Artificial
  Synthetic oligonucleotide
acccggtggaacgatcctgagtcacgactggcagccctccgagaagtcct

SEQ ID NO: 196325 - DNA, 58 bp, Artificial
  Synthetic oligonucleotide
gcgccggcaggggttccctgcttactctggtcctgcaccgctgctcccgaggggctac

SEQ ID NO: 196326 - DNA, 60 bp, Artificial
  Synthetic oligonucleotide
gcgtgccagctacgcgtgtcatccacgtgtgtcatccacgtgtgtcatccacgtgtgtca

SEQ ID NO: 196327 - DNA, 58 bp, Artificial
  Synthetic oligonucleotide
ggaaaactacgcggcgaccagggtccctgtactgcttgcttcgcaacacccacatgga

SEQ ID NO: 196328 - DNA, 55 bp, Artificial
  Synthetic oligonucleotide
ggaccgtccacggcaccgcacggtcggggaaggcacccgtcagcgagaccaggaa

SEQ ID NO: 196329 - DNA, 60 bp, Artificial
  Synthetic oligonucleotide
gtgacatttcgtagaatcctgttctgcggcaacacctctgcagaggtctgctggggtgcg

SEQ ID NO: 196330 - DNA, 60 bp, Artificial
  Synthetic oligonucleotide
gtgcatcggtgctcatcaatacttgctgggtccgtgcgcgctgactcagtactcgctgcg

SEQ ID NO: 196331 - DNA, 56 bp, Artificial
  Synthetic oligonucleotide
taagtgaacaccgcaccagcaacagatggacgtttccccggggtagagacgccaac

SEQ ID NO: 196332 - DNA, 60 bp, Artificial
  Synthetic oligonucleotide
taggcgtgtggtccacaccatggtttcatagctccgtggctcacggaagcaggacgctag

SEQ ID NO: 196333 - DNA, 60 bp, Artificial
  Synthetic oligonucleotide
cacatggaagggatcccacatgggcatctcgtacgaccgacgttacccgatgtccgctca

SEQ ID NO: 196334 - DNA, 59 bp, Artificial
  Synthetic oligonucleotide
tccgggcgcacttgggaatggtgcgtcaagaggccagctcgcgaggggccctctcgtag

SEQ ID NO: 196335 - DNA, 60 bp, Artificial
  Synthetic oligonucleotide
tcttcgcaaacgtcactgggtgccagggtgcgtctgcacttcgtttgttgcactcgcaca

SEQ ID NO: 196336 - DNA, 57 bp, Artificial
  Synthetic oligonucleotide
tgcgtactcgacgcgccgggctcacgttaacccttgccgctcgcttgacagtagggg

SEQ ID NO: 196337 - DNA, 54 bp, Artificial
  Synthetic oligonucleotide
tggatcacccaggcgcggaacaggaaaaccccggtcaacgcggcgtcctaggaa

SEQ ID NO: 196338 - DNA, 60 bp, Artificial
  Synthetic oligonucleotide
tgggggctccacgtctgcccgtcaaagacgtctgcagtcacgatgcgaagcggagcggga

SEQ ID NO: 196339 - DNA, 58 bp, Artificial
  Synthetic oligonucleotide
ttactctggtcctgcaccgctgctcccgaggggctactcgtgagttgtggaagggccc

SEQ ID NO: 196340 - DNA, 60 bp, Artificial
  Synthetic oligonucleotide
ttgtctcgcaaccgagcggttctgagacgcccggaagggcccatgtgactgccacagccg

SEQ ID NO: 196341 - DNA, 60 bp, Artificial
  Synthetic oligonucleotide
tttacatgcatacatgccatcttgctgacctgcaggcatgtctgcatgcaggaatgtcag

SEQ ID NO: 196342 - DNA, 49 bp, Artificial
  Synthetic oligonucleotide
aggggcccggtgaggggcccggtgaggggcccggtgaggggcccggtga

SEQ ID NO: 196343 - DNA, 56 bp, Artificial
  Synthetic oligonucleotide
acgcctaccgccaacaggtggtcgtcaaggctgtaggcgccctgtctgggcccgcc

SEQ ID NO: 196344 - DNA, 60 bp, Artificial
  Synthetic oligonucleotide
cagcgccacggggtgcaatggctgcaccccgtgcgatgacgccgaagacacggggtgcaa

SEQ ID NO: 196345 - DNA, 53 bp, Artificial
  Synthetic oligonucleotide
acgcccgacccggaagaccgcaacccccaagtcatcctcggttggtggatcac

SEQ ID NO: 196346 - DNA, 60 bp, Artificial
  Synthetic oligonucleotide
acctgagaacggtcgttctctggcgatggccctacagtagagaacgctggttctcgatgc

SEQ ID NO: 196347 - DNA, 57 bp, Artificial
  Synthetic oligonucleotide
aggggggtgacgacggagcagaaccgcaggtcaggggttttgcacgctcagatggcg

SEQ ID NO: 196348 - DNA, 56 bp, Artificial
  Synthetic oligonucleotide
aggtgcctgctcgctggggggtgtgaccggaagaggtcaacaactttcgtcaccga

SEQ ID NO: 196349 - DNA, 56 bp, Artificial
  Synthetic oligonucleotide
agtccaaggaaagccaacgtgttgtgccacaacgaatctcgacgcctttaaatcaa

SEQ ID NO: 196350 - DNA, 60 bp, Artificial
  Synthetic oligonucleotide
aaagattgattacgttgcagcgcaaggagttcgcctgtggataacgtgctcacgattcgt

SEQ ID NO: 196351 - DNA, 59 bp, Artificial
  Synthetic oligonucleotide
ctgtctcagacgccgtggccgtcaacgcagcgttgcggacacgggttgtgcgacggcgt

SEQ ID NO: 196352 - DNA, 54 bp, Artificial
  Synthetic oligonucleotide
ttcagcccggttccgttgtagggacgaacgcggaacggggacacagtgcaccga

SEQ ID NO: 196353 - DNA, 58 bp, Artificial
  Synthetic oligonucleotide
gtggcctaggggggtcactgttgtgctggatgcgctgaggacggccaacgcgtgccgt

SEQ ID NO: 196354 - DNA, 57 bp, Artificial
  Synthetic oligonucleotide
atcgtgcagctcattgccactcttcctaactcatactccggcgcgaggaccacaaga

SEQ ID NO: 196355 - DNA, 60 bp, Artificial
  Synthetic oligonucleotide
ccccgtctgggcatgtaatccgttgcgggagaagcacatacgtgtgccagaaagattgat

SEQ ID NO: 196356 - DNA, 49 bp, Artificial
  Synthetic oligonucleotide
ccagagccctccaggtggttccccggttccccggtactagacggggaac

SEQ ID NO: 196357 - DNA, 55 bp, Artificial
  Synthetic oligonucleotide
cgttgcgtgagaacaggtcacggagggtttccatctcgccggtttggctctaccg

SEQ ID NO: 196358 - DNA, 55 bp, Artificial
  Synthetic oligonucleotide
ctctcggaccgggtgaactcgttcatggctgacgctccatcgctcgggagggaag

SEQ ID NO: 196359 - DNA, 55 bp, Artificial
  Synthetic oligonucleotide
gaggtcttgcgcacactcgcaccttgcgtgttagcttccccacggctgcaggtca

SEQ ID NO: 196360 - DNA, 55 bp, Artificial
  Synthetic oligonucleotide
agaaccgcaggtcaggggttttgcacgctcagatggcgtgcggcggagtccgatg

SEQ ID NO: 196361 - DNA, 55 bp, Artificial
  Synthetic oligonucleotide
gcgcaaggagttcgcctgtggataacgtgctcacgattcgttcaaattccctggg

SEQ ID NO: 196362 - DNA, 55 bp, Artificial
  Synthetic oligonucleotide
acgcgtcgtgcatgggttcttggcgcgagtgaccctgtcgcgagagcttccgtgc

SEQ ID NO: 196363 - DNA, 55 bp, Artificial
  Synthetic oligonucleotide
ggcattcgatgagcctagcgacctggtcctatatgggcagttgtatctgcctaag

SEQ ID NO: 196364 - DNA, 55 bp, Artificial
  Synthetic oligonucleotide
ggcgaccagggtccctgtactgcttgcttcgcaacacccacatggaagggatccc

SEQ ID NO: 196365 - DNA, 55 bp, Artificial
  Synthetic oligonucleotide
ggcgtcaccttgagcctccttgacagagcgttaccgaactgcaacaagccggact

SEQ ID NO: 196366 - DNA, 59 bp, Artificial
  Synthetic oligonucleotide
ccttgccgttcgctgcagaggcgtatcggcaaggggtcgagtccacgttgtgtcactag

SEQ ID NO: 196367 - DNA, 54 bp, Artificial
  Synthetic oligonucleotide
ggggctactcgtgagttgtggaagggccctcgttgttgacgcaacgggggctct

SEQ ID NO: 196368 - DNA, 55 bp, Artificial
  Synthetic oligonucleotide
ggtctcctcggtcggtgcgagcactggtccccggtccatcggcacggggagggcc

SEQ ID NO: 196369 - DNA, 50 bp, Artificial
  Synthetic oligonucleotide
aacaggaaaaccccggtcaacgcggcgtcctaggaaaactacgcggcgac

SEQ ID NO: 196370 - DNA, 55 bp, Artificial
  Synthetic oligonucleotide
tgctcccgaggggctactcgtgagttgtggaagggccctcgttgttgacgcaacg

SEQ ID NO: 196371 - DNA, 55 bp, Artificial
  Synthetic oligonucleotide
accgtccatcccgaggagtgcgacgtagcagagcactgacagggctgcggtgaga

SEQ ID NO: 196372 - DNA, 55 bp, Artificial
  Synthetic oligonucleotide
aatgcacacgctgtgccacacatgggtcaccaccctgcgctacgaagagcccgca

SEQ ID NO: 196373 - DNA, 55 bp, Artificial
  Synthetic oligonucleotide
tatccttttcgttagttgaattacattattcctcggccaaaggagattacatctt

SEQ ID NO: 196374 - DNA, 55 bp, Artificial
  Synthetic oligonucleotide
tccggcagactcgctgtgacctgcggtggaaccgaccgcggagctgcgtcgttct

SEQ ID NO: 196375 - DNA, 55 bp, Artificial
  Synthetic oligonucleotide
tcctgagaggcgaggtcctgaccaccacgggagactcccaaccatgtccagcgaa

SEQ ID NO: 196376 - DNA, 55 bp, Artificial
  Synthetic oligonucleotide
tgcacgtggagtcctctccatcgaggggtgtccccgcagtgactcgtgtcacctg

SEQ ID NO: 196377 - DNA, 60 bp, Artificial
  Synthetic oligonucleotide
ctagagcgcggcgggctaaggccctgccgcgctctagaaagcgatggtgctgagtggcca

SEQ ID NO: 196378 - DNA, 55 bp, Artificial
  Synthetic oligonucleotide
agtcgaacatcaggggtctcgaggcgctgggtggttgcagcttccgacaccggtt

SEQ ID NO: 196379 - DNA, 54 bp, Artificial
  Synthetic oligonucleotide
cacgaccccgtaagggtagtgtccaagtacctggatcacccaggcgcggaacag

SEQ ID NO: 196380 - DNA, 53 bp, Artificial
  Synthetic oligonucleotide
caccctaacgcagtcgacgttgctttaagcgtcgggtccaggtagtttcccca

SEQ ID NO: 196381 - DNA, 54 bp, Artificial
  Synthetic oligonucleotide
ggaacagagccccccgggacctgcagacgaagggatccgttgtgagcatcgctt

SEQ ID NO: 196382 - DNA, 51 bp, Artificial
  Synthetic oligonucleotide
cggtaacagcccggtctcgaatcgaacagaacgaaaatccgggttagggtg

SEQ ID NO: 196383 - DNA, 54 bp, Artificial
  Synthetic oligonucleotide
taacattcctagaagaacacgggcgatcgtcgtagtctggttacgcgggctggt

SEQ ID NO: 196384 - DNA, 54 bp, Artificial
  Synthetic oligonucleotide
gagtgtcctgaccgggtcgaaacatccggtaagttggacgacaccgcagacaag

SEQ ID NO: 196385 - DNA, 54 bp, Artificial
  Synthetic oligonucleotide
tcggctctagcctgcttgatcgcccacctgtagccgctcgcgcgtcctatgtct

SEQ ID NO: 196386 - DNA, 53 bp, Artificial
  Synthetic oligonucleotide
agtgcacaactgggtaacacctctgtgttcactcgtgcactctacgtcacaat

SEQ ID NO: 196387 - DNA, 53 bp, Artificial
  Synthetic oligonucleotide
ctcctgcagggagcttgctccccgaccgaaccctcttcacgctggacgtggat

SEQ ID NO: 196388 - DNA, 60 bp, Artificial
  Synthetic oligonucleotide
gacacgccgcacttcaatcacgttgcgtgagaacaggtcacggagggtttccatctcgcc

SEQ ID NO: 196389 - DNA, 53 bp, Artificial
  Synthetic oligonucleotide
ctgcattggaatctctagcagctgtcgacctgagttcgtactcgatagagaga

SEQ ID NO: 196390 - DNA, 53 bp, Artificial
  Synthetic oligonucleotide
tcgtgtccgggttatggtccacccgcatccacgactgtgcgcgtggacgccct

SEQ ID NO: 196391 - DNA, 53 bp, Artificial
  Synthetic oligonucleotide
cgctcgtcaccgttcgagagcgctccgtgtttcttccgtggcgatcggatatt

SEQ ID NO: 196392 - DNA, 53 bp, Artificial
  Synthetic oligonucleotide
cttccttcgctgagttgaccgtgtgcgtagcccctagacgacgagccatcgca

SEQ ID NO: 196393 - DNA, 52 bp, Artificial
  Synthetic oligonucleotide
ccgcagtgcccatgacccgcggggtttcgtcatttctaggggctttactacc

SEQ ID NO: 196394 - DNA, 52 bp, Artificial
  Synthetic oligonucleotide
ggatctcatcggatgtcacagcgctaacgtaacagtcctcatgtgaaatggt

SEQ ID NO: 196395 - DNA, 52 bp, Artificial
  Synthetic oligonucleotide
gcgcgtcactgaacggagcaacgaacgcgctacctccccgggggacgaaccc

SEQ ID NO: 196396 - DNA, 52 bp, Artificial
  Synthetic oligonucleotide
cacgattcgttcaaattccctgggacacaacgcgtctggcacacacatgtga

SEQ ID NO: 196397 - DNA, 51 bp, Artificial
  Synthetic oligonucleotide
ccaagcgggtgcacaacttcccccgcgttacccaccatctttcgggaccct

SEQ ID NO: 196398 - DNA, 51 bp, Artificial
  Synthetic oligonucleotide
tccatgcgggcttcacccgggcagcatgcctgtcctgtcgtgggagttggt

SEQ ID NO: 196399 - DNA, 60 bp, Artificial
  Synthetic oligonucleotide
gacccgtgaccgaacatgctcaccatgtgtagtgatctcccgcaaagagggctcagactg

SEQ ID NO: 196400 - DNA, 51 bp, Artificial
  Synthetic oligonucleotide
tgctcgcgttgtggaacggcccgggctgacgtctgatgagcccatggcagt

SEQ ID NO: 196401 - DNA, 49 bp, Artificial
  Synthetic oligonucleotide
ggggacggaccgacggtaacaagccggaggcctcccgtacaccgtcccg

SEQ ID NO: 196402 - DNA, 51 bp, Artificial
  Synthetic oligonucleotide
tgtcggtagggctcgggggccccgtccaggtgtcgttccggccacggaagc

SEQ ID NO: 196403 - DNA, 51 bp, Artificial
  Synthetic oligonucleotide
cctccggggatgtgtaacgagtctctgaccgttcgcgatgtgtggtgtgct

SEQ ID NO: 196404 - DNA, 51 bp, Artificial
  Synthetic oligonucleotide
aaattgcgggatgaccgtgaactagctcgacgaggtccaactcctcctgca

SEQ ID NO: 196405 - DNA, 51 bp, Artificial
  Synthetic oligonucleotide
gcgtgagatcaacttcgagcagatccacgttctcaccatgcgacagggact

SEQ ID NO: 196406 - DNA, 51 bp, Artificial
  Synthetic oligonucleotide
gcggatgggaccagcagcctgaggggtactgggtgcctcaagtcctgtggg

SEQ ID NO: 196407 - DNA, 51 bp, Artificial
  Synthetic oligonucleotide
aggccctgccgcgctctagaaagcgatggtgctgagtggccagagtccacg

SEQ ID NO: 196408 - DNA, 51 bp, Artificial
  Synthetic oligonucleotide
ctcccgcaaagagggctcagactggagcgagaccgcactcctaatgtccga

SEQ ID NO: 196409 - DNA, 51 bp, Artificial
  Synthetic oligonucleotide
ctcgccatgatgggtacaggacacgacaccgctgccgattactagaaggtg

SEQ ID NO: 196410 - DNA, 60 bp, Artificial
  Synthetic oligonucleotide
gatggcgtgcggcggagtccgatgcgtgaatgacattcttgtcacacaccatcttgtgcc

SEQ ID NO: 196411 - DNA, 51 bp, Artificial
  Synthetic oligonucleotide
agcgaacctcgacgctgtccgctcaaatgagttcaacgtgggcggtaatca

SEQ ID NO: 196412 - DNA, 50 bp, Artificial
  Synthetic oligonucleotide
cagaaagctccaactcggggacggttcgttccacgaccgagcggtgacga

SEQ ID NO: 196413 - DNA, 50 bp, Artificial
  Synthetic oligonucleotide
gactgactgtcccggaagggggaccgcgggaagagagtcttgctcgcagc

SEQ ID NO: 196414 - DNA, 50 bp, Artificial
  Synthetic oligonucleotide
agcctgcgttggtctctgccccatccaagctctcgtccagagtgctctcg

SEQ ID NO: 196415 - DNA, 50 bp, Artificial
  Synthetic oligonucleotide
cggagtcgtccagaaagctccaactcggggacggttcgttccacgaccga

SEQ ID NO: 196416 - DNA, 50 bp, Artificial
  Synthetic oligonucleotide
ctggaccggaagttcagatcggcgtaggatcggggaatggcccgaccccg

SEQ ID NO: 196417 - DNA, 50 bp, Artificial
  Synthetic oligonucleotide
acatggtccgctgaccccactgactgaccggagaccctgatcatgctcgg

SEQ ID NO: 196418 - DNA, 50 bp, Artificial
  Synthetic oligonucleotide
ctcgctgggtccttgtgtcatggttgatctcgcgacgggagtggttcccg

SEQ ID NO: 196419 - DNA, 50 bp, Artificial
  Synthetic oligonucleotide
aagggaatgtggcggaccagctggctcaggcattgcgtggctgacaccac

SEQ ID NO: 196420 - DNA, 50 bp, Artificial
  Synthetic oligonucleotide
acttcctcacccggtggaacgatcctgagtcacgactggcagccctccga

SEQ ID NO: 196421 - DNA, 55 bp, Artificial
  Synthetic oligonucleotide
agaaaccgcgtgtagaccccacagcgtgagcgtgacaaggcgaacgtcacgggtc

SEQ ID NO: 196422 - DNA, 55 bp, Artificial
  Synthetic oligonucleotide
cgtcgtagggcgagcactgcgtgtactggactgcgtaagtttcacacccggggag

SEQ ID NO: 196423 - DNA, 54 bp, Artificial
  Synthetic oligonucleotide
cgttgtccgaattaggacacccggactacggagcccgcctgtttcggctcatcg

SEQ ID NO: 196424 - DNA, 55 bp, Artificial
  Synthetic oligonucleotide
cgtttcgtacgtggtgggaacatcagcgtaaacgcgcagcgcacaatgtcggtag

SEQ ID NO: 196425 - DNA, 55 bp, Artificial
  Synthetic oligonucleotide
cttgcagcgaagggcaagcgatgagaatcgaatactaccggtagctgtcggagca

SEQ ID NO: 196426 - DNA, 55 bp, Artificial
  Synthetic oligonucleotide
gcgactgtatcgtagtcactgcgagcgcaattacgtatcctgcatgagacagcac

SEQ ID NO: 196427 - DNA, 55 bp, Artificial
  Synthetic oligonucleotide
gctttgcgcccgtaagcgcccttttctcgatagaggaccttcgtcctcatgcact

SEQ ID NO: 196428 - DNA, 55 bp, Artificial
  Synthetic oligonucleotide
gtatcgagagctttgctcagatccgcagcgcaaagatcgcctttggggacctcac

SEQ ID NO: 196429 - DNA, 55 bp, Artificial
  Synthetic oligonucleotide
ttttaccaaggctcggcaatctccactgcctgaccaactcccacgcgaggtggag

SEQ ID NO: 196430 - DNA, 55 bp, Artificial
  Synthetic oligonucleotide
gtgctccctcgggctttgcgaacgctgtgccagcagcgatagagcgtcggcattt

SEQ ID NO: 196431 - DNA, 55 bp, Artificial
  Synthetic oligonucleotide
taccttgctaccccttgctcgccgtgataacggttgcaacgctatgcgtctcgac

SEQ ID NO: 196432 - DNA, 52 bp, Artificial
  Synthetic oligonucleotide
agatcggtactttagtggggaattatgaacccggcgggaaggccaacagacg

SEQ ID NO: 196433 - DNA, 55 bp, Artificial
  Synthetic oligonucleotide
tgatattgtgtcgtacgcacgttgaagcgtctgccaacactgctccggaccgggg

SEQ ID NO: 196434 - DNA, 55 bp, Artificial
  Synthetic oligonucleotide
tcgctcatgggtcctcggaggtcgaaggtactcgaagcgggccctcatgggcaat

SEQ ID NO: 196435 - DNA, 54 bp, Artificial
  Synthetic oligonucleotide
cttaggttgtccgctcagtacagtacattggcgtaaggggaacggtctgggctc

SEQ ID NO: 196436 - DNA, 53 bp, Artificial
  Synthetic oligonucleotide
cgttgagatggcccataccgtacccgctcaaaacctgagcgacgatatgcgag

SEQ ID NO: 196437 - DNA, 53 bp, Artificial
  Synthetic oligonucleotide
gcgcaccgccagaacatgacttcctcccgaatacagccctgcaaactatccat

SEQ ID NO: 196438 - DNA, 53 bp, Artificial
  Synthetic oligonucleotide
cccactctactcgactcgcacccgcctttccaagtcctgtcgctagcgccctg

SEQ ID NO: 196439 - DNA, 52 bp, Artificial
  Synthetic oligonucleotide
catggttgtgcctaccccgacgtaggagtcagccggcccagccctctacgca

SEQ ID NO: 196440 - DNA, 51 bp, Artificial
  Synthetic oligonucleotide
tatgccggtgaacctgaacaatatcggacgagacgacgaagtaccgtgcga

SEQ ID NO: 196441 - DNA, 51 bp, Artificial
  Synthetic oligonucleotide
ccccaaactcgcccgtctgctctcggcatccgagcgccaaacccggcggct

SEQ ID NO: 196442 - DNA, 51 bp, Artificial
  Synthetic oligonucleotide
cgagtccacggaaccgcggtcctttctcggacacatgtccttacatgtaga

SEQ ID NO: 196443 - DNA, 55 bp, Artificial
  Synthetic oligonucleotide
aggtcgcgttttgggcgcgcaactccgaaagtccgcatgagcaacccgagcgcct

SEQ ID NO: 196444 - DNA, 50 bp, Artificial
  Synthetic oligonucleotide
tgacaaaaccacctgagcgagtgcgtatgactcgaatagagttctccgct

SEQ ID NO: 196445 - DNA, 50 bp, Artificial
  Synthetic oligonucleotide
actactccatcccgcacggagactaacgccgcatccgacggttgggggtc

SEQ ID NO: 196446 - DNA, 50 bp, Artificial
  Synthetic oligonucleotide
acgtgttcgcctcctccaagttcggcgcttgaacgcccgaggtccgccat

SEQ ID NO: 196447 - DNA, 50 bp, Artificial
  Synthetic oligonucleotide
aaaacccatctgcgactcgccaaggtcacagccggcgctaggcttctgcg

SEQ ID NO: 196448 - DNA, 50 bp, Artificial
  Synthetic oligonucleotide
aaagcatgtctcatctgacgtgttcccaaccccggcgccagagaccccct

SEQ ID NO: 196449 - DNA, 50 bp, Artificial
  Synthetic oligonucleotide
aaagccgcgtgaccaaagggtggagtagcgcacgcgttctctgctaagct

SEQ ID NO: 196450 - DNA, 50 bp, Artificial
  Synthetic oligonucleotide
aaatccatcgagcgcgcaagtttcatagtgggcgtacgcgttgggcacgc

SEQ ID NO: 196451 - DNA, 50 bp, Artificial
  Synthetic oligonucleotide
aaccctacagggcggatgctcacggatcagtctagcagggcgaccaacgc

SEQ ID NO: 196452 - DNA, 50 bp, Artificial
  Synthetic oligonucleotide
aaccgcgcaccgagccactacgattcgacgcgctatcacggcgtgaacct

SEQ ID NO: 196453 - DNA, 50 bp, Artificial
  Synthetic oligonucleotide
aacgcagcgtcggctcttgcggatgagattgctcggacacgacggggcac

SEQ ID NO: 196454 - DNA, 55 bp, Artificial
  Synthetic oligonucleotide
atctatagaactgtggggcgcacaaatgactgccggacaatcattacaccgcgat

SEQ ID NO: 196455 - DNA, 50 bp, Artificial
  Synthetic oligonucleotide
aagcctcgcggctgtctgcggctactcgctccggcattgttcgaaaaccc

SEQ ID NO: 196456 - DNA, 50 bp, Artificial
  Synthetic oligonucleotide
aagggagtggactcggtgaagtcgcaagctaccttgagcggttgcctcga

SEQ ID NO: 196457 - DNA, 50 bp, Artificial
  Synthetic oligonucleotide
aagtcgcaagctaccttgagcggttgcctcgaacgaacccgcccaggtaa

SEQ ID NO: 196458 - DNA, 50 bp, Artificial
  Synthetic oligonucleotide
aatgcccctcagccgtactagtccgcgttgggcgatccgtcacacagtga

SEQ ID NO: 196459 - DNA, 50 bp, Artificial
  Synthetic oligonucleotide
aatggccaaccaacgaagcagcggatccattcgcctgaaatagcgcccct

SEQ ID NO: 196460 - DNA, 50 bp, Artificial
  Synthetic oligonucleotide
acacagtcgcgccctgtcccgactatgcttccgtcctgtcccgacagagt

SEQ ID NO: 196461 - DNA, 50 bp, Artificial
  Synthetic oligonucleotide
acattggggaaccagctagcggcccgttgaaacacctcgccggcgccaga

SEQ ID NO: 196462 - DNA, 50 bp, Artificial
  Synthetic oligonucleotide
accaaggcgtcgcactctgatacgaacgccctacgcgcaccgtagcagta

SEQ ID NO: 196463 - DNA, 50 bp, Artificial
  Synthetic oligonucleotide
acgtgttcccaaccccggcgccagagaccccctttaggagacccgactcg

SEQ ID NO: 196464 - DNA, 50 bp, Artificial
  Synthetic oligonucleotide
acgtcacagagtacggcgagcatccgctgtgacatgatgggccacccctg

SEQ ID NO: 196465 - DNA, 55 bp, Artificial
  Synthetic oligonucleotide
catcgggacttgacagggaggtagcgcttaacgtgtaacacctcagtgctctcta

SEQ ID NO: 196466 - DNA, 50 bp, Artificial
  Synthetic oligonucleotide
acggtccgctccgaaaccgctatcggttggactggcactgcgtatcgccc

SEQ ID NO: 196467 - DNA, 50 bp, Artificial
  Synthetic oligonucleotide
acgctcgccacggtgacacgccgcgttaagcagttcgagcccgaggtgtg

SEQ ID NO: 196468 - DNA, 50 bp, Artificial
  Synthetic oligonucleotide
acgcgagagtacttgcgtggcgacccgcctactcagtaagcgtgcggcat

SEQ ID NO: 196469 - DNA, 50 bp, Artificial
  Synthetic oligonucleotide
acgccgcgttaagcagttcgagcccgaggtgtgtcgtgcattgaagggcc

SEQ ID NO: 196470 - DNA, 50 bp, Artificial
  Synthetic oligonucleotide
acgcagcatccgacgctgtcccttctccatggggcgtagccatttggaca

SEQ ID NO: 196471 - DNA, 50 bp, Artificial
  Synthetic oligonucleotide
acgaggacgtcggcacacgccgcactcgtcgtacgatttcccacgcagat

SEQ ID NO: 196472 - DNA, 50 bp, Artificial
  Synthetic oligonucleotide
acgacgtgtgccttgcgtgtggcgaaagtcggccgtaccccaattgctta

SEQ ID NO: 196473 - DNA, 50 bp, Artificial
  Synthetic oligonucleotide
acgacatagtgggtcctccaagcgaggcccaacaggcgacgcacgagcat

SEQ ID NO: 196474 - DNA, 50 bp, Artificial
  Synthetic oligonucleotide
acgacaggctgaccttgcactcctgcctgcatcccggacagatcaccgag

SEQ ID NO: 196475 - DNA, 50 bp, Artificial
  Synthetic oligonucleotide
acgaagcagcggatccattcgcctgaaatagcgcccctgtccaaggcgta

SEQ ID NO: 196476 - DNA, 55 bp, Artificial
  Synthetic oligonucleotide
cccgccgagctagcctgactgccaacttgccacctggcgtggtagcataaggcca

SEQ ID NO: 196477 - DNA, 50 bp, Artificial
  Synthetic oligonucleotide
acgaacgccctacgcgcaccgtagcagtactggatcgcccccgagacctc

SEQ ID NO: 196478 - DNA, 50 bp, Artificial
  Synthetic oligonucleotide
acctcgcacggaaaagggagttgggggactttcacgctagcaaggcaccc

SEQ ID NO: 196479 - DNA, 50 bp, Artificial
  Synthetic oligonucleotide
accccgcgtgcgcccatatctgcgtcttgcgttacgacaaatcgatgcga

SEQ ID NO: 196480 - DNA, 50 bp, Artificial
  Synthetic oligonucleotide
accaggttgtctgcttcgcgaccgtacaccgggtcctcagcacccagacg

SEQ ID NO: 196481 - DNA, 55 bp, Artificial
  Synthetic oligonucleotide
cgaaatactctgagttggggccgtagatacggcaaacgtgcgctcgcttacacag

SEQ ID NO: 196482 - DNA, 55 bp, Artificial
  Synthetic oligonucleotide
cgcatgctgtgggacgcagcgcgaaaactcttgcgcgcctagcgaattcacaatg

SEQ ID NO: 196483 - DNA, 55 bp, Artificial
  Synthetic oligonucleotide
cggattgtgcgagtgcggtgttcatatcggggttcctcggggctgctaggccaag

SEQ ID NO: 196484 - DNA, 55 bp, Artificial
  Synthetic oligonucleotide
ataaaccagctctggctatccatcactggcatatcaggatcatcgttttgcacac

SEQ ID NO: 196485 - DNA, 55 bp, Artificial
  Synthetic oligonucleotide
gcccatagggcttcatcagagccaggcagatctaacgagaggaacaacacatgtc

SEQ ID NO: 196486 - DNA, 55 bp, Artificial
  Synthetic oligonucleotide
gcgcatgacgccactggtgccccaacgccaaaatgaaaatttgaccgtccgagcc

SEQ ID NO: 196487 - DNA, 55 bp, Artificial
  Synthetic oligonucleotide
ggattgggaacctgttgatacacaatattagtaaggcctgcaactttgaggagcg

SEQ ID NO: 196488 - DNA, 55 bp, Artificial
  Synthetic oligonucleotide
tttcaacccgtattacaaaccaatgacctgttaggttcacttatcaatggctccc

SEQ ID NO: 196489 - DNA, 55 bp, Artificial
  Synthetic oligonucleotide
ttgagccgtcgcacgtgaacctgatagcggttgttgcgaaagatgtcgcagtctg

SEQ ID NO: 196490 - DNA, 55 bp, Artificial
  Synthetic oligonucleotide
tgtcattcgtcatgcccacgcgcacacatgccaggtgcgtctcctggtagatacg

SEQ ID NO: 196491 - DNA, 55 bp, Artificial
  Synthetic oligonucleotide
tggattatggccttcaccctctttatagtaaggcctagagagcgagttgtcgcgc

SEQ ID NO: 196492 - DNA, 55 bp, Artificial
  Synthetic oligonucleotide
tgcttgccagaactcgggattttagcgctatactctatgccgctgatatgctagc

SEQ ID NO: 196493 - DNA, 55 bp, Artificial
  Synthetic oligonucleotide
tctcctcacgcctgttggaaaccgatctgtagagagacaagtatatcaacctgag

SEQ ID NO: 196494 - DNA, 55 bp, Artificial
  Synthetic oligonucleotide
gtgcttacgttggagggccaaacctgctcacttgggaggacatttaccaactcgt

SEQ ID NO: 196495 - DNA, 55 bp, Artificial
  Synthetic oligonucleotide
ccggcacaaaattcctgacaacaagtgagctgagaagtggtacagtcctcgcatg

SEQ ID NO: 196496 - DNA, 55 bp, Artificial
  Synthetic oligonucleotide
gtgagcgatcaactgcgataaagaggcgcatactctgtccactgatgaacgtccc

SEQ ID NO: 196497 - DNA, 55 bp, Artificial
  Synthetic oligonucleotide
gtagtaaaacggaataatctggtaccacagacaggacaatgtcccaccagggcgc

SEQ ID NO: 196498 - DNA, 55 bp, Artificial
  Synthetic oligonucleotide
gggcctgagggtccgtaaagaagggcgaatatttatgtactgggttgcgcttgtc

SEQ ID NO: 196499 - DNA, 55 bp, Artificial
  Synthetic oligonucleotide
ggcgttacaaactgtagcagcctggctacgatactatctacatccgcgagactcg

SEQ ID NO: 196500 - DNA, 54 bp, Artificial
  Synthetic oligonucleotide
cagggcagatagaaagcgtttgaggaaaataccaacgtttggcgtgagcgaatg

SEQ ID NO: 196501 - DNA, 54 bp, Artificial
  Synthetic oligonucleotide
cagcgtgcgacaatatcaggggaacaagcttccccagcactaatgattgtttgc

SEQ ID NO: 196502 - DNA, 54 bp, Artificial
  Synthetic oligonucleotide
acatagatatcgatcatatgcgatgacgtatcccttgagattagtgccgcgaac

SEQ ID NO: 196503 - DNA, 52 bp, Artificial
  Synthetic oligonucleotide
agttcctagcgtttgcgaaaatgttatggtgagccaatagaagcattcagca

SEQ ID NO: 196504 - DNA, 52 bp, Artificial
  Synthetic oligonucleotide
aggatcgagatcacaacgcaggtcagaatgtgttacgggaaacccttcgctt

SEQ ID NO: 196505 - DNA, 51 bp, Artificial
  Synthetic oligonucleotide
tcagcgtacccaggtaggttagcttaatctcgtcgggattacgtccgatgc

SEQ ID NO: 196506 - DNA, 55 bp, Artificial
  Synthetic oligonucleotide
cgcccgcgtaaagaggagattctgcgtgaagtaagactctggcgaggtctcttga

SEQ ID NO: 196507 - DNA, 51 bp, Artificial
  Synthetic oligonucleotide
tacaaaacgccagaccgacagggaggtacgtatagtagaagcatgcgggcc

SEQ ID NO: 196508 - DNA, 50 bp, Artificial
  Synthetic oligonucleotide
aacggaaccttccagcacgcgatagctgatcggcgattgatccctgcccc

SEQ ID NO: 196509 - DNA, 50 bp, Artificial
  Synthetic oligonucleotide
aacgcttagaaagcggcgtgtggcgaggagtccaagccctagagcggccc

SEQ ID NO: 196510 - DNA, 50 bp, Artificial
  Synthetic oligonucleotide
aacgaggctaccaggggttggacacgcctccggtggattcagcaccgctc

SEQ ID NO: 196511 - DNA, 50 bp, Artificial
  Synthetic oligonucleotide
aacgagcgaggcccatagcagagggcgcacgcctttagagggcggattac

SEQ ID NO: 196512 - DNA, 50 bp, Artificial
  Synthetic oligonucleotide
aacagcgagagatttacggacatgtcgagccctcgcaagagcgggcggtc

SEQ ID NO: 196513 - DNA, 50 bp, Artificial
  Synthetic oligonucleotide
aacagccttcctggatattgtgcaagtgcgccccatctttgcccgcgtgg

SEQ ID NO: 196514 - DNA, 50 bp, Artificial
  Synthetic oligonucleotide
aacactttatcctgggtgttcagcgccgtgatatcgcagccgcggccctc

SEQ ID NO: 196515 - DNA, 50 bp, Artificial
  Synthetic oligonucleotide
aaatgctctggcgcactttagatgctggcctccccgtcgcctgggtaacc

SEQ ID NO: 196516 - DNA, 50 bp, Artificial
  Synthetic oligonucleotide
aaatccctcctggcgtcaggacccacagaactggcagcgatccctcttgc

SEQ ID NO: 196517 - DNA, 55 bp, Artificial
  Synthetic oligonucleotide
cgctcgctcatcttacaaccagaggcccacgttaaactacgcatctctaccggga

SEQ ID NO: 196518 - DNA, 50 bp, Artificial
  Synthetic oligonucleotide
aaagtacgccacgggaggccacattggtccgcgccaccatagatcaggat

SEQ ID NO: 196519 - DNA, 50 bp, Artificial
  Synthetic oligonucleotide
aaagggtcgcgcgccacagagccactcatacacgaccacgcctagagcat

SEQ ID NO: 196520 - DNA, 50 bp, Artificial
  Synthetic oligonucleotide
aaagctagcgcgggggatgcctccagttgaactcaaggtagcacgctgga

SEQ ID NO: 196521 - DNA, 50 bp, Artificial
  Synthetic oligonucleotide
aaagcgagggacgctgttgcggaagtcggaacggtcgaacgtcgtgtgtt

SEQ ID NO: 196522 - DNA, 50 bp, Artificial
  Synthetic oligonucleotide
aaagccatcccaggacacgcggctccgaaactcgcgcaacacgctcgtca

SEQ ID NO: 196523 - DNA, 50 bp, Artificial
  Synthetic oligonucleotide
aaacgcgccctgattggagtcctcctggccagcgctaaggcggagcatga

SEQ ID NO: 196524 - DNA, 50 bp, Artificial
  Synthetic oligonucleotide
aaacgactccaggtcagcaagcggggtagcattgagcgcgcgatgtaggc

SEQ ID NO: 196525 - DNA, 50 bp, Artificial
  Synthetic oligonucleotide
aaaccgtccgttctgcgaaagctagaccgtcaggctccagcgtcccttgg

SEQ ID NO: 196526 - DNA, 50 bp, Artificial
  Synthetic oligonucleotide
aaaccgctcaccgcttttcctttgtgggcgtctgtcccacgagcccaagg

SEQ ID NO: 196527 - DNA, 50 bp, Artificial
  Synthetic oligonucleotide
aaaataaactcttcccagcggtgctggccccctgagaatggcggttgcgc

SEQ ID NO: 196528 - DNA, 55 bp, Artificial
  Synthetic oligonucleotide
cgttttcatcacactattgcggagatgctggccacaatctgttgcgatttagggg

SEQ ID NO: 196529 - DNA, 50 bp, Artificial
  Synthetic oligonucleotide
aaaagcccaccacgcggtctcgcctgcgcgtgccaagtagccagcaagcc

SEQ ID NO: 196530 - DNA, 50 bp, Artificial
  Synthetic oligonucleotide
aaaacagacgcccagaggccccttacagacaccgcaggatgcgccagtag

SEQ ID NO: 196531 - DNA, 50 bp, Artificial
  Synthetic oligonucleotide
aacgaaccttctgggtctattggggagacccggcctatgatgcgccccca

SEQ ID NO: 196532 - DNA, 50 bp, Artificial
  Synthetic oligonucleotide
aacctctcccgccctgtcggtctcactcgatagggggcgcagatgacgaa

SEQ ID NO: 196533 - DNA, 50 bp, Artificial
  Synthetic oligonucleotide
aacctccgagggcgcaacggccagacggacgcttggaagccgggtgagta

SEQ ID NO: 196534 - DNA, 50 bp, Artificial
  Synthetic oligonucleotide
aaccgttcttgcgagcgtcagtggtggcttcgcattggtggtcgttccgt

SEQ ID NO: 196535 - DNA, 50 bp, Artificial
  Synthetic oligonucleotide
aaccgtaccattgacgctccatgtgagcgccgcaccactctatgccgcag

SEQ ID NO: 196536 - DNA, 50 bp, Artificial
  Synthetic oligonucleotide
aaccggttcacggcagcttacctccccctcgccaaaggtcgccaggtaga

SEQ ID NO: 196537 - DNA, 50 bp, Artificial
  Synthetic oligonucleotide
aaccggaattggccgcgcaaatgctctggcgcactttagatgctggcctc

SEQ ID NO: 196538 - DNA, 50 bp, Artificial
  Synthetic oligonucleotide
aaccgcgcgcgtacacttcaatcaggtgcccagcggattcgccatcaacc

SEQ ID NO: 196539 - DNA, 55 bp, Artificial
  Synthetic oligonucleotide
ctgagcgatccgctctactacctccgtcatcgttagggcctcgggtcccgtcatg

SEQ ID NO: 196540 - DNA, 50 bp, Artificial
  Synthetic oligonucleotide
aaccgcgcgatttgtctgccgggcgcttggaatagattgaggcgtcgcat

SEQ ID NO: 196541 - DNA, 50 bp, Artificial
  Synthetic oligonucleotide
aaccgccggctcccccactcttgcacctgattcatccgatggtcggcttg

SEQ ID NO: 196542 - DNA, 50 bp, Artificial
  Synthetic oligonucleotide
aaccgcatgtggctctcggacgttgcactgctcaggtggcaagcaaaccg

SEQ ID NO: 196543 - DNA, 50 bp, Artificial
  Synthetic oligonucleotide
aaccgcacccgtttggccttgcctacgcagacccgattcgcagcttgata

SEQ ID NO: 196544 - DNA, 50 bp, Artificial
  Synthetic oligonucleotide
aaccgatgccctacccgaaggagtcaccacgcggccccatggtctctttg

SEQ ID NO: 196545 - DNA, 50 bp, Artificial
  Synthetic oligonucleotide
aacccagcctccacgccgggtcacacgtgccagttcttgcacaacccacg

SEQ ID NO: 196546 - DNA, 50 bp, Artificial
  Synthetic oligonucleotide
aacccacgatccatagcaggcaggcaacgagcagggagcgtgtgcgacga

SEQ ID NO: 196547 - DNA, 50 bp, Artificial
  Synthetic oligonucleotide
aacaggccagtttcgcgtttccacaacaaggcaccctgcgcatcgcagag

SEQ ID NO: 196548 - DNA, 50 bp, Artificial
  Synthetic oligonucleotide
aacaggacccccttacggaccaacgtcgatgccgtttcccgcttgccttg

SEQ ID NO: 196549 - DNA, 55 bp, Artificial
  Synthetic oligonucleotide
cttactgagctgcaaccatcaatatagcccgcctcctctaactctttaggcacgc

SEQ ID NO: 196550 - DNA, 55 bp, Artificial
  Synthetic oligonucleotide
ctttcctctcaaggtcgtggggacatttatcagtccgagcgtaagatccttgcct

SEQ ID NO: 196551 - DNA, 55 bp, Artificial
  Synthetic oligonucleotide
gatattgtgggagttatggctgggcgtacggttactgctgttgcggctgagctag

SEQ ID NO: 196552 - DNA, 60 bp, Artificial
  Synthetic oligonucleotide
actagaagcgaagaggtatacttatgggatatggaataatgcgctgtgagaagcgtaaaa

SEQ ID NO: 196553 - DNA, 60 bp, Artificial
  Synthetic oligonucleotide
tctaatccatccataggcaaggcttataacgacgtagatgagatgatgaggacttattga

SEQ ID NO: 196554 - DNA, 57 bp, Artificial
  Synthetic oligonucleotide
tcttggaccgaaatctgcagctacggctcagacaccgcttaccgcgacagaaacggt

SEQ ID NO: 196555 - DNA, 50 bp, Artificial
  Synthetic oligonucleotide
tgttaccggcatttgctgcctgagccgcctgggttaagctcgcatcctgc

SEQ ID NO: 196556 - DNA, 50 bp, Artificial
  Synthetic oligonucleotide
tgtgtattctgtatcgttctttacaaagaggttgctagatgttgctgcgt

SEQ ID NO: 196557 - DNA, 50 bp, Artificial
  Synthetic oligonucleotide
aagcattgtggcagaggacgcgaagttccttagcggggaacgggcgcaga

SEQ ID NO: 196558 - DNA, 50 bp, Artificial
  Synthetic oligonucleotide
ccgtacaggaaaggaaggcgctaaaggcacgcgtggaggcattggaccga

SEQ ID NO: 196559 - DNA, 50 bp, Artificial
  Synthetic oligonucleotide
aaaactcaagaatcagacgacagggataacagttattgttccttatcact

SEQ ID NO: 196560 - DNA, 50 bp, Artificial
  Synthetic oligonucleotide
aaaagctgtgagccgcggtcccttgcttactccaggtagcctccgagctc

SEQ ID NO: 196561 - DNA, 50 bp, Artificial
  Synthetic oligonucleotide
cgatctatggacctgaactacgtaagatgttcaaatctacatccggttct

SEQ ID NO: 196562 - DNA, 50 bp, Artificial
  Synthetic oligonucleotide
aaaccagcccgacgcatcctacaacaatccccggtttaaaggcgttccat

SEQ ID NO: 196563 - DNA, 50 bp, Artificial
  Synthetic oligonucleotide
aaacgacagcgatcacgggtggtgtaacatgctgcgggagggagcgacga

SEQ ID NO: 196564 - DNA, 50 bp, Artificial
  Synthetic oligonucleotide
tttccgcagatcgtaaacacatgcaccgctttcgcacaccagatactgca

SEQ ID NO: 196565 - DNA, 57 bp, Artificial
  Synthetic oligonucleotide
ggtcatagtcgacccgcactgtctcggcatgcccgctgctgttacagacgtcctgat

SEQ ID NO: 196566 - DNA, 50 bp, Artificial
  Synthetic oligonucleotide
aaacgcgttcgtgtagctgacatccttcggaatccggtgtcccgcctccg

SEQ ID NO: 196567 - DNA, 50 bp, Artificial
  Synthetic oligonucleotide
aaacgggcttacacattccacccgcaatcgcctgggaatctgccgcacaa

SEQ ID NO: 196568 - DNA, 50 bp, Artificial
  Synthetic oligonucleotide
cgcacatctgaccgtctccggcctgtgccatacagtcccaagcctccctc

SEQ ID NO: 196569 - DNA, 50 bp, Artificial
  Synthetic oligonucleotide
aaagcccgcccctagcaaggtctccatcaagtcgtctaggcggtctggcc

SEQ ID NO: 196570 - DNA, 50 bp, Artificial
  Synthetic oligonucleotide
cgacctccgcctcgcacacctcatgtccatcacgtccaagtgccacaccc

SEQ ID NO: 196571 - DNA, 50 bp, Artificial
  Synthetic oligonucleotide
aaagcggatgcgatttcgtccgtatgccccggaagggcgctgtaacggat

SEQ ID NO: 196572 - DNA, 50 bp, Artificial
  Synthetic oligonucleotide
aaagctccgagctcgcctttccgaatctcacggaggcctgctttctcggg

SEQ ID NO: 196573 - DNA, 50 bp, Artificial
  Synthetic oligonucleotide
cgcagggtccatcggatttactccgtccacagccctcacggcaggagtta

SEQ ID NO: 196574 - DNA, 50 bp, Artificial
  Synthetic oligonucleotide
aaatcccgccctgctcggagtttaaggccagcgtaatgatgcccgcgagg

SEQ ID NO: 196575 - DNA, 50 bp, Artificial
  Synthetic oligonucleotide
aaatcgggccttttacccggcttcccggccaaatcaacggagccagtggt

SEQ ID NO: 196576 - DNA, 57 bp, Artificial
  Synthetic oligonucleotide
tacggctctaagtggcggacagtccagagcacttatgattgcagatacggcggtgct

SEQ ID NO: 196577 - DNA, 50 bp, Artificial
  Synthetic oligonucleotide
cgcccgtctgccccagttcaattccgcagtcctttgcgagcttcgtctca

SEQ ID NO: 196578 - DNA, 50 bp, Artificial
  Synthetic oligonucleotide
aaatgttggcccaggcatagagaccgccgaggacgcaaaccccaagagcg

SEQ ID NO: 196579 - DNA, 50 bp, Artificial
  Synthetic oligonucleotide
cgcccttggaaagtccgaagctcggtcttccgctcggaacgtcgcacagt

SEQ ID NO: 196580 - DNA, 50 bp, Artificial
  Synthetic oligonucleotide
ttctggtaatgtgctgtagcggactctggttcgtaggtcttcatggaggt

SEQ ID NO: 196581 - DNA, 50 bp, Artificial
  Synthetic oligonucleotide
aacattccgtccccctttccgcccgcagaggctatgtgctgcctgcccgg

SEQ ID NO: 196582 - DNA, 50 bp, Artificial
  Synthetic oligonucleotide
aaccacgttgcgctcgcagtgcccataagagccttcgccctccagaatcg

SEQ ID NO: 196583 - DNA, 50 bp, Artificial
  Synthetic oligonucleotide
aaccgatacagccagctcccgtcaccactgcggtctgtcccaaatgggcc

SEQ ID NO: 196584 - DNA, 50 bp, Artificial
  Synthetic oligonucleotide
ttcggctgtgtcactgccagacgcgatgaccgctatccgacggttatgga

SEQ ID NO: 196585 - DNA, 50 bp, Artificial
  Synthetic oligonucleotide
cgccgcgtattcttccccggtcggccacagaccgatgccgacatcattca

SEQ ID NO: 196586 - DNA, 50 bp, Artificial
  Synthetic oligonucleotide
cgcctccgttacatcctccgcgattccgctgggatgaatctccgcctgaa

SEQ ID NO: 196587 - DNA, 53 bp, Artificial
  Synthetic oligonucleotide
atcgtgcgagaaaacccctcccgatgaagtcggttgtggggatggaacgcctt

SEQ ID NO: 196588 - DNA, 50 bp, Artificial
  Synthetic oligonucleotide
aaggcctgattaagggcatgagcgccttgagaggtcgcagcattggccgt

SEQ ID NO: 196589 - DNA, 50 bp, Artificial
  Synthetic oligonucleotide
aaggctggcccgcatagaaggaccgtcataacgggcgttcttctccgcta

SEQ ID NO: 196590 - DNA, 50 bp, Artificial
  Synthetic oligonucleotide
aagggcatgagcgccttgagaggtcgcagcattggccgttaagcgcactg

SEQ ID NO: 196591 - DNA, 50 bp, Artificial
  Synthetic oligonucleotide
aaggtaggcctcatcgtagctcgcctgagagagtgccgcggacttcgtga

SEQ ID NO: 196592 - DNA, 50 bp, Artificial
  Synthetic oligonucleotide
aaggttccctgtgcggcggcagaactcctgggacggaaagagggcgctta

SEQ ID NO: 196593 - DNA, 50 bp, Artificial
  Synthetic oligonucleotide
ccgatgcagacagcctggtctgccagagccacatggaaggcctcccggtc

SEQ ID NO: 196594 - DNA, 50 bp, Artificial
  Synthetic oligonucleotide
aagtccgacgcctccggggcagagctctccgtcacgatctgggacaataa

SEQ ID NO: 196595 - DNA, 50 bp, Artificial
  Synthetic oligonucleotide
cgggtatcgccccctcgcctccgctcagcggcaagtcgtcacgcgcatga

SEQ ID NO: 196596 - DNA, 50 bp, Artificial
  Synthetic oligonucleotide
tcgtgccattccacagaacgaaggaacattgttcggattctgtcagtttc

SEQ ID NO: 196597 - DNA, 50 bp, Artificial
  Synthetic oligonucleotide
cggtaacgacaaagcgcggactctggctgtccggagcgatcccgtctttt

SEQ ID NO: 196598 - DNA, 57 bp, Artificial
  Synthetic oligonucleotide
gacaatccgttcccgacagcctgtgctatggtctgtgagcatccttgtgaggagcgc

SEQ ID NO: 196599 - DNA, 50 bp, Artificial
  Synthetic oligonucleotide
ccgatcaaggcatttttggtgtcctgcgggggctccaatacaccgtccgg

SEQ ID NO: 196600 - DNA, 50 bp, Artificial
  Synthetic oligonucleotide
aagtctcacagggggacgaaggaccgggatctgatccgattcgggcagga

SEQ ID NO: 196601 - DNA, 50 bp, Artificial
  Synthetic oligonucleotide
cggtcgggagacccctagccaccgttctaacttccccgcgaattgcggaa

SEQ ID NO: 196602 - DNA, 50 bp, Artificial
  Synthetic oligonucleotide
aagttctccggtcgccataccagtcgcaatgtccgtcgtcccgactccgg

SEQ ID NO: 196603 - DNA, 50 bp, Artificial
  Synthetic oligonucleotide
tcgcacttcagtacgcatatggggacggggcagaagagagctgccgtctg

SEQ ID NO: 196604 - DNA, 50 bp, Artificial
  Synthetic oligonucleotide
cggtctccagcccaaaagcgatcgactccggaagcacgtccaactgccat

SEQ ID NO: 196605 - DNA, 50 bp, Artificial
  Synthetic oligonucleotide
ccgactctcggcacgacacaaggggtaagggcgactcccatagtccgcac

SEQ ID NO: 196606 - DNA, 50 bp, Artificial
  Synthetic oligonucleotide
ccgactcgactgccgtccattctcccacaggacctgtgatcttcgccgcg

SEQ ID NO: 196607 - DNA, 50 bp, Artificial
  Synthetic oligonucleotide
tcctgcgatttcccttgccgcatatctgccgtactccgaacagcgccttg

SEQ ID NO: 196608 - DNA, 50 bp, Artificial
  Synthetic oligonucleotide
aatagccgtgacaggtgggctattcggccgtgcaaagggggctactcacg

SEQ ID NO: 196609 - DNA, 48 bp, Artificial
  Synthetic oligonucleotide
ccgacttttaacacgttttactccgacttttaacacgttgataacttt

SEQ ID NO: 196610 - DNA, 50 bp, Artificial
  Synthetic oligonucleotide
tccgttcaggagggggcagagcgagcggaatcctggtcgcagtcagagat

SEQ ID NO: 196611 - DNA, 50 bp, Artificial
  Synthetic oligonucleotide
ccgaccacaggtccacctgacaggggcattttaaagcctccagagcccga

SEQ ID NO: 196612 - DNA, 50 bp, Artificial
  Synthetic oligonucleotide
tccggtgtaggattgctgcctatcacatcggaaagctgcgctccctccct

SEQ ID NO: 196613 - DNA, 50 bp, Artificial
  Synthetic oligonucleotide
tccggtgacatctcccgactcgactgccgtccattctcccacaggacctg

SEQ ID NO: 196614 - DNA, 50 bp, Artificial
  Synthetic oligonucleotide
cggttgactccgcaagatcaggagtcgtgctccaggcaccaacaggccgc

SEQ ID NO: 196615 - DNA, 50 bp, Artificial
  Synthetic oligonucleotide
tccggcataagcaccgactgcaagtgcacccccaatatgctctgcgtcga

SEQ ID NO: 196616 - DNA, 50 bp, Artificial
  Synthetic oligonucleotide
aagcccaacaagaagtcacgcaggggcccgaagtcactagagcccgtctg

SEQ ID NO: 196617 - DNA, 50 bp, Artificial
  Synthetic oligonucleotide
tgctgcctgagccgcctgggttaagctcgcatcctgccagggtgccttgg

SEQ ID NO: 196618 - DNA, 50 bp, Artificial
  Synthetic oligonucleotide
cggaggaattaccgccggctttggcagtcccgctccctgttaccgtaggg

SEQ ID NO: 196619 - DNA, 50 bp, Artificial
  Synthetic oligonucleotide
ccggagcgtgaaagtcccggaagcgttgcgattccctgtgcgattccgac

SEQ ID NO: 196620 - DNA, 57 bp, Artificial
  Synthetic oligonucleotide
taagcttgtgccgccatacagtgaggagtcaaagccgggaccgaatcagacatcggg

SEQ ID NO: 196621 - DNA, 50 bp, Artificial
  Synthetic oligonucleotide
aagccgccgtaggacgtaagatgttttcggtcccgcgataggaaggggcg

SEQ ID NO: 196622 - DNA, 50 bp, Artificial
  Synthetic oligonucleotide
tgcagggatccttacaggggacactctcgctcggataaacacgcagcggt

SEQ ID NO: 196623 - DNA, 50 bp, Artificial
  Synthetic oligonucleotide
tgcactgctagatgctactgcagggggaacggaggctcctgccggattgg

SEQ ID NO: 196624 - DNA, 50 bp, Artificial
  Synthetic oligonucleotide
tgcaccgcccggagccagggtaagacggatcggttccatcatattgcgct

SEQ ID NO: 196625 - DNA, 50 bp, Artificial
  Synthetic oligonucleotide
aagcgaggtgaggtcgggtcgaagaccacatattcgccgccctcccagtc

SEQ ID NO: 196626 - DNA, 50 bp, Artificial
  Synthetic oligonucleotide
cggattttaagcgaatcttgaagcccctttatgaaaagtattgtagggac

SEQ ID NO: 196627 - DNA, 50 bp, Artificial
  Synthetic oligonucleotide
ccgcctgatgggtacgaccgtttacgataccgcagagccactccgcgagg

SEQ ID NO: 196628 - DNA, 50 bp, Artificial
  Synthetic oligonucleotide
tgatacgccctcctgctgcctgttacgtgttgtgtcatttacgcacaaaa

SEQ ID NO: 196629 - DNA, 50 bp, Artificial
  Synthetic oligonucleotide
tgataatggcaacgagcctaaggattaagccaccttgaccaaaacggaat

SEQ ID NO: 196630 - DNA, 50 bp, Artificial
  Synthetic oligonucleotide
aagcgcgagtgcgttacctggttcaacaccgggctagcctttggggcatt

SEQ ID NO: 196631 - DNA, 57 bp, Artificial
  Synthetic oligonucleotide
cggttcttcctatacgcttcgcttcacagctacggtcagcggcttttccggaggcta

SEQ ID NO: 196632 - DNA, 50 bp, Artificial
  Synthetic oligonucleotide
cggctcatattggcgcccctcacaaagtcaacctggcctcccaccccgct

SEQ ID NO: 196633 - DNA, 50 bp, Artificial
  Synthetic oligonucleotide
ccgcctctgccgtaaactgtacgcattctcccgctttgacacgggcgcat

SEQ ID NO: 196634 - DNA, 50 bp, Artificial
  Synthetic oligonucleotide
tgaccgcctttataggggcacggtaacttctgctacctactgtaattccc

SEQ ID NO: 196635 - DNA, 50 bp, Artificial
  Synthetic oligonucleotide
ccgccgtactgggaattgcccctgtcgcctcttggctgacgggaacctct

SEQ ID NO: 196636 - DNA, 50 bp, Artificial
  Synthetic oligonucleotide
tgacacccgcgaacgatgttgaggcgtggtacgaaacaaacccgtcgtta

SEQ ID NO: 196637 - DNA, 50 bp, Artificial
  Synthetic oligonucleotide
ccgcactgcacccacgatccccgcacagaggattggtcacgtcacatgcg

SEQ ID NO: 196638 - DNA, 50 bp, Artificial
  Synthetic oligonucleotide
ccgcaagatcaggagtcgtgctccaggcaccaacaggccgcggatatgtg

SEQ ID NO: 196639 - DNA, 50 bp, Artificial
  Synthetic oligonucleotide
aagctttcctcgcagcgaagcgcacagagggcgggaaccagcggtacgat

SEQ ID NO: 196640 - DNA, 50 bp, Artificial
  Synthetic oligonucleotide
cgggaggcagggaaaggatcggcctttcgtatgaacctggatgcggagcg

SEQ ID NO: 196641 - DNA, 50 bp, Artificial
  Synthetic oligonucleotide
ccgcaacggctaaggcagaggcctccgcaacgcccttgtttcttaaagcg

SEQ ID NO: 196642 - DNA, 57 bp, Artificial
  Synthetic oligonucleotide
caccgtttctgtcgcggtaagcggtgtctgagccgtagctgcagatttcggtccaag

SEQ ID NO: 196643 - DNA, 50 bp, Artificial
  Synthetic oligonucleotide
aaggcaggttatgtgcggagcaccagaggaccgcagggcggttattcgct

SEQ ID NO: 196644 - DNA, 50 bp, Artificial
  Synthetic oligonucleotide
aaggcccctttacggtaacggtttcgcgtgttccgccgacagccgtcaga

SEQ ID NO: 196645 - DNA, 50 bp, Artificial
  Synthetic oligonucleotide
ccgatgcgagcagacttgccttggaaccaccgatcagccgtacgccttcc

SEQ ID NO: 196646 - DNA, 50 bp, Artificial
  Synthetic oligonucleotide
aggctatgcacgaaaaagacggtcacgaggcttccgtagggagctgcgct

SEQ ID NO: 196647 - DNA, 50 bp, Artificial
  Synthetic oligonucleotide
aggcttcttgtttccgcagcaatagccgcgcccacctcctgtgtcagtcc

SEQ ID NO: 196648 - DNA, 50 bp, Artificial
  Synthetic oligonucleotide
aggctttcgggggtatccgggtgtgacagggaacgtatgcggagaaccta

SEQ ID NO: 196649 - DNA, 50 bp, Artificial
  Synthetic oligonucleotide
atggagtgcatgattccgacctccggcgtctatcccatcgccacggcaaa

SEQ ID NO: 196650 - DNA, 50 bp, Artificial
  Synthetic oligonucleotide
gacgggatcgtattgagacgtgccggaacactggcggaactttccggggc

SEQ ID NO: 196651 - DNA, 50 bp, Artificial
  Synthetic oligonucleotide
agggactttccaaggaagaggcgggactgcgggcgtttgaggcactgcgc

SEQ ID NO: 196652 - DNA, 50 bp, Artificial
  Synthetic oligonucleotide
gacggtttcgggagctcatcggaatgcccagtgcaacggaacccgtaccc

SEQ ID NO: 196653 - DNA, 57 bp, Artificial
  Synthetic oligonucleotide
acacaatatccggtcctgccaggagctggttgcttccgcgctctaacgtcaggacta

SEQ ID NO: 196654 - DNA, 50 bp, Artificial
  Synthetic oligonucleotide
gacgtcccctccattcggaccgctccggttgcgatcaccaaatctcctcc

SEQ ID NO: 196655 - DNA, 50 bp, Artificial
  Synthetic oligonucleotide
gctccgtgtccccgtcctgtaccttcgcaagtgtcagcagtccggtcata

SEQ ID NO: 196656 - DNA, 50 bp, Artificial
  Synthetic oligonucleotide
agggatcggtctgccggaatactgacgcacggagtgacgcacgcgaattg

SEQ ID NO: 196657 - DNA, 50 bp, Artificial
  Synthetic oligonucleotide
gacgtccctgtgctcctcccggacagtcagagtgactctgcctccgtgct

SEQ ID NO: 196658 - DNA, 50 bp, Artificial
  Synthetic oligonucleotide
agggccaatcgtcacgccaggattgaccaccacattgccacctagccagc

SEQ ID NO: 196659 - DNA, 50 bp, Artificial
  Synthetic oligonucleotide
agggccatcggctggttttcgctcgcgctctctgaccttctgggcctgat

SEQ ID NO: 196660 - DNA, 50 bp, Artificial
  Synthetic oligonucleotide
agggcgcatcaggaggcgtggtatgaggcggatcatgagagaccctggaa

SEQ ID NO: 196661 - DNA, 50 bp, Artificial
  Synthetic oligonucleotide
atggacacgccccatactcggctaccatgccacgctttaaccgcggaact

SEQ ID NO: 196662 - DNA, 50 bp, Artificial
  Synthetic oligonucleotide
aggggcacacgctgtttgtccacgcaaaggacggcatctgtgaaacctcc

SEQ ID NO: 196663 - DNA, 50 bp, Artificial
  Synthetic oligonucleotide
agggggatgtctgtaagcccgaaccagatcatagtcggcgcgggaacgga

SEQ ID NO: 196664 - DNA, 60 bp, Artificial
  Synthetic oligonucleotide
tctacacttgttccgtattgcatagcccaatatctcatggcctcctcattgcatattact

SEQ ID NO: 196665 - DNA, 57 bp, Artificial
  Synthetic oligonucleotide
cttcaatcgtctctatctgaataccacatatctttccggtaataagagccgcacgct

SEQ ID NO: 196666 - DNA, 50 bp, Artificial
  Synthetic oligonucleotide
aggggtcgttcccgaaccttagcgagtgcaagcgtaagcgcagcacgagg

SEQ ID NO: 196667 - DNA, 50 bp, Artificial
  Synthetic oligonucleotide
agggtatcccgtccgggcgtctgctgaaagacagggcggaacatgaatcg

SEQ ID NO: 196668 - DNA, 50 bp, Artificial
  Synthetic oligonucleotide
gcggccgttcccagcctgtcataggcggtctttgccttcgcatctcgtat

SEQ ID NO: 196669 - DNA, 50 bp, Artificial
  Synthetic oligonucleotide
agggttccacggtagtagcagcgggaagcggtacagtggaagtggcagga

SEQ ID NO: 196670 - DNA, 50 bp, Artificial
  Synthetic oligonucleotide
gcggcatttgacggttccggacattcggtagcatccatgcgtgcgctgtc

SEQ ID NO: 196671 - DNA, 50 bp, Artificial
  Synthetic oligonucleotide
aggtgcttaaagataatccgaccggagcctgctcccaaggccttcgccgc

SEQ ID NO: 196672 - DNA, 50 bp, Artificial
  Synthetic oligonucleotide
gcggaatgcggcgaagtgggatatcgccctgtcccggcctttcccccgtt

SEQ ID NO: 196673 - DNA, 50 bp, Artificial
  Synthetic oligonucleotide
agctagtgggcaagtcctggtatcccaccaaccgtcgcatgctgctagcg

SEQ ID NO: 196674 - DNA, 50 bp, Artificial
  Synthetic oligonucleotide
agctcccagttgcgccaataagattcacaccccggatggtccccgttgcc

SEQ ID NO: 196675 - DNA, 50 bp, Artificial
  Synthetic oligonucleotide
attccgtttggggaggtgtcgatggatgagtacgggcggctgctcccctg

SEQ ID NO: 196676 - DNA, 53 bp, Artificial
  Synthetic oligonucleotide
gaaactgcctttatgctttcccacataaaaaatcccgggtattttttgtatgc

SEQ ID NO: 196677 - DNA, 50 bp, Artificial
  Synthetic oligonucleotide
ggagcactggcaccgggcttttcccattcgattgcgttcctcggaacctt

SEQ ID NO: 196678 - DNA, 50 bp, Artificial
  Synthetic oligonucleotide
agctcctctactccctggtaaagccgaggtatgcgatcccggtccacggg

SEQ ID NO: 196679 - DNA, 50 bp, Artificial
  Synthetic oligonucleotide
attccctgaactatgcctccctccgcctgaacacgtgccagtgccggatt

SEQ ID NO: 196680 - DNA, 50 bp, Artificial
  Synthetic oligonucleotide
agctgcccatacgccagctccaccgtactgcgcgccacctggagatattc

SEQ ID NO: 196681 - DNA, 50 bp, Artificial
  Synthetic oligonucleotide
agctgccggacggtctcaatatattcctcctgcctggcacgcctgagctc

SEQ ID NO: 196682 - DNA, 50 bp, Artificial
  Synthetic oligonucleotide
aggaacacggcggtctacgggaagactgcaccggaggattacccggacgc

SEQ ID NO: 196683 - DNA, 50 bp, Artificial
  Synthetic oligonucleotide
atgttggccggagagagccttaataccgacagggagggtcctgtgggccg

SEQ ID NO: 196684 - DNA, 50 bp, Artificial
  Synthetic oligonucleotide
atgtgaattctggagccgtccttccatcgggtgtccgcaatcggcctgga

SEQ ID NO: 196685 - DNA, 50 bp, Artificial
  Synthetic oligonucleotide
gacagctgtccgcacgcccaaaggtgatcctccggacgtgggcactcgct

SEQ ID NO: 196686 - DNA, 50 bp, Artificial
  Synthetic oligonucleotide
aggatatccccagccaccctgtcgctcgcacggcagatcccctgacgaag

SEQ ID NO: 196687 - DNA, 56 bp, Artificial
  Synthetic oligonucleotide
ttgggagtgggcggtataacaaaaatacaggctgcggaggctatgagggcagccgc

SEQ ID NO: 196688 - DNA, 50 bp, Artificial
  Synthetic oligonucleotide
aggatctgctgctccgtgaaggagcgaagctccctcccctcgtgccaggc

SEQ ID NO: 196689 - DNA, 50 bp, Artificial
  Synthetic oligonucleotide
atgtatccggagcggtatgtgggtcagtgtctctcgcttgcaccggggga

SEQ ID NO: 196690 - DNA, 50 bp, Artificial
  Synthetic oligonucleotide
atgtacgctgacagaggagttcccctcgcatcacaggggtggcaaaggcg

SEQ ID NO: 196691 - DNA, 50 bp, Artificial
  Synthetic oligonucleotide
gaccatccgctgacacccgaagcctgtccctccgcactcttatctgtgcc

SEQ ID NO: 196692 - DNA, 50 bp, Artificial
  Synthetic oligonucleotide
aggcagagtcggagagcaagatggtagtgcgcctgcataccggggagcca

SEQ ID NO: 196693 - DNA, 50 bp, Artificial
  Synthetic oligonucleotide
aggcagggctctgatagcggtataagagaaacataaagagtagggccagt

SEQ ID NO: 196694 - DNA, 50 bp, Artificial
  Synthetic oligonucleotide
aggcattcaaggcgctagccaaaccgggacgcctaacttcacaccgggga

SEQ ID NO: 196695 - DNA, 50 bp, Artificial
  Synthetic oligonucleotide
atggctaccggctgtcccccaagagcaatagattcctccgccagagcggt

SEQ ID NO: 196696 - DNA, 50 bp, Artificial
  Synthetic oligonucleotide
aggcgctgagaatggaaagcccgatggggtgggtggaaccattttccgcc

SEQ ID NO: 196697 - DNA, 50 bp, Artificial
  Synthetic oligonucleotide
atggccggtccgttcagctgtggtattaccttgcccccaaaccgtggcaa

SEQ ID NO: 196698 - DNA, 56 bp, Artificial
  Synthetic oligonucleotide
gcttatgccaggtttatgtattacgattagtacaatttagtgctcgtttcaacgac

SEQ ID NO: 196699 - DNA, 50 bp, Artificial
  Synthetic oligonucleotide
aggcgggagggataagagatgcggatgacactgcgttggtacgggccggg

SEQ ID NO: 196700 - DNA, 50 bp, Artificial
  Synthetic oligonucleotide
aggctagggaggtaccattaggcaggctgaaggcatgtgtgccgcagtcc

SEQ ID NO: 196701 - DNA, 50 bp, Artificial
  Synthetic oligonucleotide
atctcagtccgcctgcaccactctgggagatccgcctcctgatacccgac

SEQ ID NO: 196702 - DNA, 50 bp, Artificial
  Synthetic oligonucleotide
gcccctatgcttatgcaccccttcgggcacgcattctggcacgggttgca

SEQ ID NO: 196703 - DNA, 50 bp, Artificial
  Synthetic oligonucleotide
gcccagctgtattgttatcccgcgacggtgcagggacaatatgccgcggc

SEQ ID NO: 196704 - DNA, 50 bp, Artificial
  Synthetic oligonucleotide
gagtgccgactccagaggttcatctcccgcctgtatgtgccccgccgatg

SEQ ID NO: 196705 - DNA, 50 bp, Artificial
  Synthetic oligonucleotide
ataggccacccggcggtccttaggatccactcggcgtaccacaaagccct

SEQ ID NO: 196706 - DNA, 50 bp, Artificial
  Synthetic oligonucleotide
atctagggccgtaccctcatccgtggataggccgatgtcaccgcctgcag

SEQ ID NO: 196707 - DNA, 50 bp, Artificial
  Synthetic oligonucleotide
gccataccagattcacgctatagaatccatgagggaagcctcaaagcgtg

SEQ ID NO: 196708 - DNA, 50 bp, Artificial
  Synthetic oligonucleotide
atcggctcctcgataatcgccacctcacgcgcacctgcagaataggtcgc

SEQ ID NO: 196709 - DNA, 56 bp, Artificial
  Synthetic oligonucleotide
gtccgttgagggcacctgctaatacgagcagagttgcaggctgtccgatgagagcc

SEQ ID NO: 196710 - DNA, 50 bp, Artificial
  Synthetic oligonucleotide
gccaacggttccgcatcctcctgtgccaaggcggtatttgatgccctggg

SEQ ID NO: 196711 - DNA, 50 bp, Artificial
  Synthetic oligonucleotide
gccaaatggtctcctgacaacgaatactcgatggaagctttgaatgcgag

SEQ ID NO: 196712 - DNA, 50 bp, Artificial
  Synthetic oligonucleotide
gcattctcacgcctgtggcggtcgcttgcgccaacttccttatccgtcgc

SEQ ID NO: 196713 - DNA, 50 bp, Artificial
  Synthetic oligonucleotide
atcgccgtaacaaccaagggaccaaccgcgggagtgggaacttgcgtggt

SEQ ID NO: 196714 - DNA, 50 bp, Artificial
  Synthetic oligonucleotide
gcagtggcctaaggccgacgatgtcttccctttgccctggccgcagtaaa

SEQ ID NO: 196715 - DNA, 50 bp, Artificial
  Synthetic oligonucleotide
gcagtcggaatgtcggtcatgctgtgtgcgatccctgtctgcgcggcgga

SEQ ID NO: 196716 - DNA, 50 bp, Artificial
  Synthetic oligonucleotide
atcgccgggactgtgctgggaggcgcgtttgagtatctctgcagcgtttt

SEQ ID NO: 196717 - DNA, 50 bp, Artificial
  Synthetic oligonucleotide
atcgcaagcgacgccttgtgcaggtatccgctgcgcgctctctgcagtcc

SEQ ID NO: 196718 - DNA, 50 bp, Artificial
  Synthetic oligonucleotide
gatccagaggggaggatgcgctgtgcggactgccttccgtcagctttcac

SEQ ID NO: 196719 - DNA, 50 bp, Artificial
  Synthetic oligonucleotide
atcactgcccctgtccttagtggaggcggcaagaatcgacggctcaggcg

SEQ ID NO: 196720 - DNA, 54 bp, Artificial
  Synthetic oligonucleotide
ggagcggaaccacgtaggatagtcaccctctctcagttccgcccaaacaacccg

SEQ ID NO: 196721 - DNA, 50 bp, Artificial
  Synthetic oligonucleotide
atccagccttgcagtcaaacggcgctctgatctctccccgtgtggctcga

SEQ ID NO: 196722 - DNA, 50 bp, Artificial
  Synthetic oligonucleotide
atcgacccaagcgttgaaggggaatacaccgttaccctgcgggctcgcga

SEQ ID NO: 196723 - DNA, 50 bp, Artificial
  Synthetic oligonucleotide
atccgcagtcggcggatttcacattttacggcggcctgtaccggggagtg

SEQ ID NO: 196724 - DNA, 50 bp, Artificial
  Synthetic oligonucleotide
gatcccaggaccatccgctgacacccgaagcctgtccctccgcactctta

SEQ ID NO: 196725 - DNA, 50 bp, Artificial
  Synthetic oligonucleotide
atccgtgttctcgagatcgggtgtgactgcggggcaaatctgctcggggt

SEQ ID NO: 196726 - DNA, 50 bp, Artificial
  Synthetic oligonucleotide
gcaacgaccggcggtacaagtgaccagaccgtcgcatacagatccggcac

SEQ ID NO: 196727 - DNA, 50 bp, Artificial
  Synthetic oligonucleotide
atccgtctgcatgcccccacatgtgcccacgcggataaatgtgtgtgcac

SEQ ID NO: 196728 - DNA, 50 bp, Artificial
  Synthetic oligonucleotide
gatgtaagcgcataagcacgaatgcaacaaagggaatgtgcgcctgcgta

SEQ ID NO: 196729 - DNA, 50 bp, Artificial
  Synthetic oligonucleotide
atgctgtgtgcgatccctgtctgcgcggcggaggaaaatggtgcatcctc

SEQ ID NO: 196730 - DNA, 50 bp, Artificial
  Synthetic oligonucleotide
aggttcccgttcccgaagcgtctccgctccatgtatcagtgccgcctccc

SEQ ID NO: 196731 - DNA, 52 bp, Artificial
  Synthetic oligonucleotide
ctttttaacctacagcccgaggatatctgaaaagccttgttaaacgcctaat

SEQ ID NO: 196732 - DNA, 50 bp, Artificial
  Synthetic oligonucleotide
aggttgaccgggtctgctgcgttgatatgttccccggcagcgttcacgta

SEQ ID NO: 196733 - DNA, 50 bp, Artificial
  Synthetic oligonucleotide
atgctggctgttgtgcggtccggctatgagaagggaaccgccatactgcg

SEQ ID NO: 196734 - DNA, 50 bp, Artificial
  Synthetic oligonucleotide
agtaccattgcaggggatacggataattcgtctaatcccatgcttaagaa

SEQ ID NO: 196735 - DNA, 50 bp, Artificial
  Synthetic oligonucleotide
atgccgtggccgtgtccatagacttccacaccgggaatagcctgtaggcc

SEQ ID NO: 196736 - DNA, 50 bp, Artificial
  Synthetic oligonucleotide
agtagtcgatagtagttaattggtagtcagttaagggggtgcagactact

SEQ ID NO: 196737 - DNA, 50 bp, Artificial
  Synthetic oligonucleotide
agtatgccagagccgtccgtgatttccccgaaccgactccgccgcataga

SEQ ID NO: 196738 - DNA, 50 bp, Artificial
  Synthetic oligonucleotide
atgccgtccgttttcgtcggaaacagcgcccgtatagccgggaccagcac

SEQ ID NO: 196739 - DNA, 50 bp, Artificial
  Synthetic oligonucleotide
atgccggggcaagacaggtgtacgcggtgggacattaccacgccatgtgc

SEQ ID NO: 196740 - DNA, 50 bp, Artificial
  Synthetic oligonucleotide
atgcccgcctcagtaagtcactggcccgcattgtccaagatgcgccactg

SEQ ID NO: 196741 - DNA, 50 bp, Artificial
  Synthetic oligonucleotide
gcgaatatcttcccagcggcatgtggagcgtaatgagtgatgcggtacag

SEQ ID NO: 196742 - DNA, 55 bp, Artificial
  Synthetic oligonucleotide
cactgttcacatcctatggcggatatgtaggtaacaacaggcagtaggaggcata

SEQ ID NO: 196743 - DNA, 50 bp, Artificial
  Synthetic oligonucleotide
gcgaagagtcccctgcctgcggtgtctcctgctttcagcgggatatgccg

SEQ ID NO: 196744 - DNA, 50 bp, Artificial
  Synthetic oligonucleotide
atgccagctgcgttcacggtctaagacagggagggctaccccacgaatga

SEQ ID NO: 196745 - DNA, 50 bp, Artificial
  Synthetic oligonucleotide
agtggccgcaagagatgttcaatcccgtccgttagctccaggggcgccgt

SEQ ID NO: 196746 - DNA, 50 bp, Artificial
  Synthetic oligonucleotide
gcctgcgggggtgtgtggcggagtgacgtgtgcgtcctaaatgtgccatc

SEQ ID NO: 196747 - DNA, 50 bp, Artificial
  Synthetic oligonucleotide
gaggataacgcgttccgcctctcgcatctgctccggattcgggaactccg

SEQ ID NO: 196748 - DNA, 50 bp, Artificial
  Synthetic oligonucleotide
atgacccatccggctgccattttactgaccgccatgcagctttagggggc

SEQ ID NO: 196749 - DNA, 50 bp, Artificial
  Synthetic oligonucleotide
gccggctcccgaaacagaggaaagatgggcgattcatcgtccggctcctt

SEQ ID NO: 196750 - DNA, 50 bp, Artificial
  Synthetic oligonucleotide
ataacccagatcgccaggacagaatagaagggggccacggccgatccgta

SEQ ID NO: 196751 - DNA, 50 bp, Artificial
  Synthetic oligonucleotide
atctcgtgattgacagtgcgggcgctgccaaggaaagcgtccctggtgta

SEQ ID NO: 196752 - DNA, 50 bp, Artificial
  Synthetic oligonucleotide
atctcgcagccggatcccatcgtccctcttgctgtcaccggcgatagcgc

SEQ ID NO: 196753 - DNA, 55 bp, Artificial
  Synthetic oligonucleotide
cactgccaacgtctttatcttcataatgcttcgcccgtacatatgtggcactcac

SEQ ID NO: 196754 - DNA, 50 bp, Artificial
  Synthetic oligonucleotide
atacgctccggtcggttccaacgccccgatcgctcccattggagacagca

SEQ ID NO: 196755 - DNA, 50 bp, Artificial
  Synthetic oligonucleotide
atactccttggacgtcccctccattcggaccgctccggttgcgatcacca

SEQ ID NO: 196756 - DNA, 50 bp, Artificial
  Synthetic oligonucleotide
gccgaggtgtaagcagcaacgcccttatcgctgctggaaccgagtgcata

SEQ ID NO: 196757 - DNA, 50 bp, Artificial
  Synthetic oligonucleotide
atagccgccgcaggaaaccacacaatagaagtttccgctcccgccgctta

SEQ ID NO: 196758 - DNA, 50 bp, Artificial
  Synthetic oligonucleotide
agaacggcagagcttcgcatcgtccggcgcttatgtccggagtgcttcac

SEQ ID NO: 196759 - DNA, 50 bp, Artificial
  Synthetic oligonucleotide
ctgtgtccggtcgtggcattttccgtccctgcttgagggtccggtgcctc

SEQ ID NO: 196760 - DNA, 50 bp, Artificial
  Synthetic oligonucleotide
agaatcaccccttacgggggcggaacctgggccatcgtaaaaagcgacgg

SEQ ID NO: 196761 - DNA, 50 bp, Artificial
  Synthetic oligonucleotide
agacaaagtggctcaagagggctaggcgttgggccggacagaccaggtta

SEQ ID NO: 196762 - DNA, 50 bp, Artificial
  Synthetic oligonucleotide
agacagcggacaatgcttccgaccgcgtcgcctttcctccggactgtacc

SEQ ID NO: 196763 - DNA, 50 bp, Artificial
  Synthetic oligonucleotide
agaccagttcaacccggtgcgccagcggagaccagaggcgaaaacaggtc

SEQ ID NO: 196764 - DNA, 55 bp, Artificial
  Synthetic oligonucleotide
cactggggacgggaggcaacaatacgccgcttgctgttcatggagaaccctactg

SEQ ID NO: 196765 - DNA, 50 bp, Artificial
  Synthetic oligonucleotide
agaccgccggaataaggcatgagctcagcgacgacctgaaccttcgcccc

SEQ ID NO: 196766 - DNA, 50 bp, Artificial
  Synthetic oligonucleotide
agacgttccacacatgccgagtgggtatcaggtggctctcgcgcaatggc

SEQ ID NO: 196767 - DNA, 50 bp, Artificial
  Synthetic oligonucleotide
ctgttggatttgtcggaaacctgcccctgtccgcgctagcggacccatta

SEQ ID NO: 196768 - DNA, 50 bp, Artificial
  Synthetic oligonucleotide
agactctccgagcacccgaaccgcatactccgggttggcatagctccccc

SEQ ID NO: 196769 - DNA, 50 bp, Artificial
  Synthetic oligonucleotide
cacctgttccgagtctgctcccttttggggcgcacagacatgggccgctc

SEQ ID NO: 196770 - DNA, 50 bp, Artificial
  Synthetic oligonucleotide
cacccacggggcattctgttccacactgcggaaccagaaccgcaggcagt

SEQ ID NO: 196771 - DNA, 50 bp, Artificial
  Synthetic oligonucleotide
gtaaccgtatgactattttacgtgatgggaaaaccatgggtacttatgag

SEQ ID NO: 196772 - DNA, 50 bp, Artificial
  Synthetic oligonucleotide
caccagagtcacccgggagttccccatagagcgaaagagggccgcattgc

SEQ ID NO: 196773 - DNA, 50 bp, Artificial
  Synthetic oligonucleotide
agagcgctgaagctgtcatgccactccggatgaacctccttctgagcgga

SEQ ID NO: 196774 - DNA, 50 bp, Artificial
  Synthetic oligonucleotide
agaggacgcaatctaaggaccggcgtttttacaaggcctttgcaggggat

SEQ ID NO: 196775 - DNA, 60 bp, Artificial
  Synthetic oligonucleotide
agtgccacctccgatatccaggttcgccacaagtccaccgcatatttctgagagcttcgc

SEQ ID NO: 196776 - DNA, 55 bp, Artificial
  Synthetic oligonucleotide
ctgtcttccgcggcggcgttttgtcctcagccgaaatttgcggtttatgcggcga

SEQ ID NO: 196777 - DNA, 50 bp, Artificial
  Synthetic oligonucleotide
agagtccccaccggaaaggccgtgcagtactgataaacgatgcgctccgc

SEQ ID NO: 196778 - DNA, 50 bp, Artificial
  Synthetic oligonucleotide
agatccgaagctccgggtccctcgctatgacatcgactgcctgtctcccg

SEQ ID NO: 196779 - DNA, 50 bp, Artificial
  Synthetic oligonucleotide
agatccggcttccccggtagggccgcatcagagcggaattcccgaagctt

SEQ ID NO: 196780 - DNA, 50 bp, Artificial
  Synthetic oligonucleotide
agatctaggcggaagtcagccgaggtccaagccagcgactggctagctcc

SEQ ID NO: 196781 - DNA, 50 bp, Artificial
  Synthetic oligonucleotide
agatctccggacgggagacgatggaaaggccggactccttcgcggcatcc

SEQ ID NO: 196782 - DNA, 50 bp, Artificial
  Synthetic oligonucleotide
agatgaaataccggctgcaggcttcgcaccggacggaaaggaccggaggt

SEQ ID NO: 196783 - DNA, 50 bp, Artificial
  Synthetic oligonucleotide
caaggggaagaaggtaatccatacagcctcccatgctggtaataaccgta

SEQ ID NO: 196784 - DNA, 50 bp, Artificial
  Synthetic oligonucleotide
agatgcctccgttgtaagtcggcgctgcaaacaccacatggcttgcgcgg

SEQ ID NO: 196785 - DNA, 50 bp, Artificial
  Synthetic oligonucleotide
agattcgggtgtgggtcttttgatcgctgttctgcgtccaagcgccccag

SEQ ID NO: 196786 - DNA, 50 bp, Artificial
  Synthetic oligonucleotide
agcaatagccgcgcccacctcctgtgtcagtccggggtcaaaagctgcgc

SEQ ID NO: 196787 - DNA, 55 bp, Artificial
  Synthetic oligonucleotide
cacggcagggccaactatcttatagcttccgtattcatatttcatctcgccgcat

SEQ ID NO: 196788 - DNA, 50 bp, Artificial
  Synthetic oligonucleotide
gtggcggtcagatgcccgaattgtggttcgagtttccgtgcagcgactgg

SEQ ID NO: 196789 - DNA, 50 bp, Artificial
  Synthetic oligonucleotide
gtggcgaccgttactgtctcccggtaaaagccgagtaccgcagccaggta

SEQ ID NO: 196790 - DNA, 50 bp, Artificial
  Synthetic oligonucleotide
ctgcacaacggatgcgcgcctttgtatatcacaccggctacgctgcacgg

SEQ ID NO: 196791 - DNA, 50 bp, Artificial
  Synthetic oligonucleotide
cagcgcagagtccagaacggacacagacgccctgctgaagaacagcgcag

SEQ ID NO: 196792 - DNA, 50 bp, Artificial
  Synthetic oligonucleotide
gtgcctgttcactcatcggttctacgattcctgaggttccgagtaccgaa

SEQ ID NO: 196793 - DNA, 50 bp, Artificial
  Synthetic oligonucleotide
gtgccccttgggtgtatcatgtagcagtctatcccgctgtcccccgcaga

SEQ ID NO: 196794 - DNA, 50 bp, Artificial
  Synthetic oligonucleotide
acggaaagcgtggctggaactttaatgtggtaaagaccggagacagtttg

SEQ ID NO: 196795 - DNA, 50 bp, Artificial
  Synthetic oligonucleotide
acggacttggacggctaggcgatgccaggccactatcccaatcatggccg

SEQ ID NO: 196796 - DNA, 50 bp, Artificial
  Synthetic oligonucleotide
acggagacagagctccgctatcccatgctctggcgccactggcagacgat

SEQ ID NO: 196797 - DNA, 50 bp, Artificial
  Synthetic oligonucleotide
ctgcgaggcgaggttagcgggagcgtgcccctgctacaagctatactgca

SEQ ID NO: 196798 - DNA, 55 bp, Artificial
  Synthetic oligonucleotide
cactctggttaagcgatcatcaaaattgcttcggttaaattcagggaattcccgc

SEQ ID NO: 196799 - DNA, 50 bp, Artificial
  Synthetic oligonucleotide
acggctaggcgatgccaggccactatcccaatcatggccgcgactgctag

SEQ ID NO: 196800 - DNA, 50 bp, Artificial
  Synthetic oligonucleotide
acgggagacgatggaaaggccggactccttcgcggcatccggatagctct

SEQ ID NO: 196801 - DNA, 50 bp, Artificial
  Synthetic oligonucleotide
acggggaagaattcgcctgtaccacactccgccacgagcccatgcttgcc

SEQ ID NO: 196802 - DNA, 50 bp, Artificial
  Synthetic oligonucleotide
acggggtcagaggcgtcaatcctccgggccacctttaaggccctgtccgc

SEQ ID NO: 196803 - DNA, 50 bp, Artificial
  Synthetic oligonucleotide
cagcatgaattcggaaataactgtcgctcaaacaaaggcgtgacacatgg

SEQ ID NO: 196804 - DNA, 50 bp, Artificial
  Synthetic oligonucleotide
cagaggacggggaacttaagaacacggcaaaggagttcctgcttgcaagg

SEQ ID NO: 196805 - DNA, 50 bp, Artificial
  Synthetic oligonucleotide
cacttccgtgactcctgagggcacgcatacggaaatgcggggcttgcgat

SEQ ID NO: 196806 - DNA, 50 bp, Artificial
  Synthetic oligonucleotide
acggtgttctgtggggagcggctatctcggacacactggcgtgcgttacg

SEQ ID NO: 196807 - DNA, 50 bp, Artificial
  Synthetic oligonucleotide
acgtatccatagacgccccggacggagacctcccccgccgatacgagtct

SEQ ID NO: 196808 - DNA, 50 bp, Artificial
  Synthetic oligonucleotide
acgtgagtagcccactttgcacggccgaatagcccacctgtcacggccat

SEQ ID NO: 196809 - DNA, 55 bp, Artificial
  Synthetic oligonucleotide
cacggagtatatggtgaaagcggtagagacattttatgcatcgcatatacaggct

SEQ ID NO: 196810 - DNA, 50 bp, Artificial
  Synthetic oligonucleotide
cactgtttcgagtctgccttctatggcccccagctgccgggtgatcggac

SEQ ID NO: 196811 - DNA, 50 bp, Artificial
  Synthetic oligonucleotide
ctggagcctttaaccgcccgccactctccctcgaatgtctttccgcctgc

SEQ ID NO: 196812 - DNA, 50 bp, Artificial
  Synthetic oligonucleotide
actatcggaacaccggccgcgcttaccgcccacggctgccctgtgtttca

SEQ ID NO: 196813 - DNA, 50 bp, Artificial
  Synthetic oligonucleotide
ctgggatttcgaggccagggagacagacccttctgggcggatgatcctgc

SEQ ID NO: 196814 - DNA, 50 bp, Artificial
  Synthetic oligonucleotide
actgcgcccctcatggattccgccggatggatcttcaaaatgccccggac

SEQ ID NO: 196815 - DNA, 50 bp, Artificial
  Synthetic oligonucleotide
ctgtccgtgatctggatgctccaagactcctgcggcacgtctcctgtgcc

SEQ ID NO: 196816 - DNA, 50 bp, Artificial
  Synthetic oligonucleotide
agccgggaagcgtgctgctcagtgtgctcccgattcatcatgcattctgc

SEQ ID NO: 196817 - DNA, 50 bp, Artificial
  Synthetic oligonucleotide
gggaacctctcagccgtccacggacgtcatggttgccgctttacagggaa

SEQ ID NO: 196818 - DNA, 50 bp, Artificial
  Synthetic oligonucleotide
agcctccgcagggcgattgcgccccctccgaccatcaaaatcctgaaatg

SEQ ID NO: 196819 - DNA, 50 bp, Artificial
  Synthetic oligonucleotide
ggctgtcgccacggcagcccccttctcatccacacttctgatgacctccg

SEQ ID NO: 196820 - DNA, 55 bp, Artificial
  Synthetic oligonucleotide
ctggggatacctacagtagtcgacagagttattcaacaggcaatcgcacaggaat

SEQ ID NO: 196821 - DNA, 50 bp, Artificial
  Synthetic oligonucleotide
ggctgtccacctctctgggtgtgtccgggaacggttactctgacctcggc

SEQ ID NO: 196822 - DNA, 50 bp, Artificial
  Synthetic oligonucleotide
attggacacgctgccccggatctgatgcgtagctgcatgcctgctcacag

SEQ ID NO: 196823 - DNA, 50 bp, Artificial
  Synthetic oligonucleotide
agcgaaattatccgcgtgctccgaaacaggccccgcatattttgcgccgc

SEQ ID NO: 196824 - DNA, 50 bp, Artificial
  Synthetic oligonucleotide
agcgaagacaggctaaagccttcccggcccccgacttgatagcggctagc

SEQ ID NO: 196825 - DNA, 50 bp, Artificial
  Synthetic oligonucleotide
agcgagacgtcaaggcaccctctccgtctcaccacacaagccagcctctc

SEQ ID NO: 196826 - DNA, 50 bp, Artificial
  Synthetic oligonucleotide
agcgccacttgaggtggggagcttcttgcagcaccccctttatgcggctc

SEQ ID NO: 196827 - DNA, 50 bp, Artificial
  Synthetic oligonucleotide
gaagggcagctccacaatctgacaaccctccgttcggcatcaccccagct

SEQ ID NO: 196828 - DNA, 50 bp, Artificial
  Synthetic oligonucleotide
ggcgaactcagtatagtcgagggcgaaaggctggttgccgcggagcggat

SEQ ID NO: 196829 - DNA, 50 bp, Artificial
  Synthetic oligonucleotide
agcgcctgtttcgaagaaaatctgggcgtcccctgtccatccaagccgct

SEQ ID NO: 196830 - DNA, 50 bp, Artificial
  Synthetic oligonucleotide
agcgctaacgttcccggcatcactccggaatccgcctttacggacggata

SEQ ID NO: 196831 - DNA, 55 bp, Artificial
  Synthetic oligonucleotide
ctctcttagccatccaaaaggttgaaccaatggcgataggaaatactaactcgcc

SEQ ID NO: 196832 - DNA, 50 bp, Artificial
  Synthetic oligonucleotide
ggcccggcattcattgcgggaagtatcgatgcagcagtgctctgggagcc

SEQ ID NO: 196833 - DNA, 50 bp, Artificial
  Synthetic oligonucleotide
agcggaaagcgcagggaatgccgggggagactgctttcgcagagcaggaa

SEQ ID NO: 196834 - DNA, 50 bp, Artificial
  Synthetic oligonucleotide
agcggcaaagaatctcggctaccggaaacttgcgattgccgggggagtgg

SEQ ID NO: 196835 - DNA, 50 bp, Artificial
  Synthetic oligonucleotide
agcgggcggaagccgtaaggatctctggctcctatgagcttgcggggaga

SEQ ID NO: 196836 - DNA, 50 bp, Artificial
  Synthetic oligonucleotide
agcggggaacggggaggggctggtatccgggagtaaagacagcctcgact

SEQ ID NO: 196837 - DNA, 50 bp, Artificial
  Synthetic oligonucleotide
attgactgcctggaacaagcgcacagacgacagtgccagaagaggggccc

SEQ ID NO: 196838 - DNA, 50 bp, Artificial
  Synthetic oligonucleotide
attctgccacgtcttccctgcgcatcagctctccttgctcccggatcagc

SEQ ID NO: 196839 - DNA, 50 bp, Artificial
  Synthetic oligonucleotide
ggatcatcagcgtgtatcactctggcagaaaagatctcgtattgtctcat

SEQ ID NO: 196840 - DNA, 50 bp, Artificial
  Synthetic oligonucleotide
agcggtcatctgtcgcccgagctgattgacgcccgtagccgccaggccag

SEQ ID NO: 196841 - DNA, 50 bp, Artificial
  Synthetic oligonucleotide
agcgttaccatagactgccgcaccccctgttaaaggtccctgtgcaccga

SEQ ID NO: 196842 - DNA, 55 bp, Artificial
  Synthetic oligonucleotide
ctctgaatattccttaaggggttcacatctgtccattaagatgcaatccaccagg

SEQ ID NO: 196843 - DNA, 50 bp, Artificial
  Synthetic oligonucleotide
agcgttgaaggggaatacaccgttaccctgcgggctcgcgacagtcagga

SEQ ID NO: 196844 - DNA, 50 bp, Artificial
  Synthetic oligonucleotide
agcacaccgtgtccgcaagtcctttcaggtacgcgaccctgtgctccgca

SEQ ID NO: 196845 - DNA, 50 bp, Artificial
  Synthetic oligonucleotide
agcagagggggcggatcagactcacccataacggcagagagttccccaga

SEQ ID NO: 196846 - DNA, 50 bp, Artificial
  Synthetic oligonucleotide
agcagggccgcggaggtctttacactgtctgcggtttcgacctgttccct

SEQ ID NO: 196847 - DNA, 50 bp, Artificial
  Synthetic oligonucleotide
agcaggggtgaccggttacctggtcatgaaagccaccatcggcgccttag

SEQ ID NO: 196848 - DNA, 50 bp, Artificial
  Synthetic oligonucleotide
agcatagcgccagtccagattcagtccgatctccgtggacgcaaaggccc

SEQ ID NO: 196849 - DNA, 50 bp, Artificial
  Synthetic oligonucleotide
gggtgcgccttgtatgagacgccttctctgtttcgattaaataatcgcag

SEQ ID NO: 196850 - DNA, 50 bp, Artificial
  Synthetic oligonucleotide
cttcgtaagggaccgattctggagtgtgcccttcgtgggggcttcggcat

SEQ ID NO: 196851 - DNA, 50 bp, Artificial
  Synthetic oligonucleotide
agccaaaccgggacgcctaacttcacaccggggaccgtcaccattgatgg

SEQ ID NO: 196852 - DNA, 50 bp, Artificial
  Synthetic oligonucleotide
agccaccccgggctgcataatccttaatccgctgcaggcattcttccggg

SEQ ID NO: 196853 - DNA, 55 bp, Artificial
  Synthetic oligonucleotide
catcaaaggttacgtctgcctgaagttttcgatctactggggactggcatgtacc

SEQ ID NO: 196854 - DNA, 50 bp, Artificial
  Synthetic oligonucleotide
caactaggcgaccctggccggctagctctaggtccgacaaacaagcccct

SEQ ID NO: 196855 - DNA, 50 bp, Artificial
  Synthetic oligonucleotide
ggggcaatctaagcccgccggaacctatggagcccttgcgaagcgaagga

SEQ ID NO: 196856 - DNA, 50 bp, Artificial
  Synthetic oligonucleotide
caaccgcgggagtgggaacttgcgtggtaaggacatcgcggccattcaag

SEQ ID NO: 196857 - DNA, 50 bp, Artificial
  Synthetic oligonucleotide
ggggacgaaggaccgggatctgatccgattcgggcaggatgaggctcata

SEQ ID NO: 196858 - DNA, 50 bp, Artificial
  Synthetic oligonucleotide
agccattgggacccaatacctgccaacgactagcggtggtgcgctaccaa

SEQ ID NO: 196859 - DNA, 50 bp, Artificial
  Synthetic oligonucleotide
gggctgtattcgggacacgctcccgctatgctcgccttcgtagtgaggga

SEQ ID NO: 196860 - DNA, 50 bp, Artificial
  Synthetic oligonucleotide
agcccactttgcacggccgaatagcccacctgtcacggccatttagccca

SEQ ID NO: 196861 - DNA, 50 bp, Artificial
  Synthetic oligonucleotide
caaaagccaggtgacggcctctggcaggcctctgagcgcttggtcgccct

SEQ ID NO: 196862 - DNA, 50 bp, Artificial
  Synthetic oligonucleotide
agcccagctctttgcggcctcgcagatagcaataagcctcccgggaagtt

SEQ ID NO: 196863 - DNA, 50 bp, Artificial
  Synthetic oligonucleotide
agccccctgcgtaattatcccgccttccacccgccatgctccggtccaaa

SEQ ID NO: 196864 - DNA, 55 bp, Artificial
  Synthetic oligonucleotide
catattgccgacacgtcctgcgatcaccggtacgccataggaatatgcctccgcg

SEQ ID NO: 196865 - DNA, 50 bp, Artificial
  Synthetic oligonucleotide
atttgcgccgtgcataaacccacgctccctgccatccgccgctatcgttc

SEQ ID NO: 196866 - DNA, 50 bp, Artificial
  Synthetic oligonucleotide
agccgcgatgtgaaccgtgtgtggtctgcggctgtgtgcatgactaaggc

SEQ ID NO: 196867 - DNA, 50 bp, Artificial
  Synthetic oligonucleotide
atttcctgaatctggcagcccccgcactgttttgccaccgggcataccgc

SEQ ID NO: 196868 - DNA, 50 bp, Artificial
  Synthetic oligonucleotide
gggagcttcggagcactagctaccctctagccacaaggcacgctcccgct

SEQ ID NO: 196869 - DNA, 50 bp, Artificial
  Synthetic oligonucleotide
gggactcgttccggacggtccctgcgcactcggtccatcagaactgctct

SEQ ID NO: 196870 - DNA, 55 bp, Artificial
  Synthetic oligonucleotide
catagaaatatccactcaggcagaaatgaattcctgcgaaaatgcagtctgacgc

SEQ ID NO: 196871 - DNA, 57 bp, Artificial
  Synthetic oligonucleotide
gtttaaataggcaaacaccagcaagctggtgacgtcctcaagcggctaaaaagattc

SEQ ID NO: 196872 - DNA, 55 bp, Artificial
  Synthetic oligonucleotide
ctctgaggaaatgtccggacgagttgcaaggcaacggtagaaaacatgtcgccgc

SEQ ID NO: 196873 - DNA, 55 bp, Artificial
  Synthetic oligonucleotide
cagtcaagaccaatcatcttaatctgtttccccataaactgtcaattcctttctc

SEQ ID NO: 196874 - DNA, 55 bp, Artificial
  Synthetic oligonucleotide
ctctgtccgacatgagcaggcgcacattatgaatgatcactgtattcactgtggg

SEQ ID NO: 196875 - DNA, 54 bp, Artificial
  Synthetic oligonucleotide
ctgaaagtataccgaagggattttccgacggagtagtggcgccgtgaacgtgcc

SEQ ID NO: 196876 - DNA, 55 bp, Artificial
  Synthetic oligonucleotide
cagggcgttgcttggcggacttatgggctttggtacggatgatgtaagaattcgt

SEQ ID NO: 196877 - DNA, 55 bp, Artificial
  Synthetic oligonucleotide
cagggcgcctacaatgtaaagagctgccataaatggtacgactgtctctgttact

SEQ ID NO: 196878 - DNA, 55 bp, Artificial
  Synthetic oligonucleotide
ctgcaatgtaggctcttgttccgattccatagttatctgcaacttccggatgtac

SEQ ID NO: 196879 - DNA, 55 bp, Artificial
  Synthetic oligonucleotide
cagcttcggattggacagattttcggaacctttgtatagtctccgtagagagcca

SEQ ID NO: 196880 - DNA, 55 bp, Artificial
  Synthetic oligonucleotide
cagctgtcagcttcggcccagagcgactttgcgggcaataaggttaaaacctctg

SEQ ID NO: 196881 - DNA, 55 bp, Artificial
  Synthetic oligonucleotide
ctgcagcgatgatactgacgctgataacagtaggcaaaatgctagaggccagatc

SEQ ID NO: 196882 - DNA, 60 bp, Artificial
  Synthetic oligonucleotide
cacatggcttgtgatgagagacaatactttccctcctattgttcagacaggatggcttga

SEQ ID NO: 196883 - DNA, 55 bp, Artificial
  Synthetic oligonucleotide
cagcgtctttatccttgtaaacgctgttgacctcattgccaatgtatctctccgg

SEQ ID NO: 196884 - DNA, 55 bp, Artificial
  Synthetic oligonucleotide
ctgcctaaacttgcacagtatgagctgaccctcctggattggatcgataagcata

SEQ ID NO: 196885 - DNA, 55 bp, Artificial
  Synthetic oligonucleotide
cagccccagtagtacagttgtaggcaccatagcgataaagtatgcaacaccacgc

SEQ ID NO: 196886 - DNA, 55 bp, Artificial
  Synthetic oligonucleotide
cagcccatacggaattcaacttagagtgaatcgaagtatacaggcagaagggtcc

SEQ ID NO: 196887 - DNA, 55 bp, Artificial
  Synthetic oligonucleotide
ctgcgatcaataagtcttccagtatccgtcctgaaatcaacgtccttggtatgac

SEQ ID NO: 196888 - DNA, 55 bp, Artificial
  Synthetic oligonucleotide
cagataactgtagttctccacgattccgagtaccgggatatccatctgtcctgcc

SEQ ID NO: 196889 - DNA, 55 bp, Artificial
  Synthetic oligonucleotide
ctgcgtgccccgcagacaacacttgaccctctaccgtaatcttaatctgctcgca

SEQ ID NO: 196890 - DNA, 55 bp, Artificial
  Synthetic oligonucleotide
cagaatattgttgacacctgtggaaagaattatcctacgctgcgaaaactccggg

SEQ ID NO: 196891 - DNA, 55 bp, Artificial
  Synthetic oligonucleotide
cagaagtgcaatcgcctcctgcggccctccatacgaatatgccgcattcgccttg

SEQ ID NO: 196892 - DNA, 55 bp, Artificial
  Synthetic oligonucleotide
ctgctaggtataacttgtgggtttcaaacggaagtgattattacggctcgaatag

SEQ ID NO: 196893 - DNA, 60 bp, Artificial
  Synthetic oligonucleotide
attggagctgacctgcttacaatagacgaaacacaaaagctcgatgcaaataagcttatc

SEQ ID NO: 196894 - DNA, 55 bp, Artificial
  Synthetic oligonucleotide
ctgctttgactcctctttcgccttttcattacagcagtccaagtagggacaatcg

SEQ ID NO: 196895 - DNA, 55 bp, Artificial
  Synthetic oligonucleotide
ctggactgtccgagttgcggagtaagcaggatgtgtgtctcgctctcacatggag

SEQ ID NO: 196896 - DNA, 55 bp, Artificial
  Synthetic oligonucleotide
gaacccggtcagatcagatttgagttcccaacacctggtattcaggcatccgtag

SEQ ID NO: 196897 - DNA, 51 bp, Artificial
  Synthetic oligonucleotide
attggtttcccctcgtgacaccggggcggtttcccgtcctcgccatggcct

SEQ ID NO: 196898 - DNA, 55 bp, Artificial
  Synthetic oligonucleotide
gaaccgccgtatgtaacccaagccacctcgggtgcaaaaccctccacgtgctcgc

SEQ ID NO: 196899 - DNA, 55 bp, Artificial
  Synthetic oligonucleotide
attggtaaacccgatgtaagtcgggctatgtacaagcaccgtatctccctgtgag

SEQ ID NO: 196900 - DNA, 55 bp, Artificial
  Synthetic oligonucleotide
gaaccgccttttacacaacaaatgcaatagagtcgttgaattcgtcatatcgccg

SEQ ID NO: 196901 - DNA, 55 bp, Artificial
  Synthetic oligonucleotide
gaagcccggtcaagtcccgcaagtgttatttccggattggctgtatccaccgtaa

SEQ ID NO: 196902 - DNA, 55 bp, Artificial
  Synthetic oligonucleotide
attctgcctcgtagaccaatatgagggatccaattcatagattatccgtttaggc

SEQ ID NO: 196903 - DNA, 55 bp, Artificial
  Synthetic oligonucleotide
gaatatttctggggaatgggatacattacggtagtcctgtttgcaattctacaga

SEQ ID NO: 196904 - DNA, 57 bp, Artificial
  Synthetic oligonucleotide
agaagagtgtatggagtacttcaaggattgccttgaataccacgaaaagacctatgg

SEQ ID NO: 196905 - DNA, 55 bp, Artificial
  Synthetic oligonucleotide
gaatcctctacccgtccagtatagaagaccacggttcggaaggacatggattgag

SEQ ID NO: 196906 - DNA, 55 bp, Artificial
  Synthetic oligonucleotide
attaccctgggcggagtcctgggaacagcagtatttatctaccggtggcacattc

SEQ ID NO: 196907 - DNA, 55 bp, Artificial
  Synthetic oligonucleotide
gaattcggcgttatggatgaatggcttcgttttggaacaggccctatgtatgctc

SEQ ID NO: 196908 - DNA, 55 bp, Artificial
  Synthetic oligonucleotide
attaagcgaggaatatttatgggtataagaaatgcggtccgcaagacaattgcat

SEQ ID NO: 196909 - DNA, 55 bp, Artificial
  Synthetic oligonucleotide
gacagcggaaatcagttgacggaaccgctcacagacagaccggtccacatcgtgg

SEQ ID NO: 196910 - DNA, 55 bp, Artificial
  Synthetic oligonucleotide
gacatacccgtcgttctctatataaccgtcatttcttccggatacgccgagaatc

SEQ ID NO: 196911 - DNA, 55 bp, Artificial
  Synthetic oligonucleotide
gacatcgttattggtagctagaaccgctaaaggggtcttaatctcgtggctggca

SEQ ID NO: 196912 - DNA, 55 bp, Artificial
  Synthetic oligonucleotide
gaccgccttacacctcgaaaatcagatccccataggagggcatgggccagagatc

SEQ ID NO: 196913 - DNA, 55 bp, Artificial
  Synthetic oligonucleotide
gaccgttcagggaatggcgaaactgcatgacggtatgatcaaaatggtctgcggc

SEQ ID NO: 196914 - DNA, 55 bp, Artificial
  Synthetic oligonucleotide
atggccaccccgttggatagtccaagcgcggtatttcgaggcacgaattgggtaa

SEQ ID NO: 196915 - DNA, 53 bp, Artificial
  Synthetic oligonucleotide
gttgataacttttattgggagatttagaacgtaattttattgtgacctttgga

SEQ ID NO: 196916 - DNA, 55 bp, Artificial
  Synthetic oligonucleotide
gacctatcaggacgtctgtaacagcagcgggcatgccgagacagtgcgggtcgac

SEQ ID NO: 196917 - DNA, 55 bp, Artificial
  Synthetic oligonucleotide
gacctcccgtgtaagagaggcctgagtcttgtgtcctggttattcttcgacgggt

SEQ ID NO: 196918 - DNA, 55 bp, Artificial
  Synthetic oligonucleotide
gacgaatatgagatattctcctctcctgacattccggaggctgccacatttggcg

SEQ ID NO: 196919 - DNA, 55 bp, Artificial
  Synthetic oligonucleotide
gacgtgcttctgtcgcccgcactacagaactgccgatcttattcgccttatccga

SEQ ID NO: 196920 - DNA, 55 bp, Artificial
  Synthetic oligonucleotide
gactccctgatcatgacaagcgtattcccgacaggaatgattttcgtgcctagca

SEQ ID NO: 196921 - DNA, 55 bp, Artificial
  Synthetic oligonucleotide
gagaatgtctcgtatgtcgctttcgtgggccaggagttgtattaattcagactcg

SEQ ID NO: 196922 - DNA, 55 bp, Artificial
  Synthetic oligonucleotide
gagattagccagcacgcagtggtggaggtgagctacctgtgatgtctgcctgtcc

SEQ ID NO: 196923 - DNA, 55 bp, Artificial
  Synthetic oligonucleotide
atgccgtccgagcatagtgcggcacacgaatatccaccgtaagcactgcaaccgt

SEQ ID NO: 196924 - DNA, 55 bp, Artificial
  Synthetic oligonucleotide
gagccgctaatcgttgctaccatcgtcgccataagggaggcaattccgatcggcg

SEQ ID NO: 196925 - DNA, 55 bp, Artificial
  Synthetic oligonucleotide
gagccttcgggctaagggacttcttgccatgtgtatcagttttccggacagctgg

SEQ ID NO: 196926 - DNA, 60 bp, Artificial
  Synthetic oligonucleotide
gaatacgcaacaattaagcgcaggatgcagcgtggcagagaacgaagcagctctgacgga

SEQ ID NO: 196927 - DNA, 55 bp, Artificial
  Synthetic oligonucleotide
gagcggttctctgacgtgtatcgtctgtcataacactggataagcttccgaacgg

SEQ ID NO: 196928 - DNA, 55 bp, Artificial
  Synthetic oligonucleotide
gagcgtcacgagcggtagcatagagctgtccgtgcgcagaaggttatgggcggac

SEQ ID NO: 196929 - DNA, 55 bp, Artificial
  Synthetic oligonucleotide
gagcttacacaaagcattgaagctgtagaaactctcaaattagaaggtgcaaagc

SEQ ID NO: 196930 - DNA, 55 bp, Artificial
  Synthetic oligonucleotide
atgagaaatcccaatagacccagggtgatagacaaacgagtacttaagctgagac

SEQ ID NO: 196931 - DNA, 55 bp, Artificial
  Synthetic oligonucleotide
ctgtggagatgtaacagccaggctctatagtagtctcgtacaacctcataggaac

SEQ ID NO: 196932 - DNA, 55 bp, Artificial
  Synthetic oligonucleotide
cttaagtccatagagccggccggagtctcatagcgcaccgtatgcttccttccgc

SEQ ID NO: 196933 - DNA, 55 bp, Artificial
  Synthetic oligonucleotide
cacctcgtttcactttgcgcccgtctgctccgacataaccgcccagctctcttgc

SEQ ID NO: 196934 - DNA, 55 bp, Artificial
  Synthetic oligonucleotide
cttaatagacattggctctacttctacccaatggccatcttcccaataagaaccc

SEQ ID NO: 196935 - DNA, 55 bp, Artificial
  Synthetic oligonucleotide
caccatcgtccaggtaaggattgtagtaaaactggttatctcctatctggcagac

SEQ ID NO: 196936 - DNA, 55 bp, Artificial
  Synthetic oligonucleotide
cttatgggatatggaataatgcgctgtgagaagcgtaaaatacaggcttgcgggg

SEQ ID NO: 196937 - DNA, 60 bp, Artificial
  Synthetic oligonucleotide
gtcaattatccaatagactaacctagtcttctgattgccaactaaatcaagagtagcaac

SEQ ID NO: 196938 - DNA, 55 bp, Artificial
  Synthetic oligonucleotide
cacatcgtggcggtcggatttgagcccctggatcatatctgcagtgtgcgtttgg

SEQ ID NO: 196939 - DNA, 53 bp, Artificial
  Synthetic oligonucleotide
cacatccacctccgttccaaaagtttcacccatattctggttggaaaccgtaa

SEQ ID NO: 196940 - DNA, 55 bp, Artificial
  Synthetic oligonucleotide
cacagactgtccaccggatcatccgcataagggacgactatgccctcggatcctc

SEQ ID NO: 196941 - DNA, 55 bp, Artificial
  Synthetic oligonucleotide
cacaaagagtgtatacgggagcaatcatcggcggaaagacaagagtgtatgaagt

SEQ ID NO: 196942 - DNA, 55 bp, Artificial
  Synthetic oligonucleotide
cacaaacataggcacctgccagcgcttctcatgtccggggttcttgccatccagg

SEQ ID NO: 196943 - DNA, 55 bp, Artificial
  Synthetic oligonucleotide
caatggggtcagtcaaatataacgagcctgtctacccttgtattgtctggcattg

SEQ ID NO: 196944 - DNA, 53 bp, Artificial
  Synthetic oligonucleotide
cttcccggaacgaaccgcccctgatttaacgttccacctatgtgtcgcattta

SEQ ID NO: 196945 - DNA, 55 bp, Artificial
  Synthetic oligonucleotide
cttccgattgcatggctctctaatccgaaaatcgtattgttctcggcaatcattg

SEQ ID NO: 196946 - DNA, 55 bp, Artificial
  Synthetic oligonucleotide
caataccaccgaccagtgtaccaataccgctgatcaggtaaattacaagcacacg

SEQ ID NO: 196947 - DNA, 55 bp, Artificial
  Synthetic oligonucleotide
caagttatgaaccggcgctcttacatatcctcacacgatacgccgatccgaaacc

SEQ ID NO: 196948 - DNA, 58 bp, Artificial
  Synthetic oligonucleotide
gcggatatgctctgcaaggtagtctgccgaaaataacttgtcaacgtcaaaactaaac

SEQ ID NO: 196949 - DNA, 60 bp, Artificial
  Synthetic oligonucleotide
tgcagtgctccaggcgctccgatgcacggacacctcgaaatcccttgtcccgttcagatc

SEQ ID NO: 196950 - DNA, 55 bp, Artificial
  Synthetic oligonucleotide
caagtgtagaagttcctaattcaatgcgacttcgggtgcttgcaaggcgtaagcg

SEQ ID NO: 196951 - DNA, 55 bp, Artificial
  Synthetic oligonucleotide
cttccggtcttaccacttcgctggcaggtgtgagcgtggatacatccggtcttgt

SEQ ID NO: 196952 - DNA, 55 bp, Artificial
  Synthetic oligonucleotide
caaggactttcgtccgcttattttgcaagatcgatgttctctcctttaagaccac

SEQ ID NO: 196953 - DNA, 55 bp, Artificial
  Synthetic oligonucleotide
caaggacatactgtgcatactgatttcccacgccggctgactcttccagataccg

SEQ ID NO: 196954 - DNA, 55 bp, Artificial
  Synthetic oligonucleotide
caagacgcgaagcggcgaaggcatgcgggaatcatggactccgccaagccgaaag

SEQ ID NO: 196955 - DNA, 55 bp, Artificial
  Synthetic oligonucleotide
cttgatctcagtctgtgaaccctttgtcgcatttacaacgtaagtacttatggtg

SEQ ID NO: 196956 - DNA, 55 bp, Artificial
  Synthetic oligonucleotide
cttgatgttcaatacctgcgtcagataagaaataatcggaaccagcaaggctgca

SEQ ID NO: 196957 - DNA, 55 bp, Artificial
  Synthetic oligonucleotide
cttgctatgctcggctatgacccgcagaagtattattccgggagatcgcctcttg

SEQ ID NO: 196958 - DNA, 55 bp, Artificial
  Synthetic oligonucleotide
caaatgatacgttcggaagttcctcaagtagtgctgtccattcttctgcgcgtct

SEQ ID NO: 196959 - DNA, 55 bp, Artificial
  Synthetic oligonucleotide
caaatccgtaatgcgcatagccatacttccgcccggacgttccaaatgcagacgc

SEQ ID NO: 196960 - DNA, 60 bp, Artificial
  Synthetic oligonucleotide
agacatagtcaagaagttagcaaatggagaacagcttccgagagaaaatcgtgaccatcc

SEQ ID NO: 196961 - DNA, 55 bp, Artificial
  Synthetic oligonucleotide
cttgtcaaaataagtcttaggctgcttccttctaccgatattcttgtgtctccac

SEQ ID NO: 196962 - DNA, 54 bp, Artificial
  Synthetic oligonucleotide
caaagatcgcgtactctcaaatctttaccccatggaactgggttgtttccaccg

SEQ ID NO: 196963 - DNA, 55 bp, Artificial
  Synthetic oligonucleotide
caaagaattatactgccagtcccagattttagcttacgagggactttccatcgag

SEQ ID NO: 196964 - DNA, 55 bp, Artificial
  Synthetic oligonucleotide
ctttgatattataatcggagtgtaactataacgctggaaatgaccgttccgtagc

SEQ ID NO: 196965 - DNA, 55 bp, Artificial
  Synthetic oligonucleotide
atttcgaaggcggacgtccatcaagcatcattatcggagagcaggtaaatccggg

SEQ ID NO: 196966 - DNA, 55 bp, Artificial
  Synthetic oligonucleotide
gaaatcactcaatggtttatgtccccataactgttcccggtaagagatctcatcc

SEQ ID NO: 196967 - DNA, 55 bp, Artificial
  Synthetic oligonucleotide
cggctggacatttctgatgctgacatccgcggcactgtttatcacggcggcgttg

SEQ ID NO: 196968 - DNA, 55 bp, Artificial
  Synthetic oligonucleotide
cggctgcgggataactaggattgccagaaaaggatccatatgagccttacgccgg

SEQ ID NO: 196969 - DNA, 55 bp, Artificial
  Synthetic oligonucleotide
cggctgaggaatggggtatatggagcaaacagggcgttcccggaggcagactatc

SEQ ID NO: 196970 - DNA, 55 bp, Artificial
  Synthetic oligonucleotide
cggcgctctctatcggattcctctgacgaatattctcggcgatgagggtaatgga

SEQ ID NO: 196971 - DNA, 48 bp, Artificial
  Synthetic oligonucleotide
ggggacccgaaagtccgctaaagcccgtggttacaaggtttttattcc

SEQ ID NO: 196972 - DNA, 55 bp, Artificial
  Synthetic oligonucleotide
cggcacaaattataatcaaacccaattgtgtgctggggctagctacaggatcgac

SEQ ID NO: 196973 - DNA, 55 bp, Artificial
  Synthetic oligonucleotide
ccgctgcaaaggaggcagtgcggaatacttacagacaaaacgatacgatcaccta

SEQ ID NO: 196974 - DNA, 55 bp, Artificial
  Synthetic oligonucleotide
ccgcttttccgcccagcatcttaatcatggcaagctctcctaatttagagaagaa

SEQ ID NO: 196975 - DNA, 55 bp, Artificial
  Synthetic oligonucleotide
ccggaatcgtcacctcaggtatctgatcaggactctgtacgttctgcaatcggtc

SEQ ID NO: 196976 - DNA, 55 bp, Artificial
  Synthetic oligonucleotide
cggattcggaatcctgaaaagtatacattaagctgataggaatgtcatctactag

SEQ ID NO: 196977 - DNA, 55 bp, Artificial
  Synthetic oligonucleotide
ccggacaggagtatcattatgcctgttgtctgtcatcgccctgccagaagcaatc

SEQ ID NO: 196978 - DNA, 55 bp, Artificial
  Synthetic oligonucleotide
cggatgtaccgtatgatcagactttgcatcacatgctgacagtattctgtcacgg

SEQ ID NO: 196979 - DNA, 55 bp, Artificial
  Synthetic oligonucleotide
cggatgctgtctggatccggataaatgtgcgttagaatagatctttacatgccgg

SEQ ID NO: 196980 - DNA, 55 bp, Artificial
  Synthetic oligonucleotide
ccggatatgagggtgatcgaaaatgtgcttgtgggagcgcatatcaaaacgggct

SEQ ID NO: 196981 - DNA, 55 bp, Artificial
  Synthetic oligonucleotide
cggactcaatggtcctccttgtggcatcccgatttctgtacgctcatacttcccg

SEQ ID NO: 196982 - DNA, 54 bp, Artificial
  Synthetic oligonucleotide
aagattcgaacttcactaggcaacaaaatacgtttgccaagtgaattcgacttt

SEQ ID NO: 196983 - DNA, 55 bp, Artificial
  Synthetic oligonucleotide
ccggctaagtccctggagtcctgtcgtcggatcacagatatgacgtcccgtcgtc

SEQ ID NO: 196984 - DNA, 55 bp, Artificial
  Synthetic oligonucleotide
ccgggctgacaacatattacggtcagacaccggggctgcttaaggatttgcgcca

SEQ ID NO: 196985 - DNA, 55 bp, Artificial
  Synthetic oligonucleotide
ccgtaaaacggcacacaagagatctccggattgtttatgaccggttccatgaact

SEQ ID NO: 196986 - DNA, 55 bp, Artificial
  Synthetic oligonucleotide
cggaaaatccggagatgatatcccgttatatgcgaggatcattaaagtcacggac

SEQ ID NO: 196987 - DNA, 55 bp, Artificial
  Synthetic oligonucleotide
ccctggcgaatcagatagtgaaaggagtgaccgtaagtcatataagagctgtagg

SEQ ID NO: 196988 - DNA, 55 bp, Artificial
  Synthetic oligonucleotide
cgtacagtatttcgcattgtgctcccgtcggctgttccgggaattcttgccggag

SEQ ID NO: 196989 - DNA, 55 bp, Artificial
  Synthetic oligonucleotide
cccttagaaagcatatctgttccaagagtacgtctgaactggtggctcgtaaggt

SEQ ID NO: 196990 - DNA, 53 bp, Artificial
  Synthetic oligonucleotide
cccttaggacttataaacttccactgaccctccctgtaaattcgctcacttac

SEQ ID NO: 196991 - DNA, 55 bp, Artificial
  Synthetic oligonucleotide
ccctttcgctcccggtcccggcatttgattccggcatgcccttccattgcacacc

SEQ ID NO: 196992 - DNA, 55 bp, Artificial
  Synthetic oligonucleotide
ccgaagttcctctccatctcgtatattgtggaaagttgctcccgcctcctctatt

SEQ ID NO: 196993 - DNA, 52 bp, Artificial
  Synthetic oligonucleotide
acccatccgtactgtgtttttcccacatacggattttcccccggacgatata

SEQ ID NO: 196994 - DNA, 55 bp, Artificial
  Synthetic oligonucleotide
ccgaattatgcgcagctattcttgacaaaggcgttagcacacagttaaaacgtgg

SEQ ID NO: 196995 - DNA, 55 bp, Artificial
  Synthetic oligonucleotide
cggtgcagcgttcacggtcagttcgtgcaaattgattaagactggacagactggt

SEQ ID NO: 196996 - DNA, 55 bp, Artificial
  Synthetic oligonucleotide
cggtgacatacaaagaccggaagtcgcatcatgagtctcatcgtcatgagacgcc

SEQ ID NO: 196997 - DNA, 55 bp, Artificial
  Synthetic oligonucleotide
cggtatggaactcaccagacctgccagaggattaaaactgtggctcaccttacag

SEQ ID NO: 196998 - DNA, 55 bp, Artificial
  Synthetic oligonucleotide
ccgatcccgttagcggtccgattggcaacgagctcactctctgcggaactgccag

SEQ ID NO: 196999 - DNA, 54 bp, Artificial
  Synthetic oligonucleotide
cgggtacgggcgcttttgaggcgggcaaatattgagatggaacggaagattacg

SEQ ID NO: 197000 - DNA, 55 bp, Artificial
  Synthetic oligonucleotide
ccgatgccataatctgtaagtaggacaccgcgccccaatactggccgatacggaa

SEQ ID NO: 197001 - DNA, 55 bp, Artificial
  Synthetic oligonucleotide
ccgatgcgggcaaggtcaattaacaggtcattactgcttaattccacttccggga

SEQ ID NO: 197002 - DNA, 55 bp, Artificial
  Synthetic oligonucleotide
cgggcatagaaagataaagccctctgtctatccgcttcgtcctgacactctcggc

SEQ ID NO: 197003 - DNA, 55 bp, Artificial
  Synthetic oligonucleotide
cgggaattgtaagtctaccccattcgccgagcaaattcttacagcgcggaacgaa

SEQ ID NO: 197004 - DNA, 60 bp, Artificial
  Synthetic oligonucleotide
taattcagcgcgcccaatgcgatttgggattgttagaacaaaaaacgttctgctatgcag

SEQ ID NO: 197005 - DNA, 55 bp, Artificial
  Synthetic oligonucleotide
cgggaatccctatggatgaggctgttatggactatgtaaagactcagcttcacgg

SEQ ID NO: 197006 - DNA, 55 bp, Artificial
  Synthetic oligonucleotide
cgccttttaagacacgcggagatgttgctctagcgggaacattcgggtatgagct

SEQ ID NO: 197007 - DNA, 55 bp, Artificial
  Synthetic oligonucleotide
ccttcagcaatcttactatcgcctttctcctactgccgtcttcccttacccgtcc

SEQ ID NO: 197008 - DNA, 55 bp, Artificial
  Synthetic oligonucleotide
cgccttccatcgtctgatctccgactttcaaattgaacgttgccttgttctcgtc

SEQ ID NO: 197009 - DNA, 54 bp, Artificial
  Synthetic oligonucleotide
ccttctcccaggtaatacagataggacgggttatcctccagcttgtaagggaag

SEQ ID NO: 197010 - DNA, 55 bp, Artificial
  Synthetic oligonucleotide
ccttctgacgcatagtctaatgccattgcacgagacgtcgcattcatcgctccct

SEQ ID NO: 197011 - DNA, 55 bp, Artificial
  Synthetic oligonucleotide
cgccgtccttctacatcaaccggatctcacagtatacgggaatttcaaacgtcgc

SEQ ID NO: 197012 - DNA, 55 bp, Artificial
  Synthetic oligonucleotide
cgcatgataatcacaggatggaacctgatggcggtggtaagtctggactgccaca

SEQ ID NO: 197013 - DNA, 52 bp, Artificial
  Synthetic oligonucleotide
cgacccctctataccctatacaaattagtcccaaaccgggatggactgtccg

SEQ ID NO: 197014 - DNA, 55 bp, Artificial
  Synthetic oligonucleotide
cgcatcccgccttcggattcatacacccgatgactaccttcggaatacgggcctg

SEQ ID NO: 197015 - DNA, 60 bp, Artificial
  Synthetic oligonucleotide
gctggattgcatcgcaaagaatttgaaatagaaagcctaaaagcaaaactgtgcgctcca

SEQ ID NO: 197016 - DNA, 55 bp, Artificial
  Synthetic oligonucleotide
cgcagataacacaacacttactcatagagcctcctatctgtcggctctgagacgc

SEQ ID NO: 197017 - DNA, 55 bp, Artificial
  Synthetic oligonucleotide
cgaggagagtccgaaggtaattggcagagcgttagatgcgggctatatcccggta

SEQ ID NO: 197018 - DNA, 55 bp, Artificial
  Synthetic oligonucleotide
cgagtatgatatttccatggaggatctcattccggtaaccaacactgtgatcgca

SEQ ID NO: 197019 - DNA, 55 bp, Artificial
  Synthetic oligonucleotide
cgcacttatgtatacttccgatctcttcaaagcttgctggatggaatcccagacg

SEQ ID NO: 197020 - DNA, 55 bp, Artificial
  Synthetic oligonucleotide
cgatcacactctgctcttgctttcataagacaatacttccatatacagccacctc

SEQ ID NO: 197021 - DNA, 55 bp, Artificial
  Synthetic oligonucleotide
cgatcacatgcttgttgccttcgcatcctgtctcaccggtacggatcacgaatcc

SEQ ID NO: 197022 - DNA, 55 bp, Artificial
  Synthetic oligonucleotide
cgattacagactggttctgatgtcagttcctgcaggccttctgaatgcagccatg

SEQ ID NO: 197023 - DNA, 55 bp, Artificial
  Synthetic oligonucleotide
cgattggcttcgtcaatatcattagcttggtcaaatggatccgtggttaaccaat

SEQ ID NO: 197024 - DNA, 55 bp, Artificial
  Synthetic oligonucleotide
cgcaaagaatttgaaatagaaagcctaaaagcaaaactgtgcgctccatacagtg

SEQ ID NO: 197025 - DNA, 55 bp, Artificial
  Synthetic oligonucleotide
cgctgtcttcccaatgtgcatgacttctgtaagttgtctcacaccgaaacagatc

SEQ ID NO: 197026 - DNA, 57 bp, Artificial
  Synthetic oligonucleotide
gctggtggtatcctcaagcggctaaaaagattcgaacttcactaggcaacgaaatac

SEQ ID NO: 197027 - DNA, 55 bp, Artificial
  Synthetic oligonucleotide
ccgtgcacgcggtacatttcgagcgatttatacaaagataggagcatttcttaaa

SEQ ID NO: 197028 - DNA, 55 bp, Artificial
  Synthetic oligonucleotide
cgctgtatgtccgtttaaaacaggaacacgtacacactgacaggtaataacaggt

SEQ ID NO: 197029 - DNA, 55 bp, Artificial
  Synthetic oligonucleotide
ccgttgccaccattgttatcgtaaatgtagtgatgtggagctccgcatagagggc

SEQ ID NO: 197030 - DNA, 55 bp, Artificial
  Synthetic oligonucleotide
cctcccgtcaaacatcgcgacgtatgtattgtcgagaatcgagctctcgccttca

SEQ ID NO: 197031 - DNA, 55 bp, Artificial
  Synthetic oligonucleotide
cgcggtctggttgtaagcggaattggactgacaggggtggatgccttatatcgcc

SEQ ID NO: 197032 - DNA, 55 bp, Artificial
  Synthetic oligonucleotide
cctcctattacgataacggcgacggctccctatgctttgtcacagaccgggcgga

SEQ ID NO: 197033 - DNA, 55 bp, Artificial
  Synthetic oligonucleotide
cgcgggaatccgtaaacagatctgcatagttccggaacccgacataatcgtaagt

SEQ ID NO: 197034 - DNA, 55 bp, Artificial
  Synthetic oligonucleotide
cctctccattgtcgcacacccaaatatacgcatttgaaactgtagggtcatctgg

SEQ ID NO: 197035 - DNA, 55 bp, Artificial
  Synthetic oligonucleotide
cctctgtgtggacacggagcagacgactttgaacctatatatgagtaatgtggga

SEQ ID NO: 197036 - DNA, 55 bp, Artificial
  Synthetic oligonucleotide
cctcttgcgggaaagcaataagcagcttctataagacattgtcaccacagcgggc

SEQ ID NO: 197037 - DNA, 60 bp, Artificial
  Synthetic oligonucleotide
taccagctgacatcgccactagactgcgcaacaaccggatcgttttcagctacgactgcc

SEQ ID NO: 197038 - DNA, 55 bp, Artificial
  Synthetic oligonucleotide
cctgaatcccttagtcattacgattacagccgcagctatctgccccgttaccgtg

SEQ ID NO: 197039 - DNA, 55 bp, Artificial
  Synthetic oligonucleotide
cgcgcactgtagattgtccttgcaaacatatcccttcccaagacatccgttccga

SEQ ID NO: 197040 - DNA, 55 bp, Artificial
  Synthetic oligonucleotide
cctgccgaatagatgcttcgttcacgaatttgatacgctcggatgttgtatctac

SEQ ID NO: 197041 - DNA, 55 bp, Artificial
  Synthetic oligonucleotide
cgcgacagtaaacggctatccgaccgagtaccttgagtacaatatggaaatgacc

SEQ ID NO: 197042 - DNA, 53 bp, Artificial
  Synthetic oligonucleotide
cctgtttacgttacgtttcgcagttactcatcccatttcttttgtgccggccg

SEQ ID NO: 197043 - DNA, 55 bp, Artificial
  Synthetic oligonucleotide
ccaggacgtaccgtagccatctgaggacggttgtccgggcaggcaatagtagcga

SEQ ID NO: 197044 - DNA, 55 bp, Artificial
  Synthetic oligonucleotide
ccaggagtaccacagagacctcggcaagggacttaatccacagatcccggtgaac

SEQ ID NO: 197045 - DNA, 55 bp, Artificial
  Synthetic oligonucleotide
ctcacggtggtattcagtattatttcggtgctgtatgtattcccgatcgtgctgg

SEQ ID NO: 197046 - DNA, 55 bp, Artificial
  Synthetic oligonucleotide
ctattatagtcattacggacaaaccaagttctcttcttgcgaaatatgccgacat

SEQ ID NO: 197047 - DNA, 55 bp, Artificial
  Synthetic oligonucleotide
ccagtcatccggggaggtataatagccgtttgtcatcgcccttctcccaagatcc

SEQ ID NO: 197048 - DNA, 60 bp, Artificial
  Synthetic oligonucleotide
ccctgatcttggttctgatctccaatctgatccctgtttcagaaatcagtattaacgctt

SEQ ID NO: 197049 - DNA, 55 bp, Artificial
  Synthetic oligonucleotide
ccagtcctgccactcattctccctcagaaccagcggcatcctcggatgtacagca

SEQ ID NO: 197050 - DNA, 55 bp, Artificial
  Synthetic oligonucleotide
ccataacgttgattgggcaaatataagcgtcctctcacaagtcattcacagcgtg

SEQ ID NO: 197051 - DNA, 55 bp, Artificial
  Synthetic oligonucleotide
ctatggatcagtcaatggaatccagggagtattaaatgagaacctgatagatctt

SEQ ID NO: 197052 - DNA, 52 bp, Artificial
  Synthetic oligonucleotide
ccatactcgggtaccgcacccttttccgttgtgggcgtaggggtcgcaacaa

SEQ ID NO: 197053 - DNA, 55 bp, Artificial
  Synthetic oligonucleotide
ccataggaagagtccgaaccatcctcgttcatgcggaagctcctgccatccgaac

SEQ ID NO: 197054 - DNA, 55 bp, Artificial
  Synthetic oligonucleotide
ccatatatccaaagctgtcttataatactcaataactgtccgtgctcctgcgttt

SEQ ID NO: 197055 - DNA, 55 bp, Artificial
  Synthetic oligonucleotide
ccatcagatatccgctgtactgaaaatcgatccgttctgcatgctcgcatgccag

SEQ ID NO: 197056 - DNA, 55 bp, Artificial
  Synthetic oligonucleotide
ccatccaaaacgttcgctaagtgcctactgaaaatactccgaagtcaccccgtca

SEQ ID NO: 197057 - DNA, 55 bp, Artificial
  Synthetic oligonucleotide
ctatctgatcaatcctctttcagacctatcacatagttataaactaccctttccg

SEQ ID NO: 197058 - DNA, 55 bp, Artificial
  Synthetic oligonucleotide
ccatgatcagttctgtcttccactggcctcctcgtttctctggtgcactgacacg

SEQ ID NO: 197059 - DNA, 60 bp, Artificial
  Synthetic oligonucleotide
tcatcaagtgtgagcgtacttgttctgccgctaaggtccgctgttgtctgatcgggagcc

SEQ ID NO: 197060 - DNA, 60 bp, Artificial
  Synthetic oligonucleotide
tactgaatttgcagagtcgagacaagtgcaaccacaggcaatttctcgatatataggcag

SEQ ID NO: 197061 - DNA, 55 bp, Artificial
  Synthetic oligonucleotide
ccatttacccatatctgagcatcttttacatgacccctggccatgcccttcgcat

SEQ ID NO: 197062 - DNA, 55 bp, Artificial
  Synthetic oligonucleotide
cccaaagagggccaaagtactcagtcttctctacaatacctgaagtaaactcggc

SEQ ID NO: 197063 - DNA, 54 bp, Artificial
  Synthetic oligonucleotide
cccaaatactccgcaaagatacccgtgtagggcaactggttatcactccggttc

SEQ ID NO: 197064 - DNA, 55 bp, Artificial
  Synthetic oligonucleotide
ctctcctctgtacgttacgttcattgtaatgtatgtctgcgatttcctaataagg

SEQ ID NO: 197065 - DNA, 55 bp, Artificial
  Synthetic oligonucleotide
ctctcccaccactccggcaagcatatcacctatctcacccaagtccttggttctg

SEQ ID NO: 197066 - DNA, 55 bp, Artificial
  Synthetic oligonucleotide
cattagcacagtcaatcggttcttccttccagacattacgataaatctcctcgtg

SEQ ID NO: 197067 - DNA, 55 bp, Artificial
  Synthetic oligonucleotide
cattaggcggatacacacgatctgggtcagcaatgagattaatcgtaggaaatcc

SEQ ID NO: 197068 - DNA, 55 bp, Artificial
  Synthetic oligonucleotide
cattttctacgctaacaacaaccgtatcccctgcattaagggcactactatcagc

SEQ ID NO: 197069 - DNA, 55 bp, Artificial
  Synthetic oligonucleotide
ctcgtacggcacgctctgttccagccagtccgtctttccctcttcggaacggtac

SEQ ID NO: 197070 - DNA, 55 bp, Artificial
  Synthetic oligonucleotide
ccaacctgggaggttgcatatgcgtccaatacacggaattttgatacggtgtcca

SEQ ID NO: 197071 - DNA, 56 bp, Artificial
  Synthetic oligonucleotide
acatgtaaacctgggtgggctgtaatggtaggggatcgaatctacgacttagaagc

SEQ ID NO: 197072 - DNA, 55 bp, Artificial
  Synthetic oligonucleotide
ccaatcctcgatgtgtctttcttcaattatcatgggcatccgttcatgtatcccc

SEQ ID NO: 197073 - DNA, 55 bp, Artificial
  Synthetic oligonucleotide
ccaatgcatcaggaaacggagtgtctacgacaaatccgaacaaacttgagatgac

SEQ ID NO: 197074 - DNA, 55 bp, Artificial
  Synthetic oligonucleotide
ccacatcctaatcgagcccaatcatatgtgtggttttcctcgtcaaatactgcgt

SEQ ID NO: 197075 - DNA, 55 bp, Artificial
  Synthetic oligonucleotide
ccaccggaatcactgtcttaaatatacggatgtgctgtccatatgttgcattcag

SEQ ID NO: 197076 - DNA, 55 bp, Artificial
  Synthetic oligonucleotide
ccacgaagcggggaaccggtatctgcaccagcttactggaatagagtgtcttccc

SEQ ID NO: 197077 - DNA, 55 bp, Artificial
  Synthetic oligonucleotide
ctccggtatccatataagtacatgtggaggtaaccttggcaatatctgtcccgaa

SEQ ID NO: 197078 - DNA, 55 bp, Artificial
  Synthetic oligonucleotide
ctccggcagaagttcttgcaaccgtcgcagtcaaccccacggctctgttctttgg

SEQ ID NO: 197079 - DNA, 55 bp, Artificial
  Synthetic oligonucleotide
ccactctctgaaacaaatatgcgatcacttggaacgagatttcgcagattcctgc

SEQ ID NO: 197080 - DNA, 55 bp, Artificial
  Synthetic oligonucleotide
ctcagacacgactccaatgtacttgttacgaatgtttcccgcaacatcagtaaaa

SEQ ID NO: 197081 - DNA, 55 bp, Artificial
  Synthetic oligonucleotide
ccagcactaacgcatcgccgagtaatgaactgattctaaatccacctttcccagt

SEQ ID NO: 197082 - DNA, 60 bp, Artificial
  Synthetic oligonucleotide
gctgccgttcctgtgcatccgtcactccataaagatccaacgtcggaacttccactccgc

SEQ ID NO: 197083 - DNA, 55 bp, Artificial
  Synthetic oligonucleotide
ccagcggagatttaaagctggacgactcttttgtctttcgcgttattcccctgag

SEQ ID NO: 197084 - DNA, 55 bp, Artificial
  Synthetic oligonucleotide
cgtgaggatgacggctattcaggggcaacttttgaccgtccggcatttaaactta

SEQ ID NO: 197085 - DNA, 55 bp, Artificial
  Synthetic oligonucleotide
cgtgaacatcgatcgttgccagtgtcttactgagtctggcctgatcccagaagtc

SEQ ID NO: 197086 - DNA, 55 bp, Artificial
  Synthetic oligonucleotide
cccgctctgccgcttttatcacactggaagcattagaactgtccggcgcactctc

SEQ ID NO: 197087 - DNA, 55 bp, Artificial
  Synthetic oligonucleotide
cgtcggagtaactccaaacattattccaatccgtggcggtacagacggctgccag

SEQ ID NO: 197088 - DNA, 55 bp, Artificial
  Synthetic oligonucleotide
cgtcattgatccaactatacaactgccttctggttgggtaacccaaaattcgtat

SEQ ID NO: 197089 - DNA, 53 bp, Artificial
  Synthetic oligonucleotide
cgtcacggagaccttaactcccttgagcttacccgtatatgtggtaaattccc

SEQ ID NO: 197090 - DNA, 55 bp, Artificial
  Synthetic oligonucleotide
cccggtccggaactcactctggttgtcagatctcgccgtacttccaagctgggtg

SEQ ID NO: 197091 - DNA, 55 bp, Artificial
  Synthetic oligonucleotide
cccggttgacacatatgccaggaatccgaacggcaaagagatccgggtatatgac

SEQ ID NO: 197092 - DNA, 53 bp, Artificial
  Synthetic oligonucleotide
cccggtttcttaaccatccccgtatcgggtaacatatcctttgccagccacaa

SEQ ID NO: 197093 - DNA, 59 bp, Artificial
  Synthetic oligonucleotide
acatcaagcaagaagctggggtccagagctataaaaaaaagaggatctacgtccaatga

SEQ ID NO: 197094 - DNA, 55 bp, Artificial
  Synthetic oligonucleotide
cccgtgtaggaaagtacacccacaccggtgtatgctccatctcattgatattcct

SEQ ID NO: 197095 - DNA, 53 bp, Artificial
  Synthetic oligonucleotide
cgtagggaacaccttgatactttggagttcaaaacccaagagaagaccaaaga

SEQ ID NO: 197096 - DNA, 55 bp, Artificial
  Synthetic oligonucleotide
cccgttccatttcggactgacgcatctcaaggataagattcgcagatttccggtc

SEQ ID NO: 197097 - DNA, 53 bp, Artificial
  Synthetic oligonucleotide
ccctccgttgtccacaccgcggataacaaacttataacatccctccggccagt

SEQ ID NO: 197098 - DNA, 55 bp, Artificial
  Synthetic oligonucleotide
ccctcttttctggcaattggagcagtgatgattccgtcttccgggacgattcccg

SEQ ID NO: 197099 - DNA, 55 bp, Artificial
  Synthetic oligonucleotide
ccctgattccgagagaaagtatcgtcttatcttccagtcccagaatgtcacattt

SEQ ID NO: 197100 - DNA, 55 bp, Artificial
  Synthetic oligonucleotide
ccctgcagccacacaacacctttaaagcgcctgcccacctgaggttctcccatta

SEQ ID NO: 197101 - DNA, 55 bp, Artificial
  Synthetic oligonucleotide
ccctggaatatactgatcttccatacggaaattacactgctcatatccaagttct

SEQ ID NO: 197102 - DNA, 55 bp, Artificial
  Synthetic oligonucleotide
ctactgccagattgtacaaaatagaggcacggaagtccgtattgatagggacctc

SEQ ID NO: 197103 - DNA, 54 bp, Artificial
  Synthetic oligonucleotide
ctacgattttctgctgtccctttaccgtataggtgccaagaagggttttctgga

SEQ ID NO: 197104 - DNA, 60 bp, Artificial
  Synthetic oligonucleotide
cgtaccttgctctatatgggttatcggcacacgagcttgcccttcgtataatgggtgaca

SEQ ID NO: 197105 - DNA, 55 bp, Artificial
  Synthetic oligonucleotide
cccagcataaaataccaagattctccctgctgcacccattctccgtccgaagcac

SEQ ID NO: 197106 - DNA, 55 bp, Artificial
  Synthetic oligonucleotide
cccagttcccctaactcgtatcgattgctgtccgcgattaggaatgtcatgtcca

SEQ ID NO: 197107 - DNA, 55 bp, Artificial
  Synthetic oligonucleotide
ctacatttctgttatcgggaaaacacatgaatatggcagactgcgtgtgctgggg

SEQ ID NO: 197108 - DNA, 55 bp, Artificial
  Synthetic oligonucleotide
ccccaaaaccacatctacttactctttacggcaatccctgcagagggttggataa

SEQ ID NO: 197109 - DNA, 55 bp, Artificial
  Synthetic oligonucleotide
ctaatcgagcccaatcatatgtgtggttttcctcgtcaaatactgcgtactctcg

SEQ ID NO: 197110 - DNA, 55 bp, Artificial
  Synthetic oligonucleotide
ccccaatgagaacaaggtgagcaccctaaacgggtgcggtgtaagatagctcgtc

SEQ ID NO: 197111 - DNA, 55 bp, Artificial
  Synthetic oligonucleotide
ctaaggcgtgatctggtgccggcgtggtcactaagtctagatgagagacaatgag

SEQ ID NO: 197112 - DNA, 55 bp, Artificial
  Synthetic oligonucleotide
ccccatacaatataacatggtcctggactgctttcacgccctccgattccctggc

SEQ ID NO: 197113 - DNA, 55 bp, Artificial
  Synthetic oligonucleotide
cgttttgtatacatggtgtgttcccgaagtctgacatccatatccttatagtaga

SEQ ID NO: 197114 - DNA, 52 bp, Artificial
  Synthetic oligonucleotide
cgttattgaggaccaaggtaactttggctaggttgaccgccttacgggcttg

SEQ ID NO: 197115 - DNA, 60 bp, Artificial
  Synthetic oligonucleotide
acggtattgataaatggcgtaaggacgcagtagtctgcatagatgggctatatacagcct

SEQ ID NO: 197116 - DNA, 55 bp, Artificial
  Synthetic oligonucleotide
cgttaccgtatgatgtacacttcgaaatggacgttttgtaatcaacggatgttcc

SEQ ID NO: 197117 - DNA, 55 bp, Artificial
  Synthetic oligonucleotide
cgtggtcagtcgtccgatatgtataagattacagttacaaccaacccgaaggttg

SEQ ID NO: 197118 - DNA, 55 bp, Artificial
  Synthetic oligonucleotide
cccctgctcttcatgtaaccgatgaaacagatccatgaccatatgtccggtcttg

SEQ ID NO: 197119 - DNA, 55 bp, Artificial
  Synthetic oligonucleotide
cgtgggtgtgcattttcccgtcacttatgcgggccactggcgtggaagtatcatt

SEQ ID NO: 197120 - DNA, 55 bp, Artificial
  Synthetic oligonucleotide
cccgatatctcggcacatgaatgacgtattgatgccagcttgaatccgcaccggg

SEQ ID NO: 197121 - DNA, 55 bp, Artificial
  Synthetic oligonucleotide
cccgcactcaaagagtcgccttagaccggctttgacccgctcctgtcggctcaca

SEQ ID NO: 197122 - DNA, 55 bp, Artificial
  Synthetic oligonucleotide
acggaggaagtccctccaagtggtgagggcagtagtagattccttgcaggagtat

SEQ ID NO: 197123 - DNA, 55 bp, Artificial
  Synthetic oligonucleotide
gtgcaacaggtatcacaaactggagatgtattgcaagccatcatgtaccttctgt

SEQ ID NO: 197124 - DNA, 55 bp, Artificial
  Synthetic oligonucleotide
gtgcacatatttgccgccccagcctactgcaatagggataatagcaagcggaagc

SEQ ID NO: 197125 - DNA, 55 bp, Artificial
  Synthetic oligonucleotide
gtgcagattaagatttgcagtcttccaacaggggaaagaatttacccggagcatg

SEQ ID NO: 197126 - DNA, 60 bp, Artificial
  Synthetic oligonucleotide
ctactcagacagcgctatatgccttgaaaagactgagtttggctatgaggtttatttcgc

SEQ ID NO: 197127 - DNA, 55 bp, Artificial
  Synthetic oligonucleotide
acgcttttcacaaacctttgcaacatcctcatgaggtactatatagtaatcacac

SEQ ID NO: 197128 - DNA, 55 bp, Artificial
  Synthetic oligonucleotide
gtggtacctctgcatatacggtacgggttaataagccgttttcttccattgcacg

SEQ ID NO: 197129 - DNA, 55 bp, Artificial
  Synthetic oligonucleotide
gtgttcgacatgttttacagtggggcaaataagcttgcggacagccggagaagtc

SEQ ID NO: 197130 - DNA, 55 bp, Artificial
  Synthetic oligonucleotide
gttaccggcgctcattgagcactaacccaggcgctaacatccactaagggcgcgt

SEQ ID NO: 197131 - DNA, 53 bp, Artificial
  Synthetic oligonucleotide
acgataaagcctaccaacaaatttcaaaaggatttgaagcgcgttcaaaagcg

SEQ ID NO: 197132 - DNA, 55 bp, Artificial
  Synthetic oligonucleotide
gttagcaaatggagaacagcttccgagagaaaatcgtgaccatcctctgacggga

SEQ ID NO: 197133 - DNA, 55 bp, Artificial
  Synthetic oligonucleotide
gttcatcacacagatcctctaacagatcacatatgattcttcttcgcggatgcat

SEQ ID NO: 197134 - DNA, 55 bp, Artificial
  Synthetic oligonucleotide
acctgaacacgaccatcctgccttacaatccctctatagcgtaagtcttgatggt

SEQ ID NO: 197135 - DNA, 55 bp, Artificial
  Synthetic oligonucleotide
gttccatctggggcatacccgtctccctcgatacttggtttcttcgctgtatcac

SEQ ID NO: 197136 - DNA, 55 bp, Artificial
  Synthetic oligonucleotide
gttctccatttcgtcgttgttgtagccaaacacacctccctgcgtgttggagcga

SEQ ID NO: 197137 - DNA, 60 bp, Artificial
  Synthetic oligonucleotide
caagagaagaccaaagagcttacacaaagcattgaagctgtagaaactctcaaattagaa

SEQ ID NO: 197138 - DNA, 55 bp, Artificial
  Synthetic oligonucleotide
gttctcctcgttacaaattgctatggttcacggggcagataagaaaacgagaccg

SEQ ID NO: 197139 - DNA, 55 bp, Artificial
  Synthetic oligonucleotide
gttgtaaagacgggctatatcaagcctcagtcccatatatccgctgtcgatacac

SEQ ID NO: 197140 - DNA, 55 bp, Artificial
  Synthetic oligonucleotide
tagacgccgcctcaactgcgtttagcgcctgccccatatcttctgttaccggcac

SEQ ID NO: 197141 - DNA, 55 bp, Artificial
  Synthetic oligonucleotide
tagaatgccacctaccgtagaggatggtattccatatctaatgacaggggatttt

SEQ ID NO: 197142 - DNA, 54 bp, Artificial
  Synthetic oligonucleotide
acagttcttttgacgtaacgggagaccgcgtgggaaagtctgacaaggtacagc

SEQ ID NO: 197143 - DNA, 55 bp, Artificial
  Synthetic oligonucleotide
acataaacctctgtaccctcttcgcagaatgccaggtcaagctgacactgggata

SEQ ID NO: 197144 - DNA, 55 bp, Artificial
  Synthetic oligonucleotide
acatcaactgcaagtcccatatcacagtacataggccccatatcggtcgtaagga

SEQ ID NO: 197145 - DNA, 55 bp, Artificial
  Synthetic oligonucleotide
acatcttctcggaatgatgactgaggctatacatactccgtttatgtccgacaga

SEQ ID NO: 197146 - DNA, 55 bp, Artificial
  Synthetic oligonucleotide
tactggctcatccaacactgcgattgcgatagtagattcgagtacatattctggc

SEQ ID NO: 197147 - DNA, 55 bp, Artificial
  Synthetic oligonucleotide
taccgtagacggcatgttgttcaaaggcgcttctgtaaaacggatagaaccgtcg

SEQ ID NO: 197148 - DNA, 57 bp, Artificial
  Synthetic oligonucleotide
cagataccggatccagttggaaaagctagcactcttcaccttacgtcccataaacag

SEQ ID NO: 197149 - DNA, 55 bp, Artificial
  Synthetic oligonucleotide
accatacgacaccacaaagaatcccgagaataatagcaggtcgcttaacgaaagc

SEQ ID NO: 197150 - DNA, 55 bp, Artificial
  Synthetic oligonucleotide
taaggattgcgtagatacctgcgatagaggcaagtccgtgtgtggtacggattcc

SEQ ID NO: 197151 - DNA, 55 bp, Artificial
  Synthetic oligonucleotide
taagatttcttgagggtggtgagccggtaagaatatggtacagtgacgctccata

SEQ ID NO: 197152 - DNA, 55 bp, Artificial
  Synthetic oligonucleotide
taagaattccgcatataaaagttcccgcagctaagaaaagctgccctgactgtac

SEQ ID NO: 197153 - DNA, 55 bp, Artificial
  Synthetic oligonucleotide
taacgaacatcccaggaggatcgcagtcagtttatatccgccgatattcatcccc

SEQ ID NO: 197154 - DNA, 54 bp, Artificial
  Synthetic oligonucleotide
taaatcttccgcgccgtcttaataaaacgtactaccttgaggatcgtctccgct

SEQ ID NO: 197155 - DNA, 55 bp, Artificial
  Synthetic oligonucleotide
accctgatggaagcgtgactccttttattcttcgaagtgaattaagcgaaattgg

SEQ ID NO: 197156 - DNA, 55 bp, Artificial
  Synthetic oligonucleotide
taaagagtatctcaagaagattggctatgagtgtaatcctttggaagctagctgg

SEQ ID NO: 197157 - DNA, 55 bp, Artificial
  Synthetic oligonucleotide
gtttagtgtcttatagtatgtgagcggcgatgtctcgtttcttcgaatcccgctg

SEQ ID NO: 197158 - DNA, 55 bp, Artificial
  Synthetic oligonucleotide
ggttaatcacatattccctggttgcctcggaactgtaaaagctgttcgaccctgc

SEQ ID NO: 197159 - DNA, 51 bp, Artificial
  Synthetic oligonucleotide
acacgttgataacttttattgggagatttggaacgtaattttattccgacc

SEQ ID NO: 197160 - DNA, 55 bp, Artificial
  Synthetic oligonucleotide
ggtttcccagtccaatacgatttctacaggtatctacattgtccgcagaagacag

SEQ ID NO: 197161 - DNA, 55 bp, Artificial
  Synthetic oligonucleotide
agagcctgacctcgaatccgtttaaagcggtattgctcggagccggcgtgacagc

SEQ ID NO: 197162 - DNA, 55 bp, Artificial
  Synthetic oligonucleotide
gtaagcccaatcagccggatcattgactgtccagagacggataggccactgcttg

SEQ ID NO: 197163 - DNA, 55 bp, Artificial
  Synthetic oligonucleotide
agagataccatcctcgtaaatgccccaggtatgccatcacaataaaacgtcaaaa

SEQ ID NO: 197164 - DNA, 55 bp, Artificial
  Synthetic oligonucleotide
agagacatagatttgataacctagttggctgagtatttgctgataggctgtccgg

SEQ ID NO: 197165 - DNA, 55 bp, Artificial
  Synthetic oligonucleotide
gtacgttatggtagaaggtgatccggagaacgttgatgctcagtatcgtaccgag

SEQ ID NO: 197166 - DNA, 55 bp, Artificial
  Synthetic oligonucleotide
gtatccagtggatctgtgaccgtgatcggtggagcgggtatggtagtcggttcct

SEQ ID NO: 197167 - DNA, 55 bp, Artificial
  Synthetic oligonucleotide
agaccgccattaagcccgcagggacttatccaggcattctcaagaactaacaggt

SEQ ID NO: 197168 - DNA, 55 bp, Artificial
  Synthetic oligonucleotide
gtatttcggataggagagcacatagagggagagcatcgccataagacttaggatg

SEQ ID NO: 197169 - DNA, 55 bp, Artificial
  Synthetic oligonucleotide
gtattttcggaatcaggagtaatctcaattctaatatgatagctgtcggcaactc

SEQ ID NO: 197170 - DNA, 57 bp, Artificial
  Synthetic oligonucleotide
aggttggtagttggttcaggcggtcagcctgatccaaatatcaaactgaggttgaac

SEQ ID NO: 197171 - DNA, 60 bp, Artificial
  Synthetic oligonucleotide
tatacttggcagacctagggacagagtaacactcgattggactgagtatagaagccttca

SEQ ID NO: 197172 - DNA, 55 bp, Artificial
  Synthetic oligonucleotide
agaataccatttccgggatcttaaaggaacttcttcttatacatgcacgaatcac

SEQ ID NO: 197173 - DNA, 55 bp, Artificial
  Synthetic oligonucleotide
gtcataccgaccgctgttttcattcgcccgttcacgatctcaagctttaccggtt

SEQ ID NO: 197174 - DNA, 55 bp, Artificial
  Synthetic oligonucleotide
gtcatcaaagattgcatggtccgtataatcctcaaatggttccgggagtttgcgt

SEQ ID NO: 197175 - DNA, 55 bp, Artificial
  Synthetic oligonucleotide
gtcatgatatggtgcatcagctgtgaacgtatccctgcctgcacatgaaacgcag

SEQ ID NO: 197176 - DNA, 55 bp, Artificial
  Synthetic oligonucleotide
actggaactgcacggaagtattcaccggaactattgtatgaaatgccacaaattc

SEQ ID NO: 197177 - DNA, 55 bp, Artificial
  Synthetic oligonucleotide
gtgaatacagtgatcattcataatgtgcgcctgctcatgtcggacagagattgcc

SEQ ID NO: 197178 - DNA, 55 bp, Artificial
  Synthetic oligonucleotide
gtctgaagggaaaatgtacgaatgtcgttacagcatgtgccagtggaacaaactg

SEQ ID NO: 197179 - DNA, 55 bp, Artificial
  Synthetic oligonucleotide
acgggcggtgtctgtctcactctgatccagatagttctgtgagtttgcagcgcgc

SEQ ID NO: 197180 - DNA, 55 bp, Artificial
  Synthetic oligonucleotide
gtctctgcacgccggatgaatcctaccacgggacctgctatgcggagagcttcgg

SEQ ID NO: 197181 - DNA, 55 bp, Artificial
  Synthetic oligonucleotide
gtctcgttcactccacaagacggactgccatccaaaccgattactgcactaaccg

SEQ ID NO: 197182 - DNA, 57 bp, Artificial
  Synthetic oligonucleotide
caacagtaatggccggtatctttgtaataaccgttatcgtataccagcttatagcaa

SEQ ID NO: 197183 - DNA, 55 bp, Artificial
  Synthetic oligonucleotide
gtcggggactccacctccgtcgtctcacagatcgccacggcatagtggtcatgat

SEQ ID NO: 197184 - DNA, 55 bp, Artificial
  Synthetic oligonucleotide
gtcggaaagttccggttcatccaataccgcttcaatacgatcaagggcagcgttc

SEQ ID NO: 197185 - DNA, 55 bp, Artificial
  Synthetic oligonucleotide
gtcgaactcataacagatcgagtccagagcattgaagatcttatgcgttctggtg

SEQ ID NO: 197186 - DNA, 55 bp, Artificial
  Synthetic oligonucleotide
gtccttcttatcataggcggagcaatctccaggtcatcaggaacggacacccaca

SEQ ID NO: 197187 - DNA, 54 bp, Artificial
  Synthetic oligonucleotide
gtcctatgggacgaagccgtttacccttaatgctgaaattgcgggctccgggag

SEQ ID NO: 197188 - DNA, 55 bp, Artificial
  Synthetic oligonucleotide
gtccctgcacaagtggtacgggatatttaccgctggtatgtagaggacggtatga

SEQ ID NO: 197189 - DNA, 55 bp, Artificial
  Synthetic oligonucleotide
actatatttataatacgcagcacggaggtatccgggagcgttatggcggcagggg

SEQ ID NO: 197190 - DNA, 55 bp, Artificial
  Synthetic oligonucleotide
gtcccgcctgtaacgcacactccgtatgcaatttcagccgatgtcccactgacag

SEQ ID NO: 197191 - DNA, 52 bp, Artificial
  Synthetic oligonucleotide
gtccccttcggggatatcggttcttcaaatcgttccgaacggtaattacatc

SEQ ID NO: 197192 - DNA, 55 bp, Artificial
  Synthetic oligonucleotide
actcctctcccaattctccgcatcttgcggttctatgtaaacctctcattgactc

SEQ ID NO: 197193 - DNA, 57 bp, Artificial
  Synthetic oligonucleotide
caaattagaaggtgcaaagcttcaaggtaggatagagtccaaacagaacgatttaga

SEQ ID NO: 197194 - DNA, 55 bp, Artificial
  Synthetic oligonucleotide
actctgtctccgccaatgcccggctaagatcacagatccggttacggatccgggt

SEQ ID NO: 197195 - DNA, 55 bp, Artificial
  Synthetic oligonucleotide
actcttattactcccctccagggtttaatctccttacccatcgtacagatcagtg

SEQ ID NO: 197196 - DNA, 55 bp, Artificial
  Synthetic oligonucleotide
tgttctttctctcctcgtggcggttataggacctgaactgcccggatacgcacac

SEQ ID NO: 197197 - DNA, 55 bp, Artificial
  Synthetic oligonucleotide
aagatgatacaatattcacccctcagagaacgatctccgaggggatttttattaa

SEQ ID NO: 197198 - DNA, 53 bp, Artificial
  Synthetic oligonucleotide
aagagtgagcctccggttccgggagtaccctatgtagtatggttggtgcccgg

SEQ ID NO: 197199 - DNA, 55 bp, Artificial
  Synthetic oligonucleotide
aagactgatgcttccgcacagagtggagacggattagtatactggtctatgtggg

SEQ ID NO: 197200 - DNA, 55 bp, Artificial
  Synthetic oligonucleotide
ttagaggactgtgccaaagtaacagctattggagaacgtatgaccggggtaccag

SEQ ID NO: 197201 - DNA, 55 bp, Artificial
  Synthetic oligonucleotide
ttagcatgcttaatgagaccacttatgaatccgccaccaaaggtatctaaaagtc

SEQ ID NO: 197202 - DNA, 55 bp, Artificial
  Synthetic oligonucleotide
ttattcctgtgaggtggagaaagacgggaatgacattattaccatccgagtgacc

SEQ ID NO: 197203 - DNA, 55 bp, Artificial
  Synthetic oligonucleotide
aactgcaacgaggatgagaagacactgacgatcgacctcatggaggacagtaagg

SEQ ID NO: 197204 - DNA, 55 bp, Artificial
  Synthetic oligonucleotide
cggtgcaacccgtgtgtagctctctcccgcaaggcggtaggtaaacagaacctcc

SEQ ID NO: 197205 - DNA, 55 bp, Artificial
  Synthetic oligonucleotide
ttatttatcggctgcctgataggtaatatcctcggaggcgcaatactccctgaca

SEQ ID NO: 197206 - DNA, 55 bp, Artificial
  Synthetic oligonucleotide
ttccagctacttctaatattgtatgtacgcataagcttcctctgtctatcctgcc

SEQ ID NO: 197207 - DNA, 55 bp, Artificial
  Synthetic oligonucleotide
ttccaggatacacttgaacaaagccttaggaagcccaaggaagcttttcgcaccc

SEQ ID NO: 197208 - DNA, 55 bp, Artificial
  Synthetic oligonucleotide
ttccccggtaagccggtagcttccctcttcggagagagacgccatatcactgcgg

SEQ ID NO: 197209 - DNA, 55 bp, Artificial
  Synthetic oligonucleotide
ttcgatcgtaggcaaggcatcacttaagacaaagtatgcacctaagggtggtccg

SEQ ID NO: 197210 - DNA, 55 bp, Artificial
  Synthetic oligonucleotide
ttcgcttaagtcccgcgagctcgatggggagtgcctcacagcttcgcatgcatct

SEQ ID NO: 197211 - DNA, 55 bp, Artificial
  Synthetic oligonucleotide
ttcggagcgatcaaccatctggcagaatgcgctgtattcattacgtttgcgggca

SEQ ID NO: 197212 - DNA, 55 bp, Artificial
  Synthetic oligonucleotide
ttctgaaattcgcacagcaggagggaggtacggattgttaaggaataagtacagg

SEQ ID NO: 197213 - DNA, 55 bp, Artificial
  Synthetic oligonucleotide
tttgttgcaacaagccattcattgtaatccttatagcctgctggtggcggacagt

SEQ ID NO: 197214 - DNA, 55 bp, Artificial
  Synthetic oligonucleotide
tttcttttccgggctgcccgttccctcgcacgaagcgccgttcgtccggatgcag

SEQ ID NO: 197215 - DNA, 60 bp, Artificial
  Synthetic oligonucleotide
caaattacacccagtatagcttgctttgtgttctaccaatgcgctcgacatattctataa

SEQ ID NO: 197216 - DNA, 55 bp, Artificial
  Synthetic oligonucleotide
tttccagattatcacattaccggtggaatttgatgcctcaagaagggcgatgata

SEQ ID NO: 197217 - DNA, 55 bp, Artificial
  Synthetic oligonucleotide
ttgtatccacagtttatccgaacggactgcaattaagaccggagacattcgcacg

SEQ ID NO: 197218 - DNA, 55 bp, Artificial
  Synthetic oligonucleotide
ttgtagcctgtggagcaattgtcagtgtaactgtattacttgtaactcctgcatt

SEQ ID NO: 197219 - DNA, 55 bp, Artificial
  Synthetic oligonucleotide
ttggaggtgcaagtgtaaagagaatacatagaccaagtgatacctcggcagtagg

SEQ ID NO: 197220 - DNA, 52 bp, Artificial
  Synthetic oligonucleotide
aaagtttagtttcacagattacggaccatttgaaagggataacgactgtagg

SEQ ID NO: 197221 - DNA, 54 bp, Artificial
  Synthetic oligonucleotide
aaataggagggtgaaacccaagggaatccgcttgacagggcttgtccggaatgc

SEQ ID NO: 197222 - DNA, 55 bp, Artificial
  Synthetic oligonucleotide
aaatcccgtacttgttggcaatacgccagtagctatcgcctgcttggacggtgta

SEQ ID NO: 197223 - DNA, 55 bp, Artificial
  Synthetic oligonucleotide
aaatcgcttgtgaatctggagtctggcgtgaattagtttgcttcgtaagcttcct

SEQ ID NO: 197224 - DNA, 55 bp, Artificial
  Synthetic oligonucleotide
ttgagagcactgctgccgatactaacgcagagtctgtgatctttacaccgtggaa

SEQ ID NO: 197225 - DNA, 55 bp, Artificial
  Synthetic oligonucleotide
ttgacgtttggcgtatctatgggaattgcagggattgtccactcattgagagggc

SEQ ID NO: 197226 - DNA, 60 bp, Artificial
  Synthetic oligonucleotide
aattggatatgctaatccttagtattctggcaaaacacgattgttatggataccagttga

SEQ ID NO: 197227 - DNA, 55 bp, Artificial
  Synthetic oligonucleotide
ttgacactcaggacaccgcctcgagtatgaagtggtcgggcatggactctacggc

SEQ ID NO: 197228 - DNA, 55 bp, Artificial
  Synthetic oligonucleotide
aacaggcagctatcacgccctagtggtcttaaagagataccggagtgtcacccgg

SEQ ID NO: 197229 - DNA, 55 bp, Artificial
  Synthetic oligonucleotide
aacatccggtaatagcagtaaatgatcaatgcccatccgaccacataccagatca

SEQ ID NO: 197230 - DNA, 55 bp, Artificial
  Synthetic oligonucleotide
aacattactttgataaacatccacgcgccgaaaggattgctacggtatgggaccc

SEQ ID NO: 197231 - DNA, 55 bp, Artificial
  Synthetic oligonucleotide
ttctgattctagggattccgattcccagacttgtattgtcggttacacagattgg

SEQ ID NO: 197232 - DNA, 55 bp, Artificial
  Synthetic oligonucleotide
tagccatgtctttacaacttccatggccattagcccacctattatcttcgcccca

SEQ ID NO: 197233 - DNA, 55 bp, Artificial
  Synthetic oligonucleotide
tagcgctattggtgagaccgagtcagatgcaataagaattgcaactatagatgga

SEQ ID NO: 197234 - DNA, 51 bp, Artificial
  Synthetic oligonucleotide
acacccgcttcttgtcccgatcgtattccggccggacgcggtaagaccgtt

SEQ ID NO: 197235 - DNA, 55 bp, Artificial
  Synthetic oligonucleotide
tatagtctatgccatcggttttcttgattcaagttagcctctgaacagtaacatc

SEQ ID NO: 197236 - DNA, 55 bp, Artificial
  Synthetic oligonucleotide
tatatggtcttgcgtggagcacagaagcaatgtgtcttgtgtataataaaggact

SEQ ID NO: 197237 - DNA, 54 bp, Artificial
  Synthetic oligonucleotide
aattcacttggcaaacgtattttgttgcctagtgaagttcgaatctttttagcc

SEQ ID NO: 197238 - DNA, 55 bp, Artificial
  Synthetic oligonucleotide
tatcaccgtgttcttaagcggaccgggagcttatggagcttccagagtggacgag

SEQ ID NO: 197239 - DNA, 55 bp, Artificial
  Synthetic oligonucleotide
tattgatacttaagactgattgagtcctgcgggattccgcatctaagatggatta

SEQ ID NO: 197240 - DNA, 55 bp, Artificial
  Synthetic oligonucleotide
aattcactcggctgaaccgatattccggcaagcgagattgatattttcgcaccgc

SEQ ID NO: 197241 - DNA, 55 bp, Artificial
  Synthetic oligonucleotide
tcaaggattgccttgaataccacgaaaagacctatggtgtcacaatcaatgcggt

SEQ ID NO: 197242 - DNA, 55 bp, Artificial
  Synthetic oligonucleotide
tcacctccggtcagtgtgtctacaaacttagctgcaaggtcgtgtccctttgtaa

SEQ ID NO: 197243 - DNA, 55 bp, Artificial
  Synthetic oligonucleotide
tcagaggatgggaatcaacctagaactgctcgataaggatagctttaagcagatc

SEQ ID NO: 197244 - DNA, 55 bp, Artificial
  Synthetic oligonucleotide
tcatcacaccttgtcaggggcctcgacccatactatccagcttactatgagggac

SEQ ID NO: 197245 - DNA, 55 bp, Artificial
  Synthetic oligonucleotide
aatgatacgctattatccgaaatgatacgcttatccggaatgcttcgctgcgggg

SEQ ID NO: 197246 - DNA, 55 bp, Artificial
  Synthetic oligonucleotide
aatctccatccgcagtttgtcgaatgatctgccgctcagaatcctacattttgac

SEQ ID NO: 197247 - DNA, 55 bp, Artificial
  Synthetic oligonucleotide
aatatttatcggatcaatcaggcaattcagttgatgagttccaccgatatgcccc

SEQ ID NO: 197248 - DNA, 59 bp, Artificial
  Synthetic oligonucleotide
gcgggatagtaatgtcttcgtcgatttgtggtgcagccgacgtgaaccttataattgtc

SEQ ID NO: 197249 - DNA, 55 bp, Artificial
  Synthetic oligonucleotide
tcctgacagcctgcggagcctacggccctccaacatatgtaccatcagacaccac

SEQ ID NO: 197250 - DNA, 55 bp, Artificial
  Synthetic oligonucleotide
tgttactgacgctcccatggatattacaagtcgttgcgtgacggcttacagttgg

SEQ ID NO: 197251 - DNA, 55 bp, Artificial
  Synthetic oligonucleotide
tgtcggctcaaacttcttccaggcggacagaaccggagcgtaggactgaatggaa

SEQ ID NO: 197252 - DNA, 55 bp, Artificial
  Synthetic oligonucleotide
tgtatctttgtcggttgtcccgtaatatatcatagtcagtgtatttcctgtcagt

SEQ ID NO: 197253 - DNA, 55 bp, Artificial
  Synthetic oligonucleotide
tggaacgaacctttatgtccattctgtcttttaccagactctcaagagcctttcc

SEQ ID NO: 197254 - DNA, 55 bp, Artificial
  Synthetic oligonucleotide
tgagattaaaagcatacgtctggacaggtttgaccataaaaccaagcgctcctac

SEQ ID NO: 197255 - DNA, 55 bp, Artificial
  Synthetic oligonucleotide
tgaatgcccggtaataatcatttggtgtcagacgattgaacagttttacatgacg

SEQ ID NO: 197256 - DNA, 55 bp, Artificial
  Synthetic oligonucleotide
tctggcttctggaagtttgttaccagtacctgaagtaattcaacatgttcgtttc

SEQ ID NO: 197257 - DNA, 55 bp, Artificial
  Synthetic oligonucleotide
tctgactgaaaaccattcatataacggcggattctgaaatactactcccctactc

SEQ ID NO: 197258 - DNA, 55 bp, Artificial
  Synthetic oligonucleotide
tctctgtcctgtacgaaccaccacatagccgtctccgctgatttccgtaacgctt

SEQ ID NO: 197259 - DNA, 55 bp, Artificial
  Synthetic oligonucleotide
ttcaaggtaggatagagtccaaacagaacgatttagaagccgtagaaggcgaaat

SEQ ID NO: 197260 - DNA, 55 bp, Artificial
  Synthetic oligonucleotide
tctcctaccctcagcaaaaggacatgtacacgtagatctcctcggatgctccttg

SEQ ID NO: 197261 - DNA, 55 bp, Artificial
  Synthetic oligonucleotide
tctccagatcctgtccgctactctgtgctgttgtaatatccgttttgggataacg

SEQ ID NO: 197262 - DNA, 55 bp, Artificial
  Synthetic oligonucleotide
aagggttgggatgtacctacatttcatcttccgaaggcagaaacagcaaatcagc

SEQ ID NO: 197263 - DNA, 55 bp, Artificial
  Synthetic oligonucleotide
tcgttacatctttcggcagctctgttccaatcggcgctacgaagactgctcctcc

SEQ ID NO: 197264 - DNA, 55 bp, Artificial
  Synthetic oligonucleotide
tcggcctaaacctgaaatgcctcgtttaggagatgatagctttcttgtacgcatt

SEQ ID NO: 197265 - DNA, 55 bp, Artificial
  Synthetic oligonucleotide
tcgcgatgtctgagagtttacgcaacctatgattaaccccacttttcccgagctg

SEQ ID NO: 197266 - DNA, 55 bp, Artificial
  Synthetic oligonucleotide
tcgccgtctcgccattctgcagggttgccacaaccgttgcatcggagccctgact

SEQ ID NO: 197267 - DNA, 55 bp, Artificial
  Synthetic oligonucleotide
agttgtaggcacagacgcaagttcaagcgaaggttggtagttggttcaggcggtc

SEQ ID NO: 197268 - DNA, 55 bp, Artificial
  Synthetic oligonucleotide
gcctgtttagatgcgatcaggttatcaagtttcgactcctgcgactcatactctg

SEQ ID NO: 197269 - DNA, 55 bp, Artificial
  Synthetic oligonucleotide
gcgaaaatacgcttctgttgcgaactttaattctcggtggatcccgatacgcgga

SEQ ID NO: 197270 - DNA, 59 bp, Artificial
  Synthetic oligonucleotide
ttcagcgtttacaagccagtgggggattgtagaccagaaattacatcgtacaatccata

SEQ ID NO: 197271 - DNA, 55 bp, Artificial
  Synthetic oligonucleotide
gcgaatggagtggtagcctccattgtttaccacgaaaatcttaatgggcatctga

SEQ ID NO: 197272 - DNA, 55 bp, Artificial
  Synthetic oligonucleotide
agtcccgcaaacgatagatgaagtccggaaatcgccaggatatgtccaatcccgt

SEQ ID NO: 197273 - DNA, 55 bp, Artificial
  Synthetic oligonucleotide
gcgatggcatgtgtccgtgacaatctgaaatatacgaaactagaccggaaaggta

SEQ ID NO: 197274 - DNA, 55 bp, Artificial
  Synthetic oligonucleotide
gcgattgtggcctgcactggaaatccaagcatttacggttctgtcgggagtttcg

SEQ ID NO: 197275 - DNA, 55 bp, Artificial
  Synthetic oligonucleotide
agtatcgatgaccttcctctttccatacactgcgccagatttctcgatggatccg

SEQ ID NO: 197276 - DNA, 55 bp, Artificial
  Synthetic oligonucleotide
gcgcaatatcccgcgatattttcagatgatgctcctgcatataccgaagacatcc

SEQ ID NO: 197277 - DNA, 55 bp, Artificial
  Synthetic oligonucleotide
gcgcatagcagttggggatagaattgtaccggtattcccggatcgtaagcggatc

SEQ ID NO: 197278 - DNA, 55 bp, Artificial
  Synthetic oligonucleotide
gcgcgttccggtatcccgaaacaatatagtacatcggattgagctttaacacggc

SEQ ID NO: 197279 - DNA, 55 bp, Artificial
  Synthetic oligonucleotide
agtaagcagcggaggagatgtctcccggtacgcagatagactgaccgtatagttc

SEQ ID NO: 197280 - DNA, 55 bp, Artificial
  Synthetic oligonucleotide
gcgctacagatgcgagaagaaacttacgaagcataccgggccttgcatttcagag

SEQ ID NO: 197281 - DNA, 54 bp, Artificial
  Synthetic oligonucleotide
agcggtaaagcttccccaatgagaacaaggtgagcaccctaaacgggtgcggtg

SEQ ID NO: 197282 - DNA, 60 bp, Artificial
  Synthetic oligonucleotide
gggtcctgcataaaattcatccgcccacagcctgacatgaatgggcaatgcccctccaca

SEQ ID NO: 197283 - DNA, 55 bp, Artificial
  Synthetic oligonucleotide
gcgctctcgcccataatagctgtaacaccttcgtaactaagtgaaccaaccgggg

SEQ ID NO: 197284 - DNA, 53 bp, Artificial
  Synthetic oligonucleotide
gcggccgaccgcctaggtttagacttcatttgcctgacgggtaaccctggaac

SEQ ID NO: 197285 - DNA, 55 bp, Artificial
  Synthetic oligonucleotide
gcttgcatcggatacaaggttaagttccgtgaactcatcattattccactggtac

SEQ ID NO: 197286 - DNA, 55 bp, Artificial
  Synthetic oligonucleotide
gcttcatatgggcggaatccgaataatcgcaccagccggaataaggaatgacgtc

SEQ ID NO: 197287 - DNA, 55 bp, Artificial
  Synthetic oligonucleotide
gcttatcccctctccgctccgactgcagcaaatagctgaaggcaggaactccgtg

SEQ ID NO: 197288 - DNA, 55 bp, Artificial
  Synthetic oligonucleotide
gctggctgaaccgagcagatgtcctatatctgtaaaacgtacgctgataccccgg

SEQ ID NO: 197289 - DNA, 55 bp, Artificial
  Synthetic oligonucleotide
gctggacatcatagttacccgctgtaatctgacgagtggcttgttgcaagcgccg

SEQ ID NO: 197290 - DNA, 55 bp, Artificial
  Synthetic oligonucleotide
gctgctttcgtcagatctgtcacagcgatcactcctgccacagatgtttctttga

SEQ ID NO: 197291 - DNA, 55 bp, Artificial
  Synthetic oligonucleotide
gctgagactggcaatcaatgaaatttatgcccgacatggttatcagttcacatcg

SEQ ID NO: 197292 - DNA, 55 bp, Artificial
  Synthetic oligonucleotide
gctcccatccccggattattgactacttctccggtagctctgtcctttaccatcc

SEQ ID NO: 197293 - DNA, 58 bp, Artificial
  Synthetic oligonucleotide
gcaagaaagaattacctttagtacctccgccgtatggcgatgatacataaaatgtcac

SEQ ID NO: 197294 - DNA, 55 bp, Artificial
  Synthetic oligonucleotide
gctcccacaaccgcacaggtcacaggctcgataccgcttctcgtccccactgcca

SEQ ID NO: 197295 - DNA, 55 bp, Artificial
  Synthetic oligonucleotide
gctccataagcatctgatctatgttctcattcgtgtaccacttaccggattggtg

SEQ ID NO: 197296 - DNA, 55 bp, Artificial
  Synthetic oligonucleotide
gctatgtatgccgtaacgagaccaagtaaggacgagttacaaacaggttaagctg

SEQ ID NO: 197297 - DNA, 55 bp, Artificial
  Synthetic oligonucleotide
gctatccccacaacaaacgccacaacgggaacggcatatctcagggcgacgctcc

SEQ ID NO: 197298 - DNA, 55 bp, Artificial
  Synthetic oligonucleotide
gcgtgtaaaatccacacttggagccagtacttggaatacaacattagccggtctt

SEQ ID NO: 197299 - DNA, 55 bp, Artificial
  Synthetic oligonucleotide
gcgtcataagtccttgatgcgatctgattggcaactcgtgtaaggtcagtaagac

SEQ ID NO: 197300 - DNA, 54 bp, Artificial
  Synthetic oligonucleotide
gcggtgtcactgtccgcccgtacttcaccggaaatggggccgtccataaaggag

SEQ ID NO: 197301 - DNA, 55 bp, Artificial
  Synthetic oligonucleotide
gcacacaagtcgggcggaggtccctactacaatgcgccgttttatgaggacggga

SEQ ID NO: 197302 - DNA, 55 bp, Artificial
  Synthetic oligonucleotide
atccgtcagggaattggcataacggatataatcggtagtaatggacttcttgcgt

SEQ ID NO: 197303 - DNA, 55 bp, Artificial
  Synthetic oligonucleotide
gatttggttttcacgattcccaaagctccgaacgcgaagtgacactgtacgttcc

SEQ ID NO: 197304 - DNA, 58 bp, Artificial
  Synthetic oligonucleotide
gttccacgaggaagttggcttgaaatatggactcgaacgaggacaggttcaagacaga

SEQ ID NO: 197305 - DNA, 55 bp, Artificial
  Synthetic oligonucleotide
gatgataccaattgcaagtgtctgcgcgaatccttttactgtaccggaacctttg

SEQ ID NO: 197306 - DNA, 55 bp, Artificial
  Synthetic oligonucleotide
gatcggtgagagaccgggattgcttacatctgaaagtatgtcggcgtatatctcg

SEQ ID NO: 197307 - DNA, 55 bp, Artificial
  Synthetic oligonucleotide
atcctttggaagggaggctttgcaggtcttatagtccagcaccactaccgggcaa

SEQ ID NO: 197308 - DNA, 55 bp, Artificial
  Synthetic oligonucleotide
gatcagtgtacagaacgcagacgtgacgacaagagccgattatgcaggtgtgttc

SEQ ID NO: 197309 - DNA, 55 bp, Artificial
  Synthetic oligonucleotide
gatacatgcaatcactatgaacacggttgtaggaatcggtattcccgggataacg

SEQ ID NO: 197310 - DNA, 55 bp, Artificial
  Synthetic oligonucleotide
gagttacgtgtgtatccatcagggaattccacccttactattctctcgtctccac

SEQ ID NO: 197311 - DNA, 55 bp, Artificial
  Synthetic oligonucleotide
gagtgtctttaaagctttccgcagaaatagcggaccgcacaataaagacaccggc

SEQ ID NO: 197312 - DNA, 55 bp, Artificial
  Synthetic oligonucleotide
atcgttataagacaggatcatcacacttgtgtttctgaccctacagtccggcctg

SEQ ID NO: 197313 - DNA, 55 bp, Artificial
  Synthetic oligonucleotide
gagtgctctcattcgctgttgctctcatgccattaaggtacgatttggggaggcc

SEQ ID NO: 197314 - DNA, 55 bp, Artificial
  Synthetic oligonucleotide
gagtcgagacaagtgcaaccacaggcaatttctcgatatataggcaggcatccag

SEQ ID NO: 197315 - DNA, 58 bp, Artificial
  Synthetic oligonucleotide
atccgtgatcccttctactttggacttcgcctcatgattccctgtcgaaggaacatac

SEQ ID NO: 197316 - DNA, 55 bp, Artificial
  Synthetic oligonucleotide
gaggggaacctgcggacttattctgaataccggcagatatatatttgaggaggac

SEQ ID NO: 197317 - DNA, 55 bp, Artificial
  Synthetic oligonucleotide
gaggcggaatcagtgcctgtttaggtaggctataagccttagccagaatgggcac

SEQ ID NO: 197318 - DNA, 55 bp, Artificial
  Synthetic oligonucleotide
gaggcattcctttgaggtcacgaaatgttggctcaatgctaagtgtacgtttccg

SEQ ID NO: 197319 - DNA, 55 bp, Artificial
  Synthetic oligonucleotide
gaggatgcggattacgcctgttatacaggttccgtaattgcgggaaaggatggcc

SEQ ID NO: 197320 - DNA, 55 bp, Artificial
  Synthetic oligonucleotide
gcctataactacagccgcacccctgtgataacagaatcaggagcaaccgtcaacg

SEQ ID NO: 197321 - DNA, 55 bp, Artificial
  Synthetic oligonucleotide
gccgttgtctatgacgattatgacaggctgattcagctgtgcgacgccatatccc

SEQ ID NO: 197322 - DNA, 55 bp, Artificial
  Synthetic oligonucleotide
gccggcctcacacggttccagcagagcccgtatgtcctcgtctgaaagctcgaag

SEQ ID NO: 197323 - DNA, 55 bp, Artificial
  Synthetic oligonucleotide
gccggcactgcattttcacggctaacacactcatgacctcccacttttatccgca

SEQ ID NO: 197324 - DNA, 55 bp, Artificial
  Synthetic oligonucleotide
gccgctacgcccagcatatctcggcttgagttatcaacactatcaaagtaagacg

SEQ ID NO: 197325 - DNA, 55 bp, Artificial
  Synthetic oligonucleotide
gccgcgcttatcctttatcgtgaaggtgaaaatcggggacgcaatgtcgtcataa

SEQ ID NO: 197326 - DNA, 60 bp, Artificial
  Synthetic oligonucleotide
catatgcactgccagagcgtgcctctggtagaacgtgaagacggttctttcaagctgtgt

SEQ ID NO: 197327 - DNA, 55 bp, Artificial
  Synthetic oligonucleotide
gccgcatcactaaatacctttctaggttgatatgggttaggtataacgcggtcaa

SEQ ID NO: 197328 - DNA, 55 bp, Artificial
  Synthetic oligonucleotide
gccgaaataatctgtgaaataactgtggcaatcgctgtcccttttacgcccatcc

SEQ ID NO: 197329 - DNA, 55 bp, Artificial
  Synthetic oligonucleotide
gccatccattctgccggcctacggcgtacccattcattcggctggcatagtcccc

SEQ ID NO: 197330 - DNA, 54 bp, Artificial
  Synthetic oligonucleotide
ataggtgtctcgcggtagactaacgaggcgtagggttttatggctagggttcag

SEQ ID NO: 197331 - DNA, 55 bp, Artificial
  Synthetic oligonucleotide
gcatcgatgaccttcgttgcttccggttcttcgcctgctgacataagggcggcga

SEQ ID NO: 197332 - DNA, 55 bp, Artificial
  Synthetic oligonucleotide
gcagtcaaacaggtttgtgacactgcctgcgataacacccggatcttttgtcagg

SEQ ID NO: 197333 - DNA, 55 bp, Artificial
  Synthetic oligonucleotide
gcaggtcatgcatggcattgaaagtcgattccgcgcctgccgaggaaagatacag

SEQ ID NO: 197334 - DNA, 55 bp, Artificial
  Synthetic oligonucleotide
gcaggggtagtggattctggtggacagggactcttagaagttatccgcggagcat

SEQ ID NO: 197335 - DNA, 55 bp, Artificial
  Synthetic oligonucleotide
atcacctatattttccatttcgaagaccaaatgagggtcacggatgcgtctacgg

SEQ ID NO: 197336 - DNA, 55 bp, Artificial
  Synthetic oligonucleotide
gcagagcgtacataaggatgatagtaagtggtattgccataccaatacacccaag

SEQ ID NO: 197337 - DNA, 54 bp, Artificial
  Synthetic oligonucleotide
gacttattgaagtgaaatacacgataaagcctaccaacaaatttcaaaaggatt

SEQ ID NO: 197338 - DNA, 55 bp, Artificial
  Synthetic oligonucleotide
gcaccaattccggtacagatggtattccacagctctccgaaccattgtgtaatcg

SEQ ID NO: 197339 - DNA, 55 bp, Artificial
  Synthetic oligonucleotide
ggggccatgaatatgatgactcacggggtggagaatccgtttatagagtatcgtg

SEQ ID NO: 197340 - DNA, 55 bp, Artificial
  Synthetic oligonucleotide
agccatcttccgtcaccggcatttgggaacggctgtcctcactgtagggaaccgg

SEQ ID NO: 197341 - DNA, 55 bp, Artificial
  Synthetic oligonucleotide
gggctttggcctttgggacgctctgatgatgggtgtgctcccctttattccgggg

SEQ ID NO: 197342 - DNA, 55 bp, Artificial
  Synthetic oligonucleotide
gggctaagggaatctgctgtgatattgcctctgtacctgatagaggtgaggtcac

SEQ ID NO: 197343 - DNA, 54 bp, Artificial
  Synthetic oligonucleotide
gggcctttctccagatatccgagaatttcctcatacccctccggtacttttatg

SEQ ID NO: 197344 - DNA, 55 bp, Artificial
  Synthetic oligonucleotide
gggcagccgatctctttgtatagatcccagcgaaccacatagccatagttcaatg

SEQ ID NO: 197345 - DNA, 55 bp, Artificial
  Synthetic oligonucleotide
gggatagagggttatgacagagcctgcatatgccttcgcaagatgattgaaaccc

SEQ ID NO: 197346 - DNA, 55 bp, Artificial
  Synthetic oligonucleotide
gggatacagattactgccgcaatcatgataatatacggtgtccagtaatatccac

SEQ ID NO: 197347 - DNA, 55 bp, Artificial
  Synthetic oligonucleotide
gggacgccacaatctggaacccacagtaattctgagaatcctgcgccggaattcg

SEQ ID NO: 197348 - DNA, 56 bp, Artificial
  Synthetic oligonucleotide
ggttaagggtgaaagcctgtagttgtaggcacagacgcaagttcaagcgaaggttg

SEQ ID NO: 197349 - DNA, 53 bp, Artificial
  Synthetic oligonucleotide
gggaaaaagggcgtagaagcagaaagcgtaacaatcggaacggtaggagagaa

SEQ ID NO: 197350 - DNA, 55 bp, Artificial
  Synthetic oligonucleotide
ggcttgaaatatggactcgaacgaggacaggttcaagacagagaggaacgtaggg

SEQ ID NO: 197351 - DNA, 55 bp, Artificial
  Synthetic oligonucleotide
ggctagcccacttgttctcttcaatagtaggttccaatccaccagagggtatgcg

SEQ ID NO: 197352 - DNA, 55 bp, Artificial
  Synthetic oligonucleotide
ggcgcgtcttcctcatttaatccgtcttcaatggaaaagatcggataatgttcgg

SEQ ID NO: 197353 - DNA, 55 bp, Artificial
  Synthetic oligonucleotide
ggcgcatcctcaaatggatcatacccttgatataccgttcccgccagacctgttc

SEQ ID NO: 197354 - DNA, 55 bp, Artificial
  Synthetic oligonucleotide
ggccggctgtaagtgagtcagctgtacagtcaaaaccgatgtagaaagtagcctt

SEQ ID NO: 197355 - DNA, 54 bp, Artificial
  Synthetic oligonucleotide
ggcccctatggggaccttagaggggacgctttcgctcggataaacacgcagcgg

SEQ ID NO: 197356 - DNA, 55 bp, Artificial
  Synthetic oligonucleotide
ggcagttgccgtaagagcagggatgttaatgaaggataccaagggtgagaactat

SEQ ID NO: 197357 - DNA, 55 bp, Artificial
  Synthetic oligonucleotide
agagtccaaacagaacgatttagaagccgtagaaggcgaaattgagcgttctagg

SEQ ID NO: 197358 - DNA, 55 bp, Artificial
  Synthetic oligonucleotide
ggtggaggaacagcggacacagatcggtgtgttaaaggcactcggctacagtgaa

SEQ ID NO: 197359 - DNA, 54 bp, Artificial
  Synthetic oligonucleotide
gagatacgcggttttattatacgtgcaatcgtaaacggtagaatacgagtacct

SEQ ID NO: 197360 - DNA, 55 bp, Artificial
  Synthetic oligonucleotide
ggtgcaccaaatgcaacttcggcagaagactggtttgacatcgcttatatacttc

SEQ ID NO: 197361 - DNA, 55 bp, Artificial
  Synthetic oligonucleotide
ggtcggctcatagccgtatctctttaatttggccacaatactctcaggggacttg

SEQ ID NO: 197362 - DNA, 54 bp, Artificial
  Synthetic oligonucleotide
ggtcccaccttcgcctttacgatcgggagcctcgagagcttaagataaaacggc

SEQ ID NO: 197363 - DNA, 55 bp, Artificial
  Synthetic oligonucleotide
ggtcagggttgcccacatcattgtcatggctgccagaacccggaaacgtggagtg

SEQ ID NO: 197364 - DNA, 55 bp, Artificial
  Synthetic oligonucleotide
ggtattcattgagcagagactggacttctctcgatgggttgagaacggattcgga

SEQ ID NO: 197365 - DNA, 54 bp, Artificial
  Synthetic oligonucleotide
agatggaggccaggtcctttaccaaagcacggaagtccactcttccctccgccg

SEQ ID NO: 197366 - DNA, 55 bp, Artificial
  Synthetic oligonucleotide
ggtatcaaagaaggggctcagaatgctaaagcccttatgaacggagcttcctacg

SEQ ID NO: 197367 - DNA, 54 bp, Artificial
  Synthetic oligonucleotide
ggtacttgttacctgtaattcttcccctatatgggtaatacggattagatcgtc

SEQ ID NO: 197368 - DNA, 55 bp, Artificial
  Synthetic oligonucleotide
ggtacggaaacttgtgaagcgattagatgaattggatcccataccattgccgtgg

SEQ ID NO: 197369 - DNA, 55 bp, Artificial
  Synthetic oligonucleotide
ggtacatacagaagactgtgggcaggtttctattaatatcagcaagccgggcatt

SEQ ID NO: 197370 - DNA, 57 bp, Artificial
  Synthetic oligonucleotide
ctctaacacgttctatgcctcccaatatccgacctacgtatttgctaagaggtcgga

SEQ ID NO: 197371 - DNA, 55 bp, Artificial
  Synthetic oligonucleotide
agcactctgtcatatgggcaaggagagcctcccctctgcgtatgtcccggcactg

SEQ ID NO: 197372 - DNA, 55 bp, Artificial
  Synthetic oligonucleotide
ggtacaattacgaccggtgcccctgctgcacatttggaatatggggttgcagtag

SEQ ID NO: 197373 - DNA, 55 bp, Artificial
  Synthetic oligonucleotide
ggtaaccgtacaccgcaagcatcgggaatacactgatcagcttgatgcactgttc

SEQ ID NO: 197374 - DNA, 55 bp, Artificial
  Synthetic oligonucleotide
gggtgtaaacggtcgcccactcttccgcattaccgaggctttgaatataaggctc

SEQ ID NO: 197375 - DNA, 55 bp, Artificial
  Synthetic oligonucleotide
gggtatatatcgagtaaaagcagtcgtattgtgtaccggaacatatctccgtgcg

SEQ ID NO: 197376 - DNA, 55 bp, Artificial
  Synthetic oligonucleotide
gggtacacaccggaatgaagcagagcccggctgtcctgacagagcatatcctgga

SEQ ID NO: 197377 - DNA, 55 bp, Artificial
  Synthetic oligonucleotide
ggaaaccgtatcctcattgcgtgtgtttgaagcataggcttcctcccacgtaggg

SEQ ID NO: 197378 - DNA, 55 bp, Artificial
  Synthetic oligonucleotide
ggaaccggcgcagacgaaatctcccacaccggaaacatcgtggtggattcccttg

SEQ ID NO: 197379 - DNA, 55 bp, Artificial
  Synthetic oligonucleotide
ggaagacgaaccctgtccggtctgtggagccatacatcatccgacactggcagtc

SEQ ID NO: 197380 - DNA, 54 bp, Artificial
  Synthetic oligonucleotide
aggaggggagccgtgaaaggacagcccttccggaacgattcgcacccaatgaag

SEQ ID NO: 197381 - DNA, 57 bp, Artificial
  Synthetic oligonucleotide
cattgccggaaacccgtgcattgccggaaacctgtgcatcgccgaaaacccgtgcat

SEQ ID NO: 197382 - DNA, 55 bp, Artificial
  Synthetic oligonucleotide
aggagagcctcccctctgcgtatgtcccggcactgtaatccggatttcctgaccc

SEQ ID NO: 197383 - DNA, 55 bp, Artificial
  Synthetic oligonucleotide
ggaatcaccaagttcttccactccgaggtacgatacatcaccaataaatacggtg

SEQ ID NO: 197384 - DNA, 55 bp, Artificial
  Synthetic oligonucleotide
ggactcatgcaagtattgatcatcggatgtccggaagcaaggtaatcaccgattt

SEQ ID NO: 197385 - DNA, 55 bp, Artificial
  Synthetic oligonucleotide
agcttggaaatataggcgatacgacagcggtggaaagaggactgacaggaacgga

SEQ ID NO: 197386 - DNA, 55 bp, Artificial
  Synthetic oligonucleotide
agctgtcggccaaaatacagacaacgtctgctttccctgatgagatgtattctcg

SEQ ID NO: 197387 - DNA, 55 bp, Artificial
  Synthetic oligonucleotide
ggactgatatgtgccccgtaaacagagatcactctaacgggatcagcattagaac

SEQ ID NO: 197388 - DNA, 55 bp, Artificial
  Synthetic oligonucleotide
ggagaatggaatatggtcagtaatatcccttacaaacactggcgttccgtccccg

SEQ ID NO: 197389 - DNA, 55 bp, Artificial
  Synthetic oligonucleotide
ggagcacctgactttgtcggattcacagacaacagataaagttttgaactttccg

SEQ ID NO: 197390 - DNA, 55 bp, Artificial
  Synthetic oligonucleotide
ggaggcactggtgtagcagagtttacacctacagcatatagtgcgacagcgggag

SEQ ID NO: 197391 - DNA, 55 bp, Artificial
  Synthetic oligonucleotide
ggaggcaggcctaaagagattgtctatgatcaggataaggtccttgctgtaagtg

SEQ ID NO: 197392 - DNA, 54 bp, Artificial
  Synthetic oligonucleotide
aatcgttgccacccctagactaggcacggaaagggggtgttagcttgaagatag

SEQ ID NO: 197393 - DNA, 60 bp, Artificial
  Synthetic oligonucleotide
cgaggaatccttgctgaactacagagaacgccaatttgagcagaataaggctgaaataca

SEQ ID NO: 197394 - DNA, 55 bp, Artificial
  Synthetic oligonucleotide
ggcaagcacgtaactttgtgccatgacaccgcctcccagaatgatgcgggaaggg

SEQ ID NO: 197395 - DNA, 55 bp, Artificial
  Synthetic oligonucleotide
ggcactaggctcacttatttggatgaacgcacgaaaactccccatggtcagacac

SEQ ID NO: 197396 - DNA, 55 bp, Artificial
  Synthetic oligonucleotide
ggagtattatgctgcagccggaggtgacaaggcggatgcctttgacaattatgcc

SEQ ID NO: 197397 - DNA, 55 bp, Artificial
  Synthetic oligonucleotide
ggagtgcagggataaatcgaattagtttcggtttacagtcggcaaataacggaga

SEQ ID NO: 197398 - DNA, 55 bp, Artificial
  Synthetic oligonucleotide
ggataaggcatacattccatctcccaaggttccaaatgcgcaggcatatccacag

SEQ ID NO: 197399 - DNA, 54 bp, Artificial
  Synthetic oligonucleotide
tctcttgtaatacttaacttctaaccatggcccgttagccgggtctggggacaa

SEQ ID NO: 197400 - DNA, 54 bp, Artificial
  Synthetic oligonucleotide
gtgtcatggaggcagatatcgactctgacgtggatgcggaaacaattttaaaga

SEQ ID NO: 197401 - DNA, 54 bp, Artificial
  Synthetic oligonucleotide
gtattacacagggaaaactggcagaattaacaggaatacatcctgtatccatcc

SEQ ID NO: 197402 - DNA, 54 bp, Artificial
  Synthetic oligonucleotide
gatccagatccgtttgatcgaaagactctttgcccacgccgctacaatctgtcc

SEQ ID NO: 197403 - DNA, 54 bp, Artificial
  Synthetic oligonucleotide
ggcctgtaatgatcctaaggtgaagattcatacctgccgaataagacactgcat

SEQ ID NO: 197404 - DNA, 60 bp, Artificial
  Synthetic oligonucleotide
ttgctggtagaactgagagagggtggctgtcctagcggagcggagccacgtaggatagtc

SEQ ID NO: 197405 - DNA, 54 bp, Artificial
  Synthetic oligonucleotide
gctgtatcccccatccctttcgctcccggtcccggcatttgattccggcatgcc

SEQ ID NO: 197406 - DNA, 54 bp, Artificial
  Synthetic oligonucleotide
cttgtgtgtgtcggtggtcgtggatattatcaggaggagggcaagcctgcaatt

SEQ ID NO: 197407 - DNA, 54 bp, Artificial
  Synthetic oligonucleotide
gtgtcatagtcggcaagcggtaatcgtttcagttcatgccataccacacgcttg

SEQ ID NO: 197408 - DNA, 54 bp, Artificial
  Synthetic oligonucleotide
tctccacagtgagcgcagcctcccacgcattccacgggagcagtccttgcgcaa

SEQ ID NO: 197409 - DNA, 54 bp, Artificial
  Synthetic oligonucleotide
ttggaatttctagaaaaaaagtatcctttgcctgcacctgtacagattatagag

SEQ ID NO: 197410 - DNA, 54 bp, Artificial
  Synthetic oligonucleotide
gtaatatgccccgatgatatccggtcctactaccagtgcgccatgattctgtaa

SEQ ID NO: 197411 - DNA, 54 bp, Artificial
  Synthetic oligonucleotide
tacctatgaattgacggagcaggggctggttaaacgtaactgacaacggaacgg

SEQ ID NO: 197412 - DNA, 54 bp, Artificial
  Synthetic oligonucleotide
taaggccttgtaccagccggagcggaagaaccgttcacattccattgcatccga

SEQ ID NO: 197413 - DNA, 54 bp, Artificial
  Synthetic oligonucleotide
ctcggaagtatctgcctttcgcttttccttggtgttgcaatgattacacttaag

SEQ ID NO: 197414 - DNA, 54 bp, Artificial
  Synthetic oligonucleotide
tacaccaaccctcggttcattacacactccttcgtatgaaatagtggccgcatg

SEQ ID NO: 197415 - DNA, 52 bp, Artificial
  Synthetic oligonucleotide
ctctacctcgcgggtaatagtaaaatggcttattactacactccttaggttt

SEQ ID NO: 197416 - DNA, 54 bp, Artificial
  Synthetic oligonucleotide
ttttcatattatgcccgtacacgatcgtattctgatccgtaaagtccggctgat

SEQ ID NO: 197417 - DNA, 54 bp, Artificial
  Synthetic oligonucleotide
gttcatagcccctgctctctgcattaatactgattccatgttccgctgcaagtg

SEQ ID NO: 197418 - DNA, 54 bp, Artificial
  Synthetic oligonucleotide
tggatgaaatagcctgtttagaagcccaataagtattggcgattaccattacca

SEQ ID NO: 197419 - DNA, 54 bp, Artificial
  Synthetic oligonucleotide
cgggcgactgacctcccccaatcgggcatatatccgtttccgggtaacgctcac

SEQ ID NO: 197420 - DNA, 54 bp, Artificial
  Synthetic oligonucleotide
tgattcctactacacgacacagcttggcttaaaggactgtacactggtatcggt

SEQ ID NO: 197421 - DNA, 54 bp, Artificial
  Synthetic oligonucleotide
cgctctgtcaattcaaagtcataggcgatttgaggcttacccgggacattaggg

SEQ ID NO: 197422 - DNA, 54 bp, Artificial
  Synthetic oligonucleotide
gaatcccgtagatgccgcatactttcggcacatatctacaaaacgtggttcata

SEQ ID NO: 197423 - DNA, 54 bp, Artificial
  Synthetic oligonucleotide
cttgcgcctccttatagacttcttagccctagtatacaccaagccctagctgag

SEQ ID NO: 197424 - DNA, 54 bp, Artificial
  Synthetic oligonucleotide
tattcaccagatcgttaagaagggacgcaaagctgtagtcgacgtttataatat

SEQ ID NO: 197425 - DNA, 54 bp, Artificial
  Synthetic oligonucleotide
gcatgaggattgccgcaacttgcgcacgggtagcatcgccgtgaggcatcagtt

SEQ ID NO: 197426 - DNA, 60 bp, Artificial
  Synthetic oligonucleotide
ttgtcagggacaatcgtggaaccgtcctgcattcgtataggtgcgctcagaattcgccgg

SEQ ID NO: 197427 - DNA, 54 bp, Artificial
  Synthetic oligonucleotide
tatctgaggacgaagtaaagggactcatcgctaaggcaatgaaagaattcgctg

SEQ ID NO: 197428 - DNA, 54 bp, Artificial
  Synthetic oligonucleotide
cggaaatgcaacgtctgtgtttgggaccttaatatactcctcatttagtagcgg

SEQ ID NO: 197429 - DNA, 54 bp, Artificial
  Synthetic oligonucleotide
ggcgtccaacatggctcacacttagagattgtctcctatgcgatctacggagct

SEQ ID NO: 197430 - DNA, 54 bp, Artificial
  Synthetic oligonucleotide
gtcattcgcaccattccccctacgtgatgggctgcaatcgcctcacgcatggta

SEQ ID NO: 197431 - DNA, 54 bp, Artificial
  Synthetic oligonucleotide
gggttgtgacacgaactttcctcctaggacatagtttagggtgcgctaatagac

SEQ ID NO: 197432 - DNA, 54 bp, Artificial
  Synthetic oligonucleotide
gtttccctctccgtaagctttatagagtcagaggagatgcgggaattaaatcta

SEQ ID NO: 197433 - DNA, 54 bp, Artificial
  Synthetic oligonucleotide
tagggcgtatctccaaagcacacaccgcagtcgttacaatgagtttcaacccag

SEQ ID NO: 197434 - DNA, 54 bp, Artificial
  Synthetic oligonucleotide
ttctgaaacatccgacgcattgttcagtactctcgaaactgtccctatggaata

SEQ ID NO: 197435 - DNA, 54 bp, Artificial
  Synthetic oligonucleotide
gcaacttcatctcaatggtcgccctatatatacccattccgtagaatgactcgc

SEQ ID NO: 197436 - DNA, 53 bp, Artificial
  Synthetic oligonucleotide
gttttgagaaagacgcggcggagtacgaaatcacttttacggttagaggagcg

SEQ ID NO: 197437 - DNA, 60 bp, Artificial
  Synthetic oligonucleotide
cgcaaatcctctcggcggtatgaaacaagaatcacgatacaagatagactgcagatttaa

SEQ ID NO: 197438 - DNA, 54 bp, Artificial
  Synthetic oligonucleotide
ccccaactgcacacggagcttcttaaatatctccgtcacggacgctgccgtatt

SEQ ID NO: 197439 - DNA, 54 bp, Artificial
  Synthetic oligonucleotide
cccaatgttaccggaattcgatccgtaatcatcgcaccaactgattcctgattc

SEQ ID NO: 197440 - DNA, 54 bp, Artificial
  Synthetic oligonucleotide
ccagagacattccgaatctgcagaagtccatccatacaaccgttggcttcggac

SEQ ID NO: 197441 - DNA, 54 bp, Artificial
  Synthetic oligonucleotide
ccacgtcacttttcgcatctggtacattataatccccaccgatcataaactgat

SEQ ID NO: 197442 - DNA, 54 bp, Artificial
  Synthetic oligonucleotide
cagtatcataggccgtgggattctccacgagctggagtgtgccaacgagggagt

SEQ ID NO: 197443 - DNA, 54 bp, Artificial
  Synthetic oligonucleotide
aagtacattcttctgcccgttctgcccattgaacacctcaattctggtatcaag

SEQ ID NO: 197444 - DNA, 54 bp, Artificial
  Synthetic oligonucleotide
cactccatattatgacagtctcctcgtaaaggcatgctctcatgaccgtacgtt

SEQ ID NO: 197445 - DNA, 54 bp, Artificial
  Synthetic oligonucleotide
agaacttcccgtccctcgtccccggtaattgcgacaggatattagtgcagattg

SEQ ID NO: 197446 - DNA, 54 bp, Artificial
  Synthetic oligonucleotide
caatccagacaaatgacccgcggatcacccttgttgcgggaggttacccgctgt

SEQ ID NO: 197447 - DNA, 54 bp, Artificial
  Synthetic oligonucleotide
agcatgtaccgcaagatacatttcccggtttgtcaactttctgcgctttccgtt

SEQ ID NO: 197448 - DNA, 60 bp, Artificial
  Synthetic oligonucleotide
ttttaaggcaagtgatattgattgggatagaacgaatgaaaatgagttcttgatacaatc

SEQ ID NO: 197449 - DNA, 54 bp, Artificial
  Synthetic oligonucleotide
caacctacagctatacgcaaatgtatggaattacgaatctgagggatgagcaga

SEQ ID NO: 197450 - DNA, 54 bp, Artificial
  Synthetic oligonucleotide
ccgttgaaaccgccggcataagactccgccgcttcaatggcaaggctctggctc

SEQ ID NO: 197451 - DNA, 54 bp, Artificial
  Synthetic oligonucleotide
atggaatcggaacggatcgcataacttctctcctttaccgcatccccggagttt

SEQ ID NO: 197452 - DNA, 51 bp, Artificial
  Synthetic oligonucleotide
agttttatcccaaaacggagtttagtggggagaagccctcttaccggcata

SEQ ID NO: 197453 - DNA, 54 bp, Artificial
  Synthetic oligonucleotide
ccttacgggacttgacctcggaacgtctgctccttcgtgaacacggctccggta

SEQ ID NO: 197454 - DNA, 54 bp, Artificial
  Synthetic oligonucleotide
aaaagccgtaagacaaatcgattgttgcactatcccaccatttctgattttccc

SEQ ID NO: 197455 - DNA, 54 bp, Artificial
  Synthetic oligonucleotide
atcctctcgtaataacgaagcatctccattgaatgccaaaaactctccaattgg

SEQ ID NO: 197456 - DNA, 54 bp, Artificial
  Synthetic oligonucleotide
atccgcgagaaatatcatagacctacttttgttctgacgaatgcggaggagggg

SEQ ID NO: 197457 - DNA, 54 bp, Artificial
  Synthetic oligonucleotide
cgatacattaagagcctcaactgcagtttctaccctgtccaccacggactttgc

SEQ ID NO: 197458 - DNA, 54 bp, Artificial
  Synthetic oligonucleotide
atatcggtagagaagtccacggagaaatctacagaaggggtatatcttgagggg

SEQ ID NO: 197459 - DNA, 59 bp, Artificial
  Synthetic oligonucleotide
cgttcctcaatcttggtaacttggaactcttccgcctcgcctgtagcgacattgatata

SEQ ID NO: 197460 - DNA, 54 bp, Artificial
  Synthetic oligonucleotide
atacgccctgccatatctgcacttgtgacgtcttttgccacccgctctgcctga

SEQ ID NO: 197461 - DNA, 54 bp, Artificial
  Synthetic oligonucleotide
aacagggctctgatcttttgggtaagacacagctcctcgaggcaccggacgggc

SEQ ID NO: 197462 - DNA, 54 bp, Artificial
  Synthetic oligonucleotide
aaccgcaacttgtgcatccgctggtgcgtataacgtatcgttttctggaatgat

SEQ ID NO: 197463 - DNA, 54 bp, Artificial
  Synthetic oligonucleotide
ccttgggcagacctctgcggggctggatgtgcatctctaccccaagtcggatat

SEQ ID NO: 197464 - DNA, 54 bp, Artificial
  Synthetic oligonucleotide
atacacaggcactgctccgcacagtaccattgccgtaagcacgcttcggtgcac

SEQ ID NO: 197465 - DNA, 54 bp, Artificial
  Synthetic oligonucleotide
ataaatgatccgaaatcgtccaatctgatatgactgacacggggtcttcgaaaa

SEQ ID NO: 197466 - DNA, 53 bp, Artificial
  Synthetic oligonucleotide
ctgggcattgaacgagagatgattggcgacatactcgtcgcggaatcttcaaa

SEQ ID NO: 197467 - DNA, 53 bp, Artificial
  Synthetic oligonucleotide
actccgacatttgcgcaggaaagtttaagagcggcaattacacatccggaagt

SEQ ID NO: 197468 - DNA, 53 bp, Artificial
  Synthetic oligonucleotide
gtcgaacttttcagttctcctcctaccagccggacttttacgcctgctttggc

SEQ ID NO: 197469 - DNA, 53 bp, Artificial
  Synthetic oligonucleotide
acggtataaagtctgtgcccaatcatacttgatacggttccactctcttagat

SEQ ID NO: 197470 - DNA, 60 bp, Artificial
  Synthetic oligonucleotide
cctatggtgtcacaatcaatgcggtaattcactttgatgaggctaccccacatatgcact

SEQ ID NO: 197471 - DNA, 53 bp, Artificial
  Synthetic oligonucleotide
acggtaagcttacatccggctccctcggcatatacctggtattcggggaaata

SEQ ID NO: 197472 - DNA, 53 bp, Artificial
  Synthetic oligonucleotide
acggagtccgcaccgcccgataatcccacaataacgctgccgcacccgtcgag

SEQ ID NO: 197473 - DNA, 53 bp, Artificial
  Synthetic oligonucleotide
gtggaacttcatatggtccgaaatctccgatcggtacttcgttacagaaactg

SEQ ID NO: 197474 - DNA, 53 bp, Artificial
  Synthetic oligonucleotide
caggtgttcttagagtattagaggcagttcgtcagtgcggacttgctgataca

SEQ ID NO: 197475 - DNA, 53 bp, Artificial
  Synthetic oligonucleotide
atgcaaaagtaatcttcggtgtgatccttaactgcgataacatgccgcttgtt

SEQ ID NO: 197476 - DNA, 53 bp, Artificial
  Synthetic oligonucleotide
acgatatccctgatgtgtacttaccacatcaatagccgcccatggacaatatc

SEQ ID NO: 197477 - DNA, 53 bp, Artificial
  Synthetic oligonucleotide
cattgaaattagacgaacaaagttttgacggggaatggaaagcggtgaaaggc

SEQ ID NO: 197478 - DNA, 53 bp, Artificial
  Synthetic oligonucleotide
accgctatggctaatgcctactatatcctgcgggatcatgggattgagctgaa

SEQ ID NO: 197479 - DNA, 53 bp, Artificial
  Synthetic oligonucleotide
ccaacttgacctatggcctgtataacaaccccttgagttacgatatagttttc

SEQ ID NO: 197480 - DNA, 53 bp, Artificial
  Synthetic oligonucleotide
taaatgctgactgtcacaattccgagctcattgagtgcgcggaatactcgaat

SEQ ID NO: 197481 - DNA, 60 bp, Artificial
  Synthetic oligonucleotide
ttaattaaagcgcaggaactgataatacagctacaaggcaagctaatggacgcacagagc

SEQ ID NO: 197482 - DNA, 53 bp, Artificial
  Synthetic oligonucleotide
acaagcggtgtcataacatcattccacgttccaagagctgtcaggattgcaac

SEQ ID NO: 197483 - DNA, 53 bp, Artificial
  Synthetic oligonucleotide
gatcccgcaaacttgtctacttgaatcacatacggattcgtgaaaatctgtgc

SEQ ID NO: 197484 - DNA, 53 bp, Artificial
  Synthetic oligonucleotide
ccagggtctgccgccgattctctaagcaactccgcatacgtatccaccgcctt

SEQ ID NO: 197485 - DNA, 53 bp, Artificial
  Synthetic oligonucleotide
ccataatagcgttctggttggttgcattttcgaataccagatactgatccatt

SEQ ID NO: 197486 - DNA, 53 bp, Artificial
  Synthetic oligonucleotide
atctgggcttataccggtgtcacatccgttaatggagatcagtctaatatcgc

SEQ ID NO: 197487 - DNA, 53 bp, Artificial
  Synthetic oligonucleotide
gatgcctgcaacggaagccacgcccttgatgatcgtgacagcgtacctggtcg

SEQ ID NO: 197488 - DNA, 53 bp, Artificial
  Synthetic oligonucleotide
acaggaaccaccgccacttatgttgctgccatattcttcttcgtatgattccc

SEQ ID NO: 197489 - DNA, 53 bp, Artificial
  Synthetic oligonucleotide
aggatggcttttcgccatcctttaatacctccgaaatggggtctgacccgctg

SEQ ID NO: 197490 - DNA, 53 bp, Artificial
  Synthetic oligonucleotide
ggaaaaccagtacttgcagaggcaaacggactcgcacgtgaagttagcaacgg

SEQ ID NO: 197491 - DNA, 53 bp, Artificial
  Synthetic oligonucleotide
gacaccctctcctgcacctcggcagtttgcatggtatacaacccagcggctga

SEQ ID NO: 197492 - DNA, 60 bp, Artificial
  Synthetic oligonucleotide
gtaatgagcttccgtattaccttcatacatacttcaacttatgcacaggaaatctcgatg

SEQ ID NO: 197493 - DNA, 53 bp, Artificial
  Synthetic oligonucleotide
gacacataccgatggtcacaatggatccggcaatatccatacgcacattgtta

SEQ ID NO: 197494 - DNA, 53 bp, Artificial
  Synthetic oligonucleotide
ggctggagacatcttccattcatccgcaagactatacagcataaatatcgcaa

SEQ ID NO: 197495 - DNA, 53 bp, Artificial
  Synthetic oligonucleotide
agccggtcgcccggagtgttgccgtgatagaagtatctgtttcccgacactgc

SEQ ID NO: 197496 - DNA, 53 bp, Artificial
  Synthetic oligonucleotide
atttactggtcgccccaagatgccgggatatatgtcacagggatcattcaaga

SEQ ID NO: 197497 - DNA, 53 bp, Artificial
  Synthetic oligonucleotide
atttcaggcaatagacggtgtgcagccttatgcggctaacctgccgggaggct

SEQ ID NO: 197498 - DNA, 52 bp, Artificial
  Synthetic oligonucleotide
gggataatcgccctttgtacaccgatacgaaacgttccgaagaacttccgta

SEQ ID NO: 197499 - DNA, 53 bp, Artificial
  Synthetic oligonucleotide
ctttcctcgggaagacctagcatccgtgtacgcactttcagattttcccgcgc

SEQ ID NO: 197500 - DNA, 53 bp, Artificial
  Synthetic oligonucleotide
cttgtaaccatatttactctggcatccgtacattgtgcactcagtatggtggc

SEQ ID NO: 197501 - DNA, 53 bp, Artificial
  Synthetic oligonucleotide
ggggacgccgccttggataagaatcagatgccctgtgagcttcaatttacgtc

SEQ ID NO: 197502 - DNA, 53 bp, Artificial
  Synthetic oligonucleotide
cttcttaccatgcagcttaaggatgcgggaacaacatcgctgacgagacgctt

SEQ ID NO: 197503 - DNA, 47 bp, Artificial
  Synthetic oligonucleotide
cttttaacacgttttattccgacttttaacacgttttactccgactt

SEQ ID NO: 197504 - DNA, 60 bp, Artificial
  Synthetic oligonucleotide
ttacgcgttattgctggtagaactgagagagggtggctgtcctagcggagcggagccacg

SEQ ID NO: 197505 - DNA, 53 bp, Artificial
  Synthetic oligonucleotide
agtaccagcccggaacgccgttgcttccatgtcccggctctgaaccttcttta

SEQ ID NO: 197506 - DNA, 53 bp, Artificial
  Synthetic oligonucleotide
ggtcgaaggaccgccgatccccgtagaaactgcaagcacgcggattcccttgt

SEQ ID NO: 197507 - DNA, 53 bp, Artificial
  Synthetic oligonucleotide
gcgcagtgagcttttcgaatatgttgataacctgggactgtacttgatacccc

SEQ ID NO: 197508 - DNA, 53 bp, Artificial
  Synthetic oligonucleotide
agagatctccgcacacgatatctcctgagccgatgagctgtatatccccgggt

SEQ ID NO: 197509 - DNA, 53 bp, Artificial
  Synthetic oligonucleotide
cttaacaggcttcgttgacaagtggattagattcacgttgtcccatccgtccc

SEQ ID NO: 197510 - DNA, 53 bp, Artificial
  Synthetic oligonucleotide
agacttgacgattcgaccttattcatgggaagtgaatggaaagactggtatta

SEQ ID NO: 197511 - DNA, 53 bp, Artificial
  Synthetic oligonucleotide
gtacctgcccagaatgcttctgtcgtactcacggtctcccgttcttatgacaa

SEQ ID NO: 197512 - DNA, 53 bp, Artificial
  Synthetic oligonucleotide
gtattctcttaatcgtaaaaccataggctgcaatatacattcccagcttgctc

SEQ ID NO: 197513 - DNA, 53 bp, Artificial
  Synthetic oligonucleotide
atatgtccacgattggggaacagacagtggaaacaagcctgagtactggatac

SEQ ID NO: 197514 - DNA, 53 bp, Artificial
  Synthetic oligonucleotide
gtcatcgtgattacaaacattgctccaaggatcaaagcctccacgcactgtcc

SEQ ID NO: 197515 - DNA, 53 bp, Artificial
  Synthetic oligonucleotide
aagacagagaggaacgtagggaacaccttgatactttggagttcaaaacccaa

SEQ ID NO: 197516 - DNA, 53 bp, Artificial
  Synthetic oligonucleotide
gcaggctgtgtcattccggagtccgtcaagcatcgaccatctctgtaaatgca

SEQ ID NO: 197517 - DNA, 53 bp, Artificial
  Synthetic oligonucleotide
aactgctctatgtaatggtcatatttcggattgatatgtcagcgctgccctat

SEQ ID NO: 197518 - DNA, 53 bp, Artificial
  Synthetic oligonucleotide
tgctacatcacggcttatacatccatcatgacacacctctgcataatcccggc

SEQ ID NO: 197519 - DNA, 53 bp, Artificial
  Synthetic oligonucleotide
tgcagtggcaacgccggttatattccctgtgcccaaagtagctgccagcgctg

SEQ ID NO: 197520 - DNA, 53 bp, Artificial
  Synthetic oligonucleotide
cctcgccggagccagaccgcagagacacctcactggcgattccgttgggttcg

SEQ ID NO: 197521 - DNA, 53 bp, Artificial
  Synthetic oligonucleotide
aatgatctgatcgcacttgtcaatctctccctggtaacgcttgagctcctgtc

SEQ ID NO: 197522 - DNA, 53 bp, Artificial
  Synthetic oligonucleotide
tcataatcagtgttggtatcggacgcatcctttaatttggaacggttgatacg

SEQ ID NO: 197523 - DNA, 53 bp, Artificial
  Synthetic oligonucleotide
aagtgtcggacgatagaaggcacccttacttaattccccttcgtcaaagactc

SEQ ID NO: 197524 - DNA, 53 bp, Artificial
  Synthetic oligonucleotide
cctgaattccgctgatgttaagcattggtcgcctccttttcgctccttgtgtc

SEQ ID NO: 197525 - DNA, 53 bp, Artificial
  Synthetic oligonucleotide
ccggacttttaagcccttctacccggacattcagcattggatcatcagcaagt

SEQ ID NO: 197526 - DNA, 58 bp, Artificial
  Synthetic oligonucleotide
atcactccggcaagaattcccggaacagccgacgggagcacaatgcgaaatactgtac

SEQ ID NO: 197527 - DNA, 53 bp, Artificial
  Synthetic oligonucleotide
ccttcccatgctttcggaggctccggtcgcttccagcgcagatctccgactgg

SEQ ID NO: 197528 - DNA, 53 bp, Artificial
  Synthetic oligonucleotide
ttcggaatcgagatgattaacattccgatgacagagagtggtccggacatgga

SEQ ID NO: 197529 - DNA, 53 bp, Artificial
  Synthetic oligonucleotide
tatgggcaaggagagcctcccctctgcgtatgtcccggcactgtaatccggat

SEQ ID NO: 197530 - DNA, 53 bp, Artificial
  Synthetic oligonucleotide
tgacgtgcgaaaaggctgcacggagtcttaagaatagatacaggcatatgcgg

SEQ ID NO: 197531 - DNA, 53 bp, Artificial
  Synthetic oligonucleotide
aagcacagccgttccaagcgccacctctgttacgccgtcaatggcgttcccta

SEQ ID NO: 197532 - DNA, 53 bp, Artificial
  Synthetic oligonucleotide
tgatcggcgggacactgaatctctatgaacatcagagcacgtataatcctaac

SEQ ID NO: 197533 - DNA, 53 bp, Artificial
  Synthetic oligonucleotide
ttacaatcgcccatgcatggttacaggttacgccatctgtccacccgtgtagc

SEQ ID NO: 197534 - DNA, 53 bp, Artificial
  Synthetic oligonucleotide
tgatggaaattctgccaactccatgctttcggatcactcgcagcttgtcctca

SEQ ID NO: 197535 - DNA, 53 bp, Artificial
  Synthetic oligonucleotide
tgatgtagtggcagggtacatagaaccacataacagacccgatacacaggcgc

SEQ ID NO: 197536 - DNA, 53 bp, Artificial
  Synthetic oligonucleotide
tcgtgcgtcagatcgtgacttatacgagagtaaattacacggcgaatcaggaa

SEQ ID NO: 197537 - DNA, 60 bp, Artificial
  Synthetic oligonucleotide
gtaattcactttgatgaggctaccccacatatgcactgccagagcgtgcctctggtagaa

SEQ ID NO: 197538 - DNA, 52 bp, Artificial
  Synthetic oligonucleotide
ggcaaaatacaacggatataaagcatacggaccggacggatgtcagatgaca

SEQ ID NO: 197539 - DNA, 52 bp, Artificial
  Synthetic oligonucleotide
attggaccaaatacgacggggatgtgctgctgcttggagcaggcggaagcac

SEQ ID NO: 197540 - DNA, 52 bp, Artificial
  Synthetic oligonucleotide
ggctgatccccttgaagcacaggcggatatttcccgactctccgggcacagt

SEQ ID NO: 197541 - DNA, 52 bp, Artificial
  Synthetic oligonucleotide
cgcttctggacggtgtgcatattggcggtcaatgtttcctggtcaatgtaga

SEQ ID NO: 197542 - DNA, 52 bp, Artificial
  Synthetic oligonucleotide
ggatccggtatcggtaccgcgtccaataacgcctgactatatgggtgcaacg

SEQ ID NO: 197543 - DNA, 51 bp, Artificial
  Synthetic oligonucleotide
attggtgccccggacaccacgcccataagaaaagccttacccgttttggcc

SEQ ID NO: 197544 - DNA, 52 bp, Artificial
  Synthetic oligonucleotide
aagcatttgcggccagcaagcacttcacaccacctgctaagatccaggatct

SEQ ID NO: 197545 - DNA, 52 bp, Artificial
  Synthetic oligonucleotide
ggagcgccgttcatacgaagtccaaacacgcatgtcgccaatggtccggtga

SEQ ID NO: 197546 - DNA, 52 bp, Artificial
  Synthetic oligonucleotide
aagcccatgggttggcagatttcggtgtccgcacaccggtaagcaggtactg

SEQ ID NO: 197547 - DNA, 52 bp, Artificial
  Synthetic oligonucleotide
agccgcagagtcgcacttcggccggacttatacttctccgtcacttccctgc

SEQ ID NO: 197548 - DNA, 58 bp, Artificial
  Synthetic oligonucleotide
gtgcgctccatacagtgacttttacgaggtgagacgaaaggttttagatgtagcggta

SEQ ID NO: 197549 - DNA, 52 bp, Artificial
  Synthetic oligonucleotide
agcccacatggtctccgtttaagggatatactattcgctgggctgttactgc

SEQ ID NO: 197550 - DNA, 52 bp, Artificial
  Synthetic oligonucleotide
caaacaatcgcaggaacaactgtcccagccgcagagtcgcacttcggccgga

SEQ ID NO: 197551 - DNA, 52 bp, Artificial
  Synthetic oligonucleotide
caaaggttgaggtgaatgcccggccgacattagatgggtttaccccgccggc

SEQ ID NO: 197552 - DNA, 52 bp, Artificial
  Synthetic oligonucleotide
caacatggttcaggctttccgcatttccgagcataaagatgtacgccttcca

SEQ ID NO: 197553 - DNA, 52 bp, Artificial
  Synthetic oligonucleotide
tgattgttccgcgcacagccagcatacttcccacaacagctacggacacata

SEQ ID NO: 197554 - DNA, 52 bp, Artificial
  Synthetic oligonucleotide
ccgcggatacttttgaacatgagatcatacataacggatccgctcatatacg

SEQ ID NO: 197555 - DNA, 52 bp, Artificial
  Synthetic oligonucleotide
caccagaatccgtggagcctgaacagtatcggggcttacgccggtgaacgga

SEQ ID NO: 197556 - DNA, 52 bp, Artificial
  Synthetic oligonucleotide
tgacatttgtaactgtcgataagaggcgaacaactccgatacactatcaaac

SEQ ID NO: 197557 - DNA, 52 bp, Artificial
  Synthetic oligonucleotide
ccgcaggcgataccttaccgcctacggcaaggagcagaagacagagttcgga

SEQ ID NO: 197558 - DNA, 52 bp, Artificial
  Synthetic oligonucleotide
gatgctcccggtgtttcaagtgacggaacatccctgaacatatcccacatta

SEQ ID NO: 197559 - DNA, 59 bp, Artificial
  Synthetic oligonucleotide
tttcgtacctgtaatctgcgcattgcggatctgtattttcgagaaaacagagcttgtat

SEQ ID NO: 197560 - DNA, 52 bp, Artificial
  Synthetic oligonucleotide
tttgggtctaaaacaaccacagcgccgttgtaagagccaagggcattataag

SEQ ID NO: 197561 - DNA, 52 bp, Artificial
  Synthetic oligonucleotide
atccgctggtggccagtttagacgccgcctcaactgcgtttagcgcctgccc

SEQ ID NO: 197562 - DNA, 52 bp, Artificial
  Synthetic oligonucleotide
aaagaacacggcggacgcatgcgccatttgtcttcccgaaatgtgaacgaat

SEQ ID NO: 197563 - DNA, 52 bp, Artificial
  Synthetic oligonucleotide
cgcactcttttaaatttgcggcaatcatcatagccccacttaaatcggcttc

SEQ ID NO: 197564 - DNA, 52 bp, Artificial
  Synthetic oligonucleotide
ttggggttacagtatctgtgatccgtgccggtattatgtatttgttccgggt

SEQ ID NO: 197565 - DNA, 52 bp, Artificial
  Synthetic oligonucleotide
atcacagtcgccacgccctctccgtagcctcttgctgtgtgcgccagatcac

SEQ ID NO: 197566 - DNA, 52 bp, Artificial
  Synthetic oligonucleotide
cgaccgaatggaaatagcaattgaacgtgattacaaagttgtaaaggctaat

SEQ ID NO: 197567 - DNA, 52 bp, Artificial
  Synthetic oligonucleotide
atatgccttccccacacattcaggcttgtgggagtcgcttcccgcaatgccc

SEQ ID NO: 197568 - DNA, 52 bp, Artificial
  Synthetic oligonucleotide
atagcggcacttcttcttacccagtgtcgtgagaatcagaataacgaccagg

SEQ ID NO: 197569 - DNA, 52 bp, Artificial
  Synthetic oligonucleotide
gccctcccggttttgggtgttatcgttgtggcgcggtttgacggactggaaa

SEQ ID NO: 197570 - DNA, 59 bp, Artificial
  Synthetic oligonucleotide
cgaggatatgcagaaatatcttactggcttatacaataactatactcagtatagtctgc

SEQ ID NO: 197571 - DNA, 52 bp, Artificial
  Synthetic oligonucleotide
aaatgtgtgatgggaggttttgccaacagcccgggtacactgatagataccg

SEQ ID NO: 197572 - DNA, 52 bp, Artificial
  Synthetic oligonucleotide
gagggcaaagctttcccgggaactcagccaaatcgataatcatgtggagcgg

SEQ ID NO: 197573 - DNA, 52 bp, Artificial
  Synthetic oligonucleotide
ttccctgtggcggttagtatgcagtagttcgattatcctgcaagggacgttt

SEQ ID NO: 197574 - DNA, 52 bp, Artificial
  Synthetic oligonucleotide
gagcgtttggcagcgtactgctttgcccactccagcggagtaagatctccgc

SEQ ID NO: 197575 - DNA, 52 bp, Artificial
  Synthetic oligonucleotide
atgccgacagtcgcccgattcccgtcttctggtggattgcgaccagattcga

SEQ ID NO: 197576 - DNA, 52 bp, Artificial
  Synthetic oligonucleotide
gcgatcggatctccgacacggagtgtacccttctgtacaagaacggttgcaa

SEQ ID NO: 197577 - DNA, 52 bp, Artificial
  Synthetic oligonucleotide
gagaattatccggggattaagcatatctccggctatgacttcgcgacaggac

SEQ ID NO: 197578 - DNA, 52 bp, Artificial
  Synthetic oligonucleotide
aaccgtaacggctgccgccccggattcctccattatgtgggcgaactccacc

SEQ ID NO: 197579 - DNA, 52 bp, Artificial
  Synthetic oligonucleotide
gacttcatactctgttttcgtccgctgacgagacctcccttggtaccacacg

SEQ ID NO: 197580 - DNA, 52 bp, Artificial
  Synthetic oligonucleotide
gcggaaactttagtgcgaagcataccggcagtaacggtgaacattccatttt

SEQ ID NO: 197581 - DNA, 58 bp, Artificial
  Synthetic oligonucleotide
ctccccttcagcatcacgcagggaatcatttgcagtaaacattaccttggccccgggc

SEQ ID NO: 197582 - DNA, 52 bp, Artificial
  Synthetic oligonucleotide
gctcctctgtacataaacggtcgccccaggaacaagcaattccgcacacctt

SEQ ID NO: 197583 - DNA, 52 bp, Artificial
  Synthetic oligonucleotide
gctcgccccataacagttgagtctattgcccagtatatcggtatgagtcgca

SEQ ID NO: 197584 - DNA, 49 bp, Artificial
  Synthetic oligonucleotide
agggaaaagcggtaccggcattacgaaagcctgttaaaggacgtccccg

SEQ ID NO: 197585 - DNA, 52 bp, Artificial
  Synthetic oligonucleotide
gctgcggatctgcgctatcttggttaccatgcgcttctcccctccagacgta

SEQ ID NO: 197586 - DNA, 52 bp, Artificial
  Synthetic oligonucleotide
aggctctttctgatatcggagcatggctcttagaaaatggggaaggcattta

SEQ ID NO: 197587 - DNA, 52 bp, Artificial
  Synthetic oligonucleotide
aggaagaagatgcaacacccaccgggtctatcaccacgggatgtcccagcga

SEQ ID NO: 197588 - DNA, 52 bp, Artificial
  Synthetic oligonucleotide
ggaccataaatcggaaaactcggtttggttcacgattacagacctcgacggc

SEQ ID NO: 197589 - DNA, 52 bp, Artificial
  Synthetic oligonucleotide
attaatatcgcggatacagccctcttaggccggattacgtccggggtcaagc

SEQ ID NO: 197590 - DNA, 52 bp, Artificial
  Synthetic oligonucleotide
ctgcaggcaacaaataaggcctcgctgccgtcagttcgccccgcaatgtact

SEQ ID NO: 197591 - DNA, 52 bp, Artificial
  Synthetic oligonucleotide
cagctccgcaaacaatcgcaggaacaactgtcccagccgcagagtcgcactt

SEQ ID NO: 197592 - DNA, 59 bp, Artificial
  Synthetic oligonucleotide
tatgggcgttgacccgcttaccgtggagacctatgcttgtgcttatccctatggggata

SEQ ID NO: 197593 - DNA, 52 bp, Artificial
  Synthetic oligonucleotide
ctgaggcttgcgagcatggttatggtgtgggtaattgcgggagttgcggcgc

SEQ ID NO: 197594 - DNA, 52 bp, Artificial
  Synthetic oligonucleotide
ctgacggtgcaaagggatttcctataaagctgccaagagaaggtgagcctgt

SEQ ID NO: 197595 - DNA, 52 bp, Artificial
  Synthetic oligonucleotide
tatagaagaactacgactgtctataaatgttccgactgcagtagctgtcctt

SEQ ID NO: 197596 - DNA, 52 bp, Artificial
  Synthetic oligonucleotide
ccccatggcccccacgttcccatgtcactgcgtgctaaaatgcgtgcaatac

SEQ ID NO: 197597 - DNA, 52 bp, Artificial
  Synthetic oligonucleotide
cccggaatttcaagtaaatccgaaagaattgtgttatcaaaagcccgtagcc

SEQ ID NO: 197598 - DNA, 52 bp, Artificial
  Synthetic oligonucleotide
cggtgcacctaatgcatctacaattcttccgatgaaattttcgcctacggga

SEQ ID NO: 197599 - DNA, 52 bp, Artificial
  Synthetic oligonucleotide
accggctgcggaacaggagagggcgctatgcttgcttgtaacagcttccctg

SEQ ID NO: 197600 - DNA, 52 bp, Artificial
  Synthetic oligonucleotide
gttcttttgttatcatatgtttcctcagatctcctcatatgtcgccatggcg

SEQ ID NO: 197601 - DNA, 52 bp, Artificial
  Synthetic oligonucleotide
catctccgtcattctgatagtgcccgatcacataacctatagcctcgactaa

SEQ ID NO: 197602 - DNA, 52 bp, Artificial
  Synthetic oligonucleotide
taggcgctcctgtagcaactgcgtccataccgcgtgtgagtccgtccgtagg

SEQ ID NO: 197603 - DNA, 57 bp, Artificial
  Synthetic oligonucleotide
ttctgtaagttctaatctgattttcttagtagccataattactccttcttgttaaca

SEQ ID NO: 197604 - DNA, 52 bp, Artificial
  Synthetic oligonucleotide
ccgacagttacaaagacctcttttatcgggtcgtattccacgccttgtgttc

SEQ ID NO: 197605 - DNA, 52 bp, Artificial
  Synthetic oligonucleotide
acagtcaccgaaagtgcattctcctctacatactgcgctccgtcactccaga

SEQ ID NO: 197606 - DNA, 52 bp, Artificial
  Synthetic oligonucleotide
ccacgccctctccgtagcctcttgctgtgtgcgccagatcacgtccgatgaa

SEQ ID NO: 197607 - DNA, 52 bp, Artificial
  Synthetic oligonucleotide
tacttgtgtgaaaagcggcgaatgtaagttgcaggagctggctcacagaatg

SEQ ID NO: 197608 - DNA, 52 bp, Artificial
  Synthetic oligonucleotide
ctccggcggctatgggaccggttgttgctctgattggtttggagttagcggg

SEQ ID NO: 197609 - DNA, 52 bp, Artificial
  Synthetic oligonucleotide
aatcaggttcttctgttcatccagtgcgcaaattcctcttgtaacaccgcca

SEQ ID NO: 197610 - DNA, 52 bp, Artificial
  Synthetic oligonucleotide
ctcccaccgaacacgctcccgccataagagcactggccagcatatctccgga

SEQ ID NO: 197611 - DNA, 52 bp, Artificial
  Synthetic oligonucleotide
tacgtacttgccaacttcacagcccggaatctggcctgcacgtctgctggca

SEQ ID NO: 197612 - DNA, 52 bp, Artificial
  Synthetic oligonucleotide
aagctgtccgccacgaaccatcttcttaagcagtgtgtgaggacggtacttc

SEQ ID NO: 197613 - DNA, 52 bp, Artificial
  Synthetic oligonucleotide
cacgcagaaatagatccgtaaacgtcgctatcataaaggacttcatggctcc

SEQ ID NO: 197614 - DNA, 60 bp, Artificial
  Synthetic oligonucleotide
aataaggactagatctgctgaatggaagccagatgtgctatagtcaagatctgtaaagcc

SEQ ID NO: 197615 - DNA, 59 bp, Artificial
  Synthetic oligonucleotide
tcccgaaccgtgaaatgtgtcatacccgtgcaagcctagaccgtcaagcggccagcttg

SEQ ID NO: 197616 - DNA, 52 bp, Artificial
  Synthetic oligonucleotide
cccctttccgcccgcagaggctatgtgctgcctgcccggaccggaggtcccc

SEQ ID NO: 197617 - DNA, 52 bp, Artificial
  Synthetic oligonucleotide
tcttttcgattcaggggacgctcactgtcggagagctcagcgcggctctgag

SEQ ID NO: 197618 - DNA, 52 bp, Artificial
  Synthetic oligonucleotide
tatcttccgttttaaactgcaatacctgcaaatccccgccctttaagagcag

SEQ ID NO: 197619 - DNA, 52 bp, Artificial
  Synthetic oligonucleotide
cgtggttgagataccgggcagcgtaatataccacgtacatttcagccttcct

SEQ ID NO: 197620 - DNA, 52 bp, Artificial
  Synthetic oligonucleotide
cgtgtacgtcaggttatgcgcgatcacggtgctaccgttcacgccatcgcct

SEQ ID NO: 197621 - DNA, 52 bp, Artificial
  Synthetic oligonucleotide
ccccggctatccttgtcattgatgttcgcttaactgtcatgcgccttgtaag

SEQ ID NO: 197622 - DNA, 52 bp, Artificial
  Synthetic oligonucleotide
aaggccctagcctggtgcgtcagaaacctctgagcccggccgtttggatcca

SEQ ID NO: 197623 - DNA, 52 bp, Artificial
  Synthetic oligonucleotide
gtcccatcttatacgacgctcctgccaggtaggctacgtcaccatccccagt

SEQ ID NO: 197624 - DNA, 52 bp, Artificial
  Synthetic oligonucleotide
tatcccaaccgtcattaaccgcctggcagacagcgtccctctgggtctgcgt

SEQ ID NO: 197625 - DNA, 52 bp, Artificial
  Synthetic oligonucleotide
cgttccggccagctattggaccaaatacgacggggatgtgctgctgcttgga

SEQ ID NO: 197626 - DNA, 56 bp, Artificial
  Synthetic oligonucleotide
aaggggttccgccccaacggagtagcagcgctgtgaacgtgccttactataccgca

SEQ ID NO: 197627 - DNA, 52 bp, Artificial
  Synthetic oligonucleotide
aattaccgcgacccttgcgtccccctgctccagttcgtactccctgcacaga

SEQ ID NO: 197628 - DNA, 52 bp, Artificial
  Synthetic oligonucleotide
aagtcgccatgcagtcatccgccacgctcatcttggcatgacagaaccccgg

SEQ ID NO: 197629 - DNA, 52 bp, Artificial
  Synthetic oligonucleotide
cagaacgtctcaagactctgtacaggagctttcataacaatcgctccatatc

SEQ ID NO: 197630 - DNA, 52 bp, Artificial
  Synthetic oligonucleotide
acgtgccagatagactgtcatgctcctgtaaccatcgacaccattgtgttca

SEQ ID NO: 197631 - DNA, 51 bp, Artificial
  Synthetic oligonucleotide
tatgaccaaaagcaatagtacatgcaacaccacgtctatccaatctcatct

SEQ ID NO: 197632 - DNA, 51 bp, Artificial
  Synthetic oligonucleotide
tcatgccctgatgccgcaagctcgcagactccgcgcaggtaatatgcatta

SEQ ID NO: 197633 - DNA, 51 bp, Artificial
  Synthetic oligonucleotide
ttggaaggatggtacgtgcaggtggagatacatatcttatctatcttacgg

SEQ ID NO: 197634 - DNA, 51 bp, Artificial
  Synthetic oligonucleotide
aaaggatcggattgttccggatgcggtgcgggcagtcgtgcagggacagaa

SEQ ID NO: 197635 - DNA, 51 bp, Artificial
  Synthetic oligonucleotide
atagtggagccggatataagtgttatttgcgaccgcagcaaacttacagac

SEQ ID NO: 197636 - DNA, 51 bp, Artificial
  Synthetic oligonucleotide
gccaacttcacagcccggaatctggcctgcacgtctgctggcaactacgat

SEQ ID NO: 197637 - DNA, 59 bp, Artificial
  Synthetic oligonucleotide
ccaccgtaagccagtgacctctcccacacgcaagccagtaccgagcatgaccgtaaata

SEQ ID NO: 197638 - DNA, 51 bp, Artificial
  Synthetic oligonucleotide
gccatcacctgtgacaccaagatgtacccagtcaggctctatatcaatttt

SEQ ID NO: 197639 - DNA, 51 bp, Artificial
  Synthetic oligonucleotide
agtcagacggagcatctctctacggaacgacagaccttgcaacgctggttc

SEQ ID NO: 197640 - DNA, 51 bp, Artificial
  Synthetic oligonucleotide
aaagcacgattcgatgagcaattggcgcggtcgcttcccatggtcgcggaa

SEQ ID NO: 197641 - DNA, 51 bp, Artificial
  Synthetic oligonucleotide
tagcaattgcataaccaccgcatgggaaaacatatgtcccaaagaattaag

SEQ ID NO: 197642 - DNA, 51 bp, Artificial
  Synthetic oligonucleotide
agtccgggcagccacacgatgtcaaattcgagcccctttgaaccgtgcata

SEQ ID NO: 197643 - DNA, 51 bp, Artificial
  Synthetic oligonucleotide
agtgctgccgcgccaagcatgactccgcaaagcggaatcggtactttctta

SEQ ID NO: 197644 - DNA, 51 bp, Artificial
  Synthetic oligonucleotide
tcagagtatcccggtacttcgtaaactgacacatcttccgatcatcgttga

SEQ ID NO: 197645 - DNA, 51 bp, Artificial
  Synthetic oligonucleotide
gcactgcaactatccccataccgatatgcggaaggagtacaaacactactg

SEQ ID NO: 197646 - DNA, 51 bp, Artificial
  Synthetic oligonucleotide
tagcagtatggagccattctgtctacacagtcagcgataccttccattaac

SEQ ID NO: 197647 - DNA, 51 bp, Artificial
  Synthetic oligonucleotide
tagccccgccaaaggttgaggtgaatgcccggccgacattagatgggttta

SEQ ID NO: 197648 - DNA, 55 bp, Artificial
  Synthetic oligonucleotide
gggatcagtcttacaacgttcgctaaaacactatcggctccttcgtactttaata

SEQ ID NO: 197649 - DNA, 51 bp, Artificial
  Synthetic oligonucleotide
tatacgtacaaacgcatatgttttgcttattgcccgctatcatcctccata

SEQ ID NO: 197650 - DNA, 51 bp, Artificial
  Synthetic oligonucleotide
ttcgacaaatagtgtgttgtttacgtaagtcactgatatccaataaaacat

SEQ ID NO: 197651 - DNA, 51 bp, Artificial
  Synthetic oligonucleotide
tcactccaagtccgttataccgctcgtccccgtcacggagttccactgcct

SEQ ID NO: 197652 - DNA, 51 bp, Artificial
  Synthetic oligonucleotide
tcgagaagagcctctatgagagcatcggaaacgcggtatgcgcggcgaccg

SEQ ID NO: 197653 - DNA, 51 bp, Artificial
  Synthetic oligonucleotide
acgcctgtggccatcacaccccaggcaatgcttgcggaaacgaatcgggtg

SEQ ID NO: 197654 - DNA, 51 bp, Artificial
  Synthetic oligonucleotide
tgctatcggagctacacacggaatcgccacataagcagaacccgtaagacc

SEQ ID NO: 197655 - DNA, 51 bp, Artificial
  Synthetic oligonucleotide
tcgcaccgctggatccgactgctgccagtgcgttacttcccacatagttgc

SEQ ID NO: 197656 - DNA, 51 bp, Artificial
  Synthetic oligonucleotide
gggccgattctgccgtcactgtcagggttggcgcttccgattatggcgaca

SEQ ID NO: 197657 - DNA, 51 bp, Artificial
  Synthetic oligonucleotide
acgcgccggagaacggcactgtaggactgcgctccagtcagtacatccata

SEQ ID NO: 197658 - DNA, 51 bp, Artificial
  Synthetic oligonucleotide
tcggtctctaaatgtttctgcgttgacgccatgatacctgcacatagcttc

SEQ ID NO: 197659 - DNA, 57 bp, Artificial
  Synthetic oligonucleotide
tccctccgcataatttggcgttacctgcagaccaattgcttttcccagcgcaaacgg

SEQ ID NO: 197660 - DNA, 51 bp, Artificial
  Synthetic oligonucleotide
agccacggcagcaataccggagcaaagattatcgcggctccccggcttcct

SEQ ID NO: 197661 - DNA, 51 bp, Artificial
  Synthetic oligonucleotide
tctccttcatcttgccacctgcctccgaaccatagccaagaaccgctccgg

SEQ ID NO: 197662 - DNA, 51 bp, Artificial
  Synthetic oligonucleotide
tcttaacgcggcttctcgattactacaatccgaagctctcgctggtattct

SEQ ID NO: 197663 - DNA, 51 bp, Artificial
  Synthetic oligonucleotide
actgtatcctcataacgagtctcatagtatctgtaacctacgtagataccc

SEQ ID NO: 197664 - DNA, 51 bp, Artificial
  Synthetic oligonucleotide
tcttatgtcagcttaaatccgggagaacccttgcgccctttgcgagaggtg

SEQ ID NO: 197665 - DNA, 51 bp, Artificial
  Synthetic oligonucleotide
agagcgaggttagcgcaagggtgcccgctttcctgcctatacagcatcgga

SEQ ID NO: 197666 - DNA, 51 bp, Artificial
  Synthetic oligonucleotide
agagccgacacctccgttgacagcgtactctctccgtgtcccgcaaggcga

SEQ ID NO: 197667 - DNA, 51 bp, Artificial
  Synthetic oligonucleotide
tgaccggccagtcagacggattcacagatacttccggggactccgctttgt

SEQ ID NO: 197668 - DNA, 51 bp, Artificial
  Synthetic oligonucleotide
gtcaggcattgacgcttgacggcaagtacctttataacggctcggtctata

SEQ ID NO: 197669 - DNA, 51 bp, Artificial
  Synthetic oligonucleotide
tacggcctacggagccattcggctgcagatacaggtgtaccacaagccgat

SEQ ID NO: 197670 - DNA, 58 bp, Artificial
  Synthetic oligonucleotide
atgatgctcttacagtaaagcctgtagacagcgtcatcggtgttaaccttaatgtcac

SEQ ID NO: 197671 - DNA, 51 bp, Artificial
  Synthetic oligonucleotide
aggggactgaatcgcggaacagccgactggacatggtaagggctggtagcg

SEQ ID NO: 197672 - DNA, 51 bp, Artificial
  Synthetic oligonucleotide
agggatgtgcggcacagctggattcttttgcggacatgctctgccatgtga

SEQ ID NO: 197673 - DNA, 51 bp, Artificial
  Synthetic oligonucleotide
tacaatgtgggtggcaagtcactatttgacattgtggaagagaagttccaa

SEQ ID NO: 197674 - DNA, 51 bp, Artificial
  Synthetic oligonucleotide
acccctgcgaaggcgagcttagcgggagcgtgccctgtgagcaaagtgact

SEQ ID NO: 197675 - DNA, 51 bp, Artificial
  Synthetic oligonucleotide
tccggccggaatacgatcgggacaagaagcgggtgtggtgcgttgttttta

SEQ ID NO: 197676 - DNA, 51 bp, Artificial
  Synthetic oligonucleotide
gctgtctacgagctcttttaatacctttacaacatatgtcattccgccgtc

SEQ ID NO: 197677 - DNA, 51 bp, Artificial
  Synthetic oligonucleotide
aggccccacaatcggttcccattccggtcccggaactttggcggtatacta

SEQ ID NO: 197678 - DNA, 51 bp, Artificial
  Synthetic oligonucleotide
taaaaacaacgcaccacacccgcttcttgtcccgatcgtattccggccgga

SEQ ID NO: 197679 - DNA, 51 bp, Artificial
  Synthetic oligonucleotide
aagatgacgcaaaatgcgacggttccgctcacccagtcacaggcgggacgt

SEQ ID NO: 197680 - DNA, 51 bp, Artificial
  Synthetic oligonucleotide
ggaacagccataccaggattccaagtcctgcgccacatgcacccatccgca

SEQ ID NO: 197681 - DNA, 58 bp, Artificial
  Synthetic oligonucleotide
gcactgtctcggcatgcccgctgctgttacagacgtcctgataggtcggagcttcgtc

SEQ ID NO: 197682 - DNA, 51 bp, Artificial
  Synthetic oligonucleotide
ggaatctaatgaatcactaagattgctgtgttgcagtcttcggaaaagacc

SEQ ID NO: 197683 - DNA, 51 bp, Artificial
  Synthetic oligonucleotide
ttaacggctgccacattagagcagcgtaccggggcgccttctgatacgatt

SEQ ID NO: 197684 - DNA, 51 bp, Artificial
  Synthetic oligonucleotide
tccggttgatgtacctacatctttgggcagtggggatgcgaatcagtgaag

SEQ ID NO: 197685 - DNA, 51 bp, Artificial
  Synthetic oligonucleotide
gttgaatgggatcggcgtctgtcccgataaaaccgctaaagatgatcttcc

SEQ ID NO: 197686 - DNA, 51 bp, Artificial
  Synthetic oligonucleotide
ggagaattagtcaatatcgatggtaatggaaaccgggtcgctgctttgatc

SEQ ID NO: 197687 - DNA, 51 bp, Artificial
  Synthetic oligonucleotide
ggcgagtgtagagtacgtcaagtgtgcctgcattatccttcccagcggaat

SEQ ID NO: 197688 - DNA, 51 bp, Artificial
  Synthetic oligonucleotide
tccttcgatacgcgccggagaacggcactgtaggactgcgctccagtcagt

SEQ ID NO: 197689 - DNA, 51 bp, Artificial
  Synthetic oligonucleotide
catgatccatcggaaccaagctactctacaatcgattctttgcgggaagcc

SEQ ID NO: 197690 - DNA, 51 bp, Artificial
  Synthetic oligonucleotide
attgtgagcggctcttatctctgtatgggcgtgtcgcagatttatctgtgc

SEQ ID NO: 197691 - DNA, 51 bp, Artificial
  Synthetic oligonucleotide
catttagccgtattgctgaaagtcttgctaccaactatgatgctatctact

SEQ ID NO: 197692 - DNA, 58 bp, Artificial
  Synthetic oligonucleotide
aggaaggatcagtccgttgagggcacctgctaatacgagcagagttgcaggctgtccg

SEQ ID NO: 197693 - DNA, 51 bp, Artificial
  Synthetic oligonucleotide
ctggcagcctgccaggtatcctgcggcgcacagtctccccatatatcagta

SEQ ID NO: 197694 - DNA, 51 bp, Artificial
  Synthetic oligonucleotide
ctgtaacttctaatctgcgttctatgatttctcgtgccaattcgatattcg

SEQ ID NO: 197695 - DNA, 51 bp, Artificial
  Synthetic oligonucleotide
ctccggctgatgcaagtgctgtagccgcgcagagatcatttcccggtgcgc

SEQ ID NO: 197696 - DNA, 51 bp, Artificial
  Synthetic oligonucleotide
cggggtagtctgagttcactggtacttgcgaaaacctgcgaagtgaaggac

SEQ ID NO: 197697 - DNA, 51 bp, Artificial
  Synthetic oligonucleotide
ctccggctacgatcgccagtacacacgcaaccgcaactgccggtaacagta

SEQ ID NO: 197698 - DNA, 51 bp, Artificial
  Synthetic oligonucleotide
ctgttcggaatgcgattactgctattccaacgagactatgggatgcaatta

SEQ ID NO: 197699 - DNA, 51 bp, Artificial
  Synthetic oligonucleotide
ctttgaccatcgtccgacagatttcttactactgtaaccttgtctgtacca

SEQ ID NO: 197700 - DNA, 51 bp, Artificial
  Synthetic oligonucleotide
ctgttggatttgtcggaaactcgccccctgtccgcgctagcggactcaata

SEQ ID NO: 197701 - DNA, 51 bp, Artificial
  Synthetic oligonucleotide
atggcaaatacttgtccggtcagcatcattctcacgctttcatccataacg

SEQ ID NO: 197702 - DNA, 51 bp, Artificial
  Synthetic oligonucleotide
ctattcaggagtaatgactaacctaccatcgtgaataacacactgtctatc

SEQ ID NO: 197703 - DNA, 58 bp, Artificial
  Synthetic oligonucleotide
ttgtatctggcatcgttcccgacatctcttgtatatggaaacttgcagatttacaacg

SEQ ID NO: 197704 - DNA, 51 bp, Artificial
  Synthetic oligonucleotide
caatacctgtgtatccgcatcaggatcgccttccggagcaggaatgtagtc

SEQ ID NO: 197705 - DNA, 51 bp, Artificial
  Synthetic oligonucleotide
ccggcctcgctctcataaccgccgtatgcattggcacttctgaggatggct

SEQ ID NO: 197706 - DNA, 51 bp, Artificial
  Synthetic oligonucleotide
ccggcataagactccgccgcttcaatggcaaggctctggctcgttaccgta

SEQ ID NO: 197707 - DNA, 51 bp, Artificial
  Synthetic oligonucleotide
ccatcctgagcattttcggcagcctgagtaagccctcgcacctgtcgcctc

SEQ ID NO: 197708 - DNA, 51 bp, Artificial
  Synthetic oligonucleotide
cggattctactccatttgcccctacaatcgcaggcatacttagtgaaactg

SEQ ID NO: 197709 - DNA, 50 bp, Artificial
  Synthetic oligonucleotide
ccggacaccacgcccataagaaaagccttacccgttttggccccggcacc

SEQ ID NO: 197710 - DNA, 51 bp, Artificial
  Synthetic oligonucleotide
gatcacggccacgatatacacattcgttgttgtcacctgtccgaataccgc

SEQ ID NO: 197711 - DNA, 51 bp, Artificial
  Synthetic oligonucleotide
cgacacctccggtcggtgcgtatccgactttgatatcccggactgcatatt

SEQ ID NO: 197712 - DNA, 51 bp, Artificial
  Synthetic oligonucleotide
gatccattaaggccctagcctggtgcgtcagaaacctctgagcccggccgt

SEQ ID NO: 197713 - DNA, 51 bp, Artificial
  Synthetic oligonucleotide
cgatttaatggataatcgcagtgcctatgtgaataagcttcagggtgaatt

SEQ ID NO: 197714 - DNA, 58 bp, Artificial
  Synthetic oligonucleotide
atctcacactctccgctcgcttccgcttccccgtacctgagaagactgtaatgggcgc

SEQ ID NO: 197715 - DNA, 51 bp, Artificial
  Synthetic oligonucleotide
ctgcctgtccgggttctatagtcttattccactccataggacttatctcgt

SEQ ID NO: 197716 - DNA, 51 bp, Artificial
  Synthetic oligonucleotide
attgcctttgcgagaacaacccccgcactgctcttgccaacacccggcatt

SEQ ID NO: 197717 - DNA, 51 bp, Artificial
  Synthetic oligonucleotide
ccctgtcaagctccagctgtctgcagacacgttcgtccattccctgctttt

SEQ ID NO: 197718 - DNA, 51 bp, Artificial
  Synthetic oligonucleotide
cgtaacgctctgttccagtcatccctatattaatcacttgcgatactattg

SEQ ID NO: 197719 - DNA, 51 bp, Artificial
  Synthetic oligonucleotide
cgcacgagttcccgtaacctgaaccactccccaaatcgtccccgtgaccgt

SEQ ID NO: 197720 - DNA, 51 bp, Artificial
  Synthetic oligonucleotide
gatacagcggacaatgttgttccccatatgctgggcagcttccatgacaag

SEQ ID NO: 197721 - DNA, 50 bp, Artificial
  Synthetic oligonucleotide
ccccgacacgatatgtccaccaaatcttcctccggccgccatagcgcgct

SEQ ID NO: 197722 - DNA, 50 bp, Artificial
  Synthetic oligonucleotide
acaccaggcctgaggtgcatgcattccacactgctccatggccgagacaa

SEQ ID NO: 197723 - DNA, 50 bp, Artificial
  Synthetic oligonucleotide
acacattccacccgcaatcgcctgggaatctgccgcacaaacgggcttac

SEQ ID NO: 197724 - DNA, 50 bp, Artificial
  Synthetic oligonucleotide
acacacgtcccggagcaaacccgttctctactctctgtccccgccatggg

SEQ ID NO: 197725 - DNA, 58 bp, Artificial
  Synthetic oligonucleotide
gtttctgtatatcaagtttcgtctaccaccctcgcgaaatattccggcacaagaatgc

SEQ ID NO: 197726 - DNA, 58 bp, Artificial
  Synthetic oligonucleotide
acgaagtgtacaagcttgccggaggtgcgggatccagacgcggaacaggaggaatgcg

SEQ ID NO: 197727 - DNA, 50 bp, Artificial
  Synthetic oligonucleotide
cgttcctacacgttgctgcgtgcgcttccatgcctgtgcggaaagccggg

SEQ ID NO: 197728 - DNA, 50 bp, Artificial
  Synthetic oligonucleotide
ccccggagtcgcatacatcggcagaccgtaacgtctcgcaaggacgccaa

SEQ ID NO: 197729 - DNA, 50 bp, Artificial
  Synthetic oligonucleotide
aatcgcctgggaatctgccgcacaaacgggcttacacattccacccgctg

SEQ ID NO: 197730 - DNA, 50 bp, Artificial
  Synthetic oligonucleotide
acacctgcaggcatcagtccgcaggagtacagaccggataccggacaggc

SEQ ID NO: 197731 - DNA, 50 bp, Artificial
  Synthetic oligonucleotide
tatacaccggcaggccacatccaagcccatgaagcctgtatgcctgggct

SEQ ID NO: 197732 - DNA, 50 bp, Artificial
  Synthetic oligonucleotide
tccgattgcatccgcaagaagggcccccttaatcccgggaagctttccgt

SEQ ID NO: 197733 - DNA, 50 bp, Artificial
  Synthetic oligonucleotide
tagtatccgcttcgtggcgaagctagcgagagcgtgcctcgtttcaggcc

SEQ ID NO: 197734 - DNA, 50 bp, Artificial
  Synthetic oligonucleotide
tccgccccttctgcacgaaaggtaacctctccaatcggaactccgccctt

SEQ ID NO: 197735 - DNA, 50 bp, Artificial
  Synthetic oligonucleotide
ccccagatagcggtccgtgatggatcccgttgcaagcagggttcccacat

SEQ ID NO: 197736 - DNA, 50 bp, Artificial
  Synthetic oligonucleotide
cccatgcgacttccgatgggttttccgacagatgcgactgcacgcggagt

SEQ ID NO: 197737 - DNA, 58 bp, Artificial
  Synthetic oligonucleotide
atgtgcaccgctcatagccagtgccgtagctgcaaccaaatcgtttccgggtgatgag

SEQ ID NO: 197738 - DNA, 50 bp, Artificial
  Synthetic oligonucleotide
acaggattgctgccaatggatggcgcacacctgcaggcatcagtccgcag

SEQ ID NO: 197739 - DNA, 50 bp, Artificial
  Synthetic oligonucleotide
tccgcgcgcatgtattgagctgagagcttcgctaagctgtccgattcgat

SEQ ID NO: 197740 - DNA, 50 bp, Artificial
  Synthetic oligonucleotide
tcactcccccgttcggacttcctgtccactgagcaaacgctcccatcagc

SEQ ID NO: 197741 - DNA, 50 bp, Artificial
  Synthetic oligonucleotide
cccgggcccactccaaaggctccctccggctgatatctcatttgatccga

SEQ ID NO: 197742 - DNA, 50 bp, Artificial
  Synthetic oligonucleotide
aatgggccctggcgccctcatgttaggcctatccctggctagttttgcta

SEQ ID NO: 197743 - DNA, 50 bp, Artificial
  Synthetic oligonucleotide
aatgtgggttgctccgccacagaccggacatgtctccggcgcatgacacg

SEQ ID NO: 197744 - DNA, 50 bp, Artificial
  Synthetic oligonucleotide
tcacagcatcgcacatctgaccgtctccggcctgtgccatacagtcccaa

SEQ ID NO: 197745 - DNA, 50 bp, Artificial
  Synthetic oligonucleotide
tcacaaggttctccgccccgacttccaccgcacttgcacccgccatcatc

SEQ ID NO: 197746 - DNA, 50 bp, Artificial
  Synthetic oligonucleotide
cccgcttctctacggcgtgcgtgtgtatgcgtcaaacgaccgggtacagg

SEQ ID NO: 197747 - DNA, 50 bp, Artificial
  Synthetic oligonucleotide
tcaagaggcggagctctgtcccggtgctggttctcacatcgagggaccag

SEQ ID NO: 197748 - DNA, 58 bp, Artificial
  Synthetic oligonucleotide
atccgtcagagctgcttcgttctctgccacgctgcatcctgcgcttaattgttgcgta

SEQ ID NO: 197749 - DNA, 50 bp, Artificial
  Synthetic oligonucleotide
cccgccgtgcatgggctttcagatctaccgcctgaagcacatcgccgctt

SEQ ID NO: 197750 - DNA, 50 bp, Artificial
  Synthetic oligonucleotide
aattgacgcgccctcaggcagtcttccggctgtttcgcacggaaccagtg

SEQ ID NO: 197751 - DNA, 50 bp, Artificial
  Synthetic oligonucleotide
cgtagccacgcaggtgcgcccaatggctccggtattaaaggggatttccg

SEQ ID NO: 197752 - DNA, 50 bp, Artificial
  Synthetic oligonucleotide
aatttctccgccgcccttggaaagtccgaagctcggtcttccgctcggaa

SEQ ID NO: 197753 - DNA, 50 bp, Artificial
  Synthetic oligonucleotide
aatgcctgtgtttcatacgctccggtcggttccaacgccccgatcgctcc

SEQ ID NO: 197754 - DNA, 50 bp, Artificial
  Synthetic oligonucleotide
cccgcatggcaagcggcgtgcacaagaaagtgacgatcaagccgaacgat

SEQ ID NO: 197755 - DNA, 50 bp, Artificial
  Synthetic oligonucleotide
tatggataagaccaccggcgctcccctctccgatggggacggtaacccac

SEQ ID NO: 197756 - DNA, 50 bp, Artificial
  Synthetic oligonucleotide
cgtacttcgcagatgcagtcagcacgtccagtgcacaggtcggttccccg

SEQ ID NO: 197757 - DNA, 50 bp, Artificial
  Synthetic oligonucleotide
tatgcctcttttcgtgtctgtacaagcataccctgtctttacctgtcaca

SEQ ID NO: 197758 - DNA, 50 bp, Artificial
  Synthetic oligonucleotide
ccctggaacttcgagcgcaactgagtacgtgtttgcagcgctcccccata

SEQ ID NO: 197759 - DNA, 58 bp, Artificial
  Synthetic oligonucleotide
gccatcttcatatgccgtcgcaacccgcacaatgccggttcctgaaaggggcagtgac

SEQ ID NO: 197760 - DNA, 50 bp, Artificial
  Synthetic oligonucleotide
tatgcaccccttcgggcacgcattctggcacgggttgcacgggatgttct

SEQ ID NO: 197761 - DNA, 50 bp, Artificial
  Synthetic oligonucleotide
cccgcatcgttgatctccgaaatctgcaccggaagctgcccgctcatgga

SEQ ID NO: 197762 - DNA, 50 bp, Artificial
  Synthetic oligonucleotide
cccctgcgaaggacacgcatgcgctatgagctggatcatccggctgacta

SEQ ID NO: 197763 - DNA, 50 bp, Artificial
  Synthetic oligonucleotide
accctctgcgcggtactccgcaagcatgttaaaccagctccgggttccgg

SEQ ID NO: 197764 - DNA, 50 bp, Artificial
  Synthetic oligonucleotide
accctgggcactgtcccgcgctccctcgcggactgcactgctttctccaa

SEQ ID NO: 197765 - DNA, 50 bp, Artificial
  Synthetic oligonucleotide
ccaaaaacgaggcgggatgactgacagccagcggatggagctacagcgga

SEQ ID NO: 197766 - DNA, 50 bp, Artificial
  Synthetic oligonucleotide
accgaacccatgcagccggacactcaggcgtccgaaagcttgaagctgga

SEQ ID NO: 197767 - DNA, 50 bp, Artificial
  Synthetic oligonucleotide
accgaatgactaatctgtgcaatgatcttaggcatcactcccggaagtac

SEQ ID NO: 197768 - DNA, 50 bp, Artificial
  Synthetic oligonucleotide
accgcagggcattctccgacatccgcacggctcctctgtgatgcggaatc

SEQ ID NO: 197769 - DNA, 50 bp, Artificial
  Synthetic oligonucleotide
accgcccgccactctccctcgaatgtctttccgcctgcatcgatccctgc

SEQ ID NO: 197770 - DNA, 58 bp, Artificial
  Synthetic oligonucleotide
agcctaccgctggggagtgcgaggctttgccatgtggtcgctgggacaggaggatatg

SEQ ID NO: 197771 - DNA, 50 bp, Artificial
  Synthetic oligonucleotide
accgctgcgtgtttatccgagcgagagcgtcccctgtaaggatccctgca

SEQ ID NO: 197772 - DNA, 50 bp, Artificial
  Synthetic oligonucleotide
accggagacattcccccgtcggcgagaggctctcctgcataacgtccgtc

SEQ ID NO: 197773 - DNA, 50 bp, Artificial
  Synthetic oligonucleotide
catcggcgatactcaggatatccccagccaccctgtcgctcgcacggcag

SEQ ID NO: 197774 - DNA, 50 bp, Artificial
  Synthetic oligonucleotide
catccggtcggcacagtctccacattcacatgtgctcccgactccccgag

SEQ ID NO: 197775 - DNA, 50 bp, Artificial
  Synthetic oligonucleotide
accggcttactggagggtgaccagagcgcagaaacgaggacgttggtgcc

SEQ ID NO: 197776 - DNA, 50 bp, Artificial
  Synthetic oligonucleotide
accgtgcgagggccaatcgtcacgccaggattgaccaccacattgccacc

SEQ ID NO: 197777 - DNA, 50 bp, Artificial
  Synthetic oligonucleotide
acctgcccggtaaacaaggcagggcggttctccgaatccgtgccagtata

SEQ ID NO: 197778 - DNA, 50 bp, Artificial
  Synthetic oligonucleotide
acctgtccacaagtaagcatcaccatataccgaccataggaaaccccttc

SEQ ID NO: 197779 - DNA, 50 bp, Artificial
  Synthetic oligonucleotide
acctgtcgaagtagcaggagtgctagtaggagtaactcgcgtcacttcta

SEQ ID NO: 197780 - DNA, 50 bp, Artificial
  Synthetic oligonucleotide
acgaagcagacagggagggcggagcgttttatctgggagactgcgacgga

SEQ ID NO: 197781 - DNA, 58 bp, Artificial
  Synthetic oligonucleotide
ttataacgacgtagatgagatgatgaggacttattgaagtgaaatacacgataaagcc

SEQ ID NO: 197782 - DNA, 50 bp, Artificial
  Synthetic oligonucleotide
gttacgtttctcataatcggctacagctctgaggatagtcatcgcacgaa

SEQ ID NO: 197783 - DNA, 50 bp, Artificial
  Synthetic oligonucleotide
cagtccggcactgctcctgcttcgggtatccgcccatgcaaatgtcctta

SEQ ID NO: 197784 - DNA, 50 bp, Artificial
  Synthetic oligonucleotide
acgcatatgaatgctcctttccggcctccgcagggcagagacgctgtggt

SEQ ID NO: 197785 - DNA, 50 bp, Artificial
  Synthetic oligonucleotide
ctgaatgcatggggaatggagagctttgagatcgtggcgctgcgttctta

SEQ ID NO: 197786 - DNA, 50 bp, Artificial
  Synthetic oligonucleotide
caggctccccgcattgcgcggacggcccccttctcatggcgactgatcaa

SEQ ID NO: 197787 - DNA, 50 bp, Artificial
  Synthetic oligonucleotide
acgcgcccccactcatgagcatggagagggacctcgtccctcgggaatgc

SEQ ID NO: 197788 - DNA, 50 bp, Artificial
  Synthetic oligonucleotide
tagccgagtcagatgtggctggcccgtacctcataatcggtgacggcggc

SEQ ID NO: 197789 - DNA, 50 bp, Artificial
  Synthetic oligonucleotide
cccagacttctcttccggtcgccgcccattgctccggtatagttcgacgc

SEQ ID NO: 197790 - DNA, 50 bp, Artificial
  Synthetic oligonucleotide
acagggctttccgtactggcctcctgccttacacgcaggcctcccgaatt

SEQ ID NO: 197791 - DNA, 50 bp, Artificial
  Synthetic oligonucleotide
cccacaaactggcaggcataagcgacgatggcgttcccgcctgaatagcg

SEQ ID NO: 197792 - DNA, 58 bp, Artificial
  Synthetic oligonucleotide
gaaggctgtggcatacgcgctccacagatcgggcgagtttacacggaaagtttgggac

SEQ ID NO: 197793 - DNA, 50 bp, Artificial
  Synthetic oligonucleotide
tagaggggctttgccccaagatccaatgccgcctcatagctcacctccga

SEQ ID NO: 197794 - DNA, 50 bp, Artificial
  Synthetic oligonucleotide
ctatgaatcgtgatttgtataatcaatacaagagcataattgttaggagc

SEQ ID NO: 197795 - DNA, 50 bp, Artificial
  Synthetic oligonucleotide
acagtccgtctcagaggatctccgcgcaagcaggtcctcacagtccggct

SEQ ID NO: 197796 - DNA, 50 bp, Artificial
  Synthetic oligonucleotide
tactgtccccgttgcggaaccccgctttcctcccatgaggtagcgcaggg

SEQ ID NO: 197797 - DNA, 50 bp, Artificial
  Synthetic oligonucleotide
acatgccttatccgccgctccctgctttcagccggcgttttagatgcggg

SEQ ID NO: 197798 - DNA, 50 bp, Artificial
  Synthetic oligonucleotide
acatgtcgcagaccgcttctacggcagactcggaacactggcccgttgca

SEQ ID NO: 197799 - DNA, 50 bp, Artificial
  Synthetic oligonucleotide
ccagaaccccaaacggcacggccaatactaccgcagtagccggatcagcg

SEQ ID NO: 197800 - DNA, 50 bp, Artificial
  Synthetic oligonucleotide
acattccttcccgtactgtccgcagagacgcacgatcgcgcttcccacga

SEQ ID NO: 197801 - DNA, 50 bp, Artificial
  Synthetic oligonucleotide
ctccgcataattcccctccggagagcagccatacatccgacagggacgcc

SEQ ID NO: 197802 - DNA, 50 bp, Artificial
  Synthetic oligonucleotide
acattggagccgaagaattccgctgtctgagcggcctcctccgctaccgg

SEQ ID NO: 197803 - DNA, 56 bp, Artificial
  Synthetic oligonucleotide
agcctccggaaaagccgctgaccgtagctgtgaagcgaagcgtataggaagaaccg

SEQ ID NO: 197804 - DNA, 50 bp, Artificial
  Synthetic oligonucleotide
accacggaagcactccttgctgccaatcccgacagtgtcatcacgcgcgc

SEQ ID NO: 197805 - DNA, 50 bp, Artificial
  Synthetic oligonucleotide
accagggaatgctgcgttccaaaagctctccccgatgccacagaggcaga

SEQ ID NO: 197806 - DNA, 50 bp, Artificial
  Synthetic oligonucleotide
accagttcatttcctgcgatcccgctatgtcccttagtgtgcacaaatgt

SEQ ID NO: 197807 - DNA, 50 bp, Artificial
  Synthetic oligonucleotide
ctccgccacagaccggacatgtctccggcgcatgacacgttccgcttcgc

SEQ ID NO: 197808 - DNA, 50 bp, Artificial
  Synthetic oligonucleotide
accattcttcacggggcagtgctgtccgcttccaaaggttccccggtcga

SEQ ID NO: 197809 - DNA, 50 bp, Artificial
  Synthetic oligonucleotide
acccaaagctgtccgcctggtgggtattacagccggagcgtctaccccga

SEQ ID NO: 197810 - DNA, 50 bp, Artificial
  Synthetic oligonucleotide
accccgcacatgtcggatctccccgtccagtccgacctctccgaaaaagc

SEQ ID NO: 197811 - DNA, 50 bp, Artificial
  Synthetic oligonucleotide
acccgaatatgggcttcatggcggggctcaaggcattttccgccgctgtg

SEQ ID NO: 197812 - DNA, 50 bp, Artificial
  Synthetic oligonucleotide
acccgggtcatgatagccgccacgctgtcaaaacactgtgtggtagccga

SEQ ID NO: 197813 - DNA, 50 bp, Artificial
  Synthetic oligonucleotide
accctcatccgtggataggccgatgtcaccgcctgcagagggcgtccctg

SEQ ID NO: 197814 - DNA, 58 bp, Artificial
  Synthetic oligonucleotide
gtgaccggatggtataagcttgtgccgccatacagtgaggagtcaaagccgggaccga

SEQ ID NO: 197815 - DNA, 50 bp, Artificial
  Synthetic oligonucleotide
ttcgcttagtacccctgcgtggcgaagttagcgagagcgtgccccggcca

SEQ ID NO: 197816 - DNA, 50 bp, Artificial
  Synthetic oligonucleotide
aaccgccaaaagcacccacacgtataaaagccctgccagagccacggggc

SEQ ID NO: 197817 - DNA, 50 bp, Artificial
  Synthetic oligonucleotide
aaccgcctggcagacagcgtccctctgggtctgcgttccatcttttaccc

SEQ ID NO: 197818 - DNA, 50 bp, Artificial
  Synthetic oligonucleotide
cgcctgccatgcgtctgacacccttcgttaccatgcctgcatgcttcgta

SEQ ID NO: 197819 - DNA, 50 bp, Artificial
  Synthetic oligonucleotide
cctgtgtatctgacttcactgttgcaacctgtttctttccccagtcacaa

SEQ ID NO: 197820 - DNA, 50 bp, Artificial
  Synthetic oligonucleotide
aaccggaaaccctcgaccacaacgggccgagcggtgtgacacaggcgtac

SEQ ID NO: 197821 - DNA, 50 bp, Artificial
  Synthetic oligonucleotide
aaccggcagcgttaaaagtgacggcggaacacccgatggcaaagcccata

SEQ ID NO: 197822 - DNA, 50 bp, Artificial
  Synthetic oligonucleotide
cctccctccgcctgaacacgtgccagtgccggatttatggctatgccaca

SEQ ID NO: 197823 - DNA, 50 bp, Artificial
  Synthetic oligonucleotide
aacgggagtccctgcccgttccgcttcacagattaacgagagcttcgccg

SEQ ID NO: 197824 - DNA, 50 bp, Artificial
  Synthetic oligonucleotide
aacggggacaatgcgcctgtggactactccctgcattatcctgctgccga

SEQ ID NO: 197825 - DNA, 57 bp, Artificial
  Synthetic oligonucleotide
catatcctcctgtcccagcgaccacatggcaaagcctcgcactccccagcggtaggc

SEQ ID NO: 197826 - DNA, 50 bp, Artificial
  Synthetic oligonucleotide
aactgccctgcccctgactgcagcgggcgatcatacggcgcatattttcc

SEQ ID NO: 197827 - DNA, 50 bp, Artificial
  Synthetic oligonucleotide
aactgcgggcggctatatgtcatggttcggtcaggtgaaggacggagcgg

SEQ ID NO: 197828 - DNA, 50 bp, Artificial
  Synthetic oligonucleotide
cgcgttccgcctctcgcatctgctccggattcgggaactccgcttctttt

SEQ ID NO: 197829 - DNA, 50 bp, Artificial
  Synthetic oligonucleotide
aagaatggcaggccgagacaggaccactggatgtggcgaccattgtgcct

SEQ ID NO: 197830 - DNA, 50 bp, Artificial
  Synthetic oligonucleotide
ttacgggcattgaattcgggggaatctgagcccgccggcacttgctgaga

SEQ ID NO: 197831 - DNA, 50 bp, Artificial
  Synthetic oligonucleotide
cctcatctccgtattcagccgcgtccggcaatgctcctgcgcccaaagaa

SEQ ID NO: 197832 - DNA, 50 bp, Artificial
  Synthetic oligonucleotide
cgctgccccggatctgatgcgtagctgcatgcctgctcacagtcggacga

SEQ ID NO: 197833 - DNA, 50 bp, Artificial
  Synthetic oligonucleotide
ccgtcggataaactgccggtgccaccgaatagcgcagcactgccacatga

SEQ ID NO: 197834 - DNA, 50 bp, Artificial
  Synthetic oligonucleotide
cgcttagtacccctgcgaaggcgagcttagcgggagcgtgccctgtgagc

SEQ ID NO: 197835 - DNA, 50 bp, Artificial
  Synthetic oligonucleotide
aagcaccctcgtatcgccttctccgaacacccggaaaggccttgtcccat

SEQ ID NO: 197836 - DNA, 53 bp, Artificial
  Synthetic oligonucleotide
cttctagtacaagttttttggttttagcacaactccaatttatttggagtgta

SEQ ID NO: 197837 - DNA, 56 bp, Artificial
  Synthetic oligonucleotide
cttacattaacgagcataaaaccagccagcgggcggttagaaaagatgccgtcttg

SEQ ID NO: 197838 - DNA, 60 bp, Artificial
  Synthetic oligonucleotide
ggagcttcaagtggtattggacgctcgattgtgttagagagtgcaagtcgcggcgccact

SEQ ID NO: 197839 - DNA, 56 bp, Artificial
  Synthetic oligonucleotide
aacaaactcaatacctttgactagatttgttggtcagttacctagtactcatatca

SEQ ID NO: 197840 - DNA, 54 bp, Artificial
  Synthetic oligonucleotide
ggctgtcccttggtaagtgtatccttgaatcgaaattccaaccggtacttcaac

SEQ ID NO: 197841 - DNA, 53 bp, Artificial
  Synthetic oligonucleotide
gttattaacgtgtctttgccaatcgtcgttacatgttccacgttaaacggtaa

SEQ ID NO: 197842 - DNA, 56 bp, Artificial
  Synthetic oligonucleotide
gatcgcaggttctaatgtctttaagaaagatggaactgttttatacgtaactccag

SEQ ID NO: 197843 - DNA, 56 bp, Artificial
  Synthetic oligonucleotide
ggtaatgctgagacaagcaatgagaagtcaagttcggatgaaaaagcagatagtcg

SEQ ID NO: 197844 - DNA, 51 bp, Artificial
  Synthetic oligonucleotide
aaaatagggccaacgatccaattttgaactaatgaaaaagcaagttccttt

SEQ ID NO: 197845 - DNA, 53 bp, Artificial
  Synthetic oligonucleotide
taaacttcctattccccgacttattcctaagcgactagaacgtattatagcgt

SEQ ID NO: 197846 - DNA, 56 bp, Artificial
  Synthetic oligonucleotide
gaagtgcgcgatgctgatacaggaactttccacgatgtttatctagcaggagcaca

SEQ ID NO: 197847 - DNA, 55 bp, Artificial
  Synthetic oligonucleotide
ctaagcagggcgaagactttattctacccaagaaatggagcggtaagacgctcgg

SEQ ID NO: 197848 - DNA, 56 bp, Artificial
  Synthetic oligonucleotide
caggcgtttttagcagaaagccgcagtgagcataagctgcttagccggtcgggtga

SEQ ID NO: 197849 - DNA, 59 bp, Artificial
  Synthetic oligonucleotide
ggacgtgcacaaagcgactaaagcctggttaatggattatgaaggtatgagcaagaacc

SEQ ID NO: 197850 - DNA, 56 bp, Artificial
  Synthetic oligonucleotide
agggactgcggcgaccaccgtaagagtgggcagcacggtcgagttttcctatgtaa

SEQ ID NO: 197851 - DNA, 49 bp, Artificial
  Synthetic oligonucleotide
ctaaccaaaacgaatgtaaaagaattactggagggaaaagaaaccctgg

SEQ ID NO: 197852 - DNA, 56 bp, Artificial
  Synthetic oligonucleotide
tcctggtcgctttgctccctaaaaaggtgtggctgcgccacatttaactccggctt

SEQ ID NO: 197853 - DNA, 56 bp, Artificial
  Synthetic oligonucleotide
gtctccggtacgttaccacgccggtggagcatgactgtgcttcatgaggaggtcta

SEQ ID NO: 197854 - DNA, 55 bp, Artificial
  Synthetic oligonucleotide
gtttgtcatgaaccaccggtcaccagaacaacgaaatttggcgggcgtaacgcaa

SEQ ID NO: 197855 - DNA, 56 bp, Artificial
  Synthetic oligonucleotide
gtaatctatgtttcaaaaaatcctgtaactgctgaaagtgtgcgtttgaaagttaa

SEQ ID NO: 197856 - DNA, 56 bp, Artificial
  Synthetic oligonucleotide
gggcacgctggggcttgacttggtgaacactcggacagctgaatcactggccgtca

SEQ ID NO: 197857 - DNA, 56 bp, Artificial
  Synthetic oligonucleotide
agccgctgcacatggtggctttacgacaattgctgcaatggccaaccttaatccga

SEQ ID NO: 197858 - DNA, 56 bp, Artificial
  Synthetic oligonucleotide
cgctattagcaagtatcggatgttagctaagcagaacttatttcccaatgtcgatt

SEQ ID NO: 197859 - DNA, 56 bp, Artificial
  Synthetic oligonucleotide
atttgttcgaaaacgacgggacgttatcctagatgttaaggatggcattgtgcaac

SEQ ID NO: 197860 - DNA, 59 bp, Artificial
  Synthetic oligonucleotide
ggacgatagtgtccgtgtaatgattttgtggacatcaattgtcttgtttgttatcttaa

SEQ ID NO: 197861 - DNA, 56 bp, Artificial
  Synthetic oligonucleotide
cgggctagctgtctctctaacggccataaatggactcagctacaagtcagccgggg

SEQ ID NO: 197862 - DNA, 56 bp, Artificial
  Synthetic oligonucleotide
caactcagccatgcgtgaagttggcacggccatgtcttccataactgcgctgcgac

SEQ ID NO: 197863 - DNA, 56 bp, Artificial
  Synthetic oligonucleotide
tcgcgcaagtgcttagagccacttccggcagccaagcctaattcacgataacgtgg

SEQ ID NO: 197864 - DNA, 56 bp, Artificial
  Synthetic oligonucleotide
ggtcgtagtcaaacgagtagaaagcagccatgcccggtgaccggtgtctgttccgc

SEQ ID NO: 197865 - DNA, 56 bp, Artificial
  Synthetic oligonucleotide
ggcgccctaagctcggtgccacagcaccaacgcgaatccggcaaggcaattgggct

SEQ ID NO: 197866 - DNA, 55 bp, Artificial
  Synthetic oligonucleotide
ggttcgtaacctgggccagcgtcactggccaaaaagatcgtttgaccggcaagct

SEQ ID NO: 197867 - DNA, 56 bp, Artificial
  Synthetic oligonucleotide
tcacagctgctcagtttcatcgtcaacgacacgccaggtctgtcgaccggggtctt

SEQ ID NO: 197868 - DNA, 56 bp, Artificial
  Synthetic oligonucleotide
atagtgcatcaatttggccgtctgcacgaaacgggacgggtcctggctgtttgcgt

SEQ ID NO: 197869 - DNA, 56 bp, Artificial
  Synthetic oligonucleotide
tagcaccgcccccgcacaagacaatcattccaatttgaccgtgtaaagccctgtga

SEQ ID NO: 197870 - DNA, 56 bp, Artificial
  Synthetic oligonucleotide
cttaaggtcttagtcattaaaggctgtaactcgggatcatctagtggaattaagac

SEQ ID NO: 197871 - DNA, 56 bp, Artificial
  Synthetic oligonucleotide
ggacctttttgatatacatgacggacctttttgatatacatgacggacctttttga

SEQ ID NO: 197872 - DNA, 55 bp, Artificial
  Synthetic oligonucleotide
gcgttgaagtaccggttggaatttcgattcaaggatacacttaccaagggacagc

SEQ ID NO: 197873 - DNA, 56 bp, Artificial
  Synthetic oligonucleotide
gtgctgcagcgctagcttcagttaacgcggagcaaaatctgcgagcccatggctta

SEQ ID NO: 197874 - DNA, 51 bp, Artificial
  Synthetic oligonucleotide
cttttctggtttccaggtaaacgaatagccaataactggtttcccacgccc

SEQ ID NO: 197875 - DNA, 56 bp, Artificial
  Synthetic oligonucleotide
atataatgccaatcctcataatgaatacaaaattcgagattatcatatattagaag

SEQ ID NO: 197876 - DNA, 56 bp, Artificial
  Synthetic oligonucleotide
tgacacgcattgatctctataaagtatagtaaagaggcctaccctaagttggatag

SEQ ID NO: 197877 - DNA, 52 bp, Artificial
  Synthetic oligonucleotide
ttcttcgctttcttaccggttggtcccttagaggaatcgtacttgcgaaccc

SEQ ID NO: 197878 - DNA, 55 bp, Artificial
  Synthetic oligonucleotide
ggttaacgttattgttcaaggcgtaaagattttagacgattaatgcattctggag

SEQ ID NO: 197879 - DNA, 56 bp, Artificial
  Synthetic oligonucleotide
ctggcattgtcgttagacctagccagccgctaaagggactgaaggcgaaagatctg

SEQ ID NO: 197880 - DNA, 55 bp, Artificial
  Synthetic oligonucleotide
aacgttacaatgacgatatttgatcggcaattcgttagttattttacacgactta

SEQ ID NO: 197881 - DNA, 55 bp, Artificial
  Synthetic oligonucleotide
gggctacggtgcttctcagttaagattcaatactttcgaaaacttattaaaatgc

SEQ ID NO: 197882 - DNA, 57 bp, Artificial
  Synthetic oligonucleotide
ggacccgctcgaagtcacccctgcctccaaggtgagccagaaggttgaccgcgccta

SEQ ID NO: 197883 - DNA, 56 bp, Artificial
  Synthetic oligonucleotide
aagtatcgcacggaagttgaagtcgataatagaccactctttcgcctttccaagcg

SEQ ID NO: 197884 - DNA, 56 bp, Artificial
  Synthetic oligonucleotide
acatggaaaatcctaagttcgagttttacacgcgtccaagtggacacaatgaattc

SEQ ID NO: 197885 - DNA, 56 bp, Artificial
  Synthetic oligonucleotide
ggtggggccgcagaacctgccgacacgctttctccagaaaacatgaccgaagtgaa

SEQ ID NO: 197886 - DNA, 55 bp, Artificial
  Synthetic oligonucleotide
aaacttggagtggggtcccatattgacgggcaagttgagtagcgcttaggccgcc

SEQ ID NO: 197887 - DNA, 56 bp, Artificial
  Synthetic oligonucleotide
cgccgattaaggtaatatgtcattgccggaacaatcaaacaactagctactaaact

SEQ ID NO: 197888 - DNA, 56 bp, Artificial
  Synthetic oligonucleotide
aggattgtcagtgaccaaattaagaccgagtacattcgtcaccaaacgactcaagt

SEQ ID NO: 197889 - DNA, 53 bp, Artificial
  Synthetic oligonucleotide
tgggccgttttcaaggctccggcgactaatttccgcctttcccaggcttggtc

SEQ ID NO: 197890 - DNA, 56 bp, Artificial
  Synthetic oligonucleotide
acgtcattagcggcattcaagcaaattttaaccgcatgattacctaagatactttc

SEQ ID NO: 197891 - DNA, 56 bp, Artificial
  Synthetic oligonucleotide
gcaaaacgatccgatctctctcgatgcggctcgcatttacgaaaacttgagagccg

SEQ ID NO: 197892 - DNA, 56 bp, Artificial
  Synthetic oligonucleotide
gtgccgaaattctagcatcatctgcacaatggttaagataacaaacaagacaattg

SEQ ID NO: 197893 - DNA, 58 bp, Artificial
  Synthetic oligonucleotide
ggaatgtctttgtggttgggggcccaggatcatataagacccaatcagtcgtcattac

SEQ ID NO: 197894 - DNA, 56 bp, Artificial
  Synthetic oligonucleotide
cccacaattagtacgaatcatacaactgaatagtcgttgttgcaataagtccttag

SEQ ID NO: 197895 - DNA, 56 bp, Artificial
  Synthetic oligonucleotide
gatgattatttgattactaatgcatttggcgtagttgataaagaaatgactaagcg

SEQ ID NO: 197896 - DNA, 55 bp, Artificial
  Synthetic oligonucleotide
gttaatgtaagccttaaggtttcaactaaagcaattacagtcaaccataaccata

SEQ ID NO: 197897 - DNA, 56 bp, Artificial
  Synthetic oligonucleotide
aggaacacacagacgtactgtgagtacttgaatttgcgctcgtggaactcttcaac

SEQ ID NO: 197898 - DNA, 56 bp, Artificial
  Synthetic oligonucleotide
tgatcaaaaagttgaccaagtggtacgcgagattgttgctaagtgggactatcagc

SEQ ID NO: 197899 - DNA, 56 bp, Artificial
  Synthetic oligonucleotide
caagagtagtagggattggcttatatacaagagtcagattattaacatctggactg

SEQ ID NO: 197900 - DNA, 55 bp, Artificial
  Synthetic oligonucleotide
ggccaagcactttgagggattggccgccttgtccacccatccagcgggacagcgg

SEQ ID NO: 197901 - DNA, 55 bp, Artificial
  Synthetic oligonucleotide
gctgatgagcgcgtttcaaatcgggctgttcgtaaggatgccgttgttttaactg

SEQ ID NO: 197902 - DNA, 55 bp, Artificial
  Synthetic oligonucleotide
acgagcgatgaaattagcttatgcgccagttgtgaatgttgaagcggttaaaccg

SEQ ID NO: 197903 - DNA, 55 bp, Artificial
  Synthetic oligonucleotide
gctcaggagtcagaacagccagttacagctagacaatgcaaagactcagctcctt

SEQ ID NO: 197904 - DNA, 60 bp, Artificial
  Synthetic oligonucleotide
ggaacgcaagtatggcagaggagacatagacaaagaaactggcgagatacaagattgatt

SEQ ID NO: 197905 - DNA, 55 bp, Artificial
  Synthetic oligonucleotide
ggctaacaactgcgccctgcgtcataacacgttcacggttaaccgggtccagatg

SEQ ID NO: 197906 - DNA, 55 bp, Artificial
  Synthetic oligonucleotide
ggctactgcacattcaccttgactaaaggagccatccccagtggtaaccacggtg

SEQ ID NO: 197907 - DNA, 55 bp, Artificial
  Synthetic oligonucleotide
gctgcccctaagcaagattttattgatcgtgctgtcttccccgaacatgccaaag

SEQ ID NO: 197908 - DNA, 55 bp, Artificial
  Synthetic oligonucleotide
accctaacttgcggtgcccgatcaactactccgtccgtagcgcgctggcgtactt

SEQ ID NO: 197909 - DNA, 55 bp, Artificial
  Synthetic oligonucleotide
ggcatcactaggccttttctaacctcgaaatctgatacttcctcacctactgccc

SEQ ID NO: 197910 - DNA, 53 bp, Artificial
  Synthetic oligonucleotide
acgattgggtgaacaccccagttaaccatcaaaccacgacgtacacgttcgtc

SEQ ID NO: 197911 - DNA, 55 bp, Artificial
  Synthetic oligonucleotide
gctgaccccaattatcaaaccagaagttaggaattctagaactaatagcgatatc

SEQ ID NO: 197912 - DNA, 53 bp, Artificial
  Synthetic oligonucleotide
ggccaaaattaaaacaagggctgccgaagcaagggcccaaatcacccgacaac

SEQ ID NO: 197913 - DNA, 55 bp, Artificial
  Synthetic oligonucleotide
gctcgtcacatgtatccatttggttcgagcacaattctaactgttgacctaggac

SEQ ID NO: 197914 - DNA, 55 bp, Artificial
  Synthetic oligonucleotide
accggttctacatcaagtggcatcgatttacgttgaagtttcgagaaacacaccg

SEQ ID NO: 197915 - DNA, 60 bp, Artificial
  Synthetic oligonucleotide
ggaaagtctgatagtgaaaattgcaacaaggacacttcagccttagagcagagcggaatc

SEQ ID NO: 197916 - DNA, 55 bp, Artificial
  Synthetic oligonucleotide
gctcttgagtgattcaccggtcccaactgcaacacagtcaagcggttcgttagcg

SEQ ID NO: 197917 - DNA, 55 bp, Artificial
  Synthetic oligonucleotide
gctcccataagccttgtcttaccgacgcctgtagcaagtgcaaaggtaagtgaca

SEQ ID NO: 197918 - DNA, 53 bp, Artificial
  Synthetic oligonucleotide
ggccacccaaccagtaattcgacccgttatcggtgccaaaatctgaccgtccc

SEQ ID NO: 197919 - DNA, 55 bp, Artificial
  Synthetic oligonucleotide
ggcgttcatgccgtaaatccaaagattacggttgacgtcaaatatgcaggctcat

SEQ ID NO: 197920 - DNA, 55 bp, Artificial
  Synthetic oligonucleotide
ggctaatcctcagtcttctcccgtctgatttatgcccgcttgtgatactgagcat

SEQ ID NO: 197921 - DNA, 55 bp, Artificial
  Synthetic oligonucleotide
ggcgtttgtcaatgaaggtgacaggcgggttgcaaaccgcggcatttcgcaatcc

SEQ ID NO: 197922 - DNA, 55 bp, Artificial
  Synthetic oligonucleotide
ggcatcaaggttccccttagtgacagagacgccatcgtgagctaagccgtaggaa

SEQ ID NO: 197923 - DNA, 55 bp, Artificial
  Synthetic oligonucleotide
gctcattgcttggatgccaataaaagtatcaagcgactgttcagtcgggaactcc

SEQ ID NO: 197924 - DNA, 55 bp, Artificial
  Synthetic oligonucleotide
gctgacaagcccgtagtggatggcgaatcatctgatataaattcatcgaataacc

SEQ ID NO: 197925 - DNA, 55 bp, Artificial
  Synthetic oligonucleotide
acgataagctccgtgaagaattcaagcgaactaaaacgccaatcgtgtttgccgg

SEQ ID NO: 197926 - DNA, 54 bp, Artificial
  Synthetic oligonucleotide
gctttttttaaatgcgcagaaaaaatttgcgaagcttattttttcgaagatcga

SEQ ID NO: 197927 - DNA, 55 bp, Artificial
  Synthetic oligonucleotide
ggcattagcttcaaacgtatggccactttcaatcggatgaggcggattgtctaag

SEQ ID NO: 197928 - DNA, 55 bp, Artificial
  Synthetic oligonucleotide
gctccccaaccacaggcctagtgtctaagtacggctgaagaacgctgcgtaccgc

SEQ ID NO: 197929 - DNA, 55 bp, Artificial
  Synthetic oligonucleotide
gctcattattcgcttcagtggtttcgccgtccactacggggctatctgggcttcc

SEQ ID NO: 197930 - DNA, 55 bp, Artificial
  Synthetic oligonucleotide
gctcccttgcttttcgcctcgcagagcacgtccagaagaattctggtataccgtg

SEQ ID NO: 197931 - DNA, 55 bp, Artificial
  Synthetic oligonucleotide
gctcgcagctgctggcagtaaagtaagcatcgttgaattcttaagtcgcccaatg

SEQ ID NO: 197932 - DNA, 55 bp, Artificial
  Synthetic oligonucleotide
gctggacacctaatcgtaagttctttaaattaccggagtcatcaaatgcctctag

SEQ ID NO: 197933 - DNA, 55 bp, Artificial
  Synthetic oligonucleotide
gctgcccctgcttaatagattcccgcatggctttatattctggtaccgttaaact

SEQ ID NO: 197934 - DNA, 55 bp, Artificial
  Synthetic oligonucleotide
gctggcgggtcgagtgttctatgtcctatttcgatagtcgagtagacgattgtcc

SEQ ID NO: 197935 - DNA, 55 bp, Artificial
  Synthetic oligonucleotide
ggaccttcgagggctctaataatcctactgatactaagaccttaacatccggaca

SEQ ID NO: 197936 - DNA, 55 bp, Artificial
  Synthetic oligonucleotide
ggccgttatggactgacgcgcttagttcagtcactgtatggcaatcagtggccat

SEQ ID NO: 197937 - DNA, 60 bp, Artificial
  Synthetic oligonucleotide
gcttattggtcataaacgaacactttttggtgatgcagcgtacacaactctatagtgact

SEQ ID NO: 197938 - DNA, 55 bp, Artificial
  Synthetic oligonucleotide
ggcgacacgattgcagagacgagtggcttccagcatatcatgagtcgttagcaga

SEQ ID NO: 197939 - DNA, 55 bp, Artificial
  Synthetic oligonucleotide
ggacctgttagccgagcagtaaaaccggcaaccgatcaattgtcggctgaagcgt

SEQ ID NO: 197940 - DNA, 55 bp, Artificial
  Synthetic oligonucleotide
ggaccgtcacctttgttaaacctgcgtgtccaacaggattacaatcggataatgg

SEQ ID NO: 197941 - DNA, 55 bp, Artificial
  Synthetic oligonucleotide
ggaccattgatgtgacagacgaaacaaccggccaaacaactggtcaagcaactgt

SEQ ID NO: 197942 - DNA, 55 bp, Artificial
  Synthetic oligonucleotide
ggatcgagttccatcatgtaacaaatccgattagtttgctcgcatgcaatcagag

SEQ ID NO: 197943 - DNA, 55 bp, Artificial
  Synthetic oligonucleotide
ggcgacttcaacgacccgatgacatttatgcaaattccaatgacaggtacgtctt

SEQ ID NO: 197944 - DNA, 55 bp, Artificial
  Synthetic oligonucleotide
ggcgcaacgaccggaatccatgaataatcccactgtgagctgcctttgtgcggaa

SEQ ID NO: 197945 - DNA, 55 bp, Artificial
  Synthetic oligonucleotide
ggaccagtgttctacagctaaggcatctttaggcgtccagctcttatcagttgcg

SEQ ID NO: 197946 - DNA, 55 bp, Artificial
  Synthetic oligonucleotide
ggatgattagatctctccagactacgctattaacgtgcactaggtgtataatttt

SEQ ID NO: 197947 - DNA, 55 bp, Artificial
  Synthetic oligonucleotide
ggcgccaaataggcggctttctttatggaattgaccattagtcgcgaacttggtt

SEQ ID NO: 197948 - DNA, 58 bp, Artificial
  Synthetic oligonucleotide
cttaacatcaagttgtttcagcaagatatgattaatgtttttgtccttgtcgttttca

SEQ ID NO: 197949 - DNA, 55 bp, Artificial
  Synthetic oligonucleotide
gctgttacggcggtaattgatggcttaactcgtaaaggatttattactcgtaaca

SEQ ID NO: 197950 - DNA, 55 bp, Artificial
  Synthetic oligonucleotide
ggaattcccatcgtgtttaactgatgccccgtatagcgattacccgatgaatcgc

SEQ ID NO: 197951 - DNA, 55 bp, Artificial
  Synthetic oligonucleotide
ggcgccccaaccatgaacgagcatagttaattagtccttgagcgtcctgagaaac

SEQ ID NO: 197952 - DNA, 55 bp, Artificial
  Synthetic oligonucleotide
ggatggcacgacggctttgggaatcgttcgggccgctgaagcactagcgtttgag

SEQ ID NO: 197953 - DNA, 55 bp, Artificial
  Synthetic oligonucleotide
ggaatgctagtattaggtaaacgccagaatactaagcttatatcagagcaagctc

SEQ ID NO: 197954 - DNA, 55 bp, Artificial
  Synthetic oligonucleotide
ggaatgacaggcgaatcaatttctaacgttgcgcaacgatcacaacgtactcagc

SEQ ID NO: 197955 - DNA, 52 bp, Artificial
  Synthetic oligonucleotide
ggaataagttcagattagcgtaaacttgtttggggagtttgtccgataccgt

SEQ ID NO: 197956 - DNA, 55 bp, Artificial
  Synthetic oligonucleotide
ggaagttagcacgtaagcaagcactggcaagagaccactatctatgtcaagagtg

SEQ ID NO: 197957 - DNA, 55 bp, Artificial
  Synthetic oligonucleotide
ggataaagtcgtagtagttactggagcttcaagtggtattggtcgctcgattgcg

SEQ ID NO: 197958 - DNA, 55 bp, Artificial
  Synthetic oligonucleotide
ggataacggctgtcaccggccgttccctactcacttcaggacggcagctcacaag

SEQ ID NO: 197959 - DNA, 55 bp, Artificial
  Synthetic oligonucleotide
ggagtctgcaagattaattggactttaactactatggggtgtccaattaccgatg

SEQ ID NO: 197960 - DNA, 55 bp, Artificial
  Synthetic oligonucleotide
gctgattactaaccttgccggagttaacaacgttggttcgctcaaaattgcggag

SEQ ID NO: 197961 - DNA, 52 bp, Artificial
  Synthetic oligonucleotide
ggaggttcgattacccaagttaacttgccccagtaaggtgaaattagtacta

SEQ ID NO: 197962 - DNA, 55 bp, Artificial
  Synthetic oligonucleotide
ggaggtgtacgagatggcgcacgttcagaaattcactaaaggaaatatgcaaggc

SEQ ID NO: 197963 - DNA, 55 bp, Artificial
  Synthetic oligonucleotide
ggagggattcgtcatgttggtattccaaatgcgttatcaaatgcgttatgtagat

SEQ ID NO: 197964 - DNA, 55 bp, Artificial
  Synthetic oligonucleotide
ggagggatcggctattcaatcaggattagaacctagtcaatgtcttctcctagat

SEQ ID NO: 197965 - DNA, 55 bp, Artificial
  Synthetic oligonucleotide
ggataactgtttgagagagcctaagggcttgacccttgatggtttaagcaccgct

SEQ ID NO: 197966 - DNA, 54 bp, Artificial
  Synthetic oligonucleotide
accttgatcggcgttactaagttaatgatctcactttgtttatccgttaatggg

SEQ ID NO: 197967 - DNA, 55 bp, Artificial
  Synthetic oligonucleotide
ggataacttttgaaaacgcggtcatatcggcgtttggagcggtggatatccccac

SEQ ID NO: 197968 - DNA, 55 bp, Artificial
  Synthetic oligonucleotide
ggagaagacacgtgatactaatccgcgttcgcaattgggtatcgatattttcgtt

SEQ ID NO: 197969 - DNA, 55 bp, Artificial
  Synthetic oligonucleotide
ggacttccaagcgctcctaagcaatttatccagtatatgacggaagatgatcgtc

SEQ ID NO: 197970 - DNA, 55 bp, Artificial
  Synthetic oligonucleotide
ggataccatttggacccagtcggactccaaggggcaagcgcaccttcgttcaacg

SEQ ID NO: 197971 - DNA, 60 bp, Artificial
  Synthetic oligonucleotide
gctgaagaccaacagacagaacatttacaacgtgcttaaagctgagcatattaaaccgga

SEQ ID NO: 197972 - DNA, 55 bp, Artificial
  Synthetic oligonucleotide
ggactcgtggtatttcgtttcaatgtgacaacttcttggtgagcacttacccggg

SEQ ID NO: 197973 - DNA, 55 bp, Artificial
  Synthetic oligonucleotide
ggacgttgatgacgcctatcaaatagatcaccgaatacctgttgctagaggtgga

SEQ ID NO: 197974 - DNA, 55 bp, Artificial
  Synthetic oligonucleotide
ggacggaaataaccgccagaattgacgctatctccgcccatgaatatcctagtaa

SEQ ID NO: 197975 - DNA, 55 bp, Artificial
  Synthetic oligonucleotide
acgaacaaagtgaggcgcaaagagcgtagcgaatggagtttaatgtgagccggtt

SEQ ID NO: 197976 - DNA, 55 bp, Artificial
  Synthetic oligonucleotide
ggccggtattcattgatgagcttcgttagctgctgctggttataagtgtccaagt

SEQ ID NO: 197977 - DNA, 55 bp, Artificial
  Synthetic oligonucleotide
ggatactgatatcgctaactttaaacgatatgggtttagtgtagttcgtcgctac

SEQ ID NO: 197978 - DNA, 55 bp, Artificial
  Synthetic oligonucleotide
acgaaccatctgctgcgaggattgcccgattttgcgggtcactcggattcggcgt

SEQ ID NO: 197979 - DNA, 55 bp, Artificial
  Synthetic oligonucleotide
gcttgcggctattgatagggttctgctaggtggtgaagcacttaggcaggtttcc

SEQ ID NO: 197980 - DNA, 55 bp, Artificial
  Synthetic oligonucleotide
ggcactaagtattactgttgccagcaataacgcaacttgtctcttgcgtggtcta

SEQ ID NO: 197981 - DNA, 55 bp, Artificial
  Synthetic oligonucleotide
gcttgagttagcaagcgtcaagcccttggctttagtaaatacataaaagattagc

SEQ ID NO: 197982 - DNA, 55 bp, Artificial
  Synthetic oligonucleotide
gctctggtaaagcttaacacggttagagttgtagagttgttgtatttgtctttac

SEQ ID NO: 197983 - DNA, 55 bp, Artificial
  Synthetic oligonucleotide
ggcgtcgatttgttgcgattagtcctaatcctgaaccgactaagtatggttctgc

SEQ ID NO: 197984 - DNA, 55 bp, Artificial
  Synthetic oligonucleotide
gcttccggacgtactcttcagcgcaccactgtcgctagtcgagccactggtactc

SEQ ID NO: 197985 - DNA, 55 bp, Artificial
  Synthetic oligonucleotide
gcttatttaaatagcgtaatctactttctaaatggcgtaggtcacgtttagcagc

SEQ ID NO: 197986 - DNA, 55 bp, Artificial
  Synthetic oligonucleotide
gcttattactcgcgttacccatctggggcgtgttaatcttagtaatgagcagctg

SEQ ID NO: 197987 - DNA, 55 bp, Artificial
  Synthetic oligonucleotide
gcttaatcatgcttaccggtggtgactcgcttgaagactacgctaccagtcaagc

SEQ ID NO: 197988 - DNA, 55 bp, Artificial
  Synthetic oligonucleotide
ggcgtctaaaccgatgtctgctatcgggggcaatgtttcaaccaatgccggcgga

SEQ ID NO: 197989 - DNA, 55 bp, Artificial
  Synthetic oligonucleotide
ggcactagcgcaaagaatcaacgtaagttgactgttgctattaagagagctcgtg

SEQ ID NO: 197990 - DNA, 55 bp, Artificial
  Synthetic oligonucleotide
gcttaagcaaagtcagcgtatacttcgagcgcacagttgccaattctgagagctt

SEQ ID NO: 197991 - DNA, 55 bp, Artificial
  Synthetic oligonucleotide
ggcagcttgttgaagtaagtcggctaaggttgcacctgttctatcatgtgtgatg

SEQ ID NO: 197992 - DNA, 55 bp, Artificial
  Synthetic oligonucleotide
ggccacgattctcgccctcatccgctatggcaaatttaccaagccctacatcggg

SEQ ID NO: 197993 - DNA, 60 bp, Artificial
  Synthetic oligonucleotide
gctcaacaggaaattgaccaaaatgacttaacttacagcgatgaccagtcaatcacagta

SEQ ID NO: 197994 - DNA, 55 bp, Artificial
  Synthetic oligonucleotide
gctgtgcgtgttgcatttactcgtaatggcggtacaatgggtgcaactggctctg

SEQ ID NO: 197995 - DNA, 55 bp, Artificial
  Synthetic oligonucleotide
ggcaggcttatgagcaattgccgaaagcaactttagttggctgctgggctcatgt

SEQ ID NO: 197996 - DNA, 55 bp, Artificial
  Synthetic oligonucleotide
ggcagtactgaagcgcttcaagatcgattagatgttttatgtggttatcatcgtt

SEQ ID NO: 197997 - DNA, 55 bp, Artificial
  Synthetic oligonucleotide
gctggtgacaaagtccatctgcttaacgttgacccagcttgctaatgcaaacgcg

SEQ ID NO: 197998 - DNA, 55 bp, Artificial
  Synthetic oligonucleotide
accgaatagctgcgataacaaactttgcagtatcaaatcattcggccaatccaca

SEQ ID NO: 197999 - DNA, 55 bp, Artificial
  Synthetic oligonucleotide
gctgggtgattagttcatctggtaaattacggaagtctaatcgtttactgagacc

SEQ ID NO: 198000 - DNA, 55 bp, Artificial
  Synthetic oligonucleotide
gctgggccaagaaatcagtcactcctgctaacggacgtcctgtgcaaatgacgac

SEQ ID NO: 198001 - DNA, 55 bp, Artificial
  Synthetic oligonucleotide
ggaaggctttgaaagagattcgtcttaatttaggtctaagtcaggctaaaatgtg

SEQ ID NO: 198002 - DNA, 55 bp, Artificial
  Synthetic oligonucleotide
ggattcagacgattgaccaacggaaagacaaggttttacatactgtccttgacgc

SEQ ID NO: 198003 - DNA, 55 bp, Artificial
  Synthetic oligonucleotide
ggccaggttgaccaggagaagacaacactgaaggccgaaaatgaccgactgagcg

SEQ ID NO: 198004 - DNA, 59 bp, Artificial
  Synthetic oligonucleotide
gctattacatcattaacgattcactcttaccgcccgatactgttatcacgtttggattc

SEQ ID NO: 198005 - DNA, 55 bp, Artificial
  Synthetic oligonucleotide
ggcaaaagctatcgtgaaggtggccgtgagcaattagacgaaaatcatatttgct

SEQ ID NO: 198006 - DNA, 55 bp, Artificial
  Synthetic oligonucleotide
ggaactattcttgcgaacttaacgcttggtagtcgtcctaatctcacgcaagcag

SEQ ID NO: 198007 - DNA, 55 bp, Artificial
  Synthetic oligonucleotide
ggccagcggtccaataatcgtgacaactggaattaaactgtttcgcagtgcgtgg

SEQ ID NO: 198008 - DNA, 55 bp, Artificial
  Synthetic oligonucleotide
ggaacgtacggggacaagaacttttgatgcagccagttatcttcgttcagtgggg

SEQ ID NO: 198009 - DNA, 55 bp, Artificial
  Synthetic oligonucleotide
ggcggtccacatctttaaatcgcttatacgagcttaaaatggcgtttaagagctt

SEQ ID NO: 198010 - DNA, 54 bp, Artificial
  Synthetic oligonucleotide
ggaacaatcgtattcgccaagtttaaaccaacttctaagccttgcttaacatgg

SEQ ID NO: 198011 - DNA, 55 bp, Artificial
  Synthetic oligonucleotide
ggcggttcgccaattatgtgtgattcttcaaacgaaggtcgtgacttagtggcca

SEQ ID NO: 198012 - DNA, 55 bp, Artificial
  Synthetic oligonucleotide
ggaaatgccgaaagttcaatcagtggtcaaattttggcctatgtcgccgttggag

SEQ ID NO: 198013 - DNA, 55 bp, Artificial
  Synthetic oligonucleotide
ggaaacttccagtgccctgtatacctgcgcttaaatggatccacaaactctccca

SEQ ID NO: 198014 - DNA, 55 bp, Artificial
  Synthetic oligonucleotide
ggcaaacattgtatcttatgaaaagtcaaaggaactgcctatagcaacgcttttc

SEQ ID NO: 198015 - DNA, 59 bp, Artificial
  Synthetic oligonucleotide
gctaggcgcttttccaacgatgcctgtggacttggtatactcaaagtgcaagttaggag

SEQ ID NO: 198016 - DNA, 55 bp, Artificial
  Synthetic oligonucleotide
ggaaacgagcaggctgattacctcggatcggacgggaaactagcggacattgtta

SEQ ID NO: 198017 - DNA, 55 bp, Artificial
  Synthetic oligonucleotide
gcttgttcatcactgtgccactgactaacaaacaacccatttcactacgagtgcg

SEQ ID NO: 198018 - DNA, 55 bp, Artificial
  Synthetic oligonucleotide
ggcaaccaatggttactggaccgcttggttcactgacaatacgatggggaatgaa

SEQ ID NO: 198019 - DNA, 55 bp, Artificial
  Synthetic oligonucleotide
ggccacggactatttgacctacacgacggcagccaaacccaagacgggctatgtg

SEQ ID NO: 198020 - DNA, 55 bp, Artificial
  Synthetic oligonucleotide
ggcgtatggctaacctagaacgatagttggcacggaacgggacggctagcgttcg

SEQ ID NO: 198021 - DNA, 55 bp, Artificial
  Synthetic oligonucleotide
ggcacagatgccggaaggaacttcgttcgattatccggcggcaggtacgttgttg

SEQ ID NO: 198022 - DNA, 55 bp, Artificial
  Synthetic oligonucleotide
gcttggttagctgattaattgaattaagtaggttaatccggacacttcagcgccg

SEQ ID NO: 198023 - DNA, 55 bp, Artificial
  Synthetic oligonucleotide
gcttgggccgttggtgaattacagtcatcgtctaatcctgaaatcgagacttttc

SEQ ID NO: 198024 - DNA, 55 bp, Artificial
  Synthetic oligonucleotide
gcaagacgatgcaggtattaaggggcgtagtgtaaatttgctaaatagcaggttg

SEQ ID NO: 198025 - DNA, 55 bp, Artificial
  Synthetic oligonucleotide
gcaacgttatgcttgccaaccttaacagccaatgcctgacggttcaaacgatagc

SEQ ID NO: 198026 - DNA, 60 bp, Artificial
  Synthetic oligonucleotide
gctagcgttccggctgtgatatcgtttatcgcccttggcatcgcactagtcggtctgtgg

SEQ ID NO: 198027 - DNA, 55 bp, Artificial
  Synthetic oligonucleotide
gcaaataacctaaccagcaggccgtatgactaagctagaccggaggttggtgcgc

SEQ ID NO: 198028 - DNA, 55 bp, Artificial
  Synthetic oligonucleotide
gcaaagcgtcactttcagggatcgtatctgcgtcattacttaagatatactcacc

SEQ ID NO: 198029 - DNA, 52 bp, Artificial
  Synthetic oligonucleotide
gcaaacccgtcttacgcacgggctcaaattacaaacgtcccctttactaatc

SEQ ID NO: 198030 - DNA, 55 bp, Artificial
  Synthetic oligonucleotide
gcaaaactctcttcacttggttcctttgtcgatcagtaattcttgcagaactccg

SEQ ID NO: 198031 - DNA, 55 bp, Artificial
  Synthetic oligonucleotide
gattttagtaaaattgtcgctgcgatctactgcatccgccagcactgtcttaagc

SEQ ID NO: 198032 - DNA, 55 bp, Artificial
  Synthetic oligonucleotide
gatttactttggggctgtcctactgtaactttgaccgttgttgtatcagcagatc

SEQ ID NO: 198033 - DNA, 55 bp, Artificial
  Synthetic oligonucleotide
gattatgggtgcgtctgatgaggatattagaagtgtgctgtcaacatttacgggt

SEQ ID NO: 198034 - DNA, 55 bp, Artificial
  Synthetic oligonucleotide
acggttgtacaaatatggtcctgatagaattaccagccagcccatcgctacatat

SEQ ID NO: 198035 - DNA, 52 bp, Artificial
  Synthetic oligonucleotide
gattaaaccaaccactaagctttaagggatcagttttcaactgacgtttaac

SEQ ID NO: 198036 - DNA, 55 bp, Artificial
  Synthetic oligonucleotide
gatgttaaacgacggattatagtatgcgtttacttgatgagccggcatctcccaa

SEQ ID NO: 198037 - DNA, 56 bp, Artificial
  Synthetic oligonucleotide
gctacgttcacttgcgtcaaggacagtatgtaaaaccttgtctttccgttggtcaa

SEQ ID NO: 198038 - DNA, 55 bp, Artificial
  Synthetic oligonucleotide
gatggctgagaatttcacctgagaataaatcataaatacatgtgaaataggcgcg

SEQ ID NO: 198039 - DNA, 55 bp, Artificial
  Synthetic oligonucleotide
gatggctctggaatatattccgcatactgtagggccatcagcgattgaggtttcc

SEQ ID NO: 198040 - DNA, 55 bp, Artificial
  Synthetic oligonucleotide
gatggccgaattactagtcatcacttaagccggcggtaacggtgctaagctgaag

SEQ ID NO: 198041 - DNA, 55 bp, Artificial
  Synthetic oligonucleotide
gatggattaggcgtagttgacgcaaaggatattcttacggacgatcaaattagct

SEQ ID NO: 198042 - DNA, 55 bp, Artificial
  Synthetic oligonucleotide
gatgccttgaatcatgggattttgcggcagtgtcgcaacggttgctggtaacata

SEQ ID NO: 198043 - DNA, 55 bp, Artificial
  Synthetic oligonucleotide
gatgccgcaccctctgtatttgggcgaaacgaccaacgaatcaagataccattcg

SEQ ID NO: 198044 - DNA, 55 bp, Artificial
  Synthetic oligonucleotide
gatgcatttcagcggtagagcgaaaatcaatcacaacccgtaaagtgactttgct

SEQ ID NO: 198045 - DNA, 55 bp, Artificial
  Synthetic oligonucleotide
gatgatttcgtttgctaaacgttcatccatagtgtgttcgttacgtaaacgagcg

SEQ ID NO: 198046 - DNA, 55 bp, Artificial
  Synthetic oligonucleotide
gatgatggctatgacccctactggtatttaggaccgaagtccattgtagaaagtc

SEQ ID NO: 198047 - DNA, 55 bp, Artificial
  Synthetic oligonucleotide
gatcgcgcacaagtcacggaaccaactaaggttaaaggagctagcctggggaatt

SEQ ID NO: 198048 - DNA, 59 bp, Artificial
  Synthetic oligonucleotide
gctacgttacgccggtgaagtaacagctcattaacagtcacattaatcggcaattctag

SEQ ID NO: 198049 - DNA, 55 bp, Artificial
  Synthetic oligonucleotide
gatcgcaaaaggcggaattgcggtcgtcgttcgatgctgacggcagcattagcga

SEQ ID NO: 198050 - DNA, 55 bp, Artificial
  Synthetic oligonucleotide
gatcgatatttcaagcgaattcataaaggctttggtcaagtacaagacactctag

SEQ ID NO: 198051 - DNA, 54 bp, Artificial
  Synthetic oligonucleotide
gatccgccgtcgcgtatacgtagataaagcttccaagtaccgccgggaaccttc

SEQ ID NO: 198052 - DNA, 55 bp, Artificial
  Synthetic oligonucleotide
gatccctggcacgtttgatttgatgttattaccaaaattaactcgctcatggact

SEQ ID NO: 198053 - DNA, 55 bp, Artificial
  Synthetic oligonucleotide
gatcatgatgaacaaacggcgttggttattaagtttattgccaatcttactgggg

SEQ ID NO: 198054 - DNA, 55 bp, Artificial
  Synthetic oligonucleotide
gatcaagagtaaagcctccactcttcaaccgcgttaacaaactcattactcctgg

SEQ ID NO: 198055 - DNA, 55 bp, Artificial
  Synthetic oligonucleotide
gcagcagtcaccttagtcacactgttggcaatgttcttcgtcttattcggaatcg

SEQ ID NO: 198056 - DNA, 55 bp, Artificial
  Synthetic oligonucleotide
gcagatctagtggcatggagttgtaattgatcttagaatgcccttatttctcttc

SEQ ID NO: 198057 - DNA, 55 bp, Artificial
  Synthetic oligonucleotide
gcagatacgtgatagttcgtagaatgcgagatgataagtatattagctcagatga

SEQ ID NO: 198058 - DNA, 55 bp, Artificial
  Synthetic oligonucleotide
gcactagcatcaggatgattaactatctcacgcagagcggtcttaccattaggca

SEQ ID NO: 198059 - DNA, 55 bp, Artificial
  Synthetic oligonucleotide
cttaaaacaactgatacgtgcaaatagagccaatcaaggaactccctaaaagagg

SEQ ID NO: 198060 - DNA, 58 bp, Artificial
  Synthetic oligonucleotide
gagggcgcaaattaaacaatcgtgaggtaattataacatgacagcaaattatactaaa

SEQ ID NO: 198061 - DNA, 55 bp, Artificial
  Synthetic oligonucleotide
gcacgttgctaaaactatcgtatgtgatctacccggagtactcagttatactatg

SEQ ID NO: 198062 - DNA, 55 bp, Artificial
  Synthetic oligonucleotide
gcacgtgagttaggatttatggcagatcgaacgcataaggaattcgcacgggaag

SEQ ID NO: 198063 - DNA, 55 bp, Artificial
  Synthetic oligonucleotide
gcacgtcctaaatgagccatataagagcgatcagagtagatatgagagtagtcag

SEQ ID NO: 198064 - DNA, 55 bp, Artificial
  Synthetic oligonucleotide
gcacgtatcaaacgacaacaacagcgccggcgtttgcgaaagcaacaagacgacc

SEQ ID NO: 198065 - DNA, 55 bp, Artificial
  Synthetic oligonucleotide
gcacgtaatcgcctcaaacggttcattcgtgctacactgacagaacttaagccag

SEQ ID NO: 198066 - DNA, 55 bp, Artificial
  Synthetic oligonucleotide
gcacggcaacttcctaccctcgcaagaggcgatcccctaactactatcggcgtta

SEQ ID NO: 198067 - DNA, 55 bp, Artificial
  Synthetic oligonucleotide
gcaccggtcctgtgacgagttgaagcgaggaacggttttgaggtactgtgaacga

SEQ ID NO: 198068 - DNA, 55 bp, Artificial
  Synthetic oligonucleotide
gcaccgacgcaaactcgcggacgcatgcaaggagtcaagggaactcctgggagtg

SEQ ID NO: 198069 - DNA, 55 bp, Artificial
  Synthetic oligonucleotide
gcacccttttggttaggtacgtctgatacgactggtgtgaatttgacagaaaccc

SEQ ID NO: 198070 - DNA, 55 bp, Artificial
  Synthetic oligonucleotide
gcaccattcactattagccaacattgctgagcgagtgaagttagctgagccaata

SEQ ID NO: 198071 - DNA, 59 bp, Artificial
  Synthetic oligonucleotide
gaggctcacagagcgcgttcaggggttttctgacctaggccatgctgtaaaggacgtaa

SEQ ID NO: 198072 - DNA, 55 bp, Artificial
  Synthetic oligonucleotide
gcaccagaaagccccttgaatgagttgagcaatgttccccttatatcctggtttc

SEQ ID NO: 198073 - DNA, 55 bp, Artificial
  Synthetic oligonucleotide
gcaccaaaggttctaaattctgataataatccttggggagttactgttgaaggag

SEQ ID NO: 198074 - DNA, 55 bp, Artificial
  Synthetic oligonucleotide
gcacattcgtctgtaattagccatgtttgactcggtgcattgtgcatataagagc

SEQ ID NO: 198075 - DNA, 55 bp, Artificial
  Synthetic oligonucleotide
gcacatattgtccactcaaaggaagttgatagtggtgctcaatgttagctgaaaa

SEQ ID NO: 198076 - DNA, 55 bp, Artificial
  Synthetic oligonucleotide
gcacagctttgcgagatattcaagatcaattaccgacttatttacaacagcatgg

SEQ ID NO: 198077 - DNA, 55 bp, Artificial
  Synthetic oligonucleotide
gcacaccattatagtagcgacatctctcgtgaacaatttgaactaatccggacag

SEQ ID NO: 198078 - DNA, 55 bp, Artificial
  Synthetic oligonucleotide
gcaattacaaacctactgcgaacaatcgctttattgacgacatagagcggacgta

SEQ ID NO: 198079 - DNA, 55 bp, Artificial
  Synthetic oligonucleotide
gcaatcgtttaatcgatgactacacgtcgttattacgggtaaccaacgtaagtga

SEQ ID NO: 198080 - DNA, 55 bp, Artificial
  Synthetic oligonucleotide
gcaatcggtgttgggattgccaacgttacaggttatctagtcactgatgctattc

SEQ ID NO: 198081 - DNA, 55 bp, Artificial
  Synthetic oligonucleotide
gcaatcccggatttagcaatcaccgatatgggaaacgttgattgtattaagttgg

SEQ ID NO: 198082 - DNA, 57 bp, Artificial
  Synthetic oligonucleotide
gagctagtgggaacgggaagacggcgttattatgctacttgctggcttccgttctta

SEQ ID NO: 198083 - DNA, 55 bp, Artificial
  Synthetic oligonucleotide
gcaagtcaaccgtctggagaatcaagtagatgttcaaggttaccagcacaatggt

SEQ ID NO: 198084 - DNA, 55 bp, Artificial
  Synthetic oligonucleotide
gcaagcagttatgtcgtaaagctagcgaacgctcggtttccctaagtacggaact

SEQ ID NO: 198085 - DNA, 55 bp, Artificial
  Synthetic oligonucleotide
gcaagcaatcttggacttacaagcgcggtgcattaaattttgctgaccgtgtagc

SEQ ID NO: 198086 - DNA, 54 bp, Artificial
  Synthetic oligonucleotide
gcaagagggtttcggggagggcccaatgtccctttagaggttcatctgcccgct

SEQ ID NO: 198087 - DNA, 55 bp, Artificial
  Synthetic oligonucleotide
gaggaacgttgcatcatagtaaccatatctgctcgacagagcatcttagctacat

SEQ ID NO: 198088 - DNA, 50 bp, Artificial
  Synthetic oligonucleotide
gaggaaaaccagttatcggttattcttttacttggaaacctgaaagaaag

SEQ ID NO: 198089 - DNA, 55 bp, Artificial
  Synthetic oligonucleotide
gagctcgcgaaccatatcgaggtactccttaggaacaggatgaccatagtatgtc

SEQ ID NO: 198090 - DNA, 55 bp, Artificial
  Synthetic oligonucleotide
gagctcaattcaggggcatctgtttgatacaagtctaccatcgacttattgtcgt

SEQ ID NO: 198091 - DNA, 55 bp, Artificial
  Synthetic oligonucleotide
gagctacgaaataccctagttgtctttgcaactgaccctgttttacggcaactat

SEQ ID NO: 198092 - DNA, 55 bp, Artificial
  Synthetic oligonucleotide
gagcgcgtacagacctgtgtatagaccgtagtaagttggccctggttgagattcc

SEQ ID NO: 198093 - DNA, 60 bp, Artificial
  Synthetic oligonucleotide
gagcgtgtgttggcctaattccacatacacagagcattactaatctggatgaactacagg

SEQ ID NO: 198094 - DNA, 55 bp, Artificial
  Synthetic oligonucleotide
gagcgaaatgcggttgatggtgttgatttaaaactacgtttgagggctttaactc

SEQ ID NO: 198095 - DNA, 55 bp, Artificial
  Synthetic oligonucleotide
gagccgttctgagcctggcctggtagatttggccataaacccggctaaatacccc

SEQ ID NO: 198096 - DNA, 55 bp, Artificial
  Synthetic oligonucleotide
gagcatagtattgtagcgtcactgtgggagatttatgacctaaacgatgagctac

SEQ ID NO: 198097 - DNA, 55 bp, Artificial
  Synthetic oligonucleotide
gagcacgttttggcgttacatcgtccgcacctagacggtgcattggacgcagctc

SEQ ID NO: 198098 - DNA, 55 bp, Artificial
  Synthetic oligonucleotide
gagcaatgtcttgcagccgatctgttaagggcttcatgacaaccatcaaagctgc

SEQ ID NO: 198099 - DNA, 55 bp, Artificial
  Synthetic oligonucleotide
gagatttgataattgccggatcctaaaacaatctgaccagtcttcgtaagcatcc

SEQ ID NO: 198100 - DNA, 55 bp, Artificial
  Synthetic oligonucleotide
gagaatgaccgtatgccaaagaataaagaagagggagaaaactggctggagatcc

SEQ ID NO: 198101 - DNA, 55 bp, Artificial
  Synthetic oligonucleotide
gactttgccgttaggtatcaagagctggtcaaaagcttaccccgtgatcgccgtc

SEQ ID NO: 198102 - DNA, 55 bp, Artificial
  Synthetic oligonucleotide
gacttgcattatcagacatcatccgatgtttacacgaggaagcaactatcgtcaa

SEQ ID NO: 198103 - DNA, 55 bp, Artificial
  Synthetic oligonucleotide
gacttccacttcgccattatagtcttcggcacctacttcatcttgacttccacta

SEQ ID NO: 198104 - DNA, 54 bp, Artificial
  Synthetic oligonucleotide
gagccgccgctataaactcccactaggaattaacctatacttgtatttaggttg

SEQ ID NO: 198105 - DNA, 55 bp, Artificial
  Synthetic oligonucleotide
gacttagcccgatctaattgaccacccatactgtcatatgaacgactagccttgt

SEQ ID NO: 198106 - DNA, 55 bp, Artificial
  Synthetic oligonucleotide
gactggcacggtcagtaggaagcaagttggggccgtcaaggaactagttggggag

SEQ ID NO: 198107 - DNA, 55 bp, Artificial
  Synthetic oligonucleotide
gactgcttaagcgtggccacagaccgactagtgcgatgccaagggcgataaacga

SEQ ID NO: 198108 - DNA, 55 bp, Artificial
  Synthetic oligonucleotide
gactgcgctagattacgtccctaaagaattaacgtttcaatcgttacgtgatcct

SEQ ID NO: 198109 - DNA, 55 bp, Artificial
  Synthetic oligonucleotide
gactcttcaagtggctagatcggcttattataagtggctccatcataaaccgagt

SEQ ID NO: 198110 - DNA, 55 bp, Artificial
  Synthetic oligonucleotide
gactcataaaacgtacggcccgcatcattcgcaaagcatcctcgtgaaatctttt

SEQ ID NO: 198111 - DNA, 55 bp, Artificial
  Synthetic oligonucleotide
gactacgtgctcgattgttctcggcattgtaatagatcagaagcgaaaagtcgct

SEQ ID NO: 198112 - DNA, 55 bp, Artificial
  Synthetic oligonucleotide
gactaaacaggctgaagtccctgttctggtcatctcatcattgaaccgggcttcc

SEQ ID NO: 198113 - DNA, 55 bp, Artificial
  Synthetic oligonucleotide
gactaaaatagggtatgcacgagtaagtagcaaagaacagaacttagatcggcaa

SEQ ID NO: 198114 - DNA, 54 bp, Artificial
  Synthetic oligonucleotide
gacggggaggaacaactccaatttctacgccatgggagtccgattctaaagtac

SEQ ID NO: 198115 - DNA, 60 bp, Artificial
  Synthetic oligonucleotide
gagcaatgacataatccattatctttaattcacgcgcattcaaatcatgacgagccttcg

SEQ ID NO: 198116 - DNA, 55 bp, Artificial
  Synthetic oligonucleotide
gacggagatacactttcccgcatggacgaaagattgagtgaagtttattgcatga

SEQ ID NO: 198117 - DNA, 55 bp, Artificial
  Synthetic oligonucleotide
gacggaatgaaacgacacactgaaacggctgaaagccaaagttagttacactaac

SEQ ID NO: 198118 - DNA, 55 bp, Artificial
  Synthetic oligonucleotide
gatcaagaactgtccaaatctgctgatccgtgatggctgggtcatgcagcgtgag

SEQ ID NO: 198119 - DNA, 55 bp, Artificial
  Synthetic oligonucleotide
acgtctcacattaatgcttggacgggtggcaagggagcggtcaaagttagtctga

SEQ ID NO: 198120 - DNA, 55 bp, Artificial
  Synthetic oligonucleotide
gatagtggcgcatacttaatcgggcgtcaaattgggcgtactaagttagctcctc

SEQ ID NO: 198121 - DNA, 55 bp, Artificial
  Synthetic oligonucleotide
gatagtggaactgcttacgaaattggagcagccgttgccatgggtaaaccagtcg

SEQ ID NO: 198122 - DNA, 55 bp, Artificial
  Synthetic oligonucleotide
gataggtactggcaacccgataaattatgaaactagagagtcccgtgcaaacatg

SEQ ID NO: 198123 - DNA, 55 bp, Artificial
  Synthetic oligonucleotide
gatagggacaacttatttgaccaactgaaattgtaatcaaacagcggtcgtctaa

SEQ ID NO: 198124 - DNA, 55 bp, Artificial
  Synthetic oligonucleotide
gataggcctgttgcctgttgagtagttctatagtcgctcttcataagcagattgt

SEQ ID NO: 198125 - DNA, 55 bp, Artificial
  Synthetic oligonucleotide
gatactgtggctcgctaggtgtatactaaacacatggaaaatcctaagttcgagt

SEQ ID NO: 198126 - DNA, 55 bp, Artificial
  Synthetic oligonucleotide
gagagaacggttagcaccggtcctgtgacgagttgaagcgaggaacggttttgag

SEQ ID NO: 198127 - DNA, 55 bp, Artificial
  Synthetic oligonucleotide
gatactctatcacaaatgatggaatggcgaatcgactactatgaacacgccactg

SEQ ID NO: 198128 - DNA, 55 bp, Artificial
  Synthetic oligonucleotide
acgttaaagtcaacatcggtatgtcgagcactcatccctaattgacgtaagatcc

SEQ ID NO: 198129 - DNA, 55 bp, Artificial
  Synthetic oligonucleotide
acgttcacaatcgttagtaaacaaaacatgctacttgccatcaagaacggtccag

SEQ ID NO: 198130 - DNA, 55 bp, Artificial
  Synthetic oligonucleotide
gagttttctatcattctgggagccacacttgctactccaggattgtggaagattt

SEQ ID NO: 198131 - DNA, 55 bp, Artificial
  Synthetic oligonucleotide
gagtttccgttggtccgaagtatttgatgcttcatggatacgggaccgttatcgg

SEQ ID NO: 198132 - DNA, 55 bp, Artificial
  Synthetic oligonucleotide
gagttggacctaagattgaagtagcagaacaaggtaatagtcacatcattacgat

SEQ ID NO: 198133 - DNA, 55 bp, Artificial
  Synthetic oligonucleotide
gagttgcatgttccctgggttgagagccctctgcatgataaagatacaaatccag

SEQ ID NO: 198134 - DNA, 55 bp, Artificial
  Synthetic oligonucleotide
gagttgcaccgtggatatgacttaccaaaggcaaaacgaaacgcagacggattag

SEQ ID NO: 198135 - DNA, 55 bp, Artificial
  Synthetic oligonucleotide
gagttgacaattttgctacacccgaaccctcttggctcgtcaaaaggcaacacct

SEQ ID NO: 198136 - DNA, 55 bp, Artificial
  Synthetic oligonucleotide
gagttaactatgcgaacttttacccatcgatatggtagcgatattacacgtgacc

SEQ ID NO: 198137 - DNA, 56 bp, Artificial
  Synthetic oligonucleotide
gacgccttaagttaagcttagaccgcttgcctgcaagggagcggcgattcgtggtt

SEQ ID NO: 198138 - DNA, 55 bp, Artificial
  Synthetic oligonucleotide
gagtgtgagcaggtaaagaaggcccgtaagacaacaatttctcccgactggatgc

SEQ ID NO: 198139 - DNA, 55 bp, Artificial
  Synthetic oligonucleotide
gagtctgaggttgctttatgggtcatgttacccttaacgtctgagacgagtgaaa

SEQ ID NO: 198140 - DNA, 55 bp, Artificial
  Synthetic oligonucleotide
gagtcctgtggaggttctcttatcatctcctaagtccaaggatagctgtgctggc

SEQ ID NO: 198141 - DNA, 55 bp, Artificial
  Synthetic oligonucleotide
gaggtactcgtgcctttgccaagaacacgttaaacaaggtccaagcctatggcgc

SEQ ID NO: 198142 - DNA, 55 bp, Artificial
  Synthetic oligonucleotide
actaccccattaaaatttcgctaactttagtgggcattctcgtgctcttgcgtga

SEQ ID NO: 198143 - DNA, 55 bp, Artificial
  Synthetic oligonucleotide
gaggctcatgcgtatacaactgagcacgtaagaactttaggtattcatctcgcga

SEQ ID NO: 198144 - DNA, 55 bp, Artificial
  Synthetic oligonucleotide
actaccttatacttatgggaatggatctacgcgattattaccgccctccatgagt

SEQ ID NO: 198145 - DNA, 55 bp, Artificial
  Synthetic oligonucleotide
gaggatgcggatgtattacaccaagttattccgcggcacgtaacagtgcgtactg

SEQ ID NO: 198146 - DNA, 55 bp, Artificial
  Synthetic oligonucleotide
gaggacgtttggggatcatgaaaacgaaccacctctctatagggccaatcccctc

SEQ ID NO: 198147 - DNA, 55 bp, Artificial
  Synthetic oligonucleotide
gaggacatgaagtctcagttgagcgtgaaggataatcaaatatctaccttaactc

SEQ ID NO: 198148 - DNA, 54 bp, Artificial
  Synthetic oligonucleotide
gacgaaaatttatttgaggacgtttggggatcatgaaaacgaaccacctctcta

SEQ ID NO: 198149 - DNA, 55 bp, Artificial
  Synthetic oligonucleotide
gcggattcccttgccctggatttagtgtagctgggcctcgactcttggatgatcc

SEQ ID NO: 198150 - DNA, 55 bp, Artificial
  Synthetic oligonucleotide
gcggaggtcaaacaccacctctggtttagcgcccagaaagtacgctgatttgttg

SEQ ID NO: 198151 - DNA, 55 bp, Artificial
  Synthetic oligonucleotide
gcggagatatatgaatgatgttgtagaaaatcataagaaggggcatcaatgagca

SEQ ID NO: 198152 - DNA, 55 bp, Artificial
  Synthetic oligonucleotide
acgctcatgatattgccatttatcggcttgtgccctcaatgctctaacagcggga

SEQ ID NO: 198153 - DNA, 55 bp, Artificial
  Synthetic oligonucleotide
gcggaattacagggaggagcatcccaattatcccaccaacgaatgaaatgctccc

SEQ ID NO: 198154 - DNA, 55 bp, Artificial
  Synthetic oligonucleotide
gcgcttgaatgttggtcaagagttaatgaacaaggtcaactaaaactctgatatc

SEQ ID NO: 198155 - DNA, 55 bp, Artificial
  Synthetic oligonucleotide
gcgcttcgtaaagaagggtgatcccttagtcacttaccatgatgtcaataaccca

SEQ ID NO: 198156 - DNA, 55 bp, Artificial
  Synthetic oligonucleotide
gcgcccattagacagaccgtctaacgttgcaaagcgttcataaactcgaaccggg

SEQ ID NO: 198157 - DNA, 55 bp, Artificial
  Synthetic oligonucleotide
gcgcattcggggattaatgtcttatttagcggcagcaactttgaccgactactag

SEQ ID NO: 198158 - DNA, 55 bp, Artificial
  Synthetic oligonucleotide
gcgcatgcgtggagctcgaccgtttcaatcatgctgactcgagagcactgcaacg

SEQ ID NO: 198159 - DNA, 50 bp, Artificial
  Synthetic oligonucleotide
gaccttaattaagcgggttggtaaagccctagcggtaatcgtggtggttt

SEQ ID NO: 198160 - DNA, 55 bp, Artificial
  Synthetic oligonucleotide
gcgcatgacacgcaggattcgcgtcaagtcaaacgttccgtagtgcgttccggta

SEQ ID NO: 198161 - DNA, 55 bp, Artificial
  Synthetic oligonucleotide
gcgcagtaaatcagttcgactcgatattgcagttaaagaccaatctggtaacttg

SEQ ID NO: 198162 - DNA, 53 bp, Artificial
  Synthetic oligonucleotide
acgcttaatttggtaatcacccttaattttagtcatatacactaagttagtcg

SEQ ID NO: 198163 - DNA, 55 bp, Artificial
  Synthetic oligonucleotide
gcgcaatgaccaaagcccggtcatcacgcctgaagccactataaggacctcaggc

SEQ ID NO: 198164 - DNA, 55 bp, Artificial
  Synthetic oligonucleotide
gcgcaagttgcttttgcacgtttaagtgatatatcaaattacctacctctactca

SEQ ID NO: 198165 - DNA, 55 bp, Artificial
  Synthetic oligonucleotide
gcgatttaattagttgggatgataaagcagctgatatctggggtttagtgcaacg

SEQ ID NO: 198166 - DNA, 55 bp, Artificial
  Synthetic oligonucleotide
gcgattattaacccgattagaatgggaataatccaactcattgcttcacgaaatg

SEQ ID NO: 198167 - DNA, 55 bp, Artificial
  Synthetic oligonucleotide
gcgatgttatgcggctccgttggactgatgtctttaacgaaaacggaaccgtgcg

SEQ ID NO: 198168 - DNA, 55 bp, Artificial
  Synthetic oligonucleotide
gcgatgaatatgtgcgatgtcggagatctcttgttgtatcagaccgtgcatgtag

SEQ ID NO: 198169 - DNA, 55 bp, Artificial
  Synthetic oligonucleotide
gcgagtcttcggtcagactgacatcgaaatttcgtttacgtccgccttacgaccg

SEQ ID NO: 198170 - DNA, 57 bp, Artificial
  Synthetic oligonucleotide
ctggccgacgtaactatacgatttttcaagttggtaaagcgacgctactgcgagtga

SEQ ID NO: 198171 - DNA, 59 bp, Artificial
  Synthetic oligonucleotide
gaccagctgaaagacttaagcaattacaaacctactgcgaacaatcgctttattgacga

SEQ ID NO: 198172 - DNA, 55 bp, Artificial
  Synthetic oligonucleotide
gcgagtcactaactccaatcgtaacttaagatgacttttgagtttagctaatcct

SEQ ID NO: 198173 - DNA, 55 bp, Artificial
  Synthetic oligonucleotide
gcgaggacccaaagaactcgcatagtaaacaaggttgtccgtagcatttccgagg

SEQ ID NO: 198174 - DNA, 50 bp, Artificial
  Synthetic oligonucleotide
gcgaacctgccggttagccccgaccataaactccgttgcccggtaaaagg

SEQ ID NO: 198175 - DNA, 55 bp, Artificial
  Synthetic oligonucleotide
gcgaaatactagaagaaactgaatgatgtgatgaaaggacggataactagatccg

SEQ ID NO: 198176 - DNA, 55 bp, Artificial
  Synthetic oligonucleotide
gcgaaagcttaagtaactccgtttccatgagcgaaagcttaagtaactcagtctc

SEQ ID NO: 198177 - DNA, 55 bp, Artificial
  Synthetic oligonucleotide
gccttggcctttaacacgataagtgtacttacggtgattgcctgccaattgcctt

SEQ ID NO: 198178 - DNA, 48 bp, Artificial
  Synthetic oligonucleotide
gccttcccctaatttgaaaagggtaaccgtccgggttgtatgttttcc

SEQ ID NO: 198179 - DNA, 55 bp, Artificial
  Synthetic oligonucleotide
gccttacagcacattcaagaggaattaccacagtacctcaaagaaaatggctttg

SEQ ID NO: 198180 - DNA, 55 bp, Artificial
  Synthetic oligonucleotide
gctatggaactagacattgagaatcgtcgtcttcaaaagttagtcgggacgctac

SEQ ID NO: 198181 - DNA, 55 bp, Artificial
  Synthetic oligonucleotide
gctatccgatagataaagttaggctcgggacgagccttggttaatagtcgtaacc

SEQ ID NO: 198182 - DNA, 60 bp, Artificial
  Synthetic oligonucleotide
gacaggaactatacataggctagacacttgtcagcattgactgtagcggctttacaatga

SEQ ID NO: 198183 - DNA, 55 bp, Artificial
  Synthetic oligonucleotide
gctagtttacaaggtgcagttcaatatttgtggcacagaaacaatcctgaaaagt

SEQ ID NO: 198184 - DNA, 55 bp, Artificial
  Synthetic oligonucleotide
gctaggtaaccgaatagctgcgataacaaactttgcagtatcaaatcattcggcc

SEQ ID NO: 198185 - DNA, 55 bp, Artificial
  Synthetic oligonucleotide
acgcaagggtcccaggtagatcatccggcagggaaactgactggcgagcgtttga

SEQ ID NO: 198186 - DNA, 55 bp, Artificial
  Synthetic oligonucleotide
gctagaccacgcaaagactcagctccttattggccaggttgaccaggagaagaca

SEQ ID NO: 198187 - DNA, 55 bp, Artificial
  Synthetic oligonucleotide
gctactaccatactttctaattaaggtagccgtagtagatggtaaaggctcactg

SEQ ID NO: 198188 - DNA, 55 bp, Artificial
  Synthetic oligonucleotide
gctactaaacaaccaatgacgaatgctcagattcgagaatatctgcttaagcatg

SEQ ID NO: 198189 - DNA, 55 bp, Artificial
  Synthetic oligonucleotide
gctacgatggttcttgcacgtgtaggagcgtataggttagcaaggcctagtgtgg

SEQ ID NO: 198190 - DNA, 55 bp, Artificial
  Synthetic oligonucleotide
gctaccgtagtagatcctaataatggtcatgtagtagctatcttgggtgggcgtc

SEQ ID NO: 198191 - DNA, 55 bp, Artificial
  Synthetic oligonucleotide
gctaccgtacatctctgggtatactcggccaacatcgggacgaccagttaaggat

SEQ ID NO: 198192 - DNA, 55 bp, Artificial
  Synthetic oligonucleotide
gctaagcctccttcaggcatcccaattggtgttagattcttctgtacttccttag

SEQ ID NO: 198193 - DNA, 56 bp, Artificial
  Synthetic oligonucleotide
gacaacccgattcgctctgtcttcgccgttgctaagttgagtgaaggttgggacgt

SEQ ID NO: 198194 - DNA, 55 bp, Artificial
  Synthetic oligonucleotide
gctaacagtgagctaatttaactgtctgtcaacggtaaatcgacttagaggggct

SEQ ID NO: 198195 - DNA, 55 bp, Artificial
  Synthetic oligonucleotide
gcgttgcattggcaatcactgttccgggcttaatcttggctaaaccagttaggtg

SEQ ID NO: 198196 - DNA, 55 bp, Artificial
  Synthetic oligonucleotide
gcgttgacgggcctggcgaccataatcgccctgaggatcggtgtagcgcattctg

SEQ ID NO: 198197 - DNA, 55 bp, Artificial
  Synthetic oligonucleotide
gcgttaggaataaatttgtctgcaaggccatggaacgcaggtataatctctgata

SEQ ID NO: 198198 - DNA, 51 bp, Artificial
  Synthetic oligonucleotide
gcgtgtcgggagtaacgacccaaacttacacgcaaaaggggtgaattcccc

SEQ ID NO: 198199 - DNA, 55 bp, Artificial
  Synthetic oligonucleotide
acgccagtggattgggcgggagcagaaaggcgcttagtcataacttggcttggcc

SEQ ID NO: 198200 - DNA, 55 bp, Artificial
  Synthetic oligonucleotide
gcgtccgttcctggattgtgctctagtaaatatgatactgttgccataatcggcg

SEQ ID NO: 198201 - DNA, 55 bp, Artificial
  Synthetic oligonucleotide
gcgtccagcgcttaagccaaattgcatgtttgcgtcattagtacctaaggcaagt

SEQ ID NO: 198202 - DNA, 55 bp, Artificial
  Synthetic oligonucleotide
gcgtagctgtcaatttatcgtagatctcagtgctggtaagtgtcgtttggtccgc

SEQ ID NO: 198203 - DNA, 55 bp, Artificial
  Synthetic oligonucleotide
gcggttcggacgaataaatctaagggaaagtcctctttgctcgctagcgctcagg

SEQ ID NO: 198204 - DNA, 59 bp, Artificial
  Synthetic oligonucleotide
gacaaacatctgactgaacgtctggatacgttgggggagtaggctgtcacgattattcg

SEQ ID NO: 198205 - DNA, 55 bp, Artificial
  Synthetic oligonucleotide
gcggtgccgcagtcaacgacgcattactcggcattagccacggcaattgtagcca

SEQ ID NO: 198206 - DNA, 55 bp, Artificial
  Synthetic oligonucleotide
gcggtgcaagaatggtgaacaaattcttactcgcatggctgatattgtcggagtt

SEQ ID NO: 198207 - DNA, 55 bp, Artificial
  Synthetic oligonucleotide
gcgggcagttcgcaaagacgctgttttagtcaatgagtggattataaccagtgac

SEQ ID NO: 198208 - DNA, 55 bp, Artificial
  Synthetic oligonucleotide
gcggccagacacgaagccggctatatcggtgcaatgctgttcgttatcccgggat

SEQ ID NO: 198209 - DNA, 55 bp, Artificial
  Synthetic oligonucleotide
gcggcagttaatatccttaattgcggactaaaagctattggttagggactagcca

SEQ ID NO: 198210 - DNA, 55 bp, Artificial
  Synthetic oligonucleotide
gcggcaaacccagcctatcgaagcaattgcggcacttcgtaaacaggaccatcgc

SEQ ID NO: 198211 - DNA, 55 bp, Artificial
  Synthetic oligonucleotide
gccatactgagcgatctactggctgagttaatttatcgagcatatacttggtgcg

SEQ ID NO: 198212 - DNA, 55 bp, Artificial
  Synthetic oligonucleotide
gccagttgatctaacttgcaatcattttgggattgctcgtataccaagaacggac

SEQ ID NO: 198213 - DNA, 55 bp, Artificial
  Synthetic oligonucleotide
gccagtgttggtgcgggatgtgaatcagcgcaccgttgaaattgatcatcgggcc

SEQ ID NO: 198214 - DNA, 55 bp, Artificial
  Synthetic oligonucleotide
gccacttcacggtcatttaaccatgggagccgtaaagtcgtatagtctagacctg

SEQ ID NO: 198215 - DNA, 59 bp, Artificial
  Synthetic oligonucleotide
gaatggaccgggtattggcaacgagcgatgaaattagcttatgtgccggttgtgaatgt

SEQ ID NO: 198216 - DNA, 55 bp, Artificial
  Synthetic oligonucleotide
gccaatattgatgatgcagacgtccgtgacctgatctcggatagtgattatcgat

SEQ ID NO: 198217 - DNA, 55 bp, Artificial
  Synthetic oligonucleotide
gccaagccagcctagtcgcttccgtcttcaagtttgtgtgccagttcttcgacga

SEQ ID NO: 198218 - DNA, 50 bp, Artificial
  Synthetic oligonucleotide
acggcgtgccccgtaccaagttgttccttttgaaccgcgtattccgtccg

SEQ ID NO: 198219 - DNA, 55 bp, Artificial
  Synthetic oligonucleotide
gccaacctataagtccttccagcaccgaactctctctgtaatagaggtacttagc

SEQ ID NO: 198220 - DNA, 55 bp, Artificial
  Synthetic oligonucleotide
gccaaaggcggtgtttagagccttagccgttctattaggggctttgatggcccat

SEQ ID NO: 198221 - DNA, 55 bp, Artificial
  Synthetic oligonucleotide
gcattggttgaccgacgacaccataaacagtcgttggatcatagacgccaccagt

SEQ ID NO: 198222 - DNA, 55 bp, Artificial
  Synthetic oligonucleotide
gcattatagcgtcttggcagtaagaaatatcctggaagtaagcagcgtcgctact

SEQ ID NO: 198223 - DNA, 55 bp, Artificial
  Synthetic oligonucleotide
gcattaacgcatcgtcaaacggtggctgcagtaattcacccgtatacccttcccg

SEQ ID NO: 198224 - DNA, 55 bp, Artificial
  Synthetic oligonucleotide
gcatgggagatcgcttatcgaatcggcaattatgttgcgccgacccaatatcccg

SEQ ID NO: 198225 - DNA, 55 bp, Artificial
  Synthetic oligonucleotide
gcatgacaagaacccgaacagattcaaagaatgcagcctcaactcgtaaatcacg

SEQ ID NO: 198226 - DNA, 55 bp, Artificial
  Synthetic oligonucleotide
gaatgctgtcgtattgggtttgcaccacggatttaacctcccgaatgacccgtaa

SEQ ID NO: 198227 - DNA, 55 bp, Artificial
  Synthetic oligonucleotide
gcatgaacgcaagccctttgtatacgttaaatttacaacagaagggcgtaccagg

SEQ ID NO: 198228 - DNA, 55 bp, Artificial
  Synthetic oligonucleotide
gcatccatgactccgtagttgactggcaattgcgtccccgaccacatgggctaac

SEQ ID NO: 198229 - DNA, 55 bp, Artificial
  Synthetic oligonucleotide
gcatcaccacctttgggcgcggtatcacgcgaaaaggcgtagcgactgacttagt

SEQ ID NO: 198230 - DNA, 55 bp, Artificial
  Synthetic oligonucleotide
gcagttgttcatatggacgagaagacccctcacatgcatatgggcattgtgccct

SEQ ID NO: 198231 - DNA, 55 bp, Artificial
  Synthetic oligonucleotide
gcagtgacgcttgtgtctttcttgtgtccgaacgacactattgacaagttctgct

SEQ ID NO: 198232 - DNA, 55 bp, Artificial
  Synthetic oligonucleotide
gcaggtctaccacacaaggttttgcgtgaagcaacaacaatgcttaagcggttag

SEQ ID NO: 198233 - DNA, 55 bp, Artificial
  Synthetic oligonucleotide
gcaggtcgttcgataccattaaacttggaaccttggccgatcataattttacgca

SEQ ID NO: 198234 - DNA, 55 bp, Artificial
  Synthetic oligonucleotide
gcaggtcgtgtcgattagggtagtggaagtagaggtgagccttgatatggtagcg

SEQ ID NO: 198235 - DNA, 55 bp, Artificial
  Synthetic oligonucleotide
gcaggggctagagagatagtgtttgtggtgttgagagaacggttagcaccggtcc

SEQ ID NO: 198236 - DNA, 55 bp, Artificial
  Synthetic oligonucleotide
gcaggagttggtccccatgaactgaagtccgacatctttccgcttgaaacgttcg

SEQ ID NO: 198237 - DNA, 60 bp, Artificial
  Synthetic oligonucleotide
gaatatggcatgcctagtatcaaggtcgttaattcggttttacgtgctcatactggactg

SEQ ID NO: 198238 - DNA, 55 bp, Artificial
  Synthetic oligonucleotide
gcaggaagcccgttctacagttggtaaagttacaatatggtcatattggacggac

SEQ ID NO: 198239 - DNA, 55 bp, Artificial
  Synthetic oligonucleotide
gcagcgtcttcttgtagcgagttctaagaatctgcacgacttgatgattatcgcc

SEQ ID NO: 198240 - DNA, 55 bp, Artificial
  Synthetic oligonucleotide
gcctgcctgcttgtgtccacttagtaagcaatttggcgttacactcatcaatcac

SEQ ID NO: 198241 - DNA, 55 bp, Artificial
  Synthetic oligonucleotide
gcctgatctaagcaatcggctctcaccgccgtccattctaccacttaactgtcat

SEQ ID NO: 198242 - DNA, 55 bp, Artificial
  Synthetic oligonucleotide
gcctcatccgattgaaagtggccatacgtttgaagctaatgccaagattaaggcc

SEQ ID NO: 198243 - DNA, 55 bp, Artificial
  Synthetic oligonucleotide
gcctcaaatggttacaaagctaaccagccgtttccgtatcctacagggcgttgcg

SEQ ID NO: 198244 - DNA, 55 bp, Artificial
  Synthetic oligonucleotide
gcctaaccaccaaacaggacgcgttaccccattacattcacgggttaacatcgca

SEQ ID NO: 198245 - DNA, 55 bp, Artificial
  Synthetic oligonucleotide
gcctaaagctcacttccagcgctgtttggttcacgtaatgcgtaatatctgcgct

SEQ ID NO: 198246 - DNA, 55 bp, Artificial
  Synthetic oligonucleotide
gcctaaaagtgagctccatttaattccagatgagggtcacatgtttaacggaaag

SEQ ID NO: 198247 - DNA, 55 bp, Artificial
  Synthetic oligonucleotide
gccgtttaacgatgacaagacgactcttacgctcgacaaacgtagctattgcttg

SEQ ID NO: 198248 - DNA, 58 bp, Artificial
  Synthetic oligonucleotide
gaatagggagatgtgtagcaaaatcctaggatacttaagctaattaaatgctgttaaa

SEQ ID NO: 198249 - DNA, 55 bp, Artificial
  Synthetic oligonucleotide
gccgggttgcaattcttgcatgacaaggcggttttggctgctcaggattagtcgg

SEQ ID NO: 198250 - DNA, 55 bp, Artificial
  Synthetic oligonucleotide
gccggctggagaagtagcatgagcttggacgttaacttgtaaaccattggttccg

SEQ ID NO: 198251 - DNA, 55 bp, Artificial
  Synthetic oligonucleotide
gccggcgtaattggggcgtcctggttatgatgctcctgattggggtggggatttt

SEQ ID NO: 198252 - DNA, 55 bp, Artificial
  Synthetic oligonucleotide
gccggcagagaagtcaagattacttagatgtgagtgtagtcctgagtaatcaatg

SEQ ID NO: 198253 - DNA, 55 bp, Artificial
  Synthetic oligonucleotide
gccgctgagggtttgtgagtcaatccgcccctcaccggtaatgacccaatcagca

SEQ ID NO: 198254 - DNA, 54 bp, Artificial
  Synthetic oligonucleotide
gccgcgatcggaactaaaagccaagctaaataagttaccacctattccggctaa

SEQ ID NO: 198255 - DNA, 55 bp, Artificial
  Synthetic oligonucleotide
gccgccaatattcaccagcacggataagtggattgtatttagcgccaaaccgaac

SEQ ID NO: 198256 - DNA, 55 bp, Artificial
  Synthetic oligonucleotide
gccgaagcttcagctgaggctcttctgaaccacgcaagcgaagcgcgctagggca

SEQ ID NO: 198257 - DNA, 55 bp, Artificial
  Synthetic oligonucleotide
gcccttagccgtgatctcatctatcgccttacttgcttgggatacaaactcttta

SEQ ID NO: 198258 - DNA, 55 bp, Artificial
  Synthetic oligonucleotide
gcccttaattgttggagcagctacgtcttgcaacttgtaagctgggtcaactaag

SEQ ID NO: 198259 - DNA, 55 bp, Artificial
  Synthetic oligonucleotide
gaagttcgaacgggaatttgaacaaatttaacgtgcatgccgatagaagtatccc

SEQ ID NO: 198260 - DNA, 55 bp, Artificial
  Synthetic oligonucleotide
gccctaatcaatgacttagcactcgacggttttcagggttggagtgaccactacg

SEQ ID NO: 198261 - DNA, 52 bp, Artificial
  Synthetic oligonucleotide
gcccgtaagcaccggttatttaagccggccaaaatggtctgtacgaagactt

SEQ ID NO: 198262 - DNA, 55 bp, Artificial
  Synthetic oligonucleotide
gcccggtaaagctccttgatcgtgtaagcatggccgctagttaatggcacattgg

SEQ ID NO: 198263 - DNA, 55 bp, Artificial
  Synthetic oligonucleotide
gcccataaaatccaactggtatgggcgccagacgtgacaaatcggtaaggtgtta

SEQ ID NO: 198264 - DNA, 55 bp, Artificial
  Synthetic oligonucleotide
gcccacccgaagaagtatcgaactcaattagttggcgactcaccgataacgcgag

SEQ ID NO: 198265 - DNA, 55 bp, Artificial
  Synthetic oligonucleotide
acggatccgtgtgaaatttgtagtaatgctaatcgcgatcaaacgataatgatgg

SEQ ID NO: 198266 - DNA, 55 bp, Artificial
  Synthetic oligonucleotide
gcccaacaactagctaacgcgaattagttaatcatttcggcgacaatcctttaga

SEQ ID NO: 198267 - DNA, 55 bp, Artificial
  Synthetic oligonucleotide
gccatgaattcagtcacgttcgacagccggagtggcttcttcgtccgttccaggg

SEQ ID NO: 198268 - DNA, 55 bp, Artificial
  Synthetic oligonucleotide
gccatagattggctgaccagctgttagttgacgcccagcataaataccacgtaag

SEQ ID NO: 198269 - DNA, 55 bp, Artificial
  Synthetic oligonucleotide
tccaatcccgcacattcttgcctgaaccgtaaagtttagggcgaatcccacttaa

SEQ ID NO: 198270 - DNA, 60 bp, Artificial
  Synthetic oligonucleotide
gaagtgattaatgatctagagtatgctttggctggtacacggcaaattagttatggcggt

SEQ ID NO: 198271 - DNA, 55 bp, Artificial
  Synthetic oligonucleotide
tccaataccgtgtggtcgaccttagtcgtggtgaagtagaggcagtcttcaaaga

SEQ ID NO: 198272 - DNA, 55 bp, Artificial
  Synthetic oligonucleotide
tccaacaaagggaaataacactggggcatgtcggccccatactgcagggtcggct

SEQ ID NO: 198273 - DNA, 55 bp, Artificial
  Synthetic oligonucleotide
tccaaacaatgagttggagccatgttcagatagcaaacctacctcgttaaattca

SEQ ID NO: 198274 - DNA, 55 bp, Artificial
  Synthetic oligonucleotide
tcattgacgttcctgaatcgcattacgattctattcagaagtacggcttcgatcc

SEQ ID NO: 198275 - DNA, 55 bp, Artificial
  Synthetic oligonucleotide
tcatggataccagggtaacattaagcgttggggccaatcaagaggaccagaaacc

SEQ ID NO: 198276 - DNA, 55 bp, Artificial
  Synthetic oligonucleotide
tcatgcggttaaaatttgcttgaatgccgctaatgacgtgaccgctaaatacttt

SEQ ID NO: 198277 - DNA, 55 bp, Artificial
  Synthetic oligonucleotide
tcatagctgttcctatgaatgtcatccaaggattagttggggctcttgtagcggt

SEQ ID NO: 198278 - DNA, 55 bp, Artificial
  Synthetic oligonucleotide
tcataaagcatcaccacctttgggcgcggtatcacgcgaaaaggcgtagcgactg

SEQ ID NO: 198279 - DNA, 55 bp, Artificial
  Synthetic oligonucleotide
tcagtgggtaatcgatgagaataatactgcaactccacaaatcacgtggactagc

SEQ ID NO: 198280 - DNA, 55 bp, Artificial
  Synthetic oligonucleotide
tcagggccatcaacctctaaggtcggaatatctggttgtagtggttttaactgat

SEQ ID NO: 198281 - DNA, 58 bp, Artificial
  Synthetic oligonucleotide
ctggatgtagatattaaagcggcaaatggtagggttattcatccacgagaatggttta

SEQ ID NO: 198282 - DNA, 60 bp, Artificial
  Synthetic oligonucleotide
gcacacccgattaccattaatggccgtccacgtgttcgtattcgcgtcagtgccagctta

SEQ ID NO: 198283 - DNA, 55 bp, Artificial
  Synthetic oligonucleotide
tcagctgggatccccaatccatttggtttagtgtatatctcaatactcaatgagg

SEQ ID NO: 198284 - DNA, 55 bp, Artificial
  Synthetic oligonucleotide
aagcgcacaaattatcggatcgtgtgtcagcgttatcggttgaagtgacttgatc

SEQ ID NO: 198285 - DNA, 55 bp, Artificial
  Synthetic oligonucleotide
tcactgttagcgtagatattacccgtgaacctgattacccaaaggacaagccgtt

SEQ ID NO: 198286 - DNA, 55 bp, Artificial
  Synthetic oligonucleotide
tcacgctcttggctgaaacgcgttcactggtgcagaaacctgcacataaggacct

SEQ ID NO: 198287 - DNA, 52 bp, Artificial
  Synthetic oligonucleotide
aagcgggcagatgaacctctaaagggacattgggccctccccgaaaccctct

SEQ ID NO: 198288 - DNA, 55 bp, Artificial
  Synthetic oligonucleotide
tcaccgcgtgtgctcagcgcaattcatgaggaggccaactatggcggcatatagt

SEQ ID NO: 198289 - DNA, 55 bp, Artificial
  Synthetic oligonucleotide
tcaccgcaagtataagggtgtagctacgtggacgttctttggtaattacccatag

SEQ ID NO: 198290 - DNA, 55 bp, Artificial
  Synthetic oligonucleotide
tcacaagtaggatgctatatcgcggataaattatgtggccgtccgcaagaagagc

SEQ ID NO: 198291 - DNA, 55 bp, Artificial
  Synthetic oligonucleotide
tcaattctggacaataacacgaaatggccagaaggtactaaactcacttgggctg

SEQ ID NO: 198292 - DNA, 55 bp, Artificial
  Synthetic oligonucleotide
tcaatgtactaatggaccgataccggtcctaaaaggattagccgagttgaacagc

SEQ ID NO: 198293 - DNA, 54 bp, Artificial
  Synthetic oligonucleotide
gcaattctagtgcggccaccctaaaaaaatgcaaatgccactaaaaggaaaccc

SEQ ID NO: 198294 - DNA, 55 bp, Artificial
  Synthetic oligonucleotide
tcaatcgactaaccttaaccgtgatagtctcttaatggcgttaggaggaattcac

SEQ ID NO: 198295 - DNA, 55 bp, Artificial
  Synthetic oligonucleotide
tcaatattcagcgtggggttcaagaatcagaacgtaaaagtttaacggtaccaga

SEQ ID NO: 198296 - DNA, 55 bp, Artificial
  Synthetic oligonucleotide
tcaagaagcgcaaacacgccaaattgccgattggttgatcggcatgaacgcaagc

SEQ ID NO: 198297 - DNA, 55 bp, Artificial
  Synthetic oligonucleotide
tcaaagagatctcagaggcgctaggatacagcagaagccaggctacagcgctcag

SEQ ID NO: 198298 - DNA, 55 bp, Artificial
  Synthetic oligonucleotide
tcaaacccggatactgacgttatggcgctagatagtatttacctcatccacttga

SEQ ID NO: 198299 - DNA, 53 bp, Artificial
  Synthetic oligonucleotide
aaggctagacgtggtcctaagttgtccaagatccaaccgaaagttaacattcc

SEQ ID NO: 198300 - DNA, 55 bp, Artificial
  Synthetic oligonucleotide
tattgaggtccagggctacaaccggaatgggatgttaaacgatgtcttacggtcg

SEQ ID NO: 198301 - DNA, 50 bp, Artificial
  Synthetic oligonucleotide
aactcccactaggaattaacctatacttgtatttaggttggttccgaacg

SEQ ID NO: 198302 - DNA, 55 bp, Artificial
  Synthetic oligonucleotide
tcgttcacctgattcatggaccaatttgttaattatagaccatggagccagatcg

SEQ ID NO: 198303 - DNA, 55 bp, Artificial
  Synthetic oligonucleotide
tcgttaccacgaccgttcctagtaccatcgtcacagtgacttatacggtgacagc

SEQ ID NO: 198304 - DNA, 60 bp, Artificial
  Synthetic oligonucleotide
gcaagtgcctcgagaccgcaatggacagtttcatcagcacacgctgcctgactacaagcg

SEQ ID NO: 198305 - DNA, 54 bp, Artificial
  Synthetic oligonucleotide
tcgttaacgtgaaatcttcaaaacgatgttcgctaccccaaccattggcgcttt

SEQ ID NO: 198306 - DNA, 55 bp, Artificial
  Synthetic oligonucleotide
tcgtgttaggaattggagttggattgtatatcctgaatcagctcctgaaaattgg

SEQ ID NO: 198307 - DNA, 55 bp, Artificial
  Synthetic oligonucleotide
aactggctctactccaactagtgcacttgatgcattcagacaagctctggttaac

SEQ ID NO: 198308 - DNA, 55 bp, Artificial
  Synthetic oligonucleotide
tcgtctggtcgtaagcaatcagccagtggttaggccggtcaagggaggcgttcgt

SEQ ID NO: 198309 - DNA, 55 bp, Artificial
  Synthetic oligonucleotide
aacttagcactatccatagcctgagcataagcttgggttaattcagccttttcac

SEQ ID NO: 198310 - DNA, 55 bp, Artificial
  Synthetic oligonucleotide
tcgtaattacaagcaatatctcctcttaggtggacgtactaataaagctgtacgt

SEQ ID NO: 198311 - DNA, 55 bp, Artificial
  Synthetic oligonucleotide
tcgtaactgtcgaagttttcatcgaaatgtttattccttacgttatggcatggct

SEQ ID NO: 198312 - DNA, 55 bp, Artificial
  Synthetic oligonucleotide
tcggcaaatcagactcgttttcagcagtcgtcaaaagaacgcttcgcttgcgtgg

SEQ ID NO: 198313 - DNA, 55 bp, Artificial
  Synthetic oligonucleotide
tcgctagtaataaagctgcgagtaccttccttaatacttggactgggtacggcaa

SEQ ID NO: 198314 - DNA, 55 bp, Artificial
  Synthetic oligonucleotide
aagaaagctaatcgggagggacttagttgggagcatttgcttgatgagatcaggc

SEQ ID NO: 198315 - DNA, 60 bp, Artificial
  Synthetic oligonucleotide
gcaacaatacagataggcgccaaataggcggctttctttatggaattgaccattagtcgc

SEQ ID NO: 198316 - DNA, 55 bp, Artificial
  Synthetic oligonucleotide
tcgatgcttatgcgggcgttggtactttgggaatcttagctagcgatcaagtaag

SEQ ID NO: 198317 - DNA, 53 bp, Artificial
  Synthetic oligonucleotide
aagaacacccgtggttgattcccgctaccgtagccttagaagttctaccggca

SEQ ID NO: 198318 - DNA, 55 bp, Artificial
  Synthetic oligonucleotide
aagaagcattgtccagccgttcatcgattaagtcaacaattccaatagttccgac

SEQ ID NO: 198319 - DNA, 55 bp, Artificial
  Synthetic oligonucleotide
aagaattgtggtcgaagttatgcgacttgcttattcaaagaatggcactcgatac

SEQ ID NO: 198320 - DNA, 54 bp, Artificial
  Synthetic oligonucleotide
aagactaagacggttttagttgttactaatcggccagcagttgcaaattcttgg

SEQ ID NO: 198321 - DNA, 55 bp, Artificial
  Synthetic oligonucleotide
tcgaaatcaaaatcccaatcggtcccggaactgtccatggcatggtgtacatcat

SEQ ID NO: 198322 - DNA, 55 bp, Artificial
  Synthetic oligonucleotide
aagcaccatttctagaatttccggtattccagccatcgcgctcataaggattgta

SEQ ID NO: 198323 - DNA, 55 bp, Artificial
  Synthetic oligonucleotide
tcctcgtaactctagtgcggttcgtcttcacaaccgtgatcgttacgatggccga

SEQ ID NO: 198324 - DNA, 55 bp, Artificial
  Synthetic oligonucleotide
tccgtccaaattgtcgcgtttatgcgacacgtattcaacatctgcaccgcaaacc

SEQ ID NO: 198325 - DNA, 55 bp, Artificial
  Synthetic oligonucleotide
tccggagataaatggctgttttagtgtttaatgctcgaaatgcttcacctactcg

SEQ ID NO: 198326 - DNA, 60 bp, Artificial
  Synthetic oligonucleotide
gcaaattctggcgtgatttgatcaaagtcacgtacccctttttctctgcaaaagtctgca

SEQ ID NO: 198327 - DNA, 55 bp, Artificial
  Synthetic oligonucleotide
tccgcacaaaggcagctcacagtgggattattcatggattccggtcgttgcgcct

SEQ ID NO: 198328 - DNA, 55 bp, Artificial
  Synthetic oligonucleotide
tccccgctgaacttccatttgacgtaagtggtgaatgatccgatctgccttccgt

SEQ ID NO: 198329 - DNA, 55 bp, Artificial
  Synthetic oligonucleotide
tccccagtatcgactatcgttagaaacacttcgatgatctcctaacacaaagtac

SEQ ID NO: 198330 - DNA, 55 bp, Artificial
  Synthetic oligonucleotide
tcccatcatctggaatattagctgagtacatccgcactgtcgtatctgtccgggg

SEQ ID NO: 198331 - DNA, 55 bp, Artificial
  Synthetic oligonucleotide
tcccaacgaacttggtgatgcatggggcccagaaggcagtcatactattgttgcc

SEQ ID NO: 198332 - DNA, 55 bp, Artificial
  Synthetic oligonucleotide
aatagcaacagtcaacttacgttgattctttgcgctagtgccagtgacacgacgt

SEQ ID NO: 198333 - DNA, 55 bp, Artificial
  Synthetic oligonucleotide
tacttgcagtgtagctttcccaagttccagttgtccaatcactgtacttagttac

SEQ ID NO: 198334 - DNA, 55 bp, Artificial
  Synthetic oligonucleotide
tacttcgcctcaattggccagccttcccgtggcgctcgacatagccattcgggtg

SEQ ID NO: 198335 - DNA, 55 bp, Artificial
  Synthetic oligonucleotide
tactctagcttcaacgtttggtttcacattatcacttggagctactcaaagtgta

SEQ ID NO: 198336 - DNA, 55 bp, Artificial
  Synthetic oligonucleotide
tactagctagcgagaactggcaactagttgaaacacggtcatgaatcgtgattga

SEQ ID NO: 198337 - DNA, 51 bp, Artificial
  Synthetic oligonucleotide
gatttaattgttaaaggcaaacattataaaaaaccccattatcacgtttta

SEQ ID NO: 198338 - DNA, 55 bp, Artificial
  Synthetic oligonucleotide
tacgtgtatctattgctaagagcactggcactagtggtttaattcactctaagca

SEQ ID NO: 198339 - DNA, 55 bp, Artificial
  Synthetic oligonucleotide
tacgtgcctatcctcagtatttaactaaattaccggataccgaagcaatggttcg

SEQ ID NO: 198340 - DNA, 55 bp, Artificial
  Synthetic oligonucleotide
tacgtgagcctgtttaactcaatgaaggaacagatcagtaatccggttgagcaag

SEQ ID NO: 198341 - DNA, 55 bp, Artificial
  Synthetic oligonucleotide
aatatttaacagacgttggagtagatacggatgtcattctgccagaaatagtgcc

SEQ ID NO: 198342 - DNA, 55 bp, Artificial
  Synthetic oligonucleotide
taccctttgcacggcgtctagccaaaaccttacggccgttgcttgtagccatacg

SEQ ID NO: 198343 - DNA, 55 bp, Artificial
  Synthetic oligonucleotide
taccatgctttctaattaaggtagccgtagtagatggtaaaggctcactgatgtg

SEQ ID NO: 198344 - DNA, 55 bp, Artificial
  Synthetic oligonucleotide
aatcagacgcgcacccactaccaaacttacgccattccccgatggaactggggcg

SEQ ID NO: 198345 - DNA, 55 bp, Artificial
  Synthetic oligonucleotide
aatcccaacaaacgggctgtcgggttcttcccatggcgtgcagggtgcatccgag

SEQ ID NO: 198346 - DNA, 55 bp, Artificial
  Synthetic oligonucleotide
tacattggaaaacggtggtatagcagcatttccagacgcacccacaactcgggga

SEQ ID NO: 198347 - DNA, 55 bp, Artificial
  Synthetic oligonucleotide
tacatctttgtcgatcgcaagcgatattgtcttaagtaagcagttagccaaagtg

SEQ ID NO: 198348 - DNA, 57 bp, Artificial
  Synthetic oligonucleotide
gattaagaattccaagaaaactcgaactcagtatgaatttatcgtgcaggttgggaa

SEQ ID NO: 198349 - DNA, 55 bp, Artificial
  Synthetic oligonucleotide
tacaggggtgtgcagatgttttacgttttcgtaaaatgcttgatggaaatacgaa

SEQ ID NO: 198350 - DNA, 55 bp, Artificial
  Synthetic oligonucleotide
tacagcccacttctggtccaacgtggctagtggtgtcgctggaagcagcaattta

SEQ ID NO: 198351 - DNA, 55 bp, Artificial
  Synthetic oligonucleotide
taatttgtcgcctagaaattcatagtgatgggtaacgtgtttctcaaaatcggtg

SEQ ID NO: 198352 - DNA, 55 bp, Artificial
  Synthetic oligonucleotide
taatgtttatagagattaagtcgttatgaggttcatagcgcaacacaaaagcccc

SEQ ID NO: 198353 - DNA, 55 bp, Artificial
  Synthetic oligonucleotide
taatggtttgcttgccggaattgcaacagaaaacaagggctataaacttgtaggg

SEQ ID NO: 198354 - DNA, 55 bp, Artificial
  Synthetic oligonucleotide
taatgatggggcttgccgcaattggaatgactgtggggtatggaattatatattc

SEQ ID NO: 198355 - DNA, 55 bp, Artificial
  Synthetic oligonucleotide
taatcatgcggatagagactaagctagacagcttaacatcagcgatcatgcgcct

SEQ ID NO: 198356 - DNA, 55 bp, Artificial
  Synthetic oligonucleotide
aatcgatagatttgattaccctctggtttaaaacccctgaggcggctcacgattg

SEQ ID NO: 198357 - DNA, 55 bp, Artificial
  Synthetic oligonucleotide
taaggcgcactacagcgtttgggagttcttgtttaccagtgactgggcaccgctt

SEQ ID NO: 198358 - DNA, 55 bp, Artificial
  Synthetic oligonucleotide
taaggcattatcggctttcagccggcccgatttacgctcaactgtcacccctggc

SEQ ID NO: 198359 - DNA, 59 bp, Artificial
  Synthetic oligonucleotide
gattaacgattacgatgtctgatttagtttataaacgtctgtctgatatgtctaaggaa

SEQ ID NO: 198360 - DNA, 55 bp, Artificial
  Synthetic oligonucleotide
taaggaatctgggtttccgcaacgattgtatcgtagtgatcactccagccttgta

SEQ ID NO: 198361 - DNA, 55 bp, Artificial
  Synthetic oligonucleotide
taagcggcaacaagttcgttccgcaagttatcagagcactcggacagcagctagg

SEQ ID NO: 198362 - DNA, 55 bp, Artificial
  Synthetic oligonucleotide
aagggcacctaagttgtctaacatgatttggttacgcaacttgatacggcagagg

SEQ ID NO: 198363 - DNA, 55 bp, Artificial
  Synthetic oligonucleotide
tattcgccaactcccacgtcttatagtttgatcggtcaactttatacatttaagc

SEQ ID NO: 198364 - DNA, 55 bp, Artificial
  Synthetic oligonucleotide
tattcaattaccagatccgaaatctgttgggttacccgttgctcgacatcagcag

SEQ ID NO: 198365 - DNA, 55 bp, Artificial
  Synthetic oligonucleotide
tattactgcgaaggtgaattaggcgtgtcccaacgttacgcctttagttatgagc

SEQ ID NO: 198366 - DNA, 55 bp, Artificial
  Synthetic oligonucleotide
tatgttgctgggttccttggttctcaagggcatcttaatcctgcggtaacgatcc

SEQ ID NO: 198367 - DNA, 55 bp, Artificial
  Synthetic oligonucleotide
tatgtcggggactatgctggcttatcctttatctaccttcagtaatcacgtttca

SEQ ID NO: 198368 - DNA, 55 bp, Artificial
  Synthetic oligonucleotide
tatgctcgaccttggccttagaagttgcagccttactatgactagccttagcact

SEQ ID NO: 198369 - DNA, 55 bp, Artificial
  Synthetic oligonucleotide
tatgaattataccgcaagttgccaatgcctgattttggccctgacttgtcacccc

SEQ ID NO: 198370 - DNA, 60 bp, Artificial
  Synthetic oligonucleotide
gatgctgacggcagcattagcgactttaattaccaatcacttacgattaacctggtcacc

SEQ ID NO: 198371 - DNA, 55 bp, Artificial
  Synthetic oligonucleotide
tatgaatatagtcacctttaggaatgaatctgcgaataaggccattatgcctctc

SEQ ID NO: 198372 - DNA, 55 bp, Artificial
  Synthetic oligonucleotide
aaggttatctcaggtgataaccctgtaactgtctcaagagttgctaagcaagctg

SEQ ID NO: 198373 - DNA, 55 bp, Artificial
  Synthetic oligonucleotide
tatctggaagtgcgactcaatctagcagacttagccactaagcccgcggttatcg

SEQ ID NO: 198374 - DNA, 55 bp, Artificial
  Synthetic oligonucleotide
tatctgcctctgcgtttgccttacgtaccttagctttgtctaactctggtgtgct

SEQ ID NO: 198375 - DNA, 54 bp, Artificial
  Synthetic oligonucleotide
aagtaacgacaagtaatgataatttaggtggcgttcgagcaatcttttcgggta

SEQ ID NO: 198376 - DNA, 55 bp, Artificial
  Synthetic oligonucleotide
aagtaacggtcttcttggcttgctgaccgaccataaccagctcggattagaacga

SEQ ID NO: 198377 - DNA, 55 bp, Artificial
  Synthetic oligonucleotide
aagtacggatatgcaccgacccttcacatgaatcttgatacatcgaagttcagag

SEQ ID NO: 198378 - DNA, 55 bp, Artificial
  Synthetic oligonucleotide
tatagcgaccggttaggtagatattcactgactgcccgttggaaaggagggcccg

SEQ ID NO: 198379 - DNA, 55 bp, Artificial
  Synthetic oligonucleotide
tagtttcgggacaatgatctttggtgttcataaggccgacgcaataatagatttt

SEQ ID NO: 198380 - DNA, 55 bp, Artificial
  Synthetic oligonucleotide
tagttgttcagttcgccattcagtgattcctttgtgccgctttgaccagcgggta

SEQ ID NO: 198381 - DNA, 60 bp, Artificial
  Synthetic oligonucleotide
gatgatacattggaaaattacgcttggtactgctaattggagccgcaatcgtcatgttac

SEQ ID NO: 198382 - DNA, 55 bp, Artificial
  Synthetic oligonucleotide
aagtgaaaccctcggtagagtcctcgaagagcgcactgctcatatgtatacgcag

SEQ ID NO: 198383 - DNA, 55 bp, Artificial
  Synthetic oligonucleotide
tagtcaagttaacaccaggggcttatgtagcagcaatctatcgtcagctgttgat

SEQ ID NO: 198384 - DNA, 55 bp, Artificial
  Synthetic oligonucleotide
taggatacggtgatgacaaaggcaaatttggcggtgtacgaatcaaccagcctac

SEQ ID NO: 198385 - DNA, 55 bp, Artificial
  Synthetic oligonucleotide
tagctcatcaaaatgtggaacagttcctgatggatgttaatcgacaattctcgcc

SEQ ID NO: 198386 - DNA, 55 bp, Artificial
  Synthetic oligonucleotide
aagttaccttgttatacacgatcttcaaagatctagccattgtagcccgttccgc

SEQ ID NO: 198387 - DNA, 55 bp, Artificial
  Synthetic oligonucleotide
tagcctcccaaatcacgtgcattaggcacatgctctagtggtaaaacgttgggcc

SEQ ID NO: 198388 - DNA, 55 bp, Artificial
  Synthetic oligonucleotide
tagcagattctaactgactcataccaacttcagtcattccatactgagtaaccat

SEQ ID NO: 198389 - DNA, 55 bp, Artificial
  Synthetic oligonucleotide
aataagggaagtgcgatccaaccattagacttagtcactaggccggcgacgttat

SEQ ID NO: 198390 - DNA, 55 bp, Artificial
  Synthetic oligonucleotide
tagaggtcagaacacttgagtattttaaagctcccatccgttgcgggcttggcta

SEQ ID NO: 198391 - DNA, 55 bp, Artificial
  Synthetic oligonucleotide
tagaccagtagaagcggccatgtctgaatacacggtagacccggaaacaggccgg

SEQ ID NO: 198392 - DNA, 57 bp, Artificial
  Synthetic oligonucleotide
ctggactaatccctttgcaccagaaagccccttgaatgagttgagcaatgttcccct

SEQ ID NO: 198393 - DNA, 60 bp, Artificial
  Synthetic oligonucleotide
gatctagtctgtcagacaagtaacatgacgattgtggctccaattagcagtaccaagcgt

SEQ ID NO: 198394 - DNA, 55 bp, Artificial
  Synthetic oligonucleotide
tagaacgtgttttggctctatgtaaaacgaacaaatctgatgagtagtaggatcc

SEQ ID NO: 198395 - DNA, 55 bp, Artificial
  Synthetic oligonucleotide
ttcttatggtaccggtggttccggaggcaccatcgatgccctctttggttcgtcg

SEQ ID NO: 198396 - DNA, 52 bp, Artificial
  Synthetic oligonucleotide
ttcggaggaaaggcttgaaaacgtcccggaatacatcgttaagaaaggcaac

SEQ ID NO: 198397 - DNA, 55 bp, Artificial
  Synthetic oligonucleotide
ttcgcaggcagatgtgccgttaaacggtgtgacgttcacagtttatgacgtgacc

SEQ ID NO: 198398 - DNA, 55 bp, Artificial
  Synthetic oligonucleotide
aaagcaaatatgcgattctactctacaagctaatgcgcgaagctgacaaagatca

SEQ ID NO: 198399 - DNA, 55 bp, Artificial
  Synthetic oligonucleotide
ttcatcacaactatcttgtatattaggttcgtagcttgaggttgtggagagccgc

SEQ ID NO: 198400 - DNA, 55 bp, Artificial
  Synthetic oligonucleotide
aaagcccctgaaagctcacaggaactcgacagacataaatctgagaattaggcgg

SEQ ID NO: 198401 - DNA, 55 bp, Artificial
  Synthetic oligonucleotide
ttcagcttggcgcttgatacagtccgaataatcgtgacagcctactcccccaacg

SEQ ID NO: 198402 - DNA, 55 bp, Artificial
  Synthetic oligonucleotide
ttcacaaagttcacatgcttcagccttagagcagagcggaatccccaaaatgggg

SEQ ID NO: 198403 - DNA, 55 bp, Artificial
  Synthetic oligonucleotide
aaagccgcacgaagccaggtgggacaagggtttgtggtgggcgagttctcggcga

SEQ ID NO: 198404 - DNA, 59 bp, Artificial
  Synthetic oligonucleotide
gatcaaagctgaaagtaaggctatggaactagacattgagaatcgtcgtcttcaaaagt

SEQ ID NO: 198405 - DNA, 55 bp, Artificial
  Synthetic oligonucleotide
ttatttgtaggtgtccagtaataccaccacaagctaaaagtattcactggccatt

SEQ ID NO: 198406 - DNA, 55 bp, Artificial
  Synthetic oligonucleotide
ttatggcatttcttcatagataaacctctcctacttctatcccaaaaggtaccac

SEQ ID NO: 198407 - DNA, 53 bp, Artificial
  Synthetic oligonucleotide
aaagcgtcggtaatggattgaggattgggttcagggtaaattggttcaacgtg

SEQ ID NO: 198408 - DNA, 55 bp, Artificial
  Synthetic oligonucleotide
ttagtaaatcaactaaatatccctttccgtcaaggttatgcttacggtcatccag

SEQ ID NO: 198409 - DNA, 55 bp, Artificial
  Synthetic oligonucleotide
ttagcatgacggttggatcatagttagcggcttttaaggcagcgatgtcaaacgt

SEQ ID NO: 198410 - DNA, 54 bp, Artificial
  Synthetic oligonucleotide
ttagaaagagatttaaaggggattaataatgccgaggattgacgaacgtagttg

SEQ ID NO: 198411 - DNA, 55 bp, Artificial
  Synthetic oligonucleotide
ttactgcaattcaacgtgcaatggataacagtgagcaaccagcatgggaggcact

SEQ ID NO: 198412 - DNA, 55 bp, Artificial
  Synthetic oligonucleotide
ttacgtcccgaggattcgtgtttgtaaagactaaccgtcaactaatgcaacagag

SEQ ID NO: 198413 - DNA, 55 bp, Artificial
  Synthetic oligonucleotide
aaaggctaagttcaataaagtcctacaacaattgcgtaaggatggcaccttgact

SEQ ID NO: 198414 - DNA, 55 bp, Artificial
  Synthetic oligonucleotide
aaagggagcgtaattattttggtcaactgaagattgcttcataccagcatgtgct

SEQ ID NO: 198415 - DNA, 60 bp, Artificial
  Synthetic oligonucleotide
gatattgttcgcggcgccctaagctcggtgccacagcaccaacgcgaatccggcaaggca

SEQ ID NO: 198416 - DNA, 54 bp, Artificial
  Synthetic oligonucleotide
ttaccaggcttgtggtggttagccttcaaaaccttgataagtttaccgtcttga

SEQ ID NO: 198417 - DNA, 55 bp, Artificial
  Synthetic oligonucleotide
aaaggttgggagagattaactgattatgcgattgagcaactttctaagcgacccg

SEQ ID NO: 198418 - DNA, 55 bp, Artificial
  Synthetic oligonucleotide
ttacaattgggcagttgagaaatatcacgtcagctaccaacaagtctatggttgg

SEQ ID NO: 198419 - DNA, 55 bp, Artificial
  Synthetic oligonucleotide
ttacaaatgttgcactacaagaaagcccatcgagttaaagagtgtggtgaagtat

SEQ ID NO: 198420 - DNA, 55 bp, Artificial
  Synthetic oligonucleotide
ttaagtgtgccacaagcagctactttagcaggtatgttaaagagtccaacagctt

SEQ ID NO: 198421 - DNA, 55 bp, Artificial
  Synthetic oligonucleotide
aaatgatcacccgtccacaaagtagttcgataattgtcattagctaaggcagcgg

SEQ ID NO: 198422 - DNA, 55 bp, Artificial
  Synthetic oligonucleotide
ttaaagttgcgagatttcaaactgtcaccacatgattcattgctgctgaaactgg

SEQ ID NO: 198423 - DNA, 55 bp, Artificial
  Synthetic oligonucleotide
ttaaagcttggttggttggagcagtacgaaccgatatacctcttttggagtggag

SEQ ID NO: 198424 - DNA, 55 bp, Artificial
  Synthetic oligonucleotide
tgttttcccgagcccagtggcggcgaacgatagcggtcaagctggctcagcttgg

SEQ ID NO: 198425 - DNA, 54 bp, Artificial
  Synthetic oligonucleotide
ttttggttacttcccatacacccggttggttcatgctttaacgctaccttggca

SEQ ID NO: 198426 - DNA, 59 bp, Artificial
  Synthetic oligonucleotide
gatatagtagtttataatagtagtttataattgacgtacgttatcatgtacacatataa

SEQ ID NO: 198427 - DNA, 55 bp, Artificial
  Synthetic oligonucleotide
ttttgcctggctggagtcgcgtgccatgaccgagagtcggcgtagtggctccatg

SEQ ID NO: 198428 - DNA, 55 bp, Artificial
  Synthetic oligonucleotide
ttttagtcgccttcttatttggtggtctgattgaaggagtctctggattcggtac

SEQ ID NO: 198429 - DNA, 55 bp, Artificial
  Synthetic oligonucleotide
tttggccatattcaccgcgtaaatagacgtccgttgatcgcatatctagttcggc

SEQ ID NO: 198430 - DNA, 55 bp, Artificial
  Synthetic oligonucleotide
aaaactcaatcggtagtacgcttggtcctgatgatagttggctattacaacgggg

SEQ ID NO: 198431 - DNA, 55 bp, Artificial
  Synthetic oligonucleotide
tttgcgatggcgctgattccaattatttggctaatcatctcgctaggcgtaatgc

SEQ ID NO: 198432 - DNA, 55 bp, Artificial
  Synthetic oligonucleotide
aaaacttggttcaaatcttcatcgagttggcggaaagacctttgttcatatgcgc

SEQ ID NO: 198433 - DNA, 55 bp, Artificial
  Synthetic oligonucleotide
tttgaagcatagtaccaataaaggcgctcgcattacttaatctgccaccacgaac

SEQ ID NO: 198434 - DNA, 53 bp, Artificial
  Synthetic oligonucleotide
tttgaaccgacgaattacacgatttaatcgaacgttttgacccattggtctag

SEQ ID NO: 198435 - DNA, 55 bp, Artificial
  Synthetic oligonucleotide
tttccgtcgtggtaaatcacgatcaataatccgcttcaaactagtagattgggtc

SEQ ID NO: 198436 - DNA, 55 bp, Artificial
  Synthetic oligonucleotide
tttccgagtccgtcattcacggcaatccaagtggactcgatgtagcagcaacgag

SEQ ID NO: 198437 - DNA, 60 bp, Artificial
  Synthetic oligonucleotide
gatagtagactggtgcgaagcccgctgttagtaggtgagtgtcaagcgacacaacgcctg

SEQ ID NO: 198438 - DNA, 54 bp, Artificial
  Synthetic oligonucleotide
aaaagggattcggcttgggacaaccgcaaaagaacaacaagcagaggccgatag

SEQ ID NO: 198439 - DNA, 53 bp, Artificial
  Synthetic oligonucleotide
tttatcacttagccgaaccaaatcaatttaccccgcccactaacccgtgcacc

SEQ ID NO: 198440 - DNA, 55 bp, Artificial
  Synthetic oligonucleotide
tttaagtacaactttctgcactactccatgcgatttaccggaacttgctccgccg

SEQ ID NO: 198441 - DNA, 55 bp, Artificial
  Synthetic oligonucleotide
ttgtttaccacaggattgtacgtctcagtcccacgtgtgtttcgaggtgctacca

SEQ ID NO: 198442 - DNA, 55 bp, Artificial
  Synthetic oligonucleotide
ttggctgatagaagctacccgtcaacgcaaaagatgtgctagttgcggctatgtc

SEQ ID NO: 198443 - DNA, 55 bp, Artificial
  Synthetic oligonucleotide
ttggctctcgaagtaaagatggtcttgatagagagatgtttgtcatgttcactcg

SEQ ID NO: 198444 - DNA, 55 bp, Artificial
  Synthetic oligonucleotide
aaacattgctatatctatctccaagcgttcctgattgaaagacaaccgatccctc

SEQ ID NO: 198445 - DNA, 55 bp, Artificial
  Synthetic oligonucleotide
ttggaatggttccagttggccagctcatagatatagcgggaagttgacccgacag

SEQ ID NO: 198446 - DNA, 55 bp, Artificial
  Synthetic oligonucleotide
ttggaaaattgtcttgctttatctactggagataagcgacaaactttacgtgata

SEQ ID NO: 198447 - DNA, 55 bp, Artificial
  Synthetic oligonucleotide
ttgctcatgttggtcgtcttttatgcgctgattctgattccgttgatattgctgc

SEQ ID NO: 198448 - DNA, 60 bp, Artificial
  Synthetic oligonucleotide
gatagctaatatacgtgaattgaagcgttttgttagagttcatggtaatgagtatgggct

SEQ ID NO: 198449 - DNA, 55 bp, Artificial
  Synthetic oligonucleotide
ttgcgtgtgaatgcctgaagccatgaattgtaatacggtgttcaattttatgagt

SEQ ID NO: 198450 - DNA, 55 bp, Artificial
  Synthetic oligonucleotide
aaacgacacagtcgccaaacttgcttgattaccatacacggtcacatctggaatc

SEQ ID NO: 198451 - DNA, 55 bp, Artificial
  Synthetic oligonucleotide
ttgcaacgggcttagatgcgttttcacacgcggcagaaggttatacatcaacctt

SEQ ID NO: 198452 - DNA, 55 bp, Artificial
  Synthetic oligonucleotide
ttgagtgaggaatagtgtttacacttgcagtacggttgttacgcatcttcttacc

SEQ ID NO: 198453 - DNA, 55 bp, Artificial
  Synthetic oligonucleotide
ttgacgcgaaaatagctgacttgcggttaattgtgttcgtaatcgttgagctacc

SEQ ID NO: 198454 - DNA, 55 bp, Artificial
  Synthetic oligonucleotide
ttgacgacgtaagacttcattcagggtaatatctttgtctgaagatagcgctgcg

SEQ ID NO: 198455 - DNA, 51 bp, Artificial
  Synthetic oligonucleotide
aaacgggtggacttcccgttttagaacaaggccagactttgaaaccgcgca

SEQ ID NO: 198456 - DNA, 55 bp, Artificial
  Synthetic oligonucleotide
tgcgggccagagacttgccgcctaaagaccaggccccggacctaatgctggttga

SEQ ID NO: 198457 - DNA, 55 bp, Artificial
  Synthetic oligonucleotide
tgcgggaagctgtcctcatcgaccaggctaaggagttggtagtctgcttgcgccc

SEQ ID NO: 198458 - DNA, 55 bp, Artificial
  Synthetic oligonucleotide
tgcgagagcactaccggctacagacttagctgtcttgctatagcgtccatcacgc

SEQ ID NO: 198459 - DNA, 58 bp, Artificial
  Synthetic oligonucleotide
gataacataattgaccctccataatattatttattctacaccctcaatataatacaac

SEQ ID NO: 198460 - DNA, 55 bp, Artificial
  Synthetic oligonucleotide
aacgatgatcagggcagctacggttctattcaagtttaagtgccagaattgtgcg

SEQ ID NO: 198461 - DNA, 55 bp, Artificial
  Synthetic oligonucleotide
tgccaacgattttactaatggacaagcgctttctaattcaacccgtaagagacaa

SEQ ID NO: 198462 - DNA, 54 bp, Artificial
  Synthetic oligonucleotide
tgcatactaatgcccgttttgaaggaattaatacgactttaccccaaacgcaaa

SEQ ID NO: 198463 - DNA, 55 bp, Artificial
  Synthetic oligonucleotide
tgcatacgttacaggtgatatctcataccatacaggtcatgatatgattgctgcg

SEQ ID NO: 198464 - DNA, 55 bp, Artificial
  Synthetic oligonucleotide
tgcaggtattagaactcatattgtcgttgctgtagcttctgcacttttcatgatc

SEQ ID NO: 198465 - DNA, 55 bp, Artificial
  Synthetic oligonucleotide
tgatatttcgttttgaagtgacaacttcttagtgagcacttacccgggtgctcac

SEQ ID NO: 198466 - DNA, 55 bp, Artificial
  Synthetic oligonucleotide
tgataccgagtcaccaacgaaaacatagtcatccggaaaggactgaatccgagca

SEQ ID NO: 198467 - DNA, 55 bp, Artificial
  Synthetic oligonucleotide
tgagcgaactaacgagcgagattaagtcgtttaaaaggtccatagccaccacccc

SEQ ID NO: 198468 - DNA, 55 bp, Artificial
  Synthetic oligonucleotide
tgacccttgtcgcacgttatcgctgtgccaacgtagagtttgctacggagtaagt

SEQ ID NO: 198469 - DNA, 55 bp, Artificial
  Synthetic oligonucleotide
aacgggtgtttaatcgtgcggctttgcaaaacgttcaagatcaattgccgactta

SEQ ID NO: 198470 - DNA, 58 bp, Artificial
  Synthetic oligonucleotide
gataaatcgtgccatgcttaaagagcaagcgattacgtttacttaagtcaaagaataa

SEQ ID NO: 198471 - DNA, 55 bp, Artificial
  Synthetic oligonucleotide
tgaccaactcatccaatagtagtaaacggtggaccactttggataatcagccggc

SEQ ID NO: 198472 - DNA, 55 bp, Artificial
  Synthetic oligonucleotide
tgacactggggcaacttctcacgtacaatgccttgttaacctacttcactaaccc

SEQ ID NO: 198473 - DNA, 55 bp, Artificial
  Synthetic oligonucleotide
tgaatcggattttaggccttatttcaagatgtttctggacgatccgttagggtac

SEQ ID NO: 198474 - DNA, 55 bp, Artificial
  Synthetic oligonucleotide
aacggtaacacggcttggtcctctaaggcatctcgcaagttataaacgtgacaga

SEQ ID NO: 198475 - DNA, 55 bp, Artificial
  Synthetic oligonucleotide
tgaaggggagccagccacgattaagccaattataaattgacgcagtgctcaagtt

SEQ ID NO: 198476 - DNA, 55 bp, Artificial
  Synthetic oligonucleotide
tgaagaagtctcctaagctgaagaaggccattagaggcggcaaggatattgccag

SEQ ID NO: 198477 - DNA, 55 bp, Artificial
  Synthetic oligonucleotide
tgaacaaatttaacgtgcatgccgatagaagtatccccgatatccatgccagcct

SEQ ID NO: 198478 - DNA, 55 bp, Artificial
  Synthetic oligonucleotide
tgaaagcgggacatcagtcactgatcttaccagcgaatatgggattgccagtgcc

SEQ ID NO: 198479 - DNA, 55 bp, Artificial
  Synthetic oligonucleotide
tctttagtgcagccttaccagcatccgtcaagataatccgataagttcctactgc

SEQ ID NO: 198480 - DNA, 53 bp, Artificial
  Synthetic oligonucleotide
tcttgatgggtacggaaaccctgaaacaccgggtaacgtgaacttcgatggtc

SEQ ID NO: 198481 - DNA, 55 bp, Artificial
  Synthetic oligonucleotide
gagtgccaacttttaaattaaattgaggctcgctcttactctcccaagggttaca

SEQ ID NO: 198482 - DNA, 55 bp, Artificial
  Synthetic oligonucleotide
tcttgatagggtaaagaaacttttgaaggatatcaagcctgttatggttcacacc

SEQ ID NO: 198483 - DNA, 55 bp, Artificial
  Synthetic oligonucleotide
tcttccaggcattttaaggcgaattggtccatgttagtccgaaaccatttcgtag

SEQ ID NO: 198484 - DNA, 55 bp, Artificial
  Synthetic oligonucleotide
tctgtacaattgcggtattgctaccaccactcattataaacctacgttttcggtt

SEQ ID NO: 198485 - DNA, 55 bp, Artificial
  Synthetic oligonucleotide
aactacccaacatagtttgtgacagctaacggttcacaacgccgttgttagctac

SEQ ID NO: 198486 - DNA, 54 bp, Artificial
  Synthetic oligonucleotide
tctcggggcttggtgtcttcaataaaccgacttagcttcaaaagggtgtaagga

SEQ ID NO: 198487 - DNA, 55 bp, Artificial
  Synthetic oligonucleotide
tctcaagatcgtgctggctgtgagcaggttagcacatttattctgacgtacattg

SEQ ID NO: 198488 - DNA, 55 bp, Artificial
  Synthetic oligonucleotide
tgttgtggtccactagtgccgcgcagactgcgaaccgtttgtaaccctgggtgta

SEQ ID NO: 198489 - DNA, 55 bp, Artificial
  Synthetic oligonucleotide
tgttaacaccaaatcatcggttgatcaccacatggtttaacaactattgaggagg

SEQ ID NO: 198490 - DNA, 55 bp, Artificial
  Synthetic oligonucleotide
aacaagagaccttaaggactcaattcatgccttggcaatgttaaatggatgcacg

SEQ ID NO: 198491 - DNA, 55 bp, Artificial
  Synthetic oligonucleotide
tgtggaatggccagtggttggtcatgcttaaccggtaaatgaatcacaaaactcg

SEQ ID NO: 198492 - DNA, 60 bp, Artificial
  Synthetic oligonucleotide
gagtgaaactctaaatgaatgtaggtgtcaacactgcgtgtaacattatgcaaaagccag

SEQ ID NO: 198493 - DNA, 55 bp, Artificial
  Synthetic oligonucleotide
tgtgcaagcatcacatccccagcgtcagttatcaactcttcaagtacctgtgggg

SEQ ID NO: 198494 - DNA, 55 bp, Artificial
  Synthetic oligonucleotide
tgtcgagcgtaagagtcgtcttatcatcgttaaacggcttcagggacgagatagt

SEQ ID NO: 198495 - DNA, 55 bp, Artificial
  Synthetic oligonucleotide
aacagccgacaaacgaggaatattaaccgaacaagtgaagcaccaaccttatgcc

SEQ ID NO: 198496 - DNA, 55 bp, Artificial
  Synthetic oligonucleotide
tgtcaggatacacaagttacacttcaccaattgatgttcaacgcagtgctgttga

SEQ ID NO: 198497 - DNA, 55 bp, Artificial
  Synthetic oligonucleotide
tgtataagtggaattgtagtgttagcgattatgtaagttgggagtgaaagttatg

SEQ ID NO: 198498 - DNA, 55 bp, Artificial
  Synthetic oligonucleotide
tgtagtcttggtaacagattaacgactgcttgtgggacgctgccggaggtatggg

SEQ ID NO: 198499 - DNA, 55 bp, Artificial
  Synthetic oligonucleotide
aacatcatcatcttggcgatcaatcttgcgacgagcattcttgatgttgctagcc

SEQ ID NO: 198500 - DNA, 55 bp, Artificial
  Synthetic oligonucleotide
tgtagagttcaaaggcttttctctttgctgataaatctttgttgatctgcggggc

SEQ ID NO: 198501 - DNA, 55 bp, Artificial
  Synthetic oligonucleotide
tggttaaacgatcaatggcgtcactatcatcactagcccaaatttgtggatcata

SEQ ID NO: 198502 - DNA, 55 bp, Artificial
  Synthetic oligonucleotide
aacatgcacaacgtaagcatttaaagcatcgcaccaactggagtatataccggaa

SEQ ID NO: 198503 - DNA, 58 bp, Artificial
  Synthetic oligonucleotide
ctgctaaacgagtatttaatcggacggctttgcgagatgttcaagatcaattaccggc

SEQ ID NO: 198504 - DNA, 55 bp, Artificial
  Synthetic oligonucleotide
gaggtttgcatacctacttaaaaaagtagggcagcaaaacgtcaaacaggtatca

SEQ ID NO: 198505 - DNA, 55 bp, Artificial
  Synthetic oligonucleotide
aacattataccgattggtgtcctctgctagacgcttttaacgcttggattcatgg

SEQ ID NO: 198506 - DNA, 55 bp, Artificial
  Synthetic oligonucleotide
tggtgagactttgatagtgatcgtagctaaggttcccttgttccgcacgcgaacc

SEQ ID NO: 198507 - DNA, 55 bp, Artificial
  Synthetic oligonucleotide
tggtcgtgtactcgattttgacttagctagtgcatataacgtaggagggcatctc

SEQ ID NO: 198508 - DNA, 55 bp, Artificial
  Synthetic oligonucleotide
tggtaaccctaacacgcttccaacatctcgtagtgataatggcaagccgagagtg

SEQ ID NO: 198509 - DNA, 55 bp, Artificial
  Synthetic oligonucleotide
tggggttacttgtggcaaacattcctgctctgttgactggggtaaggctaccact

SEQ ID NO: 198510 - DNA, 55 bp, Artificial
  Synthetic oligonucleotide
tggctggcagccacttgcgcctggctgacaaagccgggatcttaggcaatgtttt

SEQ ID NO: 198511 - DNA, 55 bp, Artificial
  Synthetic oligonucleotide
tggccaacctgtttgtccgttttctggagctgcgacaaagccaggaacactacca

SEQ ID NO: 198512 - DNA, 55 bp, Artificial
  Synthetic oligonucleotide
tggcaacgagcgatgaaattagcttatgtgccggttgtgaatgttgaagcggtta

SEQ ID NO: 198513 - DNA, 55 bp, Artificial
  Synthetic oligonucleotide
tggatcggatactggacatcgtgcgtggcttttatcaagtagacttactaccact

SEQ ID NO: 198514 - DNA, 55 bp, Artificial
  Synthetic oligonucleotide
tggagccacttataataagccgatctagccacttgaacagtcttacagatccaac

SEQ ID NO: 198515 - DNA, 59 bp, Artificial
  Synthetic oligonucleotide
cactaatctgaaattttcattatggttgtagtgtggttctgattaatggagggagagcc

SEQ ID NO: 198516 - DNA, 55 bp, Artificial
  Synthetic oligonucleotide
tggacattcgtcaatggacatctatcgtaaggccttctaccaagagatatcacag

SEQ ID NO: 198517 - DNA, 55 bp, Artificial
  Synthetic oligonucleotide
tggaagttgccgtgtctgaaagttctcgttgaaccgatccaacatgcaggtcctc

SEQ ID NO: 198518 - DNA, 55 bp, Artificial
  Synthetic oligonucleotide
tggaaccatgcacaacggctatgcttctgactcaagtagaactgtcgcttacggc

SEQ ID NO: 198519 - DNA, 55 bp, Artificial
  Synthetic oligonucleotide
tgcttgtgcaggtccgacttatgttcgcttttgccgtatacttccttgctattaa

SEQ ID NO: 198520 - DNA, 55 bp, Artificial
  Synthetic oligonucleotide
tgctgtgtgattgacgattaaccggtttgttgacagtcggcttggattgatagag

SEQ ID NO: 198521 - DNA, 55 bp, Artificial
  Synthetic oligonucleotide
tgcggtaggtagcgatgtatgtatccgtcgttggacttggcgtcaaagtgagcat

SEQ ID NO: 198522 - DNA, 55 bp, Artificial
  Synthetic oligonucleotide
ggtgcagagtagggtgaggtgaaatcggaatcttgtctttcttgggcgttagcca

SEQ ID NO: 198523 - DNA, 55 bp, Artificial
  Synthetic oligonucleotide
ggtgagattgcttaacacggcttaactacgcatgaaatgtgataactaccgtatg

SEQ ID NO: 198524 - DNA, 55 bp, Artificial
  Synthetic oligonucleotide
ggtctttggcggcaaactgtttgtcacgatctgctctcaaataagcgatttcgtc

SEQ ID NO: 198525 - DNA, 55 bp, Artificial
  Synthetic oligonucleotide
ggtctcagccacctattgcaaacgggtcgactgccgtggaataatgctgtgttcc

SEQ ID NO: 198526 - DNA, 52 bp, Artificial
  Synthetic oligonucleotide
cacgtgaaaaaatctcgagcgtgtagtaaaccgcgttttactacacgtggtt

SEQ ID NO: 198527 - DNA, 55 bp, Artificial
  Synthetic oligonucleotide
ggtctaagactagctggtggcgagctgtgatgggtgtccgatcaacatattgtaa

SEQ ID NO: 198528 - DNA, 55 bp, Artificial
  Synthetic oligonucleotide
ggtctaacaagccatcactacgtgtcacaacaacggccataatcgctagcagcgg

SEQ ID NO: 198529 - DNA, 52 bp, Artificial
  Synthetic oligonucleotide
ggtctaaagtaatttgtttactcgccccgggaaccacaaacatgccgactcc

SEQ ID NO: 198530 - DNA, 55 bp, Artificial
  Synthetic oligonucleotide
ggtcgttccatttgccgcgaattacgtgacctgtacgtggcaatttaaatgctct

SEQ ID NO: 198531 - DNA, 55 bp, Artificial
  Synthetic oligonucleotide
ggtcgtgagattacccctccatacgaattacaacctgctatgagcttagtatcgg

SEQ ID NO: 198532 - DNA, 55 bp, Artificial
  Synthetic oligonucleotide
ggtcgcaatgctatcgagccatttcaaccagttttcgcgatccaatcgggcagcc

SEQ ID NO: 198533 - DNA, 55 bp, Artificial
  Synthetic oligonucleotide
ggtcgattgccaaacgaaacggcctgagcatgtatacgttagcatcacaaaacgg

SEQ ID NO: 198534 - DNA, 55 bp, Artificial
  Synthetic oligonucleotide
ggtccttaagcatcttaagtccatagtaagcggcaagtccaggccccttatcgtc

SEQ ID NO: 198535 - DNA, 55 bp, Artificial
  Synthetic oligonucleotide
ggtccagttacaagccacacagacaatccttaatatggcagggtatgggactgct

SEQ ID NO: 198536 - DNA, 54 bp, Artificial
  Synthetic oligonucleotide
ggtcatacgttttggctaaggtaccaaatgaccaccacaagatgggttacggtg

SEQ ID NO: 198537 - DNA, 59 bp, Artificial
  Synthetic oligonucleotide
cacgtcacatcccttgtggctctagggctcaacccgtcacactatcccgtcacaacgtg

SEQ ID NO: 198538 - DNA, 55 bp, Artificial
  Synthetic oligonucleotide
ggtcagcgtcataaattaacattaccgtagcgttgggattatccaccccaacctc

SEQ ID NO: 198539 - DNA, 55 bp, Artificial
  Synthetic oligonucleotide
ggtatttggcttcaccggtttgactgaaacttcgggcacacttgtggtatttggc

SEQ ID NO: 198540 - DNA, 55 bp, Artificial
  Synthetic oligonucleotide
ggtatttatgctgggcgtcaactaacagctggtcagccaatctatggcgttactg

SEQ ID NO: 198541 - DNA, 53 bp, Artificial
  Synthetic oligonucleotide
ggtattaatttacctgaaaagtggctagagcgtgcgggactaaaagaaccgtc

SEQ ID NO: 198542 - DNA, 53 bp, Artificial
  Synthetic oligonucleotide
ggtagtcaacggtaccggaacgaccaacgggagcgaggataaggagttgacta

SEQ ID NO: 198543 - DNA, 55 bp, Artificial
  Synthetic oligonucleotide
ggtagcggtcagacagtgacagatccatatgctaccgtagaatcacctaaactgg

SEQ ID NO: 198544 - DNA, 55 bp, Artificial
  Synthetic oligonucleotide
accactgggctgctagacgtattccagataacgcttatgttattgcacctaaccg

SEQ ID NO: 198545 - DNA, 54 bp, Artificial
  Synthetic oligonucleotide
ggtaagctgattacttaccgaaagacgtcttgtgggtggtcgttgagccacctt

SEQ ID NO: 198546 - DNA, 55 bp, Artificial
  Synthetic oligonucleotide
ggtaacgggaatagcaccggttttatcgagtagtttggtgccaagtggcatggca

SEQ ID NO: 198547 - DNA, 55 bp, Artificial
  Synthetic oligonucleotide
gggttttactggcgctaataccacaaattacgccatatcttaccatcgttagtgg

SEQ ID NO: 198548 - DNA, 56 bp, Artificial
  Synthetic oligonucleotide
cacggtaaagagttttcctgcgatcaggcgcttacaaagcgctatcggataccggt

SEQ ID NO: 198549 - DNA, 52 bp, Artificial
  Synthetic oligonucleotide
gggtttccccgaagttatagtacgggaagacgtcaggcatacgtaagttgtc

SEQ ID NO: 198550 - DNA, 50 bp, Artificial
  Synthetic oligonucleotide
gggttggtaaagccctagcggtaatcgtggtggttttagccgttagtagt

SEQ ID NO: 198551 - DNA, 55 bp, Artificial
  Synthetic oligonucleotide
gggttggctcaatcaaccaccctataggaggtgagagacgttggacgacatgaca

SEQ ID NO: 198552 - DNA, 55 bp, Artificial
  Synthetic oligonucleotide
gggttccgtgactaaagtgaggtgcagcaatcatggaaatggaacggattaacgc

SEQ ID NO: 198553 - DNA, 55 bp, Artificial
  Synthetic oligonucleotide
gggtgcgctgatactcggctcaaaagagccgacagagccgtctgcaagacccctc

SEQ ID NO: 198554 - DNA, 55 bp, Artificial
  Synthetic oligonucleotide
gtaagttgcttaaaacctgtatcagaattcgctccgctcaaactaaaactgacgg

SEQ ID NO: 198555 - DNA, 55 bp, Artificial
  Synthetic oligonucleotide
acagttagtgatggcatagtccatcaatcaaagtgtcacaagcgtaggttcgtcc

SEQ ID NO: 198556 - DNA, 55 bp, Artificial
  Synthetic oligonucleotide
acagttatatcgccacccaacttacgaatcttatcttgaacacgatcgtatcctc

SEQ ID NO: 198557 - DNA, 55 bp, Artificial
  Synthetic oligonucleotide
gtaagcccttgagatcacgcatcaataaagcacgacttgcccacggacaaccgta

SEQ ID NO: 198558 - DNA, 53 bp, Artificial
  Synthetic oligonucleotide
gtaacgttccgaatatgagtgttcacattccggaccaaaccccttacaccctg

SEQ ID NO: 198559 - DNA, 54 bp, Artificial
  Synthetic oligonucleotide
cacgggcttagcgggggtagttatttcgctagcacctgccttgggtccaactta

SEQ ID NO: 198560 - DNA, 55 bp, Artificial
  Synthetic oligonucleotide
acataagaccgcagaccaggctttgaaatccgcttcaagccagaaataacgcgtt

SEQ ID NO: 198561 - DNA, 55 bp, Artificial
  Synthetic oligonucleotide
gtaaccgcacagaaccaagatttacttagtcacttaggagagacgctcacaggcg

SEQ ID NO: 198562 - DNA, 55 bp, Artificial
  Synthetic oligonucleotide
gtaaccaaatcatgttagacaacttaggtgcccttcctcactacgctgtttaccc

SEQ ID NO: 198563 - DNA, 55 bp, Artificial
  Synthetic oligonucleotide
gtaaagggattcgtcaaagtttaggcgaacaaagaacagaaatacttgcagagtc

SEQ ID NO: 198564 - DNA, 55 bp, Artificial
  Synthetic oligonucleotide
ggtttgacatggcttgcatgatcggaaaggagagaccgcagggctcgacccgatc

SEQ ID NO: 198565 - DNA, 55 bp, Artificial
  Synthetic oligonucleotide
acatattttcaacgacttccaaattggtcgcactttctagggcagtgccacgctc

SEQ ID NO: 198566 - DNA, 55 bp, Artificial
  Synthetic oligonucleotide
ggtttagaacacctgagggagcttcagaatgcatcagtacaatccttaacgctgc

SEQ ID NO: 198567 - DNA, 55 bp, Artificial
  Synthetic oligonucleotide
ggtttaccattgcgtagttcattgtagtatcaattcgtacgtgtcccagtaactt

SEQ ID NO: 198568 - DNA, 50 bp, Artificial
  Synthetic oligonucleotide
ggttgtccgttttggtcctttaatttgaaaactaggtgcgtagtaccgtc

SEQ ID NO: 198569 - DNA, 55 bp, Artificial
  Synthetic oligonucleotide
ggttggatcattgaacgcttattacaggagccagtacaagtagctttgacacgtg

SEQ ID NO: 198570 - DNA, 52 bp, Artificial
  Synthetic oligonucleotide
cacgagaatgcccactaaagttagcgaaattttaatggggtagttaaccgga

SEQ ID NO: 198571 - DNA, 55 bp, Artificial
  Synthetic oligonucleotide
ggttgcggcttgcgtacggtgcttttgcggtcaatagacggtttaagtgtattgc

SEQ ID NO: 198572 - DNA, 55 bp, Artificial
  Synthetic oligonucleotide
ggttgaatcctgataatcaattccgtcagccctgccttcgacaatatactcgtcc

SEQ ID NO: 198573 - DNA, 55 bp, Artificial
  Synthetic oligonucleotide
ggttcggaatatggcatgcctagtattaaggtcgtcaattcggttttacgtgctc

SEQ ID NO: 198574 - DNA, 55 bp, Artificial
  Synthetic oligonucleotide
acatcatcgtacttcgtgtattgggccgtgatcgtcgtatcactcgtgaacttac

SEQ ID NO: 198575 - DNA, 55 bp, Artificial
  Synthetic oligonucleotide
ggttcaaagcgggatgggagactatactgcttcttactatcgtgtaaagggcggt

SEQ ID NO: 198576 - DNA, 55 bp, Artificial
  Synthetic oligonucleotide
ggttatcgcagctacgagctcggaatctttaatgataacgatccgaaagtcgccg

SEQ ID NO: 198577 - DNA, 54 bp, Artificial
  Synthetic oligonucleotide
ggttagagcgagcgttttggaggctttactttaccggcttaagtatgagtgtta

SEQ ID NO: 198578 - DNA, 55 bp, Artificial
  Synthetic oligonucleotide
ggtgttgccagagtggacaaagtctattggtttaatgacagccgaatgaagtcac

SEQ ID NO: 198579 - DNA, 55 bp, Artificial
  Synthetic oligonucleotide
ggtgttcaatcttgtgtacaaaatggtgagacgatacacaggctcgtttgatata

SEQ ID NO: 198580 - DNA, 55 bp, Artificial
  Synthetic oligonucleotide
ggtgttcaaaacatgagtgatgtgaatgatataataactgccaatgctggtggtt

SEQ ID NO: 198581 - DNA, 60 bp, Artificial
  Synthetic oligonucleotide
caccccgacaagcaccctagcatgtgtgtagatcgtaaccacccgcaatatgttcattgc

SEQ ID NO: 198582 - DNA, 55 bp, Artificial
  Synthetic oligonucleotide
ggtgtcaatacgttattggaagttgctagggagtatcacctcgctaaatttgtgc

SEQ ID NO: 198583 - DNA, 55 bp, Artificial
  Synthetic oligonucleotide
ggtggcaagctgactaagatggttccaatgcggttaaatagtacgaatttcgact

SEQ ID NO: 198584 - DNA, 55 bp, Artificial
  Synthetic oligonucleotide
ggtgccgcaatcgtttgtaccttcccatcccgtcgaacattagctgtgggtaaac

SEQ ID NO: 198585 - DNA, 55 bp, Artificial
  Synthetic oligonucleotide
ggtgcagttaatgccttcatgctaacagggatgcgcacgccatacattttagccc

SEQ ID NO: 198586 - DNA, 55 bp, Artificial
  Synthetic oligonucleotide
gggcataaaacagaacaaagtggcctcaagcatgattgccggactttagccactg

SEQ ID NO: 198587 - DNA, 55 bp, Artificial
  Synthetic oligonucleotide
gggcaggtacaagtttggtattaagctttgactggtcagtctcagaccaaggagc

SEQ ID NO: 198588 - DNA, 55 bp, Artificial
  Synthetic oligonucleotide
gggcaagccaaaggcgcgcaggcatagccggagttaaatgtggcgaagccacacc

SEQ ID NO: 198589 - DNA, 53 bp, Artificial
  Synthetic oligonucleotide
gggcaaaacggagggttgcacaaccattccaattaattggttaaagggcgtca

SEQ ID NO: 198590 - DNA, 55 bp, Artificial
  Synthetic oligonucleotide
gggatcgcgatgattacacaccctgcaacgaattgtgcgaagtatgcagtcgcgt

SEQ ID NO: 198591 - DNA, 55 bp, Artificial
  Synthetic oligonucleotide
gggagtagacgacagcttacaattcctagaacctacaattccagtcaacatgacg

SEQ ID NO: 198592 - DNA, 60 bp, Artificial
  Synthetic oligonucleotide
caatttgtctagaattgggaaccctaggatctgatgcatcaaagcctagaactcctgccg

SEQ ID NO: 198593 - DNA, 51 bp, Artificial
  Synthetic oligonucleotide
gggacttctaataagccgccccatcccttgtttaagtcgtaaaatagccct

SEQ ID NO: 198594 - DNA, 55 bp, Artificial
  Synthetic oligonucleotide
gggaccgggatcggttgcctcttacacggtggtatcaagccacgctaccaagagg

SEQ ID NO: 198595 - DNA, 54 bp, Artificial
  Synthetic oligonucleotide
gggacattaaccggctgcaccttagcgggaagtagtctatcggggagtgggaac

SEQ ID NO: 198596 - DNA, 55 bp, Artificial
  Synthetic oligonucleotide
accccacgatcgaaaccatgcttaacaccacgatcattatcagtcatcgctctcc

SEQ ID NO: 198597 - DNA, 55 bp, Artificial
  Synthetic oligonucleotide
gggaacggatagtaagcaggttcaggcaacgttaatcgctcccgacaatgcgctt

SEQ ID NO: 198598 - DNA, 55 bp, Artificial
  Synthetic oligonucleotide
gggaacataaccacgaccagtcttgatcgcaacgttcatatgcaaatggccacca

SEQ ID NO: 198599 - DNA, 55 bp, Artificial
  Synthetic oligonucleotide
gggaacaggaaactatttgtctcaagttgattggactaacttatggcagaaggct

SEQ ID NO: 198600 - DNA, 55 bp, Artificial
  Synthetic oligonucleotide
gggaaacgtatcattagccctataaactgcgtctaccctcattattggaggtcga

SEQ ID NO: 198601 - DNA, 55 bp, Artificial
  Synthetic oligonucleotide
ggcttgtcaggctataaaattgcagatctggaagcaattattatgacttacgaag

SEQ ID NO: 198602 - DNA, 55 bp, Artificial
  Synthetic oligonucleotide
ggcttgggtctaccaactcgcataggtatccaggacttggctaattgaggcggtc

SEQ ID NO: 198603 - DNA, 55 bp, Artificial
  Synthetic oligonucleotide
caattattaagtttgacgttagcaatatagctgaactcagaaaccttacggacgg

SEQ ID NO: 198604 - DNA, 55 bp, Artificial
  Synthetic oligonucleotide
ggcttattgagccttacaggcgatattagcccctcttggaggctttaaggagttg

SEQ ID NO: 198605 - DNA, 54 bp, Artificial
  Synthetic oligonucleotide
accccgtacagttaaccccgtgggttgtccgcacgaccttatcatgtgcccagc

SEQ ID NO: 198606 - DNA, 55 bp, Artificial
  Synthetic oligonucleotide
ggctgctagacaagttgaagtccaatactactcgaagttggtctcagtaaagcta

SEQ ID NO: 198607 - DNA, 55 bp, Artificial
  Synthetic oligonucleotide
ggctgatagggatgcatacctgggctaccttaagtcaggttctagtgactatcct

SEQ ID NO: 198608 - DNA, 55 bp, Artificial
  Synthetic oligonucleotide
ggctgacggctcagattgctaacactaacgccttttcaaaaggtgaagccttacc

SEQ ID NO: 198609 - DNA, 55 bp, Artificial
  Synthetic oligonucleotide
ggctctgtatactctgatttccagatccgtgtaaatatgtccattacatccttgt

SEQ ID NO: 198610 - DNA, 55 bp, Artificial
  Synthetic oligonucleotide
ggctattaaatcgtgttgctagtgctaaggcactagagaaattattgagggaaca

SEQ ID NO: 198611 - DNA, 55 bp, Artificial
  Synthetic oligonucleotide
ggctatggcggcttactgaagcgaattaaacggcaattgaaattggacgatgccg

SEQ ID NO: 198612 - DNA, 55 bp, Artificial
  Synthetic oligonucleotide
ggctagtcatagtaaggctgcaacttctaaggccaaggtcgagcataaagtcgac

SEQ ID NO: 198613 - DNA, 55 bp, Artificial
  Synthetic oligonucleotide
ggctagacacttgtcagcattgactgtagcggctttacaatgacactagatctac

SEQ ID NO: 198614 - DNA, 60 bp, Artificial
  Synthetic oligonucleotide
ctgattcagctttgcaatcgcctgatcggtcaaggtgaacatgacccggtgagtttcgtg

SEQ ID NO: 198615 - DNA, 56 bp, Artificial
  Synthetic oligonucleotide
caattaacagccgaagttcaaaccatcggaattgttgacgtttcattagttcattc

SEQ ID NO: 198616 - DNA, 55 bp, Artificial
  Synthetic oligonucleotide
ggctacttgactccaattaaaacggcccatagtggcagctactgaggttcctacc

SEQ ID NO: 198617 - DNA, 55 bp, Artificial
  Synthetic oligonucleotide
gggtgatctgacaagcccctaaattaagaaagagcataaggcaaaactgacccca

SEQ ID NO: 198618 - DNA, 55 bp, Artificial
  Synthetic oligonucleotide
gggtcaaggatttacattgggatttactggttattgatgagagtcatgagggagt

SEQ ID NO: 198619 - DNA, 55 bp, Artificial
  Synthetic oligonucleotide
accatggtatgatttccgccttgaagtaagtcaagaacatgtaggccgcgcgctg

SEQ ID NO: 198620 - DNA, 55 bp, Artificial
  Synthetic oligonucleotide
gggtagatttaatacccatttcgatgggtattatttgtattagaaggctagcgcc

SEQ ID NO: 198621 - DNA, 52 bp, Artificial
  Synthetic oligonucleotide
gggtacggcaccaaaagctaagtaattgaaccgcttcgggttctaggaatac

SEQ ID NO: 198622 - DNA, 55 bp, Artificial
  Synthetic oligonucleotide
ggggtttgagagaacgattagcaccggtcctgtgacgagttgaagcgaggaacgg

SEQ ID NO: 198623 - DNA, 50 bp, Artificial
  Synthetic oligonucleotide
ggggttaagcacggctacgtttacgctaaactccccgccgcgacccttaa

SEQ ID NO: 198624 - DNA, 55 bp, Artificial
  Synthetic oligonucleotide
ggggtgcaactactatgatgacaagcggacttaagatgccgaagcaggttaaagc

SEQ ID NO: 198625 - DNA, 55 bp, Artificial
  Synthetic oligonucleotide
ggggtcaagctgacacagcttgcgggtttgggcagagcccatattttggtttggt

SEQ ID NO: 198626 - DNA, 60 bp, Artificial
  Synthetic oligonucleotide
caatgatatactatcgtgatatactactcgtgtgttcttgatatgaacactcctattcat

SEQ ID NO: 198627 - DNA, 55 bp, Artificial
  Synthetic oligonucleotide
ggggctgaacataatttgcctagcatgaagataataaactctgttttgcggtcgc

SEQ ID NO: 198628 - DNA, 55 bp, Artificial
  Synthetic oligonucleotide
ggggcgcacttgcttgcttcaaatggccctttcgccgatacgtgatcgtcactcg

SEQ ID NO: 198629 - DNA, 55 bp, Artificial
  Synthetic oligonucleotide
ggggcccttcgttagctggcatggcattgataccatcgatcatcggggcaattat

SEQ ID NO: 198630 - DNA, 55 bp, Artificial
  Synthetic oligonucleotide
ggggatttagttgattatgctgtatctgaaaagttcgatgattggtttcctaccg

SEQ ID NO: 198631 - DNA, 55 bp, Artificial
  Synthetic oligonucleotide
ggggagtgcttaatcgaacttaacttcatcgagcatttgttctcggctgacttga

SEQ ID NO: 198632 - DNA, 55 bp, Artificial
  Synthetic oligonucleotide
ggggaccagtatcagttcagtgaacgcgaactagaagcagtgctctcacggtcca

SEQ ID NO: 198633 - DNA, 55 bp, Artificial
  Synthetic oligonucleotide
gggcttcattaccgccagaggctacgttcgtatttagtctagattatcggggtgg

SEQ ID NO: 198634 - DNA, 55 bp, Artificial
  Synthetic oligonucleotide
gggcttcagaatggcccttctacacggccaataagagcggcgttcagtacgctat

SEQ ID NO: 198635 - DNA, 55 bp, Artificial
  Synthetic oligonucleotide
gggctgggctaagtcgaatttggacggcattaccggaagcagggcacttatcggc

SEQ ID NO: 198636 - DNA, 55 bp, Artificial
  Synthetic oligonucleotide
gggctataccttgcatggaggtttgccgaattctgtgctatgctctaaccaaatt

SEQ ID NO: 198637 - DNA, 57 bp, Artificial
  Synthetic oligonucleotide
caaggggatcacaaccgtcgtccggatattgtgttatatatcaatggactaccgttg

SEQ ID NO: 198638 - DNA, 55 bp, Artificial
  Synthetic oligonucleotide
gggcgtatgcttggggcaattaaatagtagtcaagtcagatttgacgggcgactc

SEQ ID NO: 198639 - DNA, 55 bp, Artificial
  Synthetic oligonucleotide
gggcgtaatcgtatgccagggaatgacacacataatggcagctaaggctccgatg

SEQ ID NO: 198640 - DNA, 55 bp, Artificial
  Synthetic oligonucleotide
gggcggatgtgtgagtaatgtaatgcgccattgaccccatcgctgtagtttcggg

SEQ ID NO: 198641 - DNA, 55 bp, Artificial
  Synthetic oligonucleotide
gggcgcggttttaggaccattcgatgcttatctggagttggtcgggttggaaaca

SEQ ID NO: 198642 - DNA, 55 bp, Artificial
  Synthetic oligonucleotide
gggcgatctactatgtctaatgcgatgaagcgagtcggatacggctacgtatgca

SEQ ID NO: 198643 - DNA, 55 bp, Artificial
  Synthetic oligonucleotide
gggccttctttgctgtgtagtcaaaacgtgctccgaaacccaagactctccggct

SEQ ID NO: 198644 - DNA, 53 bp, Artificial
  Synthetic oligonucleotide
acccatggaaagtgcaatttatcttgatccctcaacttttccgacctttaaag

SEQ ID NO: 198645 - DNA, 55 bp, Artificial
  Synthetic oligonucleotide
gggcccaaagattagacatgctacaatatcaggtcaatgaaattgagaacgcgga

SEQ ID NO: 198646 - DNA, 55 bp, Artificial
  Synthetic oligonucleotide
gggcatacttgggtggagaagggatgttcctaggcgaatggtttgaatcgtacca

SEQ ID NO: 198647 - DNA, 55 bp, Artificial
  Synthetic oligonucleotide
gttgccacgggagcatgtcggctaattgaacccactcattgtcggaagagagtgg

SEQ ID NO: 198648 - DNA, 54 bp, Artificial
  Synthetic oligonucleotide
caacttaggcaaggaaggggaaataaatccacttaaaatcccaagtgccatagc

SEQ ID NO: 198649 - DNA, 51 bp, Artificial
  Synthetic oligonucleotide
gttgaaggtcgccagttaccgttacaccggtaatggttacacccgcaaccc

SEQ ID NO: 198650 - DNA, 55 bp, Artificial
  Synthetic oligonucleotide
gttctccattaggtagtcagtacgctactagtgttacgcagggcattatatctgc

SEQ ID NO: 198651 - DNA, 55 bp, Artificial
  Synthetic oligonucleotide
gttcccggttggctgtcggtgtctgaaccagttggctggtcagtgtccgaatccg

SEQ ID NO: 198652 - DNA, 55 bp, Artificial
  Synthetic oligonucleotide
gttccatcatgtaacaaatccgattagtttgctcgcatgcaatcagagttgaacc

SEQ ID NO: 198653 - DNA, 54 bp, Artificial
  Synthetic oligonucleotide
gttccaacgatgtttgggtcgtcaagagtccaaagtataaggaaattttgttgc

SEQ ID NO: 198654 - DNA, 55 bp, Artificial
  Synthetic oligonucleotide
gttcaagctatctttgctgtttgcagcaatggccttacgttgcactgtagcccca

SEQ ID NO: 198655 - DNA, 55 bp, Artificial
  Synthetic oligonucleotide
gttatgttggcaggactgggcatgtcgaataccttcctagttttcgttggcgcca

SEQ ID NO: 198656 - DNA, 55 bp, Artificial
  Synthetic oligonucleotide
gttagctggcaacttagggttaaagattgattccaagtagttgagtgctgcactc

SEQ ID NO: 198657 - DNA, 55 bp, Artificial
  Synthetic oligonucleotide
gttaccacctaagttccacacagattatgtgcgacactcatgccccttaacgcgg

SEQ ID NO: 198658 - DNA, 55 bp, Artificial
  Synthetic oligonucleotide
gttaaggtaatcgtcttattgccatcaaccgtaccagtcaaagcggcatcagctg

SEQ ID NO: 198659 - DNA, 55 bp, Artificial
  Synthetic oligonucleotide
caactgtttgcaaaaaatcgtccggcaacgtgacgcaattttgacgtcgtgttgg

SEQ ID NO: 198660 - DNA, 55 bp, Artificial
  Synthetic oligonucleotide
gttaaccacaaaactgtaccaatctcagtttcacgtgcgctttgagcgtgttacc

SEQ ID NO: 198661 - DNA, 55 bp, Artificial
  Synthetic oligonucleotide
gtgttgagcttacgctcacagttacgccataaacgatgataatttcccaaccaac

SEQ ID NO: 198662 - DNA, 55 bp, Artificial
  Synthetic oligonucleotide
gtgttaactgaagtattgtgctcacgggcaatactagtcattgaacgatcttcgg

SEQ ID NO: 198663 - DNA, 55 bp, Artificial
  Synthetic oligonucleotide
gtgtaggtgtctagcccgataaagtactggtaagccggggtatcacgaatagcgg

SEQ ID NO: 198664 - DNA, 55 bp, Artificial
  Synthetic oligonucleotide
gtggttgcaactagcgttaataatgctatactacgtttgtgctgtatgacatgac

SEQ ID NO: 198665 - DNA, 55 bp, Artificial
  Synthetic oligonucleotide
gtggttcgcaggttattcaatggacattcacctcaactggtcacaagcacgaggg

SEQ ID NO: 198666 - DNA, 55 bp, Artificial
  Synthetic oligonucleotide
gtggttaagctcgacattatgttgtgcgtctttgactgcctctggaatggtttcg

SEQ ID NO: 198667 - DNA, 55 bp, Artificial
  Synthetic oligonucleotide
gtggtgatacacttcgcaacgaggacattgacctttgactttcggggcttaggtt

SEQ ID NO: 198668 - DNA, 55 bp, Artificial
  Synthetic oligonucleotide
gtggtcatttggtcatttggtcaaaatggctagaaacgttgatatgacaggctca

SEQ ID NO: 198669 - DNA, 55 bp, Artificial
  Synthetic oligonucleotide
gtggggcggatattgcaaagtatttaactgtaaatggcgtagaaaagcttcgcgc

SEQ ID NO: 198670 - DNA, 60 bp, Artificial
  Synthetic oligonucleotide
caacgcctcacatgcatatgggtgtgataccgctgacgaatggtcggctgtctgcaaagg

SEQ ID NO: 198671 - DNA, 55 bp, Artificial
  Synthetic oligonucleotide
gtggcccttgcttgttgtagagacattcccactgatacactgaacctggggaacg

SEQ ID NO: 198672 - DNA, 55 bp, Artificial
  Synthetic oligonucleotide
gtggcagatcccaacggcactacaggtttcggggaaagttgcgatcacgtcagct

SEQ ID NO: 198673 - DNA, 55 bp, Artificial
  Synthetic oligonucleotide
gtggcacgccagcagagtttacccgtaatcaaagttgggtcggtaatagccggcg

SEQ ID NO: 198674 - DNA, 55 bp, Artificial
  Synthetic oligonucleotide
acaactggcggagagctaatacttgatggaccgtgccggtagtggtttgtaatag

SEQ ID NO: 198675 - DNA, 55 bp, Artificial
  Synthetic oligonucleotide
gtggatgcgaagatacaaacaaggggtatcgttgcgaacagtgtaccggagagtt

SEQ ID NO: 198676 - DNA, 55 bp, Artificial
  Synthetic oligonucleotide
gtggacgacagaccgtttaagtcgatacgctaagttagctttagggatacactag

SEQ ID NO: 198677 - DNA, 55 bp, Artificial
  Synthetic oligonucleotide
gtgcttactttcgcaaggttgatacgcaatttggcgagattaaaattcaggtgcc

SEQ ID NO: 198678 - DNA, 55 bp, Artificial
  Synthetic oligonucleotide
taagaacctaatgaagtttggtatgaccagaaactgggcatggtcatgcgccaat

SEQ ID NO: 198679 - DNA, 55 bp, Artificial
  Synthetic oligonucleotide
aatcgttggtagtaaatcatcactggtccaaatcggttcactgactgcgccgacg

SEQ ID NO: 198680 - DNA, 55 bp, Artificial
  Synthetic oligonucleotide
taacgtgttaccaccctgtcttcagtacaaaagtaccctcaattctaatctcagc

SEQ ID NO: 198681 - DNA, 54 bp, Artificial
  Synthetic oligonucleotide
caacgagtaattcgaggtactcgtgcctttgccaagaacacgttaaacaaggtc

SEQ ID NO: 198682 - DNA, 55 bp, Artificial
  Synthetic oligonucleotide
aatctaccccgtggaagttgtcggtatattgccaagcgttggcattagctacccc

SEQ ID NO: 198683 - DNA, 55 bp, Artificial
  Synthetic oligonucleotide
aatctgtcggttggaatttggtctgcattcgtgggcttggtgtttgactggtact

SEQ ID NO: 198684 - DNA, 55 bp, Artificial
  Synthetic oligonucleotide
taaaggggagacttatcgtgcatttagtaagtgtaacaatacataacttcagggg

SEQ ID NO: 198685 - DNA, 55 bp, Artificial
  Synthetic oligonucleotide
aatgagtgttgcctcacatacaccatttatgcaggaagctagtgatttgctggca

SEQ ID NO: 198686 - DNA, 55 bp, Artificial
  Synthetic oligonucleotide
aatgcggtgcccagcaagtaaattagcgttgacgacttctaacacgagggcacgc

SEQ ID NO: 198687 - DNA, 55 bp, Artificial
  Synthetic oligonucleotide
taaacgttgcataggtgtgcaatcacaagtggttactctttagccgcattcagcg

SEQ ID NO: 198688 - DNA, 53 bp, Artificial
  Synthetic oligonucleotide
taaacgctaccccgagtcgtcttaacgttcaaggtgacactacggcagttacc

SEQ ID NO: 198689 - DNA, 55 bp, Artificial
  Synthetic oligonucleotide
aatggtagcgcgctttaatgacaagattcctccgaaaagacttaacggcaaggcg

SEQ ID NO: 198690 - DNA, 52 bp, Artificial
  Synthetic oligonucleotide
gttttcttagaacccgaagccgtacaattacttagtttctggtgccgcaccc

SEQ ID NO: 198691 - DNA, 55 bp, Artificial
  Synthetic oligonucleotide
gttttctagttctgagcgaatgacttcaaactgttggcgagtaatattactggga

SEQ ID NO: 198692 - DNA, 57 bp, Artificial
  Synthetic oligonucleotide
caacgaattagcattggggccaagtcgccggattctgtttcattattggagtaacaa

SEQ ID NO: 198693 - DNA, 52 bp, Artificial
  Synthetic oligonucleotide
gttttcgttccgtccaacgtataacggatatcttcgtttccgcgaacggtca

SEQ ID NO: 198694 - DNA, 55 bp, Artificial
  Synthetic oligonucleotide
gttttatcaatcttgagatcttcgccatcatgttgcaagccataagtacgacgta

SEQ ID NO: 198695 - DNA, 53 bp, Artificial
  Synthetic oligonucleotide
gtttcggagccatcctttatggattctcgtccgttggtgacgaaggttggggt

SEQ ID NO: 198696 - DNA, 55 bp, Artificial
  Synthetic oligonucleotide
gtttcaggattcattccgaccagttgcaaacttcccttagccaaactataagcag

SEQ ID NO: 198697 - DNA, 55 bp, Artificial
  Synthetic oligonucleotide
aatgtcagcccactaagccttttgaatacatcccgattgactattgggtgcttca

SEQ ID NO: 198698 - DNA, 55 bp, Artificial
  Synthetic oligonucleotide
gtttaggaacaggagcatgaactcgagcacaagcgtccaataaaaggtgatcatg

SEQ ID NO: 198699 - DNA, 55 bp, Artificial
  Synthetic oligonucleotide
gtttaacgctgctgagtgactggacgcaacagcacttcgttaaccgctacattgt

SEQ ID NO: 198700 - DNA, 55 bp, Artificial
  Synthetic oligonucleotide
gttgttttctccgaacaaaaccttcgtgtagttgtgtgcaaccggctgatagtcg

SEQ ID NO: 198701 - DNA, 55 bp, Artificial
  Synthetic oligonucleotide
gttgtgcttcactatccgtatttaaactccaacctagagtgccctcagcgttact

SEQ ID NO: 198702 - DNA, 55 bp, Artificial
  Synthetic oligonucleotide
gttgtgctgacgggaagtcaggtaccaattaacgtggtcctaagtgacgctcacg

SEQ ID NO: 198703 - DNA, 60 bp, Artificial
  Synthetic oligonucleotide
caaagatgttgcggagtcactcaagcaaggagaaccgttgtttgacgtcagcaaacttca

SEQ ID NO: 198704 - DNA, 55 bp, Artificial
  Synthetic oligonucleotide
gttggtcgacctacgaaaatgaaattcttagggttcatgattggagatgcccgta

SEQ ID NO: 198705 - DNA, 55 bp, Artificial
  Synthetic oligonucleotide
gttgggcccattatgaaagtggtgctcttgaaatgagtggtaaatctaattcccg

SEQ ID NO: 198706 - DNA, 55 bp, Artificial
  Synthetic oligonucleotide
gttgcgcgtatcgttcctcgcacctacattaatcagacttatgttagcaacctgg

SEQ ID NO: 198707 - DNA, 55 bp, Artificial
  Synthetic oligonucleotide
gttgcccatcagtcggcaaagcttgaccacgatttacaattactctagttttagc

SEQ ID NO: 198708 - DNA, 55 bp, Artificial
  Synthetic oligonucleotide
gttgccagcggaacgctacgagaaaatgaaagagttatcgaattcgagtattaga

SEQ ID NO: 198709 - DNA, 55 bp, Artificial
  Synthetic oligonucleotide
gtcagtgaagattatcattttgttcgtccacaaatgaacacgggtcacgtattga

SEQ ID NO: 198710 - DNA, 55 bp, Artificial
  Synthetic oligonucleotide
gtcagtagtcaccatcttaaacaaatcaagaatagcataattccgttaaaggggc

SEQ ID NO: 198711 - DNA, 55 bp, Artificial
  Synthetic oligonucleotide
gtcagcatcatacagcattcttaagtgatgagaagcggttgcaatactacagcct

SEQ ID NO: 198712 - DNA, 55 bp, Artificial
  Synthetic oligonucleotide
gtcagacagttgctcagttgacgattcccaaaattggtcttagtctgccggtttt

SEQ ID NO: 198713 - DNA, 55 bp, Artificial
  Synthetic oligonucleotide
gtcagaaataactggttgagctgtttcattggggtttagtaatgatgatccaacc

SEQ ID NO: 198714 - DNA, 58 bp, Artificial
  Synthetic oligonucleotide
caaagatgagaacacgcaattcttgatagacgaacctgaaatatacttacaccccaag

SEQ ID NO: 198715 - DNA, 55 bp, Artificial
  Synthetic oligonucleotide
acagagtaacgccgattctcagttggatgaacaatgccactgtgttccggtgtcg

SEQ ID NO: 198716 - DNA, 55 bp, Artificial
  Synthetic oligonucleotide
gtcacaactgaaagcgtgcgaaagaagataaagcgtgctttgggtgttaaggcag

SEQ ID NO: 198717 - DNA, 55 bp, Artificial
  Synthetic oligonucleotide
acagatgaatcaaggaagaattattgtgattacaggctcaccggggacaggaaaa

SEQ ID NO: 198718 - DNA, 55 bp, Artificial
  Synthetic oligonucleotide
gtcaatggcatcagtgttgttcatctgtccgccatatggtccacgatctagcact

SEQ ID NO: 198719 - DNA, 55 bp, Artificial
  Synthetic oligonucleotide
acagattgggaacgttggtactatggcacaggtaaggataatcggttgaaacaag

SEQ ID NO: 198720 - DNA, 55 bp, Artificial
  Synthetic oligonucleotide
gtcaacaagttaaacaagtcatctcccgaggttaccgtatacgtactaccagatg

SEQ ID NO: 198721 - DNA, 55 bp, Artificial
  Synthetic oligonucleotide
gtcaacaacataactgtaccaatcggcaagaccgatcgcgttctcagatcagcga

SEQ ID NO: 198722 - DNA, 55 bp, Artificial
  Synthetic oligonucleotide
gtcaaagcccgaaagccggtatagtaccgttcatggtcatggtcgaatactttgg

SEQ ID NO: 198723 - DNA, 55 bp, Artificial
  Synthetic oligonucleotide
gtatgaaggcataatcatacaacctttggaggaccagaattgttccagcttaaag

SEQ ID NO: 198724 - DNA, 55 bp, Artificial
  Synthetic oligonucleotide
gtatcgagcagttggcgccaagttgtgttatacagcggcaattgtccatgggcac

SEQ ID NO: 198725 - DNA, 59 bp, Artificial
  Synthetic oligonucleotide
ctgatcggggcatgctagccgcttatcaacctaacgaactcgaattcatttctaaagcg

SEQ ID NO: 198726 - DNA, 59 bp, Artificial
  Synthetic oligonucleotide
caaagactcagctccttattggccaggttgaccaggagaagacaacactgaaggccgaa

SEQ ID NO: 198727 - DNA, 55 bp, Artificial
  Synthetic oligonucleotide
gtatcactcgtgaaacgattaatcgccaccactacgggaacaccatactgctgca

SEQ ID NO: 198728 - DNA, 55 bp, Artificial
  Synthetic oligonucleotide
gtatatgggtccactttccttaccgcctttactgctgccactttaaggccaaata

SEQ ID NO: 198729 - DNA, 52 bp, Artificial
  Synthetic oligonucleotide
gtagttaaagcacgttgtaaaggactagcataaaaggccctaaacttagttc

SEQ ID NO: 198730 - DNA, 51 bp, Artificial
  Synthetic oligonucleotide
acagctgaccgggacgaatggttaccgaaccgtaaaacaagacgtttatgg

SEQ ID NO: 198731 - DNA, 55 bp, Artificial
  Synthetic oligonucleotide
gtagtccgcccatacctttctcattcggctttacgattggtcgaagtacgtattc

SEQ ID NO: 198732 - DNA, 55 bp, Artificial
  Synthetic oligonucleotide
gtaggtcatagtaatgctacacgtgctcaaatgaaaggctcacttgctagtcacg

SEQ ID NO: 198733 - DNA, 55 bp, Artificial
  Synthetic oligonucleotide
gtagctttaaaggggatcacaattaaccgtcgccagattccttcatcattaccac

SEQ ID NO: 198734 - DNA, 55 bp, Artificial
  Synthetic oligonucleotide
gtagatacactgttggtatatacagggctctccaccaaggagcaggttcgttcag

SEQ ID NO: 198735 - DNA, 55 bp, Artificial
  Synthetic oligonucleotide
gtagagaagctcttcttgaaggcgcaattagtgcgcgtgatatgacatctgagag

SEQ ID NO: 198736 - DNA, 55 bp, Artificial
  Synthetic oligonucleotide
gtactgagatccttgtacttggaaatagatagctctctgaatatttgaagctctc

SEQ ID NO: 198737 - DNA, 58 bp, Artificial
  Synthetic oligonucleotide
catggttattaactacaattcctacacgtccaaggaatcacgggcgatttcgagatgc

SEQ ID NO: 198738 - DNA, 53 bp, Artificial
  Synthetic oligonucleotide
gtacggagtgtttgccttttccacccgttggtagactggtgttctctagtacc

SEQ ID NO: 198739 - DNA, 55 bp, Artificial
  Synthetic oligonucleotide
acagtgcagtgggtaacggcaggctatttgttaatggctgcgttagtcatgttaa

SEQ ID NO: 198740 - DNA, 55 bp, Artificial
  Synthetic oligonucleotide
gtaattcgctcatcttagcatcatgcaaggattctggtatgcctaaagattgtag

SEQ ID NO: 198741 - DNA, 54 bp, Artificial
  Synthetic oligonucleotide
gtaatcaatgaatttaaaggctgtaaggcaaatttaaggttcgggctacccgca

SEQ ID NO: 198742 - DNA, 55 bp, Artificial
  Synthetic oligonucleotide
gtgctgccaaagaattacgcatcaccagatctggataaggttcgtcttggtggag

SEQ ID NO: 198743 - DNA, 55 bp, Artificial
  Synthetic oligonucleotide
gtgctacttatgacatcgattacctatagtccagaattaattggttccgggtaga

SEQ ID NO: 198744 - DNA, 55 bp, Artificial
  Synthetic oligonucleotide
gtgcctttggcgttgtcttgccacttactaccgtcttatccggcgtctttggatc

SEQ ID NO: 198745 - DNA, 55 bp, Artificial
  Synthetic oligonucleotide
gtgcctcgcttaatgtatctggaccattcataagtgcatctccaagaactgagct

SEQ ID NO: 198746 - DNA, 55 bp, Artificial
  Synthetic oligonucleotide
gtgatggtttgtatttgttaccacctaaagcccaagcaattgcatctaggatcga

SEQ ID NO: 198747 - DNA, 55 bp, Artificial
  Synthetic oligonucleotide
gtgaggtaaccgaggttctcgagcacatcgatgatttgaatcgttgggctcacga

SEQ ID NO: 198748 - DNA, 60 bp, Artificial
  Synthetic oligonucleotide
catggatggctacagccgcggtcttggttcacgtaacttgccaggtggtatggacgctga

SEQ ID NO: 198749 - DNA, 55 bp, Artificial
  Synthetic oligonucleotide
gtgagcgtcaattaagtcttcaacttgaacgtagtcgcggacattagtaccgtct

SEQ ID NO: 198750 - DNA, 55 bp, Artificial
  Synthetic oligonucleotide
gtgactaagaatgatcaaaggggtgagttgttaccagtatcagcacagcacgtgc

SEQ ID NO: 198751 - DNA, 55 bp, Artificial
  Synthetic oligonucleotide
gtgaacagccatgagtcacgtatcatcaggcaattaacaatcccgattgcgatgg

SEQ ID NO: 198752 - DNA, 55 bp, Artificial
  Synthetic oligonucleotide
gtcttgtgctccttcaccccatcttgcgtgagttccttctggtaagtcacctaag

SEQ ID NO: 198753 - DNA, 55 bp, Artificial
  Synthetic oligonucleotide
gtcttagcgtccattttgcttactgtatcaatctctaattcaggagcgtgagacg

SEQ ID NO: 198754 - DNA, 55 bp, Artificial
  Synthetic oligonucleotide
gtctgaatgcatttcacgtctaagagagggcttgggaggtgtgaaagtccgtctg

SEQ ID NO: 198755 - DNA, 55 bp, Artificial
  Synthetic oligonucleotide
gtcgtgtggaatcttgtgagcgttgaagaacattgctaaagctaaggttccaaaa

SEQ ID NO: 198756 - DNA, 55 bp, Artificial
  Synthetic oligonucleotide
gtcgtggactgcgatactcttcctctaaatcccgtaactcatcagctaaaacgtg

SEQ ID NO: 198757 - DNA, 55 bp, Artificial
  Synthetic oligonucleotide
acaatttgctataggcaaggatggaatgaaactgtatcaaacgtggttctgtcac

SEQ ID NO: 198758 - DNA, 55 bp, Artificial
  Synthetic oligonucleotide
gtcgtcgatttaaggcgagatccagatagctagcatgtgcttacgtcacgtagtg

SEQ ID NO: 198759 - DNA, 55 bp, Artificial
  Synthetic oligonucleotide
catcaactgcgctaaccacttataaaaagcctactctaccttaactccccataaa

SEQ ID NO: 198760 - DNA, 55 bp, Artificial
  Synthetic oligonucleotide
gtcgtagtgatgtggcgacgacaaccttgatgcaaattctagccggtgaattaga

SEQ ID NO: 198761 - DNA, 55 bp, Artificial
  Synthetic oligonucleotide
gtcggtcgaagtactagcaccgtaaagactcccataagctgccttaggaacagtt

SEQ ID NO: 198762 - DNA, 55 bp, Artificial
  Synthetic oligonucleotide
gtcgcttgatacttttattggcatccaagcaatgagttacaatgaccgctacttc

SEQ ID NO: 198763 - DNA, 55 bp, Artificial
  Synthetic oligonucleotide
gtcgctgccttagatgggtatcataagtttgtgcgcaccggtattccgtgtgccc

SEQ ID NO: 198764 - DNA, 55 bp, Artificial
  Synthetic oligonucleotide
gtcgcaatattataaccgcatcaaacctgattcattgcttgagtttgctgatgcg

SEQ ID NO: 198765 - DNA, 55 bp, Artificial
  Synthetic oligonucleotide
gtcgaaacactaccattttctgttcaggagtacctttagcttgtgcgggatcagg

SEQ ID NO: 198766 - DNA, 55 bp, Artificial
  Synthetic oligonucleotide
gtccttgacgcaagtgaacgtagcttccaatacaatgatttacttcataaaggtg

SEQ ID NO: 198767 - DNA, 55 bp, Artificial
  Synthetic oligonucleotide
gtccgtcacctgaagacatatgccggaattatgatcacggctagtcataacccga

SEQ ID NO: 198768 - DNA, 51 bp, Artificial
  Synthetic oligonucleotide
gtccctcccaaacaccgaatcagagggtatttagaaaggaccgttattagt

SEQ ID NO: 198769 - DNA, 55 bp, Artificial
  Synthetic oligonucleotide
gtcccaggccttgattttgctcgtttcaggtgtcttgattattactggccggatg

SEQ ID NO: 198770 - DNA, 54 bp, Artificial
  Synthetic oligonucleotide
catcaacggactttcgcgaaggtctattttttagactttcgctcgtagcaaggg

SEQ ID NO: 198771 - DNA, 55 bp, Artificial
  Synthetic oligonucleotide
gtcccacgctcagaggaacgatatggatgggcataataaaggtcagcgacaccgg

SEQ ID NO: 198772 - DNA, 55 bp, Artificial
  Synthetic oligonucleotide
acacgggtccactggtgcctcatttgaaacaatcgtggcgagtggccctcgagct

SEQ ID NO: 198773 - DNA, 55 bp, Artificial
  Synthetic oligonucleotide
gtccaaccaccagctgaaattgtgtcccaaactgagttccatgtagttcccgggt

SEQ ID NO: 198774 - DNA, 55 bp, Artificial
  Synthetic oligonucleotide
cgaaaacttgttataggaggtctgctagacatggaaagcgcattgaatgggagaa

SEQ ID NO: 198775 - DNA, 55 bp, Artificial
  Synthetic oligonucleotide
ccttgtgcggattcgacaagtgtagtgcggatggtcgaattaccttgcttagtaa

SEQ ID NO: 198776 - DNA, 55 bp, Artificial
  Synthetic oligonucleotide
ccttgtaattagctctgtatcttacgccatagtgccataaaagcttcctcagcac

SEQ ID NO: 198777 - DNA, 53 bp, Artificial
  Synthetic oligonucleotide
ccttgccggagttaacaacgttggttcgctcaaaattgcggagtttggacacc

SEQ ID NO: 198778 - DNA, 55 bp, Artificial
  Synthetic oligonucleotide
ccttgccccattcttcatatccgtgcaagattacttcagtatcggcatgtgtctt

SEQ ID NO: 198779 - DNA, 55 bp, Artificial
  Synthetic oligonucleotide
ccttgatcccaagtaggtgtaattcgatgagaattatcggttacaaaagcacctg

SEQ ID NO: 198780 - DNA, 55 bp, Artificial
  Synthetic oligonucleotide
ccttgacgagcaagtcggctatcggtcaaactcttcggatgacgacaacgtagcg

SEQ ID NO: 198781 - DNA, 60 bp, Artificial
  Synthetic oligonucleotide
catatttaagttacgagccatggtattcatagcagatcttactctccatgcaccagttcc

SEQ ID NO: 198782 - DNA, 55 bp, Artificial
  Synthetic oligonucleotide
ccttgaaccatcgcactcacagatggggtgagataatccggcgacatcgtagcca

SEQ ID NO: 198783 - DNA, 55 bp, Artificial
  Synthetic oligonucleotide
ccttcttaagttcaccgaagtaacgaagtccaaatacggcagcacaattatgtgg

SEQ ID NO: 198784 - DNA, 55 bp, Artificial
  Synthetic oligonucleotide
ccttcgcgtgcttcttaccgtattcgttcatgaatatttgataagacttacgcgt

SEQ ID NO: 198785 - DNA, 55 bp, Artificial
  Synthetic oligonucleotide
ccttcaaaccgaatagctggatacccgctcttataagcgaacattttctgcagta

SEQ ID NO: 198786 - DNA, 55 bp, Artificial
  Synthetic oligonucleotide
ccttactggggtgcccctgccatttgtttcacagggtgggtcagccttgatcggg

SEQ ID NO: 198787 - DNA, 55 bp, Artificial
  Synthetic oligonucleotide
cctgtatatcgcgaattgatggatattagtcgatactacgatcagcaaacggagg

SEQ ID NO: 198788 - DNA, 55 bp, Artificial
  Synthetic oligonucleotide
cctggttttgccgatgaaaagatctatttataccatgcaagtggtttgagccctg

SEQ ID NO: 198789 - DNA, 55 bp, Artificial
  Synthetic oligonucleotide
cctgctataatgccctagtttatcattctgcaaatgcatggcgtagtgctgtagg

SEQ ID NO: 198790 - DNA, 55 bp, Artificial
  Synthetic oligonucleotide
cctgcagttcgacgaccagcaaattcctttccaatgtactctctcgcctcgcgca

SEQ ID NO: 198791 - DNA, 53 bp, Artificial
  Synthetic oligonucleotide
cctgacaaggttaccacgtaaggcgctttatctgaacccttcgtattacgttg

SEQ ID NO: 198792 - DNA, 55 bp, Artificial
  Synthetic oligonucleotide
cataggcgccaaaataaggtaattaagacaggaaaattgaccgaaccacctatga

SEQ ID NO: 198793 - DNA, 55 bp, Artificial
  Synthetic oligonucleotide
cctgaaaagcacattgatgagcgccgttactacatgattatgtataaagtaggga

SEQ ID NO: 198794 - DNA, 55 bp, Artificial
  Synthetic oligonucleotide
cctctaccagccatacaacccgtcagttctccgcctcatcaagcacacgatcgac

SEQ ID NO: 198795 - DNA, 55 bp, Artificial
  Synthetic oligonucleotide
cctccggtctagcttagtcatacggcctgctggttaggttatttgccactctcta

SEQ ID NO: 198796 - DNA, 55 bp, Artificial
  Synthetic oligonucleotide
cctattggccaggtgagagtctacaacgctgaggcgctgaaagaatgcaagacgg

SEQ ID NO: 198797 - DNA, 52 bp, Artificial
  Synthetic oligonucleotide
cctatacgagtttgtgaaccccggtttatgaaattgggcgataaagaagccc

SEQ ID NO: 198798 - DNA, 55 bp, Artificial
  Synthetic oligonucleotide
cctagaattccaacgctaaaggaactagtcaaactagccataattgcgccaaccc

SEQ ID NO: 198799 - DNA, 55 bp, Artificial
  Synthetic oligonucleotide
cctacgattaatccaatcgtgagtgaatgtcgacacaaccttcgtcggatcattc

SEQ ID NO: 198800 - DNA, 55 bp, Artificial
  Synthetic oligonucleotide
cctacaccttgaccgattgttgaacctagttgcaaggagggtccttctggcccta

SEQ ID NO: 198801 - DNA, 55 bp, Artificial
  Synthetic oligonucleotide
cctacacacttattcagtcccttttagcgacgataagtacgtatggggtcgagat

SEQ ID NO: 198802 - DNA, 55 bp, Artificial
  Synthetic oligonucleotide
cctaattgaggcgcccacgacgctacgtctactcacctcatcaacgactgccgtc

SEQ ID NO: 198803 - DNA, 57 bp, Artificial
  Synthetic oligonucleotide
catacggttgtcagagacgcagagtatcaaaaactaaaagcccatttagttttatca

SEQ ID NO: 198804 - DNA, 55 bp, Artificial
  Synthetic oligonucleotide
cgatcatgttttctatgctgatccgtattccccttgggaacgtggatccaatgag

SEQ ID NO: 198805 - DNA, 55 bp, Artificial
  Synthetic oligonucleotide
cgatcagataatcttgcttgtaacggcgtggatagatctggtacaagagtaagtt

SEQ ID NO: 198806 - DNA, 55 bp, Artificial
  Synthetic oligonucleotide
cgataatgactgaaccagcagttggagtaagctgtcctactaacaagcgtaagag

SEQ ID NO: 198807 - DNA, 55 bp, Artificial
  Synthetic oligonucleotide
aggcataagcctcgaacagctcttcaaggagattaggcagaaagtcgttggatgg

SEQ ID NO: 198808 - DNA, 55 bp, Artificial
  Synthetic oligonucleotide
cgagttcgcaaactaatagcgagtctagtgccaaatctgatagtacatctaaggc

SEQ ID NO: 198809 - DNA, 55 bp, Artificial
  Synthetic oligonucleotide
cgagtgttgcgggtcgtgatacggtgagtgggacggatctcagtccagacgtaca

SEQ ID NO: 198810 - DNA, 55 bp, Artificial
  Synthetic oligonucleotide
cgagtgcttcaaagcaaagtgattatgcttacatgagacccctaattcccagctc

SEQ ID NO: 198811 - DNA, 55 bp, Artificial
  Synthetic oligonucleotide
cgagtcgctcaataaggtcggctggaataaagcgtaagataccaactgtaattag

SEQ ID NO: 198812 - DNA, 55 bp, Artificial
  Synthetic oligonucleotide
cgagccatggtattcatagcagatcttactctccatgcaccagttccaaacgata

SEQ ID NO: 198813 - DNA, 55 bp, Artificial
  Synthetic oligonucleotide
cgagacgatacaggagcccctaaaacggcactttatggtggggtgacacgggctc

SEQ ID NO: 198814 - DNA, 53 bp, Artificial
  Synthetic oligonucleotide
cataacggcgtttcaacttaaagttatcccgcaccttaatgttcttccgcgac

SEQ ID NO: 198815 - DNA, 48 bp, Artificial
  Synthetic oligonucleotide
cgagaagggagccaccgttaccgggaccgccaattttacggttcccgt

SEQ ID NO: 198816 - DNA, 55 bp, Artificial
  Synthetic oligonucleotide
cgactttcgataactttagtatccatgacaatttcgcgtgttaaccctggagtat

SEQ ID NO: 198817 - DNA, 55 bp, Artificial
  Synthetic oligonucleotide
cgactttaattaccaatcacttacgattaacctggtcaccagaaaccattgcggc

SEQ ID NO: 198818 - DNA, 55 bp, Artificial
  Synthetic oligonucleotide
cgacttgaccatttgtctacaaggcagctgcgctggggcattggccttggcttac

SEQ ID NO: 198819 - DNA, 54 bp, Artificial
  Synthetic oligonucleotide
cgacttacgtcgtcttccgtatcggctcggagtagacaagccctccattccggg

SEQ ID NO: 198820 - DNA, 55 bp, Artificial
  Synthetic oligonucleotide
cgactggaacgtttaagtccagaaacgttattcacgccgtttgatcaagcaacgc

SEQ ID NO: 198821 - DNA, 55 bp, Artificial
  Synthetic oligonucleotide
cgacgtttgttgaacctaggttacatgaaatatcagtccctaattggtcatactg

SEQ ID NO: 198822 - DNA, 55 bp, Artificial
  Synthetic oligonucleotide
cgacgggacgttatcctagatgttaaggatggcattgtgcaacccgatcccaaca

SEQ ID NO: 198823 - DNA, 55 bp, Artificial
  Synthetic oligonucleotide
cgaccttagaacgaataaataagcctctcagacggtgtcaggagtctgaatggag

SEQ ID NO: 198824 - DNA, 55 bp, Artificial
  Synthetic oligonucleotide
cgacctactgttcaccacttagtctacgcagatggttatagttttccttctggtc

SEQ ID NO: 198825 - DNA, 60 bp, Artificial
  Synthetic oligonucleotide
cagtgaaccattgaagtgcacacgatgtaacacaaaaatgagtccgcactcaccgacaac

SEQ ID NO: 198826 - DNA, 55 bp, Artificial
  Synthetic oligonucleotide
aggctcccttagtaattaatgccgtaacagtcaagaaactccgatcacgaggact

SEQ ID NO: 198827 - DNA, 55 bp, Artificial
  Synthetic oligonucleotide
cgaattctggttaagagattggtaaaattggaatagccaaaagctgttcgttcga

SEQ ID NO: 198828 - DNA, 55 bp, Artificial
  Synthetic oligonucleotide
cgaaggcacgcacagcagctttgcctttattagcggctaaacgttcatcttcctg

SEQ ID NO: 198829 - DNA, 55 bp, Artificial
  Synthetic oligonucleotide
cgaaggaatcccgtttccataagcggtatgtgttggttgaccgttttgactctga

SEQ ID NO: 198830 - DNA, 55 bp, Artificial
  Synthetic oligonucleotide
agggaacactgcgggcgcctagaatgtggccccggtcgaactgatcctttggccg

SEQ ID NO: 198831 - DNA, 55 bp, Artificial
  Synthetic oligonucleotide
cgaactagtcactcagctaatgcatcgtcgcaacaatatcccacgaaaatctctt

SEQ ID NO: 198832 - DNA, 55 bp, Artificial
  Synthetic oligonucleotide
cgaacgctgctgatttctaaagcccagtacgttgagacattgcgaatgttgagcg

SEQ ID NO: 198833 - DNA, 55 bp, Artificial
  Synthetic oligonucleotide
cgaaccgcatccctttatcatgggtccgtttgctaatatccgctaagcctcctgg

SEQ ID NO: 198834 - DNA, 55 bp, Artificial
  Synthetic oligonucleotide
cgaaatgggatcacgccctgaaaggtaagttcacgagtgatacgacgatcaaggc

SEQ ID NO: 198835 - DNA, 55 bp, Artificial
  Synthetic oligonucleotide
ccggatcgtatttgcgttaatccgttccatttccatgattgctgcacctcacttt

SEQ ID NO: 198836 - DNA, 57 bp, Artificial
  Synthetic oligonucleotide
ctgaggaaaaacgaatcgaggcattccgatgacaacacctaaacgatacgaactgga

SEQ ID NO: 198837 - DNA, 57 bp, Artificial
  Synthetic oligonucleotide
cagtcgatcggataccatcgaccgatcaaaataaacgagataaagcgaaaaatatta

SEQ ID NO: 198838 - DNA, 55 bp, Artificial
  Synthetic oligonucleotide
ccggaatacattgccagcgtggttagcatggactctaaaggcttctttagctgtc

SEQ ID NO: 198839 - DNA, 55 bp, Artificial
  Synthetic oligonucleotide
ccggaacaatggtatttaggccaaagatacgggtatgccgatcactggtattccg

SEQ ID NO: 198840 - DNA, 53 bp, Artificial
  Synthetic oligonucleotide
ccggaaaaggtagctgcgttgtacgttacacaggcatttgttggtttaaccta

SEQ ID NO: 198841 - DNA, 55 bp, Artificial
  Synthetic oligonucleotide
ccgctttgatgtactacaatccgagtttaaaggcttgtcagctggaaacgattaa

SEQ ID NO: 198842 - DNA, 55 bp, Artificial
  Synthetic oligonucleotide
ccgctggcttagttgtataccgtaacgcaaaagggctaattcagaaagaacgatc

SEQ ID NO: 198843 - DNA, 55 bp, Artificial
  Synthetic oligonucleotide
ccgctgacatagttttgggacctaagttgaatctgtcatgcgcatctcccgtttg

SEQ ID NO: 198844 - DNA, 55 bp, Artificial
  Synthetic oligonucleotide
ccgctgacaagttgcgtgtaagcgcacgattgtgcggcacattaaaacagcttcg

SEQ ID NO: 198845 - DNA, 55 bp, Artificial
  Synthetic oligonucleotide
ccgctactcattgtccaataactggattgacgagaaaggcgacgtttacgtctac

SEQ ID NO: 198846 - DNA, 55 bp, Artificial
  Synthetic oligonucleotide
ccgcgttggaattctacattgttgtcgtgtactggattaggaatatctgcataag

SEQ ID NO: 198847 - DNA, 55 bp, Artificial
  Synthetic oligonucleotide
ccgcggccgcttacgctcttttaaacgcgtgcacaggcgcagaaacctgcacata

SEQ ID NO: 198848 - DNA, 57 bp, Artificial
  Synthetic oligonucleotide
caggtctgcgcactccgcaaagttggtttaaatataatcagactttacgaaaatctc

SEQ ID NO: 198849 - DNA, 55 bp, Artificial
  Synthetic oligonucleotide
ccgcgcgctagctggttgggtcgccaagtattccttaacttccgctaattgacgt

SEQ ID NO: 198850 - DNA, 55 bp, Artificial
  Synthetic oligonucleotide
ccgcgaagcattaataaactttgtgccaagtaaaagagcgcaccaacgattgcga

SEQ ID NO: 198851 - DNA, 55 bp, Artificial
  Synthetic oligonucleotide
ccgcgaaccacacattgagctttacaatgggccaaagtagctgtaaacgcaaggc

SEQ ID NO: 198852 - DNA, 55 bp, Artificial
  Synthetic oligonucleotide
ccgccttaactagcggttaatccaaaatgtgtaattggccaactcagctcgtggc

SEQ ID NO: 198853 - DNA, 55 bp, Artificial
  Synthetic oligonucleotide
ccgcctgtgtccatatcgagccactcatcacttggtgtcagatgctgacgaaccc

SEQ ID NO: 198854 - DNA, 51 bp, Artificial
  Synthetic oligonucleotide
ccgcccgtctttgctaaagggtaatcaaggcgggaaagccctaaaatggct

SEQ ID NO: 198855 - DNA, 55 bp, Artificial
  Synthetic oligonucleotide
ccgccacgtcaacggttagtcaaagcacagcgagtcaagccagtgccagctcagt

SEQ ID NO: 198856 - DNA, 55 bp, Artificial
  Synthetic oligonucleotide
ccgcatcagtcgagtgtgttgcataaaggtaccgactagttggttgttccattgc

SEQ ID NO: 198857 - DNA, 55 bp, Artificial
  Synthetic oligonucleotide
ccgcaaatggctgggatggcaatagtgccgtcggtactaggggcagttatcttgg

SEQ ID NO: 198858 - DNA, 55 bp, Artificial
  Synthetic oligonucleotide
ccgattggatgtgcacccatactactggatctacgaacagtcgacaacgaaccac

SEQ ID NO: 198859 - DNA, 59 bp, Artificial
  Synthetic oligonucleotide
cagctcactcgctacttgtgaaacgagacttcttttaatttgtgaattgcccactagag

SEQ ID NO: 198860 - DNA, 55 bp, Artificial
  Synthetic oligonucleotide
ccgattggaagtgggtgtccaagccgtaagtctgaagtcgagtcaaatgcttgac

SEQ ID NO: 198861 - DNA, 55 bp, Artificial
  Synthetic oligonucleotide
ccgattctgtcccccagacctctttcaacagatagcggtgtgtcaacacgcggga

SEQ ID NO: 198862 - DNA, 55 bp, Artificial
  Synthetic oligonucleotide
ccgattagcgttaagcgggcctcttatccggaactgtaagcgctaaagaccgcac

SEQ ID NO: 198863 - DNA, 55 bp, Artificial
  Synthetic oligonucleotide
ccgattaaacttggtacgccggtgtaaatgaacagcgctagcaccagcaacggta

SEQ ID NO: 198864 - DNA, 55 bp, Artificial
  Synthetic oligonucleotide
ccgatcgaaacgacagtagccaatggcaaatggagtgtgaatgtcccaaccggca

SEQ ID NO: 198865 - DNA, 55 bp, Artificial
  Synthetic oligonucleotide
ccgatcaaactataagacgtgggagttggcgaataactaccgaatcggaacattg

SEQ ID NO: 198866 - DNA, 55 bp, Artificial
  Synthetic oligonucleotide
ccgatattatgtaggaactgataatccggaggacgccatcaaaatatggtctgct

SEQ ID NO: 198867 - DNA, 53 bp, Artificial
  Synthetic oligonucleotide
cctaattccgagcaacgtgaccgtttaatgcaaaccttcggttgcgctcgttt

SEQ ID NO: 198868 - DNA, 55 bp, Artificial
  Synthetic oligonucleotide
cctaatcgcaatatcaccatcgtcagcaatttatcgcgtaataatatgcgggctc

SEQ ID NO: 198869 - DNA, 55 bp, Artificial
  Synthetic oligonucleotide
cctaaagcacatgagcagatcaagtcagcgcatgctcatcatatgttcgttcatg

SEQ ID NO: 198870 - DNA, 59 bp, Artificial
  Synthetic oligonucleotide
cagacggattcttggcggaattctggaagttgtctttcaatgttgattatacgcaatta

SEQ ID NO: 198871 - DNA, 55 bp, Artificial
  Synthetic oligonucleotide
cctaaaagccgttcgctcacttgaaatcggcacagcccaccttgaattagacggt

SEQ ID NO: 198872 - DNA, 55 bp, Artificial
  Synthetic oligonucleotide
ccgtgtgcaaacagcaatctctaataacttcaaacgctctattggtactaacgag

SEQ ID NO: 198873 - DNA, 55 bp, Artificial
  Synthetic oligonucleotide
ccgtggtaagtgggcctactggtacatgattattatggataccatcttatcgact

SEQ ID NO: 198874 - DNA, 54 bp, Artificial
  Synthetic oligonucleotide
ccgtggaaaccgattaagtcgtcaaaagcggaatggtcccgcttgacttgccag

SEQ ID NO: 198875 - DNA, 55 bp, Artificial
  Synthetic oligonucleotide
ccgtgctgcatgtcatatctaaacagcgagcaattgtattcatcgctgatcttac

SEQ ID NO: 198876 - DNA, 55 bp, Artificial
  Synthetic oligonucleotide
ccgtgatcacataggctataagacgattgcaatccacaaagatgcctggattagc

SEQ ID NO: 198877 - DNA, 55 bp, Artificial
  Synthetic oligonucleotide
ccgtctgccccgggcgagtttgtaggatcgggactgaacatgggccaacttgaat

SEQ ID NO: 198878 - DNA, 55 bp, Artificial
  Synthetic oligonucleotide
ccgtatttgattcgtcgctaatccgaatattgcttgaatgggcactaacttgtgg

SEQ ID NO: 198879 - DNA, 55 bp, Artificial
  Synthetic oligonucleotide
ccgtagggcttggagttagaactattgggcggtatgagcaaggctctagttttcc

SEQ ID NO: 198880 - DNA, 55 bp, Artificial
  Synthetic oligonucleotide
ccgtagatgtgggctccgcaagtccaaaggaatcccactttggtcggtcctttca

SEQ ID NO: 198881 - DNA, 60 bp, Artificial
  Synthetic oligonucleotide
cagacaagtcactatagagttgtgtacgctgcatcaccaaaaagtgttcgtttatgacca

SEQ ID NO: 198882 - DNA, 55 bp, Artificial
  Synthetic oligonucleotide
ccgtaccattcagccacgacgctactttgtggccaccaggatcaatcaggctgcc

SEQ ID NO: 198883 - DNA, 55 bp, Artificial
  Synthetic oligonucleotide
ccgtaacaaacgagattgctaataccaagataactgcccctagtaccgacggcac

SEQ ID NO: 198884 - DNA, 55 bp, Artificial
  Synthetic oligonucleotide
ccgtaaagttaggatcggtagtatcgacgtggctccgtacgtattggattccatg

SEQ ID NO: 198885 - DNA, 55 bp, Artificial
  Synthetic oligonucleotide
ccggtgaagtaacagctcattaacagtcacattaatcggcaattctagtgcggcc

SEQ ID NO: 198886 - DNA, 55 bp, Artificial
  Synthetic oligonucleotide
ccggtcaaagttgctgccgctaaataagacattaatccccgaatgcgccataacg

SEQ ID NO: 198887 - DNA, 51 bp, Artificial
  Synthetic oligonucleotide
ccggtagcaataattcgaccaccgttcttccggacttcgtttaaagtagcg

SEQ ID NO: 198888 - DNA, 55 bp, Artificial
  Synthetic oligonucleotide
ccgggtaagaaaccattaagcgcagatcggtgtagattggtgaaagcatcccact

SEQ ID NO: 198889 - DNA, 51 bp, Artificial
  Synthetic oligonucleotide
ccgggaaacttagcgttaaggtaatccgttttgggcttaagcggtacatga

SEQ ID NO: 198890 - DNA, 55 bp, Artificial
  Synthetic oligonucleotide
ccggcttatcggcgacgcaactgcagaccatttacttggcccatgtgggagctaa

SEQ ID NO: 198891 - DNA, 55 bp, Artificial
  Synthetic oligonucleotide
ccggctacaaacgctatgactggttcggattgaatgcgtcaatcttcactacggt

SEQ ID NO: 198892 - DNA, 54 bp, Artificial
  Synthetic oligonucleotide
cagacaaaacctacttgataaacagacaaaacctacttgataaacagacaaaac

SEQ ID NO: 198893 - DNA, 55 bp, Artificial
  Synthetic oligonucleotide
ccggcgtgacagtgaagatgttgggcattcgtgtcatcacggtgcttgcgagcgt

SEQ ID NO: 198894 - DNA, 55 bp, Artificial
  Synthetic oligonucleotide
ccggcgtcagaccaccggctagaatcagtggtcgcgtgatgtgtggaatagccgc

SEQ ID NO: 198895 - DNA, 54 bp, Artificial
  Synthetic oligonucleotide
ccggatttgacgtagcaacgatcggaaccgggaataaaatcgtccaacagttgc

SEQ ID NO: 198896 - DNA, 54 bp, Artificial
  Synthetic oligonucleotide
ccggattgaaggcgcaacgtcaaccaacaaacgctacgtcaaagtagtgaactt

SEQ ID NO: 198897 - DNA, 55 bp, Artificial
  Synthetic oligonucleotide
cggtcttccaatttattaaagcgtgtctttgcggcatgcaatccaatctgagttg

SEQ ID NO: 198898 - DNA, 55 bp, Artificial
  Synthetic oligonucleotide
cggtcaatagagcatggaagatcgcagcttggtagagcttacgtgggatcaaagg

SEQ ID NO: 198899 - DNA, 55 bp, Artificial
  Synthetic oligonucleotide
cggtagctgtcaccaccaaaggccttagcgatttcagtatagtgagcattgtggc

SEQ ID NO: 198900 - DNA, 55 bp, Artificial
  Synthetic oligonucleotide
cggtactaatgtccgtgactacgttcaagttgaagacttaattgacgcccatatc

SEQ ID NO: 198901 - DNA, 55 bp, Artificial
  Synthetic oligonucleotide
cgggttacctccgtgccactaatggcgatgactttgttgcgttaaccgccgataa

SEQ ID NO: 198902 - DNA, 55 bp, Artificial
  Synthetic oligonucleotide
cgggttaaagacttctactacatcttaggcagctatacccatggttctaacagcc

SEQ ID NO: 198903 - DNA, 57 bp, Artificial
  Synthetic oligonucleotide
cagaaggccataagaaacgcgttatggcggcgattaaacaaggtgagtcattgaagg

SEQ ID NO: 198904 - DNA, 55 bp, Artificial
  Synthetic oligonucleotide
cgggtggcaaatcgtgatcggactcgtcctggggattgtgtgtggggcctttacc

SEQ ID NO: 198905 - DNA, 55 bp, Artificial
  Synthetic oligonucleotide
cgggtgcgacgaaaatgctcgcgttcattggtatctcggtcattgtgatggcgag

SEQ ID NO: 198906 - DNA, 55 bp, Artificial
  Synthetic oligonucleotide
cggggtcattgctatccaactggatgattctgagggaccatatctaaaggtactg

SEQ ID NO: 198907 - DNA, 55 bp, Artificial
  Synthetic oligonucleotide
cggggtcaagcggcatattaccttaaaggggtgccacactctgcacgaaccaagg

SEQ ID NO: 198908 - DNA, 55 bp, Artificial
  Synthetic oligonucleotide
cggggcagaaggggcaacgtgccaaatttcgtcagcgtacttttgaatcgtataa

SEQ ID NO: 198909 - DNA, 55 bp, Artificial
  Synthetic oligonucleotide
cgggctgaactgctttaatcaagccaagcgtcttacagacgttcagtctatgttg

SEQ ID NO: 198910 - DNA, 55 bp, Artificial
  Synthetic oligonucleotide
cgggatttacttccgtatgatagatttggccgtttggattgccattagtgtcctc

SEQ ID NO: 198911 - DNA, 55 bp, Artificial
  Synthetic oligonucleotide
agcgtcactaactcgccatctgccgccgtagtactgtatagaacctgaaccgtca

SEQ ID NO: 198912 - DNA, 54 bp, Artificial
  Synthetic oligonucleotide
cggcttgatgaaatcaaaccacgggataccaagaaaattgctagtaaacccacc

SEQ ID NO: 198913 - DNA, 55 bp, Artificial
  Synthetic oligonucleotide
cggctgtgttaatgtctacgcacgtactaggaacggcccaagagtactgtgatcg

SEQ ID NO: 198914 - DNA, 58 bp, Artificial
  Synthetic oligonucleotide
cactcctttttaggcaacgaacgaagtgaggcgcaaggagcatagcgactggagttta

SEQ ID NO: 198915 - DNA, 53 bp, Artificial
  Synthetic oligonucleotide
cggctggtcgtaatggatttaagaaactggtaggactaaatgggttccaatcg

SEQ ID NO: 198916 - DNA, 55 bp, Artificial
  Synthetic oligonucleotide
cggctattacgttcagagggcgctgaatccaattgagaagcgtgaccgctaccgc

SEQ ID NO: 198917 - DNA, 55 bp, Artificial
  Synthetic oligonucleotide
cggctacatcaaacggtcctcaatgcgatccttccagtcaactgaagccggcgac

SEQ ID NO: 198918 - DNA, 55 bp, Artificial
  Synthetic oligonucleotide
cggcgctgtgaaccgttatacgtcacaaactattattgtagttaatgagatctgc

SEQ ID NO: 198919 - DNA, 55 bp, Artificial
  Synthetic oligonucleotide
cggcgatgaaggctcaaaacgtgcgctatcgattagaagggtacttattcccagc

SEQ ID NO: 198920 - DNA, 55 bp, Artificial
  Synthetic oligonucleotide
cggccttggtcttacgatagtccttaacctgttgattaaatgctcttctctcatg

SEQ ID NO: 198921 - DNA, 55 bp, Artificial
  Synthetic oligonucleotide
cggcctgtctagctcacaccaaccgctagttctctgaacgctgagccgactcgct

SEQ ID NO: 198922 - DNA, 55 bp, Artificial
  Synthetic oligonucleotide
cggcacaacggttgatcatttgggccactcggtacgctttaagcttttgcacgaa

SEQ ID NO: 198923 - DNA, 55 bp, Artificial
  Synthetic oligonucleotide
cggcaatacccaataactttaataagttgtttcatagcaaggaagtaggcaagcc

SEQ ID NO: 198924 - DNA, 55 bp, Artificial
  Synthetic oligonucleotide
cggcaagagtgccttaataggccctgattcgatgcagggcaaagactggtatgtc

SEQ ID NO: 198925 - DNA, 60 bp, Artificial
  Synthetic oligonucleotide
cactcacggtggcgcagacattgctaaatatctgactgcaagcggtaccgataagctgca

SEQ ID NO: 198926 - DNA, 55 bp, Artificial
  Synthetic oligonucleotide
cgtgagatcaaaacaccccgtgacattcaggactggaatgccggtaagattcctt

SEQ ID NO: 198927 - DNA, 55 bp, Artificial
  Synthetic oligonucleotide
cgtctttgctagttactacacctgcgggcttggcttcttgcactaagggatcgac

SEQ ID NO: 198928 - DNA, 55 bp, Artificial
  Synthetic oligonucleotide
cgtcttccgtatcggctcggaatagtcaagcctacgctactgggctttagagaga

SEQ ID NO: 198929 - DNA, 55 bp, Artificial
  Synthetic oligonucleotide
cgtcggcattggcaatcatgaccaacggaaaacgactaatcacagcaacaaagat

SEQ ID NO: 198930 - DNA, 55 bp, Artificial
  Synthetic oligonucleotide
cgtcgccacagtagaagttattaaattctgtcgcggtttggacgagcgcaatgtc

SEQ ID NO: 198931 - DNA, 55 bp, Artificial
  Synthetic oligonucleotide
cgtccgactttgattggaccgtatacgttactgaaattgtctcgcttcattgatg

SEQ ID NO: 198932 - DNA, 55 bp, Artificial
  Synthetic oligonucleotide
cgtcccttgttgctcttagttgtcttagcaacgggagtatacatattttgcgtgg

SEQ ID NO: 198933 - DNA, 55 bp, Artificial
  Synthetic oligonucleotide
cgtcatgacttcaccgacaaccaccagaagtggcgtgattctatgactaatcaag

SEQ ID NO: 198934 - DNA, 55 bp, Artificial
  Synthetic oligonucleotide
cgtcatcgaacacggcaccttagtcaatgttatgacaggtgaatattatccaacc

SEQ ID NO: 198935 - DNA, 55 bp, Artificial
  Synthetic oligonucleotide
cgtcaagctctggccagctagcggttattaaatatcgttaaaatctgccaccgtc

SEQ ID NO: 198936 - DNA, 58 bp, Artificial
  Synthetic oligonucleotide
cactattgcaccgaggaataaaaccaactctattatccacaactaagtggtcagagga

SEQ ID NO: 198937 - DNA, 55 bp, Artificial
  Synthetic oligonucleotide
cgtcaaagtaaacttcacgctcactattcccctttccaagaacaatggcagaacg

SEQ ID NO: 198938 - DNA, 55 bp, Artificial
  Synthetic oligonucleotide
cgtattacatgtctacggtagtaactacgcacgaagttaaagacactgtcggcgg

SEQ ID NO: 198939 - DNA, 55 bp, Artificial
  Synthetic oligonucleotide
cgtatgaagacaggacaagcaagacggggcaacgttacagtgccatgagctattc

SEQ ID NO: 198940 - DNA, 55 bp, Artificial
  Synthetic oligonucleotide
cgtatctcgccccgcattatactgtgattgccttggacagtcgtgatcacggtca

SEQ ID NO: 198941 - DNA, 55 bp, Artificial
  Synthetic oligonucleotide
cgtataaactccgaaaacgccaaactattcaggatagcatctgcttacactatcc

SEQ ID NO: 198942 - DNA, 55 bp, Artificial
  Synthetic oligonucleotide
cgtagtcgtagccagatcgttgcgacttaaaattgccgccttttcacctggacga

SEQ ID NO: 198943 - DNA, 55 bp, Artificial
  Synthetic oligonucleotide
cgtagctgataggctagtcgcatttgttcatcagtgtaggtctgtggccgcccct

SEQ ID NO: 198944 - DNA, 55 bp, Artificial
  Synthetic oligonucleotide
cgtacaacctccgaagagtagggctggacgccgtacaatcgacttggatgacagt

SEQ ID NO: 198945 - DNA, 54 bp, Artificial
  Synthetic oligonucleotide
cgtaattgcggtttcacctctaataatgtttgacgaatacgccgcttaacccaa

SEQ ID NO: 198946 - DNA, 55 bp, Artificial
  Synthetic oligonucleotide
cgtaagcttaccgaaactcttttagataccgctgaaagcagcctgattgatgagt

SEQ ID NO: 198947 - DNA, 58 bp, Artificial
  Synthetic oligonucleotide
cttcgtttactgtgattgactggtcatcgctgtaagttaagtcattttggtcaatttc

SEQ ID NO: 198948 - DNA, 60 bp, Artificial
  Synthetic oligonucleotide
ctgaaccgtctgcaaatacatgacccaccatccatgtatgtccgatactagggtctgtac

SEQ ID NO: 198949 - DNA, 60 bp, Artificial
  Synthetic oligonucleotide
cactagattgggataatcaccttgacgagcaagtcggctatcggtcaaactcttcggatg

SEQ ID NO: 198950 - DNA, 55 bp, Artificial
  Synthetic oligonucleotide
cgtaactcaggctgattatactatgacggctatgcttgaacgccaaagtttagac

SEQ ID NO: 198951 - DNA, 55 bp, Artificial
  Synthetic oligonucleotide
cgtaacgaacacactatggatgaacgtttagcaaacgaaatcatcgacgcttcaa

SEQ ID NO: 198952 - DNA, 55 bp, Artificial
  Synthetic oligonucleotide
cgtaaccacaaggctagtgtctaactacgaacgctagccggcccgtaccgtgcca

SEQ ID NO: 198953 - DNA, 55 bp, Artificial
  Synthetic oligonucleotide
cggttactacactgatgatgctggataccagctatcgttggttgataccgactac

SEQ ID NO: 198954 - DNA, 55 bp, Artificial
  Synthetic oligonucleotide
cggtgtcggattctttgcgtcggtcaggtttttcactgcgtaacgtccctggcga

SEQ ID NO: 198955 - DNA, 55 bp, Artificial
  Synthetic oligonucleotide
cgccgctgtaacggctatcagggtcgcccgtgtctttattaccatatggggcagt

SEQ ID NO: 198956 - DNA, 55 bp, Artificial
  Synthetic oligonucleotide
cgccctgcgtgttatcatatgtctgttttaaacattgagctagtgcataaggtat

SEQ ID NO: 198957 - DNA, 55 bp, Artificial
  Synthetic oligonucleotide
cgccctgcgattacgtggatttaatagtccccatcgggtagcactaaaatcggca

SEQ ID NO: 198958 - DNA, 55 bp, Artificial
  Synthetic oligonucleotide
cgccccacattgctactatgccacgagtattgaatggagtaattcgaccgttttg

SEQ ID NO: 198959 - DNA, 55 bp, Artificial
  Synthetic oligonucleotide
cgccatcacacggcatcaattcttgtaattccccagagaatttacgattgagtgc

SEQ ID NO: 198960 - DNA, 60 bp, Artificial
  Synthetic oligonucleotide
attagtgatgcataatcaaatgacactggggcaacttctcacgtacaatgccttgttaac

SEQ ID NO: 198961 - DNA, 55 bp, Artificial
  Synthetic oligonucleotide
agctcttgctaacccaattgttaaagctacaccaagtagatcgctagcaccatcg

SEQ ID NO: 198962 - DNA, 55 bp, Artificial
  Synthetic oligonucleotide
cgccaagatcaacgcgttttcagcatagttaatatctttgcgtaactcatccgcc

SEQ ID NO: 198963 - DNA, 55 bp, Artificial
  Synthetic oligonucleotide
cgccaaagtctggtttactgaggatatattttgatcgtgcttatcaggtacgtaa

SEQ ID NO: 198964 - DNA, 55 bp, Artificial
  Synthetic oligonucleotide
cgcatgggtcaaataacggaactagtgcgaaatatcatcagtgataccttgcgcg

SEQ ID NO: 198965 - DNA, 55 bp, Artificial
  Synthetic oligonucleotide
cgcataactggtcacgccatccgcaatcgagatcactaagatagcgtaatctaag

SEQ ID NO: 198966 - DNA, 55 bp, Artificial
  Synthetic oligonucleotide
cgcagttaagccaattgcagaccacctacagcactttacaggcgcagtacgagag

SEQ ID NO: 198967 - DNA, 55 bp, Artificial
  Synthetic oligonucleotide
cgcagtgctcaagttataagcggccgcaatggtttctggtgaccaggttaatcgt

SEQ ID NO: 198968 - DNA, 55 bp, Artificial
  Synthetic oligonucleotide
cgcaggctacccaaatcgatcgtcaggaattaacaccgttgcttaaccaagctgg

SEQ ID NO: 198969 - DNA, 55 bp, Artificial
  Synthetic oligonucleotide
cgcaggccacgatgttgaccacgcttagtagctaaaagtaagttctcggcaaccg

SEQ ID NO: 198970 - DNA, 55 bp, Artificial
  Synthetic oligonucleotide
cgcagacagcttgatctatggtattgtgaaacctgacgacacggttccagcgggg

SEQ ID NO: 198971 - DNA, 58 bp, Artificial
  Synthetic oligonucleotide
attagctgagatgtacccaacgtcagtcttaatccggtacaccttgccatatttaaca

SEQ ID NO: 198972 - DNA, 55 bp, Artificial
  Synthetic oligonucleotide
cgcagaaccggacccaagtcttgcaacacgtgataattcctgccgattcagattc

SEQ ID NO: 198973 - DNA, 55 bp, Artificial
  Synthetic oligonucleotide
agcttgtgaagcctacatgccgactcgatgtgacagatgctattcacgtaccact

SEQ ID NO: 198974 - DNA, 55 bp, Artificial
  Synthetic oligonucleotide
cgcactggctagtatatcgaataatcgcttaatcgtgtgatacactggtcgtccg

SEQ ID NO: 198975 - DNA, 55 bp, Artificial
  Synthetic oligonucleotide
cgcacgacctatagcatagttacctattatgccttcgttagccaatttagttgta

SEQ ID NO: 198976 - DNA, 55 bp, Artificial
  Synthetic oligonucleotide
cgcaccctttatcgcatgtttgcccgcaatcagtatggcttctccgttaaacagc

SEQ ID NO: 198977 - DNA, 55 bp, Artificial
  Synthetic oligonucleotide
cgattgcatgcttagtagttttcgattcatcgtacacgttgaactgcgtttcatt

SEQ ID NO: 198978 - DNA, 55 bp, Artificial
  Synthetic oligonucleotide
aggaatgcaactgagtaaaacagaactgaaccgatagtaccaaccaaggtaccta

SEQ ID NO: 198979 - DNA, 55 bp, Artificial
  Synthetic oligonucleotide
cgattcactcttaccgcccgatactgttatcacgtttggattcggccacctagtt

SEQ ID NO: 198980 - DNA, 55 bp, Artificial
  Synthetic oligonucleotide
cgattagagtagcccttagagtgcagctcctggattgtagtccggtccttcagct

SEQ ID NO: 198981 - DNA, 55 bp, Artificial
  Synthetic oligonucleotide
cgattaaggggcgcaaattaaagcacggtaccaccctagatttgtctacacacat

SEQ ID NO: 198982 - DNA, 53 bp, Artificial
  Synthetic oligonucleotide
attagcctgtgtaactaaataattttggcgactaagtaagttgctaatggttt

SEQ ID NO: 198983 - DNA, 55 bp, Artificial
  Synthetic oligonucleotide
cgatgctatcccagaggattctaaaccgaagtcaatcgcgttaatgcagcgcgaa

SEQ ID NO: 198984 - DNA, 54 bp, Artificial
  Synthetic oligonucleotide
aggactcggcgccggattgggggctacttgccgctatgggataaccgttctggg

SEQ ID NO: 198985 - DNA, 55 bp, Artificial
  Synthetic oligonucleotide
cgatcgactattggctaatccgaatatggaacaataccgctacgacgtacaattg

SEQ ID NO: 198986 - DNA, 55 bp, Artificial
  Synthetic oligonucleotide
cggattgtatcgggtagtctaagcttagtgtctggtgggatagacactggaacgt

SEQ ID NO: 198987 - DNA, 54 bp, Artificial
  Synthetic oligonucleotide
cggatcgcattcccaatgaaattccgaagttacaagaacgcctagtttcacgtt

SEQ ID NO: 198988 - DNA, 55 bp, Artificial
  Synthetic oligonucleotide
cggatattgcggcttatattaacgagcataaaaccagtcagcgagcggtcagaaa

SEQ ID NO: 198989 - DNA, 55 bp, Artificial
  Synthetic oligonucleotide
cggaggtctcacaatgacaacgattttaccttggctcacaaatacagaagacgtt

SEQ ID NO: 198990 - DNA, 55 bp, Artificial
  Synthetic oligonucleotide
agcgtgggtagccagttcgcgtgagttgtagcgggagtcaaaggaaattaccacg

SEQ ID NO: 198991 - DNA, 55 bp, Artificial
  Synthetic oligonucleotide
cggagccggtacaaatgagattcgcgttcagggcgttgattcgctcagatcaaag

SEQ ID NO: 198992 - DNA, 55 bp, Artificial
  Synthetic oligonucleotide
cggacgcttcttccctttacaggaaattgagcatctaccggtaataattctgccc

SEQ ID NO: 198993 - DNA, 59 bp, Artificial
  Synthetic oligonucleotide
attaaggtggcacagaacaatcttcaaagttacgagaagcgctatcaaaattacgctca

SEQ ID NO: 198994 - DNA, 55 bp, Artificial
  Synthetic oligonucleotide
cggaatgtgctatatttccacgcaataaccctcatagtcacagttggggcatcct

SEQ ID NO: 198995 - DNA, 55 bp, Artificial
  Synthetic oligonucleotide
cgcttttggagtatacttgccagactcccattcactgacggtagaaacgcttcgg

SEQ ID NO: 198996 - DNA, 55 bp, Artificial
  Synthetic oligonucleotide
cgctttcgaaaggggcttgctcatattacccaagcgttaccgaccggcggcaatg

SEQ ID NO: 198997 - DNA, 55 bp, Artificial
  Synthetic oligonucleotide
cgcttcattcgtgcagagtcaagcagggtccctgttcctaatacatggttcttcg

SEQ ID NO: 198998 - DNA, 55 bp, Artificial
  Synthetic oligonucleotide
cgctgagggatatatctggttacagtatctttccggctctggcaatacgcgttac

SEQ ID NO: 198999 - DNA, 55 bp, Artificial
  Synthetic oligonucleotide
cgctgaccatagattgcttgctgtgccttgtgttcacgcattttatcacgtcgtt

SEQ ID NO: 199000 - DNA, 55 bp, Artificial
  Synthetic oligonucleotide
cgctatcctgtatgcgcctgaaagcctaccagaggcacacccatttagctatcat

SEQ ID NO: 199001 - DNA, 55 bp, Artificial
  Synthetic oligonucleotide
cgctaattgacgttcgtgcgtccaataacgatccatcatcgattcagaaatcgac

SEQ ID NO: 199002 - DNA, 55 bp, Artificial
  Synthetic oligonucleotide
cgcgttttaagcctgagactttgcgctacttttctcccctaaggctagagcagac

SEQ ID NO: 199003 - DNA, 55 bp, Artificial
  Synthetic oligonucleotide
cgcggagttaaaatcatcgcgagattctcctagttcacgctttaggaaataacta

SEQ ID NO: 199004 - DNA, 54 bp, Artificial
  Synthetic oligonucleotide
atgtggcgaagccacacctttttagggagcgaagcgaccaggggttggtatggg

SEQ ID NO: 199005 - DNA, 55 bp, Artificial
  Synthetic oligonucleotide
cgcggaccacgttagtcagatcttgaacgggagtcgttgtgagaatgtagaggtc

SEQ ID NO: 199006 - DNA, 55 bp, Artificial
  Synthetic oligonucleotide
cgcgcgtgaggacttggaagcgcaagtcgctagattagggatgagcgaacacgtt

SEQ ID NO: 199007 - DNA, 55 bp, Artificial
  Synthetic oligonucleotide
cgcgcggagtcccttcgttagcgctttgcttgcccgtcacgcagtccgctgaata

SEQ ID NO: 199008 - DNA, 54 bp, Artificial
  Synthetic oligonucleotide
cgcgcctacaacgttaccggcttaaataaattacacctggtgttacaggcaaca

SEQ ID NO: 199009 - DNA, 55 bp, Artificial
  Synthetic oligonucleotide
agctctgtatcttacgccatagtgccataaaagcttcctcagcactaactcatcc

SEQ ID NO: 199010 - DNA, 55 bp, Artificial
  Synthetic oligonucleotide
cgcgagcgtcaagtattgatcgtccgcttccaaggtaccggtatgttgccacgtc

SEQ ID NO: 199011 - DNA, 55 bp, Artificial
  Synthetic oligonucleotide
cgcgaatccggtaaagcaattgggctcaatcgttatcagctctatcgttacgtat

SEQ ID NO: 199012 - DNA, 55 bp, Artificial
  Synthetic oligonucleotide
cgcctggtccaaggataacccaagctacacggttggcatcaagagtattgggcct

SEQ ID NO: 199013 - DNA, 55 bp, Artificial
  Synthetic oligonucleotide
cgcctaagttgaagcgtatggtaactgagaagctaaacctaggttggtcccctga

SEQ ID NO: 199014 - DNA, 55 bp, Artificial
  Synthetic oligonucleotide
cgccgtcacggtcagagacattggcccgcgttaaatgaatggcttgcggaaagcc

SEQ ID NO: 199015 - DNA, 60 bp, Artificial
  Synthetic oligonucleotide
atggtagcgggatctcttacaccgacaaacaagctatcacagggattagtagcaatgtaa

SEQ ID NO: 199016 - DNA, 55 bp, Artificial
  Synthetic oligonucleotide
cgccgtagcatgggtattaccataaacactagctgttgcgcgtgcatttcggtta

SEQ ID NO: 199017 - DNA, 55 bp, Artificial
  Synthetic oligonucleotide
cgccggtctctaacaataactgcccccactgaaagccgcgtgcacgtacttctga

SEQ ID NO: 199018 - DNA, 55 bp, Artificial
  Synthetic oligonucleotide
cacgtgaaagcacggtaaatgatgagcaaccaaggagcgcgagcaagcgtttgac

SEQ ID NO: 199019 - DNA, 55 bp, Artificial
  Synthetic oligonucleotide
cacgtcccttaatcttttgacctagtcgtaatggacgaaacatttcagacttatg

SEQ ID NO: 199020 - DNA, 54 bp, Artificial
  Synthetic oligonucleotide
cacgtagtgaactacggtaaacatcgaactagacgtagcttctcccgaattaag

SEQ ID NO: 199021 - DNA, 55 bp, Artificial
  Synthetic oligonucleotide
cacggtgacgtttagtgttcacgctcaagggtctaccgggtacaagttgcttgca

SEQ ID NO: 199022 - DNA, 54 bp, Artificial
  Synthetic oligonucleotide
cacggaatgaagtttatttaccggagtggctgcatgtttcttcgtttacggtcg

SEQ ID NO: 199023 - DNA, 55 bp, Artificial
  Synthetic oligonucleotide
cacgcttgatctaaacactgtttcataacgcagctttaagcatccttgccacagc

SEQ ID NO: 199024 - DNA, 55 bp, Artificial
  Synthetic oligonucleotide
cacgcacgttagacgtcatatttgatacgtccattacatctatcatatcgccagg

SEQ ID NO: 199025 - DNA, 55 bp, Artificial
  Synthetic oligonucleotide
cacgcaacgtattcgctagacattatggttttaccatgggccaggcatgtaccgt

SEQ ID NO: 199026 - DNA, 60 bp, Artificial
  Synthetic oligonucleotide
atgggtctagcacaacatagaataaattctatgtgtaagtgcacattggcctcgtttcac

SEQ ID NO: 199027 - DNA, 55 bp, Artificial
  Synthetic oligonucleotide
cacgagaccgatatgaatgcgattacattaaaggtcacttgattgtggaacattg

SEQ ID NO: 199028 - DNA, 55 bp, Artificial
  Synthetic oligonucleotide
cacgactcgatcttaatccggagaccattaagaaggacttatatttacgagacct

SEQ ID NO: 199029 - DNA, 55 bp, Artificial
  Synthetic oligonucleotide
cacgactaagtgattatttagaccgccattataagcttgccggtcaaacgatctt

SEQ ID NO: 199030 - DNA, 55 bp, Artificial
  Synthetic oligonucleotide
caccgttgaaccccttgctgcgcgcaaagctgtaaattctacagttcagcatgac

SEQ ID NO: 199031 - DNA, 55 bp, Artificial
  Synthetic oligonucleotide
caccggatgagggaaaacgcggacgtctttgacttcaccctgtcaccggcggaga

SEQ ID NO: 199032 - DNA, 55 bp, Artificial
  Synthetic oligonucleotide
cacccatgaccttatccgtgtaagcaatacctaattggtgggcccgtgaatcgtc

SEQ ID NO: 199033 - DNA, 55 bp, Artificial
  Synthetic oligonucleotide
caccacaggaaagcatttcaagaattttaagtcgatttggttcagcaactacctt

SEQ ID NO: 199034 - DNA, 53 bp, Artificial
  Synthetic oligonucleotide
cacatcgtcaaccggaaaacttacaacgtaattcctcccaaggtagagtattc

SEQ ID NO: 199035 - DNA, 55 bp, Artificial
  Synthetic oligonucleotide
cacagcgaatcacgagctaagcgaatttataacagtatgcgtggcttttgtggtg

SEQ ID NO: 199036 - DNA, 55 bp, Artificial
  Synthetic oligonucleotide
cacagatgcctgacttgcgaagcaccatcgttattcgtggataaccataggcacg

SEQ ID NO: 199037 - DNA, 55 bp, Artificial
  Synthetic oligonucleotide
atggcggttacctgaggaagtgaacggtagttctaaaccgctatttcagctagaa

SEQ ID NO: 199038 - DNA, 55 bp, Artificial
  Synthetic oligonucleotide
cacaagttcacgatcatgttttctatgctgatccgtattccccttgggaacgtgg

SEQ ID NO: 199039 - DNA, 55 bp, Artificial
  Synthetic oligonucleotide
caattaagtcttcaacttgaacgtagtcgcggacattagtaccgtctttagtgtc

SEQ ID NO: 199040 - DNA, 52 bp, Artificial
  Synthetic oligonucleotide
caatctttggggcggtctttgaaagtaccttgaaccctgaaactcggcggtc

SEQ ID NO: 199041 - DNA, 55 bp, Artificial
  Synthetic oligonucleotide
caatcttaccgtcataagtccgagcaacggtcatcttggtgattggaatatagcc

SEQ ID NO: 199042 - DNA, 55 bp, Artificial
  Synthetic oligonucleotide
caatcatgaaaagctttgggacatcgttgccaatcgtttgaagtccgaggtaccg

SEQ ID NO: 199043 - DNA, 55 bp, Artificial
  Synthetic oligonucleotide
caatcagccagtggttaggccggtcaagggaggcgttcgtagcgtgccagccgct

SEQ ID NO: 199044 - DNA, 55 bp, Artificial
  Synthetic oligonucleotide
caatatcgattaaggggcgcaaattaaagcacggtaccaccctagatttgtctac

SEQ ID NO: 199045 - DNA, 55 bp, Artificial
  Synthetic oligonucleotide
caatatatgaaaggaatgaccgcatgataacccagaatgagtacccacggctggc

SEQ ID NO: 199046 - DNA, 55 bp, Artificial
  Synthetic oligonucleotide
caagtaacgaagttaacgacttctatcaagtcggttataagtgttgatgctaagc

SEQ ID NO: 199047 - DNA, 55 bp, Artificial
  Synthetic oligonucleotide
caaggttttatggatgaacacaaacttcctggagctgtaacagttgatgacagac

SEQ ID NO: 199048 - DNA, 60 bp, Artificial
  Synthetic oligonucleotide
atggcggcgattaaacaaggtgagtcattgaagggagaacaagaataatgatgagcttag

SEQ ID NO: 199049 - DNA, 55 bp, Artificial
  Synthetic oligonucleotide
caggcatacttaaaaccgcatcaaccatttgccgcgtcatcatacgataatcacg

SEQ ID NO: 199050 - DNA, 55 bp, Artificial
  Synthetic oligonucleotide
caggcacgttcgcagctgcaagtgaattcttgggtcaggagcctaagcaggccga

SEQ ID NO: 199051 - DNA, 55 bp, Artificial
  Synthetic oligonucleotide
caggatcattgatcacacccttaaggtgtacttgagccgctaaatagcgccgacg

SEQ ID NO: 199052 - DNA, 55 bp, Artificial
  Synthetic oligonucleotide
cagctctgtcttttcttgctgtcaacggtaaccggagaggctgaaagccttgagg

SEQ ID NO: 199053 - DNA, 55 bp, Artificial
  Synthetic oligonucleotide
cagctcggtcttagagccggctgacttttatgaacatgccaaccgcctggtctat

SEQ ID NO: 199054 - DNA, 55 bp, Artificial
  Synthetic oligonucleotide
cagctcccagaggagctaaggaagcgtctccggacgaataatacaattgagcggg

SEQ ID NO: 199055 - DNA, 55 bp, Artificial
  Synthetic oligonucleotide
cagctaataacttttggacccgtgccatcaaagcttggtacttagcattagcggt

SEQ ID NO: 199056 - DNA, 55 bp, Artificial
  Synthetic oligonucleotide
cagcgtttgttaagactgaccgctttacgcttgagcaactgattaattggatggc

SEQ ID NO: 199057 - DNA, 55 bp, Artificial
  Synthetic oligonucleotide
cagcgtgagtagtgtagaaagcagtgtgaggagttaccaatacgtttggacggtc

SEQ ID NO: 199058 - DNA, 55 bp, Artificial
  Synthetic oligonucleotide
cagcggagattgaacagcagaaagaggaaatggctaacgaatttaagagttttaa

SEQ ID NO: 199059 - DNA, 59 bp, Artificial
  Synthetic oligonucleotide
gaaggtctgtgttttataccagagctatcaatagtaacggtgtgcccattaatcttgat

SEQ ID NO: 199060 - DNA, 60 bp, Artificial
  Synthetic oligonucleotide
atggaatccgcccagttaacgtaatggtgcttagcagcagtgctcgccccacctggttca

SEQ ID NO: 199061 - DNA, 55 bp, Artificial
  Synthetic oligonucleotide
cagcactaactcatccttaccattcttcgaatgaaccttggacatctgtcggctc

SEQ ID NO: 199062 - DNA, 55 bp, Artificial
  Synthetic oligonucleotide
cagattgtgcccctccgtgaacacgtaaaactttgcctcgacgatccaactctcg

SEQ ID NO: 199063 - DNA, 54 bp, Artificial
  Synthetic oligonucleotide
cagattacggtaacaggacgcttagcccaacactcggaacttccacaaaacaac

SEQ ID NO: 199064 - DNA, 55 bp, Artificial
  Synthetic oligonucleotide
cagatggggtcgaagcaaaagtggctgcgaattcacaatagtcaggaatggccgg

SEQ ID NO: 199065 - DNA, 55 bp, Artificial
  Synthetic oligonucleotide
cagagaactaggaggattgtttgtattaggtacggaacatcatgaatcacaacga

SEQ ID NO: 199066 - DNA, 55 bp, Artificial
  Synthetic oligonucleotide
cagacgaaccagcgattaatcattcatagcgatcgcggaagccagtttacatcgc

SEQ ID NO: 199067 - DNA, 55 bp, Artificial
  Synthetic oligonucleotide
cagaagctgctcctatagtaagctttcgtatactgaagtgaggtatttgaagtgc

SEQ ID NO: 199068 - DNA, 55 bp, Artificial
  Synthetic oligonucleotide
cagaacgccctaaaacggacacacaactcgatttgtttagctatgatacaggctg

SEQ ID NO: 199069 - DNA, 55 bp, Artificial
  Synthetic oligonucleotide
cactttaacgtctcaaacgttgacccacgggctaaagttcatagtaagcgcaagc

SEQ ID NO: 199070 - DNA, 55 bp, Artificial
  Synthetic oligonucleotide
cactgtaacttcagttggttcgcctgtaactccattagctgttggggtaagtgtc

SEQ ID NO: 199071 - DNA, 58 bp, Artificial
  Synthetic oligonucleotide
atggaacgattcctaagaaaattgagaatgccaagggaatgattcggtactttgctca

SEQ ID NO: 199072 - DNA, 55 bp, Artificial
  Synthetic oligonucleotide
cactgggctattagacgccctaggaggctttaaggagttgatagactagcggatg

SEQ ID NO: 199073 - DNA, 55 bp, Artificial
  Synthetic oligonucleotide
cactgctttgatttatgctttgcagtcagtggaaggtatggatactggaactgct

SEQ ID NO: 199074 - DNA, 55 bp, Artificial
  Synthetic oligonucleotide
cactcgatcctaattctcgagcaacaataatcggtcttggaaaatcagctggcag

SEQ ID NO: 199075 - DNA, 55 bp, Artificial
  Synthetic oligonucleotide
agttaatcgaaattactcatgagtatcactaacccgcacagtctgctagctgtgc

SEQ ID NO: 199076 - DNA, 55 bp, Artificial
  Synthetic oligonucleotide
cactcagctaatgcatcgtcgcaacaatatcccacgaaaatctcttaattatcgt

SEQ ID NO: 199077 - DNA, 55 bp, Artificial
  Synthetic oligonucleotide
agttagtcgcccaaaatgatagtgacgtcgttgtggttgatacggctccgactgg

SEQ ID NO: 199078 - DNA, 55 bp, Artificial
  Synthetic oligonucleotide
cactaagccagatcttaacgcaagaccacaagataatctttacttagcagtgaac

SEQ ID NO: 199079 - DNA, 55 bp, Artificial
  Synthetic oligonucleotide
cacgtgctagtaaaatcggtagcagtgtcgtaatcccaggacaagttgtaacgcc

SEQ ID NO: 199080 - DNA, 54 bp, Artificial
  Synthetic oligonucleotide
cacgtgaaccgatccagattactcccaccagttttcctttactacgccaaggaa

SEQ ID NO: 199081 - DNA, 55 bp, Artificial
  Synthetic oligonucleotide
caaaacagcgatgttagagcggctattaaagcttctggcttgaagcaatatgagg

SEQ ID NO: 199082 - DNA, 60 bp, Artificial
  Synthetic oligonucleotide
atgctggattccgcactaaatgttaacgaatcgagcgctagtcatgcctataacgttctt

SEQ ID NO: 199083 - DNA, 55 bp, Artificial
  Synthetic oligonucleotide
attggtggaattatgggattgctcttagcggtccttatcatcacttttggatttt

SEQ ID NO: 199084 - DNA, 55 bp, Artificial
  Synthetic oligonucleotide
attggggcgttgacatctgactgatgtacgtactcataaaagtgaatacagccgc

SEQ ID NO: 199085 - DNA, 55 bp, Artificial
  Synthetic oligonucleotide
atataagcaagctttgttggagcaagggaaaattgtgacttatgatgtgcggaga

SEQ ID NO: 199086 - DNA, 55 bp, Artificial
  Synthetic oligonucleotide
attgacaacaagtccgagtggcaacgattgattgaagaagcttataagtctagtt

SEQ ID NO: 199087 - DNA, 55 bp, Artificial
  Synthetic oligonucleotide
atatcacggactacattggtccgaacaccaaacacattgatgcaactaatcagta

SEQ ID NO: 199088 - DNA, 55 bp, Artificial
  Synthetic oligonucleotide
attcggtgaaggcgtctataccgatgtccccggtctttgtaagatagctaccatt

SEQ ID NO: 199089 - DNA, 55 bp, Artificial
  Synthetic oligonucleotide
attcaaacttaaacccaagatctttgcgaatgccaacgatcatcacccgataacg

SEQ ID NO: 199090 - DNA, 55 bp, Artificial
  Synthetic oligonucleotide
attattctgcgcgtcctagagggcttgccctgccttagtttgcgcttcttttgcc

SEQ ID NO: 199091 - DNA, 55 bp, Artificial
  Synthetic oligonucleotide
atcaagctcggtgattcaacagacaaacccgaatattcaaaccttcgctggggag

SEQ ID NO: 199092 - DNA, 55 bp, Artificial
  Synthetic oligonucleotide
attagcgtgaatcactaactggtggccgaccctgacaatcatacgcgactgtgag

SEQ ID NO: 199093 - DNA, 60 bp, Artificial
  Synthetic oligonucleotide
atgcgcactatcatgtaatgcgcactatcatgtaatgcgcactatcatgtaatgcgcact

SEQ ID NO: 199094 - DNA, 55 bp, Artificial
  Synthetic oligonucleotide
attaacaacgtgtacgggtgcactgcttgcctgagattgttgagtcggttgtgtg

SEQ ID NO: 199095 - DNA, 55 bp, Artificial
  Synthetic oligonucleotide
atgttatattggatctgggtcttaatagttggtgccataataggactagccgccg

SEQ ID NO: 199096 - DNA, 55 bp, Artificial
  Synthetic oligonucleotide
atgtgtgttattatgaggttgtagcagaaaccgcttacaaagccgatacgagggg

SEQ ID NO: 199097 - DNA, 55 bp, Artificial
  Synthetic oligonucleotide
atgtgggcaggtaattctgcacggatagtagccgttatctacttcgaagggtgac

SEQ ID NO: 199098 - DNA, 55 bp, Artificial
  Synthetic oligonucleotide
atgtaagacaccggaaaagatatatgttaagcgagtaataggggcagaaggcgac

SEQ ID NO: 199099 - DNA, 55 bp, Artificial
  Synthetic oligonucleotide
atggggtattgtgtggtagagctacgtggaaaccatctattaagccttttgcagc

SEQ ID NO: 199100 - DNA, 55 bp, Artificial
  Synthetic oligonucleotide
atgggcatcatcagtaatggcaatgcttccgtgacgatagtctaactttaacccc

SEQ ID NO: 199101 - DNA, 55 bp, Artificial
  Synthetic oligonucleotide
atgggactaatctaaaatagacttcagttggaggcgatgaaatgcgttgggaacc

SEQ ID NO: 199102 - DNA, 55 bp, Artificial
  Synthetic oligonucleotide
atggcaacaaattaacgttggaactcccatcacccctgcatcgtgattactggac

SEQ ID NO: 199103 - DNA, 55 bp, Artificial
  Synthetic oligonucleotide
atgcttctctgacacctgtatacggatttacgccagtaactaccatagtgtcctt

SEQ ID NO: 199104 - DNA, 60 bp, Artificial
  Synthetic oligonucleotide
atgaagttaagtcgtctgactatatgactgccaatgatgaccgtaacttagaagtgatta

SEQ ID NO: 199105 - DNA, 55 bp, Artificial
  Synthetic oligonucleotide
atccttgacttggctctacattaactccaacttgcttagcgaatttggcagcacg

SEQ ID NO: 199106 - DNA, 55 bp, Artificial
  Synthetic oligonucleotide
atgattcctctaagggaccaaatggcaagaaagctaagaataagctaaatcggcg

SEQ ID NO: 199107 - DNA, 55 bp, Artificial
  Synthetic oligonucleotide
atgatctcttagccattgagacagtatggttaggctatcttcacgcagtacattg

SEQ ID NO: 199108 - DNA, 53 bp, Artificial
  Synthetic oligonucleotide
atcctttaggcgcctttgtttcgacaaaatagtattggccgactaagagttgg

SEQ ID NO: 199109 - DNA, 55 bp, Artificial
  Synthetic oligonucleotide
atcgaacttggacgcgctttggtcgtagaatgccctacttactattcagcgcacc

SEQ ID NO: 199110 - DNA, 55 bp, Artificial
  Synthetic oligonucleotide
atctgctccgtgcttaattaggctaaccaacgtgtccttaataaacttttgcgta

SEQ ID NO: 199111 - DNA, 55 bp, Artificial
  Synthetic oligonucleotide
atcgagcgtcccgctgtgtccgacttttctggtccgaaacaggcgtctgcattta

SEQ ID NO: 199112 - DNA, 55 bp, Artificial
  Synthetic oligonucleotide
caaggctgatcacgggcacgtttcttaaagggaggacattgctcgaatagcggat

SEQ ID NO: 199113 - DNA, 55 bp, Artificial
  Synthetic oligonucleotide
caaggactgctcctacccaatccattggcatcataattaacccaaagacaagtac

SEQ ID NO: 199114 - DNA, 55 bp, Artificial
  Synthetic oligonucleotide
caagctcacaaatatatacagtccaaatgctctccataatcagacatcttgggct

SEQ ID NO: 199115 - DNA, 60 bp, Artificial
  Synthetic oligonucleotide
atgaaacaacaattattatggcgacccatcaattattggggttagagagtattgcagatg

SEQ ID NO: 199116 - DNA, 55 bp, Artificial
  Synthetic oligonucleotide
caagcgtgctttaggcgataagagtgttgctaaagtacaaattgttgtccagagc

SEQ ID NO: 199117 - DNA, 55 bp, Artificial
  Synthetic oligonucleotide
caagcgcataggttgacgcaatggtcaaaagtccgaggacggtataagttgcaac

SEQ ID NO: 199118 - DNA, 55 bp, Artificial
  Synthetic oligonucleotide
caagcatgattggcggtcgtggtgttgttctgacttccgaggaagcgattcacga

SEQ ID NO: 199119 - DNA, 55 bp, Artificial
  Synthetic oligonucleotide
caagagggccactaaatcgcccggcttttcaattgcgggaccactggttgttcga

SEQ ID NO: 199120 - DNA, 55 bp, Artificial
  Synthetic oligonucleotide
caagagcggcggtcaatcgatacggaacgggcaaccaacgacttgaagatgaccg

SEQ ID NO: 199121 - DNA, 55 bp, Artificial
  Synthetic oligonucleotide
caagactagtcatatcgccagtagtaaacttgatcatactataaccgtagtacac

SEQ ID NO: 199122 - DNA, 55 bp, Artificial
  Synthetic oligonucleotide
caactttacgtgagtttgtagtgtatgcgaatgaacgaaaacgtcaagctgagag

SEQ ID NO: 199123 - DNA, 55 bp, Artificial
  Synthetic oligonucleotide
atacattgggctcagcatttggcttcaccttatcgcttggagcaacgcaaagtgt

SEQ ID NO: 199124 - DNA, 55 bp, Artificial
  Synthetic oligonucleotide
caactggttgccaagcccaatgatttggacgggaacgtcgctatctttggtgggg

SEQ ID NO: 199125 - DNA, 55 bp, Artificial
  Synthetic oligonucleotide
caactggtcaatgaggggaataaatcttaccaagtaatggctgacgccttaggcg

SEQ ID NO: 199126 - DNA, 59 bp, Artificial
  Synthetic oligonucleotide
atgaaaactgtacgttgattacaccaactgaagaatatcgtcggataatcatatttatg

SEQ ID NO: 199127 - DNA, 51 bp, Artificial
  Synthetic oligonucleotide
caactgagggccgggtacggagcaaccgaagtcgggtggtttagtcttaac

SEQ ID NO: 199128 - DNA, 54 bp, Artificial
  Synthetic oligonucleotide
caactcgaaggtatacttacctttctcggcaaattgattgtcccgatacgtggg

SEQ ID NO: 199129 - DNA, 55 bp, Artificial
  Synthetic oligonucleotide
caacgtttagagaagataatcctcacggtgataagatagcaccctataacgcaga

SEQ ID NO: 199130 - DNA, 55 bp, Artificial
  Synthetic oligonucleotide
caacgatcttagtattcgtcttgaggtgataacgaaccacttgattagaactagg

SEQ ID NO: 199131 - DNA, 55 bp, Artificial
  Synthetic oligonucleotide
ataccttagctcgcttgcgacggagctttcgcacgtttcggatattgtgaatcgc

SEQ ID NO: 199132 - DNA, 55 bp, Artificial
  Synthetic oligonucleotide
caaccatctcaccacccatgaggcgtgttagttcagtaggagataacaaatcttg

SEQ ID NO: 199133 - DNA, 55 bp, Artificial
  Synthetic oligonucleotide
caacaggaggtcgatcaggacccgaaactcgccaagtaccacgtcaaggtcacca

SEQ ID NO: 199134 - DNA, 55 bp, Artificial
  Synthetic oligonucleotide
caacaggacagacagtagaaatccaggctacttttgcagatcatagtccttctac

SEQ ID NO: 199135 - DNA, 55 bp, Artificial
  Synthetic oligonucleotide
caacaacaatgcttaagcggttagaaaagcaaggcgctagtgaactgcaaccagc

SEQ ID NO: 199136 - DNA, 55 bp, Artificial
  Synthetic oligonucleotide
caaaggagaacggtgataaatggcaacgatttcagaagtcgcaaaattggcgggg

SEQ ID NO: 199137 - DNA, 56 bp, Artificial
  Synthetic oligonucleotide
atcttgcgtaccgccaagggttatcacgtgtactacgtgtttgatcaccctatgtt

SEQ ID NO: 199138 - DNA, 55 bp, Artificial
  Synthetic oligonucleotide
atactaacgaaattttaggccgtgatactggaatcgtagtatttgttgaccgctg

SEQ ID NO: 199139 - DNA, 53 bp, Artificial
  Synthetic oligonucleotide
caaacgtgtttgaagtcccgtggagttgaacaggggtaccgtgaatggatcgg

SEQ ID NO: 199140 - DNA, 55 bp, Artificial
  Synthetic oligonucleotide
caaacgcaccatcactttcgccatgtccattaaagtcaaaacgaacactagctac

SEQ ID NO: 199141 - DNA, 55 bp, Artificial
  Synthetic oligonucleotide
caaacactccgggtcagtttagcgtccttttcatcaaagacccaggaaagctcgc

SEQ ID NO: 199142 - DNA, 55 bp, Artificial
  Synthetic oligonucleotide
atactactcgtgtgttcttgatatgaacactcctattcatgttctagcatagtcg

SEQ ID NO: 199143 - DNA, 53 bp, Artificial
  Synthetic oligonucleotide
caaaacctacttgataaacttctataagccttgggagagtaaggttcaagagg

SEQ ID NO: 199144 - DNA, 54 bp, Artificial
  Synthetic oligonucleotide
cccctttaaaacgtccagggtgccttgcttctggctggcagttaatgacgtccc

SEQ ID NO: 199145 - DNA, 55 bp, Artificial
  Synthetic oligonucleotide
ccccgtggtcgtgtagcgaatgctaaagcatatgtgcaattaggaatatcgttag

SEQ ID NO: 199146 - DNA, 55 bp, Artificial
  Synthetic oligonucleotide
agtaaaacgccttagaacgcaaatatgggcttccgagagtgcctcagctgtctgg

SEQ ID NO: 199147 - DNA, 55 bp, Artificial
  Synthetic oligonucleotide
ccccgctgggaaaatcattgatgccgattattgacgccatgttgaaatggggcca

SEQ ID NO: 199148 - DNA, 60 bp, Artificial
  Synthetic oligonucleotide
atcgtctctagcttatcgaggtcactgtccggaaaagcagtcgttagaatgctgtcgtat

SEQ ID NO: 199149 - DNA, 55 bp, Artificial
  Synthetic oligonucleotide
ccccactgcctgctaagcgcaatcagttggcgggaggatacgtggccttgcgaca

SEQ ID NO: 199150 - DNA, 55 bp, Artificial
  Synthetic oligonucleotide
ccccaccatggctctatacaaatataatcggctgtaacaggatattgtgaccata

SEQ ID NO: 199151 - DNA, 55 bp, Artificial
  Synthetic oligonucleotide
ccccaactggtgaggtaccaaggacagatccgaccaacataccggaagaatcggc

SEQ ID NO: 199152 - DNA, 55 bp, Artificial
  Synthetic oligonucleotide
cccataaatatactgccaccaagaccaataagagtacctgatcctatcaagccat

SEQ ID NO: 199153 - DNA, 55 bp, Artificial
  Synthetic oligonucleotide
cccagctatgcgaacgccatcagtcacactgacacagcgctgaaacgaatattat

SEQ ID NO: 199154 - DNA, 55 bp, Artificial
  Synthetic oligonucleotide
cccaccaaaactgcacaatgtgaggactagcattacgccacatttgaaccagtgg

SEQ ID NO: 199155 - DNA, 55 bp, Artificial
  Synthetic oligonucleotide
cccaatgttgagactattacagccgatattaaagacggggccgcttgtgtcttaa

SEQ ID NO: 199156 - DNA, 55 bp, Artificial
  Synthetic oligonucleotide
cccaagaagacactatcaaagtattggggcagacttcgcatgaattcaccgctaa

SEQ ID NO: 199157 - DNA, 54 bp, Artificial
  Synthetic oligonucleotide
cccaactaacggctgataagtcaccaacacgggctaagtccattcctaaataaa

SEQ ID NO: 199158 - DNA, 55 bp, Artificial
  Synthetic oligonucleotide
cccaaagagaaccgttggattgttattcgtcaatgtattggccattgttttaaga

SEQ ID NO: 199159 - DNA, 58 bp, Artificial
  Synthetic oligonucleotide
atcgtagtcgcatctcgaaatcgcccgtgattccttggacgtgtaggaattgtagtta

SEQ ID NO: 199160 - DNA, 55 bp, Artificial
  Synthetic oligonucleotide
cccaaacgacttagagaagagccagaagcggagtgggcaaaagcattaagatggc

SEQ ID NO: 199161 - DNA, 55 bp, Artificial
  Synthetic oligonucleotide
ccattggataacgcatgccgttaaccttaaattgatcgtcttttaagcgacccac

SEQ ID NO: 199162 - DNA, 55 bp, Artificial
  Synthetic oligonucleotide
ccattagtgtttacatcacgggtctttggttctactgtttctgtcttaggacgag

SEQ ID NO: 199163 - DNA, 55 bp, Artificial
  Synthetic oligonucleotide
ccatgctactttccactagctcaactgaaaccgccgagggtcgaatcttgctcgg

SEQ ID NO: 199164 - DNA, 55 bp, Artificial
  Synthetic oligonucleotide
ccatgcataactgcactagtgtagccagccttttgacctagtatagctggagcac

SEQ ID NO: 199165 - DNA, 55 bp, Artificial
  Synthetic oligonucleotide
ccatcggcatgtaaacctcagaaacgtcctccattgagatgcggtcattaagcga

SEQ ID NO: 199166 - DNA, 55 bp, Artificial
  Synthetic oligonucleotide
ccaggttcttactattccgcggaccatcaaggctcaagaagtagttcgacgtggc

SEQ ID NO: 199167 - DNA, 53 bp, Artificial
  Synthetic oligonucleotide
ccaggtagtaaggttcggagcggacgatgttaaaggcccgcttaatgggcgcc

SEQ ID NO: 199168 - DNA, 55 bp, Artificial
  Synthetic oligonucleotide
ccaggcgatcttttaacaccatgtaagctaacttagcagtatcgcttaactttcg

SEQ ID NO: 199169 - DNA, 55 bp, Artificial
  Synthetic oligonucleotide
ccaggatttggtttgggaattatctcgcaacagatcagcgttatcaactcgggtt

SEQ ID NO: 199170 - DNA, 60 bp, Artificial
  Synthetic oligonucleotide
gaagctgatagcatatattgatactgtggctcgctaggtgtatactaaacacatggaaaa

SEQ ID NO: 199171 - DNA, 53 bp, Artificial
  Synthetic oligonucleotide
atcggtggacgttttgcaaagagtgcgggttggtttaccgtcatcgcttcggt

SEQ ID NO: 199172 - DNA, 55 bp, Artificial
  Synthetic oligonucleotide
ccagcgccattaaaataccgcgaagcatcgtttgcttcttactgcgaacctcggt

SEQ ID NO: 199173 - DNA, 55 bp, Artificial
  Synthetic oligonucleotide
ccagcgatctagaatcaaagtcaaggcaccgccttcaggcctagtcttagttgat

SEQ ID NO: 199174 - DNA, 55 bp, Artificial
  Synthetic oligonucleotide
ccagatagctagcatgtgcttacgtcacgtagtgttaaaactgaacgattggtta

SEQ ID NO: 199175 - DNA, 55 bp, Artificial
  Synthetic oligonucleotide
ccagacgaaactgtcgtcaaattgttgcttgctgttccgggtccggccgctaaca

SEQ ID NO: 199176 - DNA, 55 bp, Artificial
  Synthetic oligonucleotide
ccgatactgtgagcacgttgccacataggtgtttgaactagtgcggccaaaagcg

SEQ ID NO: 199177 - DNA, 55 bp, Artificial
  Synthetic oligonucleotide
ccgataagaattgcgaaatcccaaatcatatattcaggaccagctgggataaacc

SEQ ID NO: 199178 - DNA, 55 bp, Artificial
  Synthetic oligonucleotide
ccgataaccacgttatggccgtcgcaactgacagccaccgcttgagtcaacggaa

SEQ ID NO: 199179 - DNA, 54 bp, Artificial
  Synthetic oligonucleotide
ccgaggagattttggggaacgctttgaattaaatgcccctaccatccctgacta

SEQ ID NO: 199180 - DNA, 55 bp, Artificial
  Synthetic oligonucleotide
ccgagataaggctagtcggatcgtgtccgttaccgcaccttagagaggacattac

SEQ ID NO: 199181 - DNA, 55 bp, Artificial
  Synthetic oligonucleotide
ccgaatgttacatgctggtaaaatgtacaattccgctctggtgacgttatggcgg

SEQ ID NO: 199182 - DNA, 57 bp, Artificial
  Synthetic oligonucleotide
caaactgtttaggtgcactccttcgtttatcccaagatctctatcaaaataatcaac

SEQ ID NO: 199183 - DNA, 55 bp, Artificial
  Synthetic oligonucleotide
ccgaacgattaatacctcaggaagcaactactacagttgaactagatgctcttac

SEQ ID NO: 199184 - DNA, 54 bp, Artificial
  Synthetic oligonucleotide
ccgaaagtcacttagtaagaagcaacttaaagggtgtattatggcactccgttg

SEQ ID NO: 199185 - DNA, 55 bp, Artificial
  Synthetic oligonucleotide
ccgaaagtacttatcaagcatgaaaccgacaaatgaagctactaaggtcgccgct

SEQ ID NO: 199186 - DNA, 55 bp, Artificial
  Synthetic oligonucleotide
ccgaaacgatcccggcggtggttaccggcagcttgactatcttgggcacgatgct

SEQ ID NO: 199187 - DNA, 53 bp, Artificial
  Synthetic oligonucleotide
ccctgaccgggcctttaggcttgtcccattccacccattgcgggttctcccag

SEQ ID NO: 199188 - DNA, 55 bp, Artificial
  Synthetic oligonucleotide
ccctacgcatcctaaccatatttgggaactaaagccatatttacgtactagtagc

SEQ ID NO: 199189 - DNA, 55 bp, Artificial
  Synthetic oligonucleotide
ccctaccgcgaacaagtcctctggcacctctttgttcaagatgacctggtaagac

SEQ ID NO: 199190 - DNA, 55 bp, Artificial
  Synthetic oligonucleotide
ccctaattaagggtgatattagtggggatgatcctgtgatggttcgcttgcactc

SEQ ID NO: 199191 - DNA, 55 bp, Artificial
  Synthetic oligonucleotide
cccgtaagcgtggccagtcttgtaagcaactgaaacagtaccggtaacaggagcg

SEQ ID NO: 199192 - DNA, 55 bp, Artificial
  Synthetic oligonucleotide
cccgctcaggttcaagcgttctgaacagcaaagggcaaagcccactaagtcaact

SEQ ID NO: 199193 - DNA, 54 bp, Artificial
  Synthetic oligonucleotide
caaaatgttgccgacggtatagtttcctttagaaaattcatgaagttgcctcct

SEQ ID NO: 199194 - DNA, 55 bp, Artificial
  Synthetic oligonucleotide
cccgccagtagaaagtggtgagctcatgagtcaattagccgcacatatgcagaag

SEQ ID NO: 199195 - DNA, 55 bp, Artificial
  Synthetic oligonucleotide
cccgcagtgttcaatatttgaatctatgtcgcagtaaatatggatcctagatcag

SEQ ID NO: 199196 - DNA, 54 bp, Artificial
  Synthetic oligonucleotide
cccgcagtcagtaaaacaatgtcgccgggaactaattcgggtgcaggtaaagtc

SEQ ID NO: 199197 - DNA, 55 bp, Artificial
  Synthetic oligonucleotide
cccgcagctgaatatttgcaacggtaaaggatactcttctatacagttctcctcc

SEQ ID NO: 199198 - DNA, 55 bp, Artificial
  Synthetic oligonucleotide
cccgattgtgtccactttgacaccgatggtccagcgttggacgaagcagaaaggg

SEQ ID NO: 199199 - DNA, 55 bp, Artificial
  Synthetic oligonucleotide
cccgatcttaagtcagattgcaacagcttatgtcgaattggcacgcaatacaccg

SEQ ID NO: 199200 - DNA, 55 bp, Artificial
  Synthetic oligonucleotide
cccgaggccgcttacactccgactcctaagcgcgccggttcacgctctgtattag

SEQ ID NO: 199201 - DNA, 55 bp, Artificial
  Synthetic oligonucleotide
cccgacctcagatttctggaattaccatacactagccgcgtttagtgtccaagga

SEQ ID NO: 199202 - DNA, 55 bp, Artificial
  Synthetic oligonucleotide
cccgaagttaaacgaaacttgattcaggtgcgactaaccgacgcacagctaagtg

SEQ ID NO: 199203 - DNA, 55 bp, Artificial
  Synthetic oligonucleotide
cccgaaaagtatcaatatcctgtgaacgagattaaggcgcatggtggggcggata

SEQ ID NO: 199204 - DNA, 60 bp, Artificial
  Synthetic oligonucleotide
attttgtggagcatactaatcaactttggcgatcaaatgatgccagaaaagctgttacgg

SEQ ID NO: 199205 - DNA, 55 bp, Artificial
  Synthetic oligonucleotide
cattcgtgtcggtaactcgttggtcaagtaatcccaatagcgtggaccatggacc

SEQ ID NO: 199206 - DNA, 55 bp, Artificial
  Synthetic oligonucleotide
cattcatcaacccatagaatcccattgcttctccaacatgactccgaggaaccag

SEQ ID NO: 199207 - DNA, 55 bp, Artificial
  Synthetic oligonucleotide
cattagaattaaaccgatcgcaattggaattgacgtcgtcccaaccgaccagcta

SEQ ID NO: 199208 - DNA, 55 bp, Artificial
  Synthetic oligonucleotide
catgggacccgatgggcggaccacaaaagatctgtacgagaatcagttgcatcaa

SEQ ID NO: 199209 - DNA, 55 bp, Artificial
  Synthetic oligonucleotide
catgcagcagtgacctcagctgatattaccggggaacgtgaagtacacccgagtg

SEQ ID NO: 199210 - DNA, 55 bp, Artificial
  Synthetic oligonucleotide
catgcaagctaaggtagcagtcaacggttcaaatgaccctaacatctgcgttgta

SEQ ID NO: 199211 - DNA, 55 bp, Artificial
  Synthetic oligonucleotide
catgattgcgcaatataacgtctacccaggagaaccgctctacgcagcactgagc

SEQ ID NO: 199212 - DNA, 55 bp, Artificial
  Synthetic oligonucleotide
catgacattgggccacgaatgcggtattatcaatcctcgatggatcgggacactt

SEQ ID NO: 199213 - DNA, 55 bp, Artificial
  Synthetic oligonucleotide
catccttagatggctcattattcgcttcagtggtttcgccgtccactacggggct

SEQ ID NO: 199214 - DNA, 55 bp, Artificial
  Synthetic oligonucleotide
catcctgcaacgcgaactctttataagcacgcttttctttaaagttagctccacg

SEQ ID NO: 199215 - DNA, 60 bp, Artificial
  Synthetic oligonucleotide
atttccacgcctaggcttgatgcctgcatttacggacgcaatctcaacattgcgttcacg

SEQ ID NO: 199216 - DNA, 55 bp, Artificial
  Synthetic oligonucleotide
catcctgacaaaggccagtctggacgcgtctaatatcttatccccaatagttggg

SEQ ID NO: 199217 - DNA, 55 bp, Artificial
  Synthetic oligonucleotide
catcacgacgcaagaggccgttattattttcgtttaaccctcgttgattgggagc

SEQ ID NO: 199218 - DNA, 55 bp, Artificial
  Synthetic oligonucleotide
catcaagtacttaaacaatactagtcaaggtggggactttgcctatgcctttcgt

SEQ ID NO: 199219 - DNA, 55 bp, Artificial
  Synthetic oligonucleotide
agtgaaatccaagtaatcgcctatatatccaatgctaaacttcttaactagcact

SEQ ID NO: 199220 - DNA, 55 bp, Artificial
  Synthetic oligonucleotide
catatcctacgacatgaccgtctttagttggaactggattcaataaaggattagc

SEQ ID NO: 199221 - DNA, 55 bp, Artificial
  Synthetic oligonucleotide
catatattttgtctgattgggacgaaccgactagcgaaacacatattgacgaggg

SEQ ID NO: 199222 - DNA, 55 bp, Artificial
  Synthetic oligonucleotide
cataccattgcgatctggtggcacttgtacctcaattgatccaaactgggtatca

SEQ ID NO: 199223 - DNA, 55 bp, Artificial
  Synthetic oligonucleotide
catacacaacttccgttgtgtcggtaacccaaacttcgttcttgccctgacgatc

SEQ ID NO: 199224 - DNA, 55 bp, Artificial
  Synthetic oligonucleotide
cataatatattgaccagccggaattaacagccgtttatcgtagctctcaggacct

SEQ ID NO: 199225 - DNA, 55 bp, Artificial
  Synthetic oligonucleotide
agtgaagaccctggtatagacacagagcggttaacgtgattccaccgagaactga

SEQ ID NO: 199226 - DNA, 58 bp, Artificial
  Synthetic oligonucleotide
atttacagtatggtgattatttacaaatgttgcactacaagaaagcccatcgagttaa

SEQ ID NO: 199227 - DNA, 55 bp, Artificial
  Synthetic oligonucleotide
cagtgccttaataaaacttacccgccataccacagatgttccagataaatattgg

SEQ ID NO: 199228 - DNA, 55 bp, Artificial
  Synthetic oligonucleotide
cagtgcacaccgacagttagaatgtgcaggcagtgtaggcacgtccttgacgcgg

SEQ ID NO: 199229 - DNA, 55 bp, Artificial
  Synthetic oligonucleotide
cagtcgtacctagcagccaatctggcgacacattcagtactgtcgctaacgccgt

SEQ ID NO: 199230 - DNA, 55 bp, Artificial
  Synthetic oligonucleotide
cagtcagcgcttgaaatcctgtcgattattgcgtatcgacaaccgattactcgag

SEQ ID NO: 199231 - DNA, 55 bp, Artificial
  Synthetic oligonucleotide
cagtcacaaaacgggttacgaagtccgagtcaaataatgattccgggtgacgatg

SEQ ID NO: 199232 - DNA, 55 bp, Artificial
  Synthetic oligonucleotide
cagtatggacaacgacagagcaggccagaaggcgaatagagcccttcagagggac

SEQ ID NO: 199233 - DNA, 55 bp, Artificial
  Synthetic oligonucleotide
caggttggtgggcaacttacgcaagtgggtatataggtgattacttagatttcac

SEQ ID NO: 199234 - DNA, 55 bp, Artificial
  Synthetic oligonucleotide
agtgccattgaaactgcccgacgtaagttagcgttggctaagtccttattattgg

SEQ ID NO: 199235 - DNA, 55 bp, Artificial
  Synthetic oligonucleotide
ccagaataagtggtgaagtctttggctcttgtctaacattcggtacggtaggtga

SEQ ID NO: 199236 - DNA, 53 bp, Artificial
  Synthetic oligonucleotide
ccagaaggatcaatttgaaaaccccaccggtattggtagtacaataactgact

SEQ ID NO: 199237 - DNA, 53 bp, Artificial
  Synthetic oligonucleotide
attgtgtaatctggtactaaaagataataacgttttggagtattagcttttaa

SEQ ID NO: 199238 - DNA, 55 bp, Artificial
  Synthetic oligonucleotide
ccagaaggacttgatccaatcgaagcgacttcattaacctgtgccggcgttacga

SEQ ID NO: 199239 - DNA, 55 bp, Artificial
  Synthetic oligonucleotide
ccactgaaggggatgctggtaagagcactgatgttgagaaaccagcagttcctac

SEQ ID NO: 199240 - DNA, 55 bp, Artificial
  Synthetic oligonucleotide
ccacgtggtgcatggaacttatgcgcagataagctcgagaggtctactcttggtg

SEQ ID NO: 199241 - DNA, 55 bp, Artificial
  Synthetic oligonucleotide
ccacctgatataagtgcgcataaaatcaagatgcgtaggtgggtggtaccgcgat

SEQ ID NO: 199242 - DNA, 55 bp, Artificial
  Synthetic oligonucleotide
ccaccgttaaattctggtcgcactatcgtgtctgcttgctccctttgactgctgg

SEQ ID NO: 199243 - DNA, 55 bp, Artificial
  Synthetic oligonucleotide
ccacatgcacgcgagccttctttacctgatctatcccgtacagaacctctgtagt

SEQ ID NO: 199244 - DNA, 55 bp, Artificial
  Synthetic oligonucleotide
ccacatctagtctcgatttagtcgttcatgattggtataatcataagtcgcggtt

SEQ ID NO: 199245 - DNA, 55 bp, Artificial
  Synthetic oligonucleotide
ccacactagccggcttaccgttaatcaaaacgattgtagcgagtcccttatcacg

SEQ ID NO: 199246 - DNA, 54 bp, Artificial
  Synthetic oligonucleotide
ccacacgggtatcaacccacaccgtcgtccacgtaacgcttctaacgctaagga

SEQ ID NO: 199247 - DNA, 55 bp, Artificial
  Synthetic oligonucleotide
ccaatcgcgcatatggacacgaaagtgtcgatcggtttaggagccaatatcttat

SEQ ID NO: 199248 - DNA, 52 bp, Artificial
  Synthetic oligonucleotide
attgtcgtctagaaaaccaacgcggcgtttaaatggcgtcacgttaccggac

SEQ ID NO: 199249 - DNA, 55 bp, Artificial
  Synthetic oligonucleotide
ccaatcattggccctagtgtaccaagcaaagccgtaaagtcaaaattccttgcag

SEQ ID NO: 199250 - DNA, 55 bp, Artificial
  Synthetic oligonucleotide
ccaataagcgaatgccggcagtctgataatcgacctgcctaagtaattcatagct

SEQ ID NO: 199251 - DNA, 55 bp, Artificial
  Synthetic oligonucleotide
ccaagtaagggtgtgcttgagttcctaaagtattacgtgcacgattggtatcctt

SEQ ID NO: 199252 - DNA, 53 bp, Artificial
  Synthetic oligonucleotide
ccaagaagctaaagaggtccctagcgcctacggggaatttgtatcgataaggg

SEQ ID NO: 199253 - DNA, 55 bp, Artificial
  Synthetic oligonucleotide
ccaagaaaactcgaactcagtatgaatttatcgtgcaggttgggaataagaatga

SEQ ID NO: 199254 - DNA, 55 bp, Artificial
  Synthetic oligonucleotide
ccaactggcgttattattaatgcggcttctgttttattcggtggcctacttggtg

SEQ ID NO: 199255 - DNA, 55 bp, Artificial
  Synthetic oligonucleotide
ccaacggtgactccaagcgatccaggcaaggatacgccagtaccatacgcaccac

SEQ ID NO: 199256 - DNA, 55 bp, Artificial
  Synthetic oligonucleotide
ccaacggtcccattgaaggcgtcaatcgaaagattaaacagattaagcggacagc

SEQ ID NO: 199257 - DNA, 55 bp, Artificial
  Synthetic oligonucleotide
ccaaccgaaattcctgaagtaacgagaattgataatttgtcatatggtccagatc

SEQ ID NO: 199258 - DNA, 55 bp, Artificial
  Synthetic oligonucleotide
ccaaccagtagttggaccaccacttgagtaacgctgtaagttaagcattaatgga

SEQ ID NO: 199259 - DNA, 51 bp, Artificial
  Synthetic oligonucleotide
attgggccgtttaaggcaggtcaaataattaaaattagcgttaataaaaga

SEQ ID NO: 199260 - DNA, 55 bp, Artificial
  Synthetic oligonucleotide
ccaaccagctcatctctaataacaactttgacttgttactactccctagtcttta

SEQ ID NO: 199261 - DNA, 55 bp, Artificial
  Synthetic oligonucleotide
ccaacacaacgcttatcagttagtcagatgaactcttccctcgtaagaagttatt

SEQ ID NO: 199262 - DNA, 55 bp, Artificial
  Synthetic oligonucleotide
agtccgtcaatgcgattcccgataagtcgacgattgcgatttctagtaatccagc

SEQ ID NO: 199263 - DNA, 55 bp, Artificial
  Synthetic oligonucleotide
ccaaacgtactggcattaaagaacgacgcatggtcacagatgaaacaactagtag

SEQ ID NO: 199264 - DNA, 55 bp, Artificial
  Synthetic oligonucleotide
ccaaacgatgcttcgatcatccatacgatccctgaatttaaatggagcgacggac

SEQ ID NO: 199265 - DNA, 55 bp, Artificial
  Synthetic oligonucleotide
ccaaaacaggtgacctacttggcatcaattatctaggtactcacaccatgagaaa

SEQ ID NO: 199266 - DNA, 55 bp, Artificial
  Synthetic oligonucleotide
cattggtcttatcttctgctcattccaatgatgacaattatcactgttccgttcc

SEQ ID NO: 199267 - DNA, 55 bp, Artificial
  Synthetic oligonucleotide
cttctaatggtcagtaaggtcagccgcttcagcggtcaatcgtgtataatatagt

SEQ ID NO: 199268 - DNA, 53 bp, Artificial
  Synthetic oligonucleotide
ctctgatgtaactactttaaccaaacgcttaaccaaattagggtatggggcta

SEQ ID NO: 199269 - DNA, 55 bp, Artificial
  Synthetic oligonucleotide
agatggcgtaccacagcatggtgggaagagcttttatctagcgttgatcgcttgc

SEQ ID NO: 199270 - DNA, 56 bp, Artificial
  Synthetic oligonucleotide
attgctgtgttagtgccaagtatcttattaacttgggtctcagtctttttatacgg

SEQ ID NO: 199271 - DNA, 55 bp, Artificial
  Synthetic oligonucleotide
agcaggcaagacaagtactggaggcttagttgcttgggaacttgctaaacgcggt

SEQ ID NO: 199272 - DNA, 55 bp, Artificial
  Synthetic oligonucleotide
agacacagacaattgatggatatgttggtactactcacgaagtaacggatgcaac

SEQ ID NO: 199273 - DNA, 55 bp, Artificial
  Synthetic oligonucleotide
actgtatttgaccgttggtagatccaatgctcgcttgtcatgcagatgacctagc

SEQ ID NO: 199274 - DNA, 55 bp, Artificial
  Synthetic oligonucleotide
ctctccacaggaaagcatttcaaggatttgtaaccgatttggttctgcaacgact

SEQ ID NO: 199275 - DNA, 55 bp, Artificial
  Synthetic oligonucleotide
ctctcaatccaagattagctgctacaccaccgcccaaaataaacgtcttcggctt

SEQ ID NO: 199276 - DNA, 55 bp, Artificial
  Synthetic oligonucleotide
gacatttaccttagaggaatttagaaatgcccttgatgtacctaagagctatcgt

SEQ ID NO: 199277 - DNA, 55 bp, Artificial
  Synthetic oligonucleotide
ctacttacatacacgtgatgctcaatctgcgggtttaaagtctcctgatgcggcg

SEQ ID NO: 199278 - DNA, 55 bp, Artificial
  Synthetic oligonucleotide
ctagagccatgaacggttggtgttgtggtccactagtgccgcgcagactgcgaac

SEQ ID NO: 199279 - DNA, 55 bp, Artificial
  Synthetic oligonucleotide
ctagagggttgcgatgaataagatacgccctttaggttatagcgttcattaagcc

SEQ ID NO: 199280 - DNA, 55 bp, Artificial
  Synthetic oligonucleotide
ctctaatcaaatttagctgtttgaaatgggcggttagatgagttatttagtagct

SEQ ID NO: 199281 - DNA, 59 bp, Artificial
  Synthetic oligonucleotide
gaagactctgtacgtatggttgaagaagtctcctaagctgaagaaggccattagaggcg

SEQ ID NO: 199282 - DNA, 58 bp, Artificial
  Synthetic oligonucleotide
attgcgaaagatactgaacgggtcttagatgaactagacggcaacacaaccgctatcc

SEQ ID NO: 199283 - DNA, 53 bp, Artificial
  Synthetic oligonucleotide
gaaaaggtccattgtacgtgttaaccattggagttacatttctttccgttagc

SEQ ID NO: 199284 - DNA, 55 bp, Artificial
  Synthetic oligonucleotide
agcaggaatgttaagacaacaacccacatttgcacggagttgatgtcctttacgt

SEQ ID NO: 199285 - DNA, 55 bp, Artificial
  Synthetic oligonucleotide
ctagagttgtagatagtagaccagcggataatggacatgccattagaagacgccg

SEQ ID NO: 199286 - DNA, 55 bp, Artificial
  Synthetic oligonucleotide
gaatcgcaggttcgtaagaatgaaaccatgaactcatacttcggtgtgattcttt

SEQ ID NO: 199287 - DNA, 55 bp, Artificial
  Synthetic oligonucleotide
ctcgtcaaatcaagcggcgtcgcaaccaacatttgcggacggtggggttaacgac

SEQ ID NO: 199288 - DNA, 55 bp, Artificial
  Synthetic oligonucleotide
cttccgagcgtttaatcggacgatcaatccacgcatgttgcggtaaatcctcgcg

SEQ ID NO: 199289 - DNA, 55 bp, Artificial
  Synthetic oligonucleotide
gaaaaggttggggtgttcttaatggtactcaaactcaatcactctcacttccaca

SEQ ID NO: 199290 - DNA, 55 bp, Artificial
  Synthetic oligonucleotide
ctcgggcagtcaacattattagcggcactgtacgtgaagtccgtcgtaattctgc

SEQ ID NO: 199291 - DNA, 55 bp, Artificial
  Synthetic oligonucleotide
ctgtgctaaactgatgcacagcaagttctacactcgtaagaacgtcaagcgtgct

SEQ ID NO: 199292 - DNA, 55 bp, Artificial
  Synthetic oligonucleotide
ctagatagagctgaggtaatcgtcgttacccgcaagtcatagttacggatgtgag

SEQ ID NO: 199293 - DNA, 59 bp, Artificial
  Synthetic oligonucleotide
attgatgtgtcaaagtcctcggataatttctccgttctgccccttgagaggctggatcc

SEQ ID NO: 199294 - DNA, 55 bp, Artificial
  Synthetic oligonucleotide
ctagcaacctgcgtcaaatgctgttaacaacagtcgatcggataccatcgaccga

SEQ ID NO: 199295 - DNA, 55 bp, Artificial
  Synthetic oligonucleotide
ctcggagtctttggcttctctagtgttactgaaacttctggttcactcggagttt

SEQ ID NO: 199296 - DNA, 55 bp, Artificial
  Synthetic oligonucleotide
ctgtgtaatcagctaacatatgatgtgcttgtggtatcgacaagacttctctagc

SEQ ID NO: 199297 - DNA, 55 bp, Artificial
  Synthetic oligonucleotide
ctcgcttaattcgctcaggatacgccgacaaaagctgcttatagccagtatacac

SEQ ID NO: 199298 - DNA, 55 bp, Artificial
  Synthetic oligonucleotide
ctccttcgaacttaatccttgtaccatgttgcaattaaaaccgagtactagctgg

SEQ ID NO: 199299 - DNA, 55 bp, Artificial
  Synthetic oligonucleotide
cttgagcttagattcaacgatcgttcgagcgcatcaaaaggccactggggcaaaa

SEQ ID NO: 199300 - DNA, 55 bp, Artificial
  Synthetic oligonucleotide
gaagtgcctattcagaaaactatcaaggggctaatagggaatacattaccattct

SEQ ID NO: 199301 - DNA, 55 bp, Artificial
  Synthetic oligonucleotide
cttgagcatgttcttactacgcaactcctcagctactactaaatcgtggttcttg

SEQ ID NO: 199302 - DNA, 55 bp, Artificial
  Synthetic oligonucleotide
ctaactgagcatgtctgacgccattagcagttttaatgtgagacttagtttgtct

SEQ ID NO: 199303 - DNA, 55 bp, Artificial
  Synthetic oligonucleotide
agccacaccagcattcaaagattgcacgtgtcctgtcatcggaatagttaatgtt

SEQ ID NO: 199304 - DNA, 60 bp, Artificial
  Synthetic oligonucleotide
attctaggatctctctcagcttgacgttttcgttcattcgcatacactacaaactcacgt

SEQ ID NO: 199305 - DNA, 55 bp, Artificial
  Synthetic oligonucleotide
ctaaggacggtaatgttttatgtgtgaaacacgctgaagcacttggattaactcc

SEQ ID NO: 199306 - DNA, 55 bp, Artificial
  Synthetic oligonucleotide
ctaagtgaactttcgagcagaggttacgactattgaccaaggcccgtcccaggcc

SEQ ID NO: 199307 - DNA, 55 bp, Artificial
  Synthetic oligonucleotide
cttttgctatccacactataactgtgcataaagtaatcgttccacctcggtcatg

SEQ ID NO: 199308 - DNA, 55 bp, Artificial
  Synthetic oligonucleotide
ctgtacaaacttagctaatacacctggtatgtcctatccatgggcggctgaaaag

SEQ ID NO: 199309 - DNA, 55 bp, Artificial
  Synthetic oligonucleotide
ctaataaagtagccgatcgaccgcacttgcggaccaatgttcatcccttgtgttc

SEQ ID NO: 199310 - DNA, 55 bp, Artificial
  Synthetic oligonucleotide
gaagttatgaagcctgcgtatattctaatgatggcgcgcgagattactatctata

SEQ ID NO: 199311 - DNA, 55 bp, Artificial
  Synthetic oligonucleotide
gaccgtgccacgacggtatcattagaggtcgctgctgcaagtttccggtagtgac

SEQ ID NO: 199312 - DNA, 55 bp, Artificial
  Synthetic oligonucleotide
agaacaagcgtcagatgtgggatcctgagggaatccgtaataatggaatggcgcc

SEQ ID NO: 199313 - DNA, 55 bp, Artificial
  Synthetic oligonucleotide
ctaatcgatataaaccagccgttaaatggcttcggtcattagggacagcaatgtg

SEQ ID NO: 199314 - DNA, 55 bp, Artificial
  Synthetic oligonucleotide
ctacacaattaaccgggatttgagtccttatacagtctacgagtcagaccttgta

SEQ ID NO: 199315 - DNA, 60 bp, Artificial
  Synthetic oligonucleotide
attctactgattcaggcataatgctttttggcgttcccattaatatcagaatttgtggag

SEQ ID NO: 199316 - DNA, 55 bp, Artificial
  Synthetic oligonucleotide
gaccgctcgttccaccgatttgcatgtgattcttatgagtttccgtcagattcag

SEQ ID NO: 199317 - DNA, 55 bp, Artificial
  Synthetic oligonucleotide
ctctttgagagtgtcgtctgacatgctctgagttaatttaggtgctgcgttcttc

SEQ ID NO: 199318 - DNA, 55 bp, Artificial
  Synthetic oligonucleotide
cttctctaagccccttataagttcacgatatactcttctaaacatttctattgga

SEQ ID NO: 199319 - DNA, 53 bp, Artificial
  Synthetic oligonucleotide
ctacactacttccgggaacgcctttatcttaaagcaatccctcggggtactga

SEQ ID NO: 199320 - DNA, 55 bp, Artificial
  Synthetic oligonucleotide
actcttagtctatttgcagaagaatccgcctaagaatcctgaaagtagcattgcc

SEQ ID NO: 199321 - DNA, 55 bp, Artificial
  Synthetic oligonucleotide
gaagttcctagtctgccagctcaccctaactgcagatgtgttctgggtgcttact

SEQ ID NO: 199322 - DNA, 55 bp, Artificial
  Synthetic oligonucleotide
ctgtcaaggattcgaccaatatttaaacggtacttgggaattcggcatggctaag

SEQ ID NO: 199323 - DNA, 55 bp, Artificial
  Synthetic oligonucleotide
ctaccacccctgtgtcgccgtttgccacaattgtctcacgccaacgtttagtgcc

SEQ ID NO: 199324 - DNA, 55 bp, Artificial
  Synthetic oligonucleotide
agatatagtgtcgaatttgaaaggaagcggttttcatgcggattagttcgttatc

SEQ ID NO: 199325 - DNA, 55 bp, Artificial
  Synthetic oligonucleotide
agatcgcggttctattacacagtatgctagattatttatctcgagactcatcccc

SEQ ID NO: 199326 - DNA, 57 bp, Artificial
  Synthetic oligonucleotide
attcgtatttactagacatagtttaaagcttgagttagcaagcgtcaagcccttggc

SEQ ID NO: 199327 - DNA, 55 bp, Artificial
  Synthetic oligonucleotide
ctctggacatataacttacgctttctgcgcagggttgagagtcacgtcttgcgcc

SEQ ID NO: 199328 - DNA, 55 bp, Artificial
  Synthetic oligonucleotide
gaagttgtcaaacagggcttacaggatttggcaaatgagaccggcctatcgatta

SEQ ID NO: 199329 - DNA, 55 bp, Artificial
  Synthetic oligonucleotide
gaataaattctatgtgtaagtgcacattggcctcgtttcactcggcctgctgatt

SEQ ID NO: 199330 - DNA, 55 bp, Artificial
  Synthetic oligonucleotide
cttctacacgtactttagcgcagatattacgcattacgtgaaccaaacagcgctg

SEQ ID NO: 199331 - DNA, 55 bp, Artificial
  Synthetic oligonucleotide
gaaacaccaagttggcgagttaaggcaatcatttgacggattgctgactcttgac

SEQ ID NO: 199332 - DNA, 55 bp, Artificial
  Synthetic oligonucleotide
ctcatccttaccattcttcgaatgaaccttggacatctgtcggctcttctcagga

SEQ ID NO: 199333 - DNA, 55 bp, Artificial
  Synthetic oligonucleotide
ctatcgacattaagcagatctgcacaaattcccgcatagttagtttctggtcggt

SEQ ID NO: 199334 - DNA, 55 bp, Artificial
  Synthetic oligonucleotide
cttagcccgattttcgaagacaaacttcgcttcgtcaagcaatccatcagtcatc

SEQ ID NO: 199335 - DNA, 54 bp, Artificial
  Synthetic oligonucleotide
gaaacactcggttctgacgtttcgacccgatatgccgtaaagaaatcggctacg

SEQ ID NO: 199336 - DNA, 55 bp, Artificial
  Synthetic oligonucleotide
gaaacgcgtttacgtttgcggtgcttcattggataccaccaccttcgtaaggatc

SEQ ID NO: 199337 - DNA, 60 bp, Artificial
  Synthetic oligonucleotide
attcagagtccagctgatgatcaagcagccattgacgatacaataaaagctctgtttgaa

SEQ ID NO: 199338 - DNA, 55 bp, Artificial
  Synthetic oligonucleotide
ctgttttaaggggctgccaattgaggtcagggcttgcacttggtcagcggttaag

SEQ ID NO: 199339 - DNA, 55 bp, Artificial
  Synthetic oligonucleotide
agcaatatagctgaactcagaaaccttacggacggtagcctaaaagaactaggcg

SEQ ID NO: 199340 - DNA, 55 bp, Artificial
  Synthetic oligonucleotide
ctatgcctaaaagcgacgaaagacactgactagtgccaattcggttagtttgtat

SEQ ID NO: 199341 - DNA, 55 bp, Artificial
  Synthetic oligonucleotide
gaattccattcgttacctggatgtgcatgaccaattgaactggtcggaatagggc

SEQ ID NO: 199342 - DNA, 55 bp, Artificial
  Synthetic oligonucleotide
ctatgtctgcggtattgatccgcttaacgccaccaaccacttgcatcggcaaatc

SEQ ID NO: 199343 - DNA, 55 bp, Artificial
  Synthetic oligonucleotide
agcacatcaacagcacttgccaattgccttccccactaccctaattgtgctagcg

SEQ ID NO: 199344 - DNA, 55 bp, Artificial
  Synthetic oligonucleotide
agcaatggtgaaagatgggataaatcgattggctgaagggattcgtaagtatagc

SEQ ID NO: 199345 - DNA, 55 bp, Artificial
  Synthetic oligonucleotide
gaaccagtcataacgttgacgtggaagttagtgtcaatttgaagggctgataaaa

SEQ ID NO: 199346 - DNA, 55 bp, Artificial
  Synthetic oligonucleotide
ctcaacctgactcctgtgccttgctacgtcgcacaaacaatcgactgacgtcgct

SEQ ID NO: 199347 - DNA, 55 bp, Artificial
  Synthetic oligonucleotide
cttagagttcttaagaccagctaatgtagtcttagttgcaacggtcttagcaccc

SEQ ID NO: 199348 - DNA, 60 bp, Artificial
  Synthetic oligonucleotide
attcaagcagtccaatccgcactgaaccatcgtcccagacgtattctgaactatcttcgc

SEQ ID NO: 199349 - DNA, 55 bp, Artificial
  Synthetic oligonucleotide
cttaacaacggattaactaatttcgcttctgatgccggtagtgaaacccaattgc

SEQ ID NO: 199350 - DNA, 55 bp, Artificial
  Synthetic oligonucleotide
ctcagacaagccgttaagcccggctgaagccgatttgatgagtcagaaggcaaga

SEQ ID NO: 199351 - DNA, 55 bp, Artificial
  Synthetic oligonucleotide
gaaccactatatcgaggtcaaaggaaaacgtcgagaactttatccaacatctgag

SEQ ID NO: 199352 - DNA, 55 bp, Artificial
  Synthetic oligonucleotide
gaacacgtaatcgaggcaatgtcagaacacaagccaattgttggccgttcagcag

SEQ ID NO: 199353 - DNA, 55 bp, Artificial
  Synthetic oligonucleotide
agactcgccgaactgaggtgcttcttactcaagaagacttctaaccccaagccgt

SEQ ID NO: 199354 - DNA, 55 bp, Artificial
  Synthetic oligonucleotide
ctcaattcaaggcggtactaaaatgttggacgaagaattaaaggaacacggcatc

SEQ ID NO: 199355 - DNA, 55 bp, Artificial
  Synthetic oligonucleotide
ctcaactacggttaacaccctggcgcacctgaatgacattcaaaacgtcaaccag

SEQ ID NO: 199356 - DNA, 55 bp, Artificial
  Synthetic oligonucleotide
ctcaactagctgtcttgttagatgccggaacgagaatgttcttgtctgacacggc

SEQ ID NO: 199357 - DNA, 55 bp, Artificial
  Synthetic oligonucleotide
gaaatatggtatctggcattgcaccatatacaagaaccactttaggctcaagctc

SEQ ID NO: 199358 - DNA, 51 bp, Artificial
  Synthetic oligonucleotide
cttaatttgcaagaaaacattcctttgagccgttatacttttacccaaacc

SEQ ID NO: 199359 - DNA, 58 bp, Artificial
  Synthetic oligonucleotide
attatctgttggccaactgacaaccggtgtaactatccctgaatggacagcggtgtta

SEQ ID NO: 199360 - DNA, 55 bp, Artificial
  Synthetic oligonucleotide
gacaatcaactgaatcgatggagttatttgcgataaagcacggtttgcgatcacg

SEQ ID NO: 199361 - DNA, 55 bp, Artificial
  Synthetic oligonucleotide
gacaatagttactaaggatcctcatgcttggtttgttaccgagggtgaagacggt

SEQ ID NO: 199362 - DNA, 55 bp, Artificial
  Synthetic oligonucleotide
gacattggtggcttcatagcgttaacaaagctaggtctattgccctccttctttg

SEQ ID NO: 199363 - DNA, 55 bp, Artificial
  Synthetic oligonucleotide
ctagcagtacaaggggcgactgacgtgcaaggttatcacaagttcacttacaccg

SEQ ID NO: 199364 - DNA, 55 bp, Artificial
  Synthetic oligonucleotide
cttcagcttccgcttttctgcgtaagattgcaatccttgtttcgagatctggtgg

SEQ ID NO: 199365 - DNA, 55 bp, Artificial
  Synthetic oligonucleotide
cttcaattaagaggcaaatggtatattcaccttggcgctaccacggctataccgg

SEQ ID NO: 199366 - DNA, 55 bp, Artificial
  Synthetic oligonucleotide
ctagcgcccgtgatcaaatgtcgcttaagattgttctttcagctaacccaacgcc

SEQ ID NO: 199367 - DNA, 55 bp, Artificial
  Synthetic oligonucleotide
ctcctatttgggattataataaattgcttcggatcggtaattgcgtttgttggac

SEQ ID NO: 199368 - DNA, 55 bp, Artificial
  Synthetic oligonucleotide
ctccgtaccgcaaacagcctactatctgcctagttacatgaatccagcagccatc

SEQ ID NO: 199369 - DNA, 55 bp, Artificial
  Synthetic oligonucleotide
ctagcttcgcgtcgtcacaaggctcacgtctgaacgataatcagcccgtgactcc

SEQ ID NO: 199370 - DNA, 60 bp, Artificial
  Synthetic oligonucleotide
attatcatgtagtgcgcattatcatgtagtgcgcattatcatgtagtgcgcattatcatg

SEQ ID NO: 199371 - DNA, 55 bp, Artificial
  Synthetic oligonucleotide
gaaaatcatagtttacgtaatgatttgagtgaagctgagggccacaactgtgaac

SEQ ID NO: 199372 - DNA, 55 bp, Artificial
  Synthetic oligonucleotide
ctaggacgctcgctttatcgagcacgtgaaacacctaactttaccagtcgcacag

SEQ ID NO: 199373 - DNA, 55 bp, Artificial
  Synthetic oligonucleotide
ctaggactagtcaagtaccaacagaatacgacagtcagaacagcactgcgaatac

SEQ ID NO: 199374 - DNA, 55 bp, Artificial
  Synthetic oligonucleotide
ctaggtaggacaattttctccggttagctacgcttgggcaacgcgtcactacgtg

SEQ ID NO: 199375 - DNA, 55 bp, Artificial
  Synthetic oligonucleotide
gacatggcttaatgccaaggaaacaagacgcgatacaacgactgttgtcgcaatg

SEQ ID NO: 199376 - DNA, 55 bp, Artificial
  Synthetic oligonucleotide
agacaggagcggagggccgtgtcgatgatgcgacctgcagttcgacgaccagcaa

SEQ ID NO: 199377 - DNA, 55 bp, Artificial
  Synthetic oligonucleotide
ctagtagttgcttgcttggtagtatctacaccgtcttctaacatccgtgaagata

SEQ ID NO: 199378 - DNA, 55 bp, Artificial
  Synthetic oligonucleotide
cttcaaatcgggcgttggtatgcactaacttagtaaagtttgagcgtgcaaatcg

SEQ ID NO: 199379 - DNA, 55 bp, Artificial
  Synthetic oligonucleotide
ctccgcttagaacagattggactcggctaggccagtctcctagttggaatggacg

SEQ ID NO: 199380 - DNA, 55 bp, Artificial
  Synthetic oligonucleotide
ctagtgcgccacgttgaaaacgtgataaagtagatgtacccaaagtaatcacccc

SEQ ID NO: 199381 - DNA, 58 bp, Artificial
  Synthetic oligonucleotide
attataattagattgcgtgtaaactcgataagccccagttttgcgcatagtgtgggta

SEQ ID NO: 199382 - DNA, 55 bp, Artificial
  Synthetic oligonucleotide
cttattattttggggagtcttaaccaatgtgactccaagcttatacaacataggg

SEQ ID NO: 199383 - DNA, 55 bp, Artificial
  Synthetic oligonucleotide
agacagtatagcagcgcctgtagtaggcaccaaatacgcgttaggtgagggctgc

SEQ ID NO: 199384 - DNA, 55 bp, Artificial
  Synthetic oligonucleotide
ctagttgtaccgtaatcttctgcgaaaggaataccagcctcactacgatctactg

SEQ ID NO: 199385 - DNA, 55 bp, Artificial
  Synthetic oligonucleotide
ctccccactgaccagttggatgaatacgtgggcttaatcactgcacaacttgcgc

SEQ ID NO: 199386 - DNA, 55 bp, Artificial
  Synthetic oligonucleotide
ctccccaaacacgtgatacttacggtgaattggtatcgatgatggaaacaaagga

SEQ ID NO: 199387 - DNA, 55 bp, Artificial
  Synthetic oligonucleotide
agcactgattcatcgagcgttacctcagatgatacgtctagtacaacaacggcca

SEQ ID NO: 199388 - DNA, 55 bp, Artificial
  Synthetic oligonucleotide
ctcccagacaccggacaagccggtaggaatattatagcatgccaatttgtcctca

SEQ ID NO: 199389 - DNA, 55 bp, Artificial
  Synthetic oligonucleotide
ctcccaacgtaagatgacctgaccaacgctcttaccgtacttttcaccgattgat

SEQ ID NO: 199390 - DNA, 55 bp, Artificial
  Synthetic oligonucleotide
ctgtttagtaaatctacactatgtcccttaatacctgcatcatcttgctgattcg

SEQ ID NO: 199391 - DNA, 54 bp, Artificial
  Synthetic oligonucleotide
ctggctggggatcgggattaacctgctttggaccgtcctttacctggccttagc

SEQ ID NO: 199392 - DNA, 60 bp, Artificial
  Synthetic oligonucleotide
gaacgctattttgaagtatctatgagttcaagaactgctatattacgtgatattatgcag

SEQ ID NO: 199393 - DNA, 49 bp, Artificial
  Synthetic oligonucleotide
attagtttttaaattacataagttttttgcgacgtgggcttttttcacg

SEQ ID NO: 199394 - DNA, 52 bp, Artificial
  Synthetic oligonucleotide
cgtgtccggatcagttaaccctgacgttaacgtgtaatccaaactttgcccc

SEQ ID NO: 199395 - DNA, 55 bp, Artificial
  Synthetic oligonucleotide
cgtgtttgatcttgcgtgtagtctacattagtaacattaatgccttgaactagtc

SEQ ID NO: 199396 - DNA, 55 bp, Artificial
  Synthetic oligonucleotide
agccgttacgatggcatgcttagccggactttacgtcgttagcttcctggtctcc

SEQ ID NO: 199397 - DNA, 55 bp, Artificial
  Synthetic oligonucleotide
cgttaacgataacgaatgagaagtcaccaacatctctaccaggagtagtagtgta

SEQ ID NO: 199398 - DNA, 54 bp, Artificial
  Synthetic oligonucleotide
gaagacgttttgactacattcttgctaacccgcctttcaatttgaaggagtggg

SEQ ID NO: 199399 - DNA, 55 bp, Artificial
  Synthetic oligonucleotide
gacgcaaacagtggatgttcaactgcgaataactccaggaattgctgcacacacc

SEQ ID NO: 199400 - DNA, 55 bp, Artificial
  Synthetic oligonucleotide
gaaggctcttaaaagctcatataagccgattgtgaacgttgaagcggttcggacg

SEQ ID NO: 199401 - DNA, 55 bp, Artificial
  Synthetic oligonucleotide
cgttaatggtgtcggttgttaagccaccagctgaaccatactacgatgagcgaac

SEQ ID NO: 199402 - DNA, 55 bp, Artificial
  Synthetic oligonucleotide
cttgtccgtttccacctaagtagcttgattcaacgaagaaatcagacggacgcaa

SEQ ID NO: 199403 - DNA, 55 bp, Artificial
  Synthetic oligonucleotide
cgttacaaagttcgcaaatgtctcgaattttccaaacattaggtgcggatcctaa

SEQ ID NO: 199404 - DNA, 60 bp, Artificial
  Synthetic oligonucleotide
cgccatatgcatagccagttagacttccatctgcgccaacaacgcggtgacagggaacca

SEQ ID NO: 199405 - DNA, 55 bp, Artificial
  Synthetic oligonucleotide
cgttacccttggttatcattggagaacatgccgaggttgacgttaagagtgccga

SEQ ID NO: 199406 - DNA, 55 bp, Artificial
  Synthetic oligonucleotide
cgttataaaacgagtctagttgacataattgtgcttagccgcagtgcctgccccg

SEQ ID NO: 199407 - DNA, 52 bp, Artificial
  Synthetic oligonucleotide
ctgccgttgaactttgaaagccgtcggaacaggtttaaagtcgactttggga

SEQ ID NO: 199408 - DNA, 55 bp, Artificial
  Synthetic oligonucleotide
cgttcaatactttagatgggtaggaaacttgttccatggcgatcttggtacaagt

SEQ ID NO: 199409 - DNA, 55 bp, Artificial
  Synthetic oligonucleotide
gaagggtgggtccaggtagatctattcgttttaccagtcgtaactatactgctcg

SEQ ID NO: 199410 - DNA, 55 bp, Artificial
  Synthetic oligonucleotide
cgttcagatgcagcccttgatacttgctcgagatggccacacgatgaatcgcaat

SEQ ID NO: 199411 - DNA, 55 bp, Artificial
  Synthetic oligonucleotide
acttgcgagatgccttagaggaccaagccgtgttaccgtttaacgtcgaacatgt

SEQ ID NO: 199412 - DNA, 55 bp, Artificial
  Synthetic oligonucleotide
ctgccagaaatagtgccatggattcgtgaatctaactgttatgaatatggggatt

SEQ ID NO: 199413 - DNA, 55 bp, Artificial
  Synthetic oligonucleotide
cgttcgcagtggattaatcgcaatcccaagttcggtaacgaccacatcgatactg

SEQ ID NO: 199414 - DNA, 55 bp, Artificial
  Synthetic oligonucleotide
ctggcttcgcacattcagccttgtacttgacttctagtcagacgggctcgctgga

SEQ ID NO: 199415 - DNA, 51 bp, Artificial
  Synthetic oligonucleotide
cgcattttgtttaatggaaccgttcggattaaaaatattggtctgttttaa

SEQ ID NO: 199416 - DNA, 55 bp, Artificial
  Synthetic oligonucleotide
ctgcagattaggatgatcaccaattgaccaggtaagaatttggttagttgccaag

SEQ ID NO: 199417 - DNA, 55 bp, Artificial
  Synthetic oligonucleotide
ctgcacccttttcagtagcttcttgtttcatacgttcaattgctaccattcgagc

SEQ ID NO: 199418 - DNA, 55 bp, Artificial
  Synthetic oligonucleotide
ctgcaaaagtagcctggatttctactgtctgtcctgttgtattgatggtagcgtt

SEQ ID NO: 199419 - DNA, 55 bp, Artificial
  Synthetic oligonucleotide
gaagtcgctggttggcacgcaactaatttggcagcggataagccgtatcactacc

SEQ ID NO: 199420 - DNA, 55 bp, Artificial
  Synthetic oligonucleotide
cttgtagcttgtggtggaataactggacatttatctcgtgcatcaccgcataaag

SEQ ID NO: 199421 - DNA, 55 bp, Artificial
  Synthetic oligonucleotide
agagcgtttaactggtcgaattgcctttggcagtgctaatgcgcgcgaacttttg

SEQ ID NO: 199422 - DNA, 52 bp, Artificial
  Synthetic oligonucleotide
ctttagcccgcccggcgaggggaaatgcggtccagctgggtcagggttttag

SEQ ID NO: 199423 - DNA, 55 bp, Artificial
  Synthetic oligonucleotide
gaagagccagtcattctgatcgcttgtggggacggctatgcagaacttttggcta

SEQ ID NO: 199424 - DNA, 55 bp, Artificial
  Synthetic oligonucleotide
ctgctactacggcataattgttcattgcacctaatttaaccaaggtcgcggtgtt

SEQ ID NO: 199425 - DNA, 55 bp, Artificial
  Synthetic oligonucleotide
ctgctacaataactccttctgccgctgagcgaaacttaatctacattcagagtgc

SEQ ID NO: 199426 - DNA, 60 bp, Artificial
  Synthetic oligonucleotide
cgcattgctgaagctgacttcaacaacgcttgtcaattgcatgctatcaacaaggaagat

SEQ ID NO: 199427 - DNA, 55 bp, Artificial
  Synthetic oligonucleotide
ctgctttggtcgctgttggtgccagctacttattcccagtcgacattattttgcc

SEQ ID NO: 199428 - DNA, 55 bp, Artificial
  Synthetic oligonucleotide
ctgctaatgacacttgatctattttaaagcctgttacacaaggagcacatggcac

SEQ ID NO: 199429 - DNA, 55 bp, Artificial
  Synthetic oligonucleotide
cgtgagttaccaggatccgtccttgttgacgctaaccaaaatatgggacagctcg

SEQ ID NO: 199430 - DNA, 55 bp, Artificial
  Synthetic oligonucleotide
ctggaactgattgggtacgacgtgattcaacacgtgcgcaaatgcgggtggctgt

SEQ ID NO: 199431 - DNA, 55 bp, Artificial
  Synthetic oligonucleotide
ctttagaagaattacaagccgttcatgagtattggcggtcaatgaatcgttactc

SEQ ID NO: 199432 - DNA, 55 bp, Artificial
  Synthetic oligonucleotide
gaagcactgacgacggctttggcatgagtatcagttagaacagaaattgtcactg

SEQ ID NO: 199433 - DNA, 55 bp, Artificial
  Synthetic oligonucleotide
gaagcccggcccttactcgcgccggtagatttgtccaacaccacatcaattccgg

SEQ ID NO: 199434 - DNA, 54 bp, Artificial
  Synthetic oligonucleotide
cgtgatttaggtggattagttttcgtcgaccttagagattataagggaatcgta

SEQ ID NO: 199435 - DNA, 55 bp, Artificial
  Synthetic oligonucleotide
ctgcggcagcatcaacgcaatgatcgttaacgtgataatggttgccagtgatcgg

SEQ ID NO: 199436 - DNA, 55 bp, Artificial
  Synthetic oligonucleotide
ctttactccaacagttggacccgcctggcgtgggggctcgctcgctccaagagtg

SEQ ID NO: 199437 - DNA, 60 bp, Artificial
  Synthetic oligonucleotide
cgcagaacaattgaaagcgacttttcgcttctgacctattacaatgccgagaacaatcga

SEQ ID NO: 199438 - DNA, 55 bp, Artificial
  Synthetic oligonucleotide
gacgcccttagtgtgacgcatttcgtaacgaactacaaatgttatgaacgcagag

SEQ ID NO: 199439 - DNA, 55 bp, Artificial
  Synthetic oligonucleotide
cgtgcacctgattcgtttagtccagcgttacattcctaagatgccgacagggata

SEQ ID NO: 199440 - DNA, 55 bp, Artificial
  Synthetic oligonucleotide
ctggaccatattgaataccgttgaacaagtcgatttcagcttgcgtccgcttctt

SEQ ID NO: 199441 - DNA, 55 bp, Artificial
  Synthetic oligonucleotide
gaagcgtgtgatgattagcttcgagtacaaggtggtaccgcataagtgcccttgc

SEQ ID NO: 199442 - DNA, 55 bp, Artificial
  Synthetic oligonucleotide
ctgcgcttgaaacgaccggttcaagattgatccacatgagatatgttccctcgag

SEQ ID NO: 199443 - DNA, 55 bp, Artificial
  Synthetic oligonucleotide
acttggggattagttagaagagcgctgaagctggtcataacagcgtgtccacctt

SEQ ID NO: 199444 - DNA, 55 bp, Artificial
  Synthetic oligonucleotide
ctgcgatatttagcagatccagggtccgccctttatcgcggtagtgtatcgcttt

SEQ ID NO: 199445 - DNA, 55 bp, Artificial
  Synthetic oligonucleotide
cgtgctgacttactagctgcccttccagctgaagaggttcaccatgaattaggcg

SEQ ID NO: 199446 - DNA, 55 bp, Artificial
  Synthetic oligonucleotide
ctggctcctagcaatttccgtgatatcttatgcaccggaaacccttgatcctttg

SEQ ID NO: 199447 - DNA, 55 bp, Artificial
  Synthetic oligonucleotide
ctgcctatttagttatcacatccgatagaggaatggtgggtagctataatgccaa

SEQ ID NO: 199448 - DNA, 58 bp, Artificial
  Synthetic oligonucleotide
cgcagaaactgaacgaaaaaggctggaatatagaacgtggcgagcgtggtagcaagcg

SEQ ID NO: 199449 - DNA, 55 bp, Artificial
  Synthetic oligonucleotide
agaacgtaaatcttcaccagataacggaacatctgatacctctatggactgctca

SEQ ID NO: 199450 - DNA, 55 bp, Artificial
  Synthetic oligonucleotide
ctttatagcattagaacttgacacccgcaacaaagaagctgatccatttactcca

SEQ ID NO: 199451 - DNA, 55 bp, Artificial
  Synthetic oligonucleotide
gaagctaagtcggtttattgaagacaccaagccccgagattatgttgaggcgttg

SEQ ID NO: 199452 - DNA, 55 bp, Artificial
  Synthetic oligonucleotide
cgtggttttgtcattcgagactttgtccattatgtagctggcgccgatcgatgaa

SEQ ID NO: 199453 - DNA, 55 bp, Artificial
  Synthetic oligonucleotide
cttgttgagccagttttgaactgctaatactgcttcatctgccataatgcagacc

SEQ ID NO: 199454 - DNA, 54 bp, Artificial
  Synthetic oligonucleotide
ctgtaacctatttaggtcaagaccacattaataagcgtgggaacccgattgccc

SEQ ID NO: 199455 - DNA, 54 bp, Artificial
  Synthetic oligonucleotide
ctttcatccccgctgtcaaaacgattctaggtttcggttcaggaacttggacta

SEQ ID NO: 199456 - DNA, 55 bp, Artificial
  Synthetic oligonucleotide
cgttgtaaccgtaatccgccgcaatttgcgtaactgctagtgcgtctggtgctcc

SEQ ID NO: 199457 - DNA, 55 bp, Artificial
  Synthetic oligonucleotide
cttgatgcgccccaaaattgttgtcaatacctctaatggcaagattcaatttggc

SEQ ID NO: 199458 - DNA, 55 bp, Artificial
  Synthetic oligonucleotide
ctaaagtcagttggattagggaatagggcaaagtctacagcatattggttagtag

SEQ ID NO: 199459 - DNA, 59 bp, Artificial
  Synthetic oligonucleotide
cgcaaacttgggcgctaggctcgcctgcgtgagtagtaacgatatcggcgttgtgaact

SEQ ID NO: 199460 - DNA, 53 bp, Artificial
  Synthetic oligonucleotide
gaacggttctaccgataaagaagtggaagaacaaactggaattaatcgccgaa

SEQ ID NO: 199461 - DNA, 55 bp, Artificial
  Synthetic oligonucleotide
ctaaacgtcgtgtaccaattcgtgttacagtttataactctgatggctcaacaaa

SEQ ID NO: 199462 - DNA, 55 bp, Artificial
  Synthetic oligonucleotide
ctgaagatgtatgaaaggatcgaccaaagtgggattcctttggacttgcggagcc

SEQ ID NO: 199463 - DNA, 55 bp, Artificial
  Synthetic oligonucleotide
ctttgatattgatcggtacataacgcttgatgccgaagacaaagacgacatgttg

SEQ ID NO: 199464 - DNA, 55 bp, Artificial
  Synthetic oligonucleotide
ctttgggtacatctactttatcacgttttcaacgtggcgcactagcacaactggt

SEQ ID NO: 199465 - DNA, 55 bp, Artificial
  Synthetic oligonucleotide
gacgaatcatctgtcctagagtcagcattaagactgaggcgttgacatcgatcac

SEQ ID NO: 199466 - DNA, 55 bp, Artificial
  Synthetic oligonucleotide
cttggaagataactccgaaatgaggtgcatacaatgagttttgcagtggctagaa

SEQ ID NO: 199467 - DNA, 55 bp, Artificial
  Synthetic oligonucleotide
ctttggtgtgcctagtactaaagccatctggcatgaaggatcacaagccgtggac

SEQ ID NO: 199468 - DNA, 55 bp, Artificial
  Synthetic oligonucleotide
ctgagcgtaagatgttctctcgcttaaaggggatacggaacaacccagatcgctg

SEQ ID NO: 199469 - DNA, 55 bp, Artificial
  Synthetic oligonucleotide
cgtttgctttcctgaagacgtcccaagatagacctgaacccttcccttgacgata

SEQ ID NO: 199470 - DNA, 58 bp, Artificial
  Synthetic oligonucleotide
cgattgcggcaggtaatctagccaaaactggggttagattagcgcagtcacacccgat

SEQ ID NO: 199471 - DNA, 55 bp, Artificial
  Synthetic oligonucleotide
ctgagaaaaccttctctcgttcagatgaggatccttttacagctaattacaatgg

SEQ ID NO: 199472 - DNA, 55 bp, Artificial
  Synthetic oligonucleotide
ctgacgaagcggttaatgttcgtgcttttgtggagggtaagccgcatcatacggt

SEQ ID NO: 199473 - DNA, 55 bp, Artificial
  Synthetic oligonucleotide
agaacaccgctgacgcgctaacctgtgtccgagccttagcccacggcctgcctta

SEQ ID NO: 199474 - DNA, 55 bp, Artificial
  Synthetic oligonucleotide
cttgcgcggctttcagacaagtaccgcaagccggacttaattaatgcgttgattt

SEQ ID NO: 199475 - DNA, 55 bp, Artificial
  Synthetic oligonucleotide
cttttacgagagttaaggacgttgacgtagaaatgactgttgtcaagccatctgc

SEQ ID NO: 199476 - DNA, 54 bp, Artificial
  Synthetic oligonucleotide
acttgggttcccagatgttggcgtaagaaagacgagtgttaataccagtaacga

SEQ ID NO: 199477 - DNA, 55 bp, Artificial
  Synthetic oligonucleotide
cttgatatcagtcgattcattgagcaatccatgcacgtcaatccgatcttggggt

SEQ ID NO: 199478 - DNA, 55 bp, Artificial
  Synthetic oligonucleotide
ctaacccgatttgcgaccacttcatactctgttgttagatcacgcgcattttgcc

SEQ ID NO: 199479 - DNA, 55 bp, Artificial
  Synthetic oligonucleotide
gaacgtgccaaagtaagagcatctagttcaactgtagtagttgcttcctgaggta

SEQ ID NO: 199480 - DNA, 55 bp, Artificial
  Synthetic oligonucleotide
ctgggattagcaaataggacatttaagttgggcaaaattagagtggaggtgtcaa

SEQ ID NO: 199481 - DNA, 60 bp, Artificial
  Synthetic oligonucleotide
cgattgattcattactaaatcgagtatctgtggatattgatttagaaattgttacagtag

SEQ ID NO: 199482 - DNA, 55 bp, Artificial
  Synthetic oligonucleotide
gacgagatttctgctaatgatttgggcttttacagtgatgagagtgcaattaacg

SEQ ID NO: 199483 - DNA, 55 bp, Artificial
  Synthetic oligonucleotide
ctggtagtggctcaacgttagctacagcaatgaaaatgagtcgaaaatttatagc

SEQ ID NO: 199484 - DNA, 52 bp, Artificial
  Synthetic oligonucleotide
gaccttagaacggctagttagccagacgccgttaaccgacggggcgattaac

SEQ ID NO: 199485 - DNA, 55 bp, Artificial
  Synthetic oligonucleotide
cgttgggacgaacttagtcagtatgttgattaataggaaggagaacaccgatgtc

SEQ ID NO: 199486 - DNA, 53 bp, Artificial
  Synthetic oligonucleotide
agaactcacgccactattccatggtctaaccgtccgcaaaaaatacggtaagg

SEQ ID NO: 199487 - DNA, 55 bp, Artificial
  Synthetic oligonucleotide
cttggtcaatatcaacacctgcagctgagtattccacaaactgatcaaatgccca

SEQ ID NO: 199488 - DNA, 51 bp, Artificial
  Synthetic oligonucleotide
ctggtgaataccgtttgagccaccgtgtttcccctaagggttactacaagg

SEQ ID NO: 199489 - DNA, 55 bp, Artificial
  Synthetic oligonucleotide
gaacgggtcttagatgaactagacggcaacacaaccgctatcctgtatgcgcctg

SEQ ID NO: 199490 - DNA, 54 bp, Artificial
  Synthetic oligonucleotide
agttgaccttccaatctggtctgactccggttcatttatcgacaaagccctcgc

SEQ ID NO: 199491 - DNA, 54 bp, Artificial
  Synthetic oligonucleotide
taaatcaatgcctaaactccgcaaacaggtggatatggctggccatttcgatgg

SEQ ID NO: 199492 - DNA, 59 bp, Artificial
  Synthetic oligonucleotide
cgatgattatgggtaaccgcaatgggctacatgaggtggcccaatcgatctttacaggt

SEQ ID NO: 199493 - DNA, 54 bp, Artificial
  Synthetic oligonucleotide
ccgtaccaaacgccgaacatcttcacctttatgaagtaaatcattgtattggaa

SEQ ID NO: 199494 - DNA, 54 bp, Artificial
  Synthetic oligonucleotide
taatggtttatcagaagttgaactcatttcaaataaaaagcacttttctagtag

SEQ ID NO: 199495 - DNA, 54 bp, Artificial
  Synthetic oligonucleotide
tgacgatcagcggagctgactaatcgtcaatttcctgcaaaagggtaccctctt

SEQ ID NO: 199496 - DNA, 54 bp, Artificial
  Synthetic oligonucleotide
gataattggcaagacgtttatttcaagtttaccctaaatggacaatgagcgtta

SEQ ID NO: 199497 - DNA, 54 bp, Artificial
  Synthetic oligonucleotide
aatcccaacatcaactcaaccatgaagacttgtatgctctcttttcgagacatc

SEQ ID NO: 199498 - DNA, 54 bp, Artificial
  Synthetic oligonucleotide
gttcgtggtaaggataagagagtcggtcgttatactggtaagactgctcgtcgt

SEQ ID NO: 199499 - DNA, 54 bp, Artificial
  Synthetic oligonucleotide
gtcttttactgggaaggttgagctaagcgatggtatttgggtatgcgtaccaca

SEQ ID NO: 199500 - DNA, 54 bp, Artificial
  Synthetic oligonucleotide
taacatctggtagattttgactatctacgccggtaaatgcggtcaagttcgggt

SEQ ID NO: 199501 - DNA, 54 bp, Artificial
  Synthetic oligonucleotide
tgccatcaccgttggaccgtatttttccatgccagtggacgcggtgccaggagg

SEQ ID NO: 199502 - DNA, 54 bp, Artificial
  Synthetic oligonucleotide
acgcgcccagggcagttgttaaccctgcagccatggtagcccatgcaatgatac

SEQ ID NO: 199503 - DNA, 56 bp, Artificial
  Synthetic oligonucleotide
gaacgcggcgaacgtggtagcaagcggaagcacttaagcgttgaacggtacaaaga

SEQ ID NO: 199504 - DNA, 56 bp, Artificial
  Synthetic oligonucleotide
cgatgaaaacattgcttattttgaagtcccaagtcatgaacaaggtaaaataagag

SEQ ID NO: 199505 - DNA, 54 bp, Artificial
  Synthetic oligonucleotide
gcgggcctcgtctcccgaggtgacaaaagccgtccgcgaattagtacggattgc

SEQ ID NO: 199506 - DNA, 54 bp, Artificial
  Synthetic oligonucleotide
gtgacacggcaaatagcccttaacgacgcattctagattaccttcaccatgcgt

SEQ ID NO: 199507 - DNA, 54 bp, Artificial
  Synthetic oligonucleotide
cttaaacgttgtgtgaatattcgttttggggatgatgtccgcccaatgactgaa

SEQ ID NO: 199508 - DNA, 54 bp, Artificial
  Synthetic oligonucleotide
gcagttagtggtttccacccaaggtaaacaaatcgatgcccttaacgctgctag

SEQ ID NO: 199509 - DNA, 54 bp, Artificial
  Synthetic oligonucleotide
tacaggaacgttgaagcaagccttacggcaaaaagcagccaaccgtgagaccta

SEQ ID NO: 199510 - DNA, 54 bp, Artificial
  Synthetic oligonucleotide
ccgatgtctgctatcgggggcaatgtttcaaccaatgccggcggactaagcggt

SEQ ID NO: 199511 - DNA, 52 bp, Artificial
  Synthetic oligonucleotide
acaataccaaaagcctgacgtcttggaaaacaagcccttgttttcccgagcc

SEQ ID NO: 199512 - DNA, 54 bp, Artificial
  Synthetic oligonucleotide
gcccagcatggcctatgttagtattccgtgctcctaaaggctggggggggccta

SEQ ID NO: 199513 - DNA, 54 bp, Artificial
  Synthetic oligonucleotide
ccccttgtggtcatttgcttagcgtaagtaacgatcagttcaatcatgattagt

SEQ ID NO: 199514 - DNA, 54 bp, Artificial
  Synthetic oligonucleotide
taccagtgagttgtcaggcgatgaggtaactgttacaattcctacacgtcgttg

SEQ ID NO: 199515 - DNA, 59 bp, Artificial
  Synthetic oligonucleotide
cgatctattaggaattaattatctaggtactcatacgatgcgcaaaactggggcttatc

SEQ ID NO: 199516 - DNA, 54 bp, Artificial
  Synthetic oligonucleotide
gtacatgacgtgccagtaaaaagtacatgacgtgccagtaaaaagtacatgacg

SEQ ID NO: 199517 - DNA, 54 bp, Artificial
  Synthetic oligonucleotide
aattacatcttgcatcctatgttggaagacaggcgattcgtacattaagtgttc

SEQ ID NO: 199518 - DNA, 54 bp, Artificial
  Synthetic oligonucleotide
aattaaaccactttcgcacgatcgttgccaataactgcgctagtccagtgaccc

SEQ ID NO: 199519 - DNA, 54 bp, Artificial
  Synthetic oligonucleotide
gtcactgtacttttacgccataatcgggcgttgcgcaaatttaatcaagattac

SEQ ID NO: 199520 - DNA, 54 bp, Artificial
  Synthetic oligonucleotide
gtggacaatcctaacgcccgccgggtcaacaagaaacccatgccgactatcggg

SEQ ID NO: 199521 - DNA, 53 bp, Artificial
  Synthetic oligonucleotide
gaaggtcaacgtgtgggttttgtaacgattgaaggaaaacgaggaccacaagc

SEQ ID NO: 199522 - DNA, 54 bp, Artificial
  Synthetic oligonucleotide
gcatctaacgaaaacggctctttggaaactgattgcgaagatggggcgttgagg

SEQ ID NO: 199523 - DNA, 54 bp, Artificial
  Synthetic oligonucleotide
gtcgaacctttgagacgatcggacagaaggcatcggcaaaagttcgcaaatcct

SEQ ID NO: 199524 - DNA, 54 bp, Artificial
  Synthetic oligonucleotide
gaagtagttgttacagctgggttgcctactggtgactatgccgaccaagaacgc

SEQ ID NO: 199525 - DNA, 54 bp, Artificial
  Synthetic oligonucleotide
caaggtcttaaaggactactaccaagaagccgacgtgatggagttgttaaagac

SEQ ID NO: 199526 - DNA, 57 bp, Artificial
  Synthetic oligonucleotide
cgatcactcgaccaaataagtttacgaacatcaatcattaattaaccctccttcgca

SEQ ID NO: 199527 - DNA, 54 bp, Artificial
  Synthetic oligonucleotide
atacctagaagcctttaaatcgtctcagagacgattttagggcttctggtaggg

SEQ ID NO: 199528 - DNA, 54 bp, Artificial
  Synthetic oligonucleotide
taagcggggaccccaatcacgtgctggattcagtgcgaatccggtcgtactacc

SEQ ID NO: 199529 - DNA, 54 bp, Artificial
  Synthetic oligonucleotide
gtggtatactgggattagcaaataggacatttaagttgggcaaaattagagtgg

SEQ ID NO: 199530 - DNA, 54 bp, Artificial
  Synthetic oligonucleotide
taactgaccaagcacgttggcagtggccagtccgttcatgtcaggttgagccga

SEQ ID NO: 199531 - DNA, 54 bp, Artificial
  Synthetic oligonucleotide
tgatatgctttaaccgaactacaaagcatccattagctgtgtgggctttgtaat

SEQ ID NO: 199532 - DNA, 54 bp, Artificial
  Synthetic oligonucleotide
tggttaatccagctcgatttggcagtcgcatgcaccaggacaagtcggccacgc

SEQ ID NO: 199533 - DNA, 54 bp, Artificial
  Synthetic oligonucleotide
tgatcgccgttgccaaaccttcgcgtaagaccttaccttgcttagccgtcgcta

SEQ ID NO: 199534 - DNA, 54 bp, Artificial
  Synthetic oligonucleotide
gtttgggactttgtccgcgaagccggtgttgactcagacggtaagactgtcctt

SEQ ID NO: 199535 - DNA, 54 bp, Artificial
  Synthetic oligonucleotide
taacttatcatggatacgaataaacgaacctcataaagacacaataaacggcaa

SEQ ID NO: 199536 - DNA, 54 bp, Artificial
  Synthetic oligonucleotide
ccgtcgcaagcgcgacttggatacgcgggggctgagcgttcggctccacacctt

SEQ ID NO: 199537 - DNA, 60 bp, Artificial
  Synthetic oligonucleotide
cgatattatggccagtttgttcgtagatcatgacagcacccgttttgcgcatagtgtgac

SEQ ID NO: 199538 - DNA, 54 bp, Artificial
  Synthetic oligonucleotide
ccttggctttagtaaatacataaaagattagctcttctcacgtggctgaatgag

SEQ ID NO: 199539 - DNA, 52 bp, Artificial
  Synthetic oligonucleotide
gtctgggtttggggcgacagcgcccaagggtttaaaaaagacgtttcagcga

SEQ ID NO: 199540 - DNA, 54 bp, Artificial
  Synthetic oligonucleotide
gtctgctaccaccaaaccagaataagtaacgcgaagtaaagtcagttaatagtg

SEQ ID NO: 199541 - DNA, 54 bp, Artificial
  Synthetic oligonucleotide
tgccgtggtcctttcaagtaacgccaagagccaaaaggacgttcgccaggccac

SEQ ID NO: 199542 - DNA, 54 bp, Artificial
  Synthetic oligonucleotide
gtatgcgtcgtaatgatcgtcactacatttcgataagatacgaacggaatagca

SEQ ID NO: 199543 - DNA, 54 bp, Artificial
  Synthetic oligonucleotide
gtatgggttctgcattcttgacgacagatagcaaaggtattttgcgagtcactg

SEQ ID NO: 199544 - DNA, 54 bp, Artificial
  Synthetic oligonucleotide
gcctaagattttgtccttatcgccatttgcaacgactgggaagcgactatagcc

SEQ ID NO: 199545 - DNA, 54 bp, Artificial
  Synthetic oligonucleotide
aatgctacctgaaccaaagtgtcctaaaacatcatgtggaatagtagtaccgac

SEQ ID NO: 199546 - DNA, 54 bp, Artificial
  Synthetic oligonucleotide
aacggatgagtatgatagcctagaaattcacggttgttaaccttttcgacatac

SEQ ID NO: 199547 - DNA, 54 bp, Artificial
  Synthetic oligonucleotide
gtgcgtggttcaatttcgggtgatgaagcatcgaactacggtctttacgcgttt

SEQ ID NO: 199548 - DNA, 60 bp, Artificial
  Synthetic oligonucleotide
cgatacatgatcgacaatagtttcatcagtgacatgtcttgcccgtaaatctaaggctat

SEQ ID NO: 199549 - DNA, 54 bp, Artificial
  Synthetic oligonucleotide
gcatcctggactgccaagattggttcaccagcagctacggtcccgagtaggggc

SEQ ID NO: 199550 - DNA, 54 bp, Artificial
  Synthetic oligonucleotide
taatcaacgcttggtcaccacagaagaaagtagtgagtgcttcttgccagagtg

SEQ ID NO: 199551 - DNA, 53 bp, Artificial
  Synthetic oligonucleotide
aacggaaaataaactggtccaatcttggttacaatttggacctgcaactcgaa

SEQ ID NO: 199552 - DNA, 54 bp, Artificial
  Synthetic oligonucleotide
gcgcctctggacttaccacttcggtacgctccatgccatgtgactgatcgcggt

SEQ ID NO: 199553 - DNA, 54 bp, Artificial
  Synthetic oligonucleotide
gcattgtaatggtttactctgctagtgcgattaaccttacttatgtcggagtta

SEQ ID NO: 199554 - DNA, 54 bp, Artificial
  Synthetic oligonucleotide
gaatagaaaagtctcgtaaacttacgtgcacttcgctgtgtcaggggaagtttg

SEQ ID NO: 199555 - DNA, 54 bp, Artificial
  Synthetic oligonucleotide
actgttaagtttggtggggatgctactaagacttacgatggtagtgcaattagc

SEQ ID NO: 199556 - DNA, 53 bp, Artificial
  Synthetic oligonucleotide
taaggggaattattccctttgtaattatgagcggaatatctttaataatggtt

SEQ ID NO: 199557 - DNA, 54 bp, Artificial
  Synthetic oligonucleotide
tcgatttaagggcgttggtcacttgactgaccacccaggaaattcgatcagcgg

SEQ ID NO: 199558 - DNA, 54 bp, Artificial
  Synthetic oligonucleotide
cagtttcattcctatttgcgtcgatataagagagttatacaacgtcacggtact

SEQ ID NO: 199559 - DNA, 59 bp, Artificial
  Synthetic oligonucleotide
cgagtttttaatcgcacagctttgcgagatattcaagatcaattaccgacttatttaca

SEQ ID NO: 199560 - DNA, 54 bp, Artificial
  Synthetic oligonucleotide
tcgcacgaaaacaactgcgtggaaacgaatcgaaggcgtacattataccaccga

SEQ ID NO: 199561 - DNA, 54 bp, Artificial
  Synthetic oligonucleotide
tttctttggcatctaagaccgatgtttggttgaagagtggcgtttctaaggacc

SEQ ID NO: 199562 - DNA, 54 bp, Artificial
  Synthetic oligonucleotide
agctcaaatgattatcaacagataagcttttaaagatagatccgttagagcgtg

SEQ ID NO: 199563 - DNA, 54 bp, Artificial
  Synthetic oligonucleotide
tatcttgaaccggttgcacgtttggaactccaccggcgatgttaacggccgcaa

SEQ ID NO: 199564 - DNA, 54 bp, Artificial
  Synthetic oligonucleotide
gcaaattatactaaagcaaggtatttttcgtttattatttatccagaaagtatc

SEQ ID NO: 199565 - DNA, 54 bp, Artificial
  Synthetic oligonucleotide
tcagcgatttttgctgatccgccttttttggtttgtgttgtaaataaattttta

SEQ ID NO: 199566 - DNA, 54 bp, Artificial
  Synthetic oligonucleotide
agaaaaagattaaggaagtcaagggcttgaatcgtttcttcgaggctcatatac

SEQ ID NO: 199567 - DNA, 52 bp, Artificial
  Synthetic oligonucleotide
gggcttcgaatacgaggccccttttagatttagctagtaatccgtattaaag

SEQ ID NO: 199568 - DNA, 54 bp, Artificial
  Synthetic oligonucleotide
atgactgcttcgacaatatctaaatagctaaccaagtccgaatttcgtgccttg

SEQ ID NO: 199569 - DNA, 54 bp, Artificial
  Synthetic oligonucleotide
tccctcagcgagcttttaagggcaaactacggaacctgggcgattactaatatc

SEQ ID NO: 199570 - DNA, 57 bp, Artificial
  Synthetic oligonucleotide
cgagcgtatttttagggtgatctgacaagcccctaaattaagaaagagcataaggca

SEQ ID NO: 199571 - DNA, 54 bp, Artificial
  Synthetic oligonucleotide
cgttaacgcgaatacagtcgtatcaatttggatatgaaggccgtcaaccagatt

SEQ ID NO: 199572 - DNA, 54 bp, Artificial
  Synthetic oligonucleotide
acgatcccgtgttagtagcggggacggatggtgtggggactaagctcttagtcg

SEQ ID NO: 199573 - DNA, 54 bp, Artificial
  Synthetic oligonucleotide
tatccggtaacgtcttacaaacggtcaccaacaatccaatggccgaccctagtc

SEQ ID NO: 199574 - DNA, 52 bp, Artificial
  Synthetic oligonucleotide
gctctctcctttttttaacacgattttggggaacttgaacgtagtctcaacc

SEQ ID NO: 199575 - DNA, 54 bp, Artificial
  Synthetic oligonucleotide
gctctaaacctttgagctttggtcaagtgctcgactgattagtactaggtccgc

SEQ ID NO: 199576 - DNA, 54 bp, Artificial
  Synthetic oligonucleotide
attagcttatgcccttactcaccctaatagtgaatttttgtggaacgcaaaacc

SEQ ID NO: 199577 - DNA, 54 bp, Artificial
  Synthetic oligonucleotide
tcgcttcgaagtaacgcacttaaaagttgttaagcgacgaacgtcagtccgagt

SEQ ID NO: 199578 - DNA, 54 bp, Artificial
  Synthetic oligonucleotide
atatttttgcgatatggcgtccaaagcacatatcccatacgctcgtctctttgg

SEQ ID NO: 199579 - DNA, 54 bp, Artificial
  Synthetic oligonucleotide
cgtgggttttggtcctatccgaaatgccacgtgccgcttccatggacggaacct

SEQ ID NO: 199580 - DNA, 54 bp, Artificial
  Synthetic oligonucleotide
tttgtcacacttgaatcacgtaaccgacgttccttatgatggtcatgatcactt

SEQ ID NO: 199581 - DNA, 60 bp, Artificial
  Synthetic oligonucleotide
cgagcaagttcacaacgccgatatcgttactactcacgcaggcgagcctagcgcccaagt

SEQ ID NO: 199582 - DNA, 54 bp, Artificial
  Synthetic oligonucleotide
aagtcgtgttcccattccacgatcactcggaattcgcacaagtggtgaccggtt

SEQ ID NO: 199583 - DNA, 53 bp, Artificial
  Synthetic oligonucleotide
acttttttgtaatgctgataacagtttttccttgtttgataattagtgggtgg

SEQ ID NO: 199584 - DNA, 54 bp, Artificial
  Synthetic oligonucleotide
gattgttaaatctggtagtaataaagatggcatacacacaaatagagctattaa

SEQ ID NO: 199585 - DNA, 54 bp, Artificial
  Synthetic oligonucleotide
ttctagtaggaataattattacattagtttcagctgctagcgtgatttatgaga

SEQ ID NO: 199586 - DNA, 54 bp, Artificial
  Synthetic oligonucleotide
cagcactgaccccctcaaggcgtctttgccctttgaccaaaaccggcacggctt

SEQ ID NO: 199587 - DNA, 54 bp, Artificial
  Synthetic oligonucleotide
accagcttacattgctgtcatagtagggatattaacggaatcgtcgattcatag

SEQ ID NO: 199588 - DNA, 54 bp, Artificial
  Synthetic oligonucleotide
tcacaagtcactaccgaactatacgatgtatcaatctatgcgtctgcatatccc

SEQ ID NO: 199589 - DNA, 54 bp, Artificial
  Synthetic oligonucleotide
tttacccaccgttcgatcaaaccacctaagacgaacatacccataatagaagct

SEQ ID NO: 199590 - DNA, 54 bp, Artificial
  Synthetic oligonucleotide
cattagtcgcgaacttggttataaggattttggacacgtaagcgtccatcagcg

SEQ ID NO: 199591 - DNA, 54 bp, Artificial
  Synthetic oligonucleotide
accgcaccatcagatgcggcaactaaccaacctagcaaagcgtctggagcatca

SEQ ID NO: 199592 - DNA, 57 bp, Artificial
  Synthetic oligonucleotide
cgaccgaaattttgctttagatgaatacgaaaagcaacagtattattatgtcgttga

SEQ ID NO: 199593 - DNA, 54 bp, Artificial
  Synthetic oligonucleotide
aaaagtatactaattatggggttgcaacggcagctgttaagcttgtcaatgcaa

SEQ ID NO: 199594 - DNA, 54 bp, Artificial
  Synthetic oligonucleotide
cgttggaggcctattgttgcttgcgggggctcgaaaacgaagtcacgagtgact

SEQ ID NO: 199595 - DNA, 54 bp, Artificial
  Synthetic oligonucleotide
cagttaaatataaacccataaaagaatcacggcacacattaattgatctagtgc

SEQ ID NO: 199596 - DNA, 54 bp, Artificial
  Synthetic oligonucleotide
cgttgatttagcgcaaacactcattccgattagccctgatattaaagagccgta

SEQ ID NO: 199597 - DNA, 54 bp, Artificial
  Synthetic oligonucleotide
ggctaaaggtagactcttcatagttgcgagtagagcagttagatgcccataaac

SEQ ID NO: 199598 - DNA, 54 bp, Artificial
  Synthetic oligonucleotide
aagctagcctctgggagcccccgcaagcaacaataggcctccaatgttcggttt

SEQ ID NO: 199599 - DNA, 54 bp, Artificial
  Synthetic oligonucleotide
tccgcgatatggctggcgggtgatgtttatggttgtcgggattgtggcagcaat

SEQ ID NO: 199600 - DNA, 54 bp, Artificial
  Synthetic oligonucleotide
tttatgagattgataatttaactttaacacagcaatctattattcacttttttg

SEQ ID NO: 199601 - DNA, 54 bp, Artificial
  Synthetic oligonucleotide
cggcgcgttccgcacctaagtgtggagacggttggtgagcgttttactgagacc

SEQ ID NO: 199602 - DNA, 54 bp, Artificial
  Synthetic oligonucleotide
actcgtattaacggctgtaaggttgtcaactttgtgtgtttgaagtgagacata

SEQ ID NO: 199603 - DNA, 56 bp, Artificial
  Synthetic oligonucleotide
cgtgaactaaccctcatagctaatttttggcaccaaggtacgaaggcttatcaagc

SEQ ID NO: 199604 - DNA, 52 bp, Artificial
  Synthetic oligonucleotide
atgccccacccgttctaactggtcctgctggccaaagacgtaccgggaaacg

SEQ ID NO: 199605 - DNA, 54 bp, Artificial
  Synthetic oligonucleotide
ttgggctatgtacgttcaactgaggttaccattaatcacgaagcggatcagccg

SEQ ID NO: 199606 - DNA, 54 bp, Artificial
  Synthetic oligonucleotide
ccaacggatgaaccaagttgaagggatggtccctcaggtcctagaaacaagcct

SEQ ID NO: 199607 - DNA, 54 bp, Artificial
  Synthetic oligonucleotide
caggggatgctatgagcgtgtcagagaatacctttaacgttttaaccaactctg

SEQ ID NO: 199608 - DNA, 54 bp, Artificial
  Synthetic oligonucleotide
ccaactactgacagtgctagaatgagtaacgctggagcaaaccaagttatcttg

SEQ ID NO: 199609 - DNA, 52 bp, Artificial
  Synthetic oligonucleotide
gggaaaagtgcggaccaacctccaaatgggccgttggactaagctagggcgg

SEQ ID NO: 199610 - DNA, 54 bp, Artificial
  Synthetic oligonucleotide
ttggctatggcgataagtccattgcatgattgtgatgaaaaaagggatagcaaa

SEQ ID NO: 199611 - DNA, 54 bp, Artificial
  Synthetic oligonucleotide
atgggttacaactaatctatcatgggctggttaaagcgaacttaattagaccct

SEQ ID NO: 199612 - DNA, 54 bp, Artificial
  Synthetic oligonucleotide
gcaacccgagcacgcttagcagcaaaagcctttcgtcatacggcagcctatgat

SEQ ID NO: 199613 - DNA, 54 bp, Artificial
  Synthetic oligonucleotide
ctaacgccaggtccagctaatgtggctgcaacagttccgggtaagatgaaaata

SEQ ID NO: 199614 - DNA, 58 bp, Artificial
  Synthetic oligonucleotide
gaacctcagctgaagcttcggtagggctatcgccattcaccgacaaaagcacgttacc

SEQ ID NO: 199615 - DNA, 57 bp, Artificial
  Synthetic oligonucleotide
cgtatgtaggtaattatggtcgcaaatgtaggtaattatggtcgcaaatgtaggtaa

SEQ ID NO: 199616 - DNA, 54 bp, Artificial
  Synthetic oligonucleotide
atggtcctattggcgtgcttgaaaccgggagcgcaattggtatgctacttggca

SEQ ID NO: 199617 - DNA, 54 bp, Artificial
  Synthetic oligonucleotide
gggagcccaaaacgtattgctgtcgttaggtagtcaaggcgcgctcttagttaa

SEQ ID NO: 199618 - DNA, 54 bp, Artificial
  Synthetic oligonucleotide
agctaaccccaatgtagtctttcttaatgagaagtgttgacgcccattagcgtg

SEQ ID NO: 199619 - DNA, 54 bp, Artificial
  Synthetic oligonucleotide
ccaagaatgaatcaactacccttgacgtaagccaagcctttaagacgtctactg

SEQ ID NO: 199620 - DNA, 54 bp, Artificial
  Synthetic oligonucleotide
aggacgctgtctggggtctcgcctggaccatgactagtaatgtagccagccaat

SEQ ID NO: 199621 - DNA, 54 bp, Artificial
  Synthetic oligonucleotide
atttaggacccaatcaccaaatggtaccgtcacacgttgattgtctgattttgc

SEQ ID NO: 199622 - DNA, 52 bp, Artificial
  Synthetic oligonucleotide
cgatcccactaagccgcaaaggacacgtaagccctttaagcccaaagtttat

SEQ ID NO: 199623 - DNA, 54 bp, Artificial
  Synthetic oligonucleotide
agtgaacggcataaccgaccatttcaggggaccaacctaggtttagcttctcag

SEQ ID NO: 199624 - DNA, 54 bp, Artificial
  Synthetic oligonucleotide
ttttgtagttaaactagctggagattgtaagtcgcccttatgctcaattgcagc

SEQ ID NO: 199625 - DNA, 54 bp, Artificial
  Synthetic oligonucleotide
agcgccctcaatggggccatcgtcttcaaaagaacgtcgtacccgagctaaggc

SEQ ID NO: 199626 - DNA, 55 bp, Artificial
  Synthetic oligonucleotide
cgtacactcgtaatggatttcctatgggaggaagatactatggttactaagtacg

SEQ ID NO: 199627 - DNA, 54 bp, Artificial
  Synthetic oligonucleotide
ggttagaattatattccgtaccacatatgatacgtttaaacgtaacactctgtc

SEQ ID NO: 199628 - DNA, 54 bp, Artificial
  Synthetic oligonucleotide
aacgtaacactgcatcacaacaagtcgtagaagcagcgaaactttacaaagccg

SEQ ID NO: 199629 - DNA, 52 bp, Artificial
  Synthetic oligonucleotide
agcgcaactaatttacgaactaaggaagttaaccatacacccttaggaatac

SEQ ID NO: 199630 - DNA, 54 bp, Artificial
  Synthetic oligonucleotide
cgaggggatgcaaagagacaacgatcctgtatttaacttcgcctccgaattgct

SEQ ID NO: 199631 - DNA, 54 bp, Artificial
  Synthetic oligonucleotide
cactgaaacccacgggagtgcgacttggggtaatctaaaagaattgagcgacca

SEQ ID NO: 199632 - DNA, 54 bp, Artificial
  Synthetic oligonucleotide
tgaaccttgtatcttgacctggtgcagttccatttagtaagaaccatcgcaaag

SEQ ID NO: 199633 - DNA, 54 bp, Artificial
  Synthetic oligonucleotide
agcacggcacgggctgattagcgttcgtacttagcctcgagccttgtggcgacg

SEQ ID NO: 199634 - DNA, 54 bp, Artificial
  Synthetic oligonucleotide
ggttggagcagtacgaaccgatatacctcttttggagtggagtaattctggcgg

SEQ ID NO: 199635 - DNA, 53 bp, Artificial
  Synthetic oligonucleotide
aaagcttccctgggcgaccccggaatcaattcgaactccgagtgacccagccg

SEQ ID NO: 199636 - DNA, 54 bp, Artificial
  Synthetic oligonucleotide
atcgggagctacccgattccaatttgcacaccgactttatcattttggtcgtgc

SEQ ID NO: 199637 - DNA, 54 bp, Artificial
  Synthetic oligonucleotide
cggtccaccactgttggtattccgagttttcttactccaccattaggcttcgga

SEQ ID NO: 199638 - DNA, 54 bp, Artificial
  Synthetic oligonucleotide
gaaagtatcccgactgattggcgagtatgtttggaaaaattaggattggctatg

SEQ ID NO: 199639 - DNA, 54 bp, Artificial
  Synthetic oligonucleotide
gcgtaccaagcagctttataagcgcaatcaggtaattaaggccacgcgagggac

SEQ ID NO: 199640 - DNA, 53 bp, Artificial
  Synthetic oligonucleotide
aacggttacgaaagataccgaagttttgaccgagtatgtccgtcagggactca

SEQ ID NO: 199641 - DNA, 54 bp, Artificial
  Synthetic oligonucleotide
tccagatcccttaggtgcaaatacaccttgaggttcaactaatacttcgccata

SEQ ID NO: 199642 - DNA, 54 bp, Artificial
  Synthetic oligonucleotide
cccatgcccattgtggcagcaaaccgaccaccttttgcgatttcggtaatgaca

SEQ ID NO: 199643 - DNA, 54 bp, Artificial
  Synthetic oligonucleotide
cgactaatcaatcaacaattgagacgcaacaaacaactatttctaggcaaaatg

SEQ ID NO: 199644 - DNA, 54 bp, Artificial
  Synthetic oligonucleotide
caaaaaatacggtaaggggcgcggcaagccagtgatcgggtacgccttcgcttg

SEQ ID NO: 199645 - DNA, 54 bp, Artificial
  Synthetic oligonucleotide
taccggctaagtatttcagtgcaacatacgttgagtgtagtaccgtagtcaaat

SEQ ID NO: 199646 - DNA, 54 bp, Artificial
  Synthetic oligonucleotide
ttagagtggaggtgtcaaaaatgaaatatattatagatgcaatcataaggggaa

SEQ ID NO: 199647 - DNA, 53 bp, Artificial
  Synthetic oligonucleotide
actccaagtgttccaacagtaactccaaccgatccaggtaaggatacaccggt

SEQ ID NO: 199648 - DNA, 59 bp, Artificial
  Synthetic oligonucleotide
cgggaagtctcgttcgctagataaaagatcttctctatctgctttgtcggaataacatc

SEQ ID NO: 199649 - DNA, 54 bp, Artificial
  Synthetic oligonucleotide
ggagatattgcatagctgaattggtgttcgacaagaaaataacacccgtccaag

SEQ ID NO: 199650 - DNA, 54 bp, Artificial
  Synthetic oligonucleotide
gacactcctaccgccgaaggaatctgttcagattgcgccaggtaataggtaaag

SEQ ID NO: 199651 - DNA, 54 bp, Artificial
  Synthetic oligonucleotide
acgcgcatttgatgattcagataccattgatctggtcaatgcagatcgtttcct

SEQ ID NO: 199652 - DNA, 54 bp, Artificial
  Synthetic oligonucleotide
taggtctcacggttggctgctttttgccgcaaggcttgcttcaacgttcctgta

SEQ ID NO: 199653 - DNA, 54 bp, Artificial
  Synthetic oligonucleotide
taggtctaaccaacgatgatcgcatggcttacatgttaatcaaagatcgctatc

SEQ ID NO: 199654 - DNA, 54 bp, Artificial
  Synthetic oligonucleotide
taggtacgccaacaggatcaaatgctgaaggtcggaatgttttggcggcattta

SEQ ID NO: 199655 - DNA, 54 bp, Artificial
  Synthetic oligonucleotide
tcgttatggtccctggtgtcaattctctgcttgcaacgcagtgctacgtgcccg

SEQ ID NO: 199656 - DNA, 54 bp, Artificial
  Synthetic oligonucleotide
gagaacttggagtagcgtcgtcggtattttaggttcggacatggctgcttataa

SEQ ID NO: 199657 - DNA, 54 bp, Artificial
  Synthetic oligonucleotide
tcgttccacctactttgccaatccttagccattgacttcaagccatctccggct

SEQ ID NO: 199658 - DNA, 54 bp, Artificial
  Synthetic oligonucleotide
gatcttagccaaatcgcgtccagttaaaagcactctcttcccagtagctttagc

SEQ ID NO: 199659 - DNA, 52 bp, Artificial
  Synthetic oligonucleotide
cgggaaaaaacgtgcatgttttgaccagggtcgttgcaactgtttaccaaaa

SEQ ID NO: 199660 - DNA, 54 bp, Artificial
  Synthetic oligonucleotide
taggcacgtgaccattgtgggccttgaagacgcgacagtgacgttgttggatga

SEQ ID NO: 199661 - DNA, 54 bp, Artificial
  Synthetic oligonucleotide
ttccgccctgcgacatactgttcggcaaatatgcaactgggctccggccaaact

SEQ ID NO: 199662 - DNA, 54 bp, Artificial
  Synthetic oligonucleotide
acgcaagttgggtcaagtcacggtcaccagttacgatcgtggttgtgaacccgg

SEQ ID NO: 199663 - DNA, 54 bp, Artificial
  Synthetic oligonucleotide
tctcttaatgacttaccgtaataatacttggcggcagtccccataccataaatc

SEQ ID NO: 199664 - DNA, 54 bp, Artificial
  Synthetic oligonucleotide
tctgatatctgccctcttctacagctcgaggatcatacttaggtgctaactctg

SEQ ID NO: 199665 - DNA, 53 bp, Artificial
  Synthetic oligonucleotide
gaaaatcgaccaaaacctcgtagctaacaccaaaatcattacccaataaacca

SEQ ID NO: 199666 - DNA, 54 bp, Artificial
  Synthetic oligonucleotide
aagccggtaaattcgcccacgagcacggttatggcgatgcgatctatctggacc

SEQ ID NO: 199667 - DNA, 54 bp, Artificial
  Synthetic oligonucleotide
cgtccatgggggactgttggctcgccgggacttaccggaacacatggcgaccct

SEQ ID NO: 199668 - DNA, 54 bp, Artificial
  Synthetic oligonucleotide
tccccgaattgttgtccccagcttaaaacgtcgccaggatgttcggtatgcacg

SEQ ID NO: 199669 - DNA, 54 bp, Artificial
  Synthetic oligonucleotide
atagataacttagaattaataggtgttccgattgctattagtcctctgcatgat

SEQ ID NO: 199670 - DNA, 60 bp, Artificial
  Synthetic oligonucleotide
cggcaaggcaattgggctcaatcgttatcagctctatcgttacgtattgattccccaagc

SEQ ID NO: 199671 - DNA, 54 bp, Artificial
  Synthetic oligonucleotide
tcattgccactgattcggttgctggtcacttcgtacatcccaataccgctgttt

SEQ ID NO: 199672 - DNA, 54 bp, Artificial
  Synthetic oligonucleotide
ctagttgtggcattgtaattcgccaaaacttttctcgttcactggcaccataca

SEQ ID NO: 199673 - DNA, 54 bp, Artificial
  Synthetic oligonucleotide
ccattggggtaggaacgttcccaatccgaagcaatgttgaccccaggcaactca

SEQ ID NO: 199674 - DNA, 54 bp, Artificial
  Synthetic oligonucleotide
ggtgccggcaattgaccccggatactcgttcgtcagcatgtacgtgtcctattc

SEQ ID NO: 199675 - DNA, 54 bp, Artificial
  Synthetic oligonucleotide
cttatatgatgtggccacagagaagcgataactggcgtgagggcgcaaagccgg

SEQ ID NO: 199676 - DNA, 53 bp, Artificial
  Synthetic oligonucleotide
tccgaactggatgagagtcggcagacccacttgctgacggccattcaggaccg

SEQ ID NO: 199677 - DNA, 53 bp, Artificial
  Synthetic oligonucleotide
gttgacaatgagcgcgtttgttttagttcctggtggggacgctaaaatccgtt

SEQ ID NO: 199678 - DNA, 53 bp, Artificial
  Synthetic oligonucleotide
agtcgcgatcccggctgttagccaacgcaaactgattggcaaaaacgccccca

SEQ ID NO: 199679 - DNA, 53 bp, Artificial
  Synthetic oligonucleotide
tccatcattggcttttccgcgttacactccggggtcaacccgggcttagtcgc

SEQ ID NO: 199680 - DNA, 53 bp, Artificial
  Synthetic oligonucleotide
ctggaattgcagtttccggtggatcggcatgcacggctgggagtttagagccg

SEQ ID NO: 199681 - DNA, 56 bp, Artificial
  Synthetic oligonucleotide
cggagcgggcgttgattaatcagctaaaatactagtaaacaaaggcattctcgttg

SEQ ID NO: 199682 - DNA, 53 bp, Artificial
  Synthetic oligonucleotide
ctggaggtcgtttgaatatattagtacctcgtctgccggtacgcacttggact

SEQ ID NO: 199683 - DNA, 53 bp, Artificial
  Synthetic oligonucleotide
cataaggcgctagacggaccgtccactgctgttcttcaactgcacaatattcg

SEQ ID NO: 199684 - DNA, 52 bp, Artificial
  Synthetic oligonucleotide
tcccgtggcatttaacccgtaaacccgaaacattccgtcctttgtcagtgct

SEQ ID NO: 199685 - DNA, 53 bp, Artificial
  Synthetic oligonucleotide
gaactcttgctggaacaagcagcgaggctaacggttgctagaacagccatcgc

SEQ ID NO: 199686 - DNA, 53 bp, Artificial
  Synthetic oligonucleotide
tccgaaacaggcgtctgcatttaaacacggcatcattgctggtcatgccgcga

SEQ ID NO: 199687 - DNA, 53 bp, Artificial
  Synthetic oligonucleotide
gtttgagtctgaatggtcaggagtggctttgtttattgcccctaaaacaaact

SEQ ID NO: 199688 - DNA, 53 bp, Artificial
  Synthetic oligonucleotide
tcatatcccctagagtacccatgtaatagctaggagaccataggtgtccaccc

SEQ ID NO: 199689 - DNA, 53 bp, Artificial
  Synthetic oligonucleotide
tcataatagttgccttaatccgagataagacgacggtgacccgccaaactcag

SEQ ID NO: 199690 - DNA, 53 bp, Artificial
  Synthetic oligonucleotide
catcaatatatacagtgtacgttccgcctacactcgttttagtgccgccgcta

SEQ ID NO: 199691 - DNA, 53 bp, Artificial
  Synthetic oligonucleotide
aattcgcgggggatggtgaggaccgctcaattgcaactgttgatcgtgagggc

SEQ ID NO: 199692 - DNA, 60 bp, Artificial
  Synthetic oligonucleotide
cggaatccaaacataattcaaatcaatcatggtgagagttgcggcattctgggttcgatt

SEQ ID NO: 199693 - DNA, 53 bp, Artificial
  Synthetic oligonucleotide
catatttatacacaaagcgttatccgaataataatttaccggatctaaaaaag

SEQ ID NO: 199694 - DNA, 53 bp, Artificial
  Synthetic oligonucleotide
gatttggtctgtttaatttgcatctaacttatcgatccaatcttcaaagtcag

SEQ ID NO: 199695 - DNA, 53 bp, Artificial
  Synthetic oligonucleotide
tcgtaggaacggatccaacaagtattcagcaggcgacgttctcgttgctccac

SEQ ID NO: 199696 - DNA, 53 bp, Artificial
  Synthetic oligonucleotide
tagtgatgctaatatttacgtgacctcagctattcctattgatggatctggtg

SEQ ID NO: 199697 - DNA, 53 bp, Artificial
  Synthetic oligonucleotide
tcgtggcgctactggttaatccagctcgatttggcagtcgcatgcaccaggac

SEQ ID NO: 199698 - DNA, 53 bp, Artificial
  Synthetic oligonucleotide
taagactccgctagttagaaacttacgaatgagtcttagtgtccatgtgtcat

SEQ ID NO: 199699 - DNA, 53 bp, Artificial
  Synthetic oligonucleotide
aactccaacgcttggcatccccacgttccccggtgcacagtaaacatggtcta

SEQ ID NO: 199700 - DNA, 53 bp, Artificial
  Synthetic oligonucleotide
tctagacggacgacgatatgagtaatccatattaccttcgatcacagtattgc

SEQ ID NO: 199701 - DNA, 53 bp, Artificial
  Synthetic oligonucleotide
tctggcgcaacctcatgccaactttagcaggtagcgccgtttgcttgttgcta

SEQ ID NO: 199702 - DNA, 53 bp, Artificial
  Synthetic oligonucleotide
ccatattccataatcgtaccgtctacaaatgcacaatagaggtaaccgtcttt

SEQ ID NO: 199703 - DNA, 60 bp, Artificial
  Synthetic oligonucleotide
cggaaagacctttgttcatatgcgcagagatgaaatagacgaagctaataaggggtatca

SEQ ID NO: 199704 - DNA, 53 bp, Artificial
  Synthetic oligonucleotide
gcactgatgttcattctaagcaatagttcaatagaataagtgattatttatcc

SEQ ID NO: 199705 - DNA, 53 bp, Artificial
  Synthetic oligonucleotide
aatactacaggggatttgttgaagagtgaattacggcagatgggacgagccat

SEQ ID NO: 199706 - DNA, 53 bp, Artificial
  Synthetic oligonucleotide
tgacttcgtttttcgacgcgaagctagcctctgggagtccccgcaagcaacaa

SEQ ID NO: 199707 - DNA, 53 bp, Artificial
  Synthetic oligonucleotide
tacttgaaccggctaggccagctccacagcctgccatcatgagcattacggta

SEQ ID NO: 199708 - DNA, 53 bp, Artificial
  Synthetic oligonucleotide
tcttccagaccattactggccagtattttggcgactggctcttagagatcatc

SEQ ID NO: 199709 - DNA, 53 bp, Artificial
  Synthetic oligonucleotide
tactgtagtcaagaactgccttaccgccgtcacttcgaattccgatcgctacg

SEQ ID NO: 199710 - DNA, 53 bp, Artificial
  Synthetic oligonucleotide
cactggtaaggacgcttatgcgcctttggccaccaatgctgtgcgccaaggga

SEQ ID NO: 199711 - DNA, 53 bp, Artificial
  Synthetic oligonucleotide
gcataggtcccgtagccgattccgcctagtaacacgagacttgcaacgcttag

SEQ ID NO: 199712 - DNA, 53 bp, Artificial
  Synthetic oligonucleotide
gcaggtaacactagaggcgggctgtgttcaagtgctggtaacgctaaacacgg

SEQ ID NO: 199713 - DNA, 53 bp, Artificial
  Synthetic oligonucleotide
cactgccgatctatattgtggtcgtatgggcttttaaaacgccttttgatcgt

SEQ ID NO: 199714 - DNA, 60 bp, Artificial
  Synthetic oligonucleotide
cgctgccatactgccgctcagcgtgtcctttttctcgttggtgcttatcgtgttcctcaa

SEQ ID NO: 199715 - DNA, 53 bp, Artificial
  Synthetic oligonucleotide
cttaacacctgaagtaccagtagccaagcgatccaactcagcagaacgcaaat

SEQ ID NO: 199716 - DNA, 53 bp, Artificial
  Synthetic oligonucleotide
gcaggttctataactacctcagttaaactgtctttagtacgttggctaacagg

SEQ ID NO: 199717 - DNA, 53 bp, Artificial
  Synthetic oligonucleotide
gaaataaactggcaccagcggagatgcctaaaatactggggtcagcgatcgca

SEQ ID NO: 199718 - DNA, 53 bp, Artificial
  Synthetic oligonucleotide
ccccaacttacactgctcccaaggatcagcgaaacctttaaatcttaattgcg

SEQ ID NO: 199719 - DNA, 53 bp, Artificial
  Synthetic oligonucleotide
ctttatggtggggtgacacgggctcgggtatcttctcaaagttggaaacgtgc

SEQ ID NO: 199720 - DNA, 53 bp, Artificial
  Synthetic oligonucleotide
aatggtgagggtgcgcgtggaacgatgctgtcaattgccgtcgcaggacacaa

SEQ ID NO: 199721 - DNA, 52 bp, Artificial
  Synthetic oligonucleotide
cttgggtacggaagtaccgagtaaatagcgactgggaagtactaaaagataa

SEQ ID NO: 199722 - DNA, 53 bp, Artificial
  Synthetic oligonucleotide
aatgctcttatgtcaataaatgcccaccatcatgtgttaaaatcacttgctgg

SEQ ID NO: 199723 - DNA, 53 bp, Artificial
  Synthetic oligonucleotide
cagtatcaacgacataggggatcgaagccacccaataggtccaagcggtgaaa

SEQ ID NO: 199724 - DNA, 53 bp, Artificial
  Synthetic oligonucleotide
aagaggggtcattggcattatactgttaccaagggtggcttcgaaaccgttat

SEQ ID NO: 199725 - DNA, 54 bp, Artificial
  Synthetic oligonucleotide
gaacataggccaataaaaacggcttagaacgcttatatttgcgttctaagccgt

SEQ ID NO: 199726 - DNA, 60 bp, Artificial
  Synthetic oligonucleotide
cgctgatgatttgagtggtcaaactggaatgacttcctcggcgtggcagacgtttctaac

SEQ ID NO: 199727 - DNA, 53 bp, Artificial
  Synthetic oligonucleotide
tcaaacaactcaaggtggcagtcaacgtgccttctatgtatatagcccatcgg

SEQ ID NO: 199728 - DNA, 53 bp, Artificial
  Synthetic oligonucleotide
cacgcacattttgcggattagtcgctaggttcaagcgaacaaacccctgatca

SEQ ID NO: 199729 - DNA, 53 bp, Artificial
  Synthetic oligonucleotide
cacgcccactgcaatctgaacaaaccgccgttaagcgaatcaaagaaatcccc

SEQ ID NO: 199730 - DNA, 53 bp, Artificial
  Synthetic oligonucleotide
taacaccatcgcgagctgaatcaatgtaaggagcaactacattttgcatacaa

SEQ ID NO: 199731 - DNA, 53 bp, Artificial
  Synthetic oligonucleotide
aaggggccgcgctaaccactgcttaagaagacgcccgcccattgcagtattag

SEQ ID NO: 199732 - DNA, 53 bp, Artificial
  Synthetic oligonucleotide
aaggtaaagcctcgacaatgcaataacggcagtaaatacaagtgcaatgaggc

SEQ ID NO: 199733 - DNA, 53 bp, Artificial
  Synthetic oligonucleotide
tatgacgctactagcaacaagctcttaaagacacttgactctggcgattggga

SEQ ID NO: 199734 - DNA, 53 bp, Artificial
  Synthetic oligonucleotide
aacttctgagcttgtaccagcaccgtaaacgacgtaggacgagttcagggtat

SEQ ID NO: 199735 - DNA, 53 bp, Artificial
  Synthetic oligonucleotide
taaccccgtgggttgtccgcacgaccttatcatgtgcccagcgttgccgataa

SEQ ID NO: 199736 - DNA, 53 bp, Artificial
  Synthetic oligonucleotide
tgcaagttggagaactgactggagtaagacggcttatttaaagggtggatcac

SEQ ID NO: 199737 - DNA, 60 bp, Artificial
  Synthetic oligonucleotide
cgctctcagaagctcatagagcccctctgagcctgcattggtagatttttccggccgaac

SEQ ID NO: 199738 - DNA, 53 bp, Artificial
  Synthetic oligonucleotide
agaaagtctacggtgctacgattattaccgcttgtgtggctggtaactcattt

SEQ ID NO: 199739 - DNA, 53 bp, Artificial
  Synthetic oligonucleotide
tgatcttgattatcaaatattgcactataggctaaaaacaagccaatcgctaa

SEQ ID NO: 199740 - DNA, 53 bp, Artificial
  Synthetic oligonucleotide
tcgctggccgtcccaaacgcgcggcgtgctgtaaatttcgtcagaaagcgtgt

SEQ ID NO: 199741 - DNA, 53 bp, Artificial
  Synthetic oligonucleotide
cccggccacgtaccatggtaaccaatgaccgttcccattaccactgacgacag

SEQ ID NO: 199742 - DNA, 53 bp, Artificial
  Synthetic oligonucleotide
ccacagttagcttatgacccgttagccgtgattgatagttatacagatgtcgt

SEQ ID NO: 199743 - DNA, 53 bp, Artificial
  Synthetic oligonucleotide
taactaacgtttgtactccgttcctagtcacagtttgtacatagtttgctcta

SEQ ID NO: 199744 - DNA, 53 bp, Artificial
  Synthetic oligonucleotide
gatgcccaagggatcctcaaccgtgctaaggctgatgctgatcagaaagtcca

SEQ ID NO: 199745 - DNA, 53 bp, Artificial
  Synthetic oligonucleotide
tatagacattcggaatgctaaatggggaagcgatagaaacatacctattgtcg

SEQ ID NO: 199746 - DNA, 53 bp, Artificial
  Synthetic oligonucleotide
ggtttgccgcaagtcgtaaacaaagccatcagtaggggtgatttcaaatggcc

SEQ ID NO: 199747 - DNA, 53 bp, Artificial
  Synthetic oligonucleotide
agattgggaagactaccaaaatcctaagtatggcaacgactcaaattggtgtc

SEQ ID NO: 199748 - DNA, 60 bp, Artificial
  Synthetic oligonucleotide
cgctccttggctacttgcagagcagtatcacgcagtatacgtacattctcatagcgccat

SEQ ID NO: 199749 - DNA, 53 bp, Artificial
  Synthetic oligonucleotide
cggcggggtaatgattggttgcgcggatagcttcggttgtcccgacaccatta

SEQ ID NO: 199750 - DNA, 53 bp, Artificial
  Synthetic oligonucleotide
gtcctaatgaaattcgaaagggcactactctaagtggcccgcatcgagatgac

SEQ ID NO: 199751 - DNA, 53 bp, Artificial
  Synthetic oligonucleotide
acgctttatgggcgtcaatttatcacaatcagcccaagaaatactacccaaac

SEQ ID NO: 199752 - DNA, 53 bp, Artificial
  Synthetic oligonucleotide
gcgatcgataagactgccccaacatttgtctgtggtaattcaccttcagcact

SEQ ID NO: 199753 - DNA, 53 bp, Artificial
  Synthetic oligonucleotide
gcttgaatcgatttcgctaaggacgctgccgttaatggtccagtcgctacgac

SEQ ID NO: 199754 - DNA, 53 bp, Artificial
  Synthetic oligonucleotide
gtcgttaccggatgctgtacaaggttggtgttcgtcagggactgatgcgtgcg

SEQ ID NO: 199755 - DNA, 53 bp, Artificial
  Synthetic oligonucleotide
gcctttgaagttgccgaatggcttaaggtcgctatcagtgattgagccgttag

SEQ ID NO: 199756 - DNA, 53 bp, Artificial
  Synthetic oligonucleotide
ggctaccaccacggacgagctcttacaacaacggggcttcctaacgcgaattt

SEQ ID NO: 199757 - DNA, 53 bp, Artificial
  Synthetic oligonucleotide
ggtttaatcgctggcacacccgctggcaagagcgtacctaagcttttggctgt

SEQ ID NO: 199758 - DNA, 53 bp, Artificial
  Synthetic oligonucleotide
cgccattgaaacaccatagcggtttgagattgcccaaactgaatcgccagact

SEQ ID NO: 199759 - DNA, 58 bp, Artificial
  Synthetic oligonucleotide
cgctcccaggatctgaaccggccggccattgtggtcaactagccggagaccattacca

SEQ ID NO: 199760 - DNA, 53 bp, Artificial
  Synthetic oligonucleotide
agcggtgcaaacccgattaacggcacaacaactacgtcggggagtggtatcgg

SEQ ID NO: 199761 - DNA, 53 bp, Artificial
  Synthetic oligonucleotide
tttaacgttgtataagccattggacggatcatagttaaggcgcacatagtcgt

SEQ ID NO: 199762 - DNA, 53 bp, Artificial
  Synthetic oligonucleotide
cgggctttcggtgaagccctagccgttcagatggtcatcggaaatgcggtcct

SEQ ID NO: 199763 - DNA, 53 bp, Artificial
  Synthetic oligonucleotide
gtgaagtccttgcaacaaatgctcacggcacttaaagtcggctccgtcactgt

SEQ ID NO: 199764 - DNA, 53 bp, Artificial
  Synthetic oligonucleotide
atttgcttccgctcaaatgacggcatcgggtccaaataaatcggcttacctga

SEQ ID NO: 199765 - DNA, 53 bp, Artificial
  Synthetic oligonucleotide
acaatggacctgcatcgtgttctccaatagcgtacattgtataacctaaggcc

SEQ ID NO: 199766 - DNA, 53 bp, Artificial
  Synthetic oligonucleotide
gcgtcctgacggataaacttgccaagccatacgaactgaacgcggaggggatc

SEQ ID NO: 199767 - DNA, 53 bp, Artificial
  Synthetic oligonucleotide
gctttatcaaacgtggttctgtaagagtcggctatgtcctttgtgcaactggc

SEQ ID NO: 199768 - DNA, 53 bp, Artificial
  Synthetic oligonucleotide
atttcgctttgctcaaacagaaagaatacaaggaatgctatgagcataaaggg

SEQ ID NO: 199769 - DNA, 53 bp, Artificial
  Synthetic oligonucleotide
tgtacccagttaaacggacaaaaggcgcgcatgaaattaattgtcgctctcag

SEQ ID NO: 199770 - DNA, 60 bp, Artificial
  Synthetic oligonucleotide
cgctattttctagttgcagaacataatgatcttattacgaaggctcgtcatgatttgaat

SEQ ID NO: 199771 - DNA, 53 bp, Artificial
  Synthetic oligonucleotide
acaggaaaatgagcggttgggtctgtcccgctggcaaggcgaccctcggtaga

SEQ ID NO: 199772 - DNA, 53 bp, Artificial
  Synthetic oligonucleotide
attaatcatcttccggttcgtacgattcaccctttgttcgccgtgataaatca

SEQ ID NO: 199773 - DNA, 53 bp, Artificial
  Synthetic oligonucleotide
cgaacataaacgcatcaaagattgagattcgttcatgctttccgtgcataggg

SEQ ID NO: 199774 - DNA, 53 bp, Artificial
  Synthetic oligonucleotide
cgaaaggccccaactactagccctgctacgataccaactactaaagagatggc

SEQ ID NO: 199775 - DNA, 53 bp, Artificial
  Synthetic oligonucleotide
cgaaccatacggtcaaagtcgaattgtagcaagcctgttcgcacgtttgccaa

SEQ ID NO: 199776 - DNA, 53 bp, Artificial
  Synthetic oligonucleotide
aaacgctgcccgggaccttgtttctgggaatctcattagcggcccaactcgcg

SEQ ID NO: 199777 - DNA, 53 bp, Artificial
  Synthetic oligonucleotide
ctcactgatttggaacaaagggcggtgactagcgacgcttataactttgaaaa

SEQ ID NO: 199778 - DNA, 53 bp, Artificial
  Synthetic oligonucleotide
ttgcaaatcctggatagacgtcggttctaacctgaaccatctttaagtcacct

SEQ ID NO: 199779 - DNA, 53 bp, Artificial
  Synthetic oligonucleotide
ttaattcggtacggattactagctaagtctaaaaaggggcacctcgattatga

SEQ ID NO: 199780 - DNA, 53 bp, Artificial
  Synthetic oligonucleotide
agggagcggtgcttcatccaggagtttaccgcttgccaggaggttcgcgggta

SEQ ID NO: 199781 - DNA, 59 bp, Artificial
  Synthetic oligonucleotide
cgctacttgcttgataattcggagcgatcaagttttactgttaagcgagtcgcattagt

SEQ ID NO: 199782 - DNA, 53 bp, Artificial
  Synthetic oligonucleotide
cgctattatccgtatcagctctagtagagtactcgtgccagtcagtctttggc

SEQ ID NO: 199783 - DNA, 53 bp, Artificial
  Synthetic oligonucleotide
gtacgctgcaacgccaaaaacgtgctcattcgatcggacaggtgccattttcg

SEQ ID NO: 199784 - DNA, 53 bp, Artificial
  Synthetic oligonucleotide
agctactgtgacctaataactcctgaaccgttcgtaaatccgccccgtggtct

SEQ ID NO: 199785 - DNA, 53 bp, Artificial
  Synthetic oligonucleotide
gactgaatgatgttcactattggcactagtggtttagcgattaacaggggtgg

SEQ ID NO: 199786 - DNA, 53 bp, Artificial
  Synthetic oligonucleotide
gggtcaagatatgtcgcagggctacagccacaagacattattagcaagttcac

SEQ ID NO: 199787 - DNA, 53 bp, Artificial
  Synthetic oligonucleotide
cggaatacgaaacttcactaagttttgagtgtcgagaaacgcattagacgggc

SEQ ID NO: 199788 - DNA, 53 bp, Artificial
  Synthetic oligonucleotide
ctcaatgggactagtattcacgctgcagttgagacgaatcgagtcggacgctg

SEQ ID NO: 199789 - DNA, 53 bp, Artificial
  Synthetic oligonucleotide
agggcaacttcgtagtcaccttgaccgacatggtagggctcaagacagctgca

SEQ ID NO: 199790 - DNA, 53 bp, Artificial
  Synthetic oligonucleotide
gggacaggtttgtcttgatcattgatttgccccgaaacttgagaattatatag

SEQ ID NO: 199791 - DNA, 53 bp, Artificial
  Synthetic oligonucleotide
caacgattaacgcgaatgactctggaagtaagaacattcttgatgacgaatca

SEQ ID NO: 199792 - DNA, 54 bp, Artificial
  Synthetic oligonucleotide
cgcgctatattccaaaggaaaataggggtaaagcgtttggtcttattggctcca

SEQ ID NO: 199793 - DNA, 53 bp, Artificial
  Synthetic oligonucleotide
accagttggcgcctatgttgaatcatcagcgggaatcgcggttggtggtcgct

SEQ ID NO: 199794 - DNA, 53 bp, Artificial
  Synthetic oligonucleotide
attccaaacgtgaccaaggcggccgtaccaatggtgagtcccagtgctacgga

SEQ ID NO: 199795 - DNA, 53 bp, Artificial
  Synthetic oligonucleotide
actgaacgcataaatgctacatcccaacgtaatcataattaattcgaaactat

SEQ ID NO: 199796 - DNA, 53 bp, Artificial
  Synthetic oligonucleotide
ggcaccgaaattcgtggtggcgaaacgaacagcgtgtcccaaggtggcggacg

SEQ ID NO: 199797 - DNA, 53 bp, Artificial
  Synthetic oligonucleotide
ttcagtccgcatgaatcgtgccacgttagcgagtggaaaggccgcaagtgcta

SEQ ID NO: 199798 - DNA, 53 bp, Artificial
  Synthetic oligonucleotide
cgtatttagaccataacgacacccaagacgcacagacggcacaaactaagtta

SEQ ID NO: 199799 - DNA, 53 bp, Artificial
  Synthetic oligonucleotide
aaccaaatctctaagttacccgggttaccagatggtccactgaaaccgcacag

SEQ ID NO: 199800 - DNA, 53 bp, Artificial
  Synthetic oligonucleotide
cgtgctcaaatcagaaatagagtgtgagacgtcggattattacttctatcttg

SEQ ID NO: 199801 - DNA, 53 bp, Artificial
  Synthetic oligonucleotide
caatcgtcataagttaggctacggcttaagtttggcattaggtgcaattggct

SEQ ID NO: 199802 - DNA, 53 bp, Artificial
  Synthetic oligonucleotide
acttggcgctttgaatgaacactatcaagctaacccgttagaaggcggtgtga

SEQ ID NO: 199803 - DNA, 60 bp, Artificial
  Synthetic oligonucleotide
cgcgataagcaccagtcttgcgcatcgtatgggtgcccagatagttaatttcaagcaagt

SEQ ID NO: 199804 - DNA, 53 bp, Artificial
  Synthetic oligonucleotide
ataagctgcaactactttcggaaatgcaagattggatagacgaaacaggttgt

SEQ ID NO: 199805 - DNA, 53 bp, Artificial
  Synthetic oligonucleotide
caattggattttcaacgactaattttaagagtgagcgaaaatcattattggtg

SEQ ID NO: 199806 - DNA, 53 bp, Artificial
  Synthetic oligonucleotide
aaaaccaagccaagcattggcctacgcaagtgctttaaaacaaagcgctaaaa

SEQ ID NO: 199807 - DNA, 53 bp, Artificial
  Synthetic oligonucleotide
ttttcgacgcgaagctagcctctgggagtccccgcaagcaacaataggcctcc

SEQ ID NO: 199808 - DNA, 53 bp, Artificial
  Synthetic oligonucleotide
tggctaaggcttgtgcgccgcagactgatcctaccccagcatcatcggtggct

SEQ ID NO: 199809 - DNA, 53 bp, Artificial
  Synthetic oligonucleotide
ttttctcgtttctgggtgattcaatcttgaacgcgggcaaactggtgttaatc

SEQ ID NO: 199810 - DNA, 53 bp, Artificial
  Synthetic oligonucleotide
aggaaataaccacattggggttaataactttggctggtccaaagcgtgtcaca

SEQ ID NO: 199811 - DNA, 53 bp, Artificial
  Synthetic oligonucleotide
cacaccgggaaatgaaatagcttactatggaactattggtttggtagcaatag

SEQ ID NO: 199812 - DNA, 53 bp, Artificial
  Synthetic oligonucleotide
ctataatcaagcttgtgtctccgacataatgacacatctacttcataatagtg

SEQ ID NO: 199813 - DNA, 53 bp, Artificial
  Synthetic oligonucleotide
caccaattactcgaatcaaaacccgaaacgaacgttaagtacgtgacgagtga

SEQ ID NO: 199814 - DNA, 60 bp, Artificial
  Synthetic oligonucleotide
cccgtatcaatagcatgactagtggagactccacatcgcttaaaaatccagtacatgtct

SEQ ID NO: 199815 - DNA, 53 bp, Artificial
  Synthetic oligonucleotide
ttattaggaacgctggaactgttaaggctcgcaagagtggacattatgcgact

SEQ ID NO: 199816 - DNA, 53 bp, Artificial
  Synthetic oligonucleotide
cgtgacggaagctttaaaggcgctgttcttgaaatcgtacctaatctttacga

SEQ ID NO: 199817 - DNA, 53 bp, Artificial
  Synthetic oligonucleotide
ctgctattattgaaagtctcagtggcatagaaaccattaaatcactaactggt

SEQ ID NO: 199818 - DNA, 53 bp, Artificial
  Synthetic oligonucleotide
cgtgaggcatatcgattaagtagtcagtaggttcaacgctagccataatttgt

SEQ ID NO: 199819 - DNA, 53 bp, Artificial
  Synthetic oligonucleotide
ctatgagtgggtacacggcgcttaataagatctcttacgtttcacagcctgaa

SEQ ID NO: 199820 - DNA, 53 bp, Artificial
  Synthetic oligonucleotide
cggtcaagtgtgagacgcttgccctgttcgggcagaactctccatgaaatggt

SEQ ID NO: 199821 - DNA, 53 bp, Artificial
  Synthetic oligonucleotide
acaaggggccagtctttcagcggatgctaccaccccaatcaggcctaatttgg

SEQ ID NO: 199822 - DNA, 53 bp, Artificial
  Synthetic oligonucleotide
tgtaacgcacgatcgttaccgtaacgtcccttgatatgttctctggttacgat

SEQ ID NO: 199823 - DNA, 53 bp, Artificial
  Synthetic oligonucleotide
gtgctgctttgtcgaacacgtttcaatagagtgtgaaacatgccgtataaata

SEQ ID NO: 199824 - DNA, 53 bp, Artificial
  Synthetic oligonucleotide
cgcatcagtcacgataccaccgaacaccggaccaaaggctacggcacaagcgg

SEQ ID NO: 199825 - DNA, 56 bp, Artificial
  Synthetic oligonucleotide
cccgccagagcaagaaacgctagtacaggccctttagcgctttttaaactcactgc

SEQ ID NO: 199826 - DNA, 53 bp, Artificial
  Synthetic oligonucleotide
attctgcgagatccgagtcatgatgaactgctgcaagaaactaaacagtgcgc

SEQ ID NO: 199827 - DNA, 53 bp, Artificial
  Synthetic oligonucleotide
ctgatccaacgccatatatgcgcttgaaattacggcaccgaaataatcatatg

SEQ ID NO: 199828 - DNA, 53 bp, Artificial
  Synthetic oligonucleotide
gagacagccaaaagtttagggtttaagactactgccattcgggcggatatgag

SEQ ID NO: 199829 - DNA, 53 bp, Artificial
  Synthetic oligonucleotide
ctatctttacggccaatcaaacggcgcttgcagcctatgcggatttacaaaca

SEQ ID NO: 199830 - DNA, 53 bp, Artificial
  Synthetic oligonucleotide
atccttgctcttctcgtttggaaccaactacattggctgggcgaacagtctta

SEQ ID NO: 199831 - DNA, 53 bp, Artificial
  Synthetic oligonucleotide
ccggattagtaattgattggacaatgtaaacatcgtctccccgaatactttca

SEQ ID NO: 199832 - DNA, 53 bp, Artificial
  Synthetic oligonucleotide
tgtaaattctacagttcagcatgacaccgttacgaaggacgctcatgcctttg

SEQ ID NO: 199833 - DNA, 53 bp, Artificial
  Synthetic oligonucleotide
ctatcagttacaagtcaagtacgacggaatcagatcgttaacacgttgccgcg

SEQ ID NO: 199834 - DNA, 53 bp, Artificial
  Synthetic oligonucleotide
gtggcaatagattggaacaaccccgacgaagttagaaagtaccgcgcccaaaa

SEQ ID NO: 199835 - DNA, 53 bp, Artificial
  Synthetic oligonucleotide
ccggcatacaagtcgagcgagctcaacgcgtggcatatttccgtcatgctgga

SEQ ID NO: 199836 - DNA, 60 bp, Artificial
  Synthetic oligonucleotide
gaaacggagtctgcataagcaagttcaagaaataattgctgatgagcgcgtttcaaatcg

SEQ ID NO: 199837 - DNA, 57 bp, Artificial
  Synthetic oligonucleotide
ccccggttgactgacaccataagccgccacccagattgccttatctaccagttggga

SEQ ID NO: 199838 - DNA, 53 bp, Artificial
  Synthetic oligonucleotide
attgacggtcacaggcattggcccgaagtcagcgttggccattttggcgaacg

SEQ ID NO: 199839 - DNA, 52 bp, Artificial
  Synthetic oligonucleotide
aagtgtcgtcgatattcgtctgcctcaaacacaaagaaacgagcgtcaggta

SEQ ID NO: 199840 - DNA, 52 bp, Artificial
  Synthetic oligonucleotide
ctagataacgcgatggctgaaagtaccttccacatcttaaaagtggaaacgg

SEQ ID NO: 199841 - DNA, 52 bp, Artificial
  Synthetic oligonucleotide
agcagctcgacgcaagctaagtacgacgctactaaagcactcggcccccagg

SEQ ID NO: 199842 - DNA, 52 bp, Artificial
  Synthetic oligonucleotide
agcttactttcagaaactacatgaactttaaagttggtatgtgcatctgaag

SEQ ID NO: 199843 - DNA, 52 bp, Artificial
  Synthetic oligonucleotide
aaactgcaccgctagatcacgctctgatgggatccgatcaccgaccgcccag

SEQ ID NO: 199844 - DNA, 52 bp, Artificial
  Synthetic oligonucleotide
ggtaaacgcttcagctaacaaaacaccttaggacgcaaatatggacttctga

SEQ ID NO: 199845 - DNA, 52 bp, Artificial
  Synthetic oligonucleotide
cgcgatttggcaagtaagtggcaactaccaatgcggtaaacacgagtaaaat

SEQ ID NO: 199846 - DNA, 52 bp, Artificial
  Synthetic oligonucleotide
taggcacgccaaaacttatctccaaccgctcctcaggatcgcccaaacggcc

SEQ ID NO: 199847 - DNA, 52 bp, Artificial
  Synthetic oligonucleotide
aacttataaagacaacttctcaggtaattatgtaaaagatactcgtgacgtt

SEQ ID NO: 199848 - DNA, 58 bp, Artificial
  Synthetic oligonucleotide
cccatcgggtagcactgaaatcggcaaatctttatcggcacgaaatggttaatcatcg

SEQ ID NO: 199849 - DNA, 52 bp, Artificial
  Synthetic oligonucleotide
cgcctatactacattctaaatccatgcccagattgataagtggcaaccctac

SEQ ID NO: 199850 - DNA, 52 bp, Artificial
  Synthetic oligonucleotide
cgccgagcagttaaacgatgtttaaccggaagctcgcatataaaggcgatca

SEQ ID NO: 199851 - DNA, 52 bp, Artificial
  Synthetic oligonucleotide
gagagcgagtaatctgatgacgcttcaacacttcttgtacaagttgactaag

SEQ ID NO: 199852 - DNA, 52 bp, Artificial
  Synthetic oligonucleotide
aagtcggagtgtaagcggccttaagcgtgatggcccggtcttggccattgcg

SEQ ID NO: 199853 - DNA, 52 bp, Artificial
  Synthetic oligonucleotide
cagcgtaaccgggaaggcaagtgggatgccgctatgtgtgctgcaccaatcg

SEQ ID NO: 199854 - DNA, 52 bp, Artificial
  Synthetic oligonucleotide
gctcataccaggactgtgcgcaatattttatcggatggccggattaattggc

SEQ ID NO: 199855 - DNA, 52 bp, Artificial
  Synthetic oligonucleotide
agcttggctaataccacggaaataaggaataattgtgccatcgatatcgcca

SEQ ID NO: 199856 - DNA, 52 bp, Artificial
  Synthetic oligonucleotide
tcgtcacagcgggttgcttcccagccgcgccagtcttagtgccgggcatttt

SEQ ID NO: 199857 - DNA, 52 bp, Artificial
  Synthetic oligonucleotide
tataaaccccattaccaatagcagccaagacagcgtatgtcaaaatggtcca

SEQ ID NO: 199858 - DNA, 52 bp, Artificial
  Synthetic oligonucleotide
ttctatctagtaagtcgccatgacctgaactcgccaaagttcgaggtctttt

SEQ ID NO: 199859 - DNA, 57 bp, Artificial
  Synthetic oligonucleotide
cccagtctaacatagcgcttaccactcggcaaccttatttggttcagcacactttac

SEQ ID NO: 199860 - DNA, 52 bp, Artificial
  Synthetic oligonucleotide
aaaagttaacttcatgaccaaatacgcgcgtgggttaatgtgtgtccctatg

SEQ ID NO: 199861 - DNA, 52 bp, Artificial
  Synthetic oligonucleotide
tttacgacacgtggatgatgccagttacgacaagggctagcgccattcacta

SEQ ID NO: 199862 - DNA, 52 bp, Artificial
  Synthetic oligonucleotide
agccggggaatcctttgtcggaactttaccattggataatactagattggtg

SEQ ID NO: 199863 - DNA, 52 bp, Artificial
  Synthetic oligonucleotide
catgtctaattcacgaggagtaagtttggttctttcaccacctaccaagcta

SEQ ID NO: 199864 - DNA, 52 bp, Artificial
  Synthetic oligonucleotide
ggaaatcggggtatccacgtattgtgtcaattggtcgtgactgtcttggatt

SEQ ID NO: 199865 - DNA, 52 bp, Artificial
  Synthetic oligonucleotide
tttccaccgcggaccgaattgttggaaccttacgcagaaacacgtgaagatc

SEQ ID NO: 199866 - DNA, 52 bp, Artificial
  Synthetic oligonucleotide
acggtagtgcagaagcccttgccttggcagatgcggggagtaccgcagcctt

SEQ ID NO: 199867 - DNA, 52 bp, Artificial
  Synthetic oligonucleotide
gattgaacaatcgggtaatcattcgttactcccatacatggacggggcgact

SEQ ID NO: 199868 - DNA, 50 bp, Artificial
  Synthetic oligonucleotide
tttgaacgtagctgaccaaaccgtcctggtttccggtaattccccggaag

SEQ ID NO: 199869 - DNA, 52 bp, Artificial
  Synthetic oligonucleotide
atgataccgtccgcagtcgtagtggtgtgactggaaccgacgcggctcgcta

SEQ ID NO: 199870 - DNA, 58 bp, Artificial
  Synthetic oligonucleotide
cccaagtgtcttagctgcgaagtatcaccgcagttatcggccgtttttgcttggtggc

SEQ ID NO: 199871 - DNA, 52 bp, Artificial
  Synthetic oligonucleotide
tcagcttcgaactaccttgccgcttcttacgagtggcgactcggcttaaatt

SEQ ID NO: 199872 - DNA, 51 bp, Artificial
  Synthetic oligonucleotide
tccctttggaataggggttccctttttgtatacggtcaaaatttcacaata

SEQ ID NO: 199873 - DNA, 52 bp, Artificial
  Synthetic oligonucleotide
cttgtggtagcggggattgccaccccacttcagtaattgctgcgcgtccctt

SEQ ID NO: 199874 - DNA, 52 bp, Artificial
  Synthetic oligonucleotide
gacgcaaatgatgcgaaagtagcctccgagcggtcgatgcgacgtcacagcg

SEQ ID NO: 199875 - DNA, 52 bp, Artificial
  Synthetic oligonucleotide
acctcggtccatgcgacccctgaagctaagccacccgaagctgagtctgaga

SEQ ID NO: 199876 - DNA, 52 bp, Artificial
  Synthetic oligonucleotide
acctgattgaccgtagttaagcttaggcaagtcatagtcagttgatggacca

SEQ ID NO: 199877 - DNA, 52 bp, Artificial
  Synthetic oligonucleotide
tcatgtctagccctccttataagcattagtgtggcgatatgcaatcagcgag

SEQ ID NO: 199878 - DNA, 52 bp, Artificial
  Synthetic oligonucleotide
ttttgatatgacgtcgtgagccgtagaagtaggtcatgacagttgacgaaca

SEQ ID NO: 199879 - DNA, 52 bp, Artificial
  Synthetic oligonucleotide
atcgagtcctagatcaggttacaggtgctagcttggtagagttatgcttgct

SEQ ID NO: 199880 - DNA, 52 bp, Artificial
  Synthetic oligonucleotide
cgtctgggagccagcatgggggccagataagatgagtcgctttgcccggatg

SEQ ID NO: 199881 - DNA, 54 bp, Artificial
  Synthetic oligonucleotide
ccatttttgcttaagcttaaagataatggttactatacccaatatttacttgcc

SEQ ID NO: 199882 - DNA, 52 bp, Artificial
  Synthetic oligonucleotide
tccaaatctttttactcataaagccacgcctcctagaacaagttgctcatac

SEQ ID NO: 199883 - DNA, 52 bp, Artificial
  Synthetic oligonucleotide
ggagtgagtaattcgacttttaagccaggccatgcttcgttgactacgtcag

SEQ ID NO: 199884 - DNA, 52 bp, Artificial
  Synthetic oligonucleotide
gctcttattgtatcgccaatggctacttaatcatcagctagattctgaatgg

SEQ ID NO: 199885 - DNA, 52 bp, Artificial
  Synthetic oligonucleotide
agacaagcgtcgttacctgtagcaacgcttccccaatggacgcggagtgggg

SEQ ID NO: 199886 - DNA, 52 bp, Artificial
  Synthetic oligonucleotide
gcaccaattagtggccccaaagcacgaccagctgaagtaactgattggacga

SEQ ID NO: 199887 - DNA, 52 bp, Artificial
  Synthetic oligonucleotide
agaatatgccccgccaagagatcacgtaccgcattggtcaacgggacccccg

SEQ ID NO: 199888 - DNA, 52 bp, Artificial
  Synthetic oligonucleotide
cgctcatacgctgcacgataacgggtgccaccttgctcccttaccattcggg

SEQ ID NO: 199889 - DNA, 52 bp, Artificial
  Synthetic oligonucleotide
aaggtagcggttctttatcttgagggcgatggcgtaattatcaaaggcacca

SEQ ID NO: 199890 - DNA, 52 bp, Artificial
  Synthetic oligonucleotide
cgctgatagacttgatgcactaggtgctatcggcatagcacgtgcatttgct

SEQ ID NO: 199891 - DNA, 52 bp, Artificial
  Synthetic oligonucleotide
atggttttctgaaaccgttgctatctgtaatttttgttgctgatctaaggcc

SEQ ID NO: 199892 - DNA, 57 bp, Artificial
  Synthetic oligonucleotide
ccatgattctgccatttttactccaatacagcgagtttttacctagtccgtccttgc

SEQ ID NO: 199893 - DNA, 52 bp, Artificial
  Synthetic oligonucleotide
gggaccgtgatgggttgtggtgcccggtagttgtcggcaaacaagtcgtgaa

SEQ ID NO: 199894 - DNA, 52 bp, Artificial
  Synthetic oligonucleotide
atccacatgtcagtagcgatttgataccaagtcttaccgtcagcattatcaa

SEQ ID NO: 199895 - DNA, 52 bp, Artificial
  Synthetic oligonucleotide
ggcttttacgaatgcactcaaagcacctttaatcgtactatatccaacttcc

SEQ ID NO: 199896 - DNA, 52 bp, Artificial
  Synthetic oligonucleotide
cggcacggactaattagcgttcgtacttagcctcgagccctgtgacgacgcg

SEQ ID NO: 199897 - DNA, 52 bp, Artificial
  Synthetic oligonucleotide
cagggttattgacaagtgaggctatccaggcagggtttaatcctttcacggt

SEQ ID NO: 199898 - DNA, 52 bp, Artificial
  Synthetic oligonucleotide
ttgtactttggaggcatacttagagccatcgtcgttataaccacgcaatacg

SEQ ID NO: 199899 - DNA, 52 bp, Artificial
  Synthetic oligonucleotide
acccgtaaatgataataaggcagccgctagcagtgcaagtaacgtctgccga

SEQ ID NO: 199900 - DNA, 52 bp, Artificial
  Synthetic oligonucleotide
gcttagcttgctcccagcgtatttaggattggtgatcaaaaaattggggaat

SEQ ID NO: 199901 - DNA, 52 bp, Artificial
  Synthetic oligonucleotide
tcaaacttagcgttattctacgcaaatgagattagtaagttagatgacatta

SEQ ID NO: 199902 - DNA, 52 bp, Artificial
  Synthetic oligonucleotide
tcaaccgaattataaattgctactgcacctctataatccctggtttgccctc

SEQ ID NO: 199903 - DNA, 60 bp, Artificial
  Synthetic oligonucleotide
ccatcaaaccgtctttagccacaggtttaattgctctgagcgttgcgccatagtggtgaa

SEQ ID NO: 199904 - DNA, 52 bp, Artificial
  Synthetic oligonucleotide
ggctacaagcagatcgttagctactgcaagcagatggggatcaactacaagg

SEQ ID NO: 199905 - DNA, 52 bp, Artificial
  Synthetic oligonucleotide
gcttgctagggcttaatggccgggaaatgccaactgatatgaatgcccgcga

SEQ ID NO: 199906 - DNA, 52 bp, Artificial
  Synthetic oligonucleotide
cgggaagtgcaagcaatctgcgctcctttgttcaggtcaagggacacccgga

SEQ ID NO: 199907 - DNA, 52 bp, Artificial
  Synthetic oligonucleotide
accgattgattttcgttcgcgctggtaagcaaccggacggtcgtcttgcccc

SEQ ID NO: 199908 - DNA, 52 bp, Artificial
  Synthetic oligonucleotide
ccgaaaaccacgaagctgttgatctagcttgggaaggtcattcgatagctta

SEQ ID NO: 199909 - DNA, 52 bp, Artificial
  Synthetic oligonucleotide
cgaaaagagcgtgaattatgatttgcgtgttcatactgtgaccgcgtcacag

SEQ ID NO: 199910 - DNA, 52 bp, Artificial
  Synthetic oligonucleotide
cctctcccaaaagggtgtcgccaccttgaccaagaccggggctaccccagtc

SEQ ID NO: 199911 - DNA, 52 bp, Artificial
  Synthetic oligonucleotide
agagctacaccaaccggtggcatgctcggatcgccacctgtcagtagtaccg

SEQ ID NO: 199912 - DNA, 52 bp, Artificial
  Synthetic oligonucleotide
ccggctgctcaattaaaggatgatgccttaaatggtgacactcaaggcgcaa

SEQ ID NO: 199913 - DNA, 52 bp, Artificial
  Synthetic oligonucleotide
gaatcgtaaaatcattcgggacatgtttgtgggtcgcttcgtataaggtcat

SEQ ID NO: 199914 - DNA, 60 bp, Artificial
  Synthetic oligonucleotide
ccatatacagccagaatagactgcttaagcgtggccacagaccgactagtgcgatgccaa

SEQ ID NO: 199915 - DNA, 52 bp, Artificial
  Synthetic oligonucleotide
taccagccctacttagctttaatcgtggcccaatttacccgttatttaactc

SEQ ID NO: 199916 - DNA, 52 bp, Artificial
  Synthetic oligonucleotide
actttcagatccggaccaaacgcgtgcccattgggacaagcaggtcgcccta

SEQ ID NO: 199917 - DNA, 52 bp, Artificial
  Synthetic oligonucleotide
actcataagcgttacctccattgtggccacccacgagtttgctacgtctgat

SEQ ID NO: 199918 - DNA, 52 bp, Artificial
  Synthetic oligonucleotide
cgaacgtaactacggcacaatgagtcggagctatcaactaccaaacgttgat

SEQ ID NO: 199919 - DNA, 52 bp, Artificial
  Synthetic oligonucleotide
taccatcaagtatctctggctctccttctagtgggaatccatgactagaaaa

SEQ ID NO: 199920 - DNA, 52 bp, Artificial
  Synthetic oligonucleotide
ccgactaatagcgtgaagactaaggcccgtaaccctaaccgccaaccgagac

SEQ ID NO: 199921 - DNA, 52 bp, Artificial
  Synthetic oligonucleotide
acaggttcaggctattaaaggcggagttgcacaaggttttatgtctctcgag

SEQ ID NO: 199922 - DNA, 52 bp, Artificial
  Synthetic oligonucleotide
tgctaataacttcgtggttgggacgtgcgtcaattctgaaccgggcccataa

SEQ ID NO: 199923 - DNA, 52 bp, Artificial
  Synthetic oligonucleotide
cgaatgatatgcccataatttgttctgagccgctggagaggggaacagcatg

SEQ ID NO: 199924 - DNA, 52 bp, Artificial
  Synthetic oligonucleotide
gtgttttggggttgtcgaccaaagatttaccgatgcacggcaaacggcaccc

SEQ ID NO: 199925 - DNA, 60 bp, Artificial
  Synthetic oligonucleotide
ccagttctgggacaatagttccatcaacctgttaaatgcgttgattctagcgcaaattga

SEQ ID NO: 199926 - DNA, 52 bp, Artificial
  Synthetic oligonucleotide
ctgccttaggaatgagtcgtcaacagttgcggcgacaaatcgagatcccgct

SEQ ID NO: 199927 - DNA, 52 bp, Artificial
  Synthetic oligonucleotide
agttcggacgttaacggctcgcaccgttggacagctccgagttcatccgtgg

SEQ ID NO: 199928 - DNA, 52 bp, Artificial
  Synthetic oligonucleotide
gtgcccagcgaaagccatggcgagactctctgcttgcgccactggaatatgc

SEQ ID NO: 199929 - DNA, 52 bp, Artificial
  Synthetic oligonucleotide
actacgttactggttggtgcagaaccgtcgatcctaagaactcatccctcga

SEQ ID NO: 199930 - DNA, 52 bp, Artificial
  Synthetic oligonucleotide
taataccagcgatggaacatcgacagcggacggtagtaatgatgaaaccaca

SEQ ID NO: 199931 - DNA, 52 bp, Artificial
  Synthetic oligonucleotide
gtcaatcacgtagaaaagcagcgaccaatcgtgacgctggctaagcattctg

SEQ ID NO: 199932 - DNA, 52 bp, Artificial
  Synthetic oligonucleotide
tgccgcccgttttttgccgccccgggtcataccaaaagtcgctagttcataa

SEQ ID NO: 199933 - DNA, 52 bp, Artificial
  Synthetic oligonucleotide
atacgcggctaagaattttacattgcttaacgcgtgaaccagatatggccgt

SEQ ID NO: 199934 - DNA, 52 bp, Artificial
  Synthetic oligonucleotide
aaattatctaatggcggtttacaaagaatggactgattcagatcatttagag

SEQ ID NO: 199935 - DNA, 52 bp, Artificial
  Synthetic oligonucleotide
tgtacaactattaattgcgtgctatataaagcaagtacagttactttcatat

SEQ ID NO: 199936 - DNA, 59 bp, Artificial
  Synthetic oligonucleotide
ccagctatccagttgtagttggtgttttattctaaatcgctcttatttgcattctaaga

SEQ ID NO: 199937 - DNA, 52 bp, Artificial
  Synthetic oligonucleotide
gtatgggtactagaacttatactgtagatagtggcattggtttccctactca

SEQ ID NO: 199938 - DNA, 52 bp, Artificial
  Synthetic oligonucleotide
cacgcattttatcacgtcgtttgtccaacttacgtttttgtgatttaacagt

SEQ ID NO: 199939 - DNA, 52 bp, Artificial
  Synthetic oligonucleotide
ttaatcccgaagctattaacgctgttatacctgcattagctcctggtagtgg

SEQ ID NO: 199940 - DNA, 52 bp, Artificial
  Synthetic oligonucleotide
aatggtcaacctaaggggagttttgaacaatcgagtatgcagcagtttaaat

SEQ ID NO: 199941 - DNA, 52 bp, Artificial
  Synthetic oligonucleotide
gtataaattatcggctaaacgggtgtttaatcgtgcggctttgcaaaacgtt

SEQ ID NO: 199942 - DNA, 52 bp, Artificial
  Synthetic oligonucleotide
aacgggctggttgttttgcagattagccgtaacgtaattacgatagttacgt

SEQ ID NO: 199943 - DNA, 52 bp, Artificial
  Synthetic oligonucleotide
cctcttaactccccacaaaaatagccgttaccgaacaggtaacggctatgaa

SEQ ID NO: 199944 - DNA, 52 bp, Artificial
  Synthetic oligonucleotide
gaattcggccagcattcaagtccaggaatgaattagagatcgtgtcatagag

SEQ ID NO: 199945 - DNA, 52 bp, Artificial
  Synthetic oligonucleotide
tactaattattgttagtgtcgccgtggtcctatacaccatctattttgcctt

SEQ ID NO: 199946 - DNA, 52 bp, Artificial
  Synthetic oligonucleotide
gaagcctggtcgccactaggtaatggtcgacttctttccaatgacgttatta

SEQ ID NO: 199947 - DNA, 60 bp, Artificial
  Synthetic oligonucleotide
gaaacatgaccgctacagattccctattggccaggtgagagtctacaacgctgaggcgct

SEQ ID NO: 199948 - DNA, 60 bp, Artificial
  Synthetic oligonucleotide
ccagcatcatgatttagatctgttttagaggcttagacgctgaatgaagtgtcaatggta

SEQ ID NO: 199949 - DNA, 52 bp, Artificial
  Synthetic oligonucleotide
cccaagctccttggaattaaggtcagcacacgaggcccgctaatggcgcgga

SEQ ID NO: 199950 - DNA, 52 bp, Artificial
  Synthetic oligonucleotide
ctgtcacttaacttactcaaaaaagccacccacctcggagtggctttttggt

SEQ ID NO: 199951 - DNA, 52 bp, Artificial
  Synthetic oligonucleotide
aggcaagttcggggtgttcggttccaaatgccagtgcggtcacgcgtaacgc

SEQ ID NO: 199952 - DNA, 52 bp, Artificial
  Synthetic oligonucleotide
ggtggttaacccgggtctgcccagcaacaagctggttaccgcggtccccaaa

SEQ ID NO: 199953 - DNA, 52 bp, Artificial
  Synthetic oligonucleotide
ctcttttagaattgtcatcacaatacgcccaaggacaaccacgactactaac

SEQ ID NO: 199954 - DNA, 52 bp, Artificial
  Synthetic oligonucleotide
atagagtatcggttagtaagccttgacccctactcccgcaacgcatcgggac

SEQ ID NO: 199955 - DNA, 52 bp, Artificial
  Synthetic oligonucleotide
aacgtttaagtgtgcgtgtgtcaatcccaatacgcttattgaacgattgtac

SEQ ID NO: 199956 - DNA, 52 bp, Artificial
  Synthetic oligonucleotide
agcacgggcaaccttatcagtaaccacgccgttagacgtagaaatgatggca

SEQ ID NO: 199957 - DNA, 52 bp, Artificial
  Synthetic oligonucleotide
ccgtccaatcgttggatctacttagtccgcttaaaatcatgacgcgtggtta

SEQ ID NO: 199958 - DNA, 52 bp, Artificial
  Synthetic oligonucleotide
ggtgctaaaccaacgagtgaattccctacgcatctaatgtcacatattgcga

SEQ ID NO: 199959 - DNA, 60 bp, Artificial
  Synthetic oligonucleotide
ccactgctaaagcgccaccagctggcaccttagtggcatcagctgctcgtaaaacaagtg

SEQ ID NO: 199960 - DNA, 52 bp, Artificial
  Synthetic oligonucleotide
cttatcacttgaatgctatcaacaaggaagacgttattaagaaccgggctta

SEQ ID NO: 199961 - DNA, 52 bp, Artificial
  Synthetic oligonucleotide
gtctgctaagcgagtatttaatcgcacggctttgcgaaatattcaagatcaa

SEQ ID NO: 199962 - DNA, 52 bp, Artificial
  Synthetic oligonucleotide
gttgaccatggcacgtgattcgttgtcttggtcaatcttgtggttaagttga

SEQ ID NO: 199963 - DNA, 52 bp, Artificial
  Synthetic oligonucleotide
ggtgcaggcgagcaaacgccaaaggattcagtgcaagtagctcgttggcagc

SEQ ID NO: 199964 - DNA, 52 bp, Artificial
  Synthetic oligonucleotide
taacggatcaactaccgcagccggtgaggcaacaggcgcagagacgactgtt

SEQ ID NO: 199965 - DNA, 52 bp, Artificial
  Synthetic oligonucleotide
caagatgccagattctgccgctaatggcttagacaagcttaatcgtgcatca

SEQ ID NO: 199966 - DNA, 52 bp, Artificial
  Synthetic oligonucleotide
aaagctgcaggaaccaaaagcgcagttccagccacaatacttaatacaattc

SEQ ID NO: 199967 - DNA, 52 bp, Artificial
  Synthetic oligonucleotide
gcgtagccctctattagatgccattcgtcaaggggcacacgcttgcgaccgg

SEQ ID NO: 199968 - DNA, 52 bp, Artificial
  Synthetic oligonucleotide
atttgaccgttgtcgcgagtgttaccggcgcccaggtttcgggcacgagatg

SEQ ID NO: 199969 - DNA, 52 bp, Artificial
  Synthetic oligonucleotide
tctttgccaggtatgcaagcgggcgggaaggatcacaccagctacaaccgta

SEQ ID NO: 199970 - DNA, 60 bp, Artificial
  Synthetic oligonucleotide
ccacccgtgataatatagccatcgccgccgctaacctcgctatcggttgctagctgcaat

SEQ ID NO: 199971 - DNA, 52 bp, Artificial
  Synthetic oligonucleotide
gcggtttaaatagggcttgaagttggttgcttgcttaattccatcatggacc

SEQ ID NO: 199972 - DNA, 52 bp, Artificial
  Synthetic oligonucleotide
acatctgattcagttgccaatatcttaactcgtggtggtaccttcctttaca

SEQ ID NO: 199973 - DNA, 52 bp, Artificial
  Synthetic oligonucleotide
agacgttccgggccccacgctgggtaccagacaaggtgaatctcaacgcttt

SEQ ID NO: 199974 - DNA, 52 bp, Artificial
  Synthetic oligonucleotide
agtttgcggcgtaacggctggatgtcggttgcagcggttagtgcagtcaccg

SEQ ID NO: 199975 - DNA, 52 bp, Artificial
  Synthetic oligonucleotide
taccggtgtcatccttagttctgggcgaatcttcggtgaggccgccgcttta

SEQ ID NO: 199976 - DNA, 52 bp, Artificial
  Synthetic oligonucleotide
gccagattagtttctagcacgttaacccgaggttcaccaagaattcccagag

SEQ ID NO: 199977 - DNA, 52 bp, Artificial
  Synthetic oligonucleotide
tgctgggggagtgttaagacctgctactggcggggtcccaactgccgacgtc

SEQ ID NO: 199978 - DNA, 52 bp, Artificial
  Synthetic oligonucleotide
aggggttggtaatacgtgagcgttagggccaccaaggtattcgtaaagtggc

SEQ ID NO: 199979 - DNA, 52 bp, Artificial
  Synthetic oligonucleotide
ataaatctttgttgatctgcggggcattcctgtaattttggacttcaccaaa

SEQ ID NO: 199980 - DNA, 52 bp, Artificial
  Synthetic oligonucleotide
ctcaaggctttgattggtcatctgttgcaaacacatatcctttatgggtagc

SEQ ID NO: 199981 - DNA, 60 bp, Artificial
  Synthetic oligonucleotide
ccacagaccgactagtgcgatgccaagggcgataaacgatatcacagccggaacgctagc

SEQ ID NO: 199982 - DNA, 52 bp, Artificial
  Synthetic oligonucleotide
tctttaagctgatgttctaagtcacccaagcaacgtgtctctgtgcgactga

SEQ ID NO: 199983 - DNA, 51 bp, Artificial
  Synthetic oligonucleotide
gacgttcggttaacatattctcgacctcttaattagcactcataactctca

SEQ ID NO: 199984 - DNA, 51 bp, Artificial
  Synthetic oligonucleotide
caagcattgacccgaaaccaaagataatagctaagtgtcctaattggcccc

SEQ ID NO: 199985 - DNA, 51 bp, Artificial
  Synthetic oligonucleotide
tccggcgtctgatcttggccttgggtcctgatatcaagcccgctactgcta

SEQ ID NO: 199986 - DNA, 51 bp, Artificial
  Synthetic oligonucleotide
atgcgtggaccggaaagtcaaggtttatactattatggaccaatgacatca

SEQ ID NO: 199987 - DNA, 51 bp, Artificial
  Synthetic oligonucleotide
gaagtcttccacggacctcacgaacaaagctggtatttactcgatcgaatc

SEQ ID NO: 199988 - DNA, 51 bp, Artificial
  Synthetic oligonucleotide
tgcagcgtttaaagcgctatggggtaaccgggattaccaatgatagtcgct

SEQ ID NO: 199989 - DNA, 51 bp, Artificial
  Synthetic oligonucleotide
acttattttcggtttattagcctttactcggggacaattcactcagggtct

SEQ ID NO: 199990 - DNA, 51 bp, Artificial
  Synthetic oligonucleotide
actaatctatcatgggctggttaaagcgaacttaattagaccctaatagat

SEQ ID NO: 199991 - DNA, 51 bp, Artificial
  Synthetic oligonucleotide
tccgtatacggcgcggttaatgccttcatgctcacgggaatgcgtacgcct

SEQ ID NO: 199992 - DNA, 56 bp, Artificial
  Synthetic oligonucleotide
ccaacgggagcgaggataaggagttgactagctaactaaacccagacactgaattg

SEQ ID NO: 199993 - DNA, 51 bp, Artificial
  Synthetic oligonucleotide
aacctgccggctaaagttaccgtgggcgtcccttggcacgtcaacgtatgc

SEQ ID NO: 199994 - DNA, 51 bp, Artificial
  Synthetic oligonucleotide
atcggctgtgccgttgcctgatcctaagattgagcgccaacgtcgccggat

SEQ ID NO: 199995 - DNA, 51 bp, Artificial
  Synthetic oligonucleotide
atcgcgtaacatatccgcattgtgtagcgatgcccgcgcaacggtcgtccc

SEQ ID NO: 199996 - DNA, 51 bp, Artificial
  Synthetic oligonucleotide
ttttggtgatgcagcgtacacaactctatagtgacttgtctgcaatgtgag

SEQ ID NO: 199997 - DNA, 51 bp, Artificial
  Synthetic oligonucleotide
tggaaagggtggccttcatggcagcttcggtcggaatcggggtggcatcga

SEQ ID NO: 199998 - DNA, 51 bp, Artificial
  Synthetic oligonucleotide
tcccacaaacggcgacggcttgaacgactgtcgcaataatggtgtgtccgc

SEQ ID NO: 199999 - DNA, 51 bp, Artificial
  Synthetic oligonucleotide
tgcttgagttaaccagtagttccccaaaacgatatcctgtccaggggttac

SEQ ID NO: 200000 - DNA, 51 bp, Artificial
  Synthetic oligonucleotide
cacacgcataaaagtgctagtatccgcatcaccgttgagttttggcactcc

SEQ ID NO: 200001 - DNA, 51 bp, Artificial
  Synthetic oligonucleotide
aacgacggggatccaaacgtaactaccgtgctccacgccttagcttgggcc

SEQ ID NO: 200002 - DNA, 51 bp, Artificial
  Synthetic oligonucleotide
tggtgcaattccggcttgagtataacgtttatccacggcttttactcgatt

SEQ ID NO: 200003 - DNA, 59 bp, Artificial
  Synthetic oligonucleotide
ccaaatacgccaaccgaattggccttaccagtgatgataaattcattagtgactcagac

SEQ ID NO: 200004 - DNA, 51 bp, Artificial
  Synthetic oligonucleotide
tgctaacggttctggatctgacgggtacaattgctgctctctacatcaaaa

SEQ ID NO: 200005 - DNA, 51 bp, Artificial
  Synthetic oligonucleotide
tgcggtgattatgtatttcccacaaggcattgttacgagcgtcgtggccct

SEQ ID NO: 200006 - DNA, 51 bp, Artificial
  Synthetic oligonucleotide
tgtaacgcaagtggttaaacgtctgatccgtgtcttctttggcgaatccga

SEQ ID NO: 200007 - DNA, 51 bp, Artificial
  Synthetic oligonucleotide
aaaactgtagtagattcagtcgggttagcaatttctaccattaagcgagca

SEQ ID NO: 200008 - DNA, 51 bp, Artificial
  Synthetic oligonucleotide
aaaacttcgtctaagagcaggtacttggtgttagtacataatcctagtagg

SEQ ID NO: 200009 - DNA, 51 bp, Artificial
  Synthetic oligonucleotide
gacgatggcttgtacccgctgaccacgtgggccaacacaggtcccaaccga

SEQ ID NO: 200010 - DNA, 51 bp, Artificial
  Synthetic oligonucleotide
acgttaaaaatacccctttgtcatattatcggcaaaggggtataatactgt

SEQ ID NO: 200011 - DNA, 51 bp, Artificial
  Synthetic oligonucleotide
aacatcgaaatgcaaacaacggatcaagatgatatcggtagacgcatgcgt

SEQ ID NO: 200012 - DNA, 51 bp, Artificial
  Synthetic oligonucleotide
atgccatatgcttcagccttgtttaacaaccgtgctaagagtgatcgtcca

SEQ ID NO: 200013 - DNA, 51 bp, Artificial
  Synthetic oligonucleotide
tgcccggccatcgctagaatccgaccggtgttaggatccatcgctaccgca

SEQ ID NO: 200014 - DNA, 57 bp, Artificial
  Synthetic oligonucleotide
ccaaagagttaggtggcaagctgactaagatggttccaatgcggttaaatagtacga

SEQ ID NO: 200015 - DNA, 51 bp, Artificial
  Synthetic oligonucleotide
ttgagcaattagacgaagccgaaacccgtaaatattttgaaacagccaaac

SEQ ID NO: 200016 - DNA, 51 bp, Artificial
  Synthetic oligonucleotide
gacaaccgctattagacaagggtgcgcttttacccccccattgtgcgataa

SEQ ID NO: 200017 - DNA, 51 bp, Artificial
  Synthetic oligonucleotide
cacgtcgtgctaatttataccgcccagaagagatggtttgtacagctacac

SEQ ID NO: 200018 - DNA, 51 bp, Artificial
  Synthetic oligonucleotide
attagaaactcctactgagcgaattaagccaaatcgttgagcgtcaatcat

SEQ ID NO: 200019 - DNA, 51 bp, Artificial
  Synthetic oligonucleotide
gaccagcaactcgcctagctccgcagtttcaggcgcaaacaacggctcata

SEQ ID NO: 200020 - DNA, 51 bp, Artificial
  Synthetic oligonucleotide
gacttgcaacccgagctgccgaatctggctatccgtggagtaagcgtcggc

SEQ ID NO: 200021 - DNA, 51 bp, Artificial
  Synthetic oligonucleotide
gaccactggtcttcccatcaacttagattcatatgctaaaaggccacgttt

SEQ ID NO: 200022 - DNA, 51 bp, Artificial
  Synthetic oligonucleotide
aaacgtttgtgggaacaaatgagtttggtaaacattgctcactcagaacgt

SEQ ID NO: 200023 - DNA, 51 bp, Artificial
  Synthetic oligonucleotide
cacgttgggctcgccgaatcagctccacgctccgtgctgtagaaacgtggc

SEQ ID NO: 200024 - DNA, 51 bp, Artificial
  Synthetic oligonucleotide
atactaagtatggcgatggagctagtgatcttgttccgttatttagacttg

SEQ ID NO: 200025 - DNA, 55 bp, Artificial
  Synthetic oligonucleotide
cgacaagaacgacaaccaagtttaagctttgcttgtcgattggtgttcttgtcgt

SEQ ID NO: 200026 - DNA, 51 bp, Artificial
  Synthetic oligonucleotide
gagcaattagttgtccaacgtaatggtgattttgtaacgccgaagtatagt

SEQ ID NO: 200027 - DNA, 51 bp, Artificial
  Synthetic oligonucleotide
tcgtcccgtcggtgggatgttgtccgatcatttacggccgatgcagttgct

SEQ ID NO: 200028 - DNA, 51 bp, Artificial
  Synthetic oligonucleotide
ttcggttctagcgctaaagttagtcctttatggttagtcggtagctgggca

SEQ ID NO: 200029 - DNA, 51 bp, Artificial
  Synthetic oligonucleotide
attccgcaaggcgcaggtatgttagtcgcacgcactttgaccggccgactg

SEQ ID NO: 200030 - DNA, 51 bp, Artificial
  Synthetic oligonucleotide
attcgggttgctgctaaaaccaactctaataatagttagtgcaagggctgg

SEQ ID NO: 200031 - DNA, 51 bp, Artificial
  Synthetic oligonucleotide
ttcgatactaatcttactgctatagaggtgatgcagcaatctgcagcatta

SEQ ID NO: 200032 - DNA, 51 bp, Artificial
  Synthetic oligonucleotide
atatcgagtgccgtaacgaccatgaccggtggattgcttggcggtattacc

SEQ ID NO: 200033 - DNA, 51 bp, Artificial
  Synthetic oligonucleotide
cacttacgagtcaggcggctgtccctgaacagacaactgatgcgtcacagg

SEQ ID NO: 200034 - DNA, 51 bp, Artificial
  Synthetic oligonucleotide
tcttgatggattgttatcaacagcaatcattaggggagataatcccagaga

SEQ ID NO: 200035 - DNA, 51 bp, Artificial
  Synthetic oligonucleotide
tctcctgacgaaggcgactcgcgcctaggaaggaggttgctagctctagga

SEQ ID NO: 200036 - DNA, 57 bp, Artificial
  Synthetic oligonucleotide
cgaatgacgcacccaaagaatattttcatatcgacaaaaaaactgctaaccaatatg

SEQ ID NO: 200037 - DNA, 51 bp, Artificial
  Synthetic oligonucleotide
gacatcttcggttgcagcaaatttaccactcaagccatcactttcaatgtc

SEQ ID NO: 200038 - DNA, 51 bp, Artificial
  Synthetic oligonucleotide
ttattgaaagtacctgataatatgccaaatagtattgcagcaggatactca

SEQ ID NO: 200039 - DNA, 51 bp, Artificial
  Synthetic oligonucleotide
gaaacacaaccaccgaaagcttttacagagggtacattattaactgctatg

SEQ ID NO: 200040 - DNA, 51 bp, Artificial
  Synthetic oligonucleotide
tcttagttgaacctaagggatattttcctcctaagggacatgggcggttgc

SEQ ID NO: 200041 - DNA, 51 bp, Artificial
  Synthetic oligonucleotide
ttatcgaacaaactaataaaacgccttaatcgacgctctagacgtgctgaa

SEQ ID NO: 200042 - DNA, 51 bp, Artificial
  Synthetic oligonucleotide
cagtcacccacactccgtcacgttgggctcgccgaatcagctccacgctcc

SEQ ID NO: 200043 - DNA, 51 bp, Artificial
  Synthetic oligonucleotide
tgattctatcttctgtcggtggatgtgtgtaaaataagtgagatagaccgt

SEQ ID NO: 200044 - DNA, 51 bp, Artificial
  Synthetic oligonucleotide
atggctgtgaatttggctgaccattacgatgttgaaccgatccatcgagat

SEQ ID NO: 200045 - DNA, 51 bp, Artificial
  Synthetic oligonucleotide
tgatgctttacggcaacgattagacgatccagccgctcaattgacagaaac

SEQ ID NO: 200046 - DNA, 51 bp, Artificial
  Synthetic oligonucleotide
ttgttggaccgaccgccaggaggttatgcgcttcttaggtgagcggagcga

SEQ ID NO: 200047 - DNA, 57 bp, Artificial
  Synthetic oligonucleotide
cgaagacaaattcaatcgggttaaagacttctactacatcttaggcagctataccca

SEQ ID NO: 200048 - DNA, 51 bp, Artificial
  Synthetic oligonucleotide
aacagacaaacgcattcgcatggttactttggaaggatctagaacaaatac

SEQ ID NO: 200049 - DNA, 51 bp, Artificial
  Synthetic oligonucleotide
ttgtcgattagcagctcggtttcgactaaggtgccgataatacgccccatc

SEQ ID NO: 200050 - DNA, 51 bp, Artificial
  Synthetic oligonucleotide
gaatcataaccccgttaactaacataaaaccagttgttagccattcaaccg

SEQ ID NO: 200051 - DNA, 51 bp, Artificial
  Synthetic oligonucleotide
aaaatttcggatagaagcaaccacgtcatcgggctaatagcgccttggaag

SEQ ID NO: 200052 - DNA, 51 bp, Artificial
  Synthetic oligonucleotide
gactcacgtcagccgttccataagcttgtgcgacagccggcgtccggtaga

SEQ ID NO: 200053 - DNA, 51 bp, Artificial
  Synthetic oligonucleotide
cacgtaccgcattggtcaacgggacccccggaactaacggcatgacgcttc

SEQ ID NO: 200054 - DNA, 51 bp, Artificial
  Synthetic oligonucleotide
cagggatgacgctcgaatttatcgaccgcgatgatggcttgaagggaatca

SEQ ID NO: 200055 - DNA, 51 bp, Artificial
  Synthetic oligonucleotide
atggggcgcaccaccatttaggatcgagccctctggttcaaccacggcagc

SEQ ID NO: 200056 - DNA, 51 bp, Artificial
  Synthetic oligonucleotide
ttaaacaaagtccaagcctatggagctgcagaagatattgacacaaccgtt

SEQ ID NO: 200057 - DNA, 51 bp, Artificial
  Synthetic oligonucleotide
atgtccggctcgaccagttaactacggggaaaatcccattagggctgtatt

SEQ ID NO: 200058 - DNA, 59 bp, Artificial
  Synthetic oligonucleotide
cttcacaggagataacttagccctaattaagggtgatattagtggggatgatcctgtga

SEQ ID NO: 200059 - DNA, 54 bp, Artificial
  Synthetic oligonucleotide
gaaaacgtcggtgtcacgtttaaccgtcacgggattcaagtgaacgatcgacta

SEQ ID NO: 200060 - DNA, 56 bp, Artificial
  Synthetic oligonucleotide
cgaaaataaatggggtgtaagttgcttaaaacctgtatcagaattcgctccgctca

SEQ ID NO: 200061 - DNA, 51 bp, Artificial
  Synthetic oligonucleotide
gatgcgacattgccacccttaaattgacggtcttccattagtttcttgacg

SEQ ID NO: 200062 - DNA, 51 bp, Artificial
  Synthetic oligonucleotide
ttgcgcgatacgcgaaagctcccgatcccgtttccagaccaacgcaaccgg

SEQ ID NO: 200063 - DNA, 51 bp, Artificial
  Synthetic oligonucleotide
tcgcagcgaccgcagtgatcgctaggagatcgacaccatagctgcctgagc

SEQ ID NO: 200064 - DNA, 51 bp, Artificial
  Synthetic oligonucleotide
tcgcatgcaatcagagttgaaccggaaccaccgaacgggtccaacacggta

SEQ ID NO: 200065 - DNA, 51 bp, Artificial
  Synthetic oligonucleotide
aacttggcgttgacgggcctggcgaccataatcgccctgaggatcggtgta

SEQ ID NO: 200066 - DNA, 51 bp, Artificial
  Synthetic oligonucleotide
tcgcccggcgattattcttaggcggcgtcaacacgtccattctcgccagct

SEQ ID NO: 200067 - DNA, 51 bp, Artificial
  Synthetic oligonucleotide
aacggcccttattccttctcgtcggcagtcgcggcttacgccaagatggct

SEQ ID NO: 200068 - DNA, 51 bp, Artificial
  Synthetic oligonucleotide
ttaatcgctactagccctgctgcatagtcattattaccgtgcgcaagttca

SEQ ID NO: 200069 - DNA, 51 bp, Artificial
  Synthetic oligonucleotide
caacatcgcacttattttactggagccgttcgaacgtacatggttgcccaa

SEQ ID NO: 200070 - DNA, 51 bp, Artificial
  Synthetic oligonucleotide
aaacgccgggcagaatttgctggagaaatcgccagtccgcaagattgggcc

SEQ ID NO: 200071 - DNA, 52 bp, Artificial
  Synthetic oligonucleotide
cgaaaaactggtaaacctaataccttgtaccttaagcctgttcaaacagagc

SEQ ID NO: 200072 - DNA, 51 bp, Artificial
  Synthetic oligonucleotide
cttataggaagatgcttatttttacaactcaagctcataaacattttagct

SEQ ID NO: 200073 - DNA, 51 bp, Artificial
  Synthetic oligonucleotide
cggatgtccaactcgcttagccagctcagtgtacgtaaccgtggtgccgcg

SEQ ID NO: 200074 - DNA, 51 bp, Artificial
  Synthetic oligonucleotide
cttagtctaactctgggcgcccttgcctaaccgtgccgggttacgcgacgc

SEQ ID NO: 200075 - DNA, 51 bp, Artificial
  Synthetic oligonucleotide
ccgcgtgccttttcatcaacccaagtgcgctcaacgacgtaggttttattg

SEQ ID NO: 200076 - DNA, 51 bp, Artificial
  Synthetic oligonucleotide
tactcgagtgtaaggagtttcggcatcagtatagtttactacggcgtttcc

SEQ ID NO: 200077 - DNA, 51 bp, Artificial
  Synthetic oligonucleotide
ctaatcatggactgcgataatgatcattctgacgatccgactacttggatc

SEQ ID NO: 200078 - DNA, 51 bp, Artificial
  Synthetic oligonucleotide
gctgccaaggacagatttgaccgttgtcgcgagtgttaccggcgcccaggt

SEQ ID NO: 200079 - DNA, 51 bp, Artificial
  Synthetic oligonucleotide
agctacgtcccgcaaacaatcgactgcgtcgcttattcacgagcctaggct

SEQ ID NO: 200080 - DNA, 51 bp, Artificial
  Synthetic oligonucleotide
ccgcgtaagttcgcgcgtcaaagcacaccatcgtcacccgatcgagctggg

SEQ ID NO: 200081 - DNA, 51 bp, Artificial
  Synthetic oligonucleotide
gcggttgcggctgactgggcagcagactccgcattagcttgagaggttgct

SEQ ID NO: 200082 - DNA, 47 bp, Artificial
  Synthetic oligonucleotide
cgaaaaacggggcggttcttgtttttaacgttgacggtaaagaatac

SEQ ID NO: 200083 - DNA, 51 bp, Artificial
  Synthetic oligonucleotide
cttagcagttccaggccggatcaatcattatttatcagcgggtaccaacga

SEQ ID NO: 200084 - DNA, 51 bp, Artificial
  Synthetic oligonucleotide
tacgtgagcacgcgcggcagttagccgaaacggattatgtgaccgccttgt

SEQ ID NO: 200085 - DNA, 51 bp, Artificial
  Synthetic oligonucleotide
cgctgaccacgtgggccaacacaggtcccaaccgaatcaacgttggcgtca

SEQ ID NO: 200086 - DNA, 51 bp, Artificial
  Synthetic oligonucleotide
gtaaaatgtagcgcttaagctgctccaatgttggtgttaatgactttagct

SEQ ID NO: 200087 - DNA, 51 bp, Artificial
  Synthetic oligonucleotide
gttcaggcgattttaatggctctcgcttaatataaacgtcttttgctgtta

SEQ ID NO: 200088 - DNA, 51 bp, Artificial
  Synthetic oligonucleotide
tacgcgaaagctcccgatcccgtttccagaccaacgcaaccggatcggcta

SEQ ID NO: 200089 - DNA, 51 bp, Artificial
  Synthetic oligonucleotide
tacctctagctagttccccatgcatacgatactgagttttcaattcgtatt

SEQ ID NO: 200090 - DNA, 51 bp, Artificial
  Synthetic oligonucleotide
taccgcgccaactgaaggcgatcggacaatctctggtaaaggagctgcggg

SEQ ID NO: 200091 - DNA, 51 bp, Artificial
  Synthetic oligonucleotide
cgtttattatttatccagaaagtatcccgactgattggcgagtatgtttgg

SEQ ID NO: 200092 - DNA, 51 bp, Artificial
  Synthetic oligonucleotide
aatttggccccggacaatggctacagccagctaccgcgcaagtgatgcgta

SEQ ID NO: 200093 - DNA, 53 bp, Artificial
  Synthetic oligonucleotide
ccttgtttatgcccgaagttaaacgaaacttgattcaggtgcgactaaccgac

SEQ ID NO: 200094 - DNA, 51 bp, Artificial
  Synthetic oligonucleotide
tagggggcaagcgttatacgattgggtcagacgcccatgacgcaacgcact

SEQ ID NO: 200095 - DNA, 51 bp, Artificial
  Synthetic oligonucleotide
taggggacaggcagcttattatcttaagggatattcacattcagctcgtgc

SEQ ID NO: 200096 - DNA, 51 bp, Artificial
  Synthetic oligonucleotide
ccagacagctacttagattcagtcgactttgacttgccggaaaaaatcgac

SEQ ID NO: 200097 - DNA, 51 bp, Artificial
  Synthetic oligonucleotide
agccgctgttaccaccccggcaattttagcgcggtacgttttggccacgtg

SEQ ID NO: 200098 - DNA, 51 bp, Artificial
  Synthetic oligonucleotide
ctgccggagttatttccggggccctcacccagtcagctaccgttgccagtt

SEQ ID NO: 200099 - DNA, 51 bp, Artificial
  Synthetic oligonucleotide
acataaaagattagctcttctcacgtggttggatgagaggagctttttagt

SEQ ID NO: 200100 - DNA, 51 bp, Artificial
  Synthetic oligonucleotide
cgacagattgagcatgataaaacaataagagatcagacaagacaagaaatg

SEQ ID NO: 200101 - DNA, 51 bp, Artificial
  Synthetic oligonucleotide
gcacgttcataaacttttacgtctacataaggttcttctgcatctccatca

SEQ ID NO: 200102 - DNA, 51 bp, Artificial
  Synthetic oligonucleotide
gccgaattagttcaaattggtgccgtgagggattgctggggtagttcataa

SEQ ID NO: 200103 - DNA, 51 bp, Artificial
  Synthetic oligonucleotide
tagccgtgcaccaaagtgaaattagtcagccgaataatgtgaatgattcac

SEQ ID NO: 200104 - DNA, 58 bp, Artificial
  Synthetic oligonucleotide
cctgtcccgcaaaagatgtggtgatacacttcgcaacgaggacattgacctttgactt

SEQ ID NO: 200105 - DNA, 51 bp, Artificial
  Synthetic oligonucleotide
accccgggcgttagcgtcccagatcggtgctcgttcgccacctaagtacgg

SEQ ID NO: 200106 - DNA, 51 bp, Artificial
  Synthetic oligonucleotide
ctgcctaagcgccgaccagctgagttacggccgttggatgttgaaccgcca

SEQ ID NO: 200107 - DNA, 51 bp, Artificial
  Synthetic oligonucleotide
ccagttttaacatggaaccgaggttatattcccgcggacggccaaactggt

SEQ ID NO: 200108 - DNA, 51 bp, Artificial
  Synthetic oligonucleotide
ctaaatgactttggagctgtatatgtaattggatcggcaagttgcactagt

SEQ ID NO: 200109 - DNA, 51 bp, Artificial
  Synthetic oligonucleotide
gttaggttgccaaaagcccgcggcaagtcattgccttgtgtaacaagatag

SEQ ID NO: 200110 - DNA, 51 bp, Artificial
  Synthetic oligonucleotide
agtagaaaaattcgttctttgtgtgagtatgaagttactcatagaaagatg

SEQ ID NO: 200111 - DNA, 51 bp, Artificial
  Synthetic oligonucleotide
gttggataaagtcccgcgtaaaccattggcatcatttcgcgataacctggt

SEQ ID NO: 200112 - DNA, 51 bp, Artificial
  Synthetic oligonucleotide
cccgtcaaccgtgacgtatggtttcagacccggcacatccttgcgggaacc

SEQ ID NO: 200113 - DNA, 51 bp, Artificial
  Synthetic oligonucleotide
cgccgagccactccggtaactcccgataacaggacgccctttccagaatgc

SEQ ID NO: 200114 - DNA, 51 bp, Artificial
  Synthetic oligonucleotide
taacgcaagccaatgacctggcaagatctctcggtaatttgagtacgttcc

SEQ ID NO: 200115 - DNA, 59 bp, Artificial
  Synthetic oligonucleotide
cctggtcaccagaaaccattgcggccgcttataacttgagcactgcgtcaatttataat

SEQ ID NO: 200116 - DNA, 51 bp, Artificial
  Synthetic oligonucleotide
agagattcgtcttaatttaggtctaagtcaggctaaaatgtgtgaaggaat

SEQ ID NO: 200117 - DNA, 51 bp, Artificial
  Synthetic oligonucleotide
ggtgaagccgataccagaacttacacggttccaattacagctaggatgaga

SEQ ID NO: 200118 - DNA, 51 bp, Artificial
  Synthetic oligonucleotide
gctcaatggtgcgatcaactccaaggcccgcttggtagccttacgccctgg

SEQ ID NO: 200119 - DNA, 51 bp, Artificial
  Synthetic oligonucleotide
aatcttgccatacctaatgcatgttgagcagctaggttaagcaaactccat

SEQ ID NO: 200120 - DNA, 51 bp, Artificial
  Synthetic oligonucleotide
cgccaattcaggttgggttggcggccgcgttagcttgtagctgcttcgttt

SEQ ID NO: 200121 - DNA, 51 bp, Artificial
  Synthetic oligonucleotide
cgcacaatatcaaatccgctaactgccttttcctcagtagcacctgatgca

SEQ ID NO: 200122 - DNA, 51 bp, Artificial
  Synthetic oligonucleotide
aatgccgtccggtcccagggagtctgtccatcatacacggcccgttccacc

SEQ ID NO: 200123 - DNA, 51 bp, Artificial
  Synthetic oligonucleotide
ggtataactagttggtaagatgctcccctttgctaagtcataattcttagg

SEQ ID NO: 200124 - DNA, 51 bp, Artificial
  Synthetic oligonucleotide
accaactgcgcccccgttgagatcggcacagtcttggagatcccgactgct

SEQ ID NO: 200125 - DNA, 51 bp, Artificial
  Synthetic oligonucleotide
gccaagcagccaaatgagcgtgcaaatcaggtaagcaggcccgttgcggaa

SEQ ID NO: 200126 - DNA, 60 bp, Artificial
  Synthetic oligonucleotide
cctgaagaagctacttggtcaatatcaacacctgcagctgagtattccacaaactgatca

SEQ ID NO: 200127 - DNA, 51 bp, Artificial
  Synthetic oligonucleotide
acgcattaccgtggtaccacctatttactgcagattgcagcactctaatca

SEQ ID NO: 200128 - DNA, 51 bp, Artificial
  Synthetic oligonucleotide
cgaggcgctgcgtaacgtatcacaatttaatgagtggcgtcggcagtcgtt

SEQ ID NO: 200129 - DNA, 51 bp, Artificial
  Synthetic oligonucleotide
gctctaactgaattacaaagcgaacattggttgtgagggctttgtgattca

SEQ ID NO: 200130 - DNA, 51 bp, Artificial
  Synthetic oligonucleotide
aatcagaatcgcgggtaaacctttgccaccaatgcttttaattggtccttt

SEQ ID NO: 200131 - DNA, 51 bp, Artificial
  Synthetic oligonucleotide
ccccagcaattcaagaaacagtaacatcccgtgttgccaatgctccaatac

SEQ ID NO: 200132 - DNA, 51 bp, Artificial
  Synthetic oligonucleotide
acgcccgcgcagtagttgcaaaaccatacggcactggaacgtccatcgccg

SEQ ID NO: 200133 - DNA, 51 bp, Artificial
  Synthetic oligonucleotide
gcccatggttaaaacggctaagaaacgattctagagccaatctgaaagggc

SEQ ID NO: 200134 - DNA, 51 bp, Artificial
  Synthetic oligonucleotide
ccccttagcccaccaactgttagcgcccgaacggcacgttcaaaagacgta

SEQ ID NO: 200135 - DNA, 51 bp, Artificial
  Synthetic oligonucleotide
gcatacggcgtttattcctgtcttgctagcggaaaagtactattggatcga

SEQ ID NO: 200136 - DNA, 51 bp, Artificial
  Synthetic oligonucleotide
aatccgttggctcttggccattgaacgcaccgttgtccgaacggcgtagcc

SEQ ID NO: 200137 - DNA, 60 bp, Artificial
  Synthetic oligonucleotide
ccgtatctaccatacgtggataccctgacggtggaacataagcagctattccatatgtcc

SEQ ID NO: 200138 - DNA, 51 bp, Artificial
  Synthetic oligonucleotide
taatggcaagccgagagtggcagaccagacgcgagaacaatgccaaccagc

SEQ ID NO: 200139 - DNA, 51 bp, Artificial
  Synthetic oligonucleotide
aatcgaaacagcaaagaatggcggaaacgtaaaagaagttatggatcaagc

SEQ ID NO: 200140 - DNA, 51 bp, Artificial
  Synthetic oligonucleotide
ctagtgcgttggattatgcgttaggtaaagacaagcccctgcatgaacaca

SEQ ID NO: 200141 - DNA, 51 bp, Artificial
  Synthetic oligonucleotide
cgatttgcttgattttgcggttgaagccttcaagacagccattagaataag

SEQ ID NO: 200142 - DNA, 51 bp, Artificial
  Synthetic oligonucleotide
taaggcgttagtcaccaactgcgcccccgttgagatcggcacagtcttgga

SEQ ID NO: 200143 - DNA, 51 bp, Artificial
  Synthetic oligonucleotide
ctactaatagctggaccacattttaatacacgtctagtagacggagaaagc

SEQ ID NO: 200144 - DNA, 51 bp, Artificial
  Synthetic oligonucleotide
cccgccactcgttaatgcccaacgttccggccaggtcaatggtgttggata

SEQ ID NO: 200145 - DNA, 51 bp, Artificial
  Synthetic oligonucleotide
gttgcaatcactaagacggacctaactgaaacgcagattcaagaatggttt

SEQ ID NO: 200146 - DNA, 51 bp, Artificial
  Synthetic oligonucleotide
taagccgaggacaaatttaggggcggtgccaacgcattcgttacagacacc

SEQ ID NO: 200147 - DNA, 51 bp, Artificial
  Synthetic oligonucleotide
aatcgtgcgccgtgtttaagaagtgcacgtgataacccgcaactgcggccc

SEQ ID NO: 200148 - DNA, 60 bp, Artificial
  Synthetic oligonucleotide
ccgggcttaatatcagctatggtagcaggatacatcgcagatggatcttgtgaatacaca

SEQ ID NO: 200149 - DNA, 51 bp, Artificial
  Synthetic oligonucleotide
gcaactggtataattccaagaatcgcagtgaaggccgtatatgaacgttta

SEQ ID NO: 200150 - DNA, 51 bp, Artificial
  Synthetic oligonucleotide
agccgtttactacgctactaaagcataggttacaagctggtcaaatgcgtt

SEQ ID NO: 200151 - DNA, 51 bp, Artificial
  Synthetic oligonucleotide
cattgctcctgccatctgaacggcaatatatggtagcacctcggaccaagg

SEQ ID NO: 200152 - DNA, 51 bp, Artificial
  Synthetic oligonucleotide
ggcaccgcggttcatcccggggatgcttatggtttgatggtcaatgccgtt

SEQ ID NO: 200153 - DNA, 51 bp, Artificial
  Synthetic oligonucleotide
tcaagcaaaaacagccactacccttaaaactaaaactctccacgatagaat

SEQ ID NO: 200154 - DNA, 51 bp, Artificial
  Synthetic oligonucleotide
cttgggcgcgaaggcccatgtatcgaaatgggtgcaatggttggtcagggc

SEQ ID NO: 200155 - DNA, 51 bp, Artificial
  Synthetic oligonucleotide
ggaatggtatgaatgctcgatatgctagaggatcattgtcattaacgtttt

SEQ ID NO: 200156 - DNA, 51 bp, Artificial
  Synthetic oligonucleotide
gtcgtgctcggtttgcagatttggcgggggcagccaattatggacgcctta

SEQ ID NO: 200157 - DNA, 51 bp, Artificial
  Synthetic oligonucleotide
ccaaatcggtactgttactgaaactcttgaaactatccgtatgtcacgtaa

SEQ ID NO: 200158 - DNA, 51 bp, Artificial
  Synthetic oligonucleotide
aagcttgattaggcttgattaggcttgtattccttgattttataggctttc

SEQ ID NO: 200159 - DNA, 55 bp, Artificial
  Synthetic oligonucleotide
ccgcgtaggtgcctccggaggacgttttcaacttgttggccacgttagtggctga

SEQ ID NO: 200160 - DNA, 51 bp, Artificial
  Synthetic oligonucleotide
cttgcttgatccaagcccaaataagctaaagtcattgattcacttgagtga

SEQ ID NO: 200161 - DNA, 51 bp, Artificial
  Synthetic oligonucleotide
cttgcactagagctagaaatagaagtttgggcggaactagaaccagcataa

SEQ ID NO: 200162 - DNA, 51 bp, Artificial
  Synthetic oligonucleotide
tattggcgatagttacaccgcatttacacggtatctcgttagtatcctata

SEQ ID NO: 200163 - DNA, 51 bp, Artificial
  Synthetic oligonucleotide
agagtcgtatcatcgtcaaattgcaggcttgttatttcggggttttgaaga

SEQ ID NO: 200164 - DNA, 51 bp, Artificial
  Synthetic oligonucleotide
gtgacgttgtgtactgtccggaggcaatttgggtcaacaactgatttctgc

SEQ ID NO: 200165 - DNA, 51 bp, Artificial
  Synthetic oligonucleotide
cggtcctttaactgagcgacatcatgcttaagcgtggcaatttgttgcttg

SEQ ID NO: 200166 - DNA, 51 bp, Artificial
  Synthetic oligonucleotide
ggaacccgggaaaacgttaaggttgccttatctggggaaggtgctgatgaa

SEQ ID NO: 200167 - DNA, 51 bp, Artificial
  Synthetic oligonucleotide
gcgattgacttcacgttggacgccggctgcagcttggatcacttcccggtc

SEQ ID NO: 200168 - DNA, 51 bp, Artificial
  Synthetic oligonucleotide
cctcatgtaataataaggttccacgctcaacattgtctaagatcggatcaa

SEQ ID NO: 200169 - DNA, 51 bp, Artificial
  Synthetic oligonucleotide
cgtcttccgagccttaaccgttccggcttctcgcactacgcccccaaacaa

SEQ ID NO: 200170 - DNA, 60 bp, Artificial
  Synthetic oligonucleotide
gaaaaatatcaatactcaaagagatgagattgttgggcattgtggtgcagatgtggagag

SEQ ID NO: 200171 - DNA, 60 bp, Artificial
  Synthetic oligonucleotide
ccgatgaatccggcaattcagagggcttcagaatggccttctacacggcatataagagcg

SEQ ID NO: 200172 - DNA, 51 bp, Artificial
  Synthetic oligonucleotide
ctttacgcggtaaatccgtgtatatagacattcggaatgctaaatggggaa

SEQ ID NO: 200173 - DNA, 51 bp, Artificial
  Synthetic oligonucleotide
cgtcgtccgcgataaagcccctgcccgctaatcgccaacactcgttgttta

SEQ ID NO: 200174 - DNA, 51 bp, Artificial
  Synthetic oligonucleotide
gtccgttcgattagcggcatcaccctccgctaaaatggcgcatttagcaac

SEQ ID NO: 200175 - DNA, 51 bp, Artificial
  Synthetic oligonucleotide
catccaccgttgattcgcaaagctcgaacgcgctgcgacctctgtcgcgcg

SEQ ID NO: 200176 - DNA, 51 bp, Artificial
  Synthetic oligonucleotide
tcatcgtcaggtaaaacatggcgtttaattaactgatcacgtgcaattcga

SEQ ID NO: 200177 - DNA, 51 bp, Artificial
  Synthetic oligonucleotide
catcgctttacaatggctcatttcactgaagacggtcagaatttacgccga

SEQ ID NO: 200178 - DNA, 51 bp, Artificial
  Synthetic oligonucleotide
gcgatagtcccatcgttattgaagatttcattgcgtctgagagctaataaa

SEQ ID NO: 200179 - DNA, 51 bp, Artificial
  Synthetic oligonucleotide
cgtccgtgtgaatgtaccccgttgcaattaggtacttaaccgcaaagttcg

SEQ ID NO: 200180 - DNA, 51 bp, Artificial
  Synthetic oligonucleotide
ccttaatgtggcaaaaatgtaatgacacaacatcgtaacactagtcgctta

SEQ ID NO: 200181 - DNA, 51 bp, Artificial
  Synthetic oligonucleotide
cgtcccggtcatgcttcccattccgcctaaaacaacgatgatcaaaatcga

SEQ ID NO: 200182 - DNA, 54 bp, Artificial
  Synthetic oligonucleotide
ccgagaactgggcttgccagcttttacgtaggcgttccggatccttgaccacgt

SEQ ID NO: 200183 - DNA, 51 bp, Artificial
  Synthetic oligonucleotide
acggtcagttcgtcccattaagcattggctctgcggattctgtgaccttgt

SEQ ID NO: 200184 - DNA, 51 bp, Artificial
  Synthetic oligonucleotide
gcgacacaatttggcgcagaatacgtttacgggaacgtgactaatgttgaa

SEQ ID NO: 200185 - DNA, 51 bp, Artificial
  Synthetic oligonucleotide
ccttctacacggcatataagagcggcgttcagttagctataccagtagagg

SEQ ID NO: 200186 - DNA, 51 bp, Artificial
  Synthetic oligonucleotide
acctttcctcatgtttgaaaagctgatcgagaaataaagcacacaacggta

SEQ ID NO: 200187 - DNA, 51 bp, Artificial
  Synthetic oligonucleotide
aagcgtggcagcttcctaccctcgcaggcagtttcccaccaactactctcg

SEQ ID NO: 200188 - DNA, 51 bp, Artificial
  Synthetic oligonucleotide
tatcaacatcggttcaaaaacttctcgacttacttgattgttcccgctgtg

SEQ ID NO: 200189 - DNA, 51 bp, Artificial
  Synthetic oligonucleotide
cttcctatacagcctttacactaaagcccgaacaagctgatgttcggttga

SEQ ID NO: 200190 - DNA, 51 bp, Artificial
  Synthetic oligonucleotide
ggcggaacagccactccggttcagtttcgcctgggaacggatcagcttcat

SEQ ID NO: 200191 - DNA, 51 bp, Artificial
  Synthetic oligonucleotide
tatacgtaactccagtttcagctaactacatcgaacgtactgttactccag

SEQ ID NO: 200192 - DNA, 51 bp, Artificial
  Synthetic oligonucleotide
gtggatagaaagcccactgcatgataaagatataaacgaaacgactgatga

SEQ ID NO: 200193 - DNA, 54 bp, Artificial
  Synthetic oligonucleotide
ccctgaccctgataaacggaagttgtatgacgctttgtgggagtacgtaatcgg

SEQ ID NO: 200194 - DNA, 51 bp, Artificial
  Synthetic oligonucleotide
ctgataatagctcgtggtaaagtactgttttcgaaaatctgagaaggtgtc

SEQ ID NO: 200195 - DNA, 51 bp, Artificial
  Synthetic oligonucleotide
aagtaacatgacgattgtggccccaattagcagtaccgagcggaattttcc

SEQ ID NO: 200196 - DNA, 51 bp, Artificial
  Synthetic oligonucleotide
gcgggggaccaacaagcggccctatttggtcaagcagcttacgagaaggga

SEQ ID NO: 200197 - DNA, 51 bp, Artificial
  Synthetic oligonucleotide
ccggccgggttgcacctaagccgggggctgaaatcggatttagtaccgacc

SEQ ID NO: 200198 - DNA, 51 bp, Artificial
  Synthetic oligonucleotide
gcaccagaagcttttcaaaagacgcatttagagtggttttatcgcttgatt

SEQ ID NO: 200199 - DNA, 51 bp, Artificial
  Synthetic oligonucleotide
ccaatgctgttcgtgaacgcgctcacaggcctagaaacctgcgcatagggg

SEQ ID NO: 200200 - DNA, 51 bp, Artificial
  Synthetic oligonucleotide
gctttagttaacagccctaacttgcgtttgagatctagaatgcggaaaacg

SEQ ID NO: 200201 - DNA, 51 bp, Artificial
  Synthetic oligonucleotide
cttcctaacggaaaattagcttcacgtgagattattcatcactgcaagtcg

SEQ ID NO: 200202 - DNA, 51 bp, Artificial
  Synthetic oligonucleotide
gtagtacgggcagtagttatctcttggtttaggttatcaagttcatcttga

SEQ ID NO: 200203 - DNA, 51 bp, Artificial
  Synthetic oligonucleotide
tatgctcggtttatctatgattgaaaggcaacctcctctgtaagtgtatac

SEQ ID NO: 200204 - DNA, 58 bp, Artificial
  Synthetic oligonucleotide
ccctgaaagtgcgccgaaagactggcgtactattctggacaagcaaggaatgacttgg

SEQ ID NO: 200205 - DNA, 51 bp, Artificial
  Synthetic oligonucleotide
agaagtaagaataggcatcttgagtggctgaattggcgatgactgaactaa

SEQ ID NO: 200206 - DNA, 51 bp, Artificial
  Synthetic oligonucleotide
tatggcgcattcgggaattagtgtattgctcgagggaacaaactttatgcg

SEQ ID NO: 200207 - DNA, 51 bp, Artificial
  Synthetic oligonucleotide
gtagtgaagtaactcgtttcagtactacgatgcttcaaaatgactcaatgg

SEQ ID NO: 200208 - DNA, 51 bp, Artificial
  Synthetic oligonucleotide
gtgttacgaacaccgttcaacgcgcaacatctagtctgtcgttactttccc

SEQ ID NO: 200209 - DNA, 51 bp, Artificial
  Synthetic oligonucleotide
ggcgttccggatccttgaccacgttagggtgttcaagtacgccaccgggtg

SEQ ID NO: 200210 - DNA, 50 bp, Artificial
  Synthetic oligonucleotide
agggccgtgattaatctgtctgtcacgtggctagagcgggggatgccgga

SEQ ID NO: 200211 - DNA, 50 bp, Artificial
  Synthetic oligonucleotide
ctcgaattcatttcgaaagcggtgaaagatttacgggtcattcgggaggt

SEQ ID NO: 200212 - DNA, 50 bp, Artificial
  Synthetic oligonucleotide
aaaggccaacgtccgcgcagcactcggttttagcaacgctgcctgggact

SEQ ID NO: 200213 - DNA, 50 bp, Artificial
  Synthetic oligonucleotide
cgacaaagggttacttgcatccaaggcccgggtcgctgctaagcgtgcgc

SEQ ID NO: 200214 - DNA, 50 bp, Artificial
  Synthetic oligonucleotide
cgaatgggtagaccgtatctggtgcgtacacccggccaactggggcactg

SEQ ID NO: 200215 - DNA, 55 bp, Artificial
  Synthetic oligonucleotide
ccctcggtggcgaccgggggaacacataactcttagcaaagattatgtgttcatt

SEQ ID NO: 200216 - DNA, 50 bp, Artificial
  Synthetic oligonucleotide
attggctcagacttggttttgtcattcccgtttgtgtccgttatgtaatt

SEQ ID NO: 200217 - DNA, 50 bp, Artificial
  Synthetic oligonucleotide
caaacgtctctatataggcctagaagatcaaatacctgagtcaaacgaac

SEQ ID NO: 200218 - DNA, 50 bp, Artificial
  Synthetic oligonucleotide
aaagggggtgcccctacagcgagtcgccactaaagacgaggttgcttcgg

SEQ ID NO: 200219 - DNA, 50 bp, Artificial
  Synthetic oligonucleotide
ttcaagcgataagagctgttaggcttagctaagtgagggtagttcaactg

SEQ ID NO: 200220 - DNA, 50 bp, Artificial
  Synthetic oligonucleotide
cgcaaaaccggcggcaggggagtggttgcaacggctaactataaggcccg

SEQ ID NO: 200221 - DNA, 50 bp, Artificial
  Synthetic oligonucleotide
cgcaaccgttctccactggggtgaaatgggcttgtccaacctcgggtcgg

SEQ ID NO: 200222 - DNA, 50 bp, Artificial
  Synthetic oligonucleotide
ctaggtcgccattatcggacaaaatcggttggtgcttgaagttatgttta

SEQ ID NO: 200223 - DNA, 50 bp, Artificial
  Synthetic oligonucleotide
caaaccgatcactgtcgccgctaagaaaagttgcttaggtgattgggtcg

SEQ ID NO: 200224 - DNA, 50 bp, Artificial
  Synthetic oligonucleotide
gtatagaggcagagaatgttcttgaggtataccctattggctaatcacac

SEQ ID NO: 200225 - DNA, 50 bp, Artificial
  Synthetic oligonucleotide
aaaggattgattgaatggcacgagttgaagggtctacggatttatgggtg

SEQ ID NO: 200226 - DNA, 57 bp, Artificial
  Synthetic oligonucleotide
ccctacaatgagtttaacaaacgataacgtttttatgtgctgcgactggatcattgt

SEQ ID NO: 200227 - DNA, 50 bp, Artificial
  Synthetic oligonucleotide
cgactaactttaactcctaccgctggttgaacttcataacgagtaactgt

SEQ ID NO: 200228 - DNA, 50 bp, Artificial
  Synthetic oligonucleotide
aaaggacaagacggttggtttgtgaccgctgcccctaagcgcaacaccga

SEQ ID NO: 200229 - DNA, 50 bp, Artificial
  Synthetic oligonucleotide
ctccaatagcgtaaacgtctttaacattcgttctcaagtatggatcagtc

SEQ ID NO: 200230 - DNA, 50 bp, Artificial
  Synthetic oligonucleotide
gcgtataaaatggtgaccgtatcgacgactgcttgcaacatggcgccaat

SEQ ID NO: 200231 - DNA, 50 bp, Artificial
  Synthetic oligonucleotide
ttaattaaatacgaactagcatacaagcatgttagaagattatgccccga

SEQ ID NO: 200232 - DNA, 50 bp, Artificial
  Synthetic oligonucleotide
cgagccggcctaacaatcaggctgcctatcacgttttctagctacaatga

SEQ ID NO: 200233 - DNA, 50 bp, Artificial
  Synthetic oligonucleotide
caacatttcgttcaatcagagttaatcagcgcaattcaacgcgtcattga

SEQ ID NO: 200234 - DNA, 50 bp, Artificial
  Synthetic oligonucleotide
acgccgggacctaaaagaaccccgacccgttctgccttagccgcgatccc

SEQ ID NO: 200235 - DNA, 50 bp, Artificial
  Synthetic oligonucleotide
gtagtatctgtttcttcagctggactagttggctatgcggttatacctcg

SEQ ID NO: 200236 - DNA, 50 bp, Artificial
  Synthetic oligonucleotide
acatgccggtgggtaagatcaagctcaagcaaaggggagcgtcagggggc

SEQ ID NO: 200237 - DNA, 57 bp, Artificial
  Synthetic oligonucleotide
ccctaaagcaaaagtaagaccgaaggcacgcacagcagctttgcctttattagcggc

SEQ ID NO: 200238 - DNA, 50 bp, Artificial
  Synthetic oligonucleotide
actgcccccgttctgcagtagccgagccctcaacatacgtttggccaggt

SEQ ID NO: 200239 - DNA, 50 bp, Artificial
  Synthetic oligonucleotide
ggtgggaccgacaaggagcaccaagtcgaacaattgaaccggcgccaacc

SEQ ID NO: 200240 - DNA, 50 bp, Artificial
  Synthetic oligonucleotide
agggaccagaccgtggatgtttgacgactcccccttacacggccggaagc

SEQ ID NO: 200241 - DNA, 50 bp, Artificial
  Synthetic oligonucleotide
caaccaacctatctgagcaagcctctcaggccttgcaactcgtacaaggc

SEQ ID NO: 200242 - DNA, 50 bp, Artificial
  Synthetic oligonucleotide
gaattatgctcactaccttgaaacgatcactaacaagcgtccccacactt

SEQ ID NO: 200243 - DNA, 50 bp, Artificial
  Synthetic oligonucleotide
cgacggttgggtactcgttgcgggctggtcagcattggcagacgttcgac

SEQ ID NO: 200244 - DNA, 50 bp, Artificial
  Synthetic oligonucleotide
atacgctattggaagttgccagggagtaccacctcgataaatttgtgcag

SEQ ID NO: 200245 - DNA, 50 bp, Artificial
  Synthetic oligonucleotide
gtacgtactgtaattcctaaacggtcagccatctctctaggtttaagcat

SEQ ID NO: 200246 - DNA, 50 bp, Artificial
  Synthetic oligonucleotide
caacccgggtctcgtcgcactctaaatttggccccaagcatccgccgcaa

SEQ ID NO: 200247 - DNA, 50 bp, Artificial
  Synthetic oligonucleotide
agcaagtgtctgccaacgtccctcatggcgggtaaccgtccgttccatga

SEQ ID NO: 200248 - DNA, 59 bp, Artificial
  Synthetic oligonucleotide
ccctaaaaatcaaacccgccagtagaaagtggtgagctcatgagtcaattagccgcaca

SEQ ID NO: 200249 - DNA, 50 bp, Artificial
  Synthetic oligonucleotide
atagcgccataaggtaatcatggccgaattataccgcttaccagcatgta

SEQ ID NO: 200250 - DNA, 50 bp, Artificial
  Synthetic oligonucleotide
cgggtttactagctggtgtgactaggcgctgggctgcccacaaccgggca

SEQ ID NO: 200251 - DNA, 50 bp, Artificial
  Synthetic oligonucleotide
aaaaggcgattacttcccggctaaatagtgctgaatatgagcgtgacctg

SEQ ID NO: 200252 - DNA, 50 bp, Artificial
  Synthetic oligonucleotide
ggcgcaccaatctccgtcctagcttagtcatccgggctgcttcggaggtc

SEQ ID NO: 200253 - DNA, 50 bp, Artificial
  Synthetic oligonucleotide
atgccgggaaccacagaaccggaagcagtcattgcgaccggctcacacat

SEQ ID NO: 200254 - DNA, 50 bp, Artificial
  Synthetic oligonucleotide
ggcgcacttcaggatccatgcccattacaacctttcctaaagtccaagta

SEQ ID NO: 200255 - DNA, 50 bp, Artificial
  Synthetic oligonucleotide
acgacaactgcttaaatcctatttgtaattcatcccacattaggtcaaca

SEQ ID NO: 200256 - DNA, 50 bp, Artificial
  Synthetic oligonucleotide
accgccggagatcacatctgaagtattatgttcactaaccccatgtctta

SEQ ID NO: 200257 - DNA, 50 bp, Artificial
  Synthetic oligonucleotide
tttaggctaatcgtgacaagggttagcgccgttcactacacgtaaacgac

SEQ ID NO: 200258 - DNA, 50 bp, Artificial
  Synthetic oligonucleotide
tttagcttttgtaaaccgacagaaaagccaacaggtatgactgtttactc

SEQ ID NO: 200259 - DNA, 60 bp, Artificial
  Synthetic oligonucleotide
tgccccgatcagtatgcttcaaatcgtctaactggtggccatgtttggctaacaccgcgg

SEQ ID NO: 200260 - DNA, 50 bp, Artificial
  Synthetic oligonucleotide
atgcttcggaaactggtacggcgacacatgctacggacgcaacggccacg

SEQ ID NO: 200261 - DNA, 50 bp, Artificial
  Synthetic oligonucleotide
cggggttcaaccgcgcatttgcgtgcgaaaagtgggactgggttcccgct

SEQ ID NO: 200262 - DNA, 50 bp, Artificial
  Synthetic oligonucleotide
acgacaccagttaaagaattccctcatcagcggcgctagtttctttcgac

SEQ ID NO: 200263 - DNA, 50 bp, Artificial
  Synthetic oligonucleotide
cgggggcggatcggtcgcagcaaccgagtggcttacgcttacttcatgta

SEQ ID NO: 200264 - DNA, 50 bp, Artificial
  Synthetic oligonucleotide
atcctgtgatggttcgcttgcactctgagtgttttacgggggatgtactt

SEQ ID NO: 200265 - DNA, 50 bp, Artificial
  Synthetic oligonucleotide
atcctgcccgtgcagtgctccggtaatccaggtgcattcgcttggcgatt

SEQ ID NO: 200266 - DNA, 50 bp, Artificial
  Synthetic oligonucleotide
agccggcgccaggaacaaggccacgctcattcggtaaattagtgtccgcg

SEQ ID NO: 200267 - DNA, 50 bp, Artificial
  Synthetic oligonucleotide
gcttgcagtgtaacctgccggctaaagttaccgtgggcgtcccttggcac

SEQ ID NO: 200268 - DNA, 50 bp, Artificial
  Synthetic oligonucleotide
cgtttggggaaccacgaacccaaccagtgcgggcttccaagcagctggta

SEQ ID NO: 200269 - DNA, 50 bp, Artificial
  Synthetic oligonucleotide
acgaccggtagccgttaagtgcgccactttctttccgcgggcattcgtgg

SEQ ID NO: 200270 - DNA, 60 bp, Artificial
  Synthetic oligonucleotide
tgcatgattgtgatgaaaaaagggatagcaaaacttgggatgataataacgatttaattg

SEQ ID NO: 200271 - DNA, 50 bp, Artificial
  Synthetic oligonucleotide
cgttttggttttacgattgtctttcggactgcgacttgtatggcagtctt

SEQ ID NO: 200272 - DNA, 50 bp, Artificial
  Synthetic oligonucleotide
cgtgacttgtcggctgttagagacgcataaccgagtgatcattagtatta

SEQ ID NO: 200273 - DNA, 50 bp, Artificial
  Synthetic oligonucleotide
ggaggcccagttcggacgttaacggctcgcaccgttggacagctccgagt

SEQ ID NO: 200274 - DNA, 50 bp, Artificial
  Synthetic oligonucleotide
ggacttgccggaatcgttattggcctggcacctgcaattgggccaaccct

SEQ ID NO: 200275 - DNA, 50 bp, Artificial
  Synthetic oligonucleotide
ggagtaattacctggataagaatgatcgtggtgcatcctgtctcggccaa

SEQ ID NO: 200276 - DNA, 50 bp, Artificial
  Synthetic oligonucleotide
ggactattgaagcatgctcgtagttatacggccgtatgtaacccaattgt

SEQ ID NO: 200277 - DNA, 50 bp, Artificial
  Synthetic oligonucleotide
ttttgaatccgatcaaatagcgatgagagaatcacgcttttgccagtacc

SEQ ID NO: 200278 - DNA, 50 bp, Artificial
  Synthetic oligonucleotide
cgtgcacccgtactgaccgcaactagcacttccttgttatcaagtgcgtg

SEQ ID NO: 200279 - DNA, 50 bp, Artificial
  Synthetic oligonucleotide
atcgtgagaagggacccggctccttatccggtgccaagcgggacgaaatg

SEQ ID NO: 200280 - DNA, 50 bp, Artificial
  Synthetic oligonucleotide
atctagcacgtactcaaaggccatcacaccacgcccccagacgtctgcga

SEQ ID NO: 200281 - DNA, 57 bp, Artificial
  Synthetic oligonucleotide
ctttttaaaggctcatggttcggaatatggcatgcctagtattaaggtcgtcaattc

SEQ ID NO: 200282 - DNA, 49 bp, Artificial
  Synthetic oligonucleotide
tgcaccaaatttaccaccgggaaccttaaaggcccttggacggttgggt

SEQ ID NO: 200283 - DNA, 50 bp, Artificial
  Synthetic oligonucleotide
actcgctcagatcacgacagcccggcagttaatgggacttacggccgccg

SEQ ID NO: 200284 - DNA, 50 bp, Artificial
  Synthetic oligonucleotide
ttttagccgaataacgtgatttgatcgtacgaccattaccgttgcgcaag

SEQ ID NO: 200285 - DNA, 50 bp, Artificial
  Synthetic oligonucleotide
ggcagtcgttaccgcgattcgcaccccagtatacgaaccgggccccttag

SEQ ID NO: 200286 - DNA, 50 bp, Artificial
  Synthetic oligonucleotide
accgttacccagcggtcccgtgccgacccaccgcttcattcacacggcta

SEQ ID NO: 200287 - DNA, 50 bp, Artificial
  Synthetic oligonucleotide
cggttagagcatctgctagcttcggttccccacaccagctatcgcttaac

SEQ ID NO: 200288 - DNA, 49 bp, Artificial
  Synthetic oligonucleotide
accgcgttggttggttcggtggggcctcgtcccctggttaatcccaact

SEQ ID NO: 200289 - DNA, 50 bp, Artificial
  Synthetic oligonucleotide
cgttcaacacaagaaggcccgcgacctaatctcgctgccgtttggggcgg

SEQ ID NO: 200290 - DNA, 50 bp, Artificial
  Synthetic oligonucleotide
accgcgtaaacgttgccgcctgcttaattcccagccgactcgcaactgcg

SEQ ID NO: 200291 - DNA, 50 bp, Artificial
  Synthetic oligonucleotide
gacgaggcccacacgacggtttattcaccgctggcatacgtggggatggg

SEQ ID NO: 200292 - DNA, 50 bp, Artificial
  Synthetic oligonucleotide
atgcaagctttaggtgtatcaagctttgacttgcacgaagttgaaaagta

SEQ ID NO: 200293 - DNA, 56 bp, Artificial
  Synthetic oligonucleotide
tgattgccagttaggaaaatcagccggtaactgtcgccattgacaaccggttttta

SEQ ID NO: 200294 - DNA, 50 bp, Artificial
  Synthetic oligonucleotide
cgttcggccgttaatttttcgcggcttgggtggggtgacgttgctgggtt

SEQ ID NO: 200295 - DNA, 50 bp, Artificial
  Synthetic oligonucleotide
aaacggacacccagccccacggatcttcacgccactgccgcaaggacgcc

SEQ ID NO: 200296 - DNA, 50 bp, Artificial
  Synthetic oligonucleotide
aaacggcagtggggcctgacgtgacgttggttaacccagcagtccaagcg

SEQ ID NO: 200297 - DNA, 50 bp, Artificial
  Synthetic oligonucleotide
agcagtcgctgtggcagtggctagtgcggggattgattcgaagacggcta

SEQ ID NO: 200298 - DNA, 49 bp, Artificial
  Synthetic oligonucleotide
gggtaacgcttctcctcgaaaaccgagggtccccacccgaaacaggtcg

SEQ ID NO: 200299 - DNA, 50 bp, Artificial
  Synthetic oligonucleotide
gctcccgagaggaccccaccaagtagcggaccaacaaggtttccggcaat

SEQ ID NO: 200300 - DNA, 50 bp, Artificial
  Synthetic oligonucleotide
gggtagctaaaccttctgttctgattaagttctgcggaatgattgagaag

SEQ ID NO: 200301 - DNA, 50 bp, Artificial
  Synthetic oligonucleotide
aaactagttgagcagattgacgaagggagtacataactgagttgaccgtc

SEQ ID NO: 200302 - DNA, 50 bp, Artificial
  Synthetic oligonucleotide
ttctcatatctggactaggtgatgcctcagttcggaaagtatcactgtta

SEQ ID NO: 200303 - DNA, 50 bp, Artificial
  Synthetic oligonucleotide
cgcccaaggagtcggcaaaaggggccgatctacgacccaagctcccaacg

SEQ ID NO: 200304 - DNA, 55 bp, Artificial
  Synthetic oligonucleotide
tgagtttttgaaaaacaatggcaaataaaaaaagcgccctgtgacgagggcgcaa

SEQ ID NO: 200305 - DNA, 50 bp, Artificial
  Synthetic oligonucleotide
cgccatttgtcttagtttaaagccgatagattctggttcactatcccgtg

SEQ ID NO: 200306 - DNA, 50 bp, Artificial
  Synthetic oligonucleotide
ggtaataacccaacaatgagtgaacaggtcgttcaaattaacatgggggt

SEQ ID NO: 200307 - DNA, 50 bp, Artificial
  Synthetic oligonucleotide
cgccagtccttcgactaaccgccacgccgcattgggaacatagctggcca

SEQ ID NO: 200308 - DNA, 50 bp, Artificial
  Synthetic oligonucleotide
ttcgcgtggcaacttgcccttcttacgagcaggtgcaaacccgacaccta

SEQ ID NO: 200309 - DNA, 50 bp, Artificial
  Synthetic oligonucleotide
cgccaaagaccagtcggcgtccaagtcggtgcaactgcattgacgcgata

SEQ ID NO: 200310 - DNA, 50 bp, Artificial
  Synthetic oligonucleotide
atatcttcgggccccttcccgtccattggcgacaacacgccgtgtagcac

SEQ ID NO: 200311 - DNA, 50 bp, Artificial
  Synthetic oligonucleotide
agctgcatggagctgaagtaaccgcgggggagattcgcgctggtgcgtgt

SEQ ID NO: 200312 - DNA, 50 bp, Artificial
  Synthetic oligonucleotide
ctagcccagtatagtcagataattcatcgatcgttgggtacgcgcccgtt

SEQ ID NO: 200313 - DNA, 50 bp, Artificial
  Synthetic oligonucleotide
ctagctggtgtgactaggcgctgggctgcccacaaccgggcatccgtggt

SEQ ID NO: 200314 - DNA, 50 bp, Artificial
  Synthetic oligonucleotide
gctaggccattcgcatacacgggcgcgtcaaaattggcgtccaaccggtt

SEQ ID NO: 200315 - DNA, 60 bp, Artificial
  Synthetic oligonucleotide
tgagccaacagtgtcggcgtccaagcccttgtgataactgcaatatttagtcttaggaaa

SEQ ID NO: 200316 - DNA, 50 bp, Artificial
  Synthetic oligonucleotide
cgcagaatctctgatctatcaagcttcatctaagttggctgaaattgaag

SEQ ID NO: 200317 - DNA, 50 bp, Artificial
  Synthetic oligonucleotide
ttgtaacacagccaatgcgggataataaactgccaagaacgaagccaaat

SEQ ID NO: 200318 - DNA, 50 bp, Artificial
  Synthetic oligonucleotide
ttggttatacatttctttgttcacttgattagtcatagaatcacgccact

SEQ ID NO: 200319 - DNA, 50 bp, Artificial
  Synthetic oligonucleotide
acccgctgagaaccacgcccaatactttcccccgttggagcgccggtgct

SEQ ID NO: 200320 - DNA, 50 bp, Artificial
  Synthetic oligonucleotide
cggccgccaccaacgggatgaatctgcatggtggtaaccgggcaatctgc

SEQ ID NO: 200321 - DNA, 50 bp, Artificial
  Synthetic oligonucleotide
agcgtcctaggtagccctcgttttcaatgcacagggcgcactgggggtac

SEQ ID NO: 200322 - DNA, 50 bp, Artificial
  Synthetic oligonucleotide
ttggcgccgtcagcacgttaattgtgacgccgggtgggcaagaacaaacc

SEQ ID NO: 200323 - DNA, 50 bp, Artificial
  Synthetic oligonucleotide
ttggccgacagcaagtgtcgcagcgaccgcagtgatcgctaggagatcga

SEQ ID NO: 200324 - DNA, 50 bp, Artificial
  Synthetic oligonucleotide
ctaacgtcgccacagaaactggcttgactaagaaagatgctacagcggct

SEQ ID NO: 200325 - DNA, 50 bp, Artificial
  Synthetic oligonucleotide
gggcatccccattgccacgatttgtataatagatccgttcgacttcagtg

SEQ ID NO: 200326 - DNA, 60 bp, Artificial
  Synthetic oligonucleotide
tgagatagccctagaaggcccatatttgcgttctgaggcgttttagctttgcctggcaga

SEQ ID NO: 200327 - DNA, 50 bp, Artificial
  Synthetic oligonucleotide
gggccacaacggccttaagtcgttaatcgaccacctggggacccgcgagt

SEQ ID NO: 200328 - DNA, 50 bp, Artificial
  Synthetic oligonucleotide
gaccggcttcaagacgaaacttggcagctggacgccaagccaccagatcc

SEQ ID NO: 200329 - DNA, 50 bp, Artificial
  Synthetic oligonucleotide
gaccgccccgctttaatgcctgggtttgtcggcgggtatatggccagtca

SEQ ID NO: 200330 - DNA, 50 bp, Artificial
  Synthetic oligonucleotide
ctacaccgcaccccgcgagccaccacaactacggttcacaaatcacgcgt

SEQ ID NO: 200331 - DNA, 50 bp, Artificial
  Synthetic oligonucleotide
agctccgcgaacaacagcggccacgtctcctcttcatcttaggggccggt

SEQ ID NO: 200332 - DNA, 50 bp, Artificial
  Synthetic oligonucleotide
ctacatgacggccatttactacaagcgggcggatggcacttagcacagaa

SEQ ID NO: 200333 - DNA, 50 bp, Artificial
  Synthetic oligonucleotide
cgcgttacacaacagcattcagatcgtttggctcgtgaagttcaagttat

SEQ ID NO: 200334 - DNA, 50 bp, Artificial
  Synthetic oligonucleotide
cgcggtgactcccgacgtgtgcgttaataagtgccggatggtaacccggg

SEQ ID NO: 200335 - DNA, 50 bp, Artificial
  Synthetic oligonucleotide
agctctacttgaggttttggaaccggtagcagctagtccaacgcaagtag

SEQ ID NO: 200336 - DNA, 50 bp, Artificial
  Synthetic oligonucleotide
ggggcccaggatcatataagacccaatcagtcgtcattaccaacctgttt

SEQ ID NO: 200337 - DNA, 60 bp, Artificial
  Synthetic oligonucleotide
tgactctggtagttgcaaacactcctaacaagttttgctagactcagtcatcgttaagta

SEQ ID NO: 200338 - DNA, 50 bp, Artificial
  Synthetic oligonucleotide
agcagttcgttcgtgcagccccacaacttgacttgccccaagccgtagta

SEQ ID NO: 200339 - DNA, 50 bp, Artificial
  Synthetic oligonucleotide
ccatcggcacgtttgctgcctaagcgccgaccagctgagttacggccgtt

SEQ ID NO: 200340 - DNA, 50 bp, Artificial
  Synthetic oligonucleotide
agtggccggccgttgaccacctttcaagttgtgccaactagtgagcggct

SEQ ID NO: 200341 - DNA, 50 bp, Artificial
  Synthetic oligonucleotide
gcactataggatcgactttgctagttactacacctgcggggttagctttt

SEQ ID NO: 200342 - DNA, 50 bp, Artificial
  Synthetic oligonucleotide
gcactataccccattgaacacaccgcgggagctgagtacccactcggcga

SEQ ID NO: 200343 - DNA, 50 bp, Artificial
  Synthetic oligonucleotide
cagacgaaccatgagcttgtgacatcgccccaacggaacccatgccccga

SEQ ID NO: 200344 - DNA, 50 bp, Artificial
  Synthetic oligonucleotide
acgggcagcatcatgtcccagctcgttatcgtggaacgcaccagcggttg

SEQ ID NO: 200345 - DNA, 50 bp, Artificial
  Synthetic oligonucleotide
ccagcgaggccgacagtgattcagcggttcgagcggaattgcggcgggcc

SEQ ID NO: 200346 - DNA, 50 bp, Artificial
  Synthetic oligonucleotide
tagctagcacctacccgggcttgcacgccgtaattggctttcaccccgag

SEQ ID NO: 200347 - DNA, 50 bp, Artificial
  Synthetic oligonucleotide
ccagcctaccttttggtagaacctgacctttcgttttctaaaacctcagt

SEQ ID NO: 200348 - DNA, 60 bp, Artificial
  Synthetic oligonucleotide
tgacgtacttgaagactactctctaaacgagtcattgccaatagattctccactagacta

SEQ ID NO: 200349 - DNA, 50 bp, Artificial
  Synthetic oligonucleotide
taggcacgtcgctaaccccgcggtattcgtagccgaccttttgtgggcga

SEQ ID NO: 200350 - DNA, 50 bp, Artificial
  Synthetic oligonucleotide
acgtcaactgtggccgagtcgttggttggggtcggcggtacgtcctttgg

SEQ ID NO: 200351 - DNA, 50 bp, Artificial
  Synthetic oligonucleotide
tcgttagttttacttaccacccaacttataatctctccagtataaagatc

SEQ ID NO: 200352 - DNA, 50 bp, Artificial
  Synthetic oligonucleotide
cagcaccccgttaggctttggaaccaacgctgtcggcggtcacaacctgt

SEQ ID NO: 200353 - DNA, 50 bp, Artificial
  Synthetic oligonucleotide
cttcccggagcagatctgtcgcagtagtggcaatggggcccggtagttcg

SEQ ID NO: 200354 - DNA, 50 bp, Artificial
  Synthetic oligonucleotide
tagtccgagcgaaaaatgtgagagggaatggaatgactgtaaggcgcata

SEQ ID NO: 200355 - DNA, 50 bp, Artificial
  Synthetic oligonucleotide
cagcccattatgttcgttatcaattggggtcacatcgttagcaatactct

SEQ ID NO: 200356 - DNA, 50 bp, Artificial
  Synthetic oligonucleotide
cagccggcagcttgtcaccaggggccaactcacccacgataatttggcga

SEQ ID NO: 200357 - DNA, 50 bp, Artificial
  Synthetic oligonucleotide
tagtgatcactgaccagcgaccaaagtgccataaacccttatgcattagg

SEQ ID NO: 200358 - DNA, 50 bp, Artificial
  Synthetic oligonucleotide
agtattgggtgctaacacatagcccgtcttgggtttggctgccgtcgtgt

SEQ ID NO: 200359 - DNA, 58 bp, Artificial
  Synthetic oligonucleotide
tgaccggtaagaacgtattgccatcgctccagcctagggtcaagccacggtagccagt

SEQ ID NO: 200360 - DNA, 50 bp, Artificial
  Synthetic oligonucleotide
ccactgcgcggccgataattgttccacgctcgattgtgccaaacgtgcga

SEQ ID NO: 200361 - DNA, 50 bp, Artificial
  Synthetic oligonucleotide
ccccaggctgacacgcagtaacgcggcaacaatccacgccgcaatcagtg

SEQ ID NO: 200362 - DNA, 50 bp, Artificial
  Synthetic oligonucleotide
acgtcgcctgaatcgccgctaaaatccgttctgaggcccggccatcccca

SEQ ID NO: 200363 - DNA, 50 bp, Artificial
  Synthetic oligonucleotide
taccgataaggaccgcttcgataagcgagtgttagacaagtaccagcaag

SEQ ID NO: 200364 - DNA, 50 bp, Artificial
  Synthetic oligonucleotide
gaaataccagtttctgcacagatgatgtcaacgcaaccgatattttggat

SEQ ID NO: 200365 - DNA, 50 bp, Artificial
  Synthetic oligonucleotide
aacggttggcgcgagtttagtgagctggtgggggctatggtgggctaagc

SEQ ID NO: 200366 - DNA, 50 bp, Artificial
  Synthetic oligonucleotide
cccagaggatcctgaaggcccagtatactcgcccgatggcattcgcgggt

SEQ ID NO: 200367 - DNA, 50 bp, Artificial
  Synthetic oligonucleotide
cccagacctgattgggcacggctttaagattcccgcgttcgttgctggga

SEQ ID NO: 200368 - DNA, 50 bp, Artificial
  Synthetic oligonucleotide
tacgggcagacaccgtcgcatgtggtttcgccgcattagggccactcgcc

SEQ ID NO: 200369 - DNA, 50 bp, Artificial
  Synthetic oligonucleotide
tacggtgtgctatgacgtgcgattgcttggtgttaaacgtgtagaattag

SEQ ID NO: 200370 - DNA, 60 bp, Artificial
  Synthetic oligonucleotide
tgacccagagtcagacctatgcacagcgattgatcaacggtactaagaaccagttagacc

SEQ ID NO: 200371 - DNA, 50 bp, Artificial
  Synthetic oligonucleotide
aacgtcgcgacccccgtactggcgggctttaagtttgcttggccgcagtt

SEQ ID NO: 200372 - DNA, 50 bp, Artificial
  Synthetic oligonucleotide
cccaccgattggcgccacgtcctactcgtacaagacccgttactcgcgcg

SEQ ID NO: 200373 - DNA, 50 bp, Artificial
  Synthetic oligonucleotide
gaaacccttctaacaagctggccgcttcacaaccgttaattgcgccccac

SEQ ID NO: 200374 - DNA, 50 bp, Artificial
  Synthetic oligonucleotide
agtaatcggccatccccgcctcagtgacgacctgccaggtagtgccatcg

SEQ ID NO: 200375 - DNA, 50 bp, Artificial
  Synthetic oligonucleotide
aacgtggcttgggcatcaagggcgtccagtccccgtcgatcaacacgagt

SEQ ID NO: 200376 - DNA, 50 bp, Artificial
  Synthetic oligonucleotide
gatccttaacagaataaatagccactgggacgtctaaagttctggtgtaa

SEQ ID NO: 200377 - DNA, 50 bp, Artificial
  Synthetic oligonucleotide
aacgttcgaccatccagaaacggctggcaacgcggctaacggtcggcacc

SEQ ID NO: 200378 - DNA, 50 bp, Artificial
  Synthetic oligonucleotide
tactagcggcgcctttacgggaccggtttgggatcgtggcccggatggat

SEQ ID NO: 200379 - DNA, 50 bp, Artificial
  Synthetic oligonucleotide
gcaggcacgactgccaccgtgacaccgtttttgccccacgtcacgtgata

SEQ ID NO: 200380 - DNA, 50 bp, Artificial
  Synthetic oligonucleotide
tactgttctcacagtatgagtaagcaaagttggagtttgaccttgactgt

SEQ ID NO: 200381 - DNA, 60 bp, Artificial
  Synthetic oligonucleotide
tgaagtggaattatcaacggaagctgatttgctgagaaatagaattattgattaataaaa

SEQ ID NO: 200382 - DNA, 50 bp, Artificial
  Synthetic oligonucleotide
tcttaggcggcgtcaacacgtccattctcgccagctgcttctcccgtgac

SEQ ID NO: 200383 - DNA, 50 bp, Artificial
  Synthetic oligonucleotide
acgggggtggaagtgcccttacccgatcacgcgtaccgctatacggggac

SEQ ID NO: 200384 - DNA, 50 bp, Artificial
  Synthetic oligonucleotide
tcaagctcaagcaaaggggagcgtcagggggccacaacggccttaagtcg

SEQ ID NO: 200385 - DNA, 50 bp, Artificial
  Synthetic oligonucleotide
agtgagcgatggcattcaacgggggcacatggcactacagcgcaaatcgc

SEQ ID NO: 200386 - DNA, 50 bp, Artificial
  Synthetic oligonucleotide
ccaaaaatcacgacgaagccgacttgcccccacgccacccaggttagctg

SEQ ID NO: 200387 - DNA, 50 bp, Artificial
  Synthetic oligonucleotide
tcaatgtgccgcaatcggccggattctacgcacgagcctcgggatttgcg

SEQ ID NO: 200388 - DNA, 50 bp, Artificial
  Synthetic oligonucleotide
tccggaagaaaagattcggacgattgctacgcaggtatatggcgctaagg

SEQ ID NO: 200389 - DNA, 50 bp, Artificial
  Synthetic oligonucleotide
catgtacgcggttcacgagtactttgtctatagcgacgatatctattact

SEQ ID NO: 200390 - DNA, 50 bp, Artificial
  Synthetic oligonucleotide
aagcgggagtgctcggccccaactaatccgagtaatgagtcggtggcgta

SEQ ID NO: 200391 - DNA, 50 bp, Artificial
  Synthetic oligonucleotide
gattcgacggcatcaaagaccctcgggggatggtcggcgttcgtctggaa

SEQ ID NO: 200392 - DNA, 60 bp, Artificial
  Synthetic oligonucleotide
cttttgctgagatcatggcggttgaaggtattggcttatcgcaactacccgatagtcaag

SEQ ID NO: 200393 - DNA, 55 bp, Artificial
  Synthetic oligonucleotide
tgaactgggagctagccattaactttaatacggattactagctaaatctaaaagg

SEQ ID NO: 200394 - DNA, 50 bp, Artificial
  Synthetic oligonucleotide
agtcgcactgtccaaccctgattggggcggtgtgatcaagggcctagtcc

SEQ ID NO: 200395 - DNA, 50 bp, Artificial
  Synthetic oligonucleotide
tcagagagcagaagaggacgctcagaaggctaaagctgatctagataaag

SEQ ID NO: 200396 - DNA, 50 bp, Artificial
  Synthetic oligonucleotide
catcgtgcagcctttagcggccgtaccccatcagaccggcgaaattggga

SEQ ID NO: 200397 - DNA, 50 bp, Artificial
  Synthetic oligonucleotide
tcccttgctaaaccatctggagagctgggtacgatacgccctagtcgagt

SEQ ID NO: 200398 - DNA, 50 bp, Artificial
  Synthetic oligonucleotide
aagccgcgtaagacgcaataagactggccggcgatgcatgattcgaaacg

SEQ ID NO: 200399 - DNA, 50 bp, Artificial
  Synthetic oligonucleotide
tccccgtttgcgaaaattcccccggcctcgcgtgcgatagatctcgccgt

SEQ ID NO: 200400 - DNA, 50 bp, Artificial
  Synthetic oligonucleotide
tcattcgactaagcatgacaagtgctcgttcaatgagttcatggctcggc

SEQ ID NO: 200401 - DNA, 50 bp, Artificial
  Synthetic oligonucleotide
tccccatgggcagtctcctttgcggcagcacggatggacgttccagcaat

SEQ ID NO: 200402 - DNA, 50 bp, Artificial
  Synthetic oligonucleotide
tccaaatcgatttcggaaaggagcatctagtaacccagcacgagtcgtgg

SEQ ID NO: 200403 - DNA, 50 bp, Artificial
  Synthetic oligonucleotide
acggtcccgatgccggtattaaagctccccctcttgaccaccgatccgct

SEQ ID NO: 200404 - DNA, 55 bp, Artificial
  Synthetic oligonucleotide
tgaacgttgaagcggttcggacgaataaatctaagggaaagtcctctttgctcgc

SEQ ID NO: 200405 - DNA, 50 bp, Artificial
  Synthetic oligonucleotide
agtcttagcgaccgattcataggttctgcgtcccatcgctgataaaagta

SEQ ID NO: 200406 - DNA, 50 bp, Artificial
  Synthetic oligonucleotide
gcacgattactgccgccaagcgccacaacttgcgtatgacgtgcccgatt

SEQ ID NO: 200407 - DNA, 50 bp, Artificial
  Synthetic oligonucleotide
acgggcagctgctctagtggccgcagataagggattgcctgatgtggcga

SEQ ID NO: 200408 - DNA, 50 bp, Artificial
  Synthetic oligonucleotide
gaaaacggcatttagacgtcactatttttcaacgaggttcagaaatactt

SEQ ID NO: 200409 - DNA, 50 bp, Artificial
  Synthetic oligonucleotide
agtgcccccaaccgatcgtcaagggacccaacgcccttctgccaatcccg

SEQ ID NO: 200410 - DNA, 50 bp, Artificial
  Synthetic oligonucleotide
tatcaactaaatcctgctttgctcgtgtgcagattttgcgacttttgccc

SEQ ID NO: 200411 - DNA, 50 bp, Artificial
  Synthetic oligonucleotide
agtccgggaaccgctaacgatggcaagacggtgacttacaagcagccggc

SEQ ID NO: 200412 - DNA, 50 bp, Artificial
  Synthetic oligonucleotide
aacttcgctcctcctcacgacttgcccttagaagcaagcattttactcgc

SEQ ID NO: 200413 - DNA, 50 bp, Artificial
  Synthetic oligonucleotide
ccaagtcgtcgtccagagtttggatgccggcagtgtggcccattccacca

SEQ ID NO: 200414 - DNA, 50 bp, Artificial
  Synthetic oligonucleotide
ccaagtattaagccgactgatgtacaagcaatcctaggacatgaaactgt

SEQ ID NO: 200415 - DNA, 53 bp, Artificial
  Synthetic oligonucleotide
tgaacgaggtagtacgtacgtgagtgtttggttaagacggcaccctaacgagt

SEQ ID NO: 200416 - DNA, 50 bp, Artificial
  Synthetic oligonucleotide
tcgcactacccatacttttggggctatgcggaactccgagaagccgcggc

SEQ ID NO: 200417 - DNA, 50 bp, Artificial
  Synthetic oligonucleotide
aagaaactaccccgggcgttagcgtcccagatcggtgctcgttcgccacc

SEQ ID NO: 200418 - DNA, 50 bp, Artificial
  Synthetic oligonucleotide
aaggggagcgtcagggggccacaacggccttaagtcgttaatcgaccacc

SEQ ID NO: 200419 - DNA, 50 bp, Artificial
  Synthetic oligonucleotide
ccaagcggacattgcagaattatgctactaattttgccaagagtaccgga

SEQ ID NO: 200420 - DNA, 50 bp, Artificial
  Synthetic oligonucleotide
acgtaagcgagcggtgcccaccaccgtaaaccggctaagcgaaagggacg

SEQ ID NO: 200421 - DNA, 50 bp, Artificial
  Synthetic oligonucleotide
ccaagccattcgtggcggggcaacaacgccacaaagcgtcaatgagacca

SEQ ID NO: 200422 - DNA, 50 bp, Artificial
  Synthetic oligonucleotide
tattaatccaatactgcagttcggtttgatcacttacagtgagttcttca

SEQ ID NO: 200423 - DNA, 50 bp, Artificial
  Synthetic oligonucleotide
acggggagcaccacggaaaactacgtccatcaagtgcgggtggacgcgca

SEQ ID NO: 200424 - DNA, 50 bp, Artificial
  Synthetic oligonucleotide
aagggaacggaccacgtgttggctttggctagttgttgcgcatgggggag

SEQ ID NO: 200425 - DNA, 50 bp, Artificial
  Synthetic oligonucleotide
aagacggttgacgagcccaatcccttggccgaagctgagactgaacccga

SEQ ID NO: 200426 - DNA, 60 bp, Artificial
  Synthetic oligonucleotide
tgaaaagctttgcacaccattatagtagcgacatctctcgtgaacaatttgaactaatcc

SEQ ID NO: 200427 - DNA, 50 bp, Artificial
  Synthetic oligonucleotide
ccaaccgattcgattaaggggccagtgaccccgttggctttaccggccgc

SEQ ID NO: 200428 - DNA, 50 bp, Artificial
  Synthetic oligonucleotide
aagctgatcgctcagctccgcgaacaacagcggccacgtctcctcttcat

SEQ ID NO: 200429 - DNA, 50 bp, Artificial
  Synthetic oligonucleotide
ccggcggttggaatcatggctgattcagcggcaatcgtgggcgttaacga

SEQ ID NO: 200430 - DNA, 50 bp, Artificial
  Synthetic oligonucleotide
ccggatgcttcagcgcaacttactgtatacggccgtgacccgagccagcg

SEQ ID NO: 200431 - DNA, 50 bp, Artificial
  Synthetic oligonucleotide
acgtttggacaatgctcccgggcagttccattcgtgcgggttgccgccga

SEQ ID NO: 200432 - DNA, 50 bp, Artificial
  Synthetic oligonucleotide
ccggacaatggctacagccagctaccgcgcaagtgatgcgtacattgccc

SEQ ID NO: 200433 - DNA, 50 bp, Artificial
  Synthetic oligonucleotide
gagttgaagcgaggaacggttttgaggtactgtgaacgatctgtgaggcc

SEQ ID NO: 200434 - DNA, 50 bp, Artificial
  Synthetic oligonucleotide
aatttgcacgggcgggccaaatcacggctacgcggcttcaaattgtgccc

SEQ ID NO: 200435 - DNA, 50 bp, Artificial
  Synthetic oligonucleotide
caatctccgccaaccgcgcaaaatcagtctgatagtcgcctgcggccgtc

SEQ ID NO: 200436 - DNA, 50 bp, Artificial
  Synthetic oligonucleotide
gccgaggctggaatccaaggaatccgcggtgcaaatcgatcgccatcctt

SEQ ID NO: 200437 - DNA, 55 bp, Artificial
  Synthetic oligonucleotide
tctttggtgatttaccctcaatcgtcttagcagaaagaaataagtttaggagttg

SEQ ID NO: 200438 - DNA, 50 bp, Artificial
  Synthetic oligonucleotide
gcccttttacgggcgagattagtatgcgcgggctcagtcaagcgggcgtt

SEQ ID NO: 200439 - DNA, 50 bp, Artificial
  Synthetic oligonucleotide
tggccagcaaggggtcttgttaaacaagcgcggcgcccataagtgggagg

SEQ ID NO: 200440 - DNA, 50 bp, Artificial
  Synthetic oligonucleotide
aaccggctcacattaaactccattcgctacgctctttgcgcctcacttcg

SEQ ID NO: 200441 - DNA, 50 bp, Artificial
  Synthetic oligonucleotide
gttattgtataagtccataattggctcgagataaactttttcttgcgtcg

SEQ ID NO: 200442 - DNA, 50 bp, Artificial
  Synthetic oligonucleotide
aatttcgcggcaacaattacaagatctagtcctagggttacacgcccgct

SEQ ID NO: 200443 - DNA, 50 bp, Artificial
  Synthetic oligonucleotide
aaccgttgggtctttgcccgtccgttggcaattagcgacgtaccgcatga

SEQ ID NO: 200444 - DNA, 50 bp, Artificial
  Synthetic oligonucleotide
agagccgtccccagtcagctacccggcaaaaagtccccacagttggcatc

SEQ ID NO: 200445 - DNA, 50 bp, Artificial
  Synthetic oligonucleotide
aacctcacagacgttagtccgaaccgcccacgccttacctgcggtcggaa

SEQ ID NO: 200446 - DNA, 50 bp, Artificial
  Synthetic oligonucleotide
tggactgatcgggcctacatgtcgccgacggtgtttaaacggtttctagc

SEQ ID NO: 200447 - DNA, 50 bp, Artificial
  Synthetic oligonucleotide
gcccgaacttcagcggggtagaggcgactaacaatcgctccgtagccggc

SEQ ID NO: 200448 - DNA, 56 bp, Artificial
  Synthetic oligonucleotide
tctttgaattgctactagtgtatccctaaagctaacttagcgtatcgacttaaacg

SEQ ID NO: 200449 - DNA, 49 bp, Artificial
  Synthetic oligonucleotide
caccaaaaggggagatttattaaacaccaaaaggggaggtttataacac

SEQ ID NO: 200450 - DNA, 50 bp, Artificial
  Synthetic oligonucleotide
gtcatgtcaccatagtagcctaaataaggtactgacagagacaacttatc

SEQ ID NO: 200451 - DNA, 50 bp, Artificial
  Synthetic oligonucleotide
tgttgttcataatgccctagataacactagccaaaagtatttctctgata

SEQ ID NO: 200452 - DNA, 50 bp, Artificial
  Synthetic oligonucleotide
ctctcgatccatcacgggttatgcaccatggcggagagagttacattttt

SEQ ID NO: 200453 - DNA, 50 bp, Artificial
  Synthetic oligonucleotide
caactttaccagattcgggggcggatcggtcgcagcaaccgagtggctta

SEQ ID NO: 200454 - DNA, 50 bp, Artificial
  Synthetic oligonucleotide
acggacgcaacggccacggactatttgacctacacgacggcagccaaacc

SEQ ID NO: 200455 - DNA, 50 bp, Artificial
  Synthetic oligonucleotide
tgtgcgaacagatcatgagcgaggaattaaacaagactaccactgaggac

SEQ ID NO: 200456 - DNA, 50 bp, Artificial
  Synthetic oligonucleotide
acacacccaaacatggctgctagctgggccaaacgactcccgggccgcac

SEQ ID NO: 200457 - DNA, 50 bp, Artificial
  Synthetic oligonucleotide
acttacaatcatttgatggacttgcgtttcggtagccaaagtaaaagcgg

SEQ ID NO: 200458 - DNA, 50 bp, Artificial
  Synthetic oligonucleotide
gccttgcgtcacaacctggcgaatcgcacttgcacttgcatatggcgccg

SEQ ID NO: 200459 - DNA, 55 bp, Artificial
  Synthetic oligonucleotide
tctttaggagagaaatatttgatacgaagactagaaagtaagtagtaattaactg

SEQ ID NO: 200460 - DNA, 50 bp, Artificial
  Synthetic oligonucleotide
aggggatcgtggcggcctcattgggtcggctgttaaagaaccgtggctta

SEQ ID NO: 200461 - DNA, 50 bp, Artificial
  Synthetic oligonucleotide
caagcattgcggaacgttcttggtggtcatactcaacaagccggatcatt

SEQ ID NO: 200462 - DNA, 50 bp, Artificial
  Synthetic oligonucleotide
ctcttttaggtgactgaatgggtgaattgatgcttgaattgtatttgggt

SEQ ID NO: 200463 - DNA, 50 bp, Artificial
  Synthetic oligonucleotide
agaggcgaccgcgacccctctcgtgactaatcagggccgcacactagcgg

SEQ ID NO: 200464 - DNA, 50 bp, Artificial
  Synthetic oligonucleotide
ccgtacgcagtaaggttggcctagcgatgggccggcaaagaccagggtgg

SEQ ID NO: 200465 - DNA, 50 bp, Artificial
  Synthetic oligonucleotide
gcctcgggggaccaaggcatcacgttgcggcaaatgtcccagcggaccgc

SEQ ID NO: 200466 - DNA, 50 bp, Artificial
  Synthetic oligonucleotide
gtgcccggttcgtgataaaggggttcactaaacggcgtgcgtcgcccgtt

SEQ ID NO: 200467 - DNA, 50 bp, Artificial
  Synthetic oligonucleotide
gtgcgattataacggtgttattcctagatcggctaaacaagctgttcggt

SEQ ID NO: 200468 - DNA, 50 bp, Artificial
  Synthetic oligonucleotide
acaagtgatatggtttatcgtgccggtgggaccgtaacacagttagccta

SEQ ID NO: 200469 - DNA, 50 bp, Artificial
  Synthetic oligonucleotide
ccggctgtcggcgccattatgaacgcgatttcgacgccttccaaccgctg

SEQ ID NO: 200470 - DNA, 52 bp, Artificial
  Synthetic oligonucleotide
tctttaacgaaaacggaaccgtgcgttagaatacgtttatccacaccctatc

SEQ ID NO: 200471 - DNA, 50 bp, Artificial
  Synthetic oligonucleotide
ccggcgttcaggcaacgtccgcgcttaatgcggcgggatattactttgct

SEQ ID NO: 200472 - DNA, 50 bp, Artificial
  Synthetic oligonucleotide
tgcccgccaacggtttgcgttagtagttcgggattgagccgtgtcccgtg

SEQ ID NO: 200473 - DNA, 50 bp, Artificial
  Synthetic oligonucleotide
gcattggggcactcggccgaaccggacactcgggtaccactggttggcgg

SEQ ID NO: 200474 - DNA, 50 bp, Artificial
  Synthetic oligonucleotide
tgccagcggaatacccataacttaattacgtggatacaaacaccactcag

SEQ ID NO: 200475 - DNA, 50 bp, Artificial
  Synthetic oligonucleotide
taaagcggtgccttgcgtcacaacctggcgaatcgcacttgcacttgcat

SEQ ID NO: 200476 - DNA, 50 bp, Artificial
  Synthetic oligonucleotide
aacgcccccgcgttgaacatggccaattaccgtagcacgagcgtcgaagt

SEQ ID NO: 200477 - DNA, 50 bp, Artificial
  Synthetic oligonucleotide
aggtccaccagtcgcatgacctgcaaaggcgttaggcatcttaggcgcgg

SEQ ID NO: 200478 - DNA, 50 bp, Artificial
  Synthetic oligonucleotide
gaacgcaaccaagggtaatgtgaataccgccaccacaatttgaaccgaac

SEQ ID NO: 200479 - DNA, 50 bp, Artificial
  Synthetic oligonucleotide
taacatttttaagcttgatggcttagacatgccatctgaaacattgcgaa

SEQ ID NO: 200480 - DNA, 50 bp, Artificial
  Synthetic oligonucleotide
aggtgcttagtccccggtactgcccatcacgagctgcaaatgcgtgggca

SEQ ID NO: 200481 - DNA, 60 bp, Artificial
  Synthetic oligonucleotide
tgtaatgggactaagcaggtaattactgatagcaatagcgtttttagtgatggtgctaaa

SEQ ID NO: 200482 - DNA, 50 bp, Artificial
  Synthetic oligonucleotide
aggtggatcattggtggctgcgttagtcgtagccctagccggcacttggg

SEQ ID NO: 200483 - DNA, 50 bp, Artificial
  Synthetic oligonucleotide
cacggggacccggcgacacatcacgactgatttagcaacactggtggcga

SEQ ID NO: 200484 - DNA, 50 bp, Artificial
  Synthetic oligonucleotide
tgattcagatcccctaactgcgctttatacgccgccacttcttgctcagt

SEQ ID NO: 200485 - DNA, 50 bp, Artificial
  Synthetic oligonucleotide
aatcgttggagaactggaactagtgcggccgccccaaattgaccgccgcg

SEQ ID NO: 200486 - DNA, 50 bp, Artificial
  Synthetic oligonucleotide
agttcggccgcccatggtgctaaccgtcctggcgtcaaggtgccgcagtc

SEQ ID NO: 200487 - DNA, 50 bp, Artificial
  Synthetic oligonucleotide
aggttggcctagcgatgggccggcaaagaccagggtggtaccacgcaaag

SEQ ID NO: 200488 - DNA, 50 bp, Artificial
  Synthetic oligonucleotide
aatcgaagaggctcataaacatcactagaccgtgtagtccgcaagctaca

SEQ ID NO: 200489 - DNA, 50 bp, Artificial
  Synthetic oligonucleotide
taagtaggcatcagctcggtccgggtcatagattaccggttcaaaagtcc

SEQ ID NO: 200490 - DNA, 50 bp, Artificial
  Synthetic oligonucleotide
ctgttcacgttaccccagctaagccagcggccaagaccgtgggccaaact

SEQ ID NO: 200491 - DNA, 50 bp, Artificial
  Synthetic oligonucleotide
tacatcttaggctttcccagcttgttgggatgcatcctctcccctgtggc

SEQ ID NO: 200492 - DNA, 56 bp, Artificial
  Synthetic oligonucleotide
tggtgttgtgtcgtgtactttttggtgttgtgtcgtgtactttttggtgttgtgtc

SEQ ID NO: 200493 - DNA, 50 bp, Artificial
  Synthetic oligonucleotide
acgggaccggcgacagtttgtccgcatgtatcgctgccgaattagcccgt

SEQ ID NO: 200494 - DNA, 50 bp, Artificial
  Synthetic oligonucleotide
tgaccaccaacggcccttattccttctcgtcggcagtcgcggcttacgcc

SEQ ID NO: 200495 - DNA, 50 bp, Artificial
  Synthetic oligonucleotide
gcccaggctaacgtggcggtcctgtccttttcgcgcttggggtggttttt

SEQ ID NO: 200496 - DNA, 50 bp, Artificial
  Synthetic oligonucleotide
acggcgcaacctcattgacggcccaaggcgtggtcccagccggtctaagt

SEQ ID NO: 200497 - DNA, 50 bp, Artificial
  Synthetic oligonucleotide
ctgcttgggctttggtgcaattctccaaaacagatgcatcggatcctggg

SEQ ID NO: 200498 - DNA, 50 bp, Artificial
  Synthetic oligonucleotide
aattatgacgaacactttcttaaacgtagaacaaaaatttcgtgccatag

SEQ ID NO: 200499 - DNA, 50 bp, Artificial
  Synthetic oligonucleotide
aacgaaattggctgtttacttaattccgtttgattaatgcttgcttggct

SEQ ID NO: 200500 - DNA, 50 bp, Artificial
  Synthetic oligonucleotide
gccacgggcctgtcggccaaaataattcgtcgctgaggcattcccccagt

SEQ ID NO: 200501 - DNA, 50 bp, Artificial
  Synthetic oligonucleotide
acggcggccattaaacacttttggcggcaagcgggggtacccacaacggg

SEQ ID NO: 200502 - DNA, 50 bp, Artificial
  Synthetic oligonucleotide
ccgagcggtcgatgcgacgtcacagcgaagtttcgaatgggagcgccctt

SEQ ID NO: 200503 - DNA, 52 bp, Artificial
  Synthetic oligonucleotide
cttttgattagtgatcaactctaaccgttccgtttttcgcactaaaaaagtg

SEQ ID NO: 200504 - DNA, 60 bp, Artificial
  Synthetic oligonucleotide
tggtggcttcgtagatgccctttaggttctgagtgacggttgctacttgtgactggacat

SEQ ID NO: 200505 - DNA, 50 bp, Artificial
  Synthetic oligonucleotide
gccaagggtcacgtcttagaaaaggtcagcctagagctgccgagccgcgc

SEQ ID NO: 200506 - DNA, 50 bp, Artificial
  Synthetic oligonucleotide
gccaagcgccacaacttgcgtatgacgtgcccgatttaaccaccgctggg

SEQ ID NO: 200507 - DNA, 50 bp, Artificial
  Synthetic oligonucleotide
aatgtaacgtaaggccagtggcgctaacggggttgccaagcccaaccgct

SEQ ID NO: 200508 - DNA, 50 bp, Artificial
  Synthetic oligonucleotide
agttggggttcaagacttgggggtcgccggtgggattaacgccttagcgc

SEQ ID NO: 200509 - DNA, 50 bp, Artificial
  Synthetic oligonucleotide
gcattttgtttgacgaaaaatatctagtatggtcatctataaggtcagtt

SEQ ID NO: 200510 - DNA, 50 bp, Artificial
  Synthetic oligonucleotide
tgcgctacacggaacaccaggcggggcaagccaccccggtgcaatttcgt

SEQ ID NO: 200511 - DNA, 50 bp, Artificial
  Synthetic oligonucleotide
ccctttattactactcacattatactaatctttgagtaccatctcaatta

SEQ ID NO: 200512 - DNA, 50 bp, Artificial
  Synthetic oligonucleotide
taaacgttcacgacgggccttggcagacggaccagcaatcaagccggcca

SEQ ID NO: 200513 - DNA, 50 bp, Artificial
  Synthetic oligonucleotide
aggtaacttgaggccacccacgtcacttgggcagtcggcaccgccattgc

SEQ ID NO: 200514 - DNA, 50 bp, Artificial
  Synthetic oligonucleotide
aggtcacgcgctacttgagctgactcagaaacactgggcgcacctggcaa

SEQ ID NO: 200515 - DNA, 60 bp, Artificial
  Synthetic oligonucleotide
tggtccaagtctttgaatttgtcctatggctttaaattacccgctgatgagcattgaagc

SEQ ID NO: 200516 - DNA, 46 bp, Artificial
  Synthetic oligonucleotide
tcggagtgtaagtggcctcaggcgtgatggggcccggtcttggcca

SEQ ID NO: 200517 - DNA, 44 bp, Artificial
  Synthetic oligonucleotide
acgctgagagtagttgggggatcgccccctgcgagggtaagacg

SEQ ID NO: 200518 - DNA, 42 bp, Artificial
  Synthetic oligonucleotide
gttcagagaactagcggttaggtgtgagctaggcaggtcgat

SEQ ID NO: 200519 - DNA, 58 bp, Artificial
  Synthetic oligonucleotide
tggtactcgccaaattggctatggcggcttactgaagcgaattaaacggcaattgaaa

SEQ ID NO: 200520 - DNA, 60 bp, Artificial
  Synthetic oligonucleotide
tgggcaaaagcattaagatggcttttagatcaattacaagataagcgatttagtcgatta

SEQ ID NO: 200521 - DNA, 60 bp, Artificial
  Synthetic oligonucleotide
tggctttggaaggcattctcgcttggttaatgttgagaaggtgcaagataatggataggc

SEQ ID NO: 200522 - DNA, 60 bp, Artificial
  Synthetic oligonucleotide
tggctatagtttcgacctatatggtgcttctggaatggttgccctgtctggagctagtgg

SEQ ID NO: 200523 - DNA, 60 bp, Artificial
  Synthetic oligonucleotide
tggcgttgcagaacacacaactatatagtgacttgattgcaacgaggggtacgtatagcg

SEQ ID NO: 200524 - DNA, 58 bp, Artificial
  Synthetic oligonucleotide
tggccaactgctaggctattggagaattttccgaacgtatgccccacgcacggagcgg

SEQ ID NO: 200525 - DNA, 59 bp, Artificial
  Synthetic oligonucleotide
tggataaatcttatacgtgtctaaaagctaataagaatatgtagatgacccactacaaa

SEQ ID NO: 200526 - DNA, 58 bp, Artificial
  Synthetic oligonucleotide
tggagtttggtgttacaaggcaagctatcatgcgaaaaatggacgataaatttagaag

SEQ ID NO: 200527 - DNA, 59 bp, Artificial
  Synthetic oligonucleotide
ctttaacaagcatgcgagaattcttaactagcaatgaatggttagggaacgccaccata

SEQ ID NO: 200528 - DNA, 59 bp, Artificial
  Synthetic oligonucleotide
tggacttagacacttgtaatctgccttgacacaaaacctgtcgtcctttgtcgcaatgt

SEQ ID NO: 200529 - DNA, 57 bp, Artificial
  Synthetic oligonucleotide
tgctttcaagtgggttagtgaagtaggttaacaaggcattgtacgtgagaagttgcc

SEQ ID NO: 200530 - DNA, 56 bp, Artificial
  Synthetic oligonucleotide
tgctcgccccacctggttcacaacctaccactttgtgaatattgaacgagttaccc

SEQ ID NO: 200531 - DNA, 58 bp, Artificial
  Synthetic oligonucleotide
tgctccaatcagtacccttttcgacacgcttattggaatatttgaatggattagttaa

SEQ ID NO: 200532 - DNA, 60 bp, Artificial
  Synthetic oligonucleotide
tgctatctgttatcggttcacacacatcccctaacttacgttgctcccaaggatcagcga

SEQ ID NO: 200533 - DNA, 59 bp, Artificial
  Synthetic oligonucleotide
tgctatcaacaaggaagacgttattaagaaccgggcttacaagtacgctgaagtgctga

SEQ ID NO: 200534 - DNA, 60 bp, Artificial
  Synthetic oligonucleotide
tgctaagatcgcaaagaagaagggcgattgagcatgttcggaagtaatgaaaataagcag

SEQ ID NO: 200535 - DNA, 59 bp, Artificial
  Synthetic oligonucleotide
tgccgctttgaagccaacaccgaaaagccagaaggctgtcacagaaaggcccatcggga

SEQ ID NO: 200536 - DNA, 60 bp, Artificial
  Synthetic oligonucleotide
tcgagtaactcgctatacgtacccctcgttgcaatcaagtcactatatagttgtgtgttc

SEQ ID NO: 200537 - DNA, 59 bp, Artificial
  Synthetic oligonucleotide
tcgagggtctgacaagcgtttgtcgctgttatcccagtgcgccgagtagggcgggttca

SEQ ID NO: 200538 - DNA, 57 bp, Artificial
  Synthetic oligonucleotide
cttggtagacacttcgaggtaaaagttgtcattgcaccgcgtaaattaagctctgaa

SEQ ID NO: 200539 - DNA, 59 bp, Artificial
  Synthetic oligonucleotide
tcgagccaatcattgcgaccgtcggccaaacttccgctcaggaatctgttttccgtcga

SEQ ID NO: 200540 - DNA, 59 bp, Artificial
  Synthetic oligonucleotide
tcgacttgttcaaagggcggacgatacatcggagcttagttgtctctccggccatggaa

SEQ ID NO: 200541 - DNA, 60 bp, Artificial
  Synthetic oligonucleotide
tccttttccatgctcgcaggttcagtcatggggaccaccccaactgctgcctacgttgaa

SEQ ID NO: 200542 - DNA, 58 bp, Artificial
  Synthetic oligonucleotide
tccttgccatgataactactaccgccaactagttccctgcgtctaagtccaaaggctc

SEQ ID NO: 200543 - DNA, 48 bp, Artificial
  Synthetic oligonucleotide
tccttcgaacttttttatttttgaacgttaattttaaaggctcttatt

SEQ ID NO: 200544 - DNA, 60 bp, Artificial
  Synthetic oligonucleotide
tcctgggcctaataccacagcatccgcctgcataattgccgccaaaacaggtaataccgc

SEQ ID NO: 200545 - DNA, 60 bp, Artificial
  Synthetic oligonucleotide
tcctattcatgttctagcatagtcgtctttgtgactggatcaattcgagttgacacgcat

SEQ ID NO: 200546 - DNA, 56 bp, Artificial
  Synthetic oligonucleotide
tccgacaacgtatcgccaggggacccagtaatcgccatcggttctccattgggtag

SEQ ID NO: 200547 - DNA, 59 bp, Artificial
  Synthetic oligonucleotide
tccgaatcgccgactgggcatcggctactgaaatcggcaattgggaggttcgaatctgt

SEQ ID NO: 200548 - DNA, 60 bp, Artificial
  Synthetic oligonucleotide
tccctatcagtcgggactcatgatatttcgttttgaagtgacaacttcttagtgagcact

SEQ ID NO: 200549 - DNA, 52 bp, Artificial
  Synthetic oligonucleotide
cttgattttacgttttggaaaagtgaaaccctcggtagagtcctcgaagagc

SEQ ID NO: 200550 - DNA, 54 bp, Artificial
  Synthetic oligonucleotide
tcccggcggaaagcctatggtaaagattggaagagataaatgggaattccaagg

SEQ ID NO: 200551 - DNA, 60 bp, Artificial
  Synthetic oligonucleotide
tcatgtagtgcgcattatcatgtagtgcgcattatcatgtagtgcgcattatcatgtagt

SEQ ID NO: 200552 - DNA, 58 bp, Artificial
  Synthetic oligonucleotide
tcatgtagctaaaaaagagcatagttccccctggagactgctaagcgtatttttaagc

SEQ ID NO: 200553 - DNA, 60 bp, Artificial
  Synthetic oligonucleotide
tcagaacagccagttacagctagaccacgcaaagactcagctccttattggccaggttga

SEQ ID NO: 200554 - DNA, 55 bp, Artificial
  Synthetic oligonucleotide
tcacggtaacaccaaccgatccgaagacaccaagcgataagcttccggacaaccc

SEQ ID NO: 200555 - DNA, 56 bp, Artificial
  Synthetic oligonucleotide
tcacggaaccaactaaggttaaagaagctagcctgggtaattcgcaagtcctgcca

SEQ ID NO: 200556 - DNA, 58 bp, Artificial
  Synthetic oligonucleotide
tcaccgttttattaagcggcaacaagttcgttccgcaagttatcagagcactcggaca

SEQ ID NO: 200557 - DNA, 59 bp, Artificial
  Synthetic oligonucleotide
tcttgtacgggcttttcatccttagatggctcattattcgcttcagtggtttcgccgtc

SEQ ID NO: 200558 - DNA, 60 bp, Artificial
  Synthetic oligonucleotide
tcttggttatgtgcgatctacagaaataacggtcaatcgagatagtctaactttccatca

SEQ ID NO: 200559 - DNA, 58 bp, Artificial
  Synthetic oligonucleotide
tcttcaggcccgaaggactgaatgacacgaaaggcttgcgttttcccacgattgccga

SEQ ID NO: 200560 - DNA, 60 bp, Artificial
  Synthetic oligonucleotide
cttgattgctaaatggtttagaacacctgagggagcttcagaatgcatcagtacaatcct

SEQ ID NO: 200561 - DNA, 57 bp, Artificial
  Synthetic oligonucleotide
tctgtagtcacattagagttggtatcaacgtgttttttgctccaatcagtacccttt

SEQ ID NO: 200562 - DNA, 60 bp, Artificial
  Synthetic oligonucleotide
tctgctatctgtttcgctgacttgctcatgattgcctccttcgttctaatgccgattata

SEQ ID NO: 200563 - DNA, 60 bp, Artificial
  Synthetic oligonucleotide
tctcgtgttgcagataagccactatagagttgtgtacgctgcaacgccaaaaatcgttcg

SEQ ID NO: 200564 - DNA, 60 bp, Artificial
  Synthetic oligonucleotide
tctaattcatttttcatcgaacattgacatttataattgtgtgtgctatccctaactacc

SEQ ID NO: 200565 - DNA, 55 bp, Artificial
  Synthetic oligonucleotide
tctaaggaaaaaggtttaagtaaatctgctcttataacagtggcgttagatgagt

SEQ ID NO: 200566 - DNA, 60 bp, Artificial
  Synthetic oligonucleotide
tctaaacggtcatcgaagcaacgagaacgtgctcaatcgtgatctagtagcgattgactt

SEQ ID NO: 200567 - DNA, 53 bp, Artificial
  Synthetic oligonucleotide
tcgtgtctcgtatgagaaacaaaggtgcccaaacggttcggtttacgttcgac

SEQ ID NO: 200568 - DNA, 60 bp, Artificial
  Synthetic oligonucleotide
tcgtgcatctcaagttgcatgtttcgcccagtgcagcgcgggttactcgttcactaaacg

SEQ ID NO: 200569 - DNA, 60 bp, Artificial
  Synthetic oligonucleotide
tcgtcagcttcatccagttcatctagtaacttatgcatcagaacattaatatccttattg

SEQ ID NO: 200570 - DNA, 60 bp, Artificial
  Synthetic oligonucleotide
tcgggctaatgtcacatcactaccacttagtaagctataaaaagcggtgccaaatgtgct

SEQ ID NO: 200571 - DNA, 60 bp, Artificial
  Synthetic oligonucleotide
cttctgttgacgccagattgcttcggaatcagcctcatgtaccgaagtggttgcataata

SEQ ID NO: 200572 - DNA, 59 bp, Artificial
  Synthetic oligonucleotide
tcgcctgcggttaacttcttgccggttgggacattcacactccatttgccattggctac

SEQ ID NO: 200573 - DNA, 60 bp, Artificial
  Synthetic oligonucleotide
tcgcctgcgacgcttgtgtctggcgtcttcttccaagtatatgtcgtcttagtgcctggg

SEQ ID NO: 200574 - DNA, 57 bp, Artificial
  Synthetic oligonucleotide
tcgcattttggtcataaacgagcacgttttggcgttacatcgtccgcacctagacgg

SEQ ID NO: 200575 - DNA, 60 bp, Artificial
  Synthetic oligonucleotide
tcgcaagatttcaattgtcgatttggcagattcaagttgatcacgaagtaactgattttc

SEQ ID NO: 200576 - DNA, 60 bp, Artificial
  Synthetic oligonucleotide
tcgattcattcaagcccaaatgataacatggtggacggtgaaagtccggtcattgagttg

SEQ ID NO: 200577 - DNA, 58 bp, Artificial
  Synthetic oligonucleotide
tcgatcgcagtcgggaaaagtacgaccatggcgagaacataagttagagaatttacag

SEQ ID NO: 200578 - DNA, 60 bp, Artificial
  Synthetic oligonucleotide
tcgagttcacttggttgataagcggctagtatgccccgatcagtatgcttcaaatcgtct

SEQ ID NO: 200579 - DNA, 59 bp, Artificial
  Synthetic oligonucleotide
ttgtattttgacgctaattatcaaatgggatatagatataatcgtaagcctaaaattga

SEQ ID NO: 200580 - DNA, 53 bp, Artificial
  Synthetic oligonucleotide
ttggtaaattgcagggtttagcataccctttgttaaccacaaaactgtaccaa

SEQ ID NO: 200581 - DNA, 60 bp, Artificial
  Synthetic oligonucleotide
ttggactaacttatggcagaaggctcttaaaagctcatataagccgattgtgaacgttga

SEQ ID NO: 200582 - DNA, 60 bp, Artificial
  Synthetic oligonucleotide
cttcaatgctgtagcttcagagatagctgaccattacgggtatactcttattggcgaccc

SEQ ID NO: 200583 - DNA, 58 bp, Artificial
  Synthetic oligonucleotide
cttctgatcagaactaaacatatactttagcaggggcaaggtaattgaaccttgaata

SEQ ID NO: 200584 - DNA, 57 bp, Artificial
  Synthetic oligonucleotide
ttgctatagcctggggaattgatcgcgcacaagtcacggaaccaactaaggttaaag

SEQ ID NO: 200585 - DNA, 55 bp, Artificial
  Synthetic oligonucleotide
ttgcgtcacgttgccggacgatttttggtaaacagttgcgactaccctggtcaaa

SEQ ID NO: 200586 - DNA, 53 bp, Artificial
  Synthetic oligonucleotide
ttgcgaccgtactacgacccccctataggtgccacccccctataggtgccgag

SEQ ID NO: 200587 - DNA, 60 bp, Artificial
  Synthetic oligonucleotide
ttgccatcaaagtgacttgaaaatgatcacccgtccacaaagtagttcgataattgtcat

SEQ ID NO: 200588 - DNA, 55 bp, Artificial
  Synthetic oligonucleotide
ttgatattgatagatacgtaaaacttgatgaaaaccaaaaacgagaattgaaaaa

SEQ ID NO: 200589 - DNA, 58 bp, Artificial
  Synthetic oligonucleotide
ttgacggggacaaattgtctgaaccgactgaagctgaattaatcgtggctaggtggga

SEQ ID NO: 200590 - DNA, 56 bp, Artificial
  Synthetic oligonucleotide
ttgacatggtgagacgggaagaccctagttgagcgaaagcgagaaaaaagtcattt

SEQ ID NO: 200591 - DNA, 57 bp, Artificial
  Synthetic oligonucleotide
ttcttgattaacccgctcaattgtattattcgtccggagacgcttccttagctcctc

SEQ ID NO: 200592 - DNA, 53 bp, Artificial
  Synthetic oligonucleotide
ttcttatagagaagtaaaaccgtaatggttgcaaaaaagccacccaactaggc

SEQ ID NO: 200593 - DNA, 60 bp, Artificial
  Synthetic oligonucleotide
ttctgtgatatgctctaatcaaatttagttgtttggaatggagtggttagatgagttatt

SEQ ID NO: 200594 - DNA, 49 bp, Artificial
  Synthetic oligonucleotide
ctactaaattaatcctaactattgttatcctttggtggggtactttttt

SEQ ID NO: 200595 - DNA, 59 bp, Artificial
  Synthetic oligonucleotide
ttctccgacgaagccaatcggagaaaagtgcagtagttaatgagacgattaagctcaaa

SEQ ID NO: 200596 - DNA, 58 bp, Artificial
  Synthetic oligonucleotide
ttctcagtcacccgttgccgctcaagtacctcggtcgcctattcgtggctagcgttcc

SEQ ID NO: 200597 - DNA, 58 bp, Artificial
  Synthetic oligonucleotide
ttctaccggcttgtccggtgtctggagcattaccacatcctttctgggatagaggtaa

SEQ ID NO: 200598 - DNA, 57 bp, Artificial
  Synthetic oligonucleotide
ttcggacattagtgttctcagcgcgggcttaaatattaacgatgtaggaaagtcaat

SEQ ID NO: 200599 - DNA, 60 bp, Artificial
  Synthetic oligonucleotide
ttcgatggtggcagtcaattcacgagggtgatttggtccgccgagagtcatgaggtcggc

SEQ ID NO: 200600 - DNA, 59 bp, Artificial
  Synthetic oligonucleotide
ttccttccacgacagcacgctccatttgcgacatcgacttaccgatgattggacccggt

SEQ ID NO: 200601 - DNA, 60 bp, Artificial
  Synthetic oligonucleotide
tttttagtatgcatctgcggaatttttagtatgcatatgcggaatttttagtatgcatct

SEQ ID NO: 200602 - DNA, 57 bp, Artificial
  Synthetic oligonucleotide
tttttaaacgcgaagatgtttataataagcaattgacggatagtgattttcgatgaa

SEQ ID NO: 200603 - DNA, 60 bp, Artificial
  Synthetic oligonucleotide
ttttctcagcacatttagcgacttcttcggtgtgtttcgctctagatcaattcacttagg

SEQ ID NO: 200604 - DNA, 53 bp, Artificial
  Synthetic oligonucleotide
ttttcagacggggaaagctaccttacttagagttagtgacgtactccgattaa

SEQ ID NO: 200605 - DNA, 60 bp, Artificial
  Synthetic oligonucleotide
ctacggctaaatcactgaaagcagctggctataacattatcggccgttatttgacaggaa

SEQ ID NO: 200606 - DNA, 59 bp, Artificial
  Synthetic oligonucleotide
ttttcaagtgggtaaagcgactctgttgcgagtgagcgacgttatgaagcttcgttgga

SEQ ID NO: 200607 - DNA, 54 bp, Artificial
  Synthetic oligonucleotide
tttgtgttgtaaataaatttttagcgctgaggggggcaaggaagcgaattttgc

SEQ ID NO: 200608 - DNA, 49 bp, Artificial
  Synthetic oligonucleotide
tttggtttggtttgagtgggataaaaaaattgggcgaaaaacatggggg

SEQ ID NO: 200609 - DNA, 60 bp, Artificial
  Synthetic oligonucleotide
tttgctcacttagataatcccgaaaagtatcaatatcctgtgaacgagattaaggcgcat

SEQ ID NO: 200610 - DNA, 59 bp, Artificial
  Synthetic oligonucleotide
tttgcgttctgaggcgttttagctttgcctggcagaattttgcccatgaccggggctga

SEQ ID NO: 200611 - DNA, 60 bp, Artificial
  Synthetic oligonucleotide
tttgatcccgtataatgcagtcattcacatggacgaagagggagctccgcacatgcatct

SEQ ID NO: 200612 - DNA, 56 bp, Artificial
  Synthetic oligonucleotide
tttgactttcggggcttaggttttgacctgttttcgagtttgcagagcttgcgaga

SEQ ID NO: 200613 - DNA, 56 bp, Artificial
  Synthetic oligonucleotide
tttcaaggtgggtcaatttcagcgattaagatttaagaatctggacgagccaaaaa

SEQ ID NO: 200614 - DNA, 56 bp, Artificial
  Synthetic oligonucleotide
tttcaaatcgggctgttcgtaaggatgccgttgttttaactgaatgggttatcagc

SEQ ID NO: 200615 - DNA, 60 bp, Artificial
  Synthetic oligonucleotide
tttatttaaccaaatcatggcatgtaggctctatttacgctggtgctaggggcagtaagc

SEQ ID NO: 200616 - DNA, 58 bp, Artificial
  Synthetic oligonucleotide
ctaccttaactccccataaagtaactgcgtagcatcatcattacacttcgccttaatg

SEQ ID NO: 200617 - DNA, 58 bp, Artificial
  Synthetic oligonucleotide
tttactacacgtggtttaggctaatcgtgacaaggactagcgccattcactacacgta

SEQ ID NO: 200618 - DNA, 57 bp, Artificial
  Synthetic oligonucleotide
tttactaatatgggttatgtaaactagctaaaaattgtgttcaggaatgaactcata

SEQ ID NO: 200619 - DNA, 60 bp, Artificial
  Synthetic oligonucleotide
tttacaatgacactagatctacactataattacagcggaaagagaaaggctgagcggtct

SEQ ID NO: 200620 - DNA, 60 bp, Artificial
  Synthetic oligonucleotide
tttacaacgtgcttaaagctgagcatattaaacctgacggcttcaatgacaagcactatt

SEQ ID NO: 200621 - DNA, 53 bp, Artificial
  Synthetic oligonucleotide
tttaaacgggcacatgatgtacggggttgtggtgaagttttgcgttttcgtaa

SEQ ID NO: 200622 - DNA, 57 bp, Artificial
  Synthetic oligonucleotide
ttgtcctgctgatacacactttaacgtctcaaacgttgacccacgggctaaagttca

SEQ ID NO: 200623 - DNA, 56 bp, Artificial
  Synthetic oligonucleotide
ttacatgaaatacgaattaactgaacaatcagtacagtttacttttggtaacaagc

SEQ ID NO: 200624 - DNA, 60 bp, Artificial
  Synthetic oligonucleotide
ttacatatccttgcatttagagtttcgttcaagttgaacatcgtgtaatatatgagttgc

SEQ ID NO: 200625 - DNA, 51 bp, Artificial
  Synthetic oligonucleotide
ttacagcgattaaaaagtgaccgccgtttgaccgccgttttgaccgccgtt

SEQ ID NO: 200626 - DNA, 55 bp, Artificial
  Synthetic oligonucleotide
ttacacgtgacatagttcaaagcctcttagaagtcgttttagtggggctatacgg

SEQ ID NO: 200627 - DNA, 56 bp, Artificial
  Synthetic oligonucleotide
ctaccccagacttttctggtgctcttttatgtatttggtcgctttcggattcagaa

SEQ ID NO: 200628 - DNA, 60 bp, Artificial
  Synthetic oligonucleotide
ttaattctatgtcgtgctctctgacaaaaaatgtcagaatgcgcatttacaccccactaa

SEQ ID NO: 200629 - DNA, 60 bp, Artificial
  Synthetic oligonucleotide
ttaatcatggatacaaacaagcgcaagttgcttttgcacgtttaagtgatatatcaaatt

SEQ ID NO: 200630 - DNA, 60 bp, Artificial
  Synthetic oligonucleotide
ttaagatgcagagtctccgcttagaacagattggactcggctaggccagtctcctagttg

SEQ ID NO: 200631 - DNA, 60 bp, Artificial
  Synthetic oligonucleotide
ttaacccgactatcattctcagtatggacaacgacagagcaggccagaaggcgaatagag

SEQ ID NO: 200632 - DNA, 54 bp, Artificial
  Synthetic oligonucleotide
ttaaatagttcgttgaccgctaaaggtgccttgcggtcgtttgagaatttagtc

SEQ ID NO: 200633 - DNA, 55 bp, Artificial
  Synthetic oligonucleotide
ttaaaccggacggcttcaatgacaagcactattcactttacagcccggaaacgat

SEQ ID NO: 200634 - DNA, 48 bp, Artificial
  Synthetic oligonucleotide
ttaaacagcgaaaaacgggtcggttcttgtttttaacgttgacggtaa

SEQ ID NO: 200635 - DNA, 56 bp, Artificial
  Synthetic oligonucleotide
tgttcttacagggctttattcaaggttcaattaccttgcccctgctaaagtatatg

SEQ ID NO: 200636 - DNA, 54 bp, Artificial
  Synthetic oligonucleotide
tgttcagcgtggggttcaagaatcggaacgtaaaagtttgacagtaccggaata

SEQ ID NO: 200637 - DNA, 57 bp, Artificial
  Synthetic oligonucleotide
tgtgtcgtgtactttttggtgttgtgtcgtgtactttttggtgttgtattagtgcat

SEQ ID NO: 200638 - DNA, 60 bp, Artificial
  Synthetic oligonucleotide
ctacacggccaataagagcggcgttcagtacgctataccagtagaggctgagcccgacaa

SEQ ID NO: 200639 - DNA, 55 bp, Artificial
  Synthetic oligonucleotide
tgtggtaatgttctagtgttttagaaagagatttaaaggggattaataatgccga

SEQ ID NO: 200640 - DNA, 58 bp, Artificial
  Synthetic oligonucleotide
tgtgatccgttccatctcaaaaatcggctcggttggatcgaggactttttaaggctga

SEQ ID NO: 200641 - DNA, 58 bp, Artificial
  Synthetic oligonucleotide
tgtcgttcgcttcgacaaagaaaaagcgactagccaattagctagtcgctttcatttc

SEQ ID NO: 200642 - DNA, 56 bp, Artificial
  Synthetic oligonucleotide
tgtccggcgtacaaagacgggccgatccagcacataataagcctggtaaccgtggg

SEQ ID NO: 200643 - DNA, 58 bp, Artificial
  Synthetic oligonucleotide
tgtaggtaattatggtcactaatgtaggtaattatggtcactaatgtaggtaattatg

SEQ ID NO: 200644 - DNA, 60 bp, Artificial
  Synthetic oligonucleotide
tgtagctacaattgctttctcggtttatattactgagtatcaatatggtggagattctta

SEQ ID NO: 200645 - DNA, 60 bp, Artificial
  Synthetic oligonucleotide
ttccgagagtgcctcagctgtctggtgtgtctctgcagtattcgtatttgctcgtgaatg

SEQ ID NO: 200646 - DNA, 58 bp, Artificial
  Synthetic oligonucleotide
ttcatgtgccggacattatgacaactcgaaatgagctaatccctgggggtaattttaa

SEQ ID NO: 200647 - DNA, 55 bp, Artificial
  Synthetic oligonucleotide
ttcagtcgtttacactccttcgaacttaatccttgtaccatgttgcaattaaaac

SEQ ID NO: 200648 - DNA, 57 bp, Artificial
  Synthetic oligonucleotide
ttcaaccgcaacgaagcctgtaatcaattatcggttagtgtcagcaagtttaactac

SEQ ID NO: 200649 - DNA, 58 bp, Artificial
  Synthetic oligonucleotide
ctaagcgagtttccaagtcgaatttagcattgtagccatgttcactaggggtgatggg

SEQ ID NO: 200650 - DNA, 60 bp, Artificial
  Synthetic oligonucleotide
ttcaaaatgagtcgcaaacttcattggtggattatgatgctcgtcagaatccaacccgat

SEQ ID NO: 200651 - DNA, 60 bp, Artificial
  Synthetic oligonucleotide
ttatcttaaccattgtgcagatgatgctagaatttcggcacaaaaaattgttggcttttc

SEQ ID NO: 200652 - DNA, 60 bp, Artificial
  Synthetic oligonucleotide
ttatattgataacactcggattgcacatagtccattgcgggaactcaacgaagcctcaaa

SEQ ID NO: 200653 - DNA, 57 bp, Artificial
  Synthetic oligonucleotide
ttagttgatatagtctcggccaaggcgttttctaagccgagacacttcggacaatta

SEQ ID NO: 200654 - DNA, 58 bp, Artificial
  Synthetic oligonucleotide
ttaggtggctggatagtctattcaataaacgattttctgataatttctttggacgata

SEQ ID NO: 200655 - DNA, 60 bp, Artificial
  Synthetic oligonucleotide
ttaggtcattgcaaacaggatatgaacaagaactgggagaaacatgtttcacgcaacgta

SEQ ID NO: 200656 - DNA, 60 bp, Artificial
  Synthetic oligonucleotide
ttagctcagcaagatgcagatcgcaaaaggcggaattgcggtcgtcgttcgatgctgacg

SEQ ID NO: 200657 - DNA, 58 bp, Artificial
  Synthetic oligonucleotide
ttagctacccccggttgactgacaccataagccgccacccagattgccttatctacca

SEQ ID NO: 200658 - DNA, 56 bp, Artificial
  Synthetic oligonucleotide
ttagcataccctttgttaaccacaaaactgtaccaatctcagtttcacgtgcgctt

SEQ ID NO: 200659 - DNA, 57 bp, Artificial
  Synthetic oligonucleotide
ttagcagatccagggtccgccctttatcgcggtagtgtatcgctttttagccgtaca

SEQ ID NO: 200660 - DNA, 54 bp, Artificial
  Synthetic oligonucleotide
ctaagaattgcaaccgtgttaattataaaattgactatgaaactaataacggtc

SEQ ID NO: 200661 - DNA, 55 bp, Artificial
  Synthetic oligonucleotide
ttagcaaccatcaaagcaactaaaggctggaaacctgttcttagctagtaaaacc

SEQ ID NO: 200662 - DNA, 60 bp, Artificial
  Synthetic oligonucleotide
ttactgtggtaaggacgttgatgacgcctatcaaatagatcaccgaatacctgttgctag

SEQ ID NO: 200663 - DNA, 58 bp, Artificial
  Synthetic oligonucleotide
ttacggctaaagagattagactgaagactgccagagaaccaacgttagcaattaaagc

SEQ ID NO: 200664 - DNA, 57 bp, Artificial
  Synthetic oligonucleotide
ttacggcgattatacatagctggttgtacacctaattcgttcattaagcgacgtaaa

SEQ ID NO: 200665 - DNA, 55 bp, Artificial
  Synthetic oligonucleotide
ttacgctggttcttcccgaaaaagaccaattttagccaagtaacgactgatgaga

SEQ ID NO: 200666 - DNA, 57 bp, Artificial
  Synthetic oligonucleotide
ttacgacaacgcggatttgctgttgaacgtggtattcaagaatcgcaacataaaagt

SEQ ID NO: 200667 - DNA, 54 bp, Artificial
  Synthetic oligonucleotide
ttacgaaattgggcgataaagaagcccgtaagtgcaaggatagaaggttagttc

SEQ ID NO: 200668 - DNA, 55 bp, Artificial
  Synthetic oligonucleotide
gtcgactattttggtggacctgttagccgatcagtaaaaccggcaaccgatcaat

SEQ ID NO: 200669 - DNA, 60 bp, Artificial
  Synthetic oligonucleotide
gtccaagtcacatacaagggtcttatatcccatttgagcaagttggtatgcaaccattac

SEQ ID NO: 200670 - DNA, 60 bp, Artificial
  Synthetic oligonucleotide
gtcagcaaatggcaacacgatgaaaagttatgtcagcgactctaacagtagcgtcacacc

SEQ ID NO: 200671 - DNA, 58 bp, Artificial
  Synthetic oligonucleotide
ctaacatagcgcttaccactcggcaaccttatttggttcagcacactttactagctgt

SEQ ID NO: 200672 - DNA, 55 bp, Artificial
  Synthetic oligonucleotide
gtcacgtaatttcttagcatgattaatttctcgtggcggtgttttctgggttttc

SEQ ID NO: 200673 - DNA, 57 bp, Artificial
  Synthetic oligonucleotide
gtcacccgttgccgctcaagtacctcggtcgcctattcgtggctagcgttccggctg

SEQ ID NO: 200674 - DNA, 57 bp, Artificial
  Synthetic oligonucleotide
gtcaatggtaaatcatacctagaagcctttaaatcgtctcagagacgattttagggc

SEQ ID NO: 200675 - DNA, 60 bp, Artificial
  Synthetic oligonucleotide
gtcaatcggctctagcttatcgaggtcactatccggaaaagcagtcgttagaatgctgtc

SEQ ID NO: 200676 - DNA, 60 bp, Artificial
  Synthetic oligonucleotide
gtagtgcgcattatcatgtagtgcgcattatcatgtagtgcgcattatcatgtagtgcgt

SEQ ID NO: 200677 - DNA, 60 bp, Artificial
  Synthetic oligonucleotide
gtagctaaagaaaatggtgtgctagagcgaaatggacatacggaagcggctgttgatctt

SEQ ID NO: 200678 - DNA, 58 bp, Artificial
  Synthetic oligonucleotide
gtagacgtggtcttcctcatcaacccagtgattgcgtaaggaatactcgagccggtct

SEQ ID NO: 200679 - DNA, 55 bp, Artificial
  Synthetic oligonucleotide
gtagaacgtaagacccgacttctatgggccatcaaagcccctaatagaacggcta

SEQ ID NO: 200680 - DNA, 60 bp, Artificial
  Synthetic oligonucleotide
gtacgcgccatgcaaaggtgcaagcaaatagcaagcaattatctgacaaattgcaagcaa

SEQ ID NO: 200681 - DNA, 55 bp, Artificial
  Synthetic oligonucleotide
gtacgaaacctaaagcctgatgagcaggaaacaagcccttgtttccccgagccca

SEQ ID NO: 200682 - DNA, 52 bp, Artificial
  Synthetic oligonucleotide
ctaaagacgtggccggaggcttcaaaaatgctacggacaaccctaaaactcg

SEQ ID NO: 200683 - DNA, 60 bp, Artificial
  Synthetic oligonucleotide
gtaatagctgagatataagctcatcgtggttcgctaagcgaatttgcgtaatatctgtat

SEQ ID NO: 200684 - DNA, 60 bp, Artificial
  Synthetic oligonucleotide
gtaagtgcgcattatcatgataatgcgcacttatacgtcatctttgatgacgttgtgcta

SEQ ID NO: 200685 - DNA, 57 bp, Artificial
  Synthetic oligonucleotide
gtaagcgcaaggcactagcgaaggaatatgagaagcttggccgtaaattttacaaaa

SEQ ID NO: 200686 - DNA, 55 bp, Artificial
  Synthetic oligonucleotide
gtaagacaaattttgggcgataagagtgtttctatggttcaaattgtagttcaaa

SEQ ID NO: 200687 - DNA, 58 bp, Artificial
  Synthetic oligonucleotide
gtaacgctagtacgttgtacttttgttaacagcaataaagacggcatagacgctgtca

SEQ ID NO: 200688 - DNA, 56 bp, Artificial
  Synthetic oligonucleotide
gtaaataggtcatataggcgagtgccagtgcccgagttcccgtaacccgcttggaa

SEQ ID NO: 200689 - DNA, 56 bp, Artificial
  Synthetic oligonucleotide
ggtttggcagttgatgggtctttttcttggcctgaatggtggtgataccgagcccg

SEQ ID NO: 200690 - DNA, 59 bp, Artificial
  Synthetic oligonucleotide
gttcgttagaatatgcaattgcacgtgatcagttaattaaacgccatgttttacctgac

SEQ ID NO: 200691 - DNA, 58 bp, Artificial
  Synthetic oligonucleotide
gttcgcttgaaaatcaagcgtgctttaggcgataagagtgttgctaaagtacaaattg

SEQ ID NO: 200692 - DNA, 58 bp, Artificial
  Synthetic oligonucleotide
gttcaaagcctcttagaagtcgttttagtggggctatacggtgtgctatgacgtgcga

SEQ ID NO: 200693 - DNA, 60 bp, Artificial
  Synthetic oligonucleotide
cttattagactactgaatcagactagcacatcatggctagcaacttccacgacctagtcc

SEQ ID NO: 200694 - DNA, 60 bp, Artificial
  Synthetic oligonucleotide
cgtttttctactgtcgcgagatttgcaagtgtatatacacttgcgatgaattgacccaat

SEQ ID NO: 200695 - DNA, 55 bp, Artificial
  Synthetic oligonucleotide
gttagactagggtgttattaatgtactagccgtcacgtagcccacaagacgttaa

SEQ ID NO: 200696 - DNA, 55 bp, Artificial
  Synthetic oligonucleotide
gttaagagtgcttattttaagggaacaggaaactatttgtctcaagttgattgga

SEQ ID NO: 200697 - DNA, 54 bp, Artificial
  Synthetic oligonucleotide
gttaaagaagctagcctggggaattcgcaagtcctgccacgggactattttaac

SEQ ID NO: 200698 - DNA, 59 bp, Artificial
  Synthetic oligonucleotide
gtgttccggttggttgatgtgatacggtctgacagttcgacaagtcgaattgtcactcc

SEQ ID NO: 200699 - DNA, 55 bp, Artificial
  Synthetic oligonucleotide
gtgggttgctagccaatccccgtaaattgattgattaagctcgtgaaacccttag

SEQ ID NO: 200700 - DNA, 55 bp, Artificial
  Synthetic oligonucleotide
gtggcaactggtagcggtgatttttctaccgctcgtgctttccgttaccgtttca

SEQ ID NO: 200701 - DNA, 60 bp, Artificial
  Synthetic oligonucleotide
gtgcgctgaaatataatttcaaatctgacgatggtcgtcagattgctggcgttagtgtta

SEQ ID NO: 200702 - DNA, 57 bp, Artificial
  Synthetic oligonucleotide
gtgcgccgagtagggcgggttcataacgacggcatcaaataagtaaggctcgtcaac

SEQ ID NO: 200703 - DNA, 60 bp, Artificial
  Synthetic oligonucleotide
gtgcgcattatcatgtagtgcgcacattatcatgtagtgcgcattatcatgtagtgcgca

SEQ ID NO: 200704 - DNA, 60 bp, Artificial
  Synthetic oligonucleotide
gtgcctgcagattggcttaacaacaatgttggtcaaggactgatatatcgagatgggata

SEQ ID NO: 200705 - DNA, 60 bp, Artificial
  Synthetic oligonucleotide
cgttttgcgtgcgcatactgccttggtaaggctatattttgacgcagtctatcaagaacg

SEQ ID NO: 200706 - DNA, 54 bp, Artificial
  Synthetic oligonucleotide
gtgagaattcctagtttggcgacccggaacacgtgagttaatcttcaaaattcg

SEQ ID NO: 200707 - DNA, 60 bp, Artificial
  Synthetic oligonucleotide
gtcttggtcaatgaatggattatctcaagtgatcgtcatttctttgccgatttaacggcg

SEQ ID NO: 200708 - DNA, 60 bp, Artificial
  Synthetic oligonucleotide
gtctcctaagctgaagaaggccattagaggcgggcaagatattgccagggctagggctga

SEQ ID NO: 200709 - DNA, 57 bp, Artificial
  Synthetic oligonucleotide
gtcgtgatagcacgttggggtcaaaaggtgtcgtaaaacacgattcactccacgtga

SEQ ID NO: 200710 - DNA, 59 bp, Artificial
  Synthetic oligonucleotide
gtcgtgatagcacgctgggggcaaaaggtgtagtaaaacgcgatatgctccacgtgaaa

SEQ ID NO: 200711 - DNA, 57 bp, Artificial
  Synthetic oligonucleotide
gtcgctaagtcagaacgacttaactcaaactatccccaagttacatagctaatgatt

SEQ ID NO: 200712 - DNA, 55 bp, Artificial
  Synthetic oligonucleotide
gtcgcggttactagtaaccaggtaactatagtcttcattgatccccgctggaacc

SEQ ID NO: 200713 - DNA, 60 bp, Artificial
  Synthetic oligonucleotide
gggacataaaagtttgggcatgacggcccactacgcgcaatctgcgcgagttgatattac

SEQ ID NO: 200714 - DNA, 57 bp, Artificial
  Synthetic oligonucleotide
ggcttgtgccgttcgattactcgttaatggtgtcggttgttaagccaccagctgaac

SEQ ID NO: 200715 - DNA, 59 bp, Artificial
  Synthetic oligonucleotide
ggcttatcaatgtgccgttagataagtgggctaaatggaatgaattaatcgctgatttt

SEQ ID NO: 200716 - DNA, 58 bp, Artificial
  Synthetic oligonucleotide
cgttgtgctaaacccatcaaaaccggcatcagatttcgcgttgctcaaacgtaactga

SEQ ID NO: 200717 - DNA, 55 bp, Artificial
  Synthetic oligonucleotide
ggctggttcgccgagaacttggagtagcgtcgtcggtattttaggttcggacatg

SEQ ID NO: 200718 - DNA, 60 bp, Artificial
  Synthetic oligonucleotide
ggctgcgcagatgttttgcgttttcgaaagttgcctgatggttcaactaagctttatcaa

SEQ ID NO: 200719 - DNA, 52 bp, Artificial
  Synthetic oligonucleotide
ggctaaggctctaaacaccgcctttggcaagtttatgggggccttcggtccc

SEQ ID NO: 200720 - DNA, 57 bp, Artificial
  Synthetic oligonucleotide
ggcgtttcgcttactctaaagcagaacgtactactaggctagtagaattatggcgaa

SEQ ID NO: 200721 - DNA, 60 bp, Artificial
  Synthetic oligonucleotide
ggcgtgtgcaactgagcgagaagatgtggcttcggctagtgaattggcgacgtcaccata

SEQ ID NO: 200722 - DNA, 58 bp, Artificial
  Synthetic oligonucleotide
ggcgtggcaaaagtaaaccggtatccgatagcgctttgtaagcgcctgatcgcaggaa

SEQ ID NO: 200723 - DNA, 56 bp, Artificial
  Synthetic oligonucleotide
ggcgtgcactcgacaaagttcgcggggccaaactcggtacaaccgagcaagaatac

SEQ ID NO: 200724 - DNA, 60 bp, Artificial
  Synthetic oligonucleotide
ggcgtccaatgactgcatgtctcgttgtccaagactgcctcctggcttgtcgcgacaaac

SEQ ID NO: 200725 - DNA, 60 bp, Artificial
  Synthetic oligonucleotide
ggcgctaatcgtgcagatactatgttctatgacttcatagaaaaacatccaaaaggtcac

SEQ ID NO: 200726 - DNA, 58 bp, Artificial
  Synthetic oligonucleotide
ggcccatagttgagtggcttttaatttgcgcttcatgccgttagattattttctccga

SEQ ID NO: 200727 - DNA, 53 bp, Artificial
  Synthetic oligonucleotide
cgttgcaactaaaagcgggtacgagctggtagtcaacggtaccggaacgacca

SEQ ID NO: 200728 - DNA, 60 bp, Artificial
  Synthetic oligonucleotide
ggccaccttattacgaatgagcgatgttatgcggctccgttggactgatgtctttaacga

SEQ ID NO: 200729 - DNA, 60 bp, Artificial
  Synthetic oligonucleotide
ggccaccatcgcattgtaagtattcaacaatcatttttgcgagatttggctcttcgacaa

SEQ ID NO: 200730 - DNA, 56 bp, Artificial
  Synthetic oligonucleotide
ggcatagtaaggcctatgtgtatgatcttattaagaataaggggaaaatagttaaa

SEQ ID NO: 200731 - DNA, 60 bp, Artificial
  Synthetic oligonucleotide
ggatgagcatcgatcatcaattctactgtctctttggcatcatgtactgacgctttagta

SEQ ID NO: 200732 - DNA, 58 bp, Artificial
  Synthetic oligonucleotide
ggatccgcggcattaaagtcttcaggcccgaaggactgaatgacacgaaaggcttgcg

SEQ ID NO: 200733 - DNA, 57 bp, Artificial
  Synthetic oligonucleotide
ggatatcgaggcttacattaacgagcataaaaccagccagcgggcggttagaaaaga

SEQ ID NO: 200734 - DNA, 58 bp, Artificial
  Synthetic oligonucleotide
ggtttataatcctcagctgggatccccaatccatttggtttagtgtatatctcaatac

SEQ ID NO: 200735 - DNA, 60 bp, Artificial
  Synthetic oligonucleotide
ggttccttgaacaatggaaatggtctgaccgtgatctttgtcagcttcgcgcattagctt

SEQ ID NO: 200736 - DNA, 57 bp, Artificial
  Synthetic oligonucleotide
ggttaaatatcgtggtaataaccctatgcacggaaagcatgaacgaatctcaatctt

SEQ ID NO: 200737 - DNA, 56 bp, Artificial
  Synthetic oligonucleotide
ggtgtaataaataaatggattaccgtcgtcgtccatttgcttatttttgactgcaa

SEQ ID NO: 200738 - DNA, 60 bp, Artificial
  Synthetic oligonucleotide
cgttcagagggcgctgaatccaattgagaagcgtgaccgctaccgcttccctattggcca

SEQ ID NO: 200739 - DNA, 56 bp, Artificial
  Synthetic oligonucleotide
ggtggtaaatactacggtaatggggttacttgtggcaaacattcctgctctgttga

SEQ ID NO: 200740 - DNA, 54 bp, Artificial
  Synthetic oligonucleotide
ggtggcgagtatcaaccaataccttcggggaaagccacgtttgcgcgccctaaa

SEQ ID NO: 200741 - DNA, 60 bp, Artificial
  Synthetic oligonucleotide
ggtggcgactaccattttgcattaaatactggacatttaaccgatatgcaatccgcaatc

SEQ ID NO: 200742 - DNA, 58 bp, Artificial
  Synthetic oligonucleotide
ggtgaaagactaagagatacctctaaatatagtggcaaagtaagaccatggcgagaaa

SEQ ID NO: 200743 - DNA, 60 bp, Artificial
  Synthetic oligonucleotide
ggtctcgcttctgttgacgccagattgcttcggaatcagcctcatgtaccgaagtggttg

SEQ ID NO: 200744 - DNA, 60 bp, Artificial
  Synthetic oligonucleotide
ggtctagtcgtttatctagcaacctgcgtcaaatgctgttaacaacagtcgatcggatac

SEQ ID NO: 200745 - DNA, 56 bp, Artificial
  Synthetic oligonucleotide
ggtcgtctttaaagacgacctttaggtattggatcgatagatcttatatcaacgaa

SEQ ID NO: 200746 - DNA, 60 bp, Artificial
  Synthetic oligonucleotide
ggtatcaaagacaccagcgccaatgtaaactcggatattatgaaagccttgttgacaatg

SEQ ID NO: 200747 - DNA, 60 bp, Artificial
  Synthetic oligonucleotide
ggtagtaatcgcatgggcgaagatagttcagaatacgtctgggacgatggttcagtgcgg

SEQ ID NO: 200748 - DNA, 56 bp, Artificial
  Synthetic oligonucleotide
ggtaggcgtaccaaacatgttgcatggggtaataccataggttggcagggttcaac

SEQ ID NO: 200749 - DNA, 53 bp, Artificial
  Synthetic oligonucleotide
cgttaatcagaccggtttatgactaaacctaacccgattaacgagtgagattg

SEQ ID NO: 200750 - DNA, 58 bp, Artificial
  Synthetic oligonucleotide
ggtaatcaatcattaggatttgtctcgggatggtccctcaaacaaggggctgtcgcaa

SEQ ID NO: 200751 - DNA, 58 bp, Artificial
  Synthetic oligonucleotide
ggtaacaaccgtgattagacaaaacagcgatgttagagcggctattaaagcttctggc

SEQ ID NO: 200752 - DNA, 54 bp, Artificial
  Synthetic oligonucleotide
gggtccgttgcccatccccaagcgttgtagtcaagataagggttcttaacgcca

SEQ ID NO: 200753 - DNA, 58 bp, Artificial
  Synthetic oligonucleotide
gggtatctttcacgccattctgtagagttcaaaggcttttctctttgctgataaatct

SEQ ID NO: 200754 - DNA, 54 bp, Artificial
  Synthetic oligonucleotide
ggggttttatcgcagccattagtaaaacgccttagaacgcaaatatgggcttcc

SEQ ID NO: 200755 - DNA, 60 bp, Artificial
  Synthetic oligonucleotide
gggccgcaaatggctgggatggcaatcgtaccatcaatattgggagccgtcatcttggta

SEQ ID NO: 200756 - DNA, 60 bp, Artificial
  Synthetic oligonucleotide
tatcgcccttggcatcgcactagtcggtctgtggccacgcttaagcagtctattctggct

SEQ ID NO: 200757 - DNA, 60 bp, Artificial
  Synthetic oligonucleotide
tatcgaacgtcccagcattgatcagaacgaggtcttagtcgccgttcaggcaacgagtat

SEQ ID NO: 200758 - DNA, 58 bp, Artificial
  Synthetic oligonucleotide
tatcccgatgggcctttctgtgacagccttctggcttttcggtgttggcttcaaagcg

SEQ ID NO: 200759 - DNA, 52 bp, Artificial
  Synthetic oligonucleotide
tatatgaatagtcttaaagttgctagaaacgaaaaataaggccctaaaaaac

SEQ ID NO: 200760 - DNA, 51 bp, Artificial
  Synthetic oligonucleotide
cgttaaaacaggttgactggggccactttgaaattgccctacctgtctttt

SEQ ID NO: 200761 - DNA, 59 bp, Artificial
  Synthetic oligonucleotide
tataggtcttatgtagttcatcttccaggcattttaaggcgaattggtccatgttagtc

SEQ ID NO: 200762 - DNA, 59 bp, Artificial
  Synthetic oligonucleotide
tataaacagatcttaaaacaaccatctcaccacccatgaggcgtgttagttcagtagga

SEQ ID NO: 200763 - DNA, 60 bp, Artificial
  Synthetic oligonucleotide
tagtgtagctgggcctcgactcttggatgatccacgtaatttcttatacatccactacat

SEQ ID NO: 200764 - DNA, 60 bp, Artificial
  Synthetic oligonucleotide
tagtggatgcccagccgaccttccgcatgtgcacacaccgtcatatacttggaatgagct

SEQ ID NO: 200765 - DNA, 55 bp, Artificial
  Synthetic oligonucleotide
tagtggaaccgaagcgatgacggtaaaccaacccgcactctttgcaaaacgtcca

SEQ ID NO: 200766 - DNA, 60 bp, Artificial
  Synthetic oligonucleotide
tagcgctggcatgctgtcagtaggtcaaatagctaaaatgctgaagaccaacagacagaa

SEQ ID NO: 200767 - DNA, 53 bp, Artificial
  Synthetic oligonucleotide
tagcctatggggtttagtttttacaactcgtcaaatagagttgtaattcctgt

SEQ ID NO: 200768 - DNA, 58 bp, Artificial
  Synthetic oligonucleotide
tagatgagggaattagccccgataacatcgttcctactggcaacggcttaattatcga

SEQ ID NO: 200769 - DNA, 58 bp, Artificial
  Synthetic oligonucleotide
tagagttgctaacggggatcagcacctagaaccgcaacttctaggtgtcaccctccta

SEQ ID NO: 200770 - DNA, 57 bp, Artificial
  Synthetic oligonucleotide
tagagggaagtcatcactttttcggacagtttgctaagcgactttttgtgaagcttg

SEQ ID NO: 200771 - DNA, 51 bp, Artificial
  Synthetic oligonucleotide
cgtggggttcaagaatcagaacgtaaaagtttaacggtaccagaatataaa

SEQ ID NO: 200772 - DNA, 57 bp, Artificial
  Synthetic oligonucleotide
tagagaagtatcggttaggaaaatcatatctaacttatcccggaatagaagcagacc

SEQ ID NO: 200773 - DNA, 58 bp, Artificial
  Synthetic oligonucleotide
tagacgacattaattacgaaaatgttctacagagacctaaaagtgaactatcacagtg

SEQ ID NO: 200774 - DNA, 60 bp, Artificial
  Synthetic oligonucleotide
tacttttgtaccatcatagctaggtacagtggtagatggtgcaattggtgttgttgtatc

SEQ ID NO: 200775 - DNA, 55 bp, Artificial
  Synthetic oligonucleotide
tactttgatcggtttaggaaattcaaacttaaacccaagatctttgcgaatgcca

SEQ ID NO: 200776 - DNA, 60 bp, Artificial
  Synthetic oligonucleotide
tactcgtacatgcacgatttacgaggtcgaattgatactactatgcaggatacgtctatt

SEQ ID NO: 200777 - DNA, 56 bp, Artificial
  Synthetic oligonucleotide
tacgtcgtgacggtctcagtaaacgattagacttccgtaatttaccagatgaacta

SEQ ID NO: 200778 - DNA, 60 bp, Artificial
  Synthetic oligonucleotide
tcaccctcgtttagtgatacaatgagtatatcgtaatattgatttatgctatgaatctcg

SEQ ID NO: 200779 - DNA, 60 bp, Artificial
  Synthetic oligonucleotide
tcaagatttcacgaggtaaaaatgcagttgccgacatgaaccgaacatcatcatgcttct

SEQ ID NO: 200780 - DNA, 60 bp, Artificial
  Synthetic oligonucleotide
tcaagacatggggtgcccttggatttgtcaactcattcgttggccttattgtgatcctgg

SEQ ID NO: 200781 - DNA, 60 bp, Artificial
  Synthetic oligonucleotide
tcaaccgacgcagccaactcaaccgacgcagccaactcaaccgacgcagccaactcaacc

SEQ ID NO: 200782 - DNA, 54 bp, Artificial
  Synthetic oligonucleotide
cgtgcgactttttcgtgttctcgcgatgttttaccgaaaagagagtaggtaatc

SEQ ID NO: 200783 - DNA, 60 bp, Artificial
  Synthetic oligonucleotide
tcaaagttcaaacattcattctgccaggtctgaatgtttggactaagtagctgttgtcta

SEQ ID NO: 200784 - DNA, 60 bp, Artificial
  Synthetic oligonucleotide
tcaaactcagaccagcaatgacagcaatatcagagcccaattagaagcctggcatgctag

SEQ ID NO: 200785 - DNA, 60 bp, Artificial
  Synthetic oligonucleotide
tatttctttcagttaattatcgatacttatttgccgcacttgatgactaataggctttca

SEQ ID NO: 200786 - DNA, 57 bp, Artificial
  Synthetic oligonucleotide
tatttctcttcttgacattaactgaggaaagctcaaagttgggcgagcttagaaaaa

SEQ ID NO: 200787 - DNA, 60 bp, Artificial
  Synthetic oligonucleotide
tattgctgtcctcatctcatgcaatctaatgccaattatagcaatggctacacacgacta

SEQ ID NO: 200788 - DNA, 60 bp, Artificial
  Synthetic oligonucleotide
tattgacgacatagagcggacgtatgaccatttgatggacctccgatttgggcatcggag

SEQ ID NO: 200789 - DNA, 60 bp, Artificial
  Synthetic oligonucleotide
tattctagaatattctggaatcgtgaaactgattggcatcagtagaatttcacaaaaacg

SEQ ID NO: 200790 - DNA, 60 bp, Artificial
  Synthetic oligonucleotide
tattatgcagtttattagagatagtgagcttgataattacagtgattttattggctattg

SEQ ID NO: 200791 - DNA, 60 bp, Artificial
  Synthetic oligonucleotide
tatggtgacgtcgccaattcactagccgaagccacatcttctcgctcagttgcacacgcc

SEQ ID NO: 200792 - DNA, 55 bp, Artificial
  Synthetic oligonucleotide
tatgctttgacagagttccgagatttaaagagtagttacgcaaaaacaacttttc

SEQ ID NO: 200793 - DNA, 54 bp, Artificial
  Synthetic oligonucleotide
cgtgcacgttttgaccagggtagtcgcaactgtttaccaaaaatcgtccggcaa

SEQ ID NO: 200794 - DNA, 60 bp, Artificial
  Synthetic oligonucleotide
tatgcgcttcgttagtcccacgctcagaggaacgatatggatgggcataataaaggtcag

SEQ ID NO: 200795 - DNA, 60 bp, Artificial
  Synthetic oligonucleotide
tatgataattgcactagatgaggcaatggcggttggtgcctcaattacagatagcaaggc

SEQ ID NO: 200796 - DNA, 58 bp, Artificial
  Synthetic oligonucleotide
tatctttgtggttgggggacctggatcatataagacccaatcagtcgtcattaccaac

SEQ ID NO: 200797 - DNA, 53 bp, Artificial
  Synthetic oligonucleotide
tatcggcggcgtcacttaagccgtaactaattcgttcgggccaccgtgttacc

SEQ ID NO: 200798 - DNA, 58 bp, Artificial
  Synthetic oligonucleotide
taaactattaccagcgacattcattgctgcttagcttttaaggaggcgattaattggg

SEQ ID NO: 200799 - DNA, 55 bp, Artificial
  Synthetic oligonucleotide
taaacgtggatcaaagtgaccactttttgggtctggataaattaacccaatatca

SEQ ID NO: 200800 - DNA, 59 bp, Artificial
  Synthetic oligonucleotide
taaaattgataaagaaactggcgaaatactagaagaaactgaatgatgtgatgaaagga

SEQ ID NO: 200801 - DNA, 53 bp, Artificial
  Synthetic oligonucleotide
taaaattacactttttagtttgcactccttcgaacttaatccttgcaccacgt

SEQ ID NO: 200802 - DNA, 57 bp, Artificial
  Synthetic oligonucleotide
taaaagtgtaacgtttaatgctgactgagggtgctatacttcgtttgtactccgcaa

SEQ ID NO: 200803 - DNA, 56 bp, Artificial
  Synthetic oligonucleotide
taaaaggtatgcacctcaaaacacagtaagtaggccagaaataactagctttagtg

SEQ ID NO: 200804 - DNA, 60 bp, Artificial
  Synthetic oligonucleotide
cttatccattaaccctgtactcgtaataatagcgatcaatccatagtcacgagtaacatc

SEQ ID NO: 200805 - DNA, 60 bp, Artificial
  Synthetic oligonucleotide
cgtgaatcggacttggctcgagattacttgtggtgaagccccttatatgacttctagata

SEQ ID NO: 200806 - DNA, 54 bp, Artificial
  Synthetic oligonucleotide
taaaactacgctacgcttcatttgtttgtccctccttacttcttgattggtcgg

SEQ ID NO: 200807 - DNA, 60 bp, Artificial
  Synthetic oligonucleotide
gtttccgcaagatagacttgatgcgagtgacgcttcgagtcgagctgagttacagatcca

SEQ ID NO: 200808 - DNA, 56 bp, Artificial
  Synthetic oligonucleotide
gtttattcgcattttggtcataaacgagcacgttttggcgttacatcgtccgcacc

SEQ ID NO: 200809 - DNA, 60 bp, Artificial
  Synthetic oligonucleotide
gtttaagcttatcgggagcatagagtttatacagagagcggcagattacatttaagcgac

SEQ ID NO: 200810 - DNA, 57 bp, Artificial
  Synthetic oligonucleotide
gtttaagcagtttagcagcttgataagccttcgtaccttggtgccaaaaattagcta

SEQ ID NO: 200811 - DNA, 56 bp, Artificial
  Synthetic oligonucleotide
gttgttcgatttggccgtcgatgcatcagttagttatcgttattaacttcgaaccc

SEQ ID NO: 200812 - DNA, 59 bp, Artificial
  Synthetic oligonucleotide
gttggggataaatactctggacatataacttacgctttctgcgcagggttgagagtcac

SEQ ID NO: 200813 - DNA, 60 bp, Artificial
  Synthetic oligonucleotide
gttggagaaacattttagatgagttgcatgttccctgggttgagagccctctgcatgata

SEQ ID NO: 200814 - DNA, 60 bp, Artificial
  Synthetic oligonucleotide
gttgagcgccgtttggtggcttcctataagaagcatgatgatgttcggttcatgtcggta

SEQ ID NO: 200815 - DNA, 60 bp, Artificial
  Synthetic oligonucleotide
gttgacagtctgccagtcacaccatacttggtcccacaagaatgcggcatgcacatgcaa

SEQ ID NO: 200816 - DNA, 58 bp, Artificial
  Synthetic oligonucleotide
ctgaaaacttgaagcagggagttgtgattgacgataaaacagtcgctgaattaaagac

SEQ ID NO: 200817 - DNA, 55 bp, Artificial
  Synthetic oligonucleotide
gttcttagctagtaaaacctcccgtgagtgtcgttcgtgaccccgcttgcagtta

SEQ ID NO: 200818 - DNA, 55 bp, Artificial
  Synthetic oligonucleotide
gttctcgattactggcccaatctggtgcatttttaggggttaagataaagctttc

SEQ ID NO: 200819 - DNA, 55 bp, Artificial
  Synthetic oligonucleotide
gttctcgaggggctatttgagacttatagaccctatagttgagttttactttcta

SEQ ID NO: 200820 - DNA, 60 bp, Artificial
  Synthetic oligonucleotide
tacgctactgacagtaagcttgtatctatttcctgtgagttttctgatatcccagaatct

SEQ ID NO: 200821 - DNA, 60 bp, Artificial
  Synthetic oligonucleotide
tacgatccaaccgacttaatttcacaaagttcacatgcttcagccttagagcagagcgga

SEQ ID NO: 200822 - DNA, 60 bp, Artificial
  Synthetic oligonucleotide
tacccggtcaagccgactagtgtcaatgcttcatgagctttcctgtttcgtacatctaac

SEQ ID NO: 200823 - DNA, 53 bp, Artificial
  Synthetic oligonucleotide
tacccgaggacggtaatactggttggaacacagtttatgggttaactagagcc

SEQ ID NO: 200824 - DNA, 57 bp, Artificial
  Synthetic oligonucleotide
taccatcatccaacattaaccgagacgatacaggagcccctaaaacggcactttatg

SEQ ID NO: 200825 - DNA, 56 bp, Artificial
  Synthetic oligonucleotide
taccaggtagcgaccacgaagcaactgccccatctttaatagaaagacgagggtcg

SEQ ID NO: 200826 - DNA, 57 bp, Artificial
  Synthetic oligonucleotide
taccaacaacagtaccgttcactagtgagcctaaagcttgagctacggtataaatgt

SEQ ID NO: 200827 - DNA, 57 bp, Artificial
  Synthetic oligonucleotide
ctcttgtcccgatttaagggtatgaggtataatgaatacaagcacagaaatcaaagt

SEQ ID NO: 200828 - DNA, 60 bp, Artificial
  Synthetic oligonucleotide
taattgcctcacggtcttctacacgtactttagcgcagatattacgcatcacgtgaacca

SEQ ID NO: 200829 - DNA, 60 bp, Artificial
  Synthetic oligonucleotide
taatgtgcaccaatctcgagttgtctaggaggtgataacgtgaccgaactcattaaagcc

SEQ ID NO: 200830 - DNA, 55 bp, Artificial
  Synthetic oligonucleotide
taatcttataaactttgataggagttttattatgacaacgacaaaaaagagatta

SEQ ID NO: 200831 - DNA, 54 bp, Artificial
  Synthetic oligonucleotide
taaggcgacttatcccaagtaacccacattcaccgcggtacttccacattccgt

SEQ ID NO: 200832 - DNA, 57 bp, Artificial
  Synthetic oligonucleotide
taaggcgcatggtggggcggatattgcaaagtatttaactgtaaatggcgtagaaaa

SEQ ID NO: 200833 - DNA, 58 bp, Artificial
  Synthetic oligonucleotide
taagagttgattataatcccaaacgacttagagaagagccagaagcggagtgggcaaa

SEQ ID NO: 200834 - DNA, 60 bp, Artificial
  Synthetic oligonucleotide
taagaagctggaagcacctcataatgagcctgagagcagttctgaatccgaaagcgacca

SEQ ID NO: 200835 - DNA, 50 bp, Artificial
  Synthetic oligonucleotide
taacgttctttttagcctcgaaaatggttattttgatgtggtttttaacg

SEQ ID NO: 200836 - DNA, 60 bp, Artificial
  Synthetic oligonucleotide
taacggccacttagtgttacgcagaagcactagtaataaggttagaattgcatagcggca

SEQ ID NO: 200837 - DNA, 57 bp, Artificial
  Synthetic oligonucleotide
taacccgccgtgcggaggaatgttgcctttttgctaattgtgggctggtggcgtagc

SEQ ID NO: 200838 - DNA, 59 bp, Artificial
  Synthetic oligonucleotide
ctctgtgaggtaattatagcatatgaaaagtaaatctaaaatcgattgggcagtacctc

SEQ ID NO: 200839 - DNA, 54 bp, Artificial
  Synthetic oligonucleotide
taaccccctgcaaaacgaccatacagacgtttcagagcctaccgagggtaatta

SEQ ID NO: 200840 - DNA, 60 bp, Artificial
  Synthetic oligonucleotide
taaatcactcatctgaagacatgaccttggcttatttgggattagatcaagaaacccgtg

SEQ ID NO: 200841 - DNA, 59 bp, Artificial
  Synthetic oligonucleotide
taaatataaatggtgcctccgcggcgataaagcccctcgttggcaggactgcgatggcc

SEQ ID NO: 200842 - DNA, 57 bp, Artificial
  Synthetic oligonucleotide
taaagcagggactcaccgaagacagtcccctaaaagagaggtggtagcgattcgcta

SEQ ID NO: 200843 - DNA, 52 bp, Artificial
  Synthetic oligonucleotide
accaaagatgtactttttatcgaacaaactaataaaacgccttaatcgacgc

SEQ ID NO: 200844 - DNA, 55 bp, Artificial
  Synthetic oligonucleotide
agacatagtttaaagcttgagttagtaagcgtcaagtccttagttctagtaaata

SEQ ID NO: 200845 - DNA, 59 bp, Artificial
  Synthetic oligonucleotide
agcttttgctgagttagtcgcccaaaatgatagtgacgtcgttgtggttgatacggctc

SEQ ID NO: 200846 - DNA, 53 bp, Artificial
  Synthetic oligonucleotide
aagcctgattttccgcaacccgtttttgcttttaatcatggtaagacgccact

SEQ ID NO: 200847 - DNA, 54 bp, Artificial
  Synthetic oligonucleotide
accaaagtccgaaccgcatccctttatcatgggtccgtttactaatatccgcta

SEQ ID NO: 200848 - DNA, 58 bp, Artificial
  Synthetic oligonucleotide
agacagccgaacaaccggattatcaaaagcgcgtggtcttaacacctagtgagattga

SEQ ID NO: 200849 - DNA, 60 bp, Artificial
  Synthetic oligonucleotide
ctctggtcttatgttctctaatagtctttccttccatttatcacgttctaatagatgcac

SEQ ID NO: 200850 - DNA, 60 bp, Artificial
  Synthetic oligonucleotide
accaacgcttcgaattaatcatctataatagtcattttttatgctgcattcagtgaacca

SEQ ID NO: 200851 - DNA, 59 bp, Artificial
  Synthetic oligonucleotide
aagcccattatcacgtaatttatgtggcgaagaatcctgttactgcggatagcgttaga

SEQ ID NO: 200852 - DNA, 54 bp, Artificial
  Synthetic oligonucleotide
aagcagtaacctcacaatctcactcgttaatcgggttaggtttagtcataaacc

SEQ ID NO: 200853 - DNA, 58 bp, Artificial
  Synthetic oligonucleotide
aagcaggggcagcaaaagttagcagcggttgaaaatgaaactaaacagcgtcaagtga

SEQ ID NO: 200854 - DNA, 58 bp, Artificial
  Synthetic oligonucleotide
agtgatgccgctaagctagcttacatggtactaaaagaccggctagagtattctttac

SEQ ID NO: 200855 - DNA, 58 bp, Artificial
  Synthetic oligonucleotide
aagactcatgagatttggcaaaaacttggttcaaatcttcatcgagttggcggaaaga

SEQ ID NO: 200856 - DNA, 60 bp, Artificial
  Synthetic oligonucleotide
aagacaattgatgtccacaaaatcattacacggacactatcgtccaaagaaattatcaga

SEQ ID NO: 200857 - DNA, 59 bp, Artificial
  Synthetic oligonucleotide
acgggcagtggcgcgtgctttaaacggtgatccagcctacgcacaaactagcgaagaca

SEQ ID NO: 200858 - DNA, 59 bp, Artificial
  Synthetic oligonucleotide
agaagaagactcgtatttgaaattgcgcagtggggtttctgcgtgagttcaaatcgatg

SEQ ID NO: 200859 - DNA, 54 bp, Artificial
  Synthetic oligonucleotide
accaatatagggagtgattactttgggtacatctactttatcacgttttcaacg

SEQ ID NO: 200860 - DNA, 60 bp, Artificial
  Synthetic oligonucleotide
ctctggtcatgccaaaggtagctagttcataatgaatgtgagagattcccatttcatcgt

SEQ ID NO: 200861 - DNA, 58 bp, Artificial
  Synthetic oligonucleotide
aactcgccggattatgttcactttgcccgaccaggcaatcgataaattaaatcagcta

SEQ ID NO: 200862 - DNA, 60 bp, Artificial
  Synthetic oligonucleotide
agtggcaggacgattgcaactaatcgtttcagcgtatacaagatgcggagaaatcttaat

SEQ ID NO: 200863 - DNA, 60 bp, Artificial
  Synthetic oligonucleotide
acatgagtgatgtgaatgatataataactgccaatgctggtggttttcgattgtattttg

SEQ ID NO: 200864 - DNA, 57 bp, Artificial
  Synthetic oligonucleotide
aagggcttggtctctttaccggaatacattgccagcgtggttagcatggactctaaa

SEQ ID NO: 200865 - DNA, 60 bp, Artificial
  Synthetic oligonucleotide
aagggcaaggaggccacgcaaaactatatattacctccagaggactatcagaggctcaca

SEQ ID NO: 200866 - DNA, 55 bp, Artificial
  Synthetic oligonucleotide
agtccggtggcaaaggccggtgctaagggggaacgtaattcacgcaagagcacga

SEQ ID NO: 200867 - DNA, 52 bp, Artificial
  Synthetic oligonucleotide
aggaattactaactcggtttggatttgttcaaccggggctaggtaatatcat

SEQ ID NO: 200868 - DNA, 60 bp, Artificial
  Synthetic oligonucleotide
agactgatctgagcggtcaggccccagaggtagcagccgagatcggctataagttcacga

SEQ ID NO: 200869 - DNA, 54 bp, Artificial
  Synthetic oligonucleotide
aaggcaagtcaggtaaaagacctggtcaatagttggcttgacaaccacccggac

SEQ ID NO: 200870 - DNA, 59 bp, Artificial
  Synthetic oligonucleotide
aaggacgggctgaacggcattgaaatgtcagtagatctcattgagtagcgggggagacc

SEQ ID NO: 200871 - DNA, 59 bp, Artificial
  Synthetic oligonucleotide
ctctctttactgcatgaatttcagtaaagaggtatttataagtgtatacaggtgaaaga

SEQ ID NO: 200872 - DNA, 57 bp, Artificial
  Synthetic oligonucleotide
agtccgtccttgccatgataactactaccgccaactagttccctgcgtctaagtcca

SEQ ID NO: 200873 - DNA, 60 bp, Artificial
  Synthetic oligonucleotide
aagctagccatggaatacaatttgtacgttcacatgttgatgtaaccgatcctagcttga

SEQ ID NO: 200874 - DNA, 57 bp, Artificial
  Synthetic oligonucleotide
aagcgtttgtcgctgttatcccagtgcgccgagtagggcgggttcataacgacggca

SEQ ID NO: 200875 - DNA, 60 bp, Artificial
  Synthetic oligonucleotide
agacggcaacacaaccgctatcctgtatgcgcctgaaagcctaccagaggcacacccatt

SEQ ID NO: 200876 - DNA, 59 bp, Artificial
  Synthetic oligonucleotide
agtcctagacgggttgaaatggtcattctgaagaatcgaactggcaagacaggcggtca

SEQ ID NO: 200877 - DNA, 60 bp, Artificial
  Synthetic oligonucleotide
aagcggcttagaacgcaaatataagcgttctaagccgcttttatcagcataggttcatga

SEQ ID NO: 200878 - DNA, 59 bp, Artificial
  Synthetic oligonucleotide
agacattgttggatcgacacgtttggcaaaggcttgctaccgtggtactggcagccttg

SEQ ID NO: 200879 - DNA, 57 bp, Artificial
  Synthetic oligonucleotide
aagcggaatggaccgggtattggcaacgagcgatgaaattagattatgtgccggttg

SEQ ID NO: 200880 - DNA, 60 bp, Artificial
  Synthetic oligonucleotide
acatttgcttgattttattgaagttcatggtgctgaacatggtgttcaaaacatgagtga

SEQ ID NO: 200881 - DNA, 56 bp, Artificial
  Synthetic oligonucleotide
agcggaggagcaaccactccggccggaggaagtctatagcacgattgccgggggga

SEQ ID NO: 200882 - DNA, 56 bp, Artificial
  Synthetic oligonucleotide
ctctagcctttttatcgttggcgctagccttctaatacaaataatacccatttcga

SEQ ID NO: 200883 - DNA, 59 bp, Artificial
  Synthetic oligonucleotide
aacgacgtccatccgctcacaccaaccgcggactctctgaagctgtcttaggatttcgc

SEQ ID NO: 200884 - DNA, 58 bp, Artificial
  Synthetic oligonucleotide
aaccttataataccaagactagtcatatcgccagtagtaaacttgatcatactataac

SEQ ID NO: 200885 - DNA, 50 bp, Artificial
  Synthetic oligonucleotide
actttgaatcgattaacctcaaaatagaaaaaaggacatttttaatttaa

SEQ ID NO: 200886 - DNA, 55 bp, Artificial
  Synthetic oligonucleotide
aacctaagataatgtctcaagtcaaaagtattttaggagagtttggaaacaagca

SEQ ID NO: 200887 - DNA, 58 bp, Artificial
  Synthetic oligonucleotide
agcggccacttcgatttgacgacgtaagacttcattcagggtaatatctttgtctgaa

SEQ ID NO: 200888 - DNA, 58 bp, Artificial
  Synthetic oligonucleotide
actttccgttatggaatccgcccagttaacgtaatggtgcttagcagcagtgctcgcc

SEQ ID NO: 200889 - DNA, 52 bp, Artificial
  Synthetic oligonucleotide
aaccccgtttaactactttccctagttaatcggtagctcattagtgaattgc

SEQ ID NO: 200890 - DNA, 56 bp, Artificial
  Synthetic oligonucleotide
aacccataacgtcactcactcgcagtagcgtcgctttaccaacttgaaaaatcgta

SEQ ID NO: 200891 - DNA, 52 bp, Artificial
  Synthetic oligonucleotide
ataacattgcgcatttaattcgagcgggaaattgtttaaccccttctaaaat

SEQ ID NO: 200892 - DNA, 58 bp, Artificial
  Synthetic oligonucleotide
ataagggcagttatgttaaagttgcgcgtatcgttcctcgcacctacattaatcagac

SEQ ID NO: 200893 - DNA, 58 bp, Artificial
  Synthetic oligonucleotide
ctctaaaggcttctttagctgtctcaatccgaaccacccggacaatcaccctagcatg

SEQ ID NO: 200894 - DNA, 60 bp, Artificial
  Synthetic oligonucleotide
aaccatgatgtgatttagagctaaagcatcactaccaatcgttgacgcagaaagacctcg

SEQ ID NO: 200895 - DNA, 48 bp, Artificial
  Synthetic oligonucleotide
aaccaaggcgtttaataagcttacccgttataagaaagttaccaaaaa

SEQ ID NO: 200896 - DNA, 60 bp, Artificial
  Synthetic oligonucleotide
actttacctggccgaactagatatgcagtcaactgacgtctatttacgcggtgaatatgc

SEQ ID NO: 200897 - DNA, 59 bp, Artificial
  Synthetic oligonucleotide
ataatctggtaggcttgggtaatcatgatcaacgccgaacgcagaatcacaaaaatacc

SEQ ID NO: 200898 - DNA, 53 bp, Artificial
  Synthetic oligonucleotide
aacagtgttaaaacgaaggaatcccgtttccataagcggtatgtgttggttga

SEQ ID NO: 200899 - DNA, 54 bp, Artificial
  Synthetic oligonucleotide
accttaaccatagtttgtgttcgttttgaggcttcgttgagttcccgcaatgga

SEQ ID NO: 200900 - DNA, 58 bp, Artificial
  Synthetic oligonucleotide
aactcatacctgtacgcctggtccaaggataacccaagctacacggttggcatcaaga

SEQ ID NO: 200901 - DNA, 54 bp, Artificial
  Synthetic oligonucleotide
acctgggtaggcgcaactgtttgcaaaaaaatcgtccggcaacgtgacgcaatt

SEQ ID NO: 200902 - DNA, 60 bp, Artificial
  Synthetic oligonucleotide
agtgtcatgaacctatgctgataaaagcggcttagaacgcttatatttgcgttctaagcc

SEQ ID NO: 200903 - DNA, 53 bp, Artificial
  Synthetic oligonucleotide
aactaaaatgattggttaactagtaccctgaataaagtagttcgcacctgaac

SEQ ID NO: 200904 - DNA, 60 bp, Artificial
  Synthetic oligonucleotide
ctcgctagcgctcaggaaacggctaaatatcaagttaagtctgctgattacatgacggac

SEQ ID NO: 200905 - DNA, 58 bp, Artificial
  Synthetic oligonucleotide
aacgtggcgcactagcacaactggtcaatgaggggaataaatcttaccaagtaatggc

SEQ ID NO: 200906 - DNA, 58 bp, Artificial
  Synthetic oligonucleotide
acggttaagaatgcttatggtgcagaagagctaagaagttcattgcgagttttaacca

SEQ ID NO: 200907 - DNA, 52 bp, Artificial
  Synthetic oligonucleotide
aacgtaaaagtttaacggtaccagaatataaagccatgcgggaatctattaa

SEQ ID NO: 200908 - DNA, 60 bp, Artificial
  Synthetic oligonucleotide
agttacgtcacggctaacgacaatgcaaacacggtgtatcacctgacaacactagagatc

SEQ ID NO: 200909 - DNA, 60 bp, Artificial
  Synthetic oligonucleotide
agttagattgtaatagctattggcgattagaaatgcaattgcgaggatctaaaactataa

SEQ ID NO: 200910 - DNA, 55 bp, Artificial
  Synthetic oligonucleotide
agttattttaccggggatagcgtgaattatgttacgcaagtagaatggaccgatc

SEQ ID NO: 200911 - DNA, 59 bp, Artificial
  Synthetic oligonucleotide
agttcaggaaataattgctgatgagcgcgtttcaaatcgggctgttcgtaaggatgccg

SEQ ID NO: 200912 - DNA, 57 bp, Artificial
  Synthetic oligonucleotide
acccaaggcagtagccagataaccgctgccgctagggccactaaaccagccacccga

SEQ ID NO: 200913 - DNA, 56 bp, Artificial
  Synthetic oligonucleotide
aacgccttaggacgttacgaacataatctacatgtcttagagacccaagagctagg

SEQ ID NO: 200914 - DNA, 56 bp, Artificial
  Synthetic oligonucleotide
aacgccgagagtagttagaggaacgcctcttgcgagggtaggaagtcgccgtgcaa

SEQ ID NO: 200915 - DNA, 52 bp, Artificial
  Synthetic oligonucleotide
cttagctaatccggaaacgacgttagccaaaacgtattattttcctggtgaa

SEQ ID NO: 200916 - DNA, 58 bp, Artificial
  Synthetic oligonucleotide
ctccctaagttgctctgtagtcacattagagttggtatcaacgtgttttttgctccaa

SEQ ID NO: 200917 - DNA, 59 bp, Artificial
  Synthetic oligonucleotide
aacgcaaatataagcgttctaagccgtttttatcagcataggttcatggcacaagtgaa

SEQ ID NO: 200918 - DNA, 58 bp, Artificial
  Synthetic oligonucleotide
aattgatcgtgatagcttgcattcactattcccgtttagctgggaacagtaccccacc

SEQ ID NO: 200919 - DNA, 59 bp, Artificial
  Synthetic oligonucleotide
aattctacagttcaacatgacaccgttgaaccccttgctgcgcgcaaagctgtaaattc

SEQ ID NO: 200920 - DNA, 57 bp, Artificial
  Synthetic oligonucleotide
aattcgtattagtcagtagtcaccatcttaaacaaatcaagaatagcataattccgt

SEQ ID NO: 200921 - DNA, 55 bp, Artificial
  Synthetic oligonucleotide
agcaagtaaagctacaccgcaaaaagttaacttcatgaccaaatacgcgcgtggg

SEQ ID NO: 200922 - DNA, 58 bp, Artificial
  Synthetic oligonucleotide
aattagttcaagtgctgctaggatctcatcagtcgttacttggctaaaattggtcttt

SEQ ID NO: 200923 - DNA, 54 bp, Artificial
  Synthetic oligonucleotide
agcaagggtttgcggctctttttggccatattcaccgcgtaaatagacgtccgt

SEQ ID NO: 200924 - DNA, 50 bp, Artificial
  Synthetic oligonucleotide
agggtttaaaaaagacgtttcagcgatttttgctgatccgccttttttgg

SEQ ID NO: 200925 - DNA, 60 bp, Artificial
  Synthetic oligonucleotide
acagcttaccttcaaagagatctcagaggcgctaggatacagcagaagccaggctacagc

SEQ ID NO: 200926 - DNA, 59 bp, Artificial
  Synthetic oligonucleotide
acggaaacgtcagcggcagcaggggctagagagatagtgtttgtggtgttgagagaacg

SEQ ID NO: 200927 - DNA, 57 bp, Artificial
  Synthetic oligonucleotide
ctccccgccaaagattcgtcatatgattccctcacccccatagctataattagaaag

SEQ ID NO: 200928 - DNA, 51 bp, Artificial
  Synthetic oligonucleotide
agggtttcaacggtctcccgcgaaggtctattttttagactttcgctcgta

SEQ ID NO: 200929 - DNA, 60 bp, Artificial
  Synthetic oligonucleotide
acaggttaattggactgatttgtggcagaaggctcttagaagctcatataagccgattgt

SEQ ID NO: 200930 - DNA, 57 bp, Artificial
  Synthetic oligonucleotide
aatctggttggtttgggtaatcatgatcaacgtcgaacacagaatcacaaaaatacc

SEQ ID NO: 200931 - DNA, 60 bp, Artificial
  Synthetic oligonucleotide
aatctccgaatccccaaaagtgtatgaatatacgcggcatggtgcgctattttgctcact

SEQ ID NO: 200932 - DNA, 60 bp, Artificial
  Synthetic oligonucleotide
agccatgcgggaatctattaagcaggggcagcaaaagttagcagcggctgaaaatgaaac

SEQ ID NO: 200933 - DNA, 55 bp, Artificial
  Synthetic oligonucleotide
aggtggtgtttcacattactctcagttacgtttcacaaatgtttagaacacaaat

SEQ ID NO: 200934 - DNA, 59 bp, Artificial
  Synthetic oligonucleotide
agaggtaatgctcttctaaagtgcgcttaaataaccattgccagtggttaatcagtgct

SEQ ID NO: 200935 - DNA, 55 bp, Artificial
  Synthetic oligonucleotide
aggcttgggtccaccttccactaccctaatcgacacgacctgccaaactggacaa

SEQ ID NO: 200936 - DNA, 59 bp, Artificial
  Synthetic oligonucleotide
acgcaaaggtactggttctctgcaagctagtgcggaagaaactgctaagtatgaagtta

SEQ ID NO: 200937 - DNA, 55 bp, Artificial
  Synthetic oligonucleotide
acaccccagaacaagtaaccgcacagaaccaagatttacttagtcacttaggaga

SEQ ID NO: 200938 - DNA, 54 bp, Artificial
  Synthetic oligonucleotide
ctcataggagggtaaaaaatagacagccgggaaaaggacttccaacaagcgctc

SEQ ID NO: 200939 - DNA, 58 bp, Artificial
  Synthetic oligonucleotide
acacggcctcgactatctggacgaaaccacacagccaaatcttgtttgtggatttcac

SEQ ID NO: 200940 - DNA, 60 bp, Artificial
  Synthetic oligonucleotide
acaattatacatagaacgtcattatcacaaagtatcgttatcgcatgatattggtaaata

SEQ ID NO: 200941 - DNA, 56 bp, Artificial
  Synthetic oligonucleotide
acgcagttggattggtatagctggttaatttaaatcatttttgcgtatcaaaagta

SEQ ID NO: 200942 - DNA, 57 bp, Artificial
  Synthetic oligonucleotide
agcaggaccgtttgaatgcaggagttagcggagcagactttttgaagcgtccccgcg

SEQ ID NO: 200943 - DNA, 52 bp, Artificial
  Synthetic oligonucleotide
acaagtctggctcaacaaaacttacggtaaagtttctggctttggtaaagta

SEQ ID NO: 200944 - DNA, 55 bp, Artificial
  Synthetic oligonucleotide
agcagttaaaaaacgcttatgacagcttaaaaagcgcttttaactctctaactgc

SEQ ID NO: 200945 - DNA, 56 bp, Artificial
  Synthetic oligonucleotide
acgccaatcaaagaagaactcacgccactattccatggtctaaccgtccgcaaaaa

SEQ ID NO: 200946 - DNA, 58 bp, Artificial
  Synthetic oligonucleotide
acacttaaaggtagcattttagataagagagagcgcccgctaaagcggacgctctctc

SEQ ID NO: 200947 - DNA, 57 bp, Artificial
  Synthetic oligonucleotide
agggcaataatccggccagtcaaacggctaatcagacttatcagttagccaaaaagc

SEQ ID NO: 200948 - DNA, 58 bp, Artificial
  Synthetic oligonucleotide
acagacagaacatttacaacgtgcttaaagctgagcatattaaaccggacggcttcaa

SEQ ID NO: 200949 - DNA, 54 bp, Artificial
  Synthetic oligonucleotide
ctcataacttttagtagttttccgtgcttacagtaaggcttattcttaattgaa

SEQ ID NO: 200950 - DNA, 60 bp, Artificial
  Synthetic oligonucleotide
agcatcatctgcacaatggttaagataacaaacaagacaattgatgtccacaaaatcatt

SEQ ID NO: 200951 - DNA, 53 bp, Artificial
  Synthetic oligonucleotide
acgctcacgagtgattttaacgatcaattgaaagggaactacccaaacgtctt

SEQ ID NO: 200952 - DNA, 52 bp, Artificial
  Synthetic oligonucleotide
aatttcttcacgtgtagcaaaccctggattacgacaccttttgaccccaacg

SEQ ID NO: 200953 - DNA, 56 bp, Artificial
  Synthetic oligonucleotide
aattgggggataaagaagcccgtcattgcaaggatagaaggctagttccaataaga

SEQ ID NO: 200954 - DNA, 57 bp, Artificial
  Synthetic oligonucleotide
aattggctagtttaatgaatgagctacgaaataccctagttgtctttgcaactgacc

SEQ ID NO: 200955 - DNA, 59 bp, Artificial
  Synthetic oligonucleotide
aattgatgatttggagcaagctttggctgggtcccggcaaattagctatgggggcttgc

SEQ ID NO: 200956 - DNA, 52 bp, Artificial
  Synthetic oligonucleotide
aataccttacgttgatatccgagtttatcctaaagccttacacttactaaac

SEQ ID NO: 200957 - DNA, 58 bp, Artificial
  Synthetic oligonucleotide
agtagccaatggcaaatggagtgtgaatgtcccaaccggcaagaagttaaccgcaggc

SEQ ID NO: 200958 - DNA, 60 bp, Artificial
  Synthetic oligonucleotide
aataattatccatacgaaccaacgaacaatgccacagaatcgcgctctcagcaccaacaa

SEQ ID NO: 200959 - DNA, 59 bp, Artificial
  Synthetic oligonucleotide
agtaggatgggtaattttgttgactcttgatttaatcagaccagatacttgagccataa

SEQ ID NO: 200960 - DNA, 58 bp, Artificial
  Synthetic oligonucleotide
ctattgtagcttatcctgaaagtcttcctaaaaattggaaggacattatcagtcaaga

SEQ ID NO: 200961 - DNA, 59 bp, Artificial
  Synthetic oligonucleotide
aggcgggcttgtggtcgccattcaattctaacgccatcattgacaatcttaattaccaa

SEQ ID NO: 200962 - DNA, 57 bp, Artificial
  Synthetic oligonucleotide
agtaggcaatggcgacgggctcggtatcaccaccattcaggccaagaaaaagaccca

SEQ ID NO: 200963 - DNA, 58 bp, Artificial
  Synthetic oligonucleotide
aataacactgtgaatccaagcacaccaagcactaattgtaacaaccccaattaatcgc

SEQ ID NO: 200964 - DNA, 60 bp, Artificial
  Synthetic oligonucleotide
agtatattgggctataccttgcatggaggtctgccggattctgtgctatgctctaatcaa

SEQ ID NO: 200965 - DNA, 58 bp, Artificial
  Synthetic oligonucleotide
agagcccaagctttacgcagtaaagtatattgggctataccttgcatggaggttctcc

SEQ ID NO: 200966 - DNA, 51 bp, Artificial
  Synthetic oligonucleotide
aagtgccgttacgcgcctacaacgttaccggcttaaataaattacacctgg

SEQ ID NO: 200967 - DNA, 59 bp, Artificial
  Synthetic oligonucleotide
agtatttcgtttgtgcatcagctgggtgattagttcatctggtaaattacggaagtcta

SEQ ID NO: 200968 - DNA, 52 bp, Artificial
  Synthetic oligonucleotide
agacttcgggggctagaaaatgaaatcaagttcgatttattttgaccgattt

SEQ ID NO: 200969 - DNA, 56 bp, Artificial
  Synthetic oligonucleotide
agtcaactttatagttctacttgataaacagacaaaacctacttgataaacagaca

SEQ ID NO: 200970 - DNA, 60 bp, Artificial
  Synthetic oligonucleotide
acgaattaactttcgtctaaatgaacttgaatacgagaagctatcacagtcagcaagcac

SEQ ID NO: 200971 - DNA, 60 bp, Artificial
  Synthetic oligonucleotide
ctatggctccgattacatgttggcccatcttcgacagcttgccaaaacaactgctgacgg

SEQ ID NO: 200972 - DNA, 59 bp, Artificial
  Synthetic oligonucleotide
agccggttagcggagctaatgaaacaagtcgacaggtcaagtgagagccgccgctataa

SEQ ID NO: 200973 - DNA, 56 bp, Artificial
  Synthetic oligonucleotide
aggatgccgttgttttaactgaatgggttatcagctccgactcaacattttttgag

SEQ ID NO: 200974 - DNA, 60 bp, Artificial
  Synthetic oligonucleotide
aaggtagtacgcattgctgaagctgacttcaacaacgcttgtcaattgcatgctatcaac

SEQ ID NO: 200975 - DNA, 60 bp, Artificial
  Synthetic oligonucleotide
aggagaacgtcgtttcagcgaatgtccacaatgatgaaacaacccctcacatgcattttg

SEQ ID NO: 200976 - DNA, 57 bp, Artificial
  Synthetic oligonucleotide
acagtgttagtagcgcttgaatgttggtcaagagttaatgaacaaggtcaactaaaa

SEQ ID NO: 200977 - DNA, 60 bp, Artificial
  Synthetic oligonucleotide
agaggctgacaagctcaggagtcagaacagccagttacagctagaccacgcaaagactca

SEQ ID NO: 200978 - DNA, 56 bp, Artificial
  Synthetic oligonucleotide
agagctttaagggctccgatacctgaaagaattaatagcttgacgggcgctgttag

SEQ ID NO: 200979 - DNA, 60 bp, Artificial
  Synthetic oligonucleotide
aggcgtttagtgaacgagtaacccgcgctgcactgggcgaaacatgcaacttgagatgca

SEQ ID NO: 200980 - DNA, 60 bp, Artificial
  Synthetic oligonucleotide
aatccaatcagcaaccaagccgaatgttacatgctggtaaaatgtacaattccgctctgg

SEQ ID NO: 200981 - DNA, 56 bp, Artificial
  Synthetic oligonucleotide
aatcacccttgggtaataactcccggtgctcgtcttgcttatagtcattggatcct

SEQ ID NO: 200982 - DNA, 58 bp, Artificial
  Synthetic oligonucleotide
ctatcagggtgcctgtgcaatgagacgaagtcgaatggaaccctcccgcttgcgggtt

SEQ ID NO: 200983 - DNA, 53 bp, Artificial
  Synthetic oligonucleotide
agtaaaatcacttaattcagcctgagtaagttttttagctacgcggtactgtt

SEQ ID NO: 200984 - DNA, 58 bp, Artificial
  Synthetic oligonucleotide
agtaaggcccaggtagtgatgcgactaatcttcggaacatatttatcttcaaaccagc

SEQ ID NO: 200985 - DNA, 59 bp, Artificial
  Synthetic oligonucleotide
aatataaagccatgcgggaatctattaagcaggggcagcaaaagttagcagcggttgaa

SEQ ID NO: 200986 - DNA, 54 bp, Artificial
  Synthetic oligonucleotide
aatagttaataaagttgttacgccaaagtctggtttactgaggatatattttga

SEQ ID NO: 200987 - DNA, 60 bp, Artificial
  Synthetic oligonucleotide
acatattcttcgacttttttatgatctcttagccattgagacagtatggttaggctatct

SEQ ID NO: 200988 - DNA, 60 bp, Artificial
  Synthetic oligonucleotide
aatagtgcagttcccactcaagttccaaatacaaatagctatgataaaactcaacttgca

SEQ ID NO: 200989 - DNA, 60 bp, Artificial
  Synthetic oligonucleotide
agtacgtgttcatccaaacttgactttcttccgtgcacataattatagagacggatcaca

SEQ ID NO: 200990 - DNA, 60 bp, Artificial
  Synthetic oligonucleotide
aatagtcccagattaactgctcactcgatgagacatacagctgcaacgctgagtctgtta

SEQ ID NO: 200991 - DNA, 56 bp, Artificial
  Synthetic oligonucleotide
acgaattaagccgatactccgatcatggtgaacgacttgttaaggacctcgaaggc

SEQ ID NO: 200992 - DNA, 58 bp, Artificial
  Synthetic oligonucleotide
aggcggttaagcagtaccaagcactgattactcagattaccttaatgggacggtctgc

SEQ ID NO: 200993 - DNA, 55 bp, Artificial
  Synthetic oligonucleotide
ctatacggggacatagactgtttttttgatatactaagtcagtcgctacgccttt

SEQ ID NO: 200994 - DNA, 60 bp, Artificial
  Synthetic oligonucleotide
aatacgatgagggacgcggcaagctagtcatcgcttatgtattcgcttgggaagcaagcg

SEQ ID NO: 200995 - DNA, 56 bp, Artificial
  Synthetic oligonucleotide
actaaccatttcaaaacggatattgcggcttatattaacgagcataaaaccagtca

SEQ ID NO: 200996 - DNA, 55 bp, Artificial
  Synthetic oligonucleotide
atatgtttatcctcctaagtttgaggacaaaccggtacatgttataatacttcta

SEQ ID NO: 200997 - DNA, 53 bp, Artificial
  Synthetic oligonucleotide
aaactaaaagcaataacttgcaataccggtcaagtccaaaatgttggtgtaaa

SEQ ID NO: 200998 - DNA, 60 bp, Artificial
  Synthetic oligonucleotide
atcaaagggatacgaacactgctttgatttatgctttgcagtcagtggaaggtatggata

SEQ ID NO: 200999 - DNA, 56 bp, Artificial
  Synthetic oligonucleotide
actagacatagtttaaagcttgagttagcaagcgtcaagcccttggctttagtaaa

SEQ ID NO: 201000 - DNA, 60 bp, Artificial
  Synthetic oligonucleotide
atcaatcacattgcgaaggatccaatgactataagcaagacgagcactgggagttatcac

SEQ ID NO: 201001 - DNA, 59 bp, Artificial
  Synthetic oligonucleotide
aaagttagtcagaacttgactggcgtgcgtggctgccgaattagcattaaccactttca

SEQ ID NO: 201002 - DNA, 56 bp, Artificial
  Synthetic oligonucleotide
atcagctagtagcaaaaaaacaacaggaggtcgatcaggacccgaaactcgccaag

SEQ ID NO: 201003 - DNA, 60 bp, Artificial
  Synthetic oligonucleotide
actgacagccggttagcggagctaatgaaacaagtcgacaggtcaagtgagagccgccgc

SEQ ID NO: 201004 - DNA, 52 bp, Artificial
  Synthetic oligonucleotide
ctagtcttgtttatttaagtttagcacgaattaaaaggctaaatatgatttt

SEQ ID NO: 201005 - DNA, 57 bp, Artificial
  Synthetic oligonucleotide
aaatcatttgaacaaatggacgaaatggcaagagctttaagggcaccgattcctgaa

SEQ ID NO: 201006 - DNA, 60 bp, Artificial
  Synthetic oligonucleotide
atcagctccgactcaacattttttgaggggctgtcgcgtgatgagactaagcaattcttc

SEQ ID NO: 201007 - DNA, 56 bp, Artificial
  Synthetic oligonucleotide
aaacctcccgtgagtgtcgttcgtgaccccgcttgcagttaacaacataggtatgc

SEQ ID NO: 201008 - DNA, 58 bp, Artificial
  Synthetic oligonucleotide
atcatagcaatacgactttcgataactttagtatccatgacaatttcgcgtgttaacc

SEQ ID NO: 201009 - DNA, 53 bp, Artificial
  Synthetic oligonucleotide
aaacctacttgataaacagacaaaacctacttgataaacttctataagccttg

SEQ ID NO: 201010 - DNA, 49 bp, Artificial
  Synthetic oligonucleotide
aaacaggtcggttcttgtttttaacgttgacggtaaagaatactacagg

SEQ ID NO: 201011 - DNA, 59 bp, Artificial
  Synthetic oligonucleotide
aaattggtgatataagcgacactgagtagttcacatttgtaaggtggtttagacgcgca

SEQ ID NO: 201012 - DNA, 53 bp, Artificial
  Synthetic oligonucleotide
aaaggacgtaaatgaacttaaaacggctctaagcgcacgagaaagccgtatac

SEQ ID NO: 201013 - DNA, 55 bp, Artificial
  Synthetic oligonucleotide
aaagctattggagtaagcctgcgaacgttgaatctagggttattcgcccaattaa

SEQ ID NO: 201014 - DNA, 53 bp, Artificial
  Synthetic oligonucleotide
aaagctaacgtgattaatttaatccaacgatcaaaggtcattacttaccaccc

SEQ ID NO: 201015 - DNA, 55 bp, Artificial
  Synthetic oligonucleotide
ctagagtaactcactgacgttcgtaactttcgaatcactattgtaaattgggtat

SEQ ID NO: 201016 - DNA, 60 bp, Artificial
  Synthetic oligonucleotide
aaaggctgagcggtctcctaatgtacgactgactcagaccatttagagctggtcaagaat

SEQ ID NO: 201017 - DNA, 55 bp, Artificial
  Synthetic oligonucleotide
agctaatgcgggttgtgttgcctgtaacaccaggtgtaatttatttaagccggta

SEQ ID NO: 201018 - DNA, 55 bp, Artificial
  Synthetic oligonucleotide
aaaggtccatagccaccaccccctctctatcacgacaaggggacgaacgacaata

SEQ ID NO: 201019 - DNA, 50 bp, Artificial
  Synthetic oligonucleotide
aaagcgaaagcccaacaacctatttgcccacaataggaaaccctccccgt

SEQ ID NO: 201020 - DNA, 56 bp, Artificial
  Synthetic oligonucleotide
atactacggtaatggggttacttgtggcaaacattcctgctctgttgactggggta

SEQ ID NO: 201021 - DNA, 56 bp, Artificial
  Synthetic oligonucleotide
agcgggttaattttgtacttcgcattagaagttaagtgcaagactgcgccacctaa

SEQ ID NO: 201022 - DNA, 60 bp, Artificial
  Synthetic oligonucleotide
aaagccttgcgtatcaagggattacactagatttcagcttggcgcttgatacagtccgaa

SEQ ID NO: 201023 - DNA, 58 bp, Artificial
  Synthetic oligonucleotide
atatcacagccggaacgctagccacgaataggcgaccgaggtacttgagcggcaacgg

SEQ ID NO: 201024 - DNA, 58 bp, Artificial
  Synthetic oligonucleotide
aaagcacacgataggtcaccaaaaagcacacgataggtcaccaaaaagcacacgatag

SEQ ID NO: 201025 - DNA, 57 bp, Artificial
  Synthetic oligonucleotide
actggtaatgctagaaatggtgcgtatttccgtaaaattgatacccagtttggatca

SEQ ID NO: 201026 - DNA, 60 bp, Artificial
  Synthetic oligonucleotide
cttagagtaactgttacgctgaccatagattgcttgctgtgccttgtgttcacgcatttt

SEQ ID NO: 201027 - DNA, 57 bp, Artificial
  Synthetic oligonucleotide
ctagaagagtcaagcaagccactcaatttacgaacgtgctcttttaatcgatggttt

SEQ ID NO: 201028 - DNA, 60 bp, Artificial
  Synthetic oligonucleotide
aaagattgtggtgaagtattacaatttgctataggcaaggatggaatgaaactgtatcaa

SEQ ID NO: 201029 - DNA, 53 bp, Artificial
  Synthetic oligonucleotide
actggaatactaaacttattgaccttggattaattcgtcgacttaaaggacta

SEQ ID NO: 201030 - DNA, 53 bp, Artificial
  Synthetic oligonucleotide
aaactctttaccatgatcaacagtaatggattttacttggggaccgaaggccc

SEQ ID NO: 201031 - DNA, 54 bp, Artificial
  Synthetic oligonucleotide
atatgaccctatctctgatgtaactactttaaccaaacgcttaaccaaattagg

SEQ ID NO: 201032 - DNA, 60 bp, Artificial
  Synthetic oligonucleotide
aaagtctgcaaattttctagcacgtcctaaatgagccatataagagcgatcagagtagat

SEQ ID NO: 201033 - DNA, 55 bp, Artificial
  Synthetic oligonucleotide
agcgtaagaatttatcagtacccgaatacaaagctatgcgggaagaattgaaaaa

SEQ ID NO: 201034 - DNA, 51 bp, Artificial
  Synthetic oligonucleotide
aaaaccgagtactagctggtagtcaacggtaccggaacgaccaacgggagc

SEQ ID NO: 201035 - DNA, 60 bp, Artificial
  Synthetic oligonucleotide
aacacactttctccattagtcgccatttcagaatatgcttacacggagtgtactggtgca

SEQ ID NO: 201036 - DNA, 60 bp, Artificial
  Synthetic oligonucleotide
actctgaggcgttagaagcggcgattcatcatgcgttagctagttatcgactggatgtag

SEQ ID NO: 201037 - DNA, 57 bp, Artificial
  Synthetic oligonucleotide
aacaaagtttgtacgctatctaatcagtttagcaaaagctaatcaaaatggtactca

SEQ ID NO: 201038 - DNA, 55 bp, Artificial
  Synthetic oligonucleotide
gcgttagcgcccgattaaatgtggcttgccactcctttttaggcaacgaacgaag

SEQ ID NO: 201039 - DNA, 58 bp, Artificial
  Synthetic oligonucleotide
accctggttgaaattcaagcagtccaatccgcactgaaccatcgtcccagacgtattc

SEQ ID NO: 201040 - DNA, 58 bp, Artificial
  Synthetic oligonucleotide
atcgactacattttgtctgtttatcgactacattttgtctgtttatcgactacattta

SEQ ID NO: 201041 - DNA, 57 bp, Artificial
  Synthetic oligonucleotide
aaaaggtagtgtgactaattcagaggaaagtaattattcttccgatatcactgccaa

SEQ ID NO: 201042 - DNA, 60 bp, Artificial
  Synthetic oligonucleotide
agctagctcgctagctctcgcgtagctctctcgtcacttagcctaaaagtggctaaaatg

SEQ ID NO: 201043 - DNA, 57 bp, Artificial
  Synthetic oligonucleotide
aaaacatcaggggcgttattcctattacgctaactcaatatttgcataaagctcaaa

SEQ ID NO: 201044 - DNA, 56 bp, Artificial
  Synthetic oligonucleotide
atccttattgctaaaatgatacccatacgtttcccagtcacgggctaattgcattt

SEQ ID NO: 201045 - DNA, 51 bp, Artificial
  Synthetic oligonucleotide
aaaaggtcacatgggcaattcttcgaaagttaataaagacggtacgaaacg

SEQ ID NO: 201046 - DNA, 55 bp, Artificial
  Synthetic oligonucleotide
aaatttcgcctaacaataaggcaaccaatggttactggaccgcttggttcactga

SEQ ID NO: 201047 - DNA, 54 bp, Artificial
  Synthetic oligonucleotide
aaaaatttgttgttaaatatcattcgaaaagaacacttagttaatgtgatacat

SEQ ID NO: 201048 - DNA, 54 bp, Artificial
  Synthetic oligonucleotide
aaaaagtacataacgtgccagtaaaaagtacatgacgtgccagtaaaaagtaca

SEQ ID NO: 201049 - DNA, 58 bp, Artificial
  Synthetic oligonucleotide
gcgtggttagcatggactctaaaggcttctttagctgtctcaatccgaaccaccccga

SEQ ID NO: 201050 - DNA, 60 bp, Artificial
  Synthetic oligonucleotide
aaacagaatggactagatattggcaacgagcgatgaaattagcttatgtgccggttgtga

SEQ ID NO: 201051 - DNA, 60 bp, Artificial
  Synthetic oligonucleotide
atccggatctggctaagtaccatgtcagagtgaccaaatcaaatatcgttgaggattggt

SEQ ID NO: 201052 - DNA, 60 bp, Artificial
  Synthetic oligonucleotide
aaaaaataagcatgtgtatgctaaaacagatattgtttatcttaatgattttgatattga

SEQ ID NO: 201053 - DNA, 60 bp, Artificial
  Synthetic oligonucleotide
atcctaagacagcttcagagagtccgcggttggtgtgagcggatggacgtcgtttccaga

SEQ ID NO: 201054 - DNA, 60 bp, Artificial
  Synthetic oligonucleotide
aaaagtcatatgaggacatgaagtctcagttgagcgtgaaggataatcaaatatctacct

SEQ ID NO: 201055 - DNA, 54 bp, Artificial
  Synthetic oligonucleotide
aaaaagatctgtaataggagtattcaggacccacgcaattttaaatcctagttc

SEQ ID NO: 201056 - DNA, 59 bp, Artificial
  Synthetic oligonucleotide
gtgtctggatttaatgaatagtaatgccattttgacttcttacttacgatgaccaatcc

SEQ ID NO: 201057 - DNA, 52 bp, Artificial
  Synthetic oligonucleotide
ctattcgtttacctggaaacccgaaaagaaagacgctaacgacttctcacaa

SEQ ID NO: 201058 - DNA, 57 bp, Artificial
  Synthetic oligonucleotide
cagcgtcaatcctatcttaaggagactctaaatagtaaagtagccgcccaaatgacc

SEQ ID NO: 201059 - DNA, 53 bp, Artificial
  Synthetic oligonucleotide
ggtacaccctattgtacttttagtggtgtttcccttttgtccactctttgaca

SEQ ID NO: 201060 - DNA, 60 bp, Artificial
  Synthetic oligonucleotide
gcgtgagtgttctctcagagctgactaaacaggctgaagtccctgttctggtcatctcat

SEQ ID NO: 201061 - DNA, 53 bp, Artificial
  Synthetic oligonucleotide
ccaaaagtagttgggggatcgccccctgcgaggataggacgttgccacgcggt

SEQ ID NO: 201062 - DNA, 59 bp, Artificial
  Synthetic oligonucleotide
gaagttgctacctatggaccttgatcaatccacttatttgtatagtaatatgctattcc

SEQ ID NO: 201063 - DNA, 56 bp, Artificial
  Synthetic oligonucleotide
cggtcatgatttgcaaacgattgtaatattccttaattttgctagggtatcctact

SEQ ID NO: 201064 - DNA, 59 bp, Artificial
  Synthetic oligonucleotide
acgaatgacacgttcattactcttagatccggataaacagactagtagccgatcagtac

SEQ ID NO: 201065 - DNA, 55 bp, Artificial
  Synthetic oligonucleotide
aagattcagcaggattttttaagttacttttgaatgttacttgatcgtaaatgta

SEQ ID NO: 201066 - DNA, 59 bp, Artificial
  Synthetic oligonucleotide
tccttatacttcaactgctgacctaactgtgatcaaaggcttattaactagtaatggta

SEQ ID NO: 201067 - DNA, 59 bp, Artificial
  Synthetic oligonucleotide
tcctgtggagctactactgtcagtgcagcaaggtttcgcacttatcgctatcatacgcc

SEQ ID NO: 201068 - DNA, 59 bp, Artificial
  Synthetic oligonucleotide
gctcccacatcatcaaaggaaaatctattacgactaacaactgtatatcctagtaatac

SEQ ID NO: 201069 - DNA, 57 bp, Artificial
  Synthetic oligonucleotide
gaggcgttttagctttgcctggcagaattttgcccatgaccggggctgaggataccc

SEQ ID NO: 201070 - DNA, 59 bp, Artificial
  Synthetic oligonucleotide
gcaccaacaaatccatccaacaacaataaattaatgcaaaaaagcttgctaccgtagca

SEQ ID NO: 201071 - DNA, 56 bp, Artificial
  Synthetic oligonucleotide
gcgggttcataacgacggcatcaaataagtaaggctcgtcaacgggccaatcttta

SEQ ID NO: 201072 - DNA, 53 bp, Artificial
  Synthetic oligonucleotide
gcgttagttaaaacagaagtggataacgtcaaagatttcctaaacaagttatc

SEQ ID NO: 201073 - DNA, 57 bp, Artificial
  Synthetic oligonucleotide
atcgttaagtatgtgtacttcgatatgtgctcggtcaagttacttagtaacccttca

SEQ ID NO: 201074 - DNA, 59 bp, Artificial
  Synthetic oligonucleotide
gtcatacattcctcgtggataaatcgaccaatcccaatctgtcgtctcaatgccatctg

SEQ ID NO: 201075 - DNA, 59 bp, Artificial
  Synthetic oligonucleotide
tccgagtccatgcttgctccctttgcacgggtcacagtttgtcccattcagtgacgttt

SEQ ID NO: 201076 - DNA, 54 bp, Artificial
  Synthetic oligonucleotide
cccggttctggaattggcttaaagttgcgcccagtacgttccagcgtccacaaa

SEQ ID NO: 201077 - DNA, 57 bp, Artificial
  Synthetic oligonucleotide
taacggtgcaacggaacctttcgtggatcacataacgtctcgcttcccacagtggac

SEQ ID NO: 201078 - DNA, 53 bp, Artificial
  Synthetic oligonucleotide
ctgacggtcaatcttggtcggattttagcgttaacgaccaattggactttaaa

SEQ ID NO: 201079 - DNA, 54 bp, Artificial
  Synthetic oligonucleotide
ctgataggtaactttaaggcctataagttccaaataacgcctataaaagagcaa

SEQ ID NO: 201080 - DNA, 57 bp, Artificial
  Synthetic oligonucleotide
taccaattcacggaatggttatcgagtttgtcagcttaccacacaagtagggacact

SEQ ID NO: 201081 - DNA, 57 bp, Artificial
  Synthetic oligonucleotide
aaaccacggctggtccgtttgcttgacggggtagtgcgccttgttgtcatgatgaaa

SEQ ID NO: 201082 - DNA, 55 bp, Artificial
  Synthetic oligonucleotide
gcgggctagccgcttaccgttcaccaatcttaggcattagacccccgtcacccca

SEQ ID NO: 201083 - DNA, 58 bp, Artificial
  Synthetic oligonucleotide
tacctcggtcgcctattcgtggctagcgttccggctgtgatatcgtttatcgcccttg

SEQ ID NO: 201084 - DNA, 59 bp, Artificial
  Synthetic oligonucleotide
gtactgtctgcgccattggtaagccgtgtcctggcttgtaatctcgggcactagcttat

SEQ ID NO: 201085 - DNA, 56 bp, Artificial
  Synthetic oligonucleotide
tacggactttttagatttggatgagatgcctaagcgcgtgactttcgtgggtgggg

SEQ ID NO: 201086 - DNA, 59 bp, Artificial
  Synthetic oligonucleotide
gccgctcaagtacctcggtcgcctattcgtggctagcgttccggctgtgatatcgttta

SEQ ID NO: 201087 - DNA, 55 bp, Artificial
  Synthetic oligonucleotide
gcgatctgttaggaattaattatctagggacccatacgatgcgtaaaaccggggc

SEQ ID NO: 201088 - DNA, 59 bp, Artificial
  Synthetic oligonucleotide
ctcggtgccacagcaccaacgcgaatccggcaaggcaattgggctcaatcgttatcagc

SEQ ID NO: 201089 - DNA, 59 bp, Artificial
  Synthetic oligonucleotide
ccgactgtgtatgagcactctcacctcggccattaaaaatcggcgtgcgtcctagccgc

SEQ ID NO: 201090 - DNA, 56 bp, Artificial
  Synthetic oligonucleotide
cgggtgttgcgctcgatatttagccccagctagtttattccagtaaataccgaaca

SEQ ID NO: 201091 - DNA, 57 bp, Artificial
  Synthetic oligonucleotide
agtagccagataaccgctgccgctagggccactaaaccagccacccgaccaactgcg

SEQ ID NO: 201092 - DNA, 59 bp, Artificial
  Synthetic oligonucleotide
ttgaccttccgcacttgcggctagcttcaaaagctgatcctgtgagaaaccggcttgtg

SEQ ID NO: 201093 - DNA, 60 bp, Artificial
  Synthetic oligonucleotide
gcggctgttaccgcagatgatataaatggcgttcgtactgggttaatgggccccgcagca

SEQ ID NO: 201094 - DNA, 56 bp, Artificial
  Synthetic oligonucleotide
tagccagtgcccccatcttaccgttcatggtgagtcgttgaatccgggcaaaggtt

SEQ ID NO: 201095 - DNA, 59 bp, Artificial
  Synthetic oligonucleotide
ctaactatggctgtcaaacatataatcactgtggccatttgcaaataacggagaattct

SEQ ID NO: 201096 - DNA, 57 bp, Artificial
  Synthetic oligonucleotide
tagggaacagccttccatgactttccttctggaatattgttaacgatttcctgactc

SEQ ID NO: 201097 - DNA, 55 bp, Artificial
  Synthetic oligonucleotide
gccagggttgtccggaagcttatcgcttggtgtcttcggatcggttggtgttacc

SEQ ID NO: 201098 - DNA, 55 bp, Artificial
  Synthetic oligonucleotide
gcggagaagttcttcaatttgcgaaaactgataatggtttaaagttatatcaaac

SEQ ID NO: 201099 - DNA, 59 bp, Artificial
  Synthetic oligonucleotide
ctcatgatacagcttcggcggttattgggacaccatgtgaaggacaacattgggcatac

SEQ ID NO: 201100 - DNA, 59 bp, Artificial
  Synthetic oligonucleotide
gttatgcgacaccaactgtctttaggtcagctgttaacttataatgctttgctcgctta

SEQ ID NO: 201101 - DNA, 55 bp, Artificial
  Synthetic oligonucleotide
ccttcctagcccataacgatacgcaagacgcccagaccgtccaaaccaagttagc

SEQ ID NO: 201102 - DNA, 59 bp, Artificial
  Synthetic oligonucleotide
gtgttagtaagcaaaccatcagatatcattaccgcaatataccggctaaatatgtggta

SEQ ID NO: 201103 - DNA, 55 bp, Artificial
  Synthetic oligonucleotide
tatggaccatggaccgtaggtcgttgggaaagctttacagccccagaacaagaag

SEQ ID NO: 201104 - DNA, 54 bp, Artificial
  Synthetic oligonucleotide
gcggacacggaactggacgtttgttttataccctgagagtgctacgaagggttg

SEQ ID NO: 201105 - DNA, 57 bp, Artificial
  Synthetic oligonucleotide
ggacaagccttagggacaatggcatcttcctttacggcaggcaacttgctcgggcct

SEQ ID NO: 201106 - DNA, 58 bp, Artificial
  Synthetic oligonucleotide
aaattgcgcagtggggtttctgcgtgagttcaaatcgatgtccgccctgttccagcgt

SEQ ID NO: 201107 - DNA, 58 bp, Artificial
  Synthetic oligonucleotide
cagcaattcaaagtaaagatctaactaaggctctagttaatatcaccgagaacttaga

SEQ ID NO: 201108 - DNA, 55 bp, Artificial
  Synthetic oligonucleotide
gatactagcaagataaatcgtcgtttagatagtataactttacccgtagctcgtt

SEQ ID NO: 201109 - DNA, 56 bp, Artificial
  Synthetic oligonucleotide
cacatgacattaggggttgtggggaaactttgcgttttcgtaagatcaataatcag

SEQ ID NO: 201110 - DNA, 59 bp, Artificial
  Synthetic oligonucleotide
gatacttatcctgatagtgcctataaaatgtctgacgattgatcaaggctttattagag

SEQ ID NO: 201111 - DNA, 59 bp, Artificial
  Synthetic oligonucleotide
tgctaatgttggatttcgcgtaaatattcaacatttcgaccccagcgtgctatcacgac

SEQ ID NO: 201112 - DNA, 59 bp, Artificial
  Synthetic oligonucleotide
cgtaatggtgcttagcagcagtgctcgccccacctggttcacaacctaccactttgtga

SEQ ID NO: 201113 - DNA, 54 bp, Artificial
  Synthetic oligonucleotide
aaagtccagtcgttatctccttcggactttaactgctttgaatgttggctttaa

SEQ ID NO: 201114 - DNA, 59 bp, Artificial
  Synthetic oligonucleotide
gatactacaccaatgatggctatcagctatcgctggttgataccgaatatgtggcccaa

SEQ ID NO: 201115 - DNA, 60 bp, Artificial
  Synthetic oligonucleotide
gcgctcctcggggactaaccgagacagtctgcaggatatgctcctgtagcccaacagatt

SEQ ID NO: 201116 - DNA, 59 bp, Artificial
  Synthetic oligonucleotide
tgttcattgcttcagttgcggcgtgtcctatgatcgtttgattgttgggctcttattaa

SEQ ID NO: 201117 - DNA, 56 bp, Artificial
  Synthetic oligonucleotide
aaagtattgccccaggtagcgttggtattgctggagcccagacggggatgtatccg

SEQ ID NO: 201118 - DNA, 59 bp, Artificial
  Synthetic oligonucleotide
caattgccattaccagtcattgttcatgtattcaagaaaaataagttaccacactacta

SEQ ID NO: 201119 - DNA, 55 bp, Artificial
  Synthetic oligonucleotide
aacgtggataaagcacgttagcgaccttgccctcccgacacagcctaggacgtct

SEQ ID NO: 201120 - DNA, 56 bp, Artificial
  Synthetic oligonucleotide
aatttgatagaaattcttgctacgtaagttattaagtatttctgctcgcttttgag

SEQ ID NO: 201121 - DNA, 58 bp, Artificial
  Synthetic oligonucleotide
ggtgattatttacaaatgttgcactataagaaatcccatcgagttaaagagtgtggtg

SEQ ID NO: 201122 - DNA, 58 bp, Artificial
  Synthetic oligonucleotide
cgcctgaagcgcgcatgcacattaatttacggccttttctgtcggctaggcttcccca

SEQ ID NO: 201123 - DNA, 58 bp, Artificial
  Synthetic oligonucleotide
tagcacatttgcgtcacgaagctcgcacaaatcttgaaggcacaactgcgctgggact

SEQ ID NO: 201124 - DNA, 55 bp, Artificial
  Synthetic oligonucleotide
ggtgaatttaaacaactactcgcacaagaaacacgttttcgtgaagccttgtatg

SEQ ID NO: 201125 - DNA, 53 bp, Artificial
  Synthetic oligonucleotide
gtcaagctggttcagcttgtcaggtttgggtgaaacccaaggtcttacttttt

SEQ ID NO: 201126 - DNA, 60 bp, Artificial
  Synthetic oligonucleotide
gcgcactgctcatatgtatacgcagtgtacatataagtgcgcccttagtctactaaggga

SEQ ID NO: 201127 - DNA, 55 bp, Artificial
  Synthetic oligonucleotide
gggtggtttccattgtcaaatatctttgatttcttaaagttattggcgatcttct

SEQ ID NO: 201128 - DNA, 58 bp, Artificial
  Synthetic oligonucleotide
atgtcagcaagcaacagcgactgaacgaagccaagtttaatatcgagcacaacggcga

SEQ ID NO: 201129 - DNA, 58 bp, Artificial
  Synthetic oligonucleotide
tgagtaacgtatcttgaacctctttgagaacatttgaatctttgattggtaagacaac

SEQ ID NO: 201130 - DNA, 58 bp, Artificial
  Synthetic oligonucleotide
cggcgttcaatagactgcatagttccttaacttcaggcctttcacaatcatagaaagt

SEQ ID NO: 201131 - DNA, 55 bp, Artificial
  Synthetic oligonucleotide
taccgtttgtcaaatgaaagacagtatcgaccaaactttgactaaagtaacagac

SEQ ID NO: 201132 - DNA, 58 bp, Artificial
  Synthetic oligonucleotide
gcagtatcttgaactgtcaagtaaccctgtattgtcttagtagatttatcactaaagg

SEQ ID NO: 201133 - DNA, 58 bp, Artificial
  Synthetic oligonucleotide
gtgcaatttggatttgtcaagcagctatgccgtacttacggacacaaggatcaggtca

SEQ ID NO: 201134 - DNA, 53 bp, Artificial
  Synthetic oligonucleotide
gataatacggttgctaaatggaaattagtacctttacaagactttacggccaa

SEQ ID NO: 201135 - DNA, 58 bp, Artificial
  Synthetic oligonucleotide
ctggcttaggattgttaaaattaaatcctaacttagtcacatgtgaagacgcatcttc

SEQ ID NO: 201136 - DNA, 56 bp, Artificial
  Synthetic oligonucleotide
caaatcgttacccgtatgttgttgtattggacgaatatccgtcatttatcttgagt

SEQ ID NO: 201137 - DNA, 60 bp, Artificial
  Synthetic oligonucleotide
cttacgcacactattaatgagccttcctgactgctgactacgtgacactcgcccccagag

SEQ ID NO: 201138 - DNA, 60 bp, Artificial
  Synthetic oligonucleotide
gcgatgttagagcggctattaaagcttctggcttgaagcaatatgaggtagctactttga

SEQ ID NO: 201139 - DNA, 54 bp, Artificial
  Synthetic oligonucleotide
ctttggccgagattttacgtaccgttaatatggtagatattgaaatagtaacta

SEQ ID NO: 201140 - DNA, 58 bp, Artificial
  Synthetic oligonucleotide
tatgtcggctactgaaacagaggccacaaatgcgcgctgcttaggtcacgatccgtta

SEQ ID NO: 201141 - DNA, 56 bp, Artificial
  Synthetic oligonucleotide
tatcagcaacagtcgagtttgcggtcggtttaacgtcctctaccgcttgggacgga

SEQ ID NO: 201142 - DNA, 58 bp, Artificial
  Synthetic oligonucleotide
ggccgatttctggcaggctggagaaaaattaatcggatgtagcaagaagttagttatc

SEQ ID NO: 201143 - DNA, 58 bp, Artificial
  Synthetic oligonucleotide
caaagcgcgattctgaatccatcccacctggcaaattgcgtgaaccaagcccacggct

SEQ ID NO: 201144 - DNA, 58 bp, Artificial
  Synthetic oligonucleotide
gagctcgcagattttgctccgcgttaactgaagctagcgctgcagcaccaagttgtgc

SEQ ID NO: 201145 - DNA, 58 bp, Artificial
  Synthetic oligonucleotide
gggagggtcaaagtgtgcgtcatgtgtcagtctatgccactaagttagtggccgacaa

SEQ ID NO: 201146 - DNA, 58 bp, Artificial
  Synthetic oligonucleotide
tataagagcggcgttcagttagctataccagtagaggctgagcccggaaaaatggtaa

SEQ ID NO: 201147 - DNA, 58 bp, Artificial
  Synthetic oligonucleotide
tattggcatgagacactactttcattttgaactgggtatagttaatctgagttgacgc

SEQ ID NO: 201148 - DNA, 54 bp, Artificial
  Synthetic oligonucleotide
taggtttattactgatcgacaaatcagttactcctcaaaaaaataacattaact

SEQ ID NO: 201149 - DNA, 60 bp, Artificial
  Synthetic oligonucleotide
gcgatgccaagggcgataaacgatatcacagccggaacgctagccacgaataggcgaccg

SEQ ID NO: 201150 - DNA, 58 bp, Artificial
  Synthetic oligonucleotide
ggtgcgactctaccagatgaacaagcgattcgcttaggcgtgattcgaattctatttg

SEQ ID NO: 201151 - DNA, 58 bp, Artificial
  Synthetic oligonucleotide
cgctaggctcgcctgcgtgagtagtaacgatatcggcgttgtgaacttgctcgaccgc

SEQ ID NO: 201152 - DNA, 51 bp, Artificial
  Synthetic oligonucleotide
atcaactctaaccgttccgtttttcgcactaaaaaagtggactaactacta

SEQ ID NO: 201153 - DNA, 57 bp, Artificial
  Synthetic oligonucleotide
gacgttaagaattaactactaacgatagacacactatttagttgatatagtctcggc

SEQ ID NO: 201154 - DNA, 58 bp, Artificial
  Synthetic oligonucleotide
gattgggaaatgaaattagaatcaattggtttgccgattgcaattagtccacttcatg

SEQ ID NO: 201155 - DNA, 58 bp, Artificial
  Synthetic oligonucleotide
cagtcagcgagcggtcagaaaagatgccgttttagtcgatgaatggattatttcgagc

SEQ ID NO: 201156 - DNA, 58 bp, Artificial
  Synthetic oligonucleotide
cttgtccgtgaaatcctcgcgtatttccgtgaggagcatagtatatttagcgatcttc

SEQ ID NO: 201157 - DNA, 55 bp, Artificial
  Synthetic oligonucleotide
atgcccggtattaaagtcgttaattcggttttacgtgctcatactggactgataa

SEQ ID NO: 201158 - DNA, 58 bp, Artificial
  Synthetic oligonucleotide
ccgtgtaatgattttgtggacatcaattgtcttgtttgttatcttaaccattgtgcag

SEQ ID NO: 201159 - DNA, 58 bp, Artificial
  Synthetic oligonucleotide
tttatcccgctagttagtggcttgataacgttgatatatgagcgtttatgtgagtgta

SEQ ID NO: 201160 - DNA, 59 bp, Artificial
  Synthetic oligonucleotide
gcgaatgggccagtttgtcggtaatgtggctgctaaagcgctgaacgtgccgtttggaa

SEQ ID NO: 201161 - DNA, 58 bp, Artificial
  Synthetic oligonucleotide
gtatatttgtgaaattcttaagtcaaatggtgagatggctcgctctaaggaacttcat

SEQ ID NO: 201162 - DNA, 58 bp, Artificial
  Synthetic oligonucleotide
acaattagttgcggttttaggtgcgtattactatgactttggccggagtatgctatga

SEQ ID NO: 201163 - DNA, 58 bp, Artificial
  Synthetic oligonucleotide
atactgctgattctagcgcagctgacaagctgcctggcgacgcaacgtttagctggca

SEQ ID NO: 201164 - DNA, 58 bp, Artificial
  Synthetic oligonucleotide
atcccagatcatttctccttgtgtagaggtatagccgtaatatgaaccacgaggatcc

SEQ ID NO: 201165 - DNA, 56 bp, Artificial
  Synthetic oligonucleotide
aatggctgaatataaatttgaacacctttaaatgtctttatacgccgaaggtgcga

SEQ ID NO: 201166 - DNA, 56 bp, Artificial
  Synthetic oligonucleotide
agatgtaccccaaaagctaaagtgaatagttgcttgtcttttctaggcggcacgga

SEQ ID NO: 201167 - DNA, 58 bp, Artificial
  Synthetic oligonucleotide
acttttgctagatccatcttcggagcgtatgagcgtaaatacggcaagttgtttccag

SEQ ID NO: 201168 - DNA, 57 bp, Artificial
  Synthetic oligonucleotide
ctcgtgtcactttaattcaccaagatattctacagtttcaattccctaacaaacaga

SEQ ID NO: 201169 - DNA, 57 bp, Artificial
  Synthetic oligonucleotide
tgtccgagaccatacgtgacaagcgtattctcgggcaaaacagggtcactaaccgta

SEQ ID NO: 201170 - DNA, 55 bp, Artificial
  Synthetic oligonucleotide
gatatttgtaaaacatattaggaaagtaacagaaccttttgttgaacctgcactg

SEQ ID NO: 201171 - DNA, 60 bp, Artificial
  Synthetic oligonucleotide
gcccaatgagaggtctctcattgggctgaatcacccgaacagcagtgtcgcaggatcgtt

SEQ ID NO: 201172 - DNA, 58 bp, Artificial
  Synthetic oligonucleotide
gctaaggcggttcaactagggtcaattcagggagcaatggccgcagtggcagttgtta

SEQ ID NO: 201173 - DNA, 58 bp, Artificial
  Synthetic oligonucleotide
tccaagcgatccaggcaaggatacgccagtaccatacgcaccacaaactacgccagta

SEQ ID NO: 201174 - DNA, 50 bp, Artificial
  Synthetic oligonucleotide
gcaaacgacttttcccaaggtaagttccaagacgagcgtcaaaaactttt

SEQ ID NO: 201175 - DNA, 58 bp, Artificial
  Synthetic oligonucleotide
gagtaattgttcgataaaggatctttctagctaagtgattgccatgtttggttattcc

SEQ ID NO: 201176 - DNA, 57 bp, Artificial
  Synthetic oligonucleotide
tatctgggtgaactgcgcgcatcgtatcacccacttgatctggcgtacgtttggcga

SEQ ID NO: 201177 - DNA, 54 bp, Artificial
  Synthetic oligonucleotide
gcgtattaactggtatatagccggtagttttagtccagtagaattgttctttct

SEQ ID NO: 201178 - DNA, 57 bp, Artificial
  Synthetic oligonucleotide
ccgagtgacacgcatcggattagttcctagtacatcagctattccagactttgttaa

SEQ ID NO: 201179 - DNA, 57 bp, Artificial
  Synthetic oligonucleotide
acaacgctagttcctaccattgctaccagtggatacgacttgcctttgtggacgcta

SEQ ID NO: 201180 - DNA, 57 bp, Artificial
  Synthetic oligonucleotide
gctggctctgtcatggccttgtcgcactataagctaacttttgcggatcatatgcca

SEQ ID NO: 201181 - DNA, 57 bp, Artificial
  Synthetic oligonucleotide
ctcgcgtcaaatctggcacttgcgcaaggcaaatctgcaacttggcgggtagcaagt

SEQ ID NO: 201182 - DNA, 60 bp, Artificial
  Synthetic oligonucleotide
gccatgactacccggacaatatccctactggcttcaagaatttagatgatgagcttgacg

SEQ ID NO: 201183 - DNA, 57 bp, Artificial
  Synthetic oligonucleotide
tttaagcaaggataaagtggttgttagaaaaagtgatcttcatgacttagaatctcg

SEQ ID NO: 201184 - DNA, 57 bp, Artificial
  Synthetic oligonucleotide
gcgtcccctcaggtagatcggcctccaaccgctcgcgcgtgaagtcattagtaatgt

SEQ ID NO: 201185 - DNA, 57 bp, Artificial
  Synthetic oligonucleotide
gccaatcttacttcggcgcttgcgctcagtagcaccagaggcgcggattcgcattct

SEQ ID NO: 201186 - DNA, 56 bp, Artificial
  Synthetic oligonucleotide
ctctaaccaaatttatctgtttgggaatggagtggttagatgagttatttagttgc

SEQ ID NO: 201187 - DNA, 54 bp, Artificial
  Synthetic oligonucleotide
gaagcgttaaaaatggctgtaaataataaagacaagggggaacgaacgtgagca

SEQ ID NO: 201188 - DNA, 57 bp, Artificial
  Synthetic oligonucleotide
gatgtccacaaaatcattacacggacactatcgtccaaagaaattatcagaaaatcg

SEQ ID NO: 201189 - DNA, 55 bp, Artificial
  Synthetic oligonucleotide
gagatacaaaagatgttcaacaaacgggccatttaacggaataagtgatgaaaac

SEQ ID NO: 201190 - DNA, 57 bp, Artificial
  Synthetic oligonucleotide
ccccaatcctcagtcttacagatcaccaaacggatcccaggtatacttagctctttg

SEQ ID NO: 201191 - DNA, 57 bp, Artificial
  Synthetic oligonucleotide
tgggatgaggctctaagctagaatagccgtctcgaataagcgtttttcgccaaacac

SEQ ID NO: 201192 - DNA, 57 bp, Artificial
  Synthetic oligonucleotide
atgtgctgaacgatttactttcaccagaagaattttctgtaaacgcaactccatata

SEQ ID NO: 201193 - DNA, 58 bp, Artificial
  Synthetic oligonucleotide
gccacaatactagtactatcgtcactatccatttggtttttagaatatgccttcttaa

SEQ ID NO: 201194 - DNA, 57 bp, Artificial
  Synthetic oligonucleotide
gttagtcttacatgactttagtgaaagtgaaatcgctgattactttgcaaaagacgg

SEQ ID NO: 201195 - DNA, 57 bp, Artificial
  Synthetic oligonucleotide
gttagctttcccccttgcaagcaccgctgctgcaacaaacgtagtcttgtggctagc

SEQ ID NO: 201196 - DNA, 57 bp, Artificial
  Synthetic oligonucleotide
cgttctgttaatggtgaaaatcgaacattgactttgcgaccaatcgatttcaagaac

SEQ ID NO: 201197 - DNA, 57 bp, Artificial
  Synthetic oligonucleotide
ctcagctcatggttccgactactacggcccatagcggactctcaccgcctagctaat

SEQ ID NO: 201198 - DNA, 57 bp, Artificial
  Synthetic oligonucleotide
actccggtggagacatggcggaacatagcactatcaactggaatggcgcgggcacag

SEQ ID NO: 201199 - DNA, 57 bp, Artificial
  Synthetic oligonucleotide
gccgtttagccgccagcgtcattcgttctggcgaccaaactggataccagactagct

SEQ ID NO: 201200 - DNA, 56 bp, Artificial
  Synthetic oligonucleotide
gggaatacattaccattctttgcaaagcttgggtatcaagtgatttaaccagtaaa

SEQ ID NO: 201201 - DNA, 50 bp, Artificial
  Synthetic oligonucleotide
ccattaaatacaccacttctaaaaaagttgggttgtccacgttggtttag

SEQ ID NO: 201202 - DNA, 57 bp, Artificial
  Synthetic oligonucleotide
aacgaggagtgatctaatgatacaagtagactgttgtccgggtaaaccagatttggc

SEQ ID NO: 201203 - DNA, 57 bp, Artificial
  Synthetic oligonucleotide
gctgcgacctctgtcgcgcgctccacgactttgcccggttgcggttgacatcacaat

SEQ ID NO: 201204 - DNA, 58 bp, Artificial
  Synthetic oligonucleotide
gccaacttttgcgcaaaatttagtcaagttaacaccaggggcttatgtagcagcaatc

SEQ ID NO: 201205 - DNA, 57 bp, Artificial
  Synthetic oligonucleotide
atcaatccctgagtccccatgtaagtcaggtcaacaccggttttaagcggcaagatc

SEQ ID NO: 201206 - DNA, 57 bp, Artificial
  Synthetic oligonucleotide
aacccagctccaagctttgtacggcaaggataaggccgagagtatcttaggtaatca

SEQ ID NO: 201207 - DNA, 57 bp, Artificial
  Synthetic oligonucleotide
ggattgcggtgattcgatccgtggtggtatcgaaagtcacctgataaagtaccgtcg

SEQ ID NO: 201208 - DNA, 57 bp, Artificial
  Synthetic oligonucleotide
agccaagttgctagttggtttttttgagcctcaagaacagcacggtgaaattcagat

SEQ ID NO: 201209 - DNA, 57 bp, Artificial
  Synthetic oligonucleotide
accgcaatggacagtttcatcagcacacgctgcctgactacaagcggcactcggata

SEQ ID NO: 201210 - DNA, 56 bp, Artificial
  Synthetic oligonucleotide
cgtcagttatggtgccgttcgtggtactaccctaccagtattcttgagtggtggaa

SEQ ID NO: 201211 - DNA, 57 bp, Artificial
  Synthetic oligonucleotide
ctaagccatattcttattgaatatcaccatctgcttctagatctacttctggcttac

SEQ ID NO: 201212 - DNA, 57 bp, Artificial
  Synthetic oligonucleotide
cggcagctatatggctacaaagccattgttcgaggttactcaaaagaaataggcgca

SEQ ID NO: 201213 - DNA, 57 bp, Artificial
  Synthetic oligonucleotide
gatcccctttcaaatcataatctgaacgactaaattatcctgtttaattgatgttac

SEQ ID NO: 201214 - DNA, 55 bp, Artificial
  Synthetic oligonucleotide
aaagcgaccaaatacataaaagagcaccagaaaagtctggggtagctgaaaacac

SEQ ID NO: 201215 - DNA, 56 bp, Artificial
  Synthetic oligonucleotide
gcagtgggttcgtttcaacttgccagaatttaacaacctgaccagtagttacgcta

SEQ ID NO: 201216 - DNA, 57 bp, Artificial
  Synthetic oligonucleotide
atttataattggcttaatcgtggctggctccccttcaaattgactgatctacccaat

SEQ ID NO: 201217 - DNA, 57 bp, Artificial
  Synthetic oligonucleotide
atagccaccatcttcatatattggcacaacttttagtccagcctcagtaagatttgc

SEQ ID NO: 201218 - DNA, 57 bp, Artificial
  Synthetic oligonucleotide
tcatgagcaaagtcggcgatcttttaagcattaattaccttggtacccacactatgc

SEQ ID NO: 201219 - DNA, 57 bp, Artificial
  Synthetic oligonucleotide
gcagaagcctactcaaagaatgtttgacgattgctgtaatgaattttggaatactac

SEQ ID NO: 201220 - DNA, 57 bp, Artificial
  Synthetic oligonucleotide
gaagtcctttgtagtgctacttatgacatcgattacctatagtccagaattaattgg

SEQ ID NO: 201221 - DNA, 57 bp, Artificial
  Synthetic oligonucleotide
catggctcgctgggcaaacggtcacggtattcgcatgtttattttggtgaccacctt

SEQ ID NO: 201222 - DNA, 57 bp, Artificial
  Synthetic oligonucleotide
agcgagtcggctcagcgttcagagaactagcggttggtgtgagctagacaggccgat

SEQ ID NO: 201223 - DNA, 53 bp, Artificial
  Synthetic oligonucleotide
ccggttatattcaggccaatctttgggactaaccaccccttgactagtcgcct

SEQ ID NO: 201224 - DNA, 57 bp, Artificial
  Synthetic oligonucleotide
agaccggcagaaccatttgatcggcctcgccagtatagttagccttgcgatcgctgc

SEQ ID NO: 201225 - DNA, 56 bp, Artificial
  Synthetic oligonucleotide
cattgaaccgtaaaaaggaatcacctctgcgatacgtatgatcgtaggggtgattt

SEQ ID NO: 201226 - DNA, 55 bp, Artificial
  Synthetic oligonucleotide
gcacgttagcgaccttgccctcccgacacagcctaggacgtcttgtaaacggtag

SEQ ID NO: 201227 - DNA, 55 bp, Artificial
  Synthetic oligonucleotide
tcaaggaggttcaagataccttactcaacaactttaaagctggccggcgtaacta

SEQ ID NO: 201228 - DNA, 57 bp, Artificial
  Synthetic oligonucleotide
cagccaaacaatattttgcagataactatggtgacgaaaatattcgctatgcagttg

SEQ ID NO: 201229 - DNA, 57 bp, Artificial
  Synthetic oligonucleotide
attggctaactctgttggtggggccgcagaacctgccgacacgctttctccagaaaa

SEQ ID NO: 201230 - DNA, 54 bp, Artificial
  Synthetic oligonucleotide
cttaaaactatcgtttaatgtggcattccaaccgtatcttaagataagttcgct

SEQ ID NO: 201231 - DNA, 57 bp, Artificial
  Synthetic oligonucleotide
ggagcttgcaaaagatcagggattgactaaatcaggactattaactgttctgattag

SEQ ID NO: 201232 - DNA, 57 bp, Artificial
  Synthetic oligonucleotide
caaaagttaatcagctttataaagcgacagcgagccaaactttaaaagctatgcaag

SEQ ID NO: 201233 - DNA, 57 bp, Artificial
  Synthetic oligonucleotide
cgatattaaaccttttaaaatgcgctctttatcagtaatcaaggcaataggctgctg

SEQ ID NO: 201234 - DNA, 57 bp, Artificial
  Synthetic oligonucleotide
cgctggggacgttgcaagaagagtttaagcatcgtcggcgctatttggctgcacagg

SEQ ID NO: 201235 - DNA, 56 bp, Artificial
  Synthetic oligonucleotide
aaacttaagtgggtcaaggatttacattgggatttactggttattgatgagagtca

SEQ ID NO: 201236 - DNA, 54 bp, Artificial
  Synthetic oligonucleotide
caaacaagcctgtattcgaaggtagacttatcgacttaaacgttgaaactatta

SEQ ID NO: 201237 - DNA, 59 bp, Artificial
  Synthetic oligonucleotide
gcacctaacagatgtaaaaagtttgtcgacttatctggtgggtgctgatcagtggttat

SEQ ID NO: 201238 - DNA, 55 bp, Artificial
  Synthetic oligonucleotide
aactccggggcttacgtggctgaagacatccggtccgggatcaattccgtggcca

SEQ ID NO: 201239 - DNA, 56 bp, Artificial
  Synthetic oligonucleotide
cgacacactgcgcacatgcgtaaagtcttgcggtggtaacgtccgcaaccacgtta

SEQ ID NO: 201240 - DNA, 56 bp, Artificial
  Synthetic oligonucleotide
tgggatgacacttccataaccatgtgggtcatgccgttgtcaactgcccgccgcat

SEQ ID NO: 201241 - DNA, 56 bp, Artificial
  Synthetic oligonucleotide
ggactatctgaagctagttaatgttgatttgggacgtgtttacgttattcaacatg

SEQ ID NO: 201242 - DNA, 56 bp, Artificial
  Synthetic oligonucleotide
gtaactgacttgcgtcagtttggaacattcaaaaataaataagttcagtcgctagc

SEQ ID NO: 201243 - DNA, 56 bp, Artificial
  Synthetic oligonucleotide
cctcctgcacgtgcggcccgttaataaacgagcgatacgtcgccgctatatagggc

SEQ ID NO: 201244 - DNA, 56 bp, Artificial
  Synthetic oligonucleotide
taccagtttgaaggaatgttacttccgttaagtcttgatgttactgatagaagtgc

SEQ ID NO: 201245 - DNA, 56 bp, Artificial
  Synthetic oligonucleotide
ctcattacctgatattgcaaatgattttaataaatcaccggcgagtacaaactggg

SEQ ID NO: 201246 - DNA, 56 bp, Artificial
  Synthetic oligonucleotide
acacgcataaaggcgcgttggctaccatagatcatcagggcttcaccttgtctgcg

SEQ ID NO: 201247 - DNA, 55 bp, Artificial
  Synthetic oligonucleotide
atacaaaacagttcgtttattaacaagtactgtgttgaagattaatgcgttggaa

SEQ ID NO: 201248 - DNA, 58 bp, Artificial
  Synthetic oligonucleotide
gttaggtggctcacagatgccggagaccgatggacgcggtgcgttttattacgttcat

SEQ ID NO: 201249 - DNA, 58 bp, Artificial
  Synthetic oligonucleotide
gaagagtattcaatgctgatagcccaggacttgttaactaattacctaatcgaattac

SEQ ID NO: 201250 - DNA, 55 bp, Artificial
  Synthetic oligonucleotide
gtaggtaaatacagagtcaacacgaatattcgtcggttcttgcagggctccattc

SEQ ID NO: 201251 - DNA, 55 bp, Artificial
  Synthetic oligonucleotide
gtatcacggaatcaggcgtcagtttacttggcaatcctaactctcgcgctctggt

SEQ ID NO: 201252 - DNA, 55 bp, Artificial
  Synthetic oligonucleotide
gtcatgcaacagatctctgaatgtaggcgcataagcatctcgccacacctgatga

SEQ ID NO: 201253 - DNA, 55 bp, Artificial
  Synthetic oligonucleotide
tatttactctcacgttatttaactcaacctttacgctcattaggcatggcagcaa

SEQ ID NO: 201254 - DNA, 55 bp, Artificial
  Synthetic oligonucleotide
gtgaagcttagattcgcaccataagcaacctgggtagttccgtctggtgtaatgc

SEQ ID NO: 201255 - DNA, 55 bp, Artificial
  Synthetic oligonucleotide
gtggctggacgtctagtcgggaaactgtagttctaggataggctaccatcgggta

SEQ ID NO: 201256 - DNA, 55 bp, Artificial
  Synthetic oligonucleotide
gtgttactgctccatttggtttgtctaccgattggtcaccttattcccctgttcg

SEQ ID NO: 201257 - DNA, 55 bp, Artificial
  Synthetic oligonucleotide
gttattgctctccgatgatgcaccagaagcgtttaatgcctcctctcggtcgctt

SEQ ID NO: 201258 - DNA, 55 bp, Artificial
  Synthetic oligonucleotide
gttcccctatgctcgtgaagcaattacctcgcaagtcattcgtggcagcttcccc

SEQ ID NO: 201259 - DNA, 55 bp, Artificial
  Synthetic oligonucleotide
gttgggaacacagcgctcatatgactttgactcggggagagcgctcaaggctggc

SEQ ID NO: 201260 - DNA, 56 bp, Artificial
  Synthetic oligonucleotide
cttgttggtgcatcattaacggttcacaaatggttcaccaatggtacacaaacggt

SEQ ID NO: 201261 - DNA, 55 bp, Artificial
  Synthetic oligonucleotide
aataggggtacgcttgctacactataagtaagtgttatcaatgtgggcatgaaca

SEQ ID NO: 201262 - DNA, 55 bp, Artificial
  Synthetic oligonucleotide
acaggtgcttattgttactaatcgaacagtggcacctttgtacctaggccatttg

SEQ ID NO: 201263 - DNA, 55 bp, Artificial
  Synthetic oligonucleotide
taactactggaacaggatttggcatattacgtctaaaacgaccagtggcggaact

SEQ ID NO: 201264 - DNA, 55 bp, Artificial
  Synthetic oligonucleotide
tatgtcccatgttgggtggtcatttcatgtcaagcagccataagccttggaaccc

SEQ ID NO: 201265 - DNA, 55 bp, Artificial
  Synthetic oligonucleotide
tacgctccagaggaacaccacgaatagccaatcgcctgttaagaagagtcaggga

SEQ ID NO: 201266 - DNA, 55 bp, Artificial
  Synthetic oligonucleotide
gcgcaccttcagaagaagctacttcgtctagcggtttcttctctccacgttgcac

SEQ ID NO: 201267 - DNA, 55 bp, Artificial
  Synthetic oligonucleotide
gcgccgatcgcaatagtaagcggattaaaggccaatatgggtgctgctacgacca

SEQ ID NO: 201268 - DNA, 55 bp, Artificial
  Synthetic oligonucleotide
gcgtcagagcaaaaggcaacctattataaaactggaccaggagattatgcggagc

SEQ ID NO: 201269 - DNA, 55 bp, Artificial
  Synthetic oligonucleotide
gctcaattctggccgtttgttccaaatcccgcataaaggttcttggcctattacc

SEQ ID NO: 201270 - DNA, 55 bp, Artificial
  Synthetic oligonucleotide
gctcgctacagtggtgaatctcgtttcggcttctttaaccctccaatacaacccc

SEQ ID NO: 201271 - DNA, 58 bp, Artificial
  Synthetic oligonucleotide
cttaataaacttcaggcattaggccatgactttattgcatccaaacgagacgagttaa

SEQ ID NO: 201272 - DNA, 54 bp, Artificial
  Synthetic oligonucleotide
ggagggagccaagtaggacagacccataagcggttaccaaaacgttgaggtcga

SEQ ID NO: 201273 - DNA, 55 bp, Artificial
  Synthetic oligonucleotide
ggagtacgtcaacatcgtcctggaaccgatgtgactttatcagcgcctaagtccg

SEQ ID NO: 201274 - DNA, 55 bp, Artificial
  Synthetic oligonucleotide
ggcaccaggcatattaccgtccagtgtgtcaatatgtgcccctataacaatggcc

SEQ ID NO: 201275 - DNA, 55 bp, Artificial
  Synthetic oligonucleotide
ggccgattctctaatgaccgttgcttgtcgcaggtatccacaaagtacggctgca

SEQ ID NO: 201276 - DNA, 55 bp, Artificial
  Synthetic oligonucleotide
ggccgcaataatactgcgcccttgagaacgtgaaatgatttgcgcgctgaaacga

SEQ ID NO: 201277 - DNA, 55 bp, Artificial
  Synthetic oligonucleotide
tcacgggcaaaacttcttcggtttccacactatgagcataagtcgggctaatatg

SEQ ID NO: 201278 - DNA, 55 bp, Artificial
  Synthetic oligonucleotide
actatggtgaatcgagcaccttttaatatcggtgattgtgtagccatgacctttc

SEQ ID NO: 201279 - DNA, 55 bp, Artificial
  Synthetic oligonucleotide
aatacaagggttcagcaagtaaagggttccttggaacagaaccatgtggatgacg

SEQ ID NO: 201280 - DNA, 53 bp, Artificial
  Synthetic oligonucleotide
gggaaacgctaagggatgagggacgcttcaccgcaacttacaatacgtttagg

SEQ ID NO: 201281 - DNA, 55 bp, Artificial
  Synthetic oligonucleotide
acggacaatccaatgatcgtgttcaatgctcgaatcaaaagcctacctgcacgat

SEQ ID NO: 201282 - DNA, 60 bp, Artificial
  Synthetic oligonucleotide
cgtcttttcgcatacctcatgacctaaacgatgatgaagcatatcggattggtgcatcat

SEQ ID NO: 201283 - DNA, 55 bp, Artificial
  Synthetic oligonucleotide
gggagtaccaattggcgcggccaaatcaatccctttatgggctctgcgatagcgc

SEQ ID NO: 201284 - DNA, 55 bp, Artificial
  Synthetic oligonucleotide
gggcattgcggtagttatcggtctcaaccaacacaataacggctttataccagtc

SEQ ID NO: 201285 - DNA, 55 bp, Artificial
  Synthetic oligonucleotide
catctgcgaatggtcattggatagagtacgacttaccccaaggcggatgctttgc

SEQ ID NO: 201286 - DNA, 55 bp, Artificial
  Synthetic oligonucleotide
catggaacgagttagtataaaactggtagccatcccggaccatgcttcatcaacc

SEQ ID NO: 201287 - DNA, 55 bp, Artificial
  Synthetic oligonucleotide
catgtctagcccagtaatgacatggatgccccacgtgtcccattagtcccagata

SEQ ID NO: 201288 - DNA, 55 bp, Artificial
  Synthetic oligonucleotide
ccaaccacccctatagcaagaatactcacgatgtcttgagccgatttgtaggttg

SEQ ID NO: 201289 - DNA, 55 bp, Artificial
  Synthetic oligonucleotide
ccaagctaccatcaggtaattgacgtactagatctcctgagcggtaggctagact

SEQ ID NO: 201290 - DNA, 55 bp, Artificial
  Synthetic oligonucleotide
ccaatccgttttcgataagtggcaatttcgctacaacatccctcgcactctcaga

SEQ ID NO: 201291 - DNA, 55 bp, Artificial
  Synthetic oligonucleotide
ccagcattgccaccacgggtactaataaggtaaatggagcaaccatacccaccgg

SEQ ID NO: 201292 - DNA, 55 bp, Artificial
  Synthetic oligonucleotide
ccatcattaatgccgcacgataagacattctcaatccatagaacttcgggttcta

SEQ ID NO: 201293 - DNA, 59 bp, Artificial
  Synthetic oligonucleotide
cgctacataagcaaaacgaccacacataatgtcatactctcgttttattaaagtgtagc

SEQ ID NO: 201294 - DNA, 55 bp, Artificial
  Synthetic oligonucleotide
cccatgtagttgacaacagctgacacatgataccaccaacttactgttccctcag

SEQ ID NO: 201295 - DNA, 55 bp, Artificial
  Synthetic oligonucleotide
ccccgccatgccataagcaacatcccataagaaattgtaaatccattacggcatg

SEQ ID NO: 201296 - DNA, 55 bp, Artificial
  Synthetic oligonucleotide
cccctcccgttaaatcacctcggtaacgtgtagcatgaacataatccacctctag

SEQ ID NO: 201297 - DNA, 55 bp, Artificial
  Synthetic oligonucleotide
cccgcttaagatatctccataacgcttatctaaccgcttatcaccgaagttcgct

SEQ ID NO: 201298 - DNA, 51 bp, Artificial
  Synthetic oligonucleotide
cccgtggggttataacgttgacttttaggcacattaggtttattcgtcacc

SEQ ID NO: 201299 - DNA, 55 bp, Artificial
  Synthetic oligonucleotide
ccctaattcagcgcatcgaatctatgtaggatgagtttatgaacagtatatttcg

SEQ ID NO: 201300 - DNA, 55 bp, Artificial
  Synthetic oligonucleotide
ccgcggtgatattaaagagtactccattagcaagtccttgcaaacgcatatcatt

SEQ ID NO: 201301 - DNA, 50 bp, Artificial
  Synthetic oligonucleotide
ccggaaacgattaagcccaaatttaaattaaacggtcttgaccaccataa

SEQ ID NO: 201302 - DNA, 54 bp, Artificial
  Synthetic oligonucleotide
cctacaactacaaagacgcacgtaccgtagtacagcaatgggtacttagtcccg

SEQ ID NO: 201303 - DNA, 55 bp, Artificial
  Synthetic oligonucleotide
cctcaacgtagagaaaccttggctcggatgtggttgctcctttgctacctatcct

SEQ ID NO: 201304 - DNA, 60 bp, Artificial
  Synthetic oligonucleotide
cgcattgcttacaggatgcagtacgatgaactccaatttcagttgtaatgctacagcggg

SEQ ID NO: 201305 - DNA, 55 bp, Artificial
  Synthetic oligonucleotide
cctggtgtttctaatcttcgtgctgcaatctacacggaatctggcgagttgataa

SEQ ID NO: 201306 - DNA, 55 bp, Artificial
  Synthetic oligonucleotide
aggctcagccatgcgacaagaacaagtcgaagcatttatctatccttctgcacgg

SEQ ID NO: 201307 - DNA, 55 bp, Artificial
  Synthetic oligonucleotide
agtacgtgatttcttcactatgggcattatgcttctcccgcgacttgttttaacc

SEQ ID NO: 201308 - DNA, 54 bp, Artificial
  Synthetic oligonucleotide
agtacttcgaccgtatttttgattgaccttatccaacaccgacataagttgttc

SEQ ID NO: 201309 - DNA, 55 bp, Artificial
  Synthetic oligonucleotide
atagtagcattttggggagcaccaatagaagacaaggagcatgcaagtcacgccg

SEQ ID NO: 201310 - DNA, 55 bp, Artificial
  Synthetic oligonucleotide
atcaaccctaccgcgtattatctctggtcctgttgcggcatccattcaaatggcc

SEQ ID NO: 201311 - DNA, 55 bp, Artificial
  Synthetic oligonucleotide
atcgatacctctacactagcggaagatacctatacgacctttagtacgcaactgc

SEQ ID NO: 201312 - DNA, 54 bp, Artificial
  Synthetic oligonucleotide
atctagcctcgcccctcggaaattcctgtaggtaatcccgtgtttcctccctca

SEQ ID NO: 201313 - DNA, 55 bp, Artificial
  Synthetic oligonucleotide
atttaatcgaggtagtcaatcgcttgctaactccacggcacgagagagagtaccg

SEQ ID NO: 201314 - DNA, 55 bp, Artificial
  Synthetic oligonucleotide
caaacgcgcgggtacatttacacggatttgtttgccagaccgcacaagcggaatg

SEQ ID NO: 201315 - DNA, 60 bp, Artificial
  Synthetic oligonucleotide
cgataggctgaggccgcaataatactgcgcccttgagaacgtgaaatgatttgcgcgctg

SEQ ID NO: 201316 - DNA, 55 bp, Artificial
  Synthetic oligonucleotide
caactgagaagctgccattcgaatgctatcaaagcgtatgggagcatggctatac

SEQ ID NO: 201317 - DNA, 55 bp, Artificial
  Synthetic oligonucleotide
cacaccgtcttaaatgctttacaggatgccggtttggaggtagagcagtctcatt

SEQ ID NO: 201318 - DNA, 55 bp, Artificial
  Synthetic oligonucleotide
cacagtcaactccccattaatcgctgcaatcacaatccgtccatcagtggcctca

SEQ ID NO: 201319 - DNA, 55 bp, Artificial
  Synthetic oligonucleotide
aggccgtgttagaagtattcaacggcatatggcctgtacgactgatctatcatgg

SEQ ID NO: 201320 - DNA, 55 bp, Artificial
  Synthetic oligonucleotide
caccgcgtgtcactttcaagcaatcatattgtgggtaagtacagagggcaggtcc

SEQ ID NO: 201321 - DNA, 55 bp, Artificial
  Synthetic oligonucleotide
cagagaccgctccaaacattccagaggtaagggacatcccgctagtgccttgaac

SEQ ID NO: 201322 - DNA, 55 bp, Artificial
  Synthetic oligonucleotide
cagagcttaaatcaccggcttataccacacgttggagtgatgttccgaaagcggg

SEQ ID NO: 201323 - DNA, 55 bp, Artificial
  Synthetic oligonucleotide
cagttgtattcatgcatacgatgaatgcttgagtattcgaggaacaccgcaacac

SEQ ID NO: 201324 - DNA, 55 bp, Artificial
  Synthetic oligonucleotide
catagcataaacaattctgcgttggacaggcttaagtccatctgcgatgctcggt

SEQ ID NO: 201325 - DNA, 55 bp, Artificial
  Synthetic oligonucleotide
catccagaaatcacgtttggtggaactggaccatggaatgcgcaagatgtacaga

SEQ ID NO: 201326 - DNA, 55 bp, Artificial
  Synthetic oligonucleotide
ccgtcctactccccaaatgtctccaacggaaatctgttgtaataaccgctcacga

SEQ ID NO: 201327 - DNA, 55 bp, Artificial
  Synthetic oligonucleotide
catctcgtacaaggcttcgagacgacatataaatgccctctcagccgagcggttt

SEQ ID NO: 201328 - DNA, 55 bp, Artificial
  Synthetic oligonucleotide
ctgagtatttggtcgaacaacgtgcaatagctatggaggaagcaacaaatgcctg

SEQ ID NO: 201329 - DNA, 55 bp, Artificial
  Synthetic oligonucleotide
ctcgcagcatagcatcaatagactccctgcttgcgcagagggtgacgtttcgcgg

SEQ ID NO: 201330 - DNA, 54 bp, Artificial
  Synthetic oligonucleotide
ctaaaacccctctgttctgataacgggtagcataaagcactaaacgactattcg

SEQ ID NO: 201331 - DNA, 55 bp, Artificial
  Synthetic oligonucleotide
cgttaactaatttaggcgcaacagcttatacgctaacggccacagcggtaggaag

SEQ ID NO: 201332 - DNA, 55 bp, Artificial
  Synthetic oligonucleotide
cgtctcctgtttgcaatgtcagtgtgcgtaaaccaagggctaggacatagcggag

SEQ ID NO: 201333 - DNA, 55 bp, Artificial
  Synthetic oligonucleotide
cgtataccagcccaatggtctaacacgttttgggaccacattatatcaggcgcta

SEQ ID NO: 201334 - DNA, 55 bp, Artificial
  Synthetic oligonucleotide
cgtacgattaatacgaaactagctaaggatgagaagcccacttcaagggagatca

SEQ ID NO: 201335 - DNA, 54 bp, Artificial
  Synthetic oligonucleotide
cggttgtggcatattggcccttaattttcaggaatgtaccaaattaatgggtcc

SEQ ID NO: 201336 - DNA, 55 bp, Artificial
  Synthetic oligonucleotide
cgggatggattaggacgctagcttatctcttatgaccgttgattcgataccgata

SEQ ID NO: 201337 - DNA, 60 bp, Artificial
  Synthetic oligonucleotide
cccgacatggtctgattcagagatgagctttgtgttaagtcctgagtcagtattgtttgg

SEQ ID NO: 201338 - DNA, 55 bp, Artificial
  Synthetic oligonucleotide
cgctcttattgtgtctttccaagcaaaatggcccgaattatccaagaggcccgtc

SEQ ID NO: 201339 - DNA, 55 bp, Artificial
  Synthetic oligonucleotide
cgctaagagctcataggtaataacaaagctcgtttctttagaacaaacctcagtc

SEQ ID NO: 201340 - DNA, 55 bp, Artificial
  Synthetic oligonucleotide
cgcgcgcctgcatttggcgtattaacgaggtatgtgccgttaatgttttggcgac

SEQ ID NO: 201341 - DNA, 55 bp, Artificial
  Synthetic oligonucleotide
cgaaccaactgtttaaccttatctgtcaaggtaaggagacgaagaatatttgcga

SEQ ID NO: 201342 - DNA, 55 bp, Artificial
  Synthetic oligonucleotide
aggcaatccgtttaccctgcgctattattcgccttttgcactaaaggttaatcga

SEQ ID NO: 201343 - DNA, 54 bp, Artificial
  Synthetic oligonucleotide
cactgaaccaggcttatgagcaatcgacacaagctgctcgaaacgaatctgcac

SEQ ID NO: 201344 - DNA, 54 bp, Artificial
  Synthetic oligonucleotide
gataacgatctgccttttacagacaattgcccggggtttggatcagtcgcgaaa

SEQ ID NO: 201345 - DNA, 54 bp, Artificial
  Synthetic oligonucleotide
gttacctattcctcgacccacgagtgttgcttttggtgatcgcgatctgtcgac

SEQ ID NO: 201346 - DNA, 54 bp, Artificial
  Synthetic oligonucleotide
cgtatcggagcgcttcgtatatcgcggtattgaagtaagttatgaccggtgcgt

SEQ ID NO: 201347 - DNA, 54 bp, Artificial
  Synthetic oligonucleotide
gtcgctggttaatccatgtgtattaagcgaagcagccattaattgtaggcggca

SEQ ID NO: 201348 - DNA, 60 bp, Artificial
  Synthetic oligonucleotide
catgagtacagagcatatgatgatgcggcgatataccttcaatgcttgatagaagttagc

SEQ ID NO: 201349 - DNA, 54 bp, Artificial
  Synthetic oligonucleotide
gtagcccacttttgaatgagtgttatcatagtgccctgtacgggattagttacg

SEQ ID NO: 201350 - DNA, 54 bp, Artificial
  Synthetic oligonucleotide
ccgtagcgtattgaattcggttattccttcgcttcgacttattaaggctattaa

SEQ ID NO: 201351 - DNA, 54 bp, Artificial
  Synthetic oligonucleotide
tctacgcaatacctctacaacgggaacggctaaggattcagcatctgctctgag

SEQ ID NO: 201352 - DNA, 54 bp, Artificial
  Synthetic oligonucleotide
cccacattaaagatggggttactggactccgagataaaatggagcacgaggccg

SEQ ID NO: 201353 - DNA, 54 bp, Artificial
  Synthetic oligonucleotide
tgtcatttgcggcacacagggtctctatacgaatgaagtcttcttgagttgaac

SEQ ID NO: 201354 - DNA, 54 bp, Artificial
  Synthetic oligonucleotide
tgtgcaggctaagcttctggagttgcatcagaacgaccgagaaaaataccctac

SEQ ID NO: 201355 - DNA, 54 bp, Artificial
  Synthetic oligonucleotide
agctaatgaaaaccagcgaccaattaattactttcgtgtcctaggctatgagca

SEQ ID NO: 201356 - DNA, 54 bp, Artificial
  Synthetic oligonucleotide
ctcgttactagaggctctttacatgttgagttgcgcccattcttttcggtctcg

SEQ ID NO: 201357 - DNA, 54 bp, Artificial
  Synthetic oligonucleotide
gcatgagttagatccaagtattgtcgtgaatcaaacgctttatgctcatgatgg

SEQ ID NO: 201358 - DNA, 54 bp, Artificial
  Synthetic oligonucleotide
cgatctttcaaagtctgtacactttagtgattcatcacggccaatgaattgggt

SEQ ID NO: 201359 - DNA, 60 bp, Artificial
  Synthetic oligonucleotide
gtgtgtgtagagtcagaaaatacaactaggcacaatccttatgaagtactactattagta

SEQ ID NO: 201360 - DNA, 60 bp, Artificial
  Synthetic oligonucleotide
caccattatccgcgctaaaccttagctctttcatgttggagtgcttagagcctttcaatg

SEQ ID NO: 201361 - DNA, 54 bp, Artificial
  Synthetic oligonucleotide
gctgataattaccggcataacaagtgtcttctcgagcttgggtgaacgcctgat

SEQ ID NO: 201362 - DNA, 53 bp, Artificial
  Synthetic oligonucleotide
gaaagtgtgtacttgattggcttgagctcggaagcgataagagctggcaactt

SEQ ID NO: 201363 - DNA, 53 bp, Artificial
  Synthetic oligonucleotide
gtggcattgggttgccgcagcgggctaagatcgagcattttaggccaccagta

SEQ ID NO: 201364 - DNA, 53 bp, Artificial
  Synthetic oligonucleotide
gatcaattatttgaatgggttaaggtggagccctcaggtgatgatttcgcttc

SEQ ID NO: 201365 - DNA, 53 bp, Artificial
  Synthetic oligonucleotide
caacattccttgtttcaaacgattaacagccgcttttatgactacttcgccaa

SEQ ID NO: 201366 - DNA, 53 bp, Artificial
  Synthetic oligonucleotide
gggcaattggcagcgtggaatgtgatgcaacataatcattttacttcaagacc

SEQ ID NO: 201367 - DNA, 53 bp, Artificial
  Synthetic oligonucleotide
cagggtcaatactatcgtcaaagaatcatgtcgtgacctcagcaacgtcaaag

SEQ ID NO: 201368 - DNA, 53 bp, Artificial
  Synthetic oligonucleotide
ggaatataggatctcccgcaaatgtacgttcagggtgaggcattatggccatg

SEQ ID NO: 201369 - DNA, 53 bp, Artificial
  Synthetic oligonucleotide
ttgccaacgcaaatttcaacatgccccgcttattattgcagaaacgataggca

SEQ ID NO: 201370 - DNA, 52 bp, Artificial
  Synthetic oligonucleotide
acccttgcgggaggctggcgcattgtacataccatgggaacgcaaatcacgc

SEQ ID NO: 201371 - DNA, 56 bp, Artificial
  Synthetic oligonucleotide
tttcccaggctgaggtgaactgagtcaaaggcggtttagtcttcgcctccctgtgg

SEQ ID NO: 201372 - DNA, 52 bp, Artificial
  Synthetic oligonucleotide
cattacaaagcattgcagcacgtgcgagtttcttaagcaaaggatgctcgtt

SEQ ID NO: 201373 - DNA, 52 bp, Artificial
  Synthetic oligonucleotide
gcattgagggtaaggtattgcgtgtcatattaaatacgctggttaaattcgc

SEQ ID NO: 201374 - DNA, 52 bp, Artificial
  Synthetic oligonucleotide
gctatagttggtacattcctaaagtatggggaacaacgacaaacccggaatc

SEQ ID NO: 201375 - DNA, 52 bp, Artificial
  Synthetic oligonucleotide
cctataagcatctatgtaagatggtgggtggcagctatattgatgcatccac

SEQ ID NO: 201376 - DNA, 52 bp, Artificial
  Synthetic oligonucleotide
ccaataactcaacgcgagtgccattatgcgtttcgtgttgctcagtacagac

SEQ ID NO: 201377 - DNA, 52 bp, Artificial
  Synthetic oligonucleotide
acccaaattgttaccacgtgcatggcccaagtggggtgcaattggcagcgca

SEQ ID NO: 201378 - DNA, 52 bp, Artificial
  Synthetic oligonucleotide
aatccaggagccactacgcgtatttcggcccgctgcgataacgccctcttct

SEQ ID NO: 201379 - DNA, 52 bp, Artificial
  Synthetic oligonucleotide
gaggaggtagggtagctattagtacccctgctaaaagaacgaatggactgta

SEQ ID NO: 201380 - DNA, 52 bp, Artificial
  Synthetic oligonucleotide
gccttcatgacgcacgatagaggtttagctggagcgattggaattgctagag

SEQ ID NO: 201381 - DNA, 52 bp, Artificial
  Synthetic oligonucleotide
ttagctaataactgcatttcaggcaggcgcttcactacggcttgctttaatc

SEQ ID NO: 201382 - DNA, 57 bp, Artificial
  Synthetic oligonucleotide
tgtttagaacataaacgctcttattgtgtctttccaagcaaaatggcccgaattatc

SEQ ID NO: 201383 - DNA, 52 bp, Artificial
  Synthetic oligonucleotide
aaccattcaaacaggggtttccagagaggccatggcttattgcataagtcca

SEQ ID NO: 201384 - DNA, 51 bp, Artificial
  Synthetic oligonucleotide
tatgtgagcagcaaccaacggtatgcctaggtgccatcaaagaggcccgcc

SEQ ID NO: 201385 - DNA, 51 bp, Artificial
  Synthetic oligonucleotide
aatcctctgcgctgccaattgcaccccacttgggccatgcacgtggtaaca

SEQ ID NO: 201386 - DNA, 51 bp, Artificial
  Synthetic oligonucleotide
tagtgcccccggatttggggatgagccgaagagccacaacggcattacgga

SEQ ID NO: 201387 - DNA, 51 bp, Artificial
  Synthetic oligonucleotide
ttggggcgcatatggacacgcttgatggacgtatgccaggagcaggcgatg

SEQ ID NO: 201388 - DNA, 51 bp, Artificial
  Synthetic oligonucleotide
gccactacgcgtatttcggcccgctgcgataacgccctcttctgcaatcga

SEQ ID NO: 201389 - DNA, 51 bp, Artificial
  Synthetic oligonucleotide
gccgtaattatgccattgggctgtagcttacttgcatataacgcatccgct

SEQ ID NO: 201390 - DNA, 51 bp, Artificial
  Synthetic oligonucleotide
atggttaggattagcgacaaaggaacggttattaagtgcattccttttagc

SEQ ID NO: 201391 - DNA, 51 bp, Artificial
  Synthetic oligonucleotide
atgaaagcattggccctatgggaggtgttcgcgtcgtgacccgcacctggg

SEQ ID NO: 201392 - DNA, 51 bp, Artificial
  Synthetic oligonucleotide
cttagagttgcagtagaccccgttaaccccccatttgtgatgcgaggggct

SEQ ID NO: 201393 - DNA, 60 bp, Artificial
  Synthetic oligonucleotide
tgtgggcggctcggttccttatcccattcggatgaagcatccttgtgatggcatgagtgc

SEQ ID NO: 201394 - DNA, 51 bp, Artificial
  Synthetic oligonucleotide
ttccgtaatgccgttgtggctcttcggctcatccccaaatccgggggcact

SEQ ID NO: 201395 - DNA, 51 bp, Artificial
  Synthetic oligonucleotide
ttcccatggtatgtacaatgcgccagcctcccgcaagggttccaaggctta

SEQ ID NO: 201396 - DNA, 51 bp, Artificial
  Synthetic oligonucleotide
atcatcgcctgctcctggcatacgtccatcaagcgtgtccatatgcgcccc

SEQ ID NO: 201397 - DNA, 51 bp, Artificial
  Synthetic oligonucleotide
tgcgccagcctcccgcaagggttccaaggcttatggctgcttgacatgaaa

SEQ ID NO: 201398 - DNA, 51 bp, Artificial
  Synthetic oligonucleotide
aaccccagcaacatttactggcgctaaacgagccacgggcgttaaagcccc

SEQ ID NO: 201399 - DNA, 51 bp, Artificial
  Synthetic oligonucleotide
ctgcccaattattcggtagagacgatagacgatgctctttcggttctattt

SEQ ID NO: 201400 - DNA, 51 bp, Artificial
  Synthetic oligonucleotide
ttaccacgtgcatggcccaagtggggtgcaattggcagcgcagaggattcg

SEQ ID NO: 201401 - DNA, 51 bp, Artificial
  Synthetic oligonucleotide
gggccagaccaccccctgttgtagcggcaacagcaactgctcctaacatcc

SEQ ID NO: 201402 - DNA, 51 bp, Artificial
  Synthetic oligonucleotide
gcgccagcgcttagagcggcagaatgtctcagtgcctcggcagtgcttatt

SEQ ID NO: 201403 - DNA, 51 bp, Artificial
  Synthetic oligonucleotide
gtcaagcagccataagccttggaacccttgcgggaggctggcgcattgtac

SEQ ID NO: 201404 - DNA, 60 bp, Artificial
  Synthetic oligonucleotide
tggtgcacggctcgtattagttggggatagagctcagctacccagtgtgaatgcagggcg

SEQ ID NO: 201405 - DNA, 51 bp, Artificial
  Synthetic oligonucleotide
cgccccggccgatcaaattagcggggacttcgttgagtcttgtacacgcga

SEQ ID NO: 201406 - DNA, 51 bp, Artificial
  Synthetic oligonucleotide
aggcatgtctggcgtgcggcttgagtctcgggtgcatatcgttactggcct

SEQ ID NO: 201407 - DNA, 51 bp, Artificial
  Synthetic oligonucleotide
gatatgcacccgagactcaagccgcacgccagacatgcctataggctcgcg

SEQ ID NO: 201408 - DNA, 51 bp, Artificial
  Synthetic oligonucleotide
gatactccaaccacagaaactagtgtaagtttaaatactacggcacctcaa

SEQ ID NO: 201409 - DNA, 51 bp, Artificial
  Synthetic oligonucleotide
cgattgcagaagagggcgttatcgcagcgggccgaaatacgcgtagtggct

SEQ ID NO: 201410 - DNA, 51 bp, Artificial
  Synthetic oligonucleotide
gcggatccgttctggattaacggggcgctcatccacgccacgagctagctc

SEQ ID NO: 201411 - DNA, 51 bp, Artificial
  Synthetic oligonucleotide
taagccttggaacccttgcgggaggctggcgcattgtacataccatgggaa

SEQ ID NO: 201412 - DNA, 51 bp, Artificial
  Synthetic oligonucleotide
ccgggatacgcgaacaagtcgcggcacgtaagccgtggagacgaattggca

SEQ ID NO: 201413 - DNA, 50 bp, Artificial
  Synthetic oligonucleotide
cgcgaaattttaaagctaacgatatacgaaatggtcaatgtgcgactctt

SEQ ID NO: 201414 - DNA, 50 bp, Artificial
  Synthetic oligonucleotide
ctaccgcggcattgggatctgggggactaaacgcgggtgagaaccccggg

SEQ ID NO: 201415 - DNA, 60 bp, Artificial
  Synthetic oligonucleotide
tgaacactattcagggacgtgctattgcggcaagtagtgatactaaaatcattatgcgcc

SEQ ID NO: 201416 - DNA, 50 bp, Artificial
  Synthetic oligonucleotide
atatcctaaagaataagaggtgagttgaaacgcagctcacacctgcccca

SEQ ID NO: 201417 - DNA, 50 bp, Artificial
  Synthetic oligonucleotide
ccttgcggcaaccctacttggcggttgtattgcaatcctgtggggctgga

SEQ ID NO: 201418 - DNA, 50 bp, Artificial
  Synthetic oligonucleotide
ataatcgggttgttcaggcaacacgctaaaccgatagttcgaacgggctt

SEQ ID NO: 201419 - DNA, 50 bp, Artificial
  Synthetic oligonucleotide
ttgttgcccgctgcgttcttagctcgggggcagtagcatacacagcgcac

SEQ ID NO: 201420 - DNA, 50 bp, Artificial
  Synthetic oligonucleotide
gggcaaccgctcgaggaagtgttgtccgccaccgagcaattaccccgtta

SEQ ID NO: 201421 - DNA, 50 bp, Artificial
  Synthetic oligonucleotide
cccaggtgcgggtcacgacgcgaacacctcccatagggccaatgctttca

SEQ ID NO: 201422 - DNA, 50 bp, Artificial
  Synthetic oligonucleotide
gggaaccggccgttccatgggggctgccttcacatcaagtaagtggggac

SEQ ID NO: 201423 - DNA, 50 bp, Artificial
  Synthetic oligonucleotide
actcaggatcaacccaggtgcgggtcacgacgcgaacacctcccataggg

SEQ ID NO: 201424 - DNA, 50 bp, Artificial
  Synthetic oligonucleotide
gcagaacccggggttcgctatgctgcgtccaggcaacgatgaatccccaa

SEQ ID NO: 201425 - DNA, 50 bp, Artificial
  Synthetic oligonucleotide
agtgactcccggtgctacagctacttccggagtgggcaatgcggcatgta

SEQ ID NO: 201426 - DNA, 60 bp, Artificial
  Synthetic oligonucleotide
tcttaaacgcaagaaagaacgtcagctcaaatatgaagaggcacgccttgatgagcatgc

SEQ ID NO: 201427 - DNA, 50 bp, Artificial
  Synthetic oligonucleotide
ccgcgcgcaaacgagcaagccttgccgtcaaggtttgagtcaccaaggcg

SEQ ID NO: 201428 - DNA, 50 bp, Artificial
  Synthetic oligonucleotide
ccgcaaccaagtcgcggcacgtaagtggtggggatgaactgtcaacacgc

SEQ ID NO: 201429 - DNA, 50 bp, Artificial
  Synthetic oligonucleotide
ggcctggaagttccgtgccgagcaccgttgatatgagtgatgcgccccac

SEQ ID NO: 201430 - DNA, 50 bp, Artificial
  Synthetic oligonucleotide
cccgaggtaccgcaagacaatttaggcacgtacaccctgcaagccggcga

SEQ ID NO: 201431 - DNA, 50 bp, Artificial
  Synthetic oligonucleotide
gcatcaccacgcaaggttggttgacccattggcctaccttcgccgccatt

SEQ ID NO: 201432 - DNA, 50 bp, Artificial
  Synthetic oligonucleotide
aattcactaccgtgcggtggatgcacacggggtgggtattgacgaggggc

SEQ ID NO: 201433 - DNA, 50 bp, Artificial
  Synthetic oligonucleotide
aattcgtctccacggcttacgtgccgcgacttgttcgcgtatcccggaga

SEQ ID NO: 201434 - DNA, 50 bp, Artificial
  Synthetic oligonucleotide
gccacgcgtaatctgccttccagccacgagataacgcggccatccaagcg

SEQ ID NO: 201435 - DNA, 50 bp, Artificial
  Synthetic oligonucleotide
caccgagaccgcggcaataagaccataactgaacgccggttgggggccat

SEQ ID NO: 201436 - DNA, 50 bp, Artificial
  Synthetic oligonucleotide
tagtggcgaagggtgaacgcgttttggggcatggtcacgagagtgcgttt

SEQ ID NO: 201437 - DNA, 60 bp, Artificial
  Synthetic oligonucleotide
tcctgcaagccaacaggtttcacctgtggcatatggcttaactacgcaggatgtcttgat

SEQ ID NO: 201438 - DNA, 50 bp, Artificial
  Synthetic oligonucleotide
cggttgcacgaggtttacgccgattaagttccccttagacttggagacgg

SEQ ID NO: 201439 - DNA, 50 bp, Artificial
  Synthetic oligonucleotide
taacctggggaacaatggcgatgcttgtaagcgcaggcattggctcgctg

SEQ ID NO: 201440 - DNA, 50 bp, Artificial
  Synthetic oligonucleotide
cggtgctacagctacttccggagtgggcaatgcggcatgtaccacgggaa

SEQ ID NO: 201441 - DNA, 50 bp, Artificial
  Synthetic oligonucleotide
tatggcgacccaggttctggccggtatggatggccctcctacgcgggaga

SEQ ID NO: 201442 - DNA, 50 bp, Artificial
  Synthetic oligonucleotide
ccgtgccgagcaccgttgatatgagtgatgcgccccacataccttgggcg

SEQ ID NO: 201443 - DNA, 50 bp, Artificial
  Synthetic oligonucleotide
tattggggattcatcgttgcctggacgcagcatagcgaaccccgggttct

SEQ ID NO: 201444 - DNA, 50 bp, Artificial
  Synthetic oligonucleotide
aggccagtaacgatatgcacccgagactcaagccgcacgccagacatgcc

SEQ ID NO: 201445 - DNA, 50 bp, Artificial
  Synthetic oligonucleotide
tcaacggctaaaacgctagcgcccgccatcgttccggctaaggtctgtgc

SEQ ID NO: 201446 - DNA, 50 bp, Artificial
  Synthetic oligonucleotide
attttgcgatggctatggcgacccaggttctggccggtatggatggccct

SEQ ID NO: 201447 - DNA, 50 bp, Artificial
  Synthetic oligonucleotide
acgccgcagctaaaggcaacaccagaacgcctgcgggcaaggtcttagca

SEQ ID NO: 201448 - DNA, 60 bp, Artificial
  Synthetic oligonucleotide
tcctatggagctaatagtattcgagatggaatatctcttggtagccagcgtgtgacacgt

SEQ ID NO: 201449 - DNA, 50 bp, Artificial
  Synthetic oligonucleotide
agcacaatacccgttggtgtggggatgggcgcttctgccgctctttgcgt

SEQ ID NO: 201450 - DNA, 50 bp, Artificial
  Synthetic oligonucleotide
gtacgcgcgcctgtcgtttctgtgccgtagatacgggcaatccgcatggc

SEQ ID NO: 201451 - DNA, 50 bp, Artificial
  Synthetic oligonucleotide
gcaactattggtgccacgatgggaactgcgattggagccgcaacgacggg

SEQ ID NO: 201452 - DNA, 50 bp, Artificial
  Synthetic oligonucleotide
aagtaattttgcccatcgggcactagcactgtctcaattatcaggacacg

SEQ ID NO: 201453 - DNA, 50 bp, Artificial
  Synthetic oligonucleotide
tcctggcgctacaggaacatcaggggcgggcaatgtggcatgtaccactg

SEQ ID NO: 201454 - DNA, 50 bp, Artificial
  Synthetic oligonucleotide
gggcggtgtaaatacctcgggccattagtttcttttcccattgtcgccct

SEQ ID NO: 201455 - DNA, 58 bp, Artificial
  Synthetic oligonucleotide
tcaacttaccgctgttgtttctggggtattgaaacgctatgtggggcttcaatcgcta

SEQ ID NO: 201456 - DNA, 60 bp, Artificial
  Synthetic oligonucleotide
gtcgtgttttgtatgtacgcggtacccatgtgaatgcactgtcgcagttaccttcctatc

SEQ ID NO: 201457 - DNA, 58 bp, Artificial
  Synthetic oligonucleotide
tattgtcgggacgggtgtttttgtcagcatcggaattgcggcgggtgtcacaggacca

SEQ ID NO: 201458 - DNA, 57 bp, Artificial
  Synthetic oligonucleotide
tattgaaactgaattccaatccgttttcgataagtggcaatttcgctacaacatccc

SEQ ID NO: 201459 - DNA, 57 bp, Artificial
  Synthetic oligonucleotide
tatcacctatccgtattgttcctgaaatagaacgagttaatcagaaagttactagag

SEQ ID NO: 201460 - DNA, 59 bp, Artificial
  Synthetic oligonucleotide
tatatctgcagacgatacaccgggtacggacttttggaaatcttctacagaatggctta

SEQ ID NO: 201461 - DNA, 58 bp, Artificial
  Synthetic oligonucleotide
tatagcaagcctaccaagtataactactggaacaggatttggcatattacgtctaaaa

SEQ ID NO: 201462 - DNA, 60 bp, Artificial
  Synthetic oligonucleotide
tacaactatcatgggcgtatagttcagtctattatggacctgccctctgtacttacccac

SEQ ID NO: 201463 - DNA, 60 bp, Artificial
  Synthetic oligonucleotide
taagtaaaaggcctagctcttgtgggcagcaattactttgtcctgaacagacttatgatg

SEQ ID NO: 201464 - DNA, 58 bp, Artificial
  Synthetic oligonucleotide
taagaaactagcgggaattactcgattagcagacttaacacatttagattacaccagc

SEQ ID NO: 201465 - DNA, 60 bp, Artificial
  Synthetic oligonucleotide
gttggagcgatgatcgtacttacaggctgtgcggcaactcacactgtcctagaacacggt

SEQ ID NO: 201466 - DNA, 60 bp, Artificial
  Synthetic oligonucleotide
aaagtcgttaaggaacaacctccagttgatcgcttatcgcaagaggatgcattgattggc

SEQ ID NO: 201467 - DNA, 59 bp, Artificial
  Synthetic oligonucleotide
gtcaaacgagcagaacaataccatccggtgattcaggtaggttctggcaatgtggttac

SEQ ID NO: 201468 - DNA, 56 bp, Artificial
  Synthetic oligonucleotide
aattaaccgtgtgaataccttaagccgcaatgaaacaggaggtttacaatgagaca

SEQ ID NO: 201469 - DNA, 60 bp, Artificial
  Synthetic oligonucleotide
aatgcaattggggcattacgagacaatcaactcctgacagtcagcttgtttgagggaacg

SEQ ID NO: 201470 - DNA, 55 bp, Artificial
  Synthetic oligonucleotide
acacaccacggccaacctttgcgtgtgactaaacaaccgacttgtaccgacacaa

SEQ ID NO: 201471 - DNA, 59 bp, Artificial
  Synthetic oligonucleotide
aataccaagccgcattgagaatgtaattctcgataatgaaattgtcaacggaaggtatc

SEQ ID NO: 201472 - DNA, 60 bp, Artificial
  Synthetic oligonucleotide
agacggtacgctaccgaatggtcagcgctcacgcttaagagggtgccgagtcagtgccaa

SEQ ID NO: 201473 - DNA, 60 bp, Artificial
  Synthetic oligonucleotide
agacagacgtttcacagtcaactccccattaatcgctgcaatcacaatccgtccatcagt

SEQ ID NO: 201474 - DNA, 55 bp, Artificial
  Synthetic oligonucleotide
agatttgggtcgtcacaaaggaacctttacggattgggccatggcacgtcagaaa

SEQ ID NO: 201475 - DNA, 56 bp, Artificial
  Synthetic oligonucleotide
aactattaaaggtggctgtattaatcgttccctcaaacaagctgactgtcaggagt

SEQ ID NO: 201476 - DNA, 55 bp, Artificial
  Synthetic oligonucleotide
actgctcggaatcgttattcctttagatctgacgtaattaagtaataaattagcg

SEQ ID NO: 201477 - DNA, 57 bp, Artificial
  Synthetic oligonucleotide
acgaacagggacatctagtaaaatggggtccaatctcctcaggtcgcgataagtgcg

SEQ ID NO: 201478 - DNA, 60 bp, Artificial
  Synthetic oligonucleotide
gggagatagcatatcggaaagtgagacaggtcaatactccaaagccttatcaaccattag

SEQ ID NO: 201479 - DNA, 60 bp, Artificial
  Synthetic oligonucleotide
actgcgccgattcaacattagcatactacaatacaccttggtggctctgcagtgaatctt

SEQ ID NO: 201480 - DNA, 58 bp, Artificial
  Synthetic oligonucleotide
acccgatacagataatgcctcaagtcctatcggtgtatgcccaagccctatgggttta

SEQ ID NO: 201481 - DNA, 59 bp, Artificial
  Synthetic oligonucleotide
tcactcagtatgagcttttctcgaactgtggtgccacaacgatataagtcagtgacaac

SEQ ID NO: 201482 - DNA, 55 bp, Artificial
  Synthetic oligonucleotide
agtgaatcttttaccacttgccctaatcctacctggactcgttctaacgatggat

SEQ ID NO: 201483 - DNA, 58 bp, Artificial
  Synthetic oligonucleotide
ctaccgctatgagatagtgaatcaggtagctgatggcaaacattgctacccagggggt

SEQ ID NO: 201484 - DNA, 57 bp, Artificial
  Synthetic oligonucleotide
aggccactaatgccgtcataaggaccggtctgagtcgagccagcgacccttgcaata

SEQ ID NO: 201485 - DNA, 56 bp, Artificial
  Synthetic oligonucleotide
ggcttaattacgttataacccacgattatcacacaacgttatcaacagattttgtg

SEQ ID NO: 201486 - DNA, 57 bp, Artificial
  Synthetic oligonucleotide
gatgcaaccgcttatcttacaacaacttaccaagcaagcatcgggtattagtcgaca

SEQ ID NO: 201487 - DNA, 57 bp, Artificial
  Synthetic oligonucleotide
cagtcaatcgttgtgggttgcaacacgccttaaggagcaatcatgggtttagacttc

SEQ ID NO: 201488 - DNA, 57 bp, Artificial
  Synthetic oligonucleotide
ctgcagccttagtacgtgagctcattacacaacaatttccacagtggggtcagctac

SEQ ID NO: 201489 - DNA, 60 bp, Artificial
  Synthetic oligonucleotide
ggctcccagatgccagaggtggatgggcgaggtgcgttctattacgttcattggtacaag

SEQ ID NO: 201490 - DNA, 57 bp, Artificial
  Synthetic oligonucleotide
ctgacataaattgagagtatctctgacgttctttgtaggtataccttattagtacgc

SEQ ID NO: 201491 - DNA, 57 bp, Artificial
  Synthetic oligonucleotide
caacgagcctaatttcaaacactatactcgtggcgggcaaatcagtttccataatct

SEQ ID NO: 201492 - DNA, 56 bp, Artificial
  Synthetic oligonucleotide
gcatgcgaataaatgggataccaattatcagcatatggaagggcgggctactgttc

SEQ ID NO: 201493 - DNA, 55 bp, Artificial
  Synthetic oligonucleotide
gatgagccacaagatatcacttacaagggcgagccaactcgtcttgaaatcggcg

SEQ ID NO: 201494 - DNA, 55 bp, Artificial
  Synthetic oligonucleotide
aagttagccaataagaagcgcgctgtatttcgaattcttcggtaagcatctgcgt

SEQ ID NO: 201495 - DNA, 55 bp, Artificial
  Synthetic oligonucleotide
tcagagatgagctttgtgttaagtcctgagtcagtattgtttggcaaccctgtgg

SEQ ID NO: 201496 - DNA, 55 bp, Artificial
  Synthetic oligonucleotide
gcaagttcctgagcgctgggacttattgtagattagtattgctgtgtgaggcggg

SEQ ID NO: 201497 - DNA, 55 bp, Artificial
  Synthetic oligonucleotide
gcaattcaagtggcctctcttatagtagttagcgtcctgactctggtgacttatg

SEQ ID NO: 201498 - DNA, 55 bp, Artificial
  Synthetic oligonucleotide
actcgcgctatgcgaattgcagaggccaaacactatgtagaatcaaaatcggagc

SEQ ID NO: 201499 - DNA, 55 bp, Artificial
  Synthetic oligonucleotide
gcactaagaccttgcttgatacattactctccgaagttgataacgcgctgcgtac

SEQ ID NO: 201500 - DNA, 59 bp, Artificial
  Synthetic oligonucleotide
gcgttcacggtactcgtctcctgtttgcaatgtcagtgtgcgtaaaccaagggctagga

SEQ ID NO: 201501 - DNA, 55 bp, Artificial
  Synthetic oligonucleotide
gcatacgcatgtacccatactcaacatgaccgaacgttcggatgggttatggcgt

SEQ ID NO: 201502 - DNA, 55 bp, Artificial
  Synthetic oligonucleotide
gccagctacactgggcggacctttgtgtagtctcgaatgcctgatgctaatgtag

SEQ ID NO: 201503 - DNA, 54 bp, Artificial
  Synthetic oligonucleotide
gcccaaaacctgagttcgggacaattgaattacgtgtttgcgacactcccttaa

SEQ ID NO: 201504 - DNA, 55 bp, Artificial
  Synthetic oligonucleotide
gccccacaggattgcaatacaaccgccaagtagggttgccgcaaggatttgggct

SEQ ID NO: 201505 - DNA, 55 bp, Artificial
  Synthetic oligonucleotide
gccgagtcgattgacacgttgggcaaagcttatggagccttagtgacttcctcta

SEQ ID NO: 201506 - DNA, 55 bp, Artificial
  Synthetic oligonucleotide
gcctatatctatcacacttcacggggtttccggaaaagtagaggctaatgttgaa

SEQ ID NO: 201507 - DNA, 55 bp, Artificial
  Synthetic oligonucleotide
gccttcaagtagcgctatttgttcgagctcttctgcagaatctgcccaatcgaat

SEQ ID NO: 201508 - DNA, 55 bp, Artificial
  Synthetic oligonucleotide
gcgagaaagcgctacaggaacatcaggtacacatgatagtctcaataccacagta

SEQ ID NO: 201509 - DNA, 55 bp, Artificial
  Synthetic oligonucleotide
gcgagttggaacgaaagtcatcgtattagcctaccctgatcaaaacggggtgaaa

SEQ ID NO: 201510 - DNA, 55 bp, Artificial
  Synthetic oligonucleotide
ctgatacaaatgagcgatatagacctgtcaggaaaacgggtgctaattcgtgagg

SEQ ID NO: 201511 - DNA, 59 bp, Artificial
  Synthetic oligonucleotide
gcacgtgcattaatgagacttcctatcttttttcgctctgtagtccaagaaggaattag

SEQ ID NO: 201512 - DNA, 55 bp, Artificial
  Synthetic oligonucleotide
ttccaccttggcatgctgataattacgccatgtgtctttgagtacactccaaggt

SEQ ID NO: 201513 - DNA, 55 bp, Artificial
  Synthetic oligonucleotide
ttacgtctgggcaggaactcatgccgaaggcattttactaagcggagctaaaggg

SEQ ID NO: 201514 - DNA, 55 bp, Artificial
  Synthetic oligonucleotide
ctgctcaattgggaacaggtgagtttcatcgattacgtatagggataggtcatcc

SEQ ID NO: 201515 - DNA, 55 bp, Artificial
  Synthetic oligonucleotide
aaccactaaccgtataaccagtatctggatttgcactatataccgaactatttgc

SEQ ID NO: 201516 - DNA, 55 bp, Artificial
  Synthetic oligonucleotide
ctggataccctggcgctctcaacaaatcaggctaagctggaattggccatgtcac

SEQ ID NO: 201517 - DNA, 55 bp, Artificial
  Synthetic oligonucleotide
tgatgatgcggcgatataccttcaatgcttgatagaagttagcatggcggggcgt

SEQ ID NO: 201518 - DNA, 55 bp, Artificial
  Synthetic oligonucleotide
tgaactactcctcgctatatcaccctctgcaaaaggctgacgaactcctatacat

SEQ ID NO: 201519 - DNA, 55 bp, Artificial
  Synthetic oligonucleotide
aactactggacaacaagtagttggcgtggcatctgaggttattcctcggtctaaa

SEQ ID NO: 201520 - DNA, 55 bp, Artificial
  Synthetic oligonucleotide
gaaaggtaaaccactacccatcggatacacgtcaataatagatccacgtagtgcg

SEQ ID NO: 201521 - DNA, 55 bp, Artificial
  Synthetic oligonucleotide
tctcatagggctttatgtcgttttgtcctttcaggctcgtcctcacacaatgaca

SEQ ID NO: 201522 - DNA, 60 bp, Artificial
  Synthetic oligonucleotide
gatgtggcctaaagcgattaaggagatccgtcaatgaacgcacttcaactcttcgtgtta

SEQ ID NO: 201523 - DNA, 55 bp, Artificial
  Synthetic oligonucleotide
gacgcgttcttgtaagatgctatataacgtcgtgttattttccagacgtgctgaa

SEQ ID NO: 201524 - DNA, 55 bp, Artificial
  Synthetic oligonucleotide
gacgtacctcaagacgcgtcccttgaaactcataggttgtttgggagtattgtgc

SEQ ID NO: 201525 - DNA, 55 bp, Artificial
  Synthetic oligonucleotide
gactatggaaccagtgactatagccctcatctgtgcggcgtcgtttggagcagtt

SEQ ID NO: 201526 - DNA, 55 bp, Artificial
  Synthetic oligonucleotide
gactgaagcagcgccatttgctgtgacactcaacgaattagttaaggcataggca

SEQ ID NO: 201527 - DNA, 55 bp, Artificial
  Synthetic oligonucleotide
gaggcaagtagtttccaattggggtatgggtatcaggatgtcgacattaaaacgg

SEQ ID NO: 201528 - DNA, 55 bp, Artificial
  Synthetic oligonucleotide
tcggaacctatgtatcttagtagcgctcgcaccagtagcgcttatttgagcatgt

SEQ ID NO: 201529 - DNA, 55 bp, Artificial
  Synthetic oligonucleotide
gataaatcaatgctgttccgaaagcccataacactaatttatagcacggatgagt

SEQ ID NO: 201530 - DNA, 55 bp, Artificial
  Synthetic oligonucleotide
ggggagatggtcaagagataagtctgtaatctcacctgctatttgggtcgaatag

SEQ ID NO: 201531 - DNA, 49 bp, Artificial
  Synthetic oligonucleotide
gggtattattttacgtttaggacgtttggtaaaagaccctcaaactgac

SEQ ID NO: 201532 - DNA, 55 bp, Artificial
  Synthetic oligonucleotide
ggtagtagcctatgccaatgcacatatcgcacttcctcaagaacgccagagcttc

SEQ ID NO: 201533 - DNA, 55 bp, Artificial
  Synthetic oligonucleotide
atgcaaatgtttcgcgaagagttcccacaactacgttttcactgtgaagtggacc

SEQ ID NO: 201534 - DNA, 55 bp, Artificial
  Synthetic oligonucleotide
gccgacacaggacttctgttcacccggtcgcagtgtatcccaagttcgagtcgtc

SEQ ID NO: 201535 - DNA, 55 bp, Artificial
  Synthetic oligonucleotide
gctaacgcgggtacgggtatctcactcggcttcggttgtactgtaggtgctggca

SEQ ID NO: 201536 - DNA, 55 bp, Artificial
  Synthetic oligonucleotide
gctacggtgcagaacttgatcgacaccattgacatgatcgtagtgactatgcgtc

SEQ ID NO: 201537 - DNA, 55 bp, Artificial
  Synthetic oligonucleotide
ggagcctggggtttcgatggattaggagaggacagtggtcgtgtgtatattatta

SEQ ID NO: 201538 - DNA, 55 bp, Artificial
  Synthetic oligonucleotide
ggatggcggttatggggataaaggaacgagcaattacccttatcgctcggcgaag

SEQ ID NO: 201539 - DNA, 55 bp, Artificial
  Synthetic oligonucleotide
ggggaagctggtattcgagtcatactataggcgtggtcgtcaaaatgtgcctcat

SEQ ID NO: 201540 - DNA, 55 bp, Artificial
  Synthetic oligonucleotide
ggtacctttccattgaaccgcaaagggaacacgtgtgccaccttcgtgaagtgag

SEQ ID NO: 201541 - DNA, 55 bp, Artificial
  Synthetic oligonucleotide
taattgcatcgggagtatatcaatgagtcagggtgtagcgattatcatgtcaggg

SEQ ID NO: 201542 - DNA, 55 bp, Artificial
  Synthetic oligonucleotide
tacggcaaggggaaagctattcaatatgacaactggagattggtcagcgatgctg

SEQ ID NO: 201543 - DNA, 55 bp, Artificial
  Synthetic oligonucleotide
tgcaaatggccgttggaaacttcacctgcctcatagttaccgccatgtacaagtc

SEQ ID NO: 201544 - DNA, 55 bp, Artificial
  Synthetic oligonucleotide
atgttctggacaatcgctaaaagcaactgcgactcgctagagagttcgcttgggg

SEQ ID NO: 201545 - DNA, 55 bp, Artificial
  Synthetic oligonucleotide
tttgtactaagtatggtgtaaagaatggcgcccaaagcataaacatcggtcaaag

SEQ ID NO: 201546 - DNA, 53 bp, Artificial
  Synthetic oligonucleotide
aaaatcctgccagtaagctttgacgcgatcgtaaccgtaacccttttcactat

SEQ ID NO: 201547 - DNA, 54 bp, Artificial
  Synthetic oligonucleotide
ttaccacaccctatccctatcaaggcaactcggataccgagaccatactcgccg

SEQ ID NO: 201548 - DNA, 54 bp, Artificial
  Synthetic oligonucleotide
ctcgtggcacttacggtcttcactacccttggggcgagcaatctcccacaatag

SEQ ID NO: 201549 - DNA, 54 bp, Artificial
  Synthetic oligonucleotide
ctacaatagtggacgcctagcttacgtcaactgcagatatcatagaccttacat

SEQ ID NO: 201550 - DNA, 54 bp, Artificial
  Synthetic oligonucleotide
caatcgacccgatttcaaatagggagtaaagaagtcactcgtcccttgcgtcca

SEQ ID NO: 201551 - DNA, 51 bp, Artificial
  Synthetic oligonucleotide
gaacgcttggctgttgagtggctcgacgtagcgagttatggagattcgcag

SEQ ID NO: 201552 - DNA, 51 bp, Artificial
  Synthetic oligonucleotide
gatacttaggttacggctatcatataagcttaggagatcatcccagctaat

SEQ ID NO: 201553 - DNA, 51 bp, Artificial
  Synthetic oligonucleotide
gcctcgctaaacatccctaagctagcttctctcgtagaatgtaatccggat

SEQ ID NO: 201554 - DNA, 50 bp, Artificial
  Synthetic oligonucleotide
agccggaatcttaatcaatggttggacgagccccatgctcggaccccgcc

SEQ ID NO: 201555 - DNA, 55 bp, Artificial
  Synthetic oligonucleotide
cacctgcgagcaacttacgagcaatcatggtctcgagctgacgttgcaagtagcg

SEQ ID NO: 201556 - DNA, 50 bp, Artificial
  Synthetic oligonucleotide
agccgaggccatagttgagccaagcgccgatagagggacgaccagcaatc

SEQ ID NO: 201557 - DNA, 50 bp, Artificial
  Synthetic oligonucleotide
agccaggggaagcggtccaatgtggatcgtgtgggacggttctcaaggtt

SEQ ID NO: 201558 - DNA, 50 bp, Artificial
  Synthetic oligonucleotide
actcgcaggaaggctctcgtgtttgtgcccatcgttcggaccgtgagcga

SEQ ID NO: 201559 - DNA, 50 bp, Artificial
  Synthetic oligonucleotide
acgtcttactcttcgtgagctcgcaagtcagggtctcgttcctggcatga

SEQ ID NO: 201560 - DNA, 50 bp, Artificial
  Synthetic oligonucleotide
acggtcgggatctttgaggtagccccgcatggtgcctggactgcgcacta

SEQ ID NO: 201561 - DNA, 50 bp, Artificial
  Synthetic oligonucleotide
acgatgcgactaagcgtggcggaacagcggagtcgggcagtgcttggcat

SEQ ID NO: 201562 - DNA, 50 bp, Artificial
  Synthetic oligonucleotide
accactggtgggctctccccgagtaactggtgatgtaagccgcctcacgg

SEQ ID NO: 201563 - DNA, 50 bp, Artificial
  Synthetic oligonucleotide
acaggcaagagcccggcgaccatggggattaacgtacccgtcaccaaggg

SEQ ID NO: 201564 - DNA, 50 bp, Artificial
  Synthetic oligonucleotide
ggtataataaagcgaccagaatacctagcaaaacacgcccttaagccact

SEQ ID NO: 201565 - DNA, 50 bp, Artificial
  Synthetic oligonucleotide
acagcgtccccatgggaggaccgttgacttacggcagtgtgggcccgaac

SEQ ID NO: 201566 - DNA, 55 bp, Artificial
  Synthetic oligonucleotide
caggtatcgccacagtacctcaatatctcggagtaaggttcgataatcaaactcg

SEQ ID NO: 201567 - DNA, 50 bp, Artificial
  Synthetic oligonucleotide
aagacgaactcccccaaatccgccccatgtcaatgcgccctcaggctcac

SEQ ID NO: 201568 - DNA, 50 bp, Artificial
  Synthetic oligonucleotide
aacggcattcgtacggtcgggatctttgaggtagccccgcatggtgcctg

SEQ ID NO: 201569 - DNA, 50 bp, Artificial
  Synthetic oligonucleotide
atagcgcgcgagcatccaagcttgtggtacggcaatcagagcgccaccaa

SEQ ID NO: 201570 - DNA, 50 bp, Artificial
  Synthetic oligonucleotide
atccctacccaacgtctgcgtgtggtatggggaactcgcgacactgccgc

SEQ ID NO: 201571 - DNA, 50 bp, Artificial
  Synthetic oligonucleotide
aggtgccgccaatcacgctctttttcagatgcgtgcgccaagcatagcgc

SEQ ID NO: 201572 - DNA, 50 bp, Artificial
  Synthetic oligonucleotide
cacgtggtggtccttataagccggcgcactggggcatgtccactcggacc

SEQ ID NO: 201573 - DNA, 50 bp, Artificial
  Synthetic oligonucleotide
cagcccctctgcggccccagtagagcgagtgtgatgtcaggtttgcgacc

SEQ ID NO: 201574 - DNA, 50 bp, Artificial
  Synthetic oligonucleotide
aggggtgagggttcctctaatcgtttgggcgcctggcttagttgaggcgg

SEQ ID NO: 201575 - DNA, 50 bp, Artificial
  Synthetic oligonucleotide
ccagtacggtaggggttgcggccagttaggacactagcgcgagtggggga

SEQ ID NO: 201576 - DNA, 50 bp, Artificial
  Synthetic oligonucleotide
cccgtttgtggaccttcgcgttcagcgctattgacgggacgttacccggc

SEQ ID NO: 201577 - DNA, 51 bp, Artificial
  Synthetic oligonucleotide
cgacaacaccaagaaaccgtatacaaaccgaagtaattttgcccggcctta

SEQ ID NO: 201578 - DNA, 50 bp, Artificial
  Synthetic oligonucleotide
ccgatgcctctggcgatgtcaatgggagcaggttcagtggccgagcctta

SEQ ID NO: 201579 - DNA, 50 bp, Artificial
  Synthetic oligonucleotide
ccggatgtaaccccgtcaacaaagaccccctggtcggaacgcaacgcgcc

SEQ ID NO: 201580 - DNA, 50 bp, Artificial
  Synthetic oligonucleotide
ccgggccgggcttagagaagggcgcaatgtgcaataaagccgtttcgctt

SEQ ID NO: 201581 - DNA, 50 bp, Artificial
  Synthetic oligonucleotide
cctactaatgagccaacagcggagccggtgccgttaaagcgccaccagta

SEQ ID NO: 201582 - DNA, 50 bp, Artificial
  Synthetic oligonucleotide
aggccacaggccgtaaactcagcgccaaacgccctgcctatcacttcggg

SEQ ID NO: 201583 - DNA, 50 bp, Artificial
  Synthetic oligonucleotide
cgagcggccctcgtcactggccgatacgcgagccgtgttggcgtttggca

SEQ ID NO: 201584 - DNA, 50 bp, Artificial
  Synthetic oligonucleotide
cgatggggaatggctccactagcgagcaggtcggtaatagccggtgcgta

SEQ ID NO: 201585 - DNA, 50 bp, Artificial
  Synthetic oligonucleotide
cgcgcagcgactagcgttgggattcttaaggggtgttgccacaaaggcgg

SEQ ID NO: 201586 - DNA, 50 bp, Artificial
  Synthetic oligonucleotide
agcgggaggaccacctgcttggtaacctgtcttggcaaaaggacgccctt

SEQ ID NO: 201587 - DNA, 50 bp, Artificial
  Synthetic oligonucleotide
cggggcttcggctcaacaaaccccgcagaccacacaaaagggtcttcagc

SEQ ID NO: 201588 - DNA, 55 bp, Artificial
  Synthetic oligonucleotide
cggactataccaaacctacgatagaccccagacttgcagattgggtcaaaggcac

SEQ ID NO: 201589 - DNA, 50 bp, Artificial
  Synthetic oligonucleotide
cgggtggtatgcaatgggcacccggtagaggtgtgtttggcggtgcggcc

SEQ ID NO: 201590 - DNA, 50 bp, Artificial
  Synthetic oligonucleotide
caatgtcccatgtgcattccggtcatcaggcttccccgggatggggcgca

SEQ ID NO: 201591 - DNA, 50 bp, Artificial
  Synthetic oligonucleotide
agcgcgaggactccctacactccctaaggtctgcggccactccctaaggc

SEQ ID NO: 201592 - DNA, 55 bp, Artificial
  Synthetic oligonucleotide
ctcgccgactctaaactgtggatcactagcagtatcaatgggatcaacaaattcc

SEQ ID NO: 201593 - DNA, 55 bp, Artificial
  Synthetic oligonucleotide
gagcaactgcaggcatgtagtagatagcggcttgagtcgcacgctgaaccataac

SEQ ID NO: 201594 - DNA, 55 bp, Artificial
  Synthetic oligonucleotide
gaggattgagttagcgcagtcaagttcgatacctttagcaaggtagtcaacgttt

SEQ ID NO: 201595 - DNA, 55 bp, Artificial
  Synthetic oligonucleotide
gcgatgacccaaagtcttcgtgatctgttgtcggactttcgaaattttttaaagc

SEQ ID NO: 201596 - DNA, 59 bp, Artificial
  Synthetic oligonucleotide
gagtaggggtctcatcaatcctttgtgtggtataaatccctccatggaatacccattca

SEQ ID NO: 201597 - DNA, 55 bp, Artificial
  Synthetic oligonucleotide
ggaatctctcgttctccgagaaggtcatgttcgatccgaacgtttgtttgtatca

SEQ ID NO: 201598 - DNA, 55 bp, Artificial
  Synthetic oligonucleotide
tatctacgagtcttgtaactaaccgatcgttaaataagtgttcgtcgactaactc

SEQ ID NO: 201599 - DNA, 55 bp, Artificial
  Synthetic oligonucleotide
gctacgcttcgggacaagccctcgctcgggctacgccaaattgtcctcctggcat

SEQ ID NO: 201600 - DNA, 55 bp, Artificial
  Synthetic oligonucleotide
gctaccatagaaccagtagttccgttaggcgtaatcggaccggtcgcgtgaagac

SEQ ID NO: 201601 - DNA, 55 bp, Artificial
  Synthetic oligonucleotide
tccagagatttacaactcggagaaattccagagctcaattcccctttgatcgtag

SEQ ID NO: 201602 - DNA, 55 bp, Artificial
  Synthetic oligonucleotide
gcgtctgcgtcgtaacaactccccatctatttcgtattccagcaggagattccga

SEQ ID NO: 201603 - DNA, 55 bp, Artificial
  Synthetic oligonucleotide
tccatcttaagcgacagagttttacacataccggaattgaacggagaagagaatg

SEQ ID NO: 201604 - DNA, 55 bp, Artificial
  Synthetic oligonucleotide
gcgcatatagatttgtacaaacccagcaatagtctcttgaacgcgccattttgct

SEQ ID NO: 201605 - DNA, 55 bp, Artificial
  Synthetic oligonucleotide
tctgattcggtttgaaattccgttgaactaagttcggagcaacccgattcccatg

SEQ ID NO: 201606 - DNA, 55 bp, Artificial
  Synthetic oligonucleotide
gcgagacgctgagttacttcgaacgacttattttacgatctgtcgggagcgagat

SEQ ID NO: 201607 - DNA, 56 bp, Artificial
  Synthetic oligonucleotide
accccacaacgcgattcatagagagcgttgtgctgagtttccctattttgggtggg

SEQ ID NO: 201608 - DNA, 54 bp, Artificial
  Synthetic oligonucleotide
atagggaattttcaaacgttccgcttgcgggagcctataaagatgaactccaac

SEQ ID NO: 201609 - DNA, 55 bp, Artificial
  Synthetic oligonucleotide
caaaacggataaaagagacgcgatcaaatgagcgagattaatgcgaagtggagaa

SEQ ID NO: 201610 - DNA, 55 bp, Artificial
  Synthetic oligonucleotide
caaaagaaacgcagacagttctctcagaaagatatggtgaccgcttgatttcatt

SEQ ID NO: 201611 - DNA, 55 bp, Artificial
  Synthetic oligonucleotide
caagagtagttcgaatgaattggatcggataactaccgtaaggtacaccagactc

SEQ ID NO: 201612 - DNA, 55 bp, Artificial
  Synthetic oligonucleotide
caatacctcgatcgccagaaatggctgtcgggtgatacccaactcgttctacgct

SEQ ID NO: 201613 - DNA, 55 bp, Artificial
  Synthetic oligonucleotide
cgcatagattgtctggattctcgcatccaggtacgctctcgcgattggatactcc

SEQ ID NO: 201614 - DNA, 55 bp, Artificial
  Synthetic oligonucleotide
cgcatactctccttagatggttgaggtgcgttatgaaactgaatctacgggagag

SEQ ID NO: 201615 - DNA, 55 bp, Artificial
  Synthetic oligonucleotide
cgcataaaggttatatagttgcagcttgcgacgcaacaggaataagcctacctaa

SEQ ID NO: 201616 - DNA, 55 bp, Artificial
  Synthetic oligonucleotide
cgatcgcaccaaaataactttatcgatcaagtgggcaactacgcataacagcgac

SEQ ID NO: 201617 - DNA, 53 bp, Artificial
  Synthetic oligonucleotide
cgagtttctctcgatcgagttgaatcggaaatcttagggttacgtttggaagg

SEQ ID NO: 201618 - DNA, 60 bp, Artificial
  Synthetic oligonucleotide
tacaaccacttctgtactattgatgatagaacctaataccagttcaatgctaggtgctgt

SEQ ID NO: 201619 - DNA, 55 bp, Artificial
  Synthetic oligonucleotide
cgagtggaagttaaaaccatttcgatggtaggaaggtcagcaatgggtgtcaaag

SEQ ID NO: 201620 - DNA, 55 bp, Artificial
  Synthetic oligonucleotide
caatgaaactccggaattgatgcctatgccaatctactattctcatgagctagtt

SEQ ID NO: 201621 - DNA, 55 bp, Artificial
  Synthetic oligonucleotide
cacggaaagaatcgtagaagacgcagtcatagaaaccgaaagcgccaaatctcct

SEQ ID NO: 201622 - DNA, 55 bp, Artificial
  Synthetic oligonucleotide
cctttctgatacaatgcgagaattgcgtctctaccttcggttccaagggaacgag

SEQ ID NO: 201623 - DNA, 55 bp, Artificial
  Synthetic oligonucleotide
cagaaggggcgccattttgtctaagtgcgcttacgattcaactttgtcgcatatc

SEQ ID NO: 201624 - DNA, 55 bp, Artificial
  Synthetic oligonucleotide
cctaatcccattcaaagcgatccattcgtctcctaaactcagatctacggaagtg

SEQ ID NO: 201625 - DNA, 55 bp, Artificial
  Synthetic oligonucleotide
cagcccgcaagaaatctatcttaactcggatatcctttaccttcccacactcgcc

SEQ ID NO: 201626 - DNA, 55 bp, Artificial
  Synthetic oligonucleotide
ccggtcgatccataaagaggcattcggcttgagttaacccgatccgtagagagcg

SEQ ID NO: 201627 - DNA, 55 bp, Artificial
  Synthetic oligonucleotide
ccggaccgatacgggtcgggcgtatcaatttgcttcttctccggtaggagctgag

SEQ ID NO: 201628 - DNA, 55 bp, Artificial
  Synthetic oligonucleotide
cagccgaacgttggcaccgatggcacaatctttatcgacaattgtccgtcgtatt

SEQ ID NO: 201629 - DNA, 58 bp, Artificial
  Synthetic oligonucleotide
cttgttagacggggaagcgtctatgagacatttcttaaatctgatcgcaggtgaaccg

SEQ ID NO: 201630 - DNA, 55 bp, Artificial
  Synthetic oligonucleotide
ccggaagacgcttatcgatatatgagtctggcattgaataattcctatcgaggag

SEQ ID NO: 201631 - DNA, 55 bp, Artificial
  Synthetic oligonucleotide
ccgctggaagattgatgaatacagtgtttgcttccgcagtagaaacggatacggt

SEQ ID NO: 201632 - DNA, 55 bp, Artificial
  Synthetic oligonucleotide
caggttatttgttgcccggctatatttatgaagtccctccgaatcatatcgatcg

SEQ ID NO: 201633 - DNA, 55 bp, Artificial
  Synthetic oligonucleotide
cagtttgatatacgtcgcacctaattgggaaaaggcctcgcgtaacatgatggcg

SEQ ID NO: 201634 - DNA, 55 bp, Artificial
  Synthetic oligonucleotide
ccgccgacctgaatgaattcggaataggaagaatcctcgacctctgtctcgattt

SEQ ID NO: 201635 - DNA, 55 bp, Artificial
  Synthetic oligonucleotide
ccgagtgcaagtccctgagaggccccttgtatttgttccgacgcaaacactttca

SEQ ID NO: 201636 - DNA, 55 bp, Artificial
  Synthetic oligonucleotide
cccggagctcctcctcgttttacccatgagactagttggatcggaaccattgcgg

SEQ ID NO: 201637 - DNA, 55 bp, Artificial
  Synthetic oligonucleotide
catcgtaggttcccatgcggaaccaaattgtaactctgcgaataaataatcaggt

SEQ ID NO: 201638 - DNA, 55 bp, Artificial
  Synthetic oligonucleotide
cattcctccgaacggagtgtatggctctcccgtaaccgtgtgataggtagactcg

SEQ ID NO: 201639 - DNA, 54 bp, Artificial
  Synthetic oligonucleotide
cgttcggaacgtttccgtagtagtgcatatttgaagaaacgacttggagtgaag

SEQ ID NO: 201640 - DNA, 57 bp, Artificial
  Synthetic oligonucleotide
ttccgccaagacatcacccaagtaaaataatcactcggatttcggggtgctaagcca

SEQ ID NO: 201641 - DNA, 55 bp, Artificial
  Synthetic oligonucleotide
cgtcacttgagctgagaactcgcgggatcctaacgaatgttaggcgtagctttcg

SEQ ID NO: 201642 - DNA, 55 bp, Artificial
  Synthetic oligonucleotide
cgtattgtgtgttcacggttttggagacactagtaccatctttgaaccgctcgca

SEQ ID NO: 201643 - DNA, 55 bp, Artificial
  Synthetic oligonucleotide
cgtattccattgcgacgactgcgtactcacctggttctacgttcagatagtaaac

SEQ ID NO: 201644 - DNA, 55 bp, Artificial
  Synthetic oligonucleotide
cgtatggaatccacaggcattacggtggactaggattaccttctgtcgtacaatc

SEQ ID NO: 201645 - DNA, 55 bp, Artificial
  Synthetic oligonucleotide
cgtagagttggaattatacgcgactccacatcttagcgatttaacaaataagcca

SEQ ID NO: 201646 - DNA, 55 bp, Artificial
  Synthetic oligonucleotide
cgtaacaaaacttccctctgtcatgtataacgatcttgatagccctatcctgcgg

SEQ ID NO: 201647 - DNA, 53 bp, Artificial
  Synthetic oligonucleotide
aattaggctccctgggagaatttcgtctcaaaatggaagacggaactttaaca

SEQ ID NO: 201648 - DNA, 55 bp, Artificial
  Synthetic oligonucleotide
aattcccactcccgctgctatggaaatcgaatgagctatatgaactacggatacc

SEQ ID NO: 201649 - DNA, 55 bp, Artificial
  Synthetic oligonucleotide
cggtattttgtcttggaatctttccaggcgctacaaggatacagttcactcccaa

SEQ ID NO: 201650 - DNA, 55 bp, Artificial
  Synthetic oligonucleotide
cgggatagtctggagtgatattaggggttagatccactggagcggttgcaccgga

SEQ ID NO: 201651 - DNA, 60 bp, Artificial
  Synthetic oligonucleotide
ggccttaccataccttgtcctccgcgagaagtcgtctcagccggaacagctactgcatcc

SEQ ID NO: 201652 - DNA, 53 bp, Artificial
  Synthetic oligonucleotide
aattggagctgctacggttgtaaatgtaaaagggcccggaaccggattgaggc

SEQ ID NO: 201653 - DNA, 55 bp, Artificial
  Synthetic oligonucleotide
acagatcgaatgttctacttagcttaaatattcagtcgttttcacatcggccccg

SEQ ID NO: 201654 - DNA, 55 bp, Artificial
  Synthetic oligonucleotide
cgcgtaaaagaattcttccgtgtctcgtttcgagccggctacagagggagtcgat

SEQ ID NO: 201655 - DNA, 52 bp, Artificial
  Synthetic oligonucleotide
agtttaggatttacgtttgactgacgcaaccactccgttgaatttacgggag

SEQ ID NO: 201656 - DNA, 55 bp, Artificial
  Synthetic oligonucleotide
agtcttcccgcctcctcgctttgcgacccttagcgagcaatgcgcctgagttccc

SEQ ID NO: 201657 - DNA, 55 bp, Artificial
  Synthetic oligonucleotide
cggataaaagagacgcgatcaaattagcgagattaatgcgaagtggagaattgga

SEQ ID NO: 201658 - DNA, 55 bp, Artificial
  Synthetic oligonucleotide
cggatttagagtagatttgattcttccggaggagcctgttagatgagagccaaac

SEQ ID NO: 201659 - DNA, 55 bp, Artificial
  Synthetic oligonucleotide
cggccaaggtcgcaaattggataggaaatagacttggatctttaggtcatcagag

SEQ ID NO: 201660 - DNA, 55 bp, Artificial
  Synthetic oligonucleotide
agccggaaccttaagcgccaatccgttcggaatgagggcgggacttgcaactcta

SEQ ID NO: 201661 - DNA, 55 bp, Artificial
  Synthetic oligonucleotide
cggcggttcagactcagtcctattctgaaactgaatcggccactcaaactccggt

SEQ ID NO: 201662 - DNA, 57 bp, Artificial
  Synthetic oligonucleotide
ttgcggttcgaaatcttctcatgaccgaatcggataagttcaacggaggaattccaa

SEQ ID NO: 201663 - DNA, 52 bp, Artificial
  Synthetic oligonucleotide
accgctcccttagtcccggaatagacggaggcaaacttcgttcccctcattc

SEQ ID NO: 201664 - DNA, 51 bp, Artificial
  Synthetic oligonucleotide
ttttaacggtattttgggaaactctaagtcccgcaaccattcgaaccaatc

SEQ ID NO: 201665 - DNA, 54 bp, Artificial
  Synthetic oligonucleotide
tttagaatctgcggaatggggagcccatcgtcttgggcacgcgatcgctcttgg

SEQ ID NO: 201666 - DNA, 54 bp, Artificial
  Synthetic oligonucleotide
ttatcagaaccggtccctaaagtcacaactcccaaagactgagtctgccctctc

SEQ ID NO: 201667 - DNA, 54 bp, Artificial
  Synthetic oligonucleotide
ttccaaagatcatttaccaaataagaagcgccccaattcaaatgggttgcaaga

SEQ ID NO: 201668 - DNA, 54 bp, Artificial
  Synthetic oligonucleotide
ttcccttggcgtggaagaacaacgagtacccatttcgatcgcatttgatccgcc

SEQ ID NO: 201669 - DNA, 54 bp, Artificial
  Synthetic oligonucleotide
agttttctcgctcgttacaattcccacatgagatacttaaccatcccacttctc

SEQ ID NO: 201670 - DNA, 54 bp, Artificial
  Synthetic oligonucleotide
cggaacgcattaatacgagaaccagtcacaatctaagactatgtggattttacg

SEQ ID NO: 201671 - DNA, 54 bp, Artificial
  Synthetic oligonucleotide
ctatcgttctttgaatgactatgaccgtggagtttacgacggttacgtgcaagc

SEQ ID NO: 201672 - DNA, 54 bp, Artificial
  Synthetic oligonucleotide
gccatgagtacatgggccacttccttagccgacttccgtttgccctttgcggga

SEQ ID NO: 201673 - DNA, 52 bp, Artificial
  Synthetic oligonucleotide
cgtaaaacacccacggttacattatttactcggatcggaacattttgcacct

SEQ ID NO: 201674 - DNA, 54 bp, Artificial
  Synthetic oligonucleotide
cgggactgccaaatacggtccatatagaatcttctttggttctccattgatcgg

SEQ ID NO: 201675 - DNA, 54 bp, Artificial
  Synthetic oligonucleotide
cttggaagtactgtacgccggtgcccctacgactagatccgtatatctgtcccc

SEQ ID NO: 201676 - DNA, 53 bp, Artificial
  Synthetic oligonucleotide
ataaactcggcaagagtgaaccgaaacacaatcgaaggagttatgggcgggca

SEQ ID NO: 201677 - DNA, 53 bp, Artificial
  Synthetic oligonucleotide
tggccgttgacttggaagtaggatttcggaagaacgttgagccagagtttcga

SEQ ID NO: 201678 - DNA, 53 bp, Artificial
  Synthetic oligonucleotide
tcacacaataccgttcgataatccattcgagtgctggtttgccgttcacaacg

SEQ ID NO: 201679 - DNA, 53 bp, Artificial
  Synthetic oligonucleotide
gcagttaaggaatcgatttcatccgcttggcttgaaccaaagtctaaagtgac

SEQ ID NO: 201680 - DNA, 53 bp, Artificial
  Synthetic oligonucleotide
tactgatatggtcttcttgcacaacgcctaaaattggtaagtaattggcgcgc

SEQ ID NO: 201681 - DNA, 53 bp, Artificial
  Synthetic oligonucleotide
aaaagatgccacttggaagggctttctactttggtccagagatcgattgaccc

SEQ ID NO: 201682 - DNA, 53 bp, Artificial
  Synthetic oligonucleotide
ctgagattgtccccaaggaactaaagatctatggatattataaacgggtgttc

SEQ ID NO: 201683 - DNA, 53 bp, Artificial
  Synthetic oligonucleotide
gggaacatgaatcgattccaattctccacttcgcattaatctcgctaatttga

SEQ ID NO: 201684 - DNA, 59 bp, Artificial
  Synthetic oligonucleotide
ctgcgtaacaatgtttgcaacctgcgctgatttttgtgcaaccccgtgttggattccaa

SEQ ID NO: 201685 - DNA, 53 bp, Artificial
  Synthetic oligonucleotide
cagtatgatccttcgagccttatccagagacaagtcgctttacaaaactttgg

SEQ ID NO: 201686 - DNA, 53 bp, Artificial
  Synthetic oligonucleotide
gtcttatttccctgaagattctagattagaattcaatcgtggaaccgcagagt

SEQ ID NO: 201687 - DNA, 52 bp, Artificial
  Synthetic oligonucleotide
ccggaagggtgggaagtctccaatcggaatgctgcccggtacgatcctgact

SEQ ID NO: 201688 - DNA, 52 bp, Artificial
  Synthetic oligonucleotide
ccacggaacccgcgatttcgtcgggaacgggagtcatataatcgaaaacggc

SEQ ID NO: 201689 - DNA, 52 bp, Artificial
  Synthetic oligonucleotide
tcattcgtcttgcctctgggacaacgacgtttgccgtttcgcaagaaggatc

SEQ ID NO: 201690 - DNA, 52 bp, Artificial
  Synthetic oligonucleotide
agggtgaacagtgatcccatgagcacctgaatccaagatgagttctgacagt

SEQ ID NO: 201691 - DNA, 52 bp, Artificial
  Synthetic oligonucleotide
gagcacgtatatctaaatacgaacgtttatcattcggagacgatcctacaag

SEQ ID NO: 201692 - DNA, 52 bp, Artificial
  Synthetic oligonucleotide
ccaatacacccgaacctacttcagttgcaaacgattctaatcctatagcacc

SEQ ID NO: 201693 - DNA, 52 bp, Artificial
  Synthetic oligonucleotide
agcatatactttctcagcacctaacccttcccaagcgggcatcccacctcgg

SEQ ID NO: 201694 - DNA, 51 bp, Artificial
  Synthetic oligonucleotide
attcccggcttttccgccgcaattccggatagggacggactcggtcccctc

SEQ ID NO: 201695 - DNA, 58 bp, Artificial
  Synthetic oligonucleotide
tttgtgaaacgggcggaatggtagtgatctgcgcgggaaccacaggatacaacgcaac

SEQ ID NO: 201696 - DNA, 52 bp, Artificial
  Synthetic oligonucleotide
aacaacgccacaacgtctcctctcgcatgaggcggagtgtaaggcccaagcg

SEQ ID NO: 201697 - DNA, 52 bp, Artificial
  Synthetic oligonucleotide
agagtttccgcgtattctacggtataacgggtccaaggaatcgctttgagac

SEQ ID NO: 201698 - DNA, 52 bp, Artificial
  Synthetic oligonucleotide
tattgctcgaatcctctctattagaagtgcctacatacagcctttcagtcaa

SEQ ID NO: 201699 - DNA, 52 bp, Artificial
  Synthetic oligonucleotide
ccgtcatcgaaaatcgattagaatgcgcggctaaaggggacttcgttattac

SEQ ID NO: 201700 - DNA, 52 bp, Artificial
  Synthetic oligonucleotide
tatcggtgttattaccaggatccgaaacatggcttcaaattaacggtcaagc

SEQ ID NO: 201701 - DNA, 52 bp, Artificial
  Synthetic oligonucleotide
cctcgcaatacttgatcacaaatcacgagaggaacgtctatctgttctgact

SEQ ID NO: 201702 - DNA, 51 bp, Artificial
  Synthetic oligonucleotide
cgccccgtaggaaagcgttttgttgagtttcccccgctcgatccctttcgc

SEQ ID NO: 201703 - DNA, 52 bp, Artificial
  Synthetic oligonucleotide
gaatgagaacagacggtgagttccaatgaggcaagagcactgccgatccctc

SEQ ID NO: 201704 - DNA, 52 bp, Artificial
  Synthetic oligonucleotide
cgtaaactctcggagggcgcggcatacgaggtgcgcggtcgatgggaaggaa

SEQ ID NO: 201705 - DNA, 52 bp, Artificial
  Synthetic oligonucleotide
ccgccgcaattccggatagggacggactcggtcccctcttccatacgaacgc

SEQ ID NO: 201706 - DNA, 57 bp, Artificial
  Synthetic oligonucleotide
gatcctaaacgggaacgcaatagcggaactccaagccattcatctccgtttcgaata

SEQ ID NO: 201707 - DNA, 56 bp, Artificial
  Synthetic oligonucleotide
ggggaacgcctgttgtggcactggttcctcccgagagaatcgtatcgttcccatta

SEQ ID NO: 201708 - DNA, 52 bp, Artificial
  Synthetic oligonucleotide
cacgaaccgccgcttggattgcatccgccctgcctttgacttctttcgcggc

SEQ ID NO: 201709 - DNA, 51 bp, Artificial
  Synthetic oligonucleotide
aatatgatctaattcgtccaaagaaagtgcgatcggctcgctatcttccgt

SEQ ID NO: 201710 - DNA, 51 bp, Artificial
  Synthetic oligonucleotide
acaggaccgatcacgttatatttacgatccgcaaccgggatattacttgtc

SEQ ID NO: 201711 - DNA, 51 bp, Artificial
  Synthetic oligonucleotide
gacaggttcgtaaactctcggagggcgcggcatacgaggtgcgcggtcgat

SEQ ID NO: 201712 - DNA, 51 bp, Artificial
  Synthetic oligonucleotide
cggagggcgcggcatacgaggtgcgcggtcgatgggaaggaatgatcgtat

SEQ ID NO: 201713 - DNA, 51 bp, Artificial
  Synthetic oligonucleotide
gaagaaacgaacatacatcgtgtcgtagatccttggggaggttcgtattac

SEQ ID NO: 201714 - DNA, 51 bp, Artificial
  Synthetic oligonucleotide
cccaaagcgaagtcggcatcccaacgtccggttgcaggaccgaaggcgatc

SEQ ID NO: 201715 - DNA, 51 bp, Artificial
  Synthetic oligonucleotide
gtagggagcagcgcactttagtttgaaagttccggaggaattagattgccc

SEQ ID NO: 201716 - DNA, 51 bp, Artificial
  Synthetic oligonucleotide
cacagtttgggaaagtacactacttcgatcttggaaatcactcatattgga

SEQ ID NO: 201717 - DNA, 51 bp, Artificial
  Synthetic oligonucleotide
taacgggtgtcagtggtagtttagacattggaaggctgattactgcaactg

SEQ ID NO: 201718 - DNA, 54 bp, Artificial
  Synthetic oligonucleotide
aagtgctccttggaaagctttcgaaaacttagcggagatactcaaataaggtac

SEQ ID NO: 201719 - DNA, 51 bp, Artificial
  Synthetic oligonucleotide
cgaagcgccccttctgcagaaaagtgaatcggggttttattctcgttaacc

SEQ ID NO: 201720 - DNA, 51 bp, Artificial
  Synthetic oligonucleotide
cgccagactttcaattatccgaggcatggattcggagactttatcaaatag

SEQ ID NO: 201721 - DNA, 51 bp, Artificial
  Synthetic oligonucleotide
tacgggaacctcggtaacggaagactttcagccgccaacgcgatccagtct

SEQ ID NO: 201722 - DNA, 51 bp, Artificial
  Synthetic oligonucleotide
attcgccgtaaacttcgcggagtgcatcggcccattcccctgttgtgacga

SEQ ID NO: 201723 - DNA, 51 bp, Artificial
  Synthetic oligonucleotide
atcatctcgcacaatcttacgaacaagtccgagcttctatgatccgtaaaa

SEQ ID NO: 201724 - DNA, 51 bp, Artificial
  Synthetic oligonucleotide
tcagtcctttcgaagatcttccgtgtaaggataagacttcggcgtcgtccc

SEQ ID NO: 201725 - DNA, 51 bp, Artificial
  Synthetic oligonucleotide
tcatacaggacggttcacgttttatcggagccaaaatgaataaacggggag

SEQ ID NO: 201726 - DNA, 51 bp, Artificial
  Synthetic oligonucleotide
gattacaattttaagccagtttggcccaacacggaaaccttgatgcggtta

SEQ ID NO: 201727 - DNA, 50 bp, Artificial
  Synthetic oligonucleotide
cgccgtttccgctagcagaggtggcgcgtatccgatcgccgaacttagaa

SEQ ID NO: 201728 - DNA, 50 bp, Artificial
  Synthetic oligonucleotide
ggtgcgtccggttccgtaggggaatccactcttagggtgctccgtgctta

SEQ ID NO: 201729 - DNA, 57 bp, Artificial
  Synthetic oligonucleotide
cgttccaagcgggaagttgaagagccctacaacgagcgtcccgactcatagtgacgc

SEQ ID NO: 201730 - DNA, 50 bp, Artificial
  Synthetic oligonucleotide
cccgcaaatgccgggagaagtcccacgacgactgctggggaatggtgttt

SEQ ID NO: 201731 - DNA, 50 bp, Artificial
  Synthetic oligonucleotide
gttcactcgatctgtagtcgaaatgcctaaagttacttcgcgtcttacaa

SEQ ID NO: 201732 - DNA, 50 bp, Artificial
  Synthetic oligonucleotide
cgaaaattggagaaccgggaagtataaaggcgacgaacaaagaagctgta

SEQ ID NO: 201733 - DNA, 50 bp, Artificial
  Synthetic oligonucleotide
cggtcggagcggcgagacatggagcggttcatagccgactttctttggct

SEQ ID NO: 201734 - DNA, 50 bp, Artificial
  Synthetic oligonucleotide
gtttaacaggatggggtgttaccttctcatacccaatgtgcagttcggca

SEQ ID NO: 201735 - DNA, 50 bp, Artificial
  Synthetic oligonucleotide
tttaataaggcagacgaagcctctgcgccagacgaattgacaccaagtgg

SEQ ID NO: 201736 - DNA, 50 bp, Artificial
  Synthetic oligonucleotide
tcggttccggtttggcaggagcttccgcatcggcaactctcgcagaactc

SEQ ID NO: 201737 - DNA, 50 bp, Artificial
  Synthetic oligonucleotide
tcgtttcagagacagtcgatcgaatctcattgatttccgaattgcggcta

SEQ ID NO: 201738 - DNA, 50 bp, Artificial
  Synthetic oligonucleotide
ttctagggtctcggaattcgattggccctccttcttcggttcccaatccc

SEQ ID NO: 201739 - DNA, 50 bp, Artificial
  Synthetic oligonucleotide
acagcaactaaccgcttcgcttcgggacgagccctcgcttgggctgcgcc

SEQ ID NO: 201740 - DNA, 60 bp, Artificial
  Synthetic oligonucleotide
ctacaaaaacattctaatcgaagcaggttacagtatgatctttgcaggggatgccatcca

SEQ ID NO: 201741 - DNA, 50 bp, Artificial
  Synthetic oligonucleotide
gaatcttcctcacgtagagaattttccttggagccttgtttgctgagagc

SEQ ID NO: 201742 - DNA, 50 bp, Artificial
  Synthetic oligonucleotide
tcatcggtggaggaccgaccggggtagaattggcaggttccatcgcagaa

SEQ ID NO: 201743 - DNA, 50 bp, Artificial
  Synthetic oligonucleotide
tctgtaagagttctcatgtcatagagacctaagctttgtggtaggaggcg

SEQ ID NO: 201744 - DNA, 50 bp, Artificial
  Synthetic oligonucleotide
tcatcccttgcgaaaggggaacatagactccattgactaacaagagttcc

SEQ ID NO: 201745 - DNA, 50 bp, Artificial
  Synthetic oligonucleotide
cggccagagaagtgaccgtttccggaaccatgatcggaaacatcaaagcc

SEQ ID NO: 201746 - DNA, 57 bp, Artificial
  Synthetic oligonucleotide
gtcggtaagaagcattcctccgaacggagtgtatggctctcccgtaaccgtgtgata

SEQ ID NO: 201747 - DNA, 54 bp, Artificial
  Synthetic oligonucleotide
accaagggcgggagaacttgtccgtaaacagaatgaaacagacgatcccttagc

SEQ ID NO: 201748 - DNA, 56 bp, Artificial
  Synthetic oligonucleotide
caatcttcactttaacaacgagatccttcaagagacgtttaacgattattatagtc

SEQ ID NO: 201749 - DNA, 53 bp, Artificial
  Synthetic oligonucleotide
tcgcattcacggtaggaaccgtaaacgtaacagtgggcggagttaagtctggg

SEQ ID NO: 201750 - DNA, 58 bp, Artificial
  Synthetic oligonucleotide
tacaaccgcacctccattagaagctgtcgcagttcccgcgctcgtttcggatttcgtc

SEQ ID NO: 201751 - DNA, 51 bp, Artificial
  Synthetic oligonucleotide
tttttactttagaaggtctggcgttggtacggttgggaaactagacacttc

SEQ ID NO: 201752 - DNA, 60 bp, Artificial
  Synthetic oligonucleotide
tcggatcgcttttgcaaatgactcgagtgatgaccaattttccatccatttcgggatact

SEQ ID NO: 201753 - DNA, 56 bp, Artificial
  Synthetic oligonucleotide
aagttccccgcagaggattgcggtgccataagggtcaaagtcgccgagtacagtgt

SEQ ID NO: 201754 - DNA, 57 bp, Artificial
  Synthetic oligonucleotide
ctgtagctgaatcgcggtaactccattctctagtcgcaatattcgtagttttttcgg

SEQ ID NO: 201755 - DNA, 58 bp, Artificial
  Synthetic oligonucleotide
gaagcgctctgcaacgtgcatcgcggctcatggtgacgcctaacgcttctatgagaat

SEQ ID NO: 201756 - DNA, 53 bp, Artificial
  Synthetic oligonucleotide
accggtatatcaagccggaaccttaagcgccaatccgttcggaatgagggcgg

SEQ ID NO: 201757 - DNA, 58 bp, Artificial
  Synthetic oligonucleotide
tgggctttggaacatcccgatcgaaacgtgactcgaggatgcgcggcggtagtcaacg

SEQ ID NO: 201758 - DNA, 56 bp, Artificial
  Synthetic oligonucleotide
agggaactaggttgggctttggaacatcccgatcgaaacgtgactcgaggatgcgc

SEQ ID NO: 201759 - DNA, 58 bp, Artificial
  Synthetic oligonucleotide
cgcggcggcgattccttttccagaaacgtctgcgatgagaacactgacttcgtccgga

SEQ ID NO: 201760 - DNA, 57 bp, Artificial
  Synthetic oligonucleotide
tcaataccggagtttgggcgactttaggtgtgttggcggcggctcatggtgtttcac

SEQ ID NO: 201761 - DNA, 53 bp, Artificial
  Synthetic oligonucleotide
ggaagaattccaactcgtttctttggatcgttgtttcagaaatctaacgtttg

SEQ ID NO: 201762 - DNA, 57 bp, Artificial
  Synthetic oligonucleotide
gatccaatcgggtgcagcctcggcacagtaccttcctagcgacaaaggcgaagggga

SEQ ID NO: 201763 - DNA, 59 bp, Artificial
  Synthetic oligonucleotide
gcggaatggtagtgatctgcgcgggaaccacaggatacaacgcaaccgtggatttgcgt

SEQ ID NO: 201764 - DNA, 57 bp, Artificial
  Synthetic oligonucleotide
cgacatccggacttaacgctgccaaactcggagcgttcacgaaggatcttgtgggct

SEQ ID NO: 201765 - DNA, 57 bp, Artificial
  Synthetic oligonucleotide
ccgaacatatcatagtaagagacgcagaacacgttctcaacggacccgaatcggcaa

SEQ ID NO: 201766 - DNA, 56 bp, Artificial
  Synthetic oligonucleotide
ggcccgtggaagcaaggagtgctcgccataacgtactccgctctggcctaagtacc

SEQ ID NO: 201767 - DNA, 56 bp, Artificial
  Synthetic oligonucleotide
gagtggaactccatgcgggtgaccaggtgaaaaaaggtatgaccctcatcacagta

SEQ ID NO: 201768 - DNA, 55 bp, Artificial
  Synthetic oligonucleotide
gaacgtatggagggcctcttcttggaacgcgggagaagaccaagccgcctgggta

SEQ ID NO: 201769 - DNA, 56 bp, Artificial
  Synthetic oligonucleotide
ccggaggagtcgcaagtgatcggattctggtcttggacggagacgtttcgttggga

SEQ ID NO: 201770 - DNA, 56 bp, Artificial
  Synthetic oligonucleotide
ggtgcagcctcggcacagtaccttcctagcgacaaaggcgaaggggattcgcaaga

SEQ ID NO: 201771 - DNA, 53 bp, Artificial
  Synthetic oligonucleotide
agtcccgaaataaacgcaaaattacccagagtcacgtgaccggccaacaccgc

SEQ ID NO: 201772 - DNA, 56 bp, Artificial
  Synthetic oligonucleotide
acttggtcgcaaaggcacttctacaacgaagcaacctaaatacctaattgatcgga

SEQ ID NO: 201773 - DNA, 55 bp, Artificial
  Synthetic oligonucleotide
accatctaccgcaggttaggggtctttggagggattacgccttgcgtcacaatta

SEQ ID NO: 201774 - DNA, 60 bp, Artificial
  Synthetic oligonucleotide
tcacataccgtgtgatccaatcgggtgcagcctcggcacagtaccttcctagcgacaaag

SEQ ID NO: 201775 - DNA, 55 bp, Artificial
  Synthetic oligonucleotide
gcgaaatccatttcgtgagtgaaagaacggtattggcactataaatcggttcgag

SEQ ID NO: 201776 - DNA, 55 bp, Artificial
  Synthetic oligonucleotide
gcgaaaatcgggcagaacgggttgtgcaaggaaatgatgaccgtttgcggacagc

SEQ ID NO: 201777 - DNA, 55 bp, Artificial
  Synthetic oligonucleotide
gccgcgtctggcgaaggtatgatcgtaagtgatgttaccgctaatccacattaca

SEQ ID NO: 201778 - DNA, 55 bp, Artificial
  Synthetic oligonucleotide
tctttggatccaagattggtgtggtagacgtgtcacaaatttcggggaccaactc

SEQ ID NO: 201779 - DNA, 55 bp, Artificial
  Synthetic oligonucleotide
tgaacgtaacttgacgattagttgcgaaagtgttgtcacagtccgtgtgtttagc

SEQ ID NO: 201780 - DNA, 55 bp, Artificial
  Synthetic oligonucleotide
gagttactcacaactgcatacctgggaaacacgccagaagaaccttccttattcg

SEQ ID NO: 201781 - DNA, 55 bp, Artificial
  Synthetic oligonucleotide
tggttttgttcattgtgcgggatacggcggaccttatcataaaattaccgatgtc

SEQ ID NO: 201782 - DNA, 55 bp, Artificial
  Synthetic oligonucleotide
gagggatccgatcaagtatcacggagtaacaccgtttcgaaaagaggacggagcg

SEQ ID NO: 201783 - DNA, 55 bp, Artificial
  Synthetic oligonucleotide
gaggaattggattcgagttcgagtagtgatgcaatcgtgtcttctaagtattcga

SEQ ID NO: 201784 - DNA, 55 bp, Artificial
  Synthetic oligonucleotide
gagacgcgatcaaattagcgagattaatgcgaagtggagaattggaatcgattca

SEQ ID NO: 201785 - DNA, 56 bp, Artificial
  Synthetic oligonucleotide
cgaatcgattgtataagttgcgattgtaattgggaaatgagccgagaaaagtttgg

SEQ ID NO: 201786 - DNA, 54 bp, Artificial
  Synthetic oligonucleotide
gaccctaagttaaattcgaccgtagcgaatacaaacccttctgcgtctcaatcg

SEQ ID NO: 201787 - DNA, 55 bp, Artificial
  Synthetic oligonucleotide
gaatacctgtgtatgcggagcgaggatctaaaggaggttgggaattatcggaagg

SEQ ID NO: 201788 - DNA, 55 bp, Artificial
  Synthetic oligonucleotide
tgtggtttactcgggatcatttctctgacttcgatccattccctacgtttcggag

SEQ ID NO: 201789 - DNA, 55 bp, Artificial
  Synthetic oligonucleotide
gaagaacggttagagtctgtgattttatctcatatcaacgacccaccagaagtga

SEQ ID NO: 201790 - DNA, 55 bp, Artificial
  Synthetic oligonucleotide
tgtgtattcgcgtacaatctctaccacaaatcggccccaagattttgggtcttct

SEQ ID NO: 201791 - DNA, 54 bp, Artificial
  Synthetic oligonucleotide
ttcttttccacgttaaacaaaactaagagccgatctcaaagccttaggatgtag

SEQ ID NO: 201792 - DNA, 55 bp, Artificial
  Synthetic oligonucleotide
tttggagagagacaatcatgtcgatacgaagaatgagtcatcagatgatgccttc

SEQ ID NO: 201793 - DNA, 55 bp, Artificial
  Synthetic oligonucleotide
tttgtaaggacggccacgtgtaaagattagatgatacttttcggaaaatcgaatg

SEQ ID NO: 201794 - DNA, 54 bp, Artificial
  Synthetic oligonucleotide
ctgcgatcgaaacggacagacctttggaataaagtttggatcgtagtagtcccg

SEQ ID NO: 201795 - DNA, 55 bp, Artificial
  Synthetic oligonucleotide
ctcgccattggaacttacattcgccattacactgtctcgtggattggagaacgtg

SEQ ID NO: 201796 - DNA, 56 bp, Artificial
  Synthetic oligonucleotide
agcaacttaccgctacgcttcgggacaagccctcgctcgggctacgccaaattgtc

SEQ ID NO: 201797 - DNA, 55 bp, Artificial
  Synthetic oligonucleotide
ctcgattcaagcgaatttagacggacattccgcgattcacaacgatattagtccg

SEQ ID NO: 201798 - DNA, 55 bp, Artificial
  Synthetic oligonucleotide
ctcgatgactatcttgatacacaaaatgggctcacaaccatggtgtcctcttggc

SEQ ID NO: 201799 - DNA, 55 bp, Artificial
  Synthetic oligonucleotide
ctcgaggagccgttttccattctctcgatttatcgtagtattcccttcttacacc

SEQ ID NO: 201800 - DNA, 52 bp, Artificial
  Synthetic oligonucleotide
ctcctatcacggaaggttgccccaaaagtgttgcgagtttaccgaagaaccg

SEQ ID NO: 201801 - DNA, 52 bp, Artificial
  Synthetic oligonucleotide
ttttaccatgggtcttcccgaaatgcaatcgtaagtttcggaagtagtggtt

SEQ ID NO: 201802 - DNA, 55 bp, Artificial
  Synthetic oligonucleotide
ctccggaaagcgtagttcagggaagggtaaactgggattatgtgaatctcagacc

SEQ ID NO: 201803 - DNA, 55 bp, Artificial
  Synthetic oligonucleotide
ttttgaacagggtttggcggatcctcgaggtctcgaataccgttctattgtagta

SEQ ID NO: 201804 - DNA, 53 bp, Artificial
  Synthetic oligonucleotide
ctcccggatggtcggttttggtaacactcgcgagcggttgtccgtctacgtac

SEQ ID NO: 201805 - DNA, 55 bp, Artificial
  Synthetic oligonucleotide
gtgcgacaccacccttcgctctttccccgtaaaatgcggccatccgatcgtaacc

SEQ ID NO: 201806 - DNA, 55 bp, Artificial
  Synthetic oligonucleotide
gtctcccattgacgatcacagatgcatacagtcgatttcttttaggttgcgaaat

SEQ ID NO: 201807 - DNA, 56 bp, Artificial
  Synthetic oligonucleotide
agcaaagggagcgccgaatggaattgggcttgtaaagttgatggggcgtcattccg

SEQ ID NO: 201808 - DNA, 55 bp, Artificial
  Synthetic oligonucleotide
gtggaagaaggcaactctttgcacaactcggtcaagttttgagtagaaccgaaag

SEQ ID NO: 201809 - DNA, 55 bp, Artificial
  Synthetic oligonucleotide
gtccatcgaatccatatcggatggaattttatatgtgcctgtaagatttcccgcg

SEQ ID NO: 201810 - DNA, 55 bp, Artificial
  Synthetic oligonucleotide
gtatgtttggcggtatagggagcttagattggaatcaggcgcgtggtaactgcaa

SEQ ID NO: 201811 - DNA, 55 bp, Artificial
  Synthetic oligonucleotide
gtacaagtggttacagacgttattctaaaccaatgtttgagaccatagccactta

SEQ ID NO: 201812 - DNA, 55 bp, Artificial
  Synthetic oligonucleotide
gtaaagcccaaggataaccgcagatgtttgcgagttgatccattcccaccgcacg

SEQ ID NO: 201813 - DNA, 55 bp, Artificial
  Synthetic oligonucleotide
ggtttgattcacgaggctgtgatttgggtgaacattccgattctcagttctcgtg

SEQ ID NO: 201814 - DNA, 55 bp, Artificial
  Synthetic oligonucleotide
gtgtacagaaacatccctaggcgccttaactccaatcttaacctgatcacctttt

SEQ ID NO: 201815 - DNA, 55 bp, Artificial
  Synthetic oligonucleotide
gttcatccaaccctactctaccaacagggcttgttataagtggaacttgtaccat

SEQ ID NO: 201816 - DNA, 55 bp, Artificial
  Synthetic oligonucleotide
gttccacggagatcgtttcgggtcttgcgcggattcttacgtatcggacgcaacc

SEQ ID NO: 201817 - DNA, 55 bp, Artificial
  Synthetic oligonucleotide
gggagagggtaaggtattgtctattatcaaagggacttccgaatcgtgtgcaact

SEQ ID NO: 201818 - DNA, 58 bp, Artificial
  Synthetic oligonucleotide
tacaatgggatttcgaaataaaccttgtgcgagagctcccgaccatgcaagggaacca

SEQ ID NO: 201819 - DNA, 55 bp, Artificial
  Synthetic oligonucleotide
gggacgaaatgtcccataaccaacttgtaagttgactggtacaaattgaatccca

SEQ ID NO: 201820 - DNA, 55 bp, Artificial
  Synthetic oligonucleotide
ggcttattcctgttgcgtcgcaagctgcaactatataacctttatgcgttttgca

SEQ ID NO: 201821 - DNA, 55 bp, Artificial
  Synthetic oligonucleotide
ggctacaatggtcaaagagtcaacgccggttgggacacactcaaacaaaccgtag

SEQ ID NO: 201822 - DNA, 55 bp, Artificial
  Synthetic oligonucleotide
ggccttatatgactagcacaatagatgctagggcagcaggcaacaattgggcgat

SEQ ID NO: 201823 - DNA, 55 bp, Artificial
  Synthetic oligonucleotide
gttcgattacaaaatgttttggagtgatgggacttagaatcggctggatgactgg

SEQ ID NO: 201824 - DNA, 55 bp, Artificial
  Synthetic oligonucleotide
ggcctacttcgtgtaacaaaatgtattcgatcgcctctgggattcgattacgggc

SEQ ID NO: 201825 - DNA, 55 bp, Artificial
  Synthetic oligonucleotide
taacgatagacttgtaatcccgggccaatcgaaccgagccgtgggtgtaggaaga

SEQ ID NO: 201826 - DNA, 55 bp, Artificial
  Synthetic oligonucleotide
ggcctaagacgacctatcaccgtagtcattcctttgccggtatctaaatccaacc

SEQ ID NO: 201827 - DNA, 55 bp, Artificial
  Synthetic oligonucleotide
tagtacgataagactgaattgtactcaatggaggacgggtaggatcgttttgaat

SEQ ID NO: 201828 - DNA, 55 bp, Artificial
  Synthetic oligonucleotide
ggagcgactcaaagttatacagtgacggtgcatccagttcctccggaagatagag

SEQ ID NO: 201829 - DNA, 60 bp, Artificial
  Synthetic oligonucleotide
caatcatgagacggaagaactcaaacaaacgttaagccaagtcaaagcgcaattagcaga

SEQ ID NO: 201830 - DNA, 56 bp, Artificial
  Synthetic oligonucleotide
gcggttagttaagctgttgccaccggcaacaacctagtacatattttaagcacaaa

SEQ ID NO: 201831 - DNA, 60 bp, Artificial
  Synthetic oligonucleotide
ccggaactattctatattggtcaactgctatggatctaattttgataagtgttgtaatga

SEQ ID NO: 201832 - DNA, 57 bp, Artificial
  Synthetic oligonucleotide
gcaattcgctatctcaacgacaaaaagctagtcgccgtccgattttttggatggtaa

SEQ ID NO: 201833 - DNA, 58 bp, Artificial
  Synthetic oligonucleotide
gtctgacgtgttctaaccttatgataaggttttctattgggcagacgatagaaaagca

SEQ ID NO: 201834 - DNA, 60 bp, Artificial
  Synthetic oligonucleotide
tagaggcgtaatcattactatatagaggcgcatacatactttgtttctcaattttggcta

SEQ ID NO: 201835 - DNA, 60 bp, Artificial
  Synthetic oligonucleotide
gtgaaaacttagctcatgtgtgatttatgagtggacgaactacctaaaagcatttgtgag

SEQ ID NO: 201836 - DNA, 53 bp, Artificial
  Synthetic oligonucleotide
cctaactttctttattcgctttcaacgaaacgaataaagaaagtaggtgcaca

SEQ ID NO: 201837 - DNA, 56 bp, Artificial
  Synthetic oligonucleotide
cctaatgtttataaggcgactatggctaaatttgttaagaatactaatgacaagtc

SEQ ID NO: 201838 - DNA, 60 bp, Artificial
  Synthetic oligonucleotide
gattattggagccttgggcgatagagttgtgactgctagtgttcatatggacgaacaaac

SEQ ID NO: 201839 - DNA, 60 bp, Artificial
  Synthetic oligonucleotide
cctggttaaaaacactgacgacagctagagcagatccagatacgaaaatagcgccaacta

SEQ ID NO: 201840 - DNA, 56 bp, Artificial
  Synthetic oligonucleotide
gtgactatactttttcaagatgttcctgtttctgtttgggaaatcaataagaatac

SEQ ID NO: 201841 - DNA, 58 bp, Artificial
  Synthetic oligonucleotide
gcggcacatattcgcgaagttggccatgaatacggggttgtgactaaacgcccacggc

SEQ ID NO: 201842 - DNA, 54 bp, Artificial
  Synthetic oligonucleotide
ccttatctaaaaacctctttggtaagacggtgcttaaaccagatgacttagatc

SEQ ID NO: 201843 - DNA, 60 bp, Artificial
  Synthetic oligonucleotide
gatcgctttaaaagcgtgttagccacaatgaagaaagcgaccttacaaagcaatcatgag

SEQ ID NO: 201844 - DNA, 56 bp, Artificial
  Synthetic oligonucleotide
gatccaaaagagactgatttatccgtgcttggtaaaaccgcttcactaaaatatcg

SEQ ID NO: 201845 - DNA, 60 bp, Artificial
  Synthetic oligonucleotide
gtgccgttaagaaatgacgaccagtcattttaggcatctcgtccttgccgactgatgaat

SEQ ID NO: 201846 - DNA, 60 bp, Artificial
  Synthetic oligonucleotide
gatcatggccatacgactatctttcaaagttaatccataaatgccatagttatctgcgat

SEQ ID NO: 201847 - DNA, 58 bp, Artificial
  Synthetic oligonucleotide
gagtaattagacgcttctaccaagtttactttagtgatggtcaatcgatttctgacca

SEQ ID NO: 201848 - DNA, 60 bp, Artificial
  Synthetic oligonucleotide
gagcgatatacgtggttgatacaagcgatatgattctgaattataccttgaacaatctta

SEQ ID NO: 201849 - DNA, 60 bp, Artificial
  Synthetic oligonucleotide
cgatgtctaatttctttagccacgataaagtgcgctggacagttgatactaatgacaatg

SEQ ID NO: 201850 - DNA, 57 bp, Artificial
  Synthetic oligonucleotide
gagataagcgcctatatggtttaaaacgtctgtaaggcgatttaagcggtgtctgac

SEQ ID NO: 201851 - DNA, 60 bp, Artificial
  Synthetic oligonucleotide
gagacggatacaaatccgtgagaccatccaatcgcattttgctaaagaggagattctatt

SEQ ID NO: 201852 - DNA, 58 bp, Artificial
  Synthetic oligonucleotide
cagcaggcttagttggacgtgtgcagacggttaccggggatgggttagacgtgatgac

SEQ ID NO: 201853 - DNA, 60 bp, Artificial
  Synthetic oligonucleotide
gtgtgagtctggtataagcgtttgtccatgttactgaactgatatcatatatgcatatca

SEQ ID NO: 201854 - DNA, 54 bp, Artificial
  Synthetic oligonucleotide
gactttggtttatttaacttgactagagaaattagacggactaaatctggagac

SEQ ID NO: 201855 - DNA, 55 bp, Artificial
  Synthetic oligonucleotide
aattagtcgttccaaccatgaattccataaaaataatcctaatgacaaggctagt

SEQ ID NO: 201856 - DNA, 57 bp, Artificial
  Synthetic oligonucleotide
gggttttgccattacagaattcgacctctgaaatggcttagaatacttactattata

SEQ ID NO: 201857 - DNA, 53 bp, Artificial
  Synthetic oligonucleotide
acaacaattaaggggcctgaacttggtgagaaaatgtatcaaggaaccgttaa

SEQ ID NO: 201858 - DNA, 56 bp, Artificial
  Synthetic oligonucleotide
gggtctaagcttgcttagccctattacgttagggctaattgacattagcaagttag

SEQ ID NO: 201859 - DNA, 49 bp, Artificial
  Synthetic oligonucleotide
acaggggtttaaagggggcgtagcctcctttacgtagagggtctaagct

SEQ ID NO: 201860 - DNA, 58 bp, Artificial
  Synthetic oligonucleotide
acatcaaagctgtcagtagtattatatggcacacttataggttttttaacaggaatag

SEQ ID NO: 201861 - DNA, 58 bp, Artificial
  Synthetic oligonucleotide
ttcgagtaccaaatatactagcaataacagaaacgacaccaattaacacattggcgta

SEQ ID NO: 201862 - DNA, 56 bp, Artificial
  Synthetic oligonucleotide
ttattgtacttatggcagtagtaattatacctttagtaactagcaataaaagctta

SEQ ID NO: 201863 - DNA, 59 bp, Artificial
  Synthetic oligonucleotide
tcaaaaaggccgcttatagggacagatagcgcatttgctatggcacttaaactacttaa

SEQ ID NO: 201864 - DNA, 59 bp, Artificial
  Synthetic oligonucleotide
accaagaccatttagattatatagtggttaaccattattgatgcacaagaagtcattgt

SEQ ID NO: 201865 - DNA, 54 bp, Artificial
  Synthetic oligonucleotide
acctctttggtaagacggtgcttaaacctgatgacttagatcgctttaaaagtg

SEQ ID NO: 201866 - DNA, 54 bp, Artificial
  Synthetic oligonucleotide
acgagtaccattttgccttgctccaaatggcccgaaaaaagcttttagacgcta

SEQ ID NO: 201867 - DNA, 60 bp, Artificial
  Synthetic oligonucleotide
acgcaaaaggatgccaatgttgccagtcgctttaatcagttgttattccatatggccacg

SEQ ID NO: 201868 - DNA, 55 bp, Artificial
  Synthetic oligonucleotide
ttactcacaacaacaggtttctcaactatatcgacgaaaaaacgagtcagccgtt

SEQ ID NO: 201869 - DNA, 53 bp, Artificial
  Synthetic oligonucleotide
acggatacacgcctgttccgtactagttgttaggataacgtccgacaacgact

SEQ ID NO: 201870 - DNA, 59 bp, Artificial
  Synthetic oligonucleotide
ttaccagttaaattgagtcatatcaggagctaattaatttcgatttaaccagaccatga

SEQ ID NO: 201871 - DNA, 53 bp, Artificial
  Synthetic oligonucleotide
acggtatccctcacctgttaacccacgagatcccaccgacgcgtctaaaagcg

SEQ ID NO: 201872 - DNA, 53 bp, Artificial
  Synthetic oligonucleotide
acgtctttaacaacgaattgggtatgaaataccgtatttatcgtccaagcgtc

SEQ ID NO: 201873 - DNA, 53 bp, Artificial
  Synthetic oligonucleotide
acgtctttaaggcagctaactaaggcttttggtaagttaagtcgatataaaca

SEQ ID NO: 201874 - DNA, 60 bp, Artificial
  Synthetic oligonucleotide
gtcctacagatagtagaagattttagatctaatcgtgaatttactattcgtgcaattcgc

SEQ ID NO: 201875 - DNA, 58 bp, Artificial
  Synthetic oligonucleotide
acgtttataagtcaacataatccatcttatacaaagtgaaaagcgctatccctacagc

SEQ ID NO: 201876 - DNA, 59 bp, Artificial
  Synthetic oligonucleotide
tgtgtacatacggtacaaattggcaccccagtccgttgactctgtgccaccggagccag

SEQ ID NO: 201877 - DNA, 60 bp, Artificial
  Synthetic oligonucleotide
gggacgtcaggtgccattcgtgtcgtctcagatcaaccagtgattgatccaaaggggcga

SEQ ID NO: 201878 - DNA, 55 bp, Artificial
  Synthetic oligonucleotide
actattatacaaacttatagacgtagtgtaaaccatttacacaaataactatgac

SEQ ID NO: 201879 - DNA, 54 bp, Artificial
  Synthetic oligonucleotide
actcaatcaagttggtaacctacatacggctttgatttccggaagtagaacggc

SEQ ID NO: 201880 - DNA, 60 bp, Artificial
  Synthetic oligonucleotide
tgtcgacaagttatcgcatactgatgtggaggcccggtatgttctttataagctggatca

SEQ ID NO: 201881 - DNA, 60 bp, Artificial
  Synthetic oligonucleotide
actgatgaattctacctctaggcggaatgaggagagctctgctcgacgattgaagacttt

SEQ ID NO: 201882 - DNA, 56 bp, Artificial
  Synthetic oligonucleotide
acttaacagacgtaaaaagcgtatcctctgtctgaatggacttgtggatacgcttt

SEQ ID NO: 201883 - DNA, 58 bp, Artificial
  Synthetic oligonucleotide
ttttgcgggcacatactgctttaataaggctctattttgacgcagtttaccaagagcg

SEQ ID NO: 201884 - DNA, 54 bp, Artificial
  Synthetic oligonucleotide
ttttacgtctgttcaatcgttgtcggacgttatcctaacaactaatacggaaca

SEQ ID NO: 201885 - DNA, 60 bp, Artificial
  Synthetic oligonucleotide
gcgccgtgagccccttttgctttaacatgcgttgatcgtggctgacgatgcgttagtagc

SEQ ID NO: 201886 - DNA, 50 bp, Artificial
  Synthetic oligonucleotide
ttttaaggggccaagtctttaacgttataacggcttatttgcccgtataa

SEQ ID NO: 201887 - DNA, 55 bp, Artificial
  Synthetic oligonucleotide
tttgttaaccagagaagtgttaattctagaccttacaagcctgacaaaaatgtta

SEQ ID NO: 201888 - DNA, 60 bp, Artificial
  Synthetic oligonucleotide
tttgtgcgagtcaggcctagctaatcaaagagatattggtcagcttattgacttctgagc

SEQ ID NO: 201889 - DNA, 59 bp, Artificial
  Synthetic oligonucleotide
tttggtcattgtcgtttgtccggaaatggttatcaaatgataaccgatgatggagagaa

SEQ ID NO: 201890 - DNA, 60 bp, Artificial
  Synthetic oligonucleotide
tttgctgtctgtggagcatacagcaaggctcttcacgtgccgtcctactttccgtgtagg

SEQ ID NO: 201891 - DNA, 54 bp, Artificial
  Synthetic oligonucleotide
ggtttagacgacctttcagccctcttgacggatacacgcctgttccgtattagt

SEQ ID NO: 201892 - DNA, 55 bp, Artificial
  Synthetic oligonucleotide
aacatttagacggattagtctataggcaatattcaaagttaaagcgtaaaagtca

SEQ ID NO: 201893 - DNA, 59 bp, Artificial
  Synthetic oligonucleotide
aaccccgctcgttcattggcaccagctgttatcttggccttcatgggaagtactggagc

SEQ ID NO: 201894 - DNA, 55 bp, Artificial
  Synthetic oligonucleotide
aacctcgatatttagcggatagaaaggtcgtgtttttaagatatgtgagagtaag

SEQ ID NO: 201895 - DNA, 60 bp, Artificial
  Synthetic oligonucleotide
ttgtgcccagataatcattcaaattggtcaagcaactgatagcctagaccgcaagaaatt

SEQ ID NO: 201896 - DNA, 57 bp, Artificial
  Synthetic oligonucleotide
caggcgttgaaaactacaccccagatgcgaccacaccggtaacgccaagtgatccga

SEQ ID NO: 201897 - DNA, 56 bp, Artificial
  Synthetic oligonucleotide
aacgactatgaaagcgtatcctccagcctaactaagcacgaggatacgctttttac

SEQ ID NO: 201898 - DNA, 57 bp, Artificial
  Synthetic oligonucleotide
aactataaacgactatgaaagcgtatcctccagcctaactaagcacgaggatacgct

SEQ ID NO: 201899 - DNA, 60 bp, Artificial
  Synthetic oligonucleotide
ttggccggccttaagggcttgcatacctgtggcataatcctgaacagctagcaacttggc

SEQ ID NO: 201900 - DNA, 60 bp, Artificial
  Synthetic oligonucleotide
gtaacgcaacctcaattattggataatctgctgggattaatatactttgatcaagagaaa

SEQ ID NO: 201901 - DNA, 57 bp, Artificial
  Synthetic oligonucleotide
aagcatattagctcctttcgtaagataatatagctttaacttcgaaaagctctcaaa

SEQ ID NO: 201902 - DNA, 60 bp, Artificial
  Synthetic oligonucleotide
ttgctttctaggtacaataatgtttttatgctctaaattattgagtatatgattatgatt

SEQ ID NO: 201903 - DNA, 60 bp, Artificial
  Synthetic oligonucleotide
ttgctacgatggggtacaatgtcaccgctaatgcccttcgtgcagtgggtgattctcgct

SEQ ID NO: 201904 - DNA, 60 bp, Artificial
  Synthetic oligonucleotide
aagcgtgttgcaacctgtgcaactgcagccgactccatttcagctaatagtgccgttggg

SEQ ID NO: 201905 - DNA, 54 bp, Artificial
  Synthetic oligonucleotide
aagctcttgggaactctctgacggcgtttttaggttgattcgggaatatcctaa

SEQ ID NO: 201906 - DNA, 60 bp, Artificial
  Synthetic oligonucleotide
ggtaggacacatcaagtgtccagtgtgcttgggtgtcgttaagaaatgacaaccagtcat

SEQ ID NO: 201907 - DNA, 58 bp, Artificial
  Synthetic oligonucleotide
tattcgacgtaaacgtcaatctgacggccgtagacgtgtttttgctcatggccgttca

SEQ ID NO: 201908 - DNA, 53 bp, Artificial
  Synthetic oligonucleotide
aatacggaacaggcgtgtatccgtcaaaggggctgaaaggtcgcttaaaccac

SEQ ID NO: 201909 - DNA, 58 bp, Artificial
  Synthetic oligonucleotide
aatagagatagtaaaatcagacgtaggcaacaattgtgttttatagctattataccta

SEQ ID NO: 201910 - DNA, 60 bp, Artificial
  Synthetic oligonucleotide
aatatgtcagttttattcttgtgatcatgtggaccaatatcagttgctccaataatgact

SEQ ID NO: 201911 - DNA, 59 bp, Artificial
  Synthetic oligonucleotide
aatgattgtcaatcgtgtgttttcgctttactatcattaatagggcagtacattaataa

SEQ ID NO: 201912 - DNA, 59 bp, Artificial
  Synthetic oligonucleotide
tgcgctgggtcagataaaggccagtgtaaactcttggtttgagggggaagcataggaca

SEQ ID NO: 201913 - DNA, 57 bp, Artificial
  Synthetic oligonucleotide
tgccaaatcctccactatgggtgccgaaagcttttggctatggtataagtgttaacc

SEQ ID NO: 201914 - DNA, 60 bp, Artificial
  Synthetic oligonucleotide
agaacgtgtgatgtcgtctgttgaccacgcacatttaacccgtgtagaccttgcttgcga

SEQ ID NO: 201915 - DNA, 57 bp, Artificial
  Synthetic oligonucleotide
ggccactcgtcatcacgtctaacccatccccggtaaccgtctgcacacgtccaacta

SEQ ID NO: 201916 - DNA, 59 bp, Artificial
  Synthetic oligonucleotide
agaaagctatcgtaatcccaaaatcggtattcgagagttgcgagaaatgactgatactg

SEQ ID NO: 201917 - DNA, 60 bp, Artificial
  Synthetic oligonucleotide
agcggaatttgatattcaggagtagtcggcagcatgtggagacaagggtcagttgcttgc

SEQ ID NO: 201918 - DNA, 56 bp, Artificial
  Synthetic oligonucleotide
tatcgaaaagcctttagaaaagctattaaaaattggcgcgatgataaacagttatc

SEQ ID NO: 201919 - DNA, 59 bp, Artificial
  Synthetic oligonucleotide
aggccgttcatatactgatctatccgctgaatacggaccttcggtcgactcaatccgta

SEQ ID NO: 201920 - DNA, 60 bp, Artificial
  Synthetic oligonucleotide
agcgtagctacaaccactcagattaggttaaagcatgcgatggactagggccacgccgcc

SEQ ID NO: 201921 - DNA, 60 bp, Artificial
  Synthetic oligonucleotide
tgatgaacatggcggtacacagttcatcgtcactaacctaagtcttccacaaaaagacat

SEQ ID NO: 201922 - DNA, 60 bp, Artificial
  Synthetic oligonucleotide
ggatctgattctatgacaagagaatcagaactagattcccgaatacatcattttattggc

SEQ ID NO: 201923 - DNA, 60 bp, Artificial
  Synthetic oligonucleotide
ggcgagtagtcatggggtcgagctttcatatctagctcgtgatgattaactatgttatgt

SEQ ID NO: 201924 - DNA, 59 bp, Artificial
  Synthetic oligonucleotide
tgggatgatgcatcgggagatcgattaagagagtggatcggggttggtaaagatacctt

SEQ ID NO: 201925 - DNA, 58 bp, Artificial
  Synthetic oligonucleotide
tgatctatccgctgaatacggaccttcggtcgactcaatccgtaactgggtcaagttg

SEQ ID NO: 201926 - DNA, 60 bp, Artificial
  Synthetic oligonucleotide
gtataattcagaatcatatcgcttgtatcaaccacgtataacgctctatttgctcttcta

SEQ ID NO: 201927 - DNA, 56 bp, Artificial
  Synthetic oligonucleotide
ggagacaagtatattacggggtctaacaggttccgagcaacaaattcggcaatata

SEQ ID NO: 201928 - DNA, 59 bp, Artificial
  Synthetic oligonucleotide
ccctgcggttgcatgactgacgcatgatcagagacgtggtctagtcccaaggcatgccc

SEQ ID NO: 201929 - DNA, 59 bp, Artificial
  Synthetic oligonucleotide
tatacctacgaggtattctcaaaataagccctgcatcttgcaaagtagagttccaatta

SEQ ID NO: 201930 - DNA, 59 bp, Artificial
  Synthetic oligonucleotide
cgcgcccgtttggtgtacctatcagttttgatgagctcacgccgctactgacggaacga

SEQ ID NO: 201931 - DNA, 53 bp, Artificial
  Synthetic oligonucleotide
tcggttaaacttgttggtacggattcccctggcctattagcgccgtgagcccc

SEQ ID NO: 201932 - DNA, 55 bp, Artificial
  Synthetic oligonucleotide
ggcgactatggctaaatttgttaagaatactaatgacaagtccttggaacttaat

SEQ ID NO: 201933 - DNA, 59 bp, Artificial
  Synthetic oligonucleotide
agtgctcatcccagctacgcacgtgcccaaatcacacgtattccctacgaaaacccgca

SEQ ID NO: 201934 - DNA, 58 bp, Artificial
  Synthetic oligonucleotide
cctaagacacttaataaagtgcctgataatcataataactttgagcaaccaaagacac

SEQ ID NO: 201935 - DNA, 58 bp, Artificial
  Synthetic oligonucleotide
ccgcaatggccggagtaattggcgctggaggcttaggaaccactgcaatcgtaactgg

SEQ ID NO: 201936 - DNA, 59 bp, Artificial
  Synthetic oligonucleotide
aaactacaccccagatgcgaccacaccggtaacgccaagtgatccgagtgcagatacga

SEQ ID NO: 201937 - DNA, 59 bp, Artificial
  Synthetic oligonucleotide
tcgccaccagaggcaattttaacgagcggcgccatcccttcacccacattagtttgcac

SEQ ID NO: 201938 - DNA, 59 bp, Artificial
  Synthetic oligonucleotide
tcagcgccactttccgtgactgctaattcaccggctaacttagcacggccatatgcgtt

SEQ ID NO: 201939 - DNA, 54 bp, Artificial
  Synthetic oligonucleotide
cctttcgtaagataatatagctttaacttcgaaaagctctcaaaacgcaaataa

SEQ ID NO: 201940 - DNA, 60 bp, Artificial
  Synthetic oligonucleotide
tcagcaaaagaataaggctatggcgtcattcctaaataatatgcaaagtatgtatgaagg

SEQ ID NO: 201941 - DNA, 51 bp, Artificial
  Synthetic oligonucleotide
catttgggcctttttagctaattattggtgggtaatttttccaatcggtgg

SEQ ID NO: 201942 - DNA, 59 bp, Artificial
  Synthetic oligonucleotide
taatggcgcgtcacgggaccgattgtatataccgacggttgcagagcacgatgctatga

SEQ ID NO: 201943 - DNA, 53 bp, Artificial
  Synthetic oligonucleotide
accttaaagaccccgaacaatgctactggcggttagaactacaactaagacgc

SEQ ID NO: 201944 - DNA, 58 bp, Artificial
  Synthetic oligonucleotide
tgacaccaacaaatggtttattttcccatgaagaatcgtgagctattcggtttgacca

SEQ ID NO: 201945 - DNA, 55 bp, Artificial
  Synthetic oligonucleotide
ttcgtgcgaaacaggccgtacttaaaatcacggatcaagccttaacggaagtaga

SEQ ID NO: 201946 - DNA, 58 bp, Artificial
  Synthetic oligonucleotide
taacggcgcaacgctatggtgctcaagattgggcaggagtgagacgctcatttggaca

SEQ ID NO: 201947 - DNA, 58 bp, Artificial
  Synthetic oligonucleotide
ggccgtggggacctctgtgataccagggctactcacgacaagtacggccgttgctgtg

SEQ ID NO: 201948 - DNA, 58 bp, Artificial
  Synthetic oligonucleotide
atattgccccatgcacgattaaacccacacacgacacgctaacaacccatacacgcta

SEQ ID NO: 201949 - DNA, 58 bp, Artificial
  Synthetic oligonucleotide
gccgtcttagtgccggctttcaatattgccgggtaggaacccaatcgcatcgtgccac

SEQ ID NO: 201950 - DNA, 55 bp, Artificial
  Synthetic oligonucleotide
accagccgaccaagaatggtccgatggttgcccctaaacgaccaacagattgggc

SEQ ID NO: 201951 - DNA, 55 bp, Artificial
  Synthetic oligonucleotide
cagttcatcgtcactaacctaagtattccacaaaaagacatcgtccgtgtttacc

SEQ ID NO: 201952 - DNA, 55 bp, Artificial
  Synthetic oligonucleotide
catttgtgagtgttgggataagccaagacaagaaaccaccgattggaaaaattac

SEQ ID NO: 201953 - DNA, 58 bp, Artificial
  Synthetic oligonucleotide
cgtgacttcttagccgccatcgcacgaaccaacgcaacttctgttgggaggccatcat

SEQ ID NO: 201954 - DNA, 58 bp, Artificial
  Synthetic oligonucleotide
cggccgattggggctattttagcgtcgggcattgtgagtgcgtctgttttggtaggca

SEQ ID NO: 201955 - DNA, 58 bp, Artificial
  Synthetic oligonucleotide
ttgttgcgctcgcaccaattacgaatgcacctaatggcatcacgccaagccatggcac

SEQ ID NO: 201956 - DNA, 58 bp, Artificial
  Synthetic oligonucleotide
ggcgcatgtccaagtgcatactgcaccggttgtccgcccttaattgctctcacagcta

SEQ ID NO: 201957 - DNA, 58 bp, Artificial
  Synthetic oligonucleotide
tgctcataagttaataaatcggactattttttatctagggctgaactgattaggctac

SEQ ID NO: 201958 - DNA, 58 bp, Artificial
  Synthetic oligonucleotide
atggcaacatccccgcgcatggtcaaactgctcagacgaccagtctgatgatttggcg

SEQ ID NO: 201959 - DNA, 58 bp, Artificial
  Synthetic oligonucleotide
tcagaattaaaagctactctagaagacttgatgattaaatacaacattcgtcctgaag

SEQ ID NO: 201960 - DNA, 56 bp, Artificial
  Synthetic oligonucleotide
gtactaactttattgccattcatttggcacaaagttttatccatacgaaatggttg

SEQ ID NO: 201961 - DNA, 58 bp, Artificial
  Synthetic oligonucleotide
cactagggacccaagcgaagcgtacatagggccaattgcccccagagcattgatgaga

SEQ ID NO: 201962 - DNA, 58 bp, Artificial
  Synthetic oligonucleotide
atgactttctatcattggttgatgatttaattgctaaggaaaaatctcgtggccatgc

SEQ ID NO: 201963 - DNA, 59 bp, Artificial
  Synthetic oligonucleotide
gtcgtgttccagtagcccttatattgcaaacaggggaatggatatgcagacgtgaaaat

SEQ ID NO: 201964 - DNA, 58 bp, Artificial
  Synthetic oligonucleotide
ctatgacaagagaatcagaactagattcccgaatacatcattttattggcttaatggg

SEQ ID NO: 201965 - DNA, 56 bp, Artificial
  Synthetic oligonucleotide
gtccattatgggggcgatattcttaattataatcagtctatttttagctttgggac

SEQ ID NO: 201966 - DNA, 55 bp, Artificial
  Synthetic oligonucleotide
aacctgatactgtaaatatcgtaaggtcacaagtcctaacctttggcgaggttga

SEQ ID NO: 201967 - DNA, 57 bp, Artificial
  Synthetic oligonucleotide
taagcgacaatagcacccagaggacctgcttgcgcaacagtggctcccgaagctacg

SEQ ID NO: 201968 - DNA, 55 bp, Artificial
  Synthetic oligonucleotide
gtctataggcaatattcaaagttaaagcgtaaaagtcacttactaggaagaggta

SEQ ID NO: 201969 - DNA, 57 bp, Artificial
  Synthetic oligonucleotide
ggtttggcgcttttcacttggcataagatggattatgttaagttcatatatgactac

SEQ ID NO: 201970 - DNA, 57 bp, Artificial
  Synthetic oligonucleotide
gatcgtttgcccgcctcagcagttgtcacgccgacttgtgccacacgtggtagcgtg

SEQ ID NO: 201971 - DNA, 57 bp, Artificial
  Synthetic oligonucleotide
aagcctgatgccttagttgctttgaatccaaaagataagtggcatgtctctgcttat

SEQ ID NO: 201972 - DNA, 55 bp, Artificial
  Synthetic oligonucleotide
ggagaggaaagacagtataaattttggataaccggttgacataaaatatgaaagc

SEQ ID NO: 201973 - DNA, 57 bp, Artificial
  Synthetic oligonucleotide
tcccgcaacactaaatcaagttcgtagcgtccgtcacgatagcgcgcaatgggcgtt

SEQ ID NO: 201974 - DNA, 57 bp, Artificial
  Synthetic oligonucleotide
ccacaatgaagaaagccactttacaaagccagaatgagacggaacaagttaagcaag

SEQ ID NO: 201975 - DNA, 57 bp, Artificial
  Synthetic oligonucleotide
tagaaggcggtacagcgattgaccgtgcgaatttagtgggtggccataatgggggta

SEQ ID NO: 201976 - DNA, 57 bp, Artificial
  Synthetic oligonucleotide
cgatagctttaagactgatatcaaaggttttgacttgcaagcctcttataaatttct

SEQ ID NO: 201977 - DNA, 57 bp, Artificial
  Synthetic oligonucleotide
cagtaacattgattgactcacctgttacatagctagattcatttgaagctaggaaaa

SEQ ID NO: 201978 - DNA, 57 bp, Artificial
  Synthetic oligonucleotide
ttaggccaagtcaacgcgcaattagctgacatccaatctgattatcaaaacctaaaa

SEQ ID NO: 201979 - DNA, 57 bp, Artificial
  Synthetic oligonucleotide
cttatgataaggttttctattgggcagacgatagaaaagcaaatagagcgatatacg

SEQ ID NO: 201980 - DNA, 56 bp, Artificial
  Synthetic oligonucleotide
aaccgaactaccgcagtacgatcaaggggaattgagtgtacaataatccagtgggc

SEQ ID NO: 201981 - DNA, 56 bp, Artificial
  Synthetic oligonucleotide
cggcgtaccaaagcgtgttgcaacctgtgcaactgcagccgactccatttcagcta

SEQ ID NO: 201982 - DNA, 56 bp, Artificial
  Synthetic oligonucleotide
gcattggcagctggtatcgcgacattcatttcgtttaacgtcttcggtttaattcc

SEQ ID NO: 201983 - DNA, 56 bp, Artificial
  Synthetic oligonucleotide
atgggccataatattgcctacgtcgtggcgtggctttgggcggtactgtttgccta

SEQ ID NO: 201984 - DNA, 56 bp, Artificial
  Synthetic oligonucleotide
cgctgaggagttaggtgtttcaaaacaggcaatacaatatcatataaagtcgctga

SEQ ID NO: 201985 - DNA, 55 bp, Artificial
  Synthetic oligonucleotide
tagttgttaggataacgtccgacaacgattgaacagacgtaaaaagcgtatcctc

SEQ ID NO: 201986 - DNA, 56 bp, Artificial
  Synthetic oligonucleotide
gagacacaaagttttattgatgcgagattatctatcttaaatcgaaaatattcaac

SEQ ID NO: 201987 - DNA, 51 bp, Artificial
  Synthetic oligonucleotide
gttgactttttgggtttacgtttgtttgacactaaaagttgccattcttta

SEQ ID NO: 201988 - DNA, 49 bp, Artificial
  Synthetic oligonucleotide
cccttttatgaacacgggattttaaataacaaaaccttaccgtttgaga

SEQ ID NO: 201989 - DNA, 56 bp, Artificial
  Synthetic oligonucleotide
tagccgacggtactcagcgtactgtgccgctaaaacagcatggcgtgagttgcgcc

SEQ ID NO: 201990 - DNA, 56 bp, Artificial
  Synthetic oligonucleotide
tagcatcgtgctctgcaaccgtcggtatatacaatcggtcccgtgacgcgccatta

SEQ ID NO: 201991 - DNA, 56 bp, Artificial
  Synthetic oligonucleotide
tggcagatgatattagttacaagctagatgatcccgtttatatcgagggcaagatc

SEQ ID NO: 201992 - DNA, 56 bp, Artificial
  Synthetic oligonucleotide
caggcaattctgttttctaaggcatattggaataactctaattcagtggctgtaac

SEQ ID NO: 201993 - DNA, 56 bp, Artificial
  Synthetic oligonucleotide
gcgcagagtgtggaagccgttttaggggtcgatgtaccggtggcgattggacatct

SEQ ID NO: 201994 - DNA, 56 bp, Artificial
  Synthetic oligonucleotide
gcgtgccctaaatgagtgtaccccgcttcagtgacaacacgtccacgcggtgtgcg

SEQ ID NO: 201995 - DNA, 56 bp, Artificial
  Synthetic oligonucleotide
gcgttgattgcacattgtacgacacttgagttgtcactacttgaaatgaattaatc

SEQ ID NO: 201996 - DNA, 53 bp, Artificial
  Synthetic oligonucleotide
ccactcagaatacattaacgacaagtttagtaacgataattgggtttacaccg

SEQ ID NO: 201997 - DNA, 56 bp, Artificial
  Synthetic oligonucleotide
catgaaggaaaatcttggtattgacttccgtttcaatactcaggttactaaagctg

SEQ ID NO: 201998 - DNA, 56 bp, Artificial
  Synthetic oligonucleotide
gcgagcatactaagtgggtacccacttagggtaaaaactaatcatctgacgagcta

SEQ ID NO: 201999 - DNA, 56 bp, Artificial
  Synthetic oligonucleotide
gctgcttcgtctggcccaaccggtacgtcctcatgcgccaaattaggcaaatgagc

SEQ ID NO: 202000 - DNA, 55 bp, Artificial
  Synthetic oligonucleotide
ctatggctattagtataagacttaaaacggctgactcgttttttcgtcgatatag

SEQ ID NO: 202001 - DNA, 56 bp, Artificial
  Synthetic oligonucleotide
tcccacgtgtcataaggactagcgagcggatctggcaaggtagcaacggcaaccaa

SEQ ID NO: 202002 - DNA, 56 bp, Artificial
  Synthetic oligonucleotide
tataaaaatcaaccctttcagctagaggccgtagagtctgtcatagctacttttga

SEQ ID NO: 202003 - DNA, 56 bp, Artificial
  Synthetic oligonucleotide
tggagttgcgccatcaccatgtctgggggtagcatatgcacgtgttggacacccaa

SEQ ID NO: 202004 - DNA, 56 bp, Artificial
  Synthetic oligonucleotide
aacccgacactcgactgtttgtccgttccaccaacgccacttggcttcatcacgta

SEQ ID NO: 202005 - DNA, 55 bp, Artificial
  Synthetic oligonucleotide
ctggtaagaagactcgcgataagaagaaggcttcaacgaagcttattgttcgcag

SEQ ID NO: 202006 - DNA, 55 bp, Artificial
  Synthetic oligonucleotide
ctgggtcgcgataaggaacttttgcgttcttatacgcaattgccatttccacgtg

SEQ ID NO: 202007 - DNA, 57 bp, Artificial
  Synthetic oligonucleotide
ccagtacacttcaagtctgttcgaaggaacgttgcaaaacgctggggtagatcattc

SEQ ID NO: 202008 - DNA, 55 bp, Artificial
  Synthetic oligonucleotide
gacggtgcttaaacctgatgacttagatcgctttaaaagtgtgttagccacgatg

SEQ ID NO: 202009 - DNA, 55 bp, Artificial
  Synthetic oligonucleotide
gacggtgtttattggtaacggcttacttgatcatcgggcgggtatggcacagcca

SEQ ID NO: 202010 - DNA, 55 bp, Artificial
  Synthetic oligonucleotide
ggagcactttcgtcaaactcaaataagttaggcgtcctgcaaaagtagccagtga

SEQ ID NO: 202011 - DNA, 55 bp, Artificial
  Synthetic oligonucleotide
ctgggattattccaccgatgataactggtcccgtcataggctatactgacgagtc

SEQ ID NO: 202012 - DNA, 55 bp, Artificial
  Synthetic oligonucleotide
gagtaccaacggcttaccaccgactaacaatgccgtgaacaagcaactaaggcgg

SEQ ID NO: 202013 - DNA, 55 bp, Artificial
  Synthetic oligonucleotide
ctgcactcggtgtgacattaagtacttgagacgcttgataaaaggactgataacg

SEQ ID NO: 202014 - DNA, 54 bp, Artificial
  Synthetic oligonucleotide
gtatcaaggagacccacctcccttcacggcgcttaatcttaacgcctcggtaac

SEQ ID NO: 202015 - DNA, 53 bp, Artificial
  Synthetic oligonucleotide
ctcctactccgttaaaccagttagccagtgttcaaattccggaagcgagggta

SEQ ID NO: 202016 - DNA, 55 bp, Artificial
  Synthetic oligonucleotide
ctgcacctttagcatgtgccacattaattaagaagccatcataatctgtcgcatt

SEQ ID NO: 202017 - DNA, 55 bp, Artificial
  Synthetic oligonucleotide
ctgcaacggttgcgattgatggggatcattatgtggtcattatgacgatcaaaac

SEQ ID NO: 202018 - DNA, 60 bp, Artificial
  Synthetic oligonucleotide
ccagtacgctggtcaagcctggtggcccactttaaaatacagtgacgctgatagtatgat

SEQ ID NO: 202019 - DNA, 55 bp, Artificial
  Synthetic oligonucleotide
gaggctttaggcggttatggtcatgacattcgggtgacaattcacgaaaataatg

SEQ ID NO: 202020 - DNA, 55 bp, Artificial
  Synthetic oligonucleotide
ctccttagtgctgctgccttccgaccctgacacgattcgaagtgcacacttgccc

SEQ ID NO: 202021 - DNA, 55 bp, Artificial
  Synthetic oligonucleotide
gagataaaatataacaccccaacgcgctacacgcttgcgtccaattaattcgagt

SEQ ID NO: 202022 - DNA, 54 bp, Artificial
  Synthetic oligonucleotide
gtgctgttaccggagggatactaataccccgttcccagttagagacagtttgtc

SEQ ID NO: 202023 - DNA, 55 bp, Artificial
  Synthetic oligonucleotide
gagcaaagcaggtataagcgtcattgttggtactccaacatacgccatcccgact

SEQ ID NO: 202024 - DNA, 55 bp, Artificial
  Synthetic oligonucleotide
ctgattgacattgcagactactttgacatgtcgctagatgaccttgtaggacgag

SEQ ID NO: 202025 - DNA, 55 bp, Artificial
  Synthetic oligonucleotide
ggactagatgccactggtggttcacgaattgataatctcggtttaactagtgagt

SEQ ID NO: 202026 - DNA, 55 bp, Artificial
  Synthetic oligonucleotide
ctgactgctgtcgccaaaaaggcaaccactgaaccagcaccgggcaccatccccc

SEQ ID NO: 202027 - DNA, 55 bp, Artificial
  Synthetic oligonucleotide
gtggacgtgtgtcactaagcacgcccgcaaggtgattttgacgttagatagccgc

SEQ ID NO: 202028 - DNA, 55 bp, Artificial
  Synthetic oligonucleotide
gtggaagcggggttaggagtcagcattttagctaaacttgtactacaacgcatgc

SEQ ID NO: 202029 - DNA, 60 bp, Artificial
  Synthetic oligonucleotide
gccacgtcctggttagctatgctaaagactgcgcgagagaatccagatagcaaaattgcc

SEQ ID NO: 202030 - DNA, 55 bp, Artificial
  Synthetic oligonucleotide
gagccatataagcacatatataccgcggtagaatacatcaggcggtggcgcgacc

SEQ ID NO: 202031 - DNA, 55 bp, Artificial
  Synthetic oligonucleotide
ggtcaagcagggtgtgtgcctactagtatcgccatggtattaaatggttcatacg

SEQ ID NO: 202032 - DNA, 55 bp, Artificial
  Synthetic oligonucleotide
gtatatgagctacccaataaacacggcacaacatttgacaattggtgaggttgac

SEQ ID NO: 202033 - DNA, 55 bp, Artificial
  Synthetic oligonucleotide
ctttacgtgcagtcaatcgttgcgagacaaagataatcaggtaaatggccgctac

SEQ ID NO: 202034 - DNA, 55 bp, Artificial
  Synthetic oligonucleotide
gttggtcgagatacattccaatcagaattgacggacaaattcacttttggtcgag

SEQ ID NO: 202035 - DNA, 55 bp, Artificial
  Synthetic oligonucleotide
cttttcggcaatatagacaccgaattgttcaattaagccggtctcctcgtctgca

SEQ ID NO: 202036 - DNA, 55 bp, Artificial
  Synthetic oligonucleotide
cttgttcagacgaccagaaagggacgtgaaatcctgtattgtttgagtgattccc

SEQ ID NO: 202037 - DNA, 55 bp, Artificial
  Synthetic oligonucleotide
ggatcctgctacgttgaagtaatagctggtctgcatgggattgctgtctgccttg

SEQ ID NO: 202038 - DNA, 55 bp, Artificial
  Synthetic oligonucleotide
cttgtgaagcttgaccgcccctcaatgtttagagtttggtagcccactaactcac

SEQ ID NO: 202039 - DNA, 55 bp, Artificial
  Synthetic oligonucleotide
ggaccgacacaatatctgcaatcacgcgacttaaagccaaccttaacgcaatata

SEQ ID NO: 202040 - DNA, 60 bp, Artificial
  Synthetic oligonucleotide
cccaacagaagttgcgttggttcgtgcgatggcggctaagaagtcacgcgatgacttgct

SEQ ID NO: 202041 - DNA, 55 bp, Artificial
  Synthetic oligonucleotide
cttgcgttgatgttgtcccggccgtttcagctgtcgtttgatcagtcgctgccac

SEQ ID NO: 202042 - DNA, 55 bp, Artificial
  Synthetic oligonucleotide
gaaagtctcgcgttcattagtggagagttcaacggttatgagggtgccagtatcg

SEQ ID NO: 202043 - DNA, 55 bp, Artificial
  Synthetic oligonucleotide
gaacagtacgatgacacactttcccaagaattgcttgatttactgattgcacatc

SEQ ID NO: 202044 - DNA, 55 bp, Artificial
  Synthetic oligonucleotide
cttgcgccttagcgtcaggcaataagtatgacaactcaccgttacgacggacttc

SEQ ID NO: 202045 - DNA, 55 bp, Artificial
  Synthetic oligonucleotide
gaactcaagcaaacgttaggccaagtcaaagcgcaattagctgacatccaagctg

SEQ ID NO: 202046 - DNA, 55 bp, Artificial
  Synthetic oligonucleotide
gaacttaatataagtccctacagataggcataaccatgtggggtaggtacaaact

SEQ ID NO: 202047 - DNA, 54 bp, Artificial
  Synthetic oligonucleotide
gaaggcgcggcccgaacacacttacaagtcgttaccattaaacgacgtgactgg

SEQ ID NO: 202048 - DNA, 55 bp, Artificial
  Synthetic oligonucleotide
ggtctatagacatggtaaatgtagttggtaatttacgaaggatgccggtcgcgtt

SEQ ID NO: 202049 - DNA, 55 bp, Artificial
  Synthetic oligonucleotide
ggacacaaggaacgacttctgagtgatcagtgtgcgtgataaacagacgtatcgc

SEQ ID NO: 202050 - DNA, 55 bp, Artificial
  Synthetic oligonucleotide
cttgaatgcgtcatacgaacacctagtgtctttatgccacgcaacaacagccacg

SEQ ID NO: 202051 - DNA, 57 bp, Artificial
  Synthetic oligonucleotide
gctacccattgtgttggacggttaactatctcttctaccacgtctctgtttttgctg

SEQ ID NO: 202052 - DNA, 53 bp, Artificial
  Synthetic oligonucleotide
cccaatagaaacccttacttttataagtcaataaggttagaacacgtcagaca

SEQ ID NO: 202053 - DNA, 54 bp, Artificial
  Synthetic oligonucleotide
ggttcaaatgaaaatcgaaaccgtaagctacgtgattggtatcctaaaggcacg

SEQ ID NO: 202054 - DNA, 55 bp, Artificial
  Synthetic oligonucleotide
cttccgacaaaccgttatgaatcatatccaacgtaatccagccgtgttccccacc

SEQ ID NO: 202055 - DNA, 54 bp, Artificial
  Synthetic oligonucleotide
ggtctagtgggttcttgggtcggtgaatcgttgttaggccattggggaccaagc

SEQ ID NO: 202056 - DNA, 55 bp, Artificial
  Synthetic oligonucleotide
ggagcagcacgagcaaccttaacttcaatgcgtttgcaaggtaagggaattactc

SEQ ID NO: 202057 - DNA, 55 bp, Artificial
  Synthetic oligonucleotide
ggtcgagaaaagtgagatggtgtagaacttaatacccggattattcatcaagaca

SEQ ID NO: 202058 - DNA, 55 bp, Artificial
  Synthetic oligonucleotide
ggacgtggtttagacgacctttcagccctcttgacggatacacgcctgttccgta

SEQ ID NO: 202059 - DNA, 55 bp, Artificial
  Synthetic oligonucleotide
ggtcattaattgggcccatattttctgacgcaactttgatacaacatcttggccg

SEQ ID NO: 202060 - DNA, 55 bp, Artificial
  Synthetic oligonucleotide
gacacactctctaatgtgtcatcatcttgcaacgtatacacccgattggcatcag

SEQ ID NO: 202061 - DNA, 55 bp, Artificial
  Synthetic oligonucleotide
ggacaaattacgatgttaggtcgtcaattaggttattttgtagcgattgctatgc

SEQ ID NO: 202062 - DNA, 55 bp, Artificial
  Synthetic oligonucleotide
gacgcaacgttggcagagtataatggtataacggtttcgctagtgttgcctcctc

SEQ ID NO: 202063 - DNA, 55 bp, Artificial
  Synthetic oligonucleotide
agtaatcagccactttattagaacgggtaatttgccagattaatatgttaaaatg

SEQ ID NO: 202064 - DNA, 55 bp, Artificial
  Synthetic oligonucleotide
ggtcagacattgcttgccccttttgttatatcggttctaatcgaatgaaacgagc

SEQ ID NO: 202065 - DNA, 55 bp, Artificial
  Synthetic oligonucleotide
ggtttactatgtcgctagcaatctgctgtggtgcttgacgtaacaatttagccaa

SEQ ID NO: 202066 - DNA, 55 bp, Artificial
  Synthetic oligonucleotide
ctggtgtctgaccaaccaaggccgttaaaatcgcgtctagcggcaattctggggc

SEQ ID NO: 202067 - DNA, 55 bp, Artificial
  Synthetic oligonucleotide
gacgggatatgctctctcacgtccgcccaagctacttcaatcaaatgtcgaattg

SEQ ID NO: 202068 - DNA, 55 bp, Artificial
  Synthetic oligonucleotide
gttgtccgtcatttctacgttatctgtacgcaaagaatcccgatcacatgagtgg

SEQ ID NO: 202069 - DNA, 55 bp, Artificial
  Synthetic oligonucleotide
ggccttcgttggccataaagctcaaatcggttgtcgtgatttcagtataaggcac

SEQ ID NO: 202070 - DNA, 55 bp, Artificial
  Synthetic oligonucleotide
gcgcattcaattgtgactgccctgtttgcgcaatttcgttagcaattagcggcac

SEQ ID NO: 202071 - DNA, 55 bp, Artificial
  Synthetic oligonucleotide
gctgtttgacgattgcttagggaatcattacgtcggttgtacagtcctgaaaggc

SEQ ID NO: 202072 - DNA, 55 bp, Artificial
  Synthetic oligonucleotide
gcgcaagtgaccacgctacaaccaatcgcgggcttaacgaatttgacttatgtga

SEQ ID NO: 202073 - DNA, 55 bp, Artificial
  Synthetic oligonucleotide
gtcgagagacgtagccattcaatacgtgagtgagagattggggcatgctgacgtt

SEQ ID NO: 202074 - DNA, 57 bp, Artificial
  Synthetic oligonucleotide
agtcagattccgttggtcgattgatatgataaacgaagtcggtaatctacgtcgtgt

SEQ ID NO: 202075 - DNA, 55 bp, Artificial
  Synthetic oligonucleotide
gtcgataagggtgtaacgggattagaattggcagatatactacatatcgaccatg

SEQ ID NO: 202076 - DNA, 55 bp, Artificial
  Synthetic oligonucleotide
gcgataaagtaggacatcacgccagactaagaaccctaaggatccggcgacaatc

SEQ ID NO: 202077 - DNA, 55 bp, Artificial
  Synthetic oligonucleotide
gtcgccactaaatgtcgaaagacatcacgtggatgaatgctcacgctatctaaag

SEQ ID NO: 202078 - DNA, 55 bp, Artificial
  Synthetic oligonucleotide
gccttggactgatcgattattctgcatcccaatcgtcctccggttcttcgtcaac

SEQ ID NO: 202079 - DNA, 55 bp, Artificial
  Synthetic oligonucleotide
gggccacgaactgaacataatggtcacaacggacaaaaccgtcaacagggtgcta

SEQ ID NO: 202080 - DNA, 55 bp, Artificial
  Synthetic oligonucleotide
gtcggaccgacaaaaggaattgccggacctgatatagttagtgatcttaaagccg

SEQ ID NO: 202081 - DNA, 55 bp, Artificial
  Synthetic oligonucleotide
gtcgggtagtaatatcacggatagtaatggccagataccaccagatattgaggca

SEQ ID NO: 202082 - DNA, 55 bp, Artificial
  Synthetic oligonucleotide
gcctgagctctgttacttccagacggattattcgccggctccattgatcccgaca

SEQ ID NO: 202083 - DNA, 55 bp, Artificial
  Synthetic oligonucleotide
gccgtgagtgtcacacgtagtcgtagtgtttatgatgtcgcaacgcccgtaggcc

SEQ ID NO: 202084 - DNA, 55 bp, Artificial
  Synthetic oligonucleotide
gggcgacgacagaaattagtggtttgaccaacttagatgatgcgggcaagcaaac

SEQ ID NO: 202085 - DNA, 58 bp, Artificial
  Synthetic oligonucleotide
agtcgttccgtcagtagcggcgtgagctcatcaaaactgataggtacaccaaacgggc

SEQ ID NO: 202086 - DNA, 55 bp, Artificial
  Synthetic oligonucleotide
gggctaaacctcgctcatctcaaagacttaacgacgactttagacagtatgacgc

SEQ ID NO: 202087 - DNA, 55 bp, Artificial
  Synthetic oligonucleotide
gtcgtctcatacgcttaatctccgacacgcataacatagcctaagccacgtgccg

SEQ ID NO: 202088 - DNA, 54 bp, Artificial
  Synthetic oligonucleotide
gccggataagtggcgctgtaaaatagcagtttccccagtacgaaggggaaaagc

SEQ ID NO: 202089 - DNA, 55 bp, Artificial
  Synthetic oligonucleotide
gccgaggttatctcattagttaagcaagaagataacaaagccaatgtagttagtc

SEQ ID NO: 202090 - DNA, 55 bp, Artificial
  Synthetic oligonucleotide
gccctaacgaaggctgcgaacccaagattttcttagaaggagcagcacgagcaac

SEQ ID NO: 202091 - DNA, 55 bp, Artificial
  Synthetic oligonucleotide
ggggcacgtaccgcaatggatcaagttagttttgatgttgaagccggccacattg

SEQ ID NO: 202092 - DNA, 55 bp, Artificial
  Synthetic oligonucleotide
gtaacgcttgatcatgagcatagatatacagccctttccgtcctcgttttagcag

SEQ ID NO: 202093 - DNA, 55 bp, Artificial
  Synthetic oligonucleotide
gcccaatgattccagcacaaactaaaagcctgcactggcctttatcggatccagc

SEQ ID NO: 202094 - DNA, 55 bp, Artificial
  Synthetic oligonucleotide
gtattgaacgattggaatattggaaagacattgccgaacggttaaggtatgtcag

SEQ ID NO: 202095 - DNA, 55 bp, Artificial
  Synthetic oligonucleotide
gctcggtgactgagataataactctacttggtaaggatttctactcagtggacta

SEQ ID NO: 202096 - DNA, 58 bp, Artificial
  Synthetic oligonucleotide
tgaaagcgtatcctccagcctaactaagcacgaggatacgctttttacgtctgttcaa

SEQ ID NO: 202097 - DNA, 55 bp, Artificial
  Synthetic oligonucleotide
gctcggcaggtaaaacggtgttcaaggacacagagcttgtctttaaactgtatcg

SEQ ID NO: 202098 - DNA, 55 bp, Artificial
  Synthetic oligonucleotide
gtaatgacaaccttgattgaagtagttccgatgtctaatccaaccgtcacgcctg

SEQ ID NO: 202099 - DNA, 55 bp, Artificial
  Synthetic oligonucleotide
gctcattattgcgtcgtattgcaattgagacagagtcgagtgataagcatcgtgc

SEQ ID NO: 202100 - DNA, 55 bp, Artificial
  Synthetic oligonucleotide
gtaatcaacaccatcgttagcaacccacttcaagtcagcagcgttacgttctgag

SEQ ID NO: 202101 - DNA, 55 bp, Artificial
  Synthetic oligonucleotide
gctatcggcaacgcatatgctgtgtcgacgccaagcgcgcacattaaatacgcta

SEQ ID NO: 202102 - DNA, 55 bp, Artificial
  Synthetic oligonucleotide
ggctccttgtacgccaatgtgttaattggtgtcgtttctgttattgctagtatat

SEQ ID NO: 202103 - DNA, 55 bp, Artificial
  Synthetic oligonucleotide
gctagaaaatcaggggcaccaacgtctccaggtcaactttcaattccaacgccgt

SEQ ID NO: 202104 - DNA, 55 bp, Artificial
  Synthetic oligonucleotide
gctgagcgttcttgcctgaaattaaccgttcctggtaagtacttggtgattgaac

SEQ ID NO: 202105 - DNA, 55 bp, Artificial
  Synthetic oligonucleotide
gctaaatcctccgattacgttcggactgcacgggcgaaaggagttccgatcaacg

SEQ ID NO: 202106 - DNA, 55 bp, Artificial
  Synthetic oligonucleotide
gcgttctgattgtcgcaaacgtggtcgctcattcgatagataagccgccaatatc

SEQ ID NO: 202107 - DNA, 53 bp, Artificial
  Synthetic oligonucleotide
ataaaaaaccattggtctatagacatggtaaatgtagttggtaatttacgaag

SEQ ID NO: 202108 - DNA, 55 bp, Artificial
  Synthetic oligonucleotide
gctggcgttgcacaatcagataagtcttgtcacctgctggcgggacatgaaacgc

SEQ ID NO: 202109 - DNA, 55 bp, Artificial
  Synthetic oligonucleotide
gcgtgttagccacaatgaagaaagcgaccttacaaagcaatcatgagacggaaga

SEQ ID NO: 202110 - DNA, 55 bp, Artificial
  Synthetic oligonucleotide
gctgttgccaccggcaacaacctagtacatattttaagcacaaatacagccctac

SEQ ID NO: 202111 - DNA, 55 bp, Artificial
  Synthetic oligonucleotide
gcgtgatagtggtccgccgaacttacctcttgcaataagttcttcccgattgggt

SEQ ID NO: 202112 - DNA, 55 bp, Artificial
  Synthetic oligonucleotide
gcgtgaagcaattaagcgccaattatatggtgctccagcgacacaatcacaacct

SEQ ID NO: 202113 - DNA, 55 bp, Artificial
  Synthetic oligonucleotide
gggattacaacgtgtgatgaatgccttaggaagctcttgggaactctctgacggc

SEQ ID NO: 202114 - DNA, 55 bp, Artificial
  Synthetic oligonucleotide
gcgtcttacgttcaaggaaggttagcagtattgcatcactacctcgtgccccttc

SEQ ID NO: 202115 - DNA, 55 bp, Artificial
  Synthetic oligonucleotide
gcgtaagtatatcgcagaattcctcggcactttcatattggtgttcgtcggaact

SEQ ID NO: 202116 - DNA, 55 bp, Artificial
  Synthetic oligonucleotide
gctgtttactcagaacgtaacgctgctgacttgaagtgggttgctaacgatggtg

SEQ ID NO: 202117 - DNA, 55 bp, Artificial
  Synthetic oligonucleotide
gcgctctatgatgcagaaagtgagttgcctgccaagggcgatgaacgcttaaccg

SEQ ID NO: 202118 - DNA, 52 bp, Artificial
  Synthetic oligonucleotide
atacgctttttacgtctgttaagtcgttgtcggacgttatcctaacaactaa

SEQ ID NO: 202119 - DNA, 55 bp, Artificial
  Synthetic oligonucleotide
gcgcgatttctgctggtgttaagtctttcataatccgattcccctcgttattcag

SEQ ID NO: 202120 - DNA, 55 bp, Artificial
  Synthetic oligonucleotide
gggtgtggcatcatataaacgtcttagtcataatcaatcgaaagggcttatagcc

SEQ ID NO: 202121 - DNA, 55 bp, Artificial
  Synthetic oligonucleotide
gtatcggatttaacgccctaacaactggtgtatcggaattagacgttgtggcaac

SEQ ID NO: 202122 - DNA, 55 bp, Artificial
  Synthetic oligonucleotide
gtatcctttgggcgctgcagctagtctcttgattggatacacaagcacggctacg

SEQ ID NO: 202123 - DNA, 55 bp, Artificial
  Synthetic oligonucleotide
ggtaaacgcattttcctcataaaccgacttaggaccaccagacaagattatggcc

SEQ ID NO: 202124 - DNA, 55 bp, Artificial
  Synthetic oligonucleotide
gcaaacggatatgctaactaaggaagcccaaggtgagcacacagaagttgatctc

SEQ ID NO: 202125 - DNA, 55 bp, Artificial
  Synthetic oligonucleotide
ggtaattcgcgggtaacctttataatgattgacaattgaagctaagacacccgct

SEQ ID NO: 202126 - DNA, 55 bp, Artificial
  Synthetic oligonucleotide
gattgcaacaagtggggcatctatagcgatcggggcattagaatcagggtacaca

SEQ ID NO: 202127 - DNA, 55 bp, Artificial
  Synthetic oligonucleotide
ggtaccgtcacactaaaatcattccctatcctagctgttcttcccatacaacagt

SEQ ID NO: 202128 - DNA, 55 bp, Artificial
  Synthetic oligonucleotide
gatgttcctgtttctgtttgggaaatcaataagaatacccctcagcccgattggg

SEQ ID NO: 202129 - DNA, 57 bp, Artificial
  Synthetic oligonucleotide
tctgacccagcgcaagccacaggaactttagaagaacaactacaagaattccgtaag

SEQ ID NO: 202130 - DNA, 55 bp, Artificial
  Synthetic oligonucleotide
gatggactactagttgctacaggtcgtcgagctaatgtgaccgatttgcacctag

SEQ ID NO: 202131 - DNA, 55 bp, Artificial
  Synthetic oligonucleotide
gatgcaccgaagttccaagctagtttgacactatttaaccaagtggcgccggaga

SEQ ID NO: 202132 - DNA, 55 bp, Artificial
  Synthetic oligonucleotide
gatgattaactacgtgaatacgacaatcaatggactaacattgcgaggcacagca

SEQ ID NO: 202133 - DNA, 55 bp, Artificial
  Synthetic oligonucleotide
gcttgttcaggctactaattaccgaaattccacatattgggagtagtccttgggt

SEQ ID NO: 202134 - DNA, 55 bp, Artificial
  Synthetic oligonucleotide
ggtacgtcaaactgtgccatattaccaaactgctcttgacgaatcggattaggtg

SEQ ID NO: 202135 - DNA, 55 bp, Artificial
  Synthetic oligonucleotide
gatccgcaatcagggctgctgcaacgggtagttcaccacctaaaccaactccggt

SEQ ID NO: 202136 - DNA, 52 bp, Artificial
  Synthetic oligonucleotide
gatcccgggtttcgtcgctgacggaaagtgttttgtcgtaattaaggactcg

SEQ ID NO: 202137 - DNA, 55 bp, Artificial
  Synthetic oligonucleotide
ggtacttaagattcacaagcggggctgtccccgcatcgattagatactggcgatc

SEQ ID NO: 202138 - DNA, 55 bp, Artificial
  Synthetic oligonucleotide
ggtattttaccaagaccgttagcttatttgcatccacgatacaatacgccttgga

SEQ ID NO: 202139 - DNA, 55 bp, Artificial
  Synthetic oligonucleotide
gtgcgccaggatacaccaacaggtttagccgtgtcagtcgctggggaacactacc

SEQ ID NO: 202140 - DNA, 60 bp, Artificial
  Synthetic oligonucleotide
atcacttgcgggcgagcctgcccataatcgaattgttcattccccacaatctcgctatga

SEQ ID NO: 202141 - DNA, 53 bp, Artificial
  Synthetic oligonucleotide
gatacagtatattaataccttatacccgtgggaaggtaaaacttatcggcgac

SEQ ID NO: 202142 - DNA, 55 bp, Artificial
  Synthetic oligonucleotide
gtgcgtttactaacagcacgctaacagcacgctagaggttcgcctcgcgaaccgc

SEQ ID NO: 202143 - DNA, 51 bp, Artificial
  Synthetic oligonucleotide
gagttggccctcgcctataaggaccggcacttttccggtaagacggcccct

SEQ ID NO: 202144 - DNA, 55 bp, Artificial
  Synthetic oligonucleotide
gagtgatctgttgtgcacgaagtttatcacgacgatgtaacaccgtgactgactt

SEQ ID NO: 202145 - DNA, 55 bp, Artificial
  Synthetic oligonucleotide
gccattacgtgacatcatgacgtttgggctacacaatatcttctgggtaggtgcc

SEQ ID NO: 202146 - DNA, 55 bp, Artificial
  Synthetic oligonucleotide
gccagcaaatagtgtaacaaacgccagcatatgcatgctagttgatgacacgacc

SEQ ID NO: 202147 - DNA, 53 bp, Artificial
  Synthetic oligonucleotide
ggggcctgaacttggtgagaaaatgtatcaaggaaccgttaaggccggagtaa

SEQ ID NO: 202148 - DNA, 55 bp, Artificial
  Synthetic oligonucleotide
gccactttacaaagccagaatgagacggaacaagttaagcaagtattaggacaag

SEQ ID NO: 202149 - DNA, 54 bp, Artificial
  Synthetic oligonucleotide
gccactaaatttaccttagttggcacacgggtaaaagatggcgttagtcacgaa

SEQ ID NO: 202150 - DNA, 55 bp, Artificial
  Synthetic oligonucleotide
gccacgtacgtgtgattgtaataaatgaacattggccatttggtagagtggtgtg

SEQ ID NO: 202151 - DNA, 59 bp, Artificial
  Synthetic oligonucleotide
ggaacttaaagctgaatatcgggattacaacgtgtgatgaatgccttaggaagctcttg

SEQ ID NO: 202152 - DNA, 55 bp, Artificial
  Synthetic oligonucleotide
ggggtcgatatccagacagaccattatcgcaagggtgcggctgattcagtgcagc

SEQ ID NO: 202153 - DNA, 55 bp, Artificial
  Synthetic oligonucleotide
gtctaccaacaattggactacacacgtgagacgttgacggcattgcacgaattgg

SEQ ID NO: 202154 - DNA, 55 bp, Artificial
  Synthetic oligonucleotide
gggtaagacactcaagtcaacaatacatgtggagacgatgcttggcacgttgcca

SEQ ID NO: 202155 - DNA, 55 bp, Artificial
  Synthetic oligonucleotide
gccaacgacgtatatgaatgactctggtaaagcagttcgcgcaatattagattac

SEQ ID NO: 202156 - DNA, 55 bp, Artificial
  Synthetic oligonucleotide
ggcaccatcaacatttctagcctaaacgctgagtaaactgctcctggatcgaaag

SEQ ID NO: 202157 - DNA, 55 bp, Artificial
  Synthetic oligonucleotide
gtaacgcctgatagctctggtaatgttgtttcagtcccaacacaagtggctagtg

SEQ ID NO: 202158 - DNA, 55 bp, Artificial
  Synthetic oligonucleotide
gcatgaacattaagtatcttttgacactaacagacaccgagacaaagcttgaaca

SEQ ID NO: 202159 - DNA, 55 bp, Artificial
  Synthetic oligonucleotide
gcatatcatgatgtgctatgttgttaatgccagctaaattataccgtgaaccctc

SEQ ID NO: 202160 - DNA, 55 bp, Artificial
  Synthetic oligonucleotide
gtatgctcctcctttcggagcagctaaagatcccgttcatatttccggttatgtg

SEQ ID NO: 202161 - DNA, 55 bp, Artificial
  Synthetic oligonucleotide
gcagagtatagcgcatcagggtgcttgcctgtcgattcgttagaaataatccggg

SEQ ID NO: 202162 - DNA, 60 bp, Artificial
  Synthetic oligonucleotide
gctaatatagctgatcaaataacacttataccaaagcaagttaacataacatcgattatc

SEQ ID NO: 202163 - DNA, 55 bp, Artificial
  Synthetic oligonucleotide
ggaacaggcgtgtatccgtcaagagggctgaaaggtcgtctaaaccacgtccaaa

SEQ ID NO: 202164 - DNA, 55 bp, Artificial
  Synthetic oligonucleotide
gggtatgaaataccgtatttatcgtccaagcgtctcacagcgcgaatatgtcgtt

SEQ ID NO: 202165 - DNA, 55 bp, Artificial
  Synthetic oligonucleotide
gcactggttccggtgattaatcagcagtacacaagttcggacattaagtcgcaaa

SEQ ID NO: 202166 - DNA, 55 bp, Artificial
  Synthetic oligonucleotide
gcactcacactaccaataatttgaccgtcgtataaaataacccgccgattcatat

SEQ ID NO: 202167 - DNA, 55 bp, Artificial
  Synthetic oligonucleotide
gcacgtctgatcgatagcgggtacctaaacaagttgggcacacttcagtcacgtc

SEQ ID NO: 202168 - DNA, 55 bp, Artificial
  Synthetic oligonucleotide
gggtcacggcggttcactaggtaagaatagactggtagcttgaacgcacccttgt

SEQ ID NO: 202169 - DNA, 55 bp, Artificial
  Synthetic oligonucleotide
gcacatcaccagttgtatagtaagtatgatgtggtcttgtacgcttttgtgcgct

SEQ ID NO: 202170 - DNA, 55 bp, Artificial
  Synthetic oligonucleotide
gcacagcggttagtatctcataactgggtgttgcgatttgtatcaaaatcacgtc

SEQ ID NO: 202171 - DNA, 55 bp, Artificial
  Synthetic oligonucleotide
tcacacaagatgggcagttaatcaaagtaggacagtctgagctagtagctgttgg

SEQ ID NO: 202172 - DNA, 55 bp, Artificial
  Synthetic oligonucleotide
caattggttcgacatttaacatgtagtcgccagcttccagatctgccacaatcgc

SEQ ID NO: 202173 - DNA, 55 bp, Artificial
  Synthetic oligonucleotide
caattgccaactacatcgcagacgttggttatgaaccgtctcaaggagtcagacc

SEQ ID NO: 202174 - DNA, 55 bp, Artificial
  Synthetic oligonucleotide
atcctaacaactaatacggaacaggcgtgtatccgtcaagagggctgaaaggtcg

SEQ ID NO: 202175 - DNA, 55 bp, Artificial
  Synthetic oligonucleotide
tcacactaggcaataaaacgttcatatgtgcaattgcaactcctatgcatgcggt

SEQ ID NO: 202176 - DNA, 55 bp, Artificial
  Synthetic oligonucleotide
tcacttgcgttccgaagtaaacaataaagacttggattagcagtggcacaccacg

SEQ ID NO: 202177 - DNA, 55 bp, Artificial
  Synthetic oligonucleotide
caatgagcccaccaaatatcggtcctagcatcggtcctagagtcataggcactcc

SEQ ID NO: 202178 - DNA, 55 bp, Artificial
  Synthetic oligonucleotide
caatccatactgggcgtgtagtagggtgagagcgaccattaacggctcggcaggt

SEQ ID NO: 202179 - DNA, 50 bp, Artificial
  Synthetic oligonucleotide
caatataccttaacgatgactggggttaaaagtcccgtaacagggaccgg

SEQ ID NO: 202180 - DNA, 55 bp, Artificial
  Synthetic oligonucleotide
tcagcactcgtgtattgtaaccccatatccgaatgaactattagtggcttttgat

SEQ ID NO: 202181 - DNA, 55 bp, Artificial
  Synthetic oligonucleotide
tcctggctccggtggcacagagtcaacggactggggtgccaatttgtaccgtatg

SEQ ID NO: 202182 - DNA, 55 bp, Artificial
  Synthetic oligonucleotide
tcgaaggaacgttgcaaaacgctggggtagatcattcttactcgcgtaaggggca

SEQ ID NO: 202183 - DNA, 55 bp, Artificial
  Synthetic oligonucleotide
tcgattaggtgtaattggttcgtcaaatgattgccacgcaccgccaaccataact

SEQ ID NO: 202184 - DNA, 55 bp, Artificial
  Synthetic oligonucleotide
caacaagttcggaaactgaacctgaaagtcaatcaagtgagacgcctagttctga

SEQ ID NO: 202185 - DNA, 60 bp, Artificial
  Synthetic oligonucleotide
ggaacacgaattgagtactgatgtcattattcaggaggcattgagaagccataagaaagt

SEQ ID NO: 202186 - DNA, 55 bp, Artificial
  Synthetic oligonucleotide
caacaacatccttatttggtaacccaatattgacaaacacgcccaaatcacgtcg

SEQ ID NO: 202187 - DNA, 55 bp, Artificial
  Synthetic oligonucleotide
caaagtatttatgcgcctctatatagcaacgcttagccattcaatttagccttac

SEQ ID NO: 202188 - DNA, 55 bp, Artificial
  Synthetic oligonucleotide
atttggctttggcactattcgaccattgttatcacgtcgctttagtcgcggcagt

SEQ ID NO: 202189 - DNA, 55 bp, Artificial
  Synthetic oligonucleotide
attgcctattacgctgagaatgcgtttcaagctggttcttggcgtttggacttca

SEQ ID NO: 202190 - DNA, 55 bp, Artificial
  Synthetic oligonucleotide
tcgtaagcatacgatgaaagctttgtgcgtcgcgagctacaagaacaagatttgg

SEQ ID NO: 202191 - DNA, 55 bp, Artificial
  Synthetic oligonucleotide
attcgccaagctatccaagtactagtgaacgaaggctatttagcacggcgtaaaa

SEQ ID NO: 202192 - DNA, 55 bp, Artificial
  Synthetic oligonucleotide
attagagttgcctcatttatacacgacattagcttgttacgggaagacattaagg

SEQ ID NO: 202193 - DNA, 55 bp, Artificial
  Synthetic oligonucleotide
attaactcaatctctcttcctgaacatagttaattggtagccattctaacacgcg

SEQ ID NO: 202194 - DNA, 55 bp, Artificial
  Synthetic oligonucleotide
tcgttaaatcaacatgctggaccctgacactatttggaaccgtgattctaatcgg

SEQ ID NO: 202195 - DNA, 55 bp, Artificial
  Synthetic oligonucleotide
tctaatcctcgtctaatttcttgttggaaaatgacaactaaagcaattggcgccc

SEQ ID NO: 202196 - DNA, 60 bp, Artificial
  Synthetic oligonucleotide
ggaaacctgcggaatgggtagagcgtgctaagggtatgcttgatgatttccgattgccga

SEQ ID NO: 202197 - DNA, 55 bp, Artificial
  Synthetic oligonucleotide
atgctaaggatagtcaagccgttggttatggggacatgacctttgcttatcctgg

SEQ ID NO: 202198 - DNA, 55 bp, Artificial
  Synthetic oligonucleotide
atgcggcaaatggccaaccactagcgcgcatactattgacttcgagcgcaggacc

SEQ ID NO: 202199 - DNA, 55 bp, Artificial
  Synthetic oligonucleotide
tctcaggcaagttcacaagctaaagcaagtaatggacgaacggtgaagggaaatc

SEQ ID NO: 202200 - DNA, 55 bp, Artificial
  Synthetic oligonucleotide
atcgattagctgctgataaacaaacttattcggtccataaccatcgcgaaaacga

SEQ ID NO: 202201 - DNA, 55 bp, Artificial
  Synthetic oligonucleotide
ccaatacagataccgctacggccgaagggatttgctccgatttagccatatagta

SEQ ID NO: 202202 - DNA, 55 bp, Artificial
  Synthetic oligonucleotide
ccaagggtacccaattgctcgagcaagaccaatggaaagaggacttgttaacgag

SEQ ID NO: 202203 - DNA, 55 bp, Artificial
  Synthetic oligonucleotide
ccaaacgtcatattcgtggtcgccattcaactttgacagctgatattgcggtctt

SEQ ID NO: 202204 - DNA, 55 bp, Artificial
  Synthetic oligonucleotide
cattgtctctcgtcaaaggttgttcttttcttgacgcattctcggtaagtaccct

SEQ ID NO: 202205 - DNA, 55 bp, Artificial
  Synthetic oligonucleotide
cattggtaatgctgtctcagacatcgcaattgctagtgatactactaacataacc

SEQ ID NO: 202206 - DNA, 55 bp, Artificial
  Synthetic oligonucleotide
cattgacattaggtagtgtgcgtacaatttgagttgactttgtcgccgcagaaag

SEQ ID NO: 202207 - DNA, 54 bp, Artificial
  Synthetic oligonucleotide
atcggagcttgccgaacacttaaaaatatcacgaacaaccctttatagaagggc

SEQ ID NO: 202208 - DNA, 55 bp, Artificial
  Synthetic oligonucleotide
cattcaaattggtcaagcaactgatagcctagaccgcaagaaattggcgaccgtc

SEQ ID NO: 202209 - DNA, 55 bp, Artificial
  Synthetic oligonucleotide
cattaggaatcgtgacctatggatcacgtgaaattgcctatgtccacgaggacga

SEQ ID NO: 202210 - DNA, 55 bp, Artificial
  Synthetic oligonucleotide
catgcgctaaaatttcgcgttcttgcctagaaatatcgctactcgagtctgtggc

SEQ ID NO: 202211 - DNA, 55 bp, Artificial
  Synthetic oligonucleotide
catgaataatattatgattggccgttttgtgccaggggattcttggattcaccgt

SEQ ID NO: 202212 - DNA, 55 bp, Artificial
  Synthetic oligonucleotide
tatgagctagatatgtgactaggcactcactaaaatgcccttccattcaggggct

SEQ ID NO: 202213 - DNA, 55 bp, Artificial
  Synthetic oligonucleotide
catcaggtgtgtaactagtcacttgtgctggtaacataagtgggagggcaatagc

SEQ ID NO: 202214 - DNA, 55 bp, Artificial
  Synthetic oligonucleotide
tatggaccactagcagaagggttattgacagaccgttatcttgatggtttcccaa

SEQ ID NO: 202215 - DNA, 55 bp, Artificial
  Synthetic oligonucleotide
catatcgcttgtatcaaccacgtataacgctctatttgctcttctatcgtccgcc

SEQ ID NO: 202216 - DNA, 55 bp, Artificial
  Synthetic oligonucleotide
cagtcgagccatcatataatgtgccaggttcgattccacagtggttagatgttgt

SEQ ID NO: 202217 - DNA, 55 bp, Artificial
  Synthetic oligonucleotide
cagtagagttctttgctccaccgatcgtaacttcaccatgcaggtgttttccgcc

SEQ ID NO: 202218 - DNA, 56 bp, Artificial
  Synthetic oligonucleotide
atctgcgttaaagatcgacctaaagctagaatggacattcgttttttgaaagaagc

SEQ ID NO: 202219 - DNA, 52 bp, Artificial
  Synthetic oligonucleotide
caggcggtttagcccaaattagacacattaccccacaattaggtttgttacc

SEQ ID NO: 202220 - DNA, 55 bp, Artificial
  Synthetic oligonucleotide
caggagtagtcggcagcatgtggagacaagggtcagttgcttgcaactgcctgcg

SEQ ID NO: 202221 - DNA, 55 bp, Artificial
  Synthetic oligonucleotide
caggaacaacgattcggacgttttcacagcatgttagcgagtatatctttagcgg

SEQ ID NO: 202222 - DNA, 55 bp, Artificial
  Synthetic oligonucleotide
tatttgtcaggggcggtgtatggcccagtcacatcggcggatattacggccttac

SEQ ID NO: 202223 - DNA, 55 bp, Artificial
  Synthetic oligonucleotide
cagcacctaaagtatctgcaaatgtgagattaaagactactgatgcaaacgcccc

SEQ ID NO: 202224 - DNA, 55 bp, Artificial
  Synthetic oligonucleotide
tcaaatacttcgctatctcgtgcgatatgctcatgattaactaagtcatcaatcg

SEQ ID NO: 202225 - DNA, 55 bp, Artificial
  Synthetic oligonucleotide
cagaggaaccatgacaccgttaactaacatgtaaccgtttgtgatccattgtcct

SEQ ID NO: 202226 - DNA, 55 bp, Artificial
  Synthetic oligonucleotide
cacttggtctcacgccccatttgtcaacgttcggtcagctcattattatgctagc

SEQ ID NO: 202227 - DNA, 55 bp, Artificial
  Synthetic oligonucleotide
cactagatttggtgccaattggtggttcacggactaaggtttctggtttgactgc

SEQ ID NO: 202228 - DNA, 55 bp, Artificial
  Synthetic oligonucleotide
tcaactcatactggtgttggtgcattggctattttgtaccatgcacgttgagcac

SEQ ID NO: 202229 - DNA, 60 bp, Artificial
  Synthetic oligonucleotide
tctcaaaacgcaaataagagccatataagcacatatataccgcggtagaatacatcaggc

SEQ ID NO: 202230 - DNA, 55 bp, Artificial
  Synthetic oligonucleotide
tcaagcgatgtcccgcactaatcggacgattgataagacagctaagcctcatggc

SEQ ID NO: 202231 - DNA, 53 bp, Artificial
  Synthetic oligonucleotide
ttataaagcgtttgtacaccaaaaccaactaggctcaaacctaaagcccacat

SEQ ID NO: 202232 - DNA, 55 bp, Artificial
  Synthetic oligonucleotide
accgacctgacgagaatatgggatcattattccgacgttgccttaggatttatcg

SEQ ID NO: 202233 - DNA, 55 bp, Artificial
  Synthetic oligonucleotide
ttatcataaggtggctgatttaagcggcgtaacagttttgacagctactgctgaa

SEQ ID NO: 202234 - DNA, 55 bp, Artificial
  Synthetic oligonucleotide
ttatggaaatcaaatattggtcagacattgcttgccccttttgttatatcggttc

SEQ ID NO: 202235 - DNA, 55 bp, Artificial
  Synthetic oligonucleotide
ttcagctccgatcaccgaatcatgttcgatgactgtacccggcttaatgatggtt

SEQ ID NO: 202236 - DNA, 55 bp, Artificial
  Synthetic oligonucleotide
acatcagcgtaagatgcctgttttattttcgcaccgaggcgtttggcgactgata

SEQ ID NO: 202237 - DNA, 55 bp, Artificial
  Synthetic oligonucleotide
acactatgtgactattctgtcaccgtaacagcaactcctgcggtgaatgctccgc

SEQ ID NO: 202238 - DNA, 53 bp, Artificial
  Synthetic oligonucleotide
acacgacgttaacgctggtagatggggtgctagatactaaagggcgtttacgg

SEQ ID NO: 202239 - DNA, 55 bp, Artificial
  Synthetic oligonucleotide
ttctttgtgacagccgaccggaggtcggccttgatacatagcacttagctccggt

SEQ ID NO: 202240 - DNA, 60 bp, Artificial
  Synthetic oligonucleotide
gcttatcttgcttgcaggcttgataagcgccttttcttttattcgcttgtgtatgtttta

SEQ ID NO: 202241 - DNA, 55 bp, Artificial
  Synthetic oligonucleotide
acaactgtaattaaacgcagactttaccttgctgatttagaagttgaagccacag

SEQ ID NO: 202242 - DNA, 55 bp, Artificial
  Synthetic oligonucleotide
ttgatcgggctaagtcgtatgttgaaggattagttgcagattatgaggatcgtca

SEQ ID NO: 202243 - DNA, 55 bp, Artificial
  Synthetic oligonucleotide
aatgtggcctcatgagcgctctcatctacgcgcagccaggtttctggcagagccc

SEQ ID NO: 202244 - DNA, 55 bp, Artificial
  Synthetic oligonucleotide
aatgactcacttggttactaacctgacgtggggtgacattgataccgtacgttcc

SEQ ID NO: 202245 - DNA, 55 bp, Artificial
  Synthetic oligonucleotide
aatcgatgcactgaggagctcggctaaaccgaacgatattagtaaagtcagatcc

SEQ ID NO: 202246 - DNA, 55 bp, Artificial
  Synthetic oligonucleotide
aagtggacgtatctcaaaactacccttgaattgcgctattttgatgagaacggct

SEQ ID NO: 202247 - DNA, 55 bp, Artificial
  Synthetic oligonucleotide
aaggctcagatcgttatgactgatgtgagtggtaagccagtgactcgtgccgaat

SEQ ID NO: 202248 - DNA, 55 bp, Artificial
  Synthetic oligonucleotide
ttgccggtgttgtgttctctgcaacttcaatctctataacgttagctgtactatc

SEQ ID NO: 202249 - DNA, 55 bp, Artificial
  Synthetic oligonucleotide
aagcaagtattaggacaagtcgaagcgcaattagcagatgtccaagaagactatc

SEQ ID NO: 202250 - DNA, 55 bp, Artificial
  Synthetic oligonucleotide
ttggttatcagatcttcttggtgggattgcacatacatatcatcctgctgacccc

SEQ ID NO: 202251 - DNA, 60 bp, Artificial
  Synthetic oligonucleotide
atgtcagcttaagtagtttaagtgccatagcaaatgcgctatctgtccctataagcggcc

SEQ ID NO: 202252 - DNA, 54 bp, Artificial
  Synthetic oligonucleotide
ttgtaacgtaattatttcctaagtggacggttattgggcaaactgacgaggcga

SEQ ID NO: 202253 - DNA, 55 bp, Artificial
  Synthetic oligonucleotide
ttgtgacctagatccacaagcaaattcgacacaattattacgtagaacatacgga

SEQ ID NO: 202254 - DNA, 55 bp, Artificial
  Synthetic oligonucleotide
aacgaatcgatgtatgcaaccggccagtttccgaaatttgttgacgatgcctacg

SEQ ID NO: 202255 - DNA, 52 bp, Artificial
  Synthetic oligonucleotide
aaccttgtcaattgggaccttttctaatcgttgggctacccaattaagagat

SEQ ID NO: 202256 - DNA, 55 bp, Artificial
  Synthetic oligonucleotide
tttacaatgtcctgttgtgaactaatagactcttgcacgtctgtagcagttacgg

SEQ ID NO: 202257 - DNA, 55 bp, Artificial
  Synthetic oligonucleotide
tttctagggcaattagagggtgattcagtacaggcaaagaaatggcatgtatcgg

SEQ ID NO: 202258 - DNA, 55 bp, Artificial
  Synthetic oligonucleotide
tttgatatcgtcgctgtgtttgcttattctctagaactacatgaaccctcgaacc

SEQ ID NO: 202259 - DNA, 55 bp, Artificial
  Synthetic oligonucleotide
aacaacacctgttgccgcacgtcgcaaaccataggggtcattggatcccgaagga

SEQ ID NO: 202260 - DNA, 55 bp, Artificial
  Synthetic oligonucleotide
tctgaccatgatgtgctattaaatgcggcaatggaagctgggcttgctaaagacg

SEQ ID NO: 202261 - DNA, 55 bp, Artificial
  Synthetic oligonucleotide
atcaggctggaccgtcaaataagatgtcatcgtgcgtccatgaaccaagcccgtt

SEQ ID NO: 202262 - DNA, 55 bp, Artificial
  Synthetic oligonucleotide
gcttagccctactacgttagggctaattgacattagcaagttagttttagccaat

SEQ ID NO: 202263 - DNA, 55 bp, Artificial
  Synthetic oligonucleotide
atcacgtgttcaaagaaccgcagttagagactaagagtaagacatggtacacaac

SEQ ID NO: 202264 - DNA, 55 bp, Artificial
  Synthetic oligonucleotide
tctgtcgtcaagcaagctgacaaccgtaccacaaatggcgataattcatcaatgg

SEQ ID NO: 202265 - DNA, 55 bp, Artificial
  Synthetic oligonucleotide
tcttacctaaacaaccggcaaagatattcaaaggttgggtgcacagcagctcaat

SEQ ID NO: 202266 - DNA, 55 bp, Artificial
  Synthetic oligonucleotide
tgacaaggaacggtcacgcctgtaaacaactaatcaaaggagcgcaaacatgcgt

SEQ ID NO: 202267 - DNA, 55 bp, Artificial
  Synthetic oligonucleotide
agtaagccggaacaattattacgcctggcactaatcgctggttttccgtgcgtat

SEQ ID NO: 202268 - DNA, 55 bp, Artificial
  Synthetic oligonucleotide
tgactagagaaattagacggactaaatctggagacttagaaactcgatattgggg

SEQ ID NO: 202269 - DNA, 55 bp, Artificial
  Synthetic oligonucleotide
agggtcatatcgaaatcggtgccaaggaaattggtggcgactgggtgattcaaaa

SEQ ID NO: 202270 - DNA, 54 bp, Artificial
  Synthetic oligonucleotide
aggggcagttggtgaggctattaggcagtcggacctaccgcgttcggcgtttta

SEQ ID NO: 202271 - DNA, 55 bp, Artificial
  Synthetic oligonucleotide
tgagatgcacaatcaaggccgttcatatactgatctatccgctgaatacggacct

SEQ ID NO: 202272 - DNA, 55 bp, Artificial
  Synthetic oligonucleotide
aggcggtatattagtatatgttctaacggcggcggacaagcaagcggttacagtg

SEQ ID NO: 202273 - DNA, 53 bp, Artificial
  Synthetic oligonucleotide
gcgtttttttgatatacggtaactgtttaacccgatacacgatactgggacta

SEQ ID NO: 202274 - DNA, 60 bp, Artificial
  Synthetic oligonucleotide
tcgtgctgtctcgccaccagaggcaattttaacgagcggcgccatcccttcacccacatt

SEQ ID NO: 202275 - DNA, 55 bp, Artificial
  Synthetic oligonucleotide
tgctaattcggtttccgaaggtcttgattcagcggctactgggattactccagcc

SEQ ID NO: 202276 - DNA, 55 bp, Artificial
  Synthetic oligonucleotide
agcgttcatcgcccttaaggattgcatttgacaccattaatgaaccgagcaatgc

SEQ ID NO: 202277 - DNA, 55 bp, Artificial
  Synthetic oligonucleotide
tgctttgcgcacgtcatctgatgcaagtagctctgctcccgtacctgtcatcgta

SEQ ID NO: 202278 - DNA, 55 bp, Artificial
  Synthetic oligonucleotide
agcccgtaacataactgggattgcagctataatcgatgccaatataaatgctccc

SEQ ID NO: 202279 - DNA, 55 bp, Artificial
  Synthetic oligonucleotide
agatacccgtacctgcaaacgcaagtagccagttccataaacttagacgtccacc

SEQ ID NO: 202280 - DNA, 55 bp, Artificial
  Synthetic oligonucleotide
agagacaaataacatgtgtactaagcggtttgtccataagaacgccgtagctgcg

SEQ ID NO: 202281 - DNA, 55 bp, Artificial
  Synthetic oligonucleotide
tggctgacgattcagtattggctgacgattcagtattggctgacgatgatgtctg

SEQ ID NO: 202282 - DNA, 55 bp, Artificial
  Synthetic oligonucleotide
agaattacgggcaccagtgtttgactttgattccaacaagctcttttcaggcgtc

SEQ ID NO: 202283 - DNA, 55 bp, Artificial
  Synthetic oligonucleotide
tggtatcatacaagcaggtatgcgcgttgatgtcccgtttggtggacgtcatgtg

SEQ ID NO: 202284 - DNA, 55 bp, Artificial
  Synthetic oligonucleotide
tggtcaactgctatggatctaattttgataagtgttgtaatgattgccgcacacc

SEQ ID NO: 202285 - DNA, 56 bp, Artificial
  Synthetic oligonucleotide
attcattaactaatagtatcaaggagacccacctcccttcacggcgcttaatctta

SEQ ID NO: 202286 - DNA, 55 bp, Artificial
  Synthetic oligonucleotide
tgtagttgttcttctaaagttcctgtggcttgcgctgggtcagataaaggccagt

SEQ ID NO: 202287 - DNA, 55 bp, Artificial
  Synthetic oligonucleotide
acttaggcgccactgtttcaagtaagtctgtggctacaacgaatttacggtcctc

SEQ ID NO: 202288 - DNA, 55 bp, Artificial
  Synthetic oligonucleotide
tgtcgactgctgttggaatggttgtttgcgtgagttgggctaattgggccaaacc

SEQ ID NO: 202289 - DNA, 55 bp, Artificial
  Synthetic oligonucleotide
ttaccaatactggctcccaattcatccagcagagtatccactgtcgttaactctg

SEQ ID NO: 202290 - DNA, 55 bp, Artificial
  Synthetic oligonucleotide
acgacagctgaaggtgttgcactcacgcttggccgtaaaattgccactgacgcgg

SEQ ID NO: 202291 - DNA, 55 bp, Artificial
  Synthetic oligonucleotide
acgacaaatacgaaagcgagacttaataaatgaaagtgcgtgttataactgccgt

SEQ ID NO: 202292 - DNA, 55 bp, Artificial
  Synthetic oligonucleotide
accttagtcacgtttacggtatcagcggaatatattgaaaccctacatgatcgtg

SEQ ID NO: 202293 - DNA, 55 bp, Artificial
  Synthetic oligonucleotide
cggggtctaacaggttccgagcaacaaattcggcaatataacaagctagttgaac

SEQ ID NO: 202294 - DNA, 53 bp, Artificial
  Synthetic oligonucleotide
taatttccgacgggccaataagcaaccgttgaattatccttccaatgggtcgg

SEQ ID NO: 202295 - DNA, 54 bp, Artificial
  Synthetic oligonucleotide
cggcataatagtggctctggtttggtacgttttacgtaacagatttaaatccat

SEQ ID NO: 202296 - DNA, 58 bp, Artificial
  Synthetic oligonucleotide
attcgaataaggtttggcgcttttcacttggcataagatggattatgttaagttcata

SEQ ID NO: 202297 - DNA, 55 bp, Artificial
  Synthetic oligonucleotide
tacatagctggattatttgttgacatgaactacagaaagcaaggtgttggtagcc

SEQ ID NO: 202298 - DNA, 55 bp, Artificial
  Synthetic oligonucleotide
cggcaacccaatccccaacagcacgaaaataatcccgttgagcaaatacacgaag

SEQ ID NO: 202299 - DNA, 55 bp, Artificial
  Synthetic oligonucleotide
cggatgagattgtcactggtttagcctcacaattaggtgactgggatgtcgtacc

SEQ ID NO: 202300 - DNA, 55 bp, Artificial
  Synthetic oligonucleotide
cggatagagcgttccatctcgtccagagttacttaagccaaattccgaaggctta

SEQ ID NO: 202301 - DNA, 55 bp, Artificial
  Synthetic oligonucleotide
cggagggcaaaggagtcagcaggtccattagctctgcgtccaaaatgtcgcgatc

SEQ ID NO: 202302 - DNA, 55 bp, Artificial
  Synthetic oligonucleotide
cggacgttatcctaacaactaatacggaacaggcgtgtatccgtcaagagggctg

SEQ ID NO: 202303 - DNA, 55 bp, Artificial
  Synthetic oligonucleotide
cggacgtacgattactcatttgtcgtgaaggtcgttgcatgttgatgttacctcg

SEQ ID NO: 202304 - DNA, 55 bp, Artificial
  Synthetic oligonucleotide
cggaagaactcaaacaaacgttaagccaagtcaaagcgcaattagcagatgtcca

SEQ ID NO: 202305 - DNA, 55 bp, Artificial
  Synthetic oligonucleotide
cgcttctaccaagtttactttagtgatggtcaatcgatttctgaccatgatgtgc

SEQ ID NO: 202306 - DNA, 55 bp, Artificial
  Synthetic oligonucleotide
cgctcttacgacgaattgtgtcaagaactagacgtgccttacgtggggcaacgcg

SEQ ID NO: 202307 - DNA, 60 bp, Artificial
  Synthetic oligonucleotide
gctgtttactctgagtctataagtttgtataatagtaagtattctaagccattgcagagg

SEQ ID NO: 202308 - DNA, 55 bp, Artificial
  Synthetic oligonucleotide
cgctcatgagtttaatagtcgtggcgcgtacaaatggaccgttgaaattagcgta

SEQ ID NO: 202309 - DNA, 55 bp, Artificial
  Synthetic oligonucleotide
cgctagtcagtatggaactatgccactcgttatatctaccgtgacagatgggcga

SEQ ID NO: 202310 - DNA, 55 bp, Artificial
  Synthetic oligonucleotide
taccaagccgttacgcaagatatgtctgaattagaacattcccgctctctgtcct

SEQ ID NO: 202311 - DNA, 55 bp, Artificial
  Synthetic oligonucleotide
cgcgtggtgattcctagtgttgcgcctcttttggtcggattggtgtacagtcaat

SEQ ID NO: 202312 - DNA, 55 bp, Artificial
  Synthetic oligonucleotide
cgcgtggacccgataatacacattataggaattggcgatattccctgtcagtttg

SEQ ID NO: 202313 - DNA, 55 bp, Artificial
  Synthetic oligonucleotide
cgcgtgaattgttgcaaactattgatcgggcagcattgctgtcacatgaagggcg

SEQ ID NO: 202314 - DNA, 54 bp, Artificial
  Synthetic oligonucleotide
cgcgtaactggtattaaaatggttgataatcaatcgggaaaacttactactgtc

SEQ ID NO: 202315 - DNA, 55 bp, Artificial
  Synthetic oligonucleotide
cgcgatgagggccaaccattgtcgatccttgcataatttcacgtgaacgctgacg

SEQ ID NO: 202316 - DNA, 55 bp, Artificial
  Synthetic oligonucleotide
cgcgagaggcaattgctaagccgccgtgttttgacatcgacgtttcaaagcgcgt

SEQ ID NO: 202317 - DNA, 55 bp, Artificial
  Synthetic oligonucleotide
cgcctcaataagctagatccgtgggaatttgacgtcctcaaacaatatgacacac

SEQ ID NO: 202318 - DNA, 54 bp, Artificial
  Synthetic oligonucleotide
tcggtttggcggaatttgccctaacgaaggctgcgaacccaagattttcttaga

SEQ ID NO: 202319 - DNA, 55 bp, Artificial
  Synthetic oligonucleotide
cgccagcttgctcttatgctagatttacggacagattttcttctgccctgtaaac

SEQ ID NO: 202320 - DNA, 55 bp, Artificial
  Synthetic oligonucleotide
cgccacctgatttgaattaaaccgttcgcatcaaaatagcgcaattcaagggtag

SEQ ID NO: 202321 - DNA, 55 bp, Artificial
  Synthetic oligonucleotide
cgccaatacctgttaatagcgttgctaaaactactgatccttgggattgcaaatg

SEQ ID NO: 202322 - DNA, 54 bp, Artificial
  Synthetic oligonucleotide
cgccaaaccctatgaaattaaggcttggcgcttttaacttggtataagctacat

SEQ ID NO: 202323 - DNA, 55 bp, Artificial
  Synthetic oligonucleotide
cgcatctagcgatgtcctccatgataactatggaagtcactgttcttgctggtgg

SEQ ID NO: 202324 - DNA, 55 bp, Artificial
  Synthetic oligonucleotide
ctccaaacaggactgcagtagaccggtcttcccaatctactagcttgcttagtac

SEQ ID NO: 202325 - DNA, 55 bp, Artificial
  Synthetic oligonucleotide
ctcagtgagctgtcggccagatccaaaccgaattgtttggttcgttgtcatatcg

SEQ ID NO: 202326 - DNA, 55 bp, Artificial
  Synthetic oligonucleotide
ctcagcattccgcgggacacagcgaatgcggatatgcaacagggcacggacttgt

SEQ ID NO: 202327 - DNA, 55 bp, Artificial
  Synthetic oligonucleotide
gtttacacggccacggaaactgattcacaggactacacggtaacgtacacggcat

SEQ ID NO: 202328 - DNA, 55 bp, Artificial
  Synthetic oligonucleotide
ctattaatcgggtaggcattgataatgatgacacgcaattagctttggcgaccgc

SEQ ID NO: 202329 - DNA, 60 bp, Artificial
  Synthetic oligonucleotide
attgcagaggtctaattctgtaatggcaaaaccctgatagttgtaatatctaggtcacca

SEQ ID NO: 202330 - DNA, 55 bp, Artificial
  Synthetic oligonucleotide
ctatctttatgggaatagtagctaagtacccgtttgcgattgcacccgggctggg

SEQ ID NO: 202331 - DNA, 55 bp, Artificial
  Synthetic oligonucleotide
ctagctttatcggtgttgaccgtacgcatcagcaatcggactttatccgagcagt

SEQ ID NO: 202332 - DNA, 50 bp, Artificial
  Synthetic oligonucleotide
gttttcgttacccggaaacgggctttcggatcggacaatcaagtttctta

SEQ ID NO: 202333 - DNA, 55 bp, Artificial
  Synthetic oligonucleotide
ctaccgtgaatgctatggcgcctgttatcgtaatttaaaagaaatccacttatgg

SEQ ID NO: 202334 - DNA, 50 bp, Artificial
  Synthetic oligonucleotide
ctaatgcaacttttcgaaaacgggttgtagaaaaatttgtatccgaaact

SEQ ID NO: 202335 - DNA, 55 bp, Artificial
  Synthetic oligonucleotide
ctaagctcatgacagaatgtcttggccgataagccttttgcgggaactcggcact

SEQ ID NO: 202336 - DNA, 55 bp, Artificial
  Synthetic oligonucleotide
cgttcttctctaaataccgccttagttgcttgttcacggcattgttagtcggtgg

SEQ ID NO: 202337 - DNA, 55 bp, Artificial
  Synthetic oligonucleotide
cgttcgatttccggcaggagtatcgccaagtgttaaattgggagatgcgatagca

SEQ ID NO: 202338 - DNA, 55 bp, Artificial
  Synthetic oligonucleotide
cgttatactacgatcggtgagtaataattgcccttcttggctcttagtcattgtt

SEQ ID NO: 202339 - DNA, 55 bp, Artificial
  Synthetic oligonucleotide
cgtgtgtacaatcgtcctggattgttagtaaggtttgcgagtgtgttgacacggt

SEQ ID NO: 202340 - DNA, 54 bp, Artificial
  Synthetic oligonucleotide
caaactttgttaagcttttattgctagttactaaaggtataattactactgcca

SEQ ID NO: 202341 - DNA, 55 bp, Artificial
  Synthetic oligonucleotide
cgtgtacgtatttatagcctaagtgaatctggtcgtgagcaaaccatacgtatcc

SEQ ID NO: 202342 - DNA, 55 bp, Artificial
  Synthetic oligonucleotide
cgtggtgaagcgagtgaaagtaaggactacttattcttcgtcacacgattgggcg

SEQ ID NO: 202343 - DNA, 55 bp, Artificial
  Synthetic oligonucleotide
cgtcatttgcaccccaaattacgtctagacaaccatcagcaaccgctagtaacgg

SEQ ID NO: 202344 - DNA, 55 bp, Artificial
  Synthetic oligonucleotide
cgtaatcctcgacacttggattatcctcctcgtaatactcgcgtccccatttggt

SEQ ID NO: 202345 - DNA, 55 bp, Artificial
  Synthetic oligonucleotide
cgtaacaacagtacaaattacccgctcctattaagtgctcaccctacttatgccc

SEQ ID NO: 202346 - DNA, 55 bp, Artificial
  Synthetic oligonucleotide
cgtaaatgccatctaaccaaccccgtttaccaccgtatctatgtgagatcccgtc

SEQ ID NO: 202347 - DNA, 55 bp, Artificial
  Synthetic oligonucleotide
cggttaagtctaatgtcccgtcaatcacagttgccagcaaatatggtgcgcgtgc

SEQ ID NO: 202348 - DNA, 55 bp, Artificial
  Synthetic oligonucleotide
cggtgtgccttgtaccagtagctcaatgtcgcgactcacaaaatagccgtgttcg

SEQ ID NO: 202349 - DNA, 55 bp, Artificial
  Synthetic oligonucleotide
cggtatcgtgccgtttatcttggtgataccgattggaattttatggccaaatctt

SEQ ID NO: 202350 - DNA, 55 bp, Artificial
  Synthetic oligonucleotide
cggtagcgacaacgctacttaaacgacctaaaggcacgtcggtagcatcaacgat

SEQ ID NO: 202351 - DNA, 60 bp, Artificial
  Synthetic oligonucleotide
tcgcactggcacaattgagtcgaggtgtggagcaacgtactgacaagcgcccagttttgt

SEQ ID NO: 202352 - DNA, 54 bp, Artificial
  Synthetic oligonucleotide
cggtaactgtttaacccgatacacgatactgggactactgacttcgaacgatta

SEQ ID NO: 202353 - DNA, 55 bp, Artificial
  Synthetic oligonucleotide
cggtaacgattgcaccaggcgattttgatcgtagttacatggtgacgtactaccc

SEQ ID NO: 202354 - DNA, 55 bp, Artificial
  Synthetic oligonucleotide
cgggttatcaagcctatgctgcacggttagaggcggttgtcgaacatttagtgtc

SEQ ID NO: 202355 - DNA, 55 bp, Artificial
  Synthetic oligonucleotide
cgggtacttgcctaccagttggatctacccggctacgatttgcataatttgcacc

SEQ ID NO: 202356 - DNA, 55 bp, Artificial
  Synthetic oligonucleotide
cctgaaagaacaagggctttcacagtggcaatcgggatatcctaatcaagatacg

SEQ ID NO: 202357 - DNA, 55 bp, Artificial
  Synthetic oligonucleotide
cctcatggttggttaaagtgggtgacgaggttgcaatggacgaccctgttgccga

SEQ ID NO: 202358 - DNA, 55 bp, Artificial
  Synthetic oligonucleotide
cctcatcagctcaggtgatacttgatccggatgattaattactcggctaactgtc

SEQ ID NO: 202359 - DNA, 55 bp, Artificial
  Synthetic oligonucleotide
tagagacaatgattgggtcagtgccgttttctgaaactcaaccagttgacctgac

SEQ ID NO: 202360 - DNA, 55 bp, Artificial
  Synthetic oligonucleotide
ccgtgagaccatccaatcgcattttgctaaagaggagattctatttaagcgcggt

SEQ ID NO: 202361 - DNA, 55 bp, Artificial
  Synthetic oligonucleotide
ccgtgaccattaactcacaaagagaaagcgatatatgacaaccagcgtacgtatc

SEQ ID NO: 202362 - DNA, 60 bp, Artificial
  Synthetic oligonucleotide
tcctggttaaaggccctcatgatagcgcgagaagatccagatacgaaaatatcgccaact

SEQ ID NO: 202363 - DNA, 55 bp, Artificial
  Synthetic oligonucleotide
ccgtatcatcgtaactgattcttggatacggaagtttggtgtaggcgcgtagctt

SEQ ID NO: 202364 - DNA, 55 bp, Artificial
  Synthetic oligonucleotide
ccggctgtcacaggggttccctgcacattaaatagagcaaccggaatacccgaaa

SEQ ID NO: 202365 - DNA, 55 bp, Artificial
  Synthetic oligonucleotide
ccgcttcaggatagtttgccgaatacgtccgaatttgattatcatcacgtggagc

SEQ ID NO: 202366 - DNA, 55 bp, Artificial
  Synthetic oligonucleotide
ccgattaaatttagacggcagttattggcattacatccacaaagaggtcgcttac

SEQ ID NO: 202367 - DNA, 55 bp, Artificial
  Synthetic oligonucleotide
tagtcaaccgtgaggcctgtcatttcgcgtactgaaacattgggtaaatcagccg

SEQ ID NO: 202368 - DNA, 55 bp, Artificial
  Synthetic oligonucleotide
ccgaagcacaaactggctatgaggttcaatcagctaacggcaaccttggcacttt

SEQ ID NO: 202369 - DNA, 55 bp, Artificial
  Synthetic oligonucleotide
ccgaaagtaatgttcttacaatcatgcgacccattggggtattgtcaattgttcc

SEQ ID NO: 202370 - DNA, 55 bp, Artificial
  Synthetic oligonucleotide
ccctctctggctactgcagaggtaggtatagctatggggaatggaacagatgtcg

SEQ ID NO: 202371 - DNA, 55 bp, Artificial
  Synthetic oligonucleotide
ccctacacccatcaacgagacaccaaccgtcgataaggttgtaaaggcactccca

SEQ ID NO: 202372 - DNA, 55 bp, Artificial
  Synthetic oligonucleotide
cccgtaacacaaggtctacttcatatttgtggtcacggaatcggacgattggtgt

SEQ ID NO: 202373 - DNA, 52 bp, Artificial
  Synthetic oligonucleotide
caaccctattcggaaaaaattggcgtgacggacttagccaataatacgggta

SEQ ID NO: 202374 - DNA, 55 bp, Artificial
  Synthetic oligonucleotide
tagtcgtgtcaatggtgcttggtatgagagcaaaacagtagcataaggtaataga

SEQ ID NO: 202375 - DNA, 55 bp, Artificial
  Synthetic oligonucleotide
cccctcaaaccaagagtttacactggcctttatctgacccagcgcaagccacagg

SEQ ID NO: 202376 - DNA, 55 bp, Artificial
  Synthetic oligonucleotide
ccccagctagattaaaatacttgaaacggccgcaaacagagttgtctcgtatcgc

SEQ ID NO: 202377 - DNA, 55 bp, Artificial
  Synthetic oligonucleotide
cccatctggtttattcttggaagaccggctctcagacgccagtggttcggcagtg

SEQ ID NO: 202378 - DNA, 55 bp, Artificial
  Synthetic oligonucleotide
cccagaaaccggctgttcgcgagctagacaacggcccatatgcttacgcgcgata

SEQ ID NO: 202379 - DNA, 55 bp, Artificial
  Synthetic oligonucleotide
cccaatcgactgcggctggtagcgttgtatatgagacagttaattgcttacccgc

SEQ ID NO: 202380 - DNA, 55 bp, Artificial
  Synthetic oligonucleotide
cccaaagcgactcacgataatccctgctacccgtgcttgatcctggccccactga

SEQ ID NO: 202381 - DNA, 55 bp, Artificial
  Synthetic oligonucleotide
ccattttaaccagtaagtacgcagcatcctcatgtggcgtagctaaccacagcgc

SEQ ID NO: 202382 - DNA, 52 bp, Artificial
  Synthetic oligonucleotide
ccattaacatggttaaaacctgggttatagacggtgtttctgcggtgaaaag

SEQ ID NO: 202383 - DNA, 55 bp, Artificial
  Synthetic oligonucleotide
ccagtcattttaggcatctcgtccttgccgactgatgaattctacctctaggcgg

SEQ ID NO: 202384 - DNA, 57 bp, Artificial
  Synthetic oligonucleotide
cacaccttgaatgagttatcaaaacgaaaagtcgtcgaacataatagtttaatcaca

SEQ ID NO: 202385 - DNA, 60 bp, Artificial
  Synthetic oligonucleotide
tccaagcgtctcacagcgcgaatatgtcgtttatacggcgcaatggaccaaagctgtgga

SEQ ID NO: 202386 - DNA, 55 bp, Artificial
  Synthetic oligonucleotide
ccagcctgcgtacgttcgataatcatgtcgcgttccatttccgcaaccgaaagta

SEQ ID NO: 202387 - DNA, 55 bp, Artificial
  Synthetic oligonucleotide
ccactttcaccgtatggctgtgattggtacatctgtacttcggtatcattccagt

SEQ ID NO: 202388 - DNA, 55 bp, Artificial
  Synthetic oligonucleotide
ccacttaggatatggtatccgttttactttcgctggtaatgttaagccatcctta

SEQ ID NO: 202389 - DNA, 55 bp, Artificial
  Synthetic oligonucleotide
ccaattcatgcctattcatcgtgataaacggtaagcgtagcagtcccatgacacc

SEQ ID NO: 202390 - DNA, 55 bp, Artificial
  Synthetic oligonucleotide
ccaatgttgccagtcgctttaatcagttgttattccatatggccacgggttcagg

SEQ ID NO: 202391 - DNA, 55 bp, Artificial
  Synthetic oligonucleotide
cgcatcatttactgcccaaaggtcagatggtcgaaaatactttgttggccgccgc

SEQ ID NO: 202392 - DNA, 55 bp, Artificial
  Synthetic oligonucleotide
cgcatatgatcgaggaaacctgcaaatccgaaagtaagcgaacagctccctgcgc

SEQ ID NO: 202393 - DNA, 55 bp, Artificial
  Synthetic oligonucleotide
cgcacgttagaaatcaagccaaacgcaccacagtatcatgctttaggcgggctag

SEQ ID NO: 202394 - DNA, 55 bp, Artificial
  Synthetic oligonucleotide
cgattcattgaccagttttctcgctggtatacacctgcagtacttacaattgggc

SEQ ID NO: 202395 - DNA, 55 bp, Artificial
  Synthetic oligonucleotide
tacgtcagcaaactatgcgtaccagttggcgttaagatttcagactgactaccag

SEQ ID NO: 202396 - DNA, 55 bp, Artificial
  Synthetic oligonucleotide
caatagactatgcaaagttattatatcttaaagcggcttttaaagggattgaaag

SEQ ID NO: 202397 - DNA, 55 bp, Artificial
  Synthetic oligonucleotide
cgatcatatatttgcctctcctatatatgcggatcctcctagagtcgacctcagc

SEQ ID NO: 202398 - DNA, 55 bp, Artificial
  Synthetic oligonucleotide
cgagtatcgtgttgagacgtggactgccacagaatacacaagctatcggccaacc

SEQ ID NO: 202399 - DNA, 55 bp, Artificial
  Synthetic oligonucleotide
cgagcttaaccctgcaacaccaaaggaaaccgatgaaggatacattaatcacttc

SEQ ID NO: 202400 - DNA, 55 bp, Artificial
  Synthetic oligonucleotide
cgacttaatctctattgtcatggttgggacaggagtttcaatcaccatgcgggta

SEQ ID NO: 202401 - DNA, 55 bp, Artificial
  Synthetic oligonucleotide
cgactgatatttctatcacagtagattatgttcaagctacccctcacaacccttg

SEQ ID NO: 202402 - DNA, 55 bp, Artificial
  Synthetic oligonucleotide
cgactatcatttctacacgaattcatcgtctgcccgtaaatcttacgccggtacc

SEQ ID NO: 202403 - DNA, 54 bp, Artificial
  Synthetic oligonucleotide
cgacgtttctttgaaaagtgggctgggattccgaccgaaactcatatcgcttcc

SEQ ID NO: 202404 - DNA, 55 bp, Artificial
  Synthetic oligonucleotide
cctgaataaatcatgaatatacgcaacgactagccctcccgcaatttgccagagg

SEQ ID NO: 202405 - DNA, 55 bp, Artificial
  Synthetic oligonucleotide
cgacacaattaccacaattatggggtggatcagctgacttggtagcatctactaa

SEQ ID NO: 202406 - DNA, 55 bp, Artificial
  Synthetic oligonucleotide
cgaataggcacatttattcgagacaagtatagctcctttgtgccagtaagttact

SEQ ID NO: 202407 - DNA, 58 bp, Artificial
  Synthetic oligonucleotide
gttataaagtctccgctaaagaagtactcacgcgccatgatttacaaacctttcatga

SEQ ID NO: 202408 - DNA, 55 bp, Artificial
  Synthetic oligonucleotide
cgaacgtctcgtgacgacttattaaccgcgaacgtgttgattgctaagcttagcg

SEQ ID NO: 202409 - DNA, 51 bp, Artificial
  Synthetic oligonucleotide
cgaaaggaaaacgacaaacttcgcgaagaacttgagattttaaaacgagcc

SEQ ID NO: 202410 - DNA, 55 bp, Artificial
  Synthetic oligonucleotide
cctttagtggagtctattccagtacaattaggtgaggatggacgcttagtgaccc

SEQ ID NO: 202411 - DNA, 55 bp, Artificial
  Synthetic oligonucleotide
cctggaacaatcgctaatacaccctcgattagtcaaggagctactggtgcatttg

SEQ ID NO: 202412 - DNA, 55 bp, Artificial
  Synthetic oligonucleotide
ccttgacatcagcgcccgaattatcaagctagtaacaggtttaatcgtcagcaga

SEQ ID NO: 202413 - DNA, 53 bp, Artificial
  Synthetic oligonucleotide
ccttcgcgcaaaacaaccgtattaacaccagggcgtggaataactgtcccgaa

SEQ ID NO: 202414 - DNA, 53 bp, Artificial
  Synthetic oligonucleotide
cctggttaaggccattcggtgtgaagacctattggtggaccccaaatacgcgg

SEQ ID NO: 202415 - DNA, 52 bp, Artificial
  Synthetic oligonucleotide
ccttaaccgagacaccagttaatgcgaccggtaccgtttcaaatcaaaagac

SEQ ID NO: 202416 - DNA, 54 bp, Artificial
  Synthetic oligonucleotide
tacgccataccatacgcacgggcacaattctacggcttcactaacagcggcgct

SEQ ID NO: 202417 - DNA, 54 bp, Artificial
  Synthetic oligonucleotide
tctgaatcaagagctcatggctgatggttctgatatgctttcacgtttcaacga

SEQ ID NO: 202418 - DNA, 60 bp, Artificial
  Synthetic oligonucleotide
gttgagtgcatctcgcaacgactgatatttctatcacagtagattatgttcaagctaccc

SEQ ID NO: 202419 - DNA, 54 bp, Artificial
  Synthetic oligonucleotide
tctgaatcaagatctcatggaagatggttcagatatgctttcacgcttcaatga

SEQ ID NO: 202420 - DNA, 54 bp, Artificial
  Synthetic oligonucleotide
taccggctgcgctgaggtaatactcacggacaacattgggtacttgggcgggta

SEQ ID NO: 202421 - DNA, 54 bp, Artificial
  Synthetic oligonucleotide
gtaagttgctcaacaagtattataacatactcaatgagtgtacatactctccag

SEQ ID NO: 202422 - DNA, 54 bp, Artificial
  Synthetic oligonucleotide
ttggccacccaaataagggcgtagcacctcaggcactgtcacactaccatcggg

SEQ ID NO: 202423 - DNA, 54 bp, Artificial
  Synthetic oligonucleotide
ttgcacgaattggttcaacccttggtgccaatttagttggtgtcgtagttatgc

SEQ ID NO: 202424 - DNA, 54 bp, Artificial
  Synthetic oligonucleotide
tgactggcattggtgttgactgactgagctagattttctgatgatggtgtcttt

SEQ ID NO: 202425 - DNA, 54 bp, Artificial
  Synthetic oligonucleotide
gtccaatatatctgatattgcataacgattaccgatcctccttgcgcatactat

SEQ ID NO: 202426 - DNA, 54 bp, Artificial
  Synthetic oligonucleotide
tgctattaaatgaccggcgtcatacaaacggcttcgcctacatatcgttaggca

SEQ ID NO: 202427 - DNA, 54 bp, Artificial
  Synthetic oligonucleotide
gtagccatgtaacgatcgttgataaggcacctaagattttggggaaatttgaac

SEQ ID NO: 202428 - DNA, 53 bp, Artificial
  Synthetic oligonucleotide
attaacggtatacggataatccgttgttgctaacaaacgtgacattcctaccc

SEQ ID NO: 202429 - DNA, 60 bp, Artificial
  Synthetic oligonucleotide
gttggagggcattggttatcagatcttcttggtgggattgcacatacatatcatcctgct

SEQ ID NO: 202430 - DNA, 54 bp, Artificial
  Synthetic oligonucleotide
gctacggacataaattgcgccttaacctttccaggaaacatttcggctaacaag

SEQ ID NO: 202431 - DNA, 54 bp, Artificial
  Synthetic oligonucleotide
aaaattgcgtatgcgtccgatactggacgtgttcgtgccgacaatcaggattac

SEQ ID NO: 202432 - DNA, 53 bp, Artificial
  Synthetic oligonucleotide
aaaggcaaccactgaaccagcaccgggcaccatcccccgttccgttggcaaat

SEQ ID NO: 202433 - DNA, 54 bp, Artificial
  Synthetic oligonucleotide
aacagccaaaacttcgtcttcagttggaatacttggttgtgcaccggcacgtga

SEQ ID NO: 202434 - DNA, 51 bp, Artificial
  Synthetic oligonucleotide
attcgctttcaacgaaacgaataaagaaagtaggtgcacaggggtttaaag

SEQ ID NO: 202435 - DNA, 54 bp, Artificial
  Synthetic oligonucleotide
attgcataacatggtcaatacctgcttggtcacgttcctcgacaatgtccgttg

SEQ ID NO: 202436 - DNA, 54 bp, Artificial
  Synthetic oligonucleotide
gcaaccaataccgtgcttgctgacacaatgaagctcacgaaaccagcaattacc

SEQ ID NO: 202437 - DNA, 54 bp, Artificial
  Synthetic oligonucleotide
gatacagaacttgcgattactgtattagtacttgggtgcccaggggccttggta

SEQ ID NO: 202438 - DNA, 52 bp, Artificial
  Synthetic oligonucleotide
aaccctccccgtcttggaccaggcgttctttgtttgaccagacaccttcgtg

SEQ ID NO: 202439 - DNA, 54 bp, Artificial
  Synthetic oligonucleotide
actagctgacgttgaagacaatattagggctaaacaggccgtacttaaaatcac

SEQ ID NO: 202440 - DNA, 60 bp, Artificial
  Synthetic oligonucleotide
cgctaaagaagtgctaacgcgacatgatctacaaactttcactgatgacttagatcagca

SEQ ID NO: 202441 - DNA, 54 bp, Artificial
  Synthetic oligonucleotide
cacgtgtcaggccggtatacaacaagttccggttgagcattaagccaaaacgcg

SEQ ID NO: 202442 - DNA, 54 bp, Artificial
  Synthetic oligonucleotide
ccgaaggtacaacgggcataacaataattcccgctgcgtgtaattctgccaaaa

SEQ ID NO: 202443 - DNA, 54 bp, Artificial
  Synthetic oligonucleotide
acattcactgatagttttatcccagcaactaattttggatcctatgctgtcaat

SEQ ID NO: 202444 - DNA, 54 bp, Artificial
  Synthetic oligonucleotide
cctacattgtcataacgccaggagttgtcatgccacacgcattggcgacgggac

SEQ ID NO: 202445 - DNA, 53 bp, Artificial
  Synthetic oligonucleotide
aattgcggtgttttagggtcgcgtgtgtccaataccaaaacggtatgtccctc

SEQ ID NO: 202446 - DNA, 54 bp, Artificial
  Synthetic oligonucleotide
acagctgttaccgaagcacaaactggctatgaggttcaatcagctaacggcaac

SEQ ID NO: 202447 - DNA, 54 bp, Artificial
  Synthetic oligonucleotide
ggttgcgttgattcaagggtttcacggattgcattcacgatttcgttaatcgga

SEQ ID NO: 202448 - DNA, 54 bp, Artificial
  Synthetic oligonucleotide
ggttaaaacgatgctttaagagtaaccattgcggactaccactgatacgaaatg

SEQ ID NO: 202449 - DNA, 54 bp, Artificial
  Synthetic oligonucleotide
aggacgctgacacgattaaaccgcaagacctccgtggttgggtctatggcttgc

SEQ ID NO: 202450 - DNA, 54 bp, Artificial
  Synthetic oligonucleotide
aaaacgccgtgttgtctcatatggactgagttcagagatgaccaaagaattcgc

SEQ ID NO: 202451 - DNA, 60 bp, Artificial
  Synthetic oligonucleotide
gaatttaagcagtctcttgttgagatgcacaatcaaggccgttcatatactgatctatcc

SEQ ID NO: 202452 - DNA, 54 bp, Artificial
  Synthetic oligonucleotide
ggcgccttagaattcgcctttcgcacataatcagaattgaacaaattcgggtat

SEQ ID NO: 202453 - DNA, 54 bp, Artificial
  Synthetic oligonucleotide
ggcacaaatttgcgcgcatcaattctaacatagtttcgtcgttggattgtgtct

SEQ ID NO: 202454 - DNA, 54 bp, Artificial
  Synthetic oligonucleotide
agtgggcgtcgcatctggtcttgtgtgggcagttggtactgccggccaattctt

SEQ ID NO: 202455 - DNA, 54 bp, Artificial
  Synthetic oligonucleotide
atggtatggcgctttcttttggattgaatggcttattgcagcaaccacgaatga

SEQ ID NO: 202456 - DNA, 54 bp, Artificial
  Synthetic oligonucleotide
gcttcgaccaaagaaggggtccgtcactgtccttggtacagcaatgcctaatcg

SEQ ID NO: 202457 - DNA, 53 bp, Artificial
  Synthetic oligonucleotide
acgttctggtgcacgaaccaaatcgattgcccatactgtgttcatctctggca

SEQ ID NO: 202458 - DNA, 53 bp, Artificial
  Synthetic oligonucleotide
cacacaaattgttaacaataacgactggttgggtaagctgacactgacggact

SEQ ID NO: 202459 - DNA, 53 bp, Artificial
  Synthetic oligonucleotide
gaccgctgttgctcgacagttgaggctttcgcccgggaccgtcactgcttcga

SEQ ID NO: 202460 - DNA, 53 bp, Artificial
  Synthetic oligonucleotide
cttgaacaaatttaaaagtcctaaatacttagggcttcctctgcttaaatcaa

SEQ ID NO: 202461 - DNA, 53 bp, Artificial
  Synthetic oligonucleotide
acgcattctcggtaagtaccctataatgtacttacatcttgaatgacaacgtg

SEQ ID NO: 202462 - DNA, 60 bp, Artificial
  Synthetic oligonucleotide
gaattagcacactatatggtttaaatcgcatataaagcgatttaagcggtgtctgacgtg

SEQ ID NO: 202463 - DNA, 53 bp, Artificial
  Synthetic oligonucleotide
atggccttaaaggccgtgctttgtcggtttgggcgaccgaacattctgtggcg

SEQ ID NO: 202464 - DNA, 53 bp, Artificial
  Synthetic oligonucleotide
aacgtgataacacctgtttgcgcccatccgtgagtgtccctctgtaacggcac

SEQ ID NO: 202465 - DNA, 53 bp, Artificial
  Synthetic oligonucleotide
ctagtaatccggttgtggacgttttgccgtgggctcctgcaactgctatggat

SEQ ID NO: 202466 - DNA, 53 bp, Artificial
  Synthetic oligonucleotide
catgtattaaaatgcgagtagtttcgggtcgctttcgcggcacaaggttagag

SEQ ID NO: 202467 - DNA, 53 bp, Artificial
  Synthetic oligonucleotide
taacctatccgataattatcttcgctaaaggctacaccgggaaccaccattag

SEQ ID NO: 202468 - DNA, 53 bp, Artificial
  Synthetic oligonucleotide
ttatcgccaaattatcgccaaaaaaaacgccaagtaagcaaggtaatagatac

SEQ ID NO: 202469 - DNA, 53 bp, Artificial
  Synthetic oligonucleotide
cggtcacgttgcacatgggtgctgcccacaagaagcaagccttccgtctgttg

SEQ ID NO: 202470 - DNA, 53 bp, Artificial
  Synthetic oligonucleotide
gggtagattgatgcgcgttaagtgcagcggagacggaatgtgagccgctgacg

SEQ ID NO: 202471 - DNA, 53 bp, Artificial
  Synthetic oligonucleotide
taccgccatacgttgcagggcgccagtcataattggcagctccggtttagcaa

SEQ ID NO: 202472 - DNA, 53 bp, Artificial
  Synthetic oligonucleotide
tagccccgcattgtccaattgtgcaagttgacgtggcatcagtccgtcgcgac

SEQ ID NO: 202473 - DNA, 54 bp, Artificial
  Synthetic oligonucleotide
gaatactttgggttcagttgcttcttgggaacttacctttggcgataaacagac

SEQ ID NO: 202474 - DNA, 53 bp, Artificial
  Synthetic oligonucleotide
ggtcactttgaacgtggtaaagatgttgcggacagacgttctagtgtcgagtc

SEQ ID NO: 202475 - DNA, 53 bp, Artificial
  Synthetic oligonucleotide
gcgacgtgctttgtattgatcgcgcataacaaatggcgcatcagttacatcac

SEQ ID NO: 202476 - DNA, 53 bp, Artificial
  Synthetic oligonucleotide
aaacgatctcaatctactctggttggacgccgctattctcctaccgctggtaa

SEQ ID NO: 202477 - DNA, 50 bp, Artificial
  Synthetic oligonucleotide
agcctctaacgctaaaccggtttatttgccgttctaagcgtttttaacca

SEQ ID NO: 202478 - DNA, 53 bp, Artificial
  Synthetic oligonucleotide
ggagagctctgctcgacgattgaagacttttggcgggagacgatcagtcgacc

SEQ ID NO: 202479 - DNA, 53 bp, Artificial
  Synthetic oligonucleotide
gcccgtgatcagcaacccattttgcgacgagtgccgtatctttcagtgcgcct

SEQ ID NO: 202480 - DNA, 53 bp, Artificial
  Synthetic oligonucleotide
gccaccgaatcatagccaccctgcgctgcccaatccgagtggtagttgccacg

SEQ ID NO: 202481 - DNA, 53 bp, Artificial
  Synthetic oligonucleotide
atcgaagcagtgacggtcccgggcgaaagcctcaactgtcgagcaacagcggt

SEQ ID NO: 202482 - DNA, 53 bp, Artificial
  Synthetic oligonucleotide
agtgagatcactggcgatagttttaagactgatatcaaaggctttgacttgca

SEQ ID NO: 202483 - DNA, 53 bp, Artificial
  Synthetic oligonucleotide
caaatacggtcactggttgacgacgcttatgttctgttgatgtgtatagccgt

SEQ ID NO: 202484 - DNA, 55 bp, Artificial
  Synthetic oligonucleotide
cgcttttatatttcgtcatagttatttgtgtaaatggtttacactacgtctataa

SEQ ID NO: 202485 - DNA, 53 bp, Artificial
  Synthetic oligonucleotide
gcgcaaacgcaagtgtccgcagatgatagcagtagttcaagtagtacgttagt

SEQ ID NO: 202486 - DNA, 53 bp, Artificial
  Synthetic oligonucleotide
gtgacggtcccgggcgaaagcctcaactgtcgagcaacagcggtcgtcgtttt

SEQ ID NO: 202487 - DNA, 53 bp, Artificial
  Synthetic oligonucleotide
caagggtccaattctcatttgatattcggcaccacttgggcgagatgaactca

SEQ ID NO: 202488 - DNA, 53 bp, Artificial
  Synthetic oligonucleotide
gtccgctgtggccctagaagcccagactctccccaacagcgagaacctgacct

SEQ ID NO: 202489 - DNA, 53 bp, Artificial
  Synthetic oligonucleotide
attacaaaagacggcaatggacgccaagcgtttaagatttttagaaccgcagc

SEQ ID NO: 202490 - DNA, 53 bp, Artificial
  Synthetic oligonucleotide
agggtacatcatattggcgtgtgaccgaatgagaggtgaagttcgcaatgacg

SEQ ID NO: 202491 - DNA, 53 bp, Artificial
  Synthetic oligonucleotide
aaccacgcctcgcagcccaccattacgcacaacgagattagataggcggccaa

SEQ ID NO: 202492 - DNA, 53 bp, Artificial
  Synthetic oligonucleotide
gatcattgtgcgactctatttagccggtatttcattcttggttgccgcacaat

SEQ ID NO: 202493 - DNA, 52 bp, Artificial
  Synthetic oligonucleotide
tgttcccagatccctcagtgcccaaccatgcagccacggctacctatggtcc

SEQ ID NO: 202494 - DNA, 52 bp, Artificial
  Synthetic oligonucleotide
cctcccgttgtcagtactagcacttctttcacgctactaccctcccctacgc

SEQ ID NO: 202495 - DNA, 59 bp, Artificial
  Synthetic oligonucleotide
tcaactcttgcaggagttaggacttggtgacctagatattaacactatcagggttttgc

SEQ ID NO: 202496 - DNA, 54 bp, Artificial
  Synthetic oligonucleotide
gaagtgcagttcctaagttggcgaccccggaacacttcgagttatcaataactt

SEQ ID NO: 202497 - DNA, 52 bp, Artificial
  Synthetic oligonucleotide
caatgcgcgtcttactaagtccttgtagtatcatggcaagtactgtggtcaa

SEQ ID NO: 202498 - DNA, 52 bp, Artificial
  Synthetic oligonucleotide
cagccacgccgtaggcaacgccacgcattgagcttaccgcaccatcttgcag

SEQ ID NO: 202499 - DNA, 52 bp, Artificial
  Synthetic oligonucleotide
caatggcactggagccacagacggcattaccagcgcccataagcatggcagc

SEQ ID NO: 202500 - DNA, 52 bp, Artificial
  Synthetic oligonucleotide
tagccttttcagctgcgagcgcatacaaggtcgcagtggtttgaggattgac

SEQ ID NO: 202501 - DNA, 52 bp, Artificial
  Synthetic oligonucleotide
tagcgttccggtataagttctgttttgtgccctggcgctgtaagcggccggg

SEQ ID NO: 202502 - DNA, 52 bp, Artificial
  Synthetic oligonucleotide
tagctcggggtcaatccgttgcactagcccaactggcactacctgacgtcgt

SEQ ID NO: 202503 - DNA, 52 bp, Artificial
  Synthetic oligonucleotide
acgggcacctaaccctgctaacaaggcgccaaaaacggccccagttaatgcc

SEQ ID NO: 202504 - DNA, 52 bp, Artificial
  Synthetic oligonucleotide
taggcgcaagaagtttgcgtgccactcgttcgcccatttcgcgttcaggttg

SEQ ID NO: 202505 - DNA, 52 bp, Artificial
  Synthetic oligonucleotide
tgcaggatccaatggctataagataaccgggcactcatcgtaattaaccacg

SEQ ID NO: 202506 - DNA, 52 bp, Artificial
  Synthetic oligonucleotide
acttcggttgcaaatattcttgggcctattgtaggcggattagcatttagtc

SEQ ID NO: 202507 - DNA, 51 bp, Artificial
  Synthetic oligonucleotide
gaaagtaggtgcacaggggtttaaagggggcgtagcctcctttacgtagag

SEQ ID NO: 202508 - DNA, 52 bp, Artificial
  Synthetic oligonucleotide
cccgctactttaataagtatagcagaaaaccgcggtaattacgcgattagat

SEQ ID NO: 202509 - DNA, 52 bp, Artificial
  Synthetic oligonucleotide
ttagctcattttagtaaaggattggctagcaataaaagattagaaatactgg

SEQ ID NO: 202510 - DNA, 52 bp, Artificial
  Synthetic oligonucleotide
tccgcgtgaacgcaaagcaatttcgtaagccccttccggtttaatgggcgcc

SEQ ID NO: 202511 - DNA, 52 bp, Artificial
  Synthetic oligonucleotide
tccctgggcgcaaccatgatcctgatgttgccttcccctcacgtcacatgat

SEQ ID NO: 202512 - DNA, 52 bp, Artificial
  Synthetic oligonucleotide
catcggtccaatcacagcggcaccaagaatggcacccacaaggactgcggaa

SEQ ID NO: 202513 - DNA, 52 bp, Artificial
  Synthetic oligonucleotide
cataccaaattttgagaagaggctatcaacaccttcaacaatgtcatgcgag

SEQ ID NO: 202514 - DNA, 52 bp, Artificial
  Synthetic oligonucleotide
gactgtggtggccgcttgaccaaatgccgatctttctgcgctggattggcca

SEQ ID NO: 202515 - DNA, 52 bp, Artificial
  Synthetic oligonucleotide
gtggcaagataaacaagggtgccaccaagctgacaataatcacggtagccgc

SEQ ID NO: 202516 - DNA, 52 bp, Artificial
  Synthetic oligonucleotide
gagcaggtagcggcgaatcgtgtcgaaagcaatcgaactacgggcgtttcca

SEQ ID NO: 202517 - DNA, 52 bp, Artificial
  Synthetic oligonucleotide
gatcatccccacaaacggcccaatagctgcagcgagcgacgtactcaaccca

SEQ ID NO: 202518 - DNA, 60 bp, Artificial
  Synthetic oligonucleotide
gaaaataccagggctttggttatgagctagatatgtgactaggcactcactaaaatgccc

SEQ ID NO: 202519 - DNA, 52 bp, Artificial
  Synthetic oligonucleotide
ctggatacttgtaagaatatcagatatgaagccgtaaaaactacaaagtaga

SEQ ID NO: 202520 - DNA, 52 bp, Artificial
  Synthetic oligonucleotide
gtctgttgaccacgcacatttaacccgtgtagaccttgcttgcgacatctac

SEQ ID NO: 202521 - DNA, 52 bp, Artificial
  Synthetic oligonucleotide
gcaacggccgtacttgtcgtgagtagccctggtatcacagacgtccccacgg

SEQ ID NO: 202522 - DNA, 52 bp, Artificial
  Synthetic oligonucleotide
gtctattgtctaaagctcgcaccgaactgaaccctaaatttgaatgggcctt

SEQ ID NO: 202523 - DNA, 52 bp, Artificial
  Synthetic oligonucleotide
aaaacgtgcgcaaactatggcggagcatgtagccaacggtcaagatgttgct

SEQ ID NO: 202524 - DNA, 52 bp, Artificial
  Synthetic oligonucleotide
taaatgggcggattatcatgatgaagtaactatccgatttagccccgaaatc

SEQ ID NO: 202525 - DNA, 52 bp, Artificial
  Synthetic oligonucleotide
aaaacgcgtaataatctcctccgttaaccaatatggacgctaataccgtctg

SEQ ID NO: 202526 - DNA, 52 bp, Artificial
  Synthetic oligonucleotide
taacgaacgaccggtgacactgaatttcagaggcgttgcgcccagcggcata

SEQ ID NO: 202527 - DNA, 52 bp, Artificial
  Synthetic oligonucleotide
ggggcataagttggcgttttgcgcacattagtttcataagtctgaccaccag

SEQ ID NO: 202528 - DNA, 52 bp, Artificial
  Synthetic oligonucleotide
gtacgtataaagttattgccagtcttgggcatgtgcgtgatttgccgaagtc

SEQ ID NO: 202529 - DNA, 49 bp, Artificial
  Synthetic oligonucleotide
ctttttaaagggccaagtctttaacgttagaacggcttatttgcccgtc

SEQ ID NO: 202530 - DNA, 52 bp, Artificial
  Synthetic oligonucleotide
ggcaaggacctaaggatttgttggaagtgaccctcaccttagccgcacccat

SEQ ID NO: 202531 - DNA, 52 bp, Artificial
  Synthetic oligonucleotide
aaggatgccggtcgcgtttattctaaacaatggtgaatggatttgtcgacgt

SEQ ID NO: 202532 - DNA, 52 bp, Artificial
  Synthetic oligonucleotide
cgcgtgtaattcgtttacagggaatattggtcataacttaatacgatgagaa

SEQ ID NO: 202533 - DNA, 52 bp, Artificial
  Synthetic oligonucleotide
cggcggtagctacctgctgggaaatttgtgaagcgccaaccgctgccgtaat

SEQ ID NO: 202534 - DNA, 52 bp, Artificial
  Synthetic oligonucleotide
aagccaagaataccgaatcccagatcggtaattgggaacgcggcgaacgaaa

SEQ ID NO: 202535 - DNA, 51 bp, Artificial
  Synthetic oligonucleotide
agctagcgctgatcccatcacgagtccaacaacgcccattgtgagaccgcg

SEQ ID NO: 202536 - DNA, 51 bp, Artificial
  Synthetic oligonucleotide
aggaccgcgcaacaggttttaggcgcttgggcgtgcctgggtgagtaccgc

SEQ ID NO: 202537 - DNA, 51 bp, Artificial
  Synthetic oligonucleotide
gagcacagcctttaatcgcacaattgttggtatcacgaggatatgaaacgc

SEQ ID NO: 202538 - DNA, 51 bp, Artificial
  Synthetic oligonucleotide
tgtgaacagcagaatatttttgaaagggctacttgcagaccctgataactg

SEQ ID NO: 202539 - DNA, 51 bp, Artificial
  Synthetic oligonucleotide
tcagcgcgatacagatagtcaggatttcgttcctggtgtttatttgtcggg

SEQ ID NO: 202540 - DNA, 54 bp, Artificial
  Synthetic oligonucleotide
ctttgggttcagttgcttcttgggaacttacctttggcgataagcagaccttaa

SEQ ID NO: 202541 - DNA, 51 bp, Artificial
  Synthetic oligonucleotide
caactgcggtgactgaccaaccaacatactgagaggcaactttcaaatccg

SEQ ID NO: 202542 - DNA, 51 bp, Artificial
  Synthetic oligonucleotide
ggaatgttaccttgtagtcttgggttcattccttttagtacgctattactc

SEQ ID NO: 202543 - DNA, 51 bp, Artificial
  Synthetic oligonucleotide
actcggatttataccactagtgtttggagttatagccttatttagaggtcc

SEQ ID NO: 202544 - DNA, 51 bp, Artificial
  Synthetic oligonucleotide
atcccctcattatcagacacagttcctaatgcaatgcgaatccattcggca

SEQ ID NO: 202545 - DNA, 51 bp, Artificial
  Synthetic oligonucleotide
agcttgcgcaacccatgacccaatgaccatttgcacgcgtctgagcggatc

SEQ ID NO: 202546 - DNA, 51 bp, Artificial
  Synthetic oligonucleotide
atattagtctcgatgagtatattaacttaaaagcgcgcgttgaaaatcgtg

SEQ ID NO: 202547 - DNA, 51 bp, Artificial
  Synthetic oligonucleotide
agaccgtagaaattgtcgacttaaacaccaccacgccattcgcatcagctc

SEQ ID NO: 202548 - DNA, 51 bp, Artificial
  Synthetic oligonucleotide
ggcaactaccactcggattgggcagcgcagggtggctatgattcggtggcc

SEQ ID NO: 202549 - DNA, 51 bp, Artificial
  Synthetic oligonucleotide
atacttgctgtcagataactgtcataagactgtcgtatactttatttcacc

SEQ ID NO: 202550 - DNA, 51 bp, Artificial
  Synthetic oligonucleotide
gcttgctgtagagggcgctgaagatgatgataaactcgcttcttccgatct

SEQ ID NO: 202551 - DNA, 57 bp, Artificial
  Synthetic oligonucleotide
ctttcaaactacaacggtgctgaccattttctattttgccgatacggaatagataca

SEQ ID NO: 202552 - DNA, 51 bp, Artificial
  Synthetic oligonucleotide
atcgcatataaagcgatttaagcggtgtctgacgtgttctaaccttattga

SEQ ID NO: 202553 - DNA, 51 bp, Artificial
  Synthetic oligonucleotide
tatacgtagtgaggctggcgtgacccaattatccactttatggcaacacgg

SEQ ID NO: 202554 - DNA, 51 bp, Artificial
  Synthetic oligonucleotide
cgtctcaagcgtgtacttggtgaagctttagacgttgatccccgtagtgtt

SEQ ID NO: 202555 - DNA, 51 bp, Artificial
  Synthetic oligonucleotide
ttatcaccaccggggaaggttaccgtcgcacgattaaagcgtcctaggagc

SEQ ID NO: 202556 - DNA, 51 bp, Artificial
  Synthetic oligonucleotide
catcaggtcatccgccacacgtgtggctaatttaggatcagcaccccgttg

SEQ ID NO: 202557 - DNA, 51 bp, Artificial
  Synthetic oligonucleotide
aagcagcgagtcattcgagcaattcaaattgcgcgtcatggggcacatgac

SEQ ID NO: 202558 - DNA, 51 bp, Artificial
  Synthetic oligonucleotide
ctagcctcgcatgtagcctggcgacccggtaaaggggcacccgtcaaacta

SEQ ID NO: 202559 - DNA, 51 bp, Artificial
  Synthetic oligonucleotide
cggcaaccttggcacttttgataaagttattaatgccagtggtagagttcc

SEQ ID NO: 202560 - DNA, 51 bp, Artificial
  Synthetic oligonucleotide
acatgatctacaaacatttcatgaggatttagattagcatttaaaaaaggt

SEQ ID NO: 202561 - DNA, 51 bp, Artificial
  Synthetic oligonucleotide
ttcgtgagctccaacgaccccagtcgaagccatcccacgtgccacaacagc

SEQ ID NO: 202562 - DNA, 60 bp, Artificial
  Synthetic oligonucleotide
taatccatgcacgtcaattagcacaccgtgcaccgattcacgtggtgcgagttgtccacc

SEQ ID NO: 202563 - DNA, 51 bp, Artificial
  Synthetic oligonucleotide
cagatcaaacggctgaatacattcgtatttcatatgctgctaatgatgacg

SEQ ID NO: 202564 - DNA, 51 bp, Artificial
  Synthetic oligonucleotide
gagaagaacatatccgtgaggcgataccgttcccacgcactatgaatcgtc

SEQ ID NO: 202565 - DNA, 51 bp, Artificial
  Synthetic oligonucleotide
tcacgagccccggccacacgcgctgcgtcaatcacagcacgacgttccaca

SEQ ID NO: 202566 - DNA, 51 bp, Artificial
  Synthetic oligonucleotide
cgatgcatcaaattgacgggtcaaatagtagtatccgattatgttactacc

SEQ ID NO: 202567 - DNA, 51 bp, Artificial
  Synthetic oligonucleotide
ctttaatgcgaaggaacactgggtacttttgcatcgattaggactgacgtt

SEQ ID NO: 202568 - DNA, 51 bp, Artificial
  Synthetic oligonucleotide
cacccgccatggcaacatccccgcgcatggtcaaactgctcagacgaccag

SEQ ID NO: 202569 - DNA, 51 bp, Artificial
  Synthetic oligonucleotide
ctggtattacaatggttttcccaagcgttgttacgccggacttgatacctg

SEQ ID NO: 202570 - DNA, 50 bp, Artificial
  Synthetic oligonucleotide
acatgggcaacggtcacttgcacctccggtcggaaacgacagagcgcctc

SEQ ID NO: 202571 - DNA, 50 bp, Artificial
  Synthetic oligonucleotide
aagcgggctgctctgcaagaggcgcaaagcgtcttttcgaatgccaagca

SEQ ID NO: 202572 - DNA, 50 bp, Artificial
  Synthetic oligonucleotide
tgccggcaaatgagtttcaaatcgagagtgcagggattgaaactcatggg

SEQ ID NO: 202573 - DNA, 54 bp, Artificial
  Synthetic oligonucleotide
taagtcaataaggttagaacacgtcagacaccgtttaaatcgccttacagacgt

SEQ ID NO: 202574 - DNA, 50 bp, Artificial
  Synthetic oligonucleotide
aagccaccgtgcgtctccgaccaattccgtttggcgatactgtgacgggc

SEQ ID NO: 202575 - DNA, 50 bp, Artificial
  Synthetic oligonucleotide
agctattacgcccgccaccccacacatatggcgagtggccaacgagtgat

SEQ ID NO: 202576 - DNA, 50 bp, Artificial
  Synthetic oligonucleotide
aactgccacccatgtgcgtccgccgctcgtagcacattaggtcgagcata

SEQ ID NO: 202577 - DNA, 50 bp, Artificial
  Synthetic oligonucleotide
accaaatagcgtcgcaactagtgtgccaagtctggcggggagccaagcgg

SEQ ID NO: 202578 - DNA, 50 bp, Artificial
  Synthetic oligonucleotide
ttttggatcacctatactttattgatcccgtggataatcagcgggtgcaa

SEQ ID NO: 202579 - DNA, 50 bp, Artificial
  Synthetic oligonucleotide
acacctcgtttagcgggacaaaagaagcccccagccactcgacgcaacgc

SEQ ID NO: 202580 - DNA, 50 bp, Artificial
  Synthetic oligonucleotide
tgcttgaccagctgtaatactcggcacacctgtcgcataaacacgatgta

SEQ ID NO: 202581 - DNA, 50 bp, Artificial
  Synthetic oligonucleotide
accacccaccaaggggcctgacgccgtcgacaaaccaatgacagatccta

SEQ ID NO: 202582 - DNA, 50 bp, Artificial
  Synthetic oligonucleotide
agccgggtgaggacaatccaaacgatccaggtacgccggccaacccaacg

SEQ ID NO: 202583 - DNA, 50 bp, Artificial
  Synthetic oligonucleotide
ttttaaacgtctcgaataaacgctcgtcgcctcaaacacgatatctggga

SEQ ID NO: 202584 - DNA, 60 bp, Artificial
  Synthetic oligonucleotide
gttggtcgttggttggctgattgctcggataatacacacaggactgttatgaatactttg

SEQ ID NO: 202585 - DNA, 50 bp, Artificial
  Synthetic oligonucleotide
agcaagcgaccacgacttttgcagaggcaagcgaaacggctgccaaccgt

SEQ ID NO: 202586 - DNA, 50 bp, Artificial
  Synthetic oligonucleotide
aacaggagattcgccgcggactagagagcctcggacggcgcattacggtt

SEQ ID NO: 202587 - DNA, 50 bp, Artificial
  Synthetic oligonucleotide
accggcaatggttggcgccgtaaacgtgtgcgctgtccccgtcgtgttag

SEQ ID NO: 202588 - DNA, 50 bp, Artificial
  Synthetic oligonucleotide
aaccaaacggcgacggatgctagcttcacggtcagtgcgaatggtccggc

SEQ ID NO: 202589 - DNA, 50 bp, Artificial
  Synthetic oligonucleotide
agacagcgaccgtttcccctcttgcttcacgcaaagaatccggcccgtct

SEQ ID NO: 202590 - DNA, 50 bp, Artificial
  Synthetic oligonucleotide
agacagacgaaccagctccctcatcacccataaaatcaacgtcgccaaaa

SEQ ID NO: 202591 - DNA, 50 bp, Artificial
  Synthetic oligonucleotide
actttcagattgtcgggtagtaatatcacggatagtaatggccagatacc

SEQ ID NO: 202592 - DNA, 50 bp, Artificial
  Synthetic oligonucleotide
acttgccccaaccgttagggccgtcatccccgcagtcacccacatgcggc

SEQ ID NO: 202593 - DNA, 50 bp, Artificial
  Synthetic oligonucleotide
aacggcgggggccgttttaattgcgttggcgttcacaggttacgcggccg

SEQ ID NO: 202594 - DNA, 50 bp, Artificial
  Synthetic oligonucleotide
acgctccgaaaagacgggtggcaagtggtgggccccgaaactggttttct

SEQ ID NO: 202595 - DNA, 58 bp, Artificial
  Synthetic oligonucleotide
cttcgtaaattgcagaaagaacagtacgatgacacactttcccaagaattgcttgatt

SEQ ID NO: 202596 - DNA, 50 bp, Artificial
  Synthetic oligonucleotide
aacgccctggttgcaactgtcccaccgacgtgcgatggtcgtagcgacta

SEQ ID NO: 202597 - DNA, 50 bp, Artificial
  Synthetic oligonucleotide
aacgacagccacactcttcgtgctccacgcgtcacccgaaactggcagta

SEQ ID NO: 202598 - DNA, 50 bp, Artificial
  Synthetic oligonucleotide
actaattcatgattgggatttaacttaataaccaacgaagtgcgtttaag

SEQ ID NO: 202599 - DNA, 50 bp, Artificial
  Synthetic oligonucleotide
ccgatggcataagtataaatggccattaagagttctttcttgtcgggatc

SEQ ID NO: 202600 - DNA, 50 bp, Artificial
  Synthetic oligonucleotide
ccgccacctagccgtgggaacggaacaccttcttctcgcgctagcgatgg

SEQ ID NO: 202601 - DNA, 50 bp, Artificial
  Synthetic oligonucleotide
ccgcttccccaaaaccttggccgctctcggcctgacagagcaagctgacg

SEQ ID NO: 202602 - DNA, 50 bp, Artificial
  Synthetic oligonucleotide
ccgtcttatgactacctttagccatatgaaaagcagtcggtaactgtttt

SEQ ID NO: 202603 - DNA, 50 bp, Artificial
  Synthetic oligonucleotide
tactttcttattcaaataatcgacctctttttgcttgttggcaacattgt

SEQ ID NO: 202604 - DNA, 50 bp, Artificial
  Synthetic oligonucleotide
tactgccaatggatgcagcgcttcaccggataagccacccttaccgcgat

SEQ ID NO: 202605 - DNA, 50 bp, Artificial
  Synthetic oligonucleotide
tacgttacccaggcacaccattcggctaggatcattctccgcggcccgat

SEQ ID NO: 202606 - DNA, 55 bp, Artificial
  Synthetic oligonucleotide
tcaacccctgcaagggttaggacttggtgacctagatattacaactatcagggtt

SEQ ID NO: 202607 - DNA, 54 bp, Artificial
  Synthetic oligonucleotide
cgtatttaatttggacatagttgttactgtggtttgtgtacttaatggttgatt

SEQ ID NO: 202608 - DNA, 50 bp, Artificial
  Synthetic oligonucleotide
taccgtcatcgttagatgaagagccaccgccattatccgtattcgtgcca

SEQ ID NO: 202609 - DNA, 50 bp, Artificial
  Synthetic oligonucleotide
cgccaacatctgtacaatgtggtgttcccgatacggcaccattataacca

SEQ ID NO: 202610 - DNA, 50 bp, Artificial
  Synthetic oligonucleotide
cggctgggacaagtttaccagcagcaacctctgattgcgcatcgcggggt

SEQ ID NO: 202611 - DNA, 50 bp, Artificial
  Synthetic oligonucleotide
cggtaagatgcgccgcataaccaccgattgaggcaatcacggccggtgca

SEQ ID NO: 202612 - DNA, 50 bp, Artificial
  Synthetic oligonucleotide
cggtacgaaatagacactactagttaatagtaaaacgcgtaagcctaaac

SEQ ID NO: 202613 - DNA, 50 bp, Artificial
  Synthetic oligonucleotide
cgtcagagttgaactcaattggctggtaccgccggcagtaggccgaccgg

SEQ ID NO: 202614 - DNA, 50 bp, Artificial
  Synthetic oligonucleotide
gtttcaagccaacggccctagtcgttgacccaccccgtccgggcctagag

SEQ ID NO: 202615 - DNA, 50 bp, Artificial
  Synthetic oligonucleotide
ctattctaccagaaaataacgtaaggcaggtgcagagcttgaatgaactg

SEQ ID NO: 202616 - DNA, 50 bp, Artificial
  Synthetic oligonucleotide
gacgcagtattgagagcgtttcttttcacattacaaaaaaaccagtcgca

SEQ ID NO: 202617 - DNA, 50 bp, Artificial
  Synthetic oligonucleotide
gttgacccaccccgtccgggcctagaggttgacttaaaacgcgccatcct

SEQ ID NO: 202618 - DNA, 60 bp, Artificial
  Synthetic oligonucleotide
cttatgtgactttaaaagatgcaataggagacctgccaagtagtccaccagatgtatttg

SEQ ID NO: 202619 - DNA, 50 bp, Artificial
  Synthetic oligonucleotide
gagcggccctggtgagccaagtggcccctgcgccaatgttattgagaccc

SEQ ID NO: 202620 - DNA, 50 bp, Artificial
  Synthetic oligonucleotide
gatcttgcggactcgctagccccgggacgcggtaaggcggccaaagtcgg

SEQ ID NO: 202621 - DNA, 50 bp, Artificial
  Synthetic oligonucleotide
gcagccgtggatgtttcggatacggatgattcggcttggcactccgcggt

SEQ ID NO: 202622 - DNA, 50 bp, Artificial
  Synthetic oligonucleotide
gcattggtgaattagctcggatgaccggtgtatcaacacggcaactgcgc

SEQ ID NO: 202623 - DNA, 50 bp, Artificial
  Synthetic oligonucleotide
gccgggcacaccaaaagtaccggatactccaaaagtgccggacacgccta

SEQ ID NO: 202624 - DNA, 50 bp, Artificial
  Synthetic oligonucleotide
gcctgatatggcaaccgtgacggctgctcgcttgacgattcgcgttggtg

SEQ ID NO: 202625 - DNA, 50 bp, Artificial
  Synthetic oligonucleotide
gcctgtactggatttattccaacgcttaaaaaagagcctgataacagtag

SEQ ID NO: 202626 - DNA, 50 bp, Artificial
  Synthetic oligonucleotide
gcgatttgtaacattttgaaccgacgcattaagttgagatacggttacgg

SEQ ID NO: 202627 - DNA, 50 bp, Artificial
  Synthetic oligonucleotide
gcggaacagaccgagcggaagcgggctgctctgcaagaggcgcaaagcgt

SEQ ID NO: 202628 - DNA, 50 bp, Artificial
  Synthetic oligonucleotide
gctgactttggacatcgacgatggcgacctacagggaccctacccgggca

SEQ ID NO: 202629 - DNA, 59 bp, Artificial
  Synthetic oligonucleotide
taaatcttacgttactattcgaacagtccaacgattagaagcaggcgaagatgtcagct

SEQ ID NO: 202630 - DNA, 50 bp, Artificial
  Synthetic oligonucleotide
gcttgtggtcacccgacatgacatgaccgtctgggcccactttaccggca

SEQ ID NO: 202631 - DNA, 50 bp, Artificial
  Synthetic oligonucleotide
ggctaccagcttgtggtcacccgacatgacatgaccgtctgggcccactt

SEQ ID NO: 202632 - DNA, 50 bp, Artificial
  Synthetic oligonucleotide
ggggattgacggccttgcaaggggatgccaactgggttctcttcgccact

SEQ ID NO: 202633 - DNA, 50 bp, Artificial
  Synthetic oligonucleotide
aggcatccttcgctgaggcaaccttggcttcgtttgacaatggggccgtt

SEQ ID NO: 202634 - DNA, 50 bp, Artificial
  Synthetic oligonucleotide
agggccgtcatccccgcagtcacccacatgcggcgatgctttgcctgttg

SEQ ID NO: 202635 - DNA, 50 bp, Artificial
  Synthetic oligonucleotide
aggtatggtatggcgtgtcgtgctagcgcacgaggcatgggtgtggggaa

SEQ ID NO: 202636 - DNA, 50 bp, Artificial
  Synthetic oligonucleotide
aggttcacgcgaccacgtacatggccaacgccacccgtaattaccgccga

SEQ ID NO: 202637 - DNA, 50 bp, Artificial
  Synthetic oligonucleotide
tctgcgtatgatgataattccgataccaaacggttcttggtacatccggt

SEQ ID NO: 202638 - DNA, 50 bp, Artificial
  Synthetic oligonucleotide
atcaaacttaatcattcaactcgagaaatagcccgtttcttaaagcgttc

SEQ ID NO: 202639 - DNA, 50 bp, Artificial
  Synthetic oligonucleotide
atccgccgtcacgttacgacacatcaggcgcattgctagccaatccgcta

SEQ ID NO: 202640 - DNA, 56 bp, Artificial
  Synthetic oligonucleotide
ctgttcaatcgttgtcggacgttatcctaacaactaatacggaacaggcgtgtatc

SEQ ID NO: 202641 - DNA, 50 bp, Artificial
  Synthetic oligonucleotide
atggcgccttccgcagctactaaacgcgtcaccagatctacagcccccat

SEQ ID NO: 202642 - DNA, 50 bp, Artificial
  Synthetic oligonucleotide
attcgccgcggactagagagcctcggacggcgcattacggttcgcaagca

SEQ ID NO: 202643 - DNA, 50 bp, Artificial
  Synthetic oligonucleotide
caaaaatttctggtctagataccagagtttcaagtgcaattggggcaggc

SEQ ID NO: 202644 - DNA, 50 bp, Artificial
  Synthetic oligonucleotide
caacagcacgtgattcaccggtggccgttccaacacccatgagggctggt

SEQ ID NO: 202645 - DNA, 50 bp, Artificial
  Synthetic oligonucleotide
caaccaaaggcttcaaccaggtaaccacccaccaaggggcctgacgccgt

SEQ ID NO: 202646 - DNA, 50 bp, Artificial
  Synthetic oligonucleotide
caaccaggtaaccacccaccaaggggcctgacgccgtcgacaaaccaatg

SEQ ID NO: 202647 - DNA, 50 bp, Artificial
  Synthetic oligonucleotide
caacgcccgaaacgcaggacgtttattccccaacgtatgccggttccgga

SEQ ID NO: 202648 - DNA, 50 bp, Artificial
  Synthetic oligonucleotide
tcccgcaacgttgttgccatggattacggaggtcttggacgccaacccac

SEQ ID NO: 202649 - DNA, 50 bp, Artificial
  Synthetic oligonucleotide
caacggccctagtcgttgacccaccccgtccgggcctagaggttgactta

SEQ ID NO: 202650 - DNA, 50 bp, Artificial
  Synthetic oligonucleotide
caacgtggggtgccagctacctttgacaagtggcaacgggcggaactggc

SEQ ID NO: 202651 - DNA, 59 bp, Artificial
  Synthetic oligonucleotide
ctaacggtgatactgaaaatattgcctattacgctgagaatgcgtttcaagctggttct

SEQ ID NO: 202652 - DNA, 50 bp, Artificial
  Synthetic oligonucleotide
caagcgccgctccaaatggcatccggtccttaaccggtaccgtccagtta

SEQ ID NO: 202653 - DNA, 50 bp, Artificial
  Synthetic oligonucleotide
caatccaacgggcatactgcaccgtccacggatcatccaacccagcagcc

SEQ ID NO: 202654 - DNA, 50 bp, Artificial
  Synthetic oligonucleotide
caatcgcgagcactgcccgtggctcccttgccggtcgcatgcaccaaact

SEQ ID NO: 202655 - DNA, 50 bp, Artificial
  Synthetic oligonucleotide
tcacttgcacctccggtcggaaacgacagagcgcctcgagtaggagcgtt

SEQ ID NO: 202656 - DNA, 50 bp, Artificial
  Synthetic oligonucleotide
tcaagttgtacgcggtccacgaagtggacggcaaaaaatggacgcaagct

SEQ ID NO: 202657 - DNA, 50 bp, Artificial
  Synthetic oligonucleotide
cacatttgcttggggcaactgccacccatgtgcgtccgccgctcgtagca

SEQ ID NO: 202658 - DNA, 50 bp, Artificial
  Synthetic oligonucleotide
tcaagataagattcgtgacgaaagtacacaaattgattggacatatcctg

SEQ ID NO: 202659 - DNA, 50 bp, Artificial
  Synthetic oligonucleotide
cacctcgttaatccaggttccgcaaggcgtcgaccaaggccgtcttgcct

SEQ ID NO: 202660 - DNA, 50 bp, Artificial
  Synthetic oligonucleotide
cagcggttggcttgggggttagtgttgccaatggtattccggcggtgcaa

SEQ ID NO: 202661 - DNA, 50 bp, Artificial
  Synthetic oligonucleotide
catcgcatcatgtcgcgctctgaccgcacgttgtaaggttgacccgggta

SEQ ID NO: 202662 - DNA, 60 bp, Artificial
  Synthetic oligonucleotide
ctagcctgacaagtattgagcgaccatctgactagaaaaaaaaccgtgatgtaagattgc

SEQ ID NO: 202663 - DNA, 50 bp, Artificial
  Synthetic oligonucleotide
tataagtcagagggtatctatggcttagcaactcgtgctagtcaatcgtt

SEQ ID NO: 202664 - DNA, 50 bp, Artificial
  Synthetic oligonucleotide
ccaccagtcatcgtcaacgcgggaccactgccaacaatcaacggggcagt

SEQ ID NO: 202665 - DNA, 50 bp, Artificial
  Synthetic oligonucleotide
ccacgcccgctcaatatcagctaaagcccgccggtatggggcatgctcca

SEQ ID NO: 202666 - DNA, 56 bp, Artificial
  Synthetic oligonucleotide
gtttcttgtcttggcttatcccaacactcacaaatgcttttaggtagttcgtccac

SEQ ID NO: 202667 - DNA, 59 bp, Artificial
  Synthetic oligonucleotide
ctcgctatgattgctttggacgtggtttagacgacctttcagccctcttgacggataca

SEQ ID NO: 202668 - DNA, 53 bp, Artificial
  Synthetic oligonucleotide
ctatttagttattcatgaaagtttgcgtaaaaatgggttaggtcgggagctgt

SEQ ID NO: 202669 - DNA, 60 bp, Artificial
  Synthetic oligonucleotide
ctcatcaaggttgcctgaataaatcatgaatatacgcaacgactagccctcccgcaattt

SEQ ID NO: 202670 - DNA, 60 bp, Artificial
  Synthetic oligonucleotide
cacttacgacagctagagcagatccagatacgaaaatagcgccaactagattagatcgcg

SEQ ID NO: 202671 - DNA, 57 bp, Artificial
  Synthetic oligonucleotide
ctccgaagggccatgacgggtttcaggttacgtccatctgctagttcaccacgagag

SEQ ID NO: 202672 - DNA, 59 bp, Artificial
  Synthetic oligonucleotide
cccacaatctcgctatgattgctttggacgtggtttagacgacctttcagccctcttga

SEQ ID NO: 202673 - DNA, 60 bp, Artificial
  Synthetic oligonucleotide
cccagatgcgaccacaccggtaacgccaagtgatccgagtgcagatacgacagtaccgta

SEQ ID NO: 202674 - DNA, 57 bp, Artificial
  Synthetic oligonucleotide
cccagctacgcacgtgcccaaatcacacgtattccctacgaaaacccgcaaactgca

SEQ ID NO: 202675 - DNA, 60 bp, Artificial
  Synthetic oligonucleotide
gcatgctatatttcttcatcacggcgcaacccgtgatcggacacctagccgctacccatt

SEQ ID NO: 202676 - DNA, 60 bp, Artificial
  Synthetic oligonucleotide
gcagctattcctagtcacattgtctctcgtcaaaggttgttcttttcttgacgcattctc

SEQ ID NO: 202677 - DNA, 60 bp, Artificial
  Synthetic oligonucleotide
gtctcacagcgcgaatatgtcgtttatacggcgcaatggaccaaagctgtggagacaagt

SEQ ID NO: 202678 - DNA, 59 bp, Artificial
  Synthetic oligonucleotide
ccctggcctattagcgccgtgagccccttttgctttaacatgcgttgatcgtggctgac

SEQ ID NO: 202679 - DNA, 59 bp, Artificial
  Synthetic oligonucleotide
taggacttttaagattgttcaaggtataattcagaatcatatcgcttgtatcaaccacg

SEQ ID NO: 202680 - DNA, 58 bp, Artificial
  Synthetic oligonucleotide
tagagttcaaatcattcgagcttaaccctgcaacaccaaaggaaaccgatgaaggata

SEQ ID NO: 202681 - DNA, 56 bp, Artificial
  Synthetic oligonucleotide
gggctaatgaacgccctcgctatcaaacatgggccgacctttttagctgaggacgg

SEQ ID NO: 202682 - DNA, 56 bp, Artificial
  Synthetic oligonucleotide
gaaacgtacttttacacattgtggtgatgtggaaagcgtagtagacaaacaggtac

SEQ ID NO: 202683 - DNA, 55 bp, Artificial
  Synthetic oligonucleotide
gatacataattccgatgattagccatgtccaagtactttcgaatgtacgcgccat

SEQ ID NO: 202684 - DNA, 55 bp, Artificial
  Synthetic oligonucleotide
gatacgaaagcgacgttccaagcatcggaagttccctcaagtggagcggacttgc

SEQ ID NO: 202685 - DNA, 55 bp, Artificial
  Synthetic oligonucleotide
gacgtttaggtgtgattggggaacaattgtattatcatgcgcatgggatcgatta

SEQ ID NO: 202686 - DNA, 55 bp, Artificial
  Synthetic oligonucleotide
gatcgattatagccgtctgtcagaaaagtataagccacttgagaagtcgtatgga

SEQ ID NO: 202687 - DNA, 55 bp, Artificial
  Synthetic oligonucleotide
gacgcttggatgtcaaggtgttacttgaaattaactaagtccattcaaccgctga

SEQ ID NO: 202688 - DNA, 55 bp, Artificial
  Synthetic oligonucleotide
gatcggcgtacctttgtagtcatagcctacagtcacgcgcatacgccatgaattt

SEQ ID NO: 202689 - DNA, 55 bp, Artificial
  Synthetic oligonucleotide
gacccaaccttcaacaccacttgtcgagggcagaccaaacaattacgatgcctca

SEQ ID NO: 202690 - DNA, 55 bp, Artificial
  Synthetic oligonucleotide
gatgacggttactttctgagcataacgaacatctacgtccgaacaaaatcttcca

SEQ ID NO: 202691 - DNA, 55 bp, Artificial
  Synthetic oligonucleotide
gatgcaagatctgaatggctccgtctcacaagccatccacaacaaaccgacggtt

SEQ ID NO: 202692 - DNA, 55 bp, Artificial
  Synthetic oligonucleotide
gatggtggtaagttggataggattcgtgacctggttggaagtagaaaatccggcc

SEQ ID NO: 202693 - DNA, 57 bp, Artificial
  Synthetic oligonucleotide
ggatcgtactgtccagctgtcattaaacctactgggtaatgtctaccgaaggcgtaa

SEQ ID NO: 202694 - DNA, 55 bp, Artificial
  Synthetic oligonucleotide
gaccactaagttccgtcgcgaattgatctgtaccaagagtcgccatttcgggcat

SEQ ID NO: 202695 - DNA, 55 bp, Artificial
  Synthetic oligonucleotide
tagcagaggatacgctgagtttccgggtgtctgcttaccaagccatgttaccagc

SEQ ID NO: 202696 - DNA, 55 bp, Artificial
  Synthetic oligonucleotide
gatttcagtaacaaagcttgcggctctagtaagcggtataaacgcacccgcattt

SEQ ID NO: 202697 - DNA, 55 bp, Artificial
  Synthetic oligonucleotide
gcaaaacggatggttaaagcagcgaacattgactgcgaagtacatttaacactcg

SEQ ID NO: 202698 - DNA, 55 bp, Artificial
  Synthetic oligonucleotide
taggatccgttgaactaccacaacctgtaagtacggtcattaatccaattacaag

SEQ ID NO: 202699 - DNA, 55 bp, Artificial
  Synthetic oligonucleotide
gaatcaatccccgcaagccccgtattaagtgggcgtgttacactatcaatcgtca

SEQ ID NO: 202700 - DNA, 55 bp, Artificial
  Synthetic oligonucleotide
tatacagcgcttgaaaacggattagcggatgtagatatgaatgaggtggaacgag

SEQ ID NO: 202701 - DNA, 54 bp, Artificial
  Synthetic oligonucleotide
gaaattccgcgattcttattttgcgagaaagtacaaactaaccttcaccgtaga

SEQ ID NO: 202702 - DNA, 55 bp, Artificial
  Synthetic oligonucleotide
gcaactccgcgttatgttgttgaagacatatacagcttgatagatattgagtcgt

SEQ ID NO: 202703 - DNA, 55 bp, Artificial
  Synthetic oligonucleotide
tatatgattgtcgatccgcggattagggaaatggggtgaggagttcatgatgcga

SEQ ID NO: 202704 - DNA, 60 bp, Artificial
  Synthetic oligonucleotide
ttgcagaacgagcgcggtcacgttgttctttcatttccgcctcaaagccagcgtgatcta

SEQ ID NO: 202705 - DNA, 55 bp, Artificial
  Synthetic oligonucleotide
cttgtcgtttgcgcttatttcctaattgccatgtcaatgggcggacttggcttga

SEQ ID NO: 202706 - DNA, 55 bp, Artificial
  Synthetic oligonucleotide
gcaagaatccaaccattgtatagctgattttcttagccgcagtggcaaagagtag

SEQ ID NO: 202707 - DNA, 55 bp, Artificial
  Synthetic oligonucleotide
gcaaggtgggattgcggttattttagaccggatgcaaggccaacttacacgactc

SEQ ID NO: 202708 - DNA, 55 bp, Artificial
  Synthetic oligonucleotide
gtatcgagttcactgcggcaaagtattcctgattcaaaattgccgttgtaagatc

SEQ ID NO: 202709 - DNA, 55 bp, Artificial
  Synthetic oligonucleotide
gtatataaagaaacgaagatgactaaactcgcctggttaaaagatatccctggca

SEQ ID NO: 202710 - DNA, 55 bp, Artificial
  Synthetic oligonucleotide
gtaggattagccacaccggtagtaaccagattattgctttactggtatctcccga

SEQ ID NO: 202711 - DNA, 55 bp, Artificial
  Synthetic oligonucleotide
gtaagtcttatgaaggcgcgattatggaggtgttccacggatgattattcaaatc

SEQ ID NO: 202712 - DNA, 55 bp, Artificial
  Synthetic oligonucleotide
gtaacgcatgtcgtcaaaggtacttagtggtgctttaagcggaccattaggcaca

SEQ ID NO: 202713 - DNA, 55 bp, Artificial
  Synthetic oligonucleotide
gtaaatcagaggaaattccaaggtcagattgaacggcgggcacgatatttaccat

SEQ ID NO: 202714 - DNA, 55 bp, Artificial
  Synthetic oligonucleotide
gtaaaatatacggagaacgcttctcttccatacgtttgataactcccgaaagcag

SEQ ID NO: 202715 - DNA, 58 bp, Artificial
  Synthetic oligonucleotide
gaatattcaattaatcagattcttgatgcctctaaactaagcaaaacaaccctatacc

SEQ ID NO: 202716 - DNA, 55 bp, Artificial
  Synthetic oligonucleotide
ggttaccgaggaaaacttgatgcatacaaatgtaagtaaaggcttgaccgattaa

SEQ ID NO: 202717 - DNA, 55 bp, Artificial
  Synthetic oligonucleotide
ggtgtttataacgatcaagtgcaagatgaccttaacttccactggacttctccag

SEQ ID NO: 202718 - DNA, 55 bp, Artificial
  Synthetic oligonucleotide
ggtgttcaaactgatggtccgattagaaccttggtcgccaaagggcttgtaacag

SEQ ID NO: 202719 - DNA, 55 bp, Artificial
  Synthetic oligonucleotide
ggtggcgtattttacgcgatttcgatgttaccgccaatctggcaagcgatttcta

SEQ ID NO: 202720 - DNA, 55 bp, Artificial
  Synthetic oligonucleotide
ggtggagcattcgctaaccttggtacagaactaactatccttgaaggtggtccag

SEQ ID NO: 202721 - DNA, 55 bp, Artificial
  Synthetic oligonucleotide
ggtgcaatttgtccgcgtgtagttgttttgtagctcgcaaatgcctcgccttttg

SEQ ID NO: 202722 - DNA, 55 bp, Artificial
  Synthetic oligonucleotide
gggtttgccattcagctctgcttggcacgataccctgggtgttcgttgagtaact

SEQ ID NO: 202723 - DNA, 55 bp, Artificial
  Synthetic oligonucleotide
taccgcttgctaaaaggcgaagtgccagaaactgattatatcgttccaatcggcg

SEQ ID NO: 202724 - DNA, 55 bp, Artificial
  Synthetic oligonucleotide
gggtgacaccagttgtactaaccactcgaccaatcggcaaagtcatatctggccg

SEQ ID NO: 202725 - DNA, 53 bp, Artificial
  Synthetic oligonucleotide
gggtagttaaaacgactcctgccaacgctaatggcgtatttacgaacactaac

SEQ ID NO: 202726 - DNA, 58 bp, Artificial
  Synthetic oligonucleotide
ggcaactatacgattgatgccgcaccggtgacagttattccggggaaagctaacgcag

SEQ ID NO: 202727 - DNA, 55 bp, Artificial
  Synthetic oligonucleotide
ggggcgcagatataggcgacgcggcagacaaatcgcttagcaaagtgtcccaatt

SEQ ID NO: 202728 - DNA, 55 bp, Artificial
  Synthetic oligonucleotide
gtttgcagaaggcgtataagattcccaactaggaacaatcgtaattctatccgtg

SEQ ID NO: 202729 - DNA, 55 bp, Artificial
  Synthetic oligonucleotide
gttcggttatcacatccatacccttaagacgctgacaagatttcgaaatggatag

SEQ ID NO: 202730 - DNA, 55 bp, Artificial
  Synthetic oligonucleotide
gttcggggatggaaagtgctaccctatctaaacgaatagtttgcacactgacccc

SEQ ID NO: 202731 - DNA, 55 bp, Artificial
  Synthetic oligonucleotide
taaaagtaaccgcactaacagaagacggcgttataatgggactagctcacgtatc

SEQ ID NO: 202732 - DNA, 54 bp, Artificial
  Synthetic oligonucleotide
gttaagtaagtccgtattcgcaagcccgttcgttccttcagtaagcggatggac

SEQ ID NO: 202733 - DNA, 55 bp, Artificial
  Synthetic oligonucleotide
gtgttctgctggataaatacatacagttcgatctaacccgccgtggtatttcaaa

SEQ ID NO: 202734 - DNA, 55 bp, Artificial
  Synthetic oligonucleotide
gtggagtaaccgaagcattacccgaacgtgcaagcctagctcatgatgactaccg

SEQ ID NO: 202735 - DNA, 55 bp, Artificial
  Synthetic oligonucleotide
gtgcccaacctcctaaattagtttggagcattcgctttaggaagcgcttggggat

SEQ ID NO: 202736 - DNA, 55 bp, Artificial
  Synthetic oligonucleotide
gtgccacaaccgctacgataaaccctggaataacaagtgcgcgtggaccgtatgc

SEQ ID NO: 202737 - DNA, 59 bp, Artificial
  Synthetic oligonucleotide
actctgacccaccggcaatagaagttgcccagttccctggatcgacatagccgaccgca

SEQ ID NO: 202738 - DNA, 55 bp, Artificial
  Synthetic oligonucleotide
gtgatctctccagccatatctctaagataaatacgatcgtcttccacgccaacga

SEQ ID NO: 202739 - DNA, 55 bp, Artificial
  Synthetic oligonucleotide
gtctatccgaattacaactggacagactgcgcaatattgttttccacgttaaact

SEQ ID NO: 202740 - DNA, 55 bp, Artificial
  Synthetic oligonucleotide
gtcggatgtatcaataacaaacgtaatattgtcgccaaatgtaagtggcatagac

SEQ ID NO: 202741 - DNA, 55 bp, Artificial
  Synthetic oligonucleotide
gtcccatttcgcgtgcaattctcgtaccatataacaagtttctaacgattgactc

SEQ ID NO: 202742 - DNA, 55 bp, Artificial
  Synthetic oligonucleotide
gtccaatcccagtgtgattcttctagttccatcaatggtcgaagtaccccactcg

SEQ ID NO: 202743 - DNA, 55 bp, Artificial
  Synthetic oligonucleotide
gtcattcccgttgcttgtgctactatcccgccacctaacaggaatagtgcgaagg

SEQ ID NO: 202744 - DNA, 55 bp, Artificial
  Synthetic oligonucleotide
gtcagcaaatgattgagagaattcacttacattccgcacaaggtcacgcttgcct

SEQ ID NO: 202745 - DNA, 55 bp, Artificial
  Synthetic oligonucleotide
gtcactccaagaaggcgccattttatttccgacgttttcagtggactcatggtac

SEQ ID NO: 202746 - DNA, 55 bp, Artificial
  Synthetic oligonucleotide
gtatgaggcttgatggtaaggttgaccgtcagtatgtctactcagatagcagagt

SEQ ID NO: 202747 - DNA, 55 bp, Artificial
  Synthetic oligonucleotide
gtatctctttgaaccatacgcttgtatagtataccatcccgcaccatttaagtca

SEQ ID NO: 202748 - DNA, 60 bp, Artificial
  Synthetic oligonucleotide
attatcatgcgcatgggatcgattatagccgtttatcagagaagtataagccaatcgaaa

SEQ ID NO: 202749 - DNA, 53 bp, Artificial
  Synthetic oligonucleotide
ggacgagcgttactaacacaaaaggtacgttaacgaagaaaactgcgcgccaa

SEQ ID NO: 202750 - DNA, 55 bp, Artificial
  Synthetic oligonucleotide
ggaacgattccttagtgttgcaacgaaagacttgcggttattcactaccaagtgg

SEQ ID NO: 202751 - DNA, 55 bp, Artificial
  Synthetic oligonucleotide
gcttgcttacaagcgcagatacttcgctatcctctatgaatgacgcaatgtcccg

SEQ ID NO: 202752 - DNA, 55 bp, Artificial
  Synthetic oligonucleotide
gcttctggcagtatggagtttgctacttgtttatagtacgagttatggggttgca

SEQ ID NO: 202753 - DNA, 55 bp, Artificial
  Synthetic oligonucleotide
gcttatgaattaccgcatattcaagtcgaaagacagacgggtcatttgttctcgg

SEQ ID NO: 202754 - DNA, 54 bp, Artificial
  Synthetic oligonucleotide
gcttactgaaggaacgaacgggcttgcgaatacggacttacttaaccaactgcc

SEQ ID NO: 202755 - DNA, 55 bp, Artificial
  Synthetic oligonucleotide
gctgttgtcgcaagtcctgacgaaatccgcggtacggtcgtaaaagctttcatcg

SEQ ID NO: 202756 - DNA, 55 bp, Artificial
  Synthetic oligonucleotide
gctgttgccgcgtaagatgtatctagcttaccgttcatgtatctggagtagctaa

SEQ ID NO: 202757 - DNA, 55 bp, Artificial
  Synthetic oligonucleotide
gctccctgttctagctgcgtaggcgtgacttgccgcttctactgcgcgccaatcg

SEQ ID NO: 202758 - DNA, 55 bp, Artificial
  Synthetic oligonucleotide
gctaattcatagccattcgtcacaacttgctgatcaaacaaagactcgagcgcgc

SEQ ID NO: 202759 - DNA, 57 bp, Artificial
  Synthetic oligonucleotide
ttggtccatcactctaaattgatccaaattacggggccctcttatagaatgaagagt

SEQ ID NO: 202760 - DNA, 55 bp, Artificial
  Synthetic oligonucleotide
gcgtgagggcagggtccagcaattactggtaagcgacagtaaccgttaggaagtg

SEQ ID NO: 202761 - DNA, 55 bp, Artificial
  Synthetic oligonucleotide
gcggtggctgactaatgtaacgtcacctgtttcgattgcaatatcggtacctgtc

SEQ ID NO: 202762 - DNA, 55 bp, Artificial
  Synthetic oligonucleotide
gcggcgttacatccgttatttagcttaatggaacttccgcaatcagctattacga

SEQ ID NO: 202763 - DNA, 55 bp, Artificial
  Synthetic oligonucleotide
gcgcttgttaacggtacctgtttgtctactacgctttccacatcaccacaatgtg

SEQ ID NO: 202764 - DNA, 55 bp, Artificial
  Synthetic oligonucleotide
gcgctgcaacatatggtgagtcagaacgagtaccgattacggaagatatgccaac

SEQ ID NO: 202765 - DNA, 55 bp, Artificial
  Synthetic oligonucleotide
gcgctgacacctattgataacgctgtctatacggatacgctaggttcagggcaaa

SEQ ID NO: 202766 - DNA, 55 bp, Artificial
  Synthetic oligonucleotide
gcgatcgtaaatacgatccactcgttgcaccaatacgtagcaaagatttagtcgg

SEQ ID NO: 202767 - DNA, 55 bp, Artificial
  Synthetic oligonucleotide
gcgaggaatttatattgactccgttcgatgtttagaaggaggacatgggacaacg

SEQ ID NO: 202768 - DNA, 55 bp, Artificial
  Synthetic oligonucleotide
gcgacttacgttcaagccgtttggaacgagaagcacattcaactaccggaatagg

SEQ ID NO: 202769 - DNA, 55 bp, Artificial
  Synthetic oligonucleotide
ggggccgcgtcactagaattttagcatacttctccccgtattgaggctgaacgag

SEQ ID NO: 202770 - DNA, 57 bp, Artificial
  Synthetic oligonucleotide
gaccgccgtcacacgaacaacaagccaatcagaaacaagcgtagttccacccgtcac

SEQ ID NO: 202771 - DNA, 55 bp, Artificial
  Synthetic oligonucleotide
ggggcattatgaaacaatgcctcactttgtaatgctcgaattgaagtaaggaggg

SEQ ID NO: 202772 - DNA, 55 bp, Artificial
  Synthetic oligonucleotide
gggaccgtagctacactagcacacgaacttggccacgcatttcactctgatgtca

SEQ ID NO: 202773 - DNA, 55 bp, Artificial
  Synthetic oligonucleotide
ggcttgcgattaataagatgctaagtgtgaccagcggaatgctgaaagatggtcg

SEQ ID NO: 202774 - DNA, 55 bp, Artificial
  Synthetic oligonucleotide
ggcttaggctaggctgggtaatggagagttcggctgctgcaatcgtgtaatgctc

SEQ ID NO: 202775 - DNA, 55 bp, Artificial
  Synthetic oligonucleotide
ggctgctagtggtggtattctagctaagtctggcactccaaatctaaacgctact

SEQ ID NO: 202776 - DNA, 52 bp, Artificial
  Synthetic oligonucleotide
ggctacggtttatcgtttacgaatcttggcccattcggttactggatagggt

SEQ ID NO: 202777 - DNA, 55 bp, Artificial
  Synthetic oligonucleotide
ggctaattatcgcctctatattagctttcacgctaccagtcattggattagttcc

SEQ ID NO: 202778 - DNA, 55 bp, Artificial
  Synthetic oligonucleotide
ggcggtcgcttagttgttcaaggcgacgaaacgactgaaattacttcaacgcgta

SEQ ID NO: 202779 - DNA, 55 bp, Artificial
  Synthetic oligonucleotide
ggcgcttagatgaatgacgctggtatcgacgtgatgattgcgcaaacgcatcgct

SEQ ID NO: 202780 - DNA, 55 bp, Artificial
  Synthetic oligonucleotide
ggccttgtctatcacgggctcagtaacatcaaatccgtatgcttcagcggaggac

SEQ ID NO: 202781 - DNA, 57 bp, Artificial
  Synthetic oligonucleotide
cgccgcgaacacgggacggatattgatgccgcgtgtgggcaacttcgtagtaaacaa

SEQ ID NO: 202782 - DNA, 55 bp, Artificial
  Synthetic oligonucleotide
ggccttacttatgagataggtacatcacttacggaacaacaatttctaaacgatg

SEQ ID NO: 202783 - DNA, 55 bp, Artificial
  Synthetic oligonucleotide
ggccacacgtcccatttcttcgcggacccatggagtatcatcgctatcaccttgc

SEQ ID NO: 202784 - DNA, 55 bp, Artificial
  Synthetic oligonucleotide
ggattatgcccaagacgatcgtttaaaaggggaagcagttagtacatccaaacga

SEQ ID NO: 202785 - DNA, 55 bp, Artificial
  Synthetic oligonucleotide
ggatattgtacttggagcttcacagaccttctaagctggttaaacggctaccaaa

SEQ ID NO: 202786 - DNA, 55 bp, Artificial
  Synthetic oligonucleotide
ggactcgtattatagtaaccaagctgcaagagtgactaaccttcatctctggcgc

SEQ ID NO: 202787 - DNA, 55 bp, Artificial
  Synthetic oligonucleotide
ggactattcgtcatgggtgcccttgttaataaatggaccacaatctatgttccac

SEQ ID NO: 202788 - DNA, 55 bp, Artificial
  Synthetic oligonucleotide
ggactacatcggggccagatttagaagcaacggctgtaagtaatttatcatgtgc

SEQ ID NO: 202789 - DNA, 55 bp, Artificial
  Synthetic oligonucleotide
caactaagcgaagaacaacaattaacagctggcgtgaaaccagagtccattcgcc

SEQ ID NO: 202790 - DNA, 55 bp, Artificial
  Synthetic oligonucleotide
caaatgtacttagctcgcttatttcagctggggtttctggactttatgaggtttc

SEQ ID NO: 202791 - DNA, 55 bp, Artificial
  Synthetic oligonucleotide
caaatgattgagcccaactcgtttgcgatgataaccttccgcgataaacggttcc

SEQ ID NO: 202792 - DNA, 60 bp, Artificial
  Synthetic oligonucleotide
gcccacatcattgggagcccgccattcgtgagtgtgaagaatgctgtcccaaacagtcgg

SEQ ID NO: 202793 - DNA, 60 bp, Artificial
  Synthetic oligonucleotide
agcgagctttacggatgcggcacgacatgtgattacattgatcgaatctactggtaagtt

SEQ ID NO: 202794 - DNA, 55 bp, Artificial
  Synthetic oligonucleotide
caaatcgaagtgggcaacgaagctggcggaggtaagtggaacaatatcgcgatcc

SEQ ID NO: 202795 - DNA, 55 bp, Artificial
  Synthetic oligonucleotide
attggcgcagatttgcggaatgaaattaactactctctcgcttaaagaacgctgg

SEQ ID NO: 202796 - DNA, 55 bp, Artificial
  Synthetic oligonucleotide
attgaccttggtagtgagccacattcatcggatgacgggcttcatgcggcctcac

SEQ ID NO: 202797 - DNA, 54 bp, Artificial
  Synthetic oligonucleotide
attcgcggaaaagtggcatttcttggcggaccgttaactttccttgatcaacta

SEQ ID NO: 202798 - DNA, 54 bp, Artificial
  Synthetic oligonucleotide
attcgataacggcttagtaaccggaccaccttcacacataaagtgcttctcggg

SEQ ID NO: 202799 - DNA, 55 bp, Artificial
  Synthetic oligonucleotide
tgcgtaattcgttatatcagattcctcgtattcgcgcgacactgttgtcaatgag

SEQ ID NO: 202800 - DNA, 55 bp, Artificial
  Synthetic oligonucleotide
attaggtcaaatgaatgagtcgccgggtgttcggatgcgagtagctttaactggc

SEQ ID NO: 202801 - DNA, 54 bp, Artificial
  Synthetic oligonucleotide
attagacgaaaaggataaagcgagcgaggttaaatcgttgccagggctaacgac

SEQ ID NO: 202802 - DNA, 55 bp, Artificial
  Synthetic oligonucleotide
tgtggtccatttattaacaagggcacccatgacgaatagtccgagaatggaagct

SEQ ID NO: 202803 - DNA, 55 bp, Artificial
  Synthetic oligonucleotide
atgcaaccacttcaagctcctacatgggacgaagcatttgcaggccaattacgcg

SEQ ID NO: 202804 - DNA, 60 bp, Artificial
  Synthetic oligonucleotide
cgagtcaacttaccagtaatcgcgctatgtttcttcagtatcgtgccgtcccagagcgaa

SEQ ID NO: 202805 - DNA, 55 bp, Artificial
  Synthetic oligonucleotide
atcttgtccgcgccagtcacaccctggatttcattgtagacatccgaaacatggg

SEQ ID NO: 202806 - DNA, 55 bp, Artificial
  Synthetic oligonucleotide
atcgtaattgtttggtctgcccttgacaagtggtgttgaaggttgggtcttgcgc

SEQ ID NO: 202807 - DNA, 55 bp, Artificial
  Synthetic oligonucleotide
atcggggtgccgggaattgagattggaggtaagttgcgggcgatggactttccgc

SEQ ID NO: 202808 - DNA, 54 bp, Artificial
  Synthetic oligonucleotide
atccggcaacaacatccgtaaacctaatgtcgttgtttgtacgcctaccggtgc

SEQ ID NO: 202809 - DNA, 55 bp, Artificial
  Synthetic oligonucleotide
ccagactttcatcaaataactgtttctcaaacgtaacacttcctacagcaccttt

SEQ ID NO: 202810 - DNA, 55 bp, Artificial
  Synthetic oligonucleotide
ccacaagtaatgctaagtcgcgagtcatttctgggtaacgtgggattggatggta

SEQ ID NO: 202811 - DNA, 55 bp, Artificial
  Synthetic oligonucleotide
tcttacaatataaagcaggaatctctaaacaagacgaggcggtagttcatgaggc

SEQ ID NO: 202812 - DNA, 55 bp, Artificial
  Synthetic oligonucleotide
catgatttaagttcccttcgtagcgccgtatcagcaggagaacctctaaaccgcg

SEQ ID NO: 202813 - DNA, 55 bp, Artificial
  Synthetic oligonucleotide
cagttgaaacgggatttgcacctgtgaaaatttaccattatggttatatgtcgga

SEQ ID NO: 202814 - DNA, 55 bp, Artificial
  Synthetic oligonucleotide
cagttccacatcagagcgcgcatgtgacacgttagagctgattacggacaaaagc

SEQ ID NO: 202815 - DNA, 60 bp, Artificial
  Synthetic oligonucleotide
cgactgtttgggacagcattcttcacactcacgaatggcgggctcccaatgatgtgggcc

SEQ ID NO: 202816 - DNA, 55 bp, Artificial
  Synthetic oligonucleotide
cagtagaatcatctactgggttaagtccgattaccgcatccccaatcccgtaagt

SEQ ID NO: 202817 - DNA, 55 bp, Artificial
  Synthetic oligonucleotide
caggcaggagggatgaggctaatcatgtttaatcgaggtttatggtaccgagaat

SEQ ID NO: 202818 - DNA, 55 bp, Artificial
  Synthetic oligonucleotide
cagatggtaccgtcgctcgtctcgataactcgtattggagaacatcaagggcatc

SEQ ID NO: 202819 - DNA, 55 bp, Artificial
  Synthetic oligonucleotide
cagatgacgccgcagctccctcgtgaagcataagtggttcatgtaaaatcggatg

SEQ ID NO: 202820 - DNA, 55 bp, Artificial
  Synthetic oligonucleotide
cacttcgtatttatttgcgactggttctatcggaagaaacacaggcaacccggct

SEQ ID NO: 202821 - DNA, 55 bp, Artificial
  Synthetic oligonucleotide
tgaacgatgcaatttatacgtactccgcggtgatcaacacagtggtgcacgaggg

SEQ ID NO: 202822 - DNA, 55 bp, Artificial
  Synthetic oligonucleotide
tgattatctactaacacagcttgtttacgaatagtttccccgctcaaactagcta

SEQ ID NO: 202823 - DNA, 55 bp, Artificial
  Synthetic oligonucleotide
cacccgtatacattgcaatatggttgccgcactttgatttaatcgtctcgcgtcc

SEQ ID NO: 202824 - DNA, 52 bp, Artificial
  Synthetic oligonucleotide
cacccggcccgtcacaccacgaagaagttgttaccacccgaagtcgcgtagg

SEQ ID NO: 202825 - DNA, 55 bp, Artificial
  Synthetic oligonucleotide
cacatcttactaagtatgacgtccatctctatagcggatgcgcaaacttacggcg

SEQ ID NO: 202826 - DNA, 60 bp, Artificial
  Synthetic oligonucleotide
aaaatggcttgtggggcattatgaaacaatgcctcactttgtaatgctcgaattgaagta

SEQ ID NO: 202827 - DNA, 55 bp, Artificial
  Synthetic oligonucleotide
caattggtcacgaattcgaatagctagcggaacaccggtatcataagcagcccgg

SEQ ID NO: 202828 - DNA, 55 bp, Artificial
  Synthetic oligonucleotide
caagacgagtgcttagtccacgagaacttggaacacgaacaagcgggctacggtt

SEQ ID NO: 202829 - DNA, 53 bp, Artificial
  Synthetic oligonucleotide
caactccgcgtttattaggatccccgccaataataagcggcttccctcggaac

SEQ ID NO: 202830 - DNA, 55 bp, Artificial
  Synthetic oligonucleotide
acgcttacgagcaattactcgaattggcgtaccatcaaacggaaatgcttctcta

SEQ ID NO: 202831 - DNA, 55 bp, Artificial
  Synthetic oligonucleotide
acgattgcagcagccgaactctccattacccagcctagcctaagccactctatcg

SEQ ID NO: 202832 - DNA, 55 bp, Artificial
  Synthetic oligonucleotide
acctagtaacccagctaccgcgataattgttgcaagcgtggtaacttgtacggaa

SEQ ID NO: 202833 - DNA, 55 bp, Artificial
  Synthetic oligonucleotide
tttggcaaatcgcaaactttacccttcgctataccatctattcagtaagggctct

SEQ ID NO: 202834 - DNA, 55 bp, Artificial
  Synthetic oligonucleotide
accctacaactgcgggtagtaaggacagcgctcatgcgcaagaatatacagaacc

SEQ ID NO: 202835 - DNA, 55 bp, Artificial
  Synthetic oligonucleotide
accagcccaaattatggacctttgagtgtgacacgggtaatagttcagagttgac

SEQ ID NO: 202836 - DNA, 55 bp, Artificial
  Synthetic oligonucleotide
tttggcaagatttagtggatactggttggaacgacatcatgggaggtggctttgc

SEQ ID NO: 202837 - DNA, 54 bp, Artificial
  Synthetic oligonucleotide
aaagacgttaaacggagacaaacaactacgcaatctttatctgtcatccgttcg

SEQ ID NO: 202838 - DNA, 55 bp, Artificial
  Synthetic oligonucleotide
acatgcaatcacctgcgttaccctgatagttagctcgggccaggcaacctcgcgg

SEQ ID NO: 202839 - DNA, 54 bp, Artificial
  Synthetic oligonucleotide
acaaccttatcccttcctattctaaacttgcttacccgtgggataatgccgtca

SEQ ID NO: 202840 - DNA, 55 bp, Artificial
  Synthetic oligonucleotide
aatgaacggcgaccaaatggactattatatcgcgattgaatccgaactcacccca

SEQ ID NO: 202841 - DNA, 55 bp, Artificial
  Synthetic oligonucleotide
aatcgcgaccgaagtggttgatttgctacccgatgcctctaaacaacgccttgcc

SEQ ID NO: 202842 - DNA, 55 bp, Artificial
  Synthetic oligonucleotide
aagtttccgcactatagccatcctctgtattcgctggtgctgcagaatcgataca

SEQ ID NO: 202843 - DNA, 55 bp, Artificial
  Synthetic oligonucleotide
aagccgttttatcgggacatcatattataactaccttacacgctgtaaatacggc

SEQ ID NO: 202844 - DNA, 52 bp, Artificial
  Synthetic oligonucleotide
aagacgtaagattacccatggtttgaataaaacggaagccgtaaatgctttg

SEQ ID NO: 202845 - DNA, 54 bp, Artificial
  Synthetic oligonucleotide
aacttttgatacgccacggggatttccagaatcgttccgccagtagttgtgact

SEQ ID NO: 202846 - DNA, 55 bp, Artificial
  Synthetic oligonucleotide
aacgtttactaagcctgagtacttgattggacgggctgcaagtgacggagcggcg

SEQ ID NO: 202847 - DNA, 55 bp, Artificial
  Synthetic oligonucleotide
tttgtgccaagtgtgacagggttaagtccaggagtagcgcttgtatctagcggac

SEQ ID NO: 202848 - DNA, 52 bp, Artificial
  Synthetic oligonucleotide
ttcctactgaagacctgaatgtaggggaaagggtcgtcgtttctaaagggga

SEQ ID NO: 202849 - DNA, 55 bp, Artificial
  Synthetic oligonucleotide
aacagatttgcacatgcagcatcactcgcagtagccgaagcaccagcgaaagcgt

SEQ ID NO: 202850 - DNA, 55 bp, Artificial
  Synthetic oligonucleotide
aaaggagttacgcgagttcatgactaaaatagttgcgaagtataatgcgcctgtc

SEQ ID NO: 202851 - DNA, 55 bp, Artificial
  Synthetic oligonucleotide
ttaaaacgccagaaggtgacgtcaaagctcgaactattccagctggacatattga

SEQ ID NO: 202852 - DNA, 55 bp, Artificial
  Synthetic oligonucleotide
atacgtatcgattccagtaatggtgctcgttggtaacttgctacttgctaatagt

SEQ ID NO: 202853 - DNA, 55 bp, Artificial
  Synthetic oligonucleotide
agtgtgcgttacataagaagcaccaatgatttcggcaatccagacctgctcatca

SEQ ID NO: 202854 - DNA, 55 bp, Artificial
  Synthetic oligonucleotide
agtccatttgcgttaggtagcgttcttgcagcttcgaatagttaccgcttgattc

SEQ ID NO: 202855 - DNA, 53 bp, Artificial
  Synthetic oligonucleotide
agtaaaattttgaggaagctagtcgttagcgggctgattaattcagtttcggg

SEQ ID NO: 202856 - DNA, 55 bp, Artificial
  Synthetic oligonucleotide
aggtcgaattacttcgttgctggtctgcccattcgtttatccatgagtaagggtt

SEQ ID NO: 202857 - DNA, 55 bp, Artificial
  Synthetic oligonucleotide
ttcttggacgatatgattatatagtgggagactggggttacgatcaacttcggct

SEQ ID NO: 202858 - DNA, 55 bp, Artificial
  Synthetic oligonucleotide
agcttttcgatctgtgtctgcagatcttgaccgaccgtactcacacgtgcatatc

SEQ ID NO: 202859 - DNA, 60 bp, Artificial
  Synthetic oligonucleotide
agtcgcctttttattcatcgatccactcacccacatactcggcgcagatgcgacaacatt

SEQ ID NO: 202860 - DNA, 55 bp, Artificial
  Synthetic oligonucleotide
ttggcaaatcgcaaactttacccttcgctatatcatttgtacagtaagggatctc

SEQ ID NO: 202861 - DNA, 51 bp, Artificial
  Synthetic oligonucleotide
agcggtaacttcttctgggtgtacaataagttccccagttacttgtacggg

SEQ ID NO: 202862 - DNA, 55 bp, Artificial
  Synthetic oligonucleotide
agcccacttcggtcccatttcggtacactttatatccagccaccgctttattgtc

SEQ ID NO: 202863 - DNA, 55 bp, Artificial
  Synthetic oligonucleotide
ttggcgacgtatgagtcaaattggtggataaaataaaacatccggcgcaaatttc

SEQ ID NO: 202864 - DNA, 55 bp, Artificial
  Synthetic oligonucleotide
tttattgattcactagggcttacaagagtgaccatgttcattaccctttgcacag

SEQ ID NO: 202865 - DNA, 55 bp, Artificial
  Synthetic oligonucleotide
actatgtagttgtacctagtaatacaaagtagaggagtgaattcgagtgagagga

SEQ ID NO: 202866 - DNA, 55 bp, Artificial
  Synthetic oligonucleotide
tttcgctttgctgtaagcccgaaagctaaacacgtagtagctgatacttgatgcc

SEQ ID NO: 202867 - DNA, 55 bp, Artificial
  Synthetic oligonucleotide
actacaatcccgccgacgctaggtttgcgttgactgaattggaatttatacgggc

SEQ ID NO: 202868 - DNA, 55 bp, Artificial
  Synthetic oligonucleotide
acgttgttctttcatttccgcctcaaagccagcgtgatctactttcaagccatgg

SEQ ID NO: 202869 - DNA, 55 bp, Artificial
  Synthetic oligonucleotide
tttctctccctgcgcattaactaatataaagtcagagtcaggagtagatgcctca

SEQ ID NO: 202870 - DNA, 60 bp, Artificial
  Synthetic oligonucleotide
gcggcgcaagcgagtggctatttacaaactgacgaactgccccgctatccactttcgcat

SEQ ID NO: 202871 - DNA, 55 bp, Artificial
  Synthetic oligonucleotide
acggcgtagaggaattacatcgtgttaatgaacgtatgcggaattctatcctgag

SEQ ID NO: 202872 - DNA, 55 bp, Artificial
  Synthetic oligonucleotide
cgtcaataataacactcgaaaatgctacatccgcgaaatgcacaatatcttggcg

SEQ ID NO: 202873 - DNA, 52 bp, Artificial
  Synthetic oligonucleotide
cctgaatgtaggggaaagggtcgtcgtttctaaaggggaacagatcccgatc

SEQ ID NO: 202874 - DNA, 55 bp, Artificial
  Synthetic oligonucleotide
cgggtatttggatactatattgaagttacccgagcaaacacgcatttgctcccag

SEQ ID NO: 202875 - DNA, 55 bp, Artificial
  Synthetic oligonucleotide
cctgacaaggcgagccgtgaatgagtaaatctacgctcatgttccacttcgtgac

SEQ ID NO: 202876 - DNA, 55 bp, Artificial
  Synthetic oligonucleotide
cctggcgtaatcccttgcgtcaaacgttcctcttccggaacagccgcatgagaca

SEQ ID NO: 202877 - DNA, 55 bp, Artificial
  Synthetic oligonucleotide
tcgcgcagctagctttaccgccaaaagtgaagacttagagttcgtacaactaaca

SEQ ID NO: 202878 - DNA, 55 bp, Artificial
  Synthetic oligonucleotide
cggggaaagacggtgtgacgctcgttgtttgtggggacacacctttgatcgaagc

SEQ ID NO: 202879 - DNA, 55 bp, Artificial
  Synthetic oligonucleotide
ccttcatcgggaaacaaatctgctatcgtgctattcgctggaattgttagcgggc

SEQ ID NO: 202880 - DNA, 55 bp, Artificial
  Synthetic oligonucleotide
ccttgacccgtcaagtattccattccttccttcgtaatgacatatgtcttcccaa

SEQ ID NO: 202881 - DNA, 59 bp, Artificial
  Synthetic oligonucleotide
gtgcagatttcaagacggcgagtccacaagagacccccttactcgtgcaacaatgggta

SEQ ID NO: 202882 - DNA, 55 bp, Artificial
  Synthetic oligonucleotide
ccttgcgacgttattattgttcacgcaaaaccttggcgcaacagaaagactgtcg

SEQ ID NO: 202883 - DNA, 55 bp, Artificial
  Synthetic oligonucleotide
cgaatatatcgttcctccaaagttagaagatgacgctggaattactggctgtgtc

SEQ ID NO: 202884 - DNA, 55 bp, Artificial
  Synthetic oligonucleotide
cgaatcgttgtacggaaaagagatggcacgttccatcctatcgaaccatgacacg

SEQ ID NO: 202885 - DNA, 54 bp, Artificial
  Synthetic oligonucleotide
cgggacttccaacataataggtgttaccatctacagttcctctaatcccttttc

SEQ ID NO: 202886 - DNA, 55 bp, Artificial
  Synthetic oligonucleotide
cgagtgtgtacttaagttgcatgtgagcattgtttactagcagcgcaactagatt

SEQ ID NO: 202887 - DNA, 55 bp, Artificial
  Synthetic oligonucleotide
cgagttgccaagtaatgccatatttatccgtgacccatgccacttttcgaagcgc

SEQ ID NO: 202888 - DNA, 55 bp, Artificial
  Synthetic oligonucleotide
cgatggcaacgaattagctacttccgacacgcttaacggcaaaattgatgcacct

SEQ ID NO: 202889 - DNA, 55 bp, Artificial
  Synthetic oligonucleotide
cggacacgtgactggaacgaatatagtttaccaatgccggtagcagatttaacct

SEQ ID NO: 202890 - DNA, 55 bp, Artificial
  Synthetic oligonucleotide
cggagaagcggcttatgtaattggcgaagttacgacacgtgaaaaggatgcggtt

SEQ ID NO: 202891 - DNA, 55 bp, Artificial
  Synthetic oligonucleotide
cggaacggactttatcagaaaggtcgctacgtcctgctttgtcaaactcggctag

SEQ ID NO: 202892 - DNA, 56 bp, Artificial
  Synthetic oligonucleotide
ttatccgcgagttaaagaatatatgcggaccaaccacagtcgaacgttcaatgggg

SEQ ID NO: 202893 - DNA, 55 bp, Artificial
  Synthetic oligonucleotide
cgcttgctggaagtgcgatgtcgcccactcggttagttcttgcccgagcagcggt

SEQ ID NO: 202894 - DNA, 55 bp, Artificial
  Synthetic oligonucleotide
cgctgtaatttgtaccgttatacttgctagaaggttctcttgccataccggaacg

SEQ ID NO: 202895 - DNA, 55 bp, Artificial
  Synthetic oligonucleotide
cgctatcaattgtcataatggctggcgttacacagaatagcggggaactagcggt

SEQ ID NO: 202896 - DNA, 55 bp, Artificial
  Synthetic oligonucleotide
cgcgtttcgctaaggaaaggagtgcttgcttagatatgcctaagtaagtcgcggc

SEQ ID NO: 202897 - DNA, 55 bp, Artificial
  Synthetic oligonucleotide
cgcgttattaaatacgttccccatatcagtgacggaacttgtattgagtccactc

SEQ ID NO: 202898 - DNA, 55 bp, Artificial
  Synthetic oligonucleotide
cggattcttctatgagtaaagcttgcttcatgtttgtatacgaaccgaagagtcc

SEQ ID NO: 202899 - DNA, 55 bp, Artificial
  Synthetic oligonucleotide
cgcgttacgcggtagtcgcgacttgtcacgattccaagtaatttaccgtgcgctg

SEQ ID NO: 202900 - DNA, 55 bp, Artificial
  Synthetic oligonucleotide
tccaaaggtatttagcgataatgggtgttttatatccagcatctgcaacgaccac

SEQ ID NO: 202901 - DNA, 55 bp, Artificial
  Synthetic oligonucleotide
cggcacgaagcttgatgcggccatatggcgaacttagacgaacgagcgaaccact

SEQ ID NO: 202902 - DNA, 55 bp, Artificial
  Synthetic oligonucleotide
cgcctctcgctgcgaatctccgtaatgaacaccaattcgctcttctaactctcca

SEQ ID NO: 202903 - DNA, 55 bp, Artificial
  Synthetic oligonucleotide
gtcatttagaataaaggttaccgaggaaaacttgatgcatacaaatgtaagtaaa

SEQ ID NO: 202904 - DNA, 59 bp, Artificial
  Synthetic oligonucleotide
gctaccggcaattgttagcctcgtgctttacgcgggagtcgttatcgcgcttggagcat

SEQ ID NO: 202905 - DNA, 55 bp, Artificial
  Synthetic oligonucleotide
cgccatatttcgagcatcaaattgtaccacttggcctacctccttgatttcggtc

SEQ ID NO: 202906 - DNA, 55 bp, Artificial
  Synthetic oligonucleotide
cgccaccttctgtagcaagagcgatacccatattatcatcggaaacagcttgcat

SEQ ID NO: 202907 - DNA, 55 bp, Artificial
  Synthetic oligonucleotide
cgcaaatcatctgtgtccgcctgtttacttagcgcatccatgtacgtcacgttga

SEQ ID NO: 202908 - DNA, 55 bp, Artificial
  Synthetic oligonucleotide
cggcggccgaagttggctgtaacacaacgctaattgaagcgaatgaacaaactgg

SEQ ID NO: 202909 - DNA, 55 bp, Artificial
  Synthetic oligonucleotide
ccctgacatttgagacaactggcaagtacgatttcttgcggacgatgcaaattgc

SEQ ID NO: 202910 - DNA, 55 bp, Artificial
  Synthetic oligonucleotide
ccctcaaggatagttagttctgtaccaaggttagcgaatgctccacctagttctg

SEQ ID NO: 202911 - DNA, 55 bp, Artificial
  Synthetic oligonucleotide
cgtttcagctgattgcgattattccattttacggtggttttagagcggctcggat

SEQ ID NO: 202912 - DNA, 55 bp, Artificial
  Synthetic oligonucleotide
cccgttagaggattggcgagatgcgttcgaaacagtaatggcagggaatgatatc

SEQ ID NO: 202913 - DNA, 55 bp, Artificial
  Synthetic oligonucleotide
cccgatccaatcacaataatacacattcccattagcatagctagcattatggaac

SEQ ID NO: 202914 - DNA, 55 bp, Artificial
  Synthetic oligonucleotide
cccgaagtacaatctgcttggatggaaaccgtacataaactagatgccgcaagta

SEQ ID NO: 202915 - DNA, 59 bp, Artificial
  Synthetic oligonucleotide
atagctgtcaaatccgcacgctacatgtaccatcccgattactgtcgaaaacggtggta

SEQ ID NO: 202916 - DNA, 55 bp, Artificial
  Synthetic oligonucleotide
ccccggtctatttaaatctactaccgttgcaaaattagaggtgattgccgagcca

SEQ ID NO: 202917 - DNA, 55 bp, Artificial
  Synthetic oligonucleotide
ctaaaagagtcgcacccatatccgccataattgcaatccataatgttaaccaccc

SEQ ID NO: 202918 - DNA, 55 bp, Artificial
  Synthetic oligonucleotide
tcgtcaaaaccttttatgtattgccgtttatcgtccgtatatgttccccatctaa

SEQ ID NO: 202919 - DNA, 55 bp, Artificial
  Synthetic oligonucleotide
cccaggccgattggcgtaagcgatagacaaccggggaaaattcctgtaccagtgc

SEQ ID NO: 202920 - DNA, 55 bp, Artificial
  Synthetic oligonucleotide
ctaatttccaagtgctaacaagcgacggagcacttacagaagacactcataaagg

SEQ ID NO: 202921 - DNA, 54 bp, Artificial
  Synthetic oligonucleotide
ccagtttatttgagaatagtagagccaagttaccagtagcccacataaccccgg

SEQ ID NO: 202922 - DNA, 55 bp, Artificial
  Synthetic oligonucleotide
ccagtacggtgaacaggtctagatacaagcattggatgatcactactgttaccag

SEQ ID NO: 202923 - DNA, 55 bp, Artificial
  Synthetic oligonucleotide
ccagtaatcgcgctatgtttcttcagtatcgtgccgtcccagagcgaactccaat

SEQ ID NO: 202924 - DNA, 54 bp, Artificial
  Synthetic oligonucleotide
ccagggaattggctaccaagtaaggctgggaaagaattctcactaaacttccga

SEQ ID NO: 202925 - DNA, 55 bp, Artificial
  Synthetic oligonucleotide
tctgcgattgatcgtggacccctttcgaaattcaatggacaagctctaacactcc

SEQ ID NO: 202926 - DNA, 60 bp, Artificial
  Synthetic oligonucleotide
tcacatcggctcttgcagaacgagcgcggtcacgttgttctttcatttccgcctcaaagc

SEQ ID NO: 202927 - DNA, 55 bp, Artificial
  Synthetic oligonucleotide
ccagctaacttgtcagtgttatcagtaggggtaatctttagttgccggctaaatc

SEQ ID NO: 202928 - DNA, 55 bp, Artificial
  Synthetic oligonucleotide
ccagcatactggtgcgcacatggatacgctgtctgtaatcctgacatgcgtggca

SEQ ID NO: 202929 - DNA, 55 bp, Artificial
  Synthetic oligonucleotide
cctaatggttcaataacacgaacacgtaacacgccttgaacagctaataagtccc

SEQ ID NO: 202930 - DNA, 55 bp, Artificial
  Synthetic oligonucleotide
tcgcttcctgaatcgtacgtttccaagatcgattcaatatactccagattcgcac

SEQ ID NO: 202931 - DNA, 55 bp, Artificial
  Synthetic oligonucleotide
ccgtgccatttaacacggactttaagcacttaagtcccgatgaatcaaagctagg

SEQ ID NO: 202932 - DNA, 55 bp, Artificial
  Synthetic oligonucleotide
ccgtacttagcacaggagcacccgtttggattatcacaacgaccgattaccatgc

SEQ ID NO: 202933 - DNA, 51 bp, Artificial
  Synthetic oligonucleotide
cgtccgagttaactgaatttagggttaccgtgtaatctcccgcggtggaaa

SEQ ID NO: 202934 - DNA, 55 bp, Artificial
  Synthetic oligonucleotide
ccgtaatgacccgggagtggatattttatcgattattcataaacatggtatttcg

SEQ ID NO: 202935 - DNA, 55 bp, Artificial
  Synthetic oligonucleotide
ccggtgtcatttcagtaaggggtgcaaaatgtgcgccgcctgtcgcactaatgac

SEQ ID NO: 202936 - DNA, 55 bp, Artificial
  Synthetic oligonucleotide
ccggtatcatggtactgccgtttgtgtcattacttaggacgacgaagcattccct

SEQ ID NO: 202937 - DNA, 56 bp, Artificial
  Synthetic oligonucleotide
acaagaactactcttacaatataaagcaggaatctctaaacaagacgaggcggtag

SEQ ID NO: 202938 - DNA, 55 bp, Artificial
  Synthetic oligonucleotide
cgtccggtaagtcatcatcccaaccattctcgcagtagcaagtccgccctcaggt

SEQ ID NO: 202939 - DNA, 54 bp, Artificial
  Synthetic oligonucleotide
ccggagattgtgttgtcgcgtaagtttacgacggattatcggattgggcttttg

SEQ ID NO: 202940 - DNA, 55 bp, Artificial
  Synthetic oligonucleotide
ccgcgcggacttggtgaatcatccgaatagccaccggtttaatcgctgggccaga

SEQ ID NO: 202941 - DNA, 55 bp, Artificial
  Synthetic oligonucleotide
cccttgccgattggtggttatggcccatacacttacagtcaagcacacgcttatt

SEQ ID NO: 202942 - DNA, 55 bp, Artificial
  Synthetic oligonucleotide
ccctggggaaatgaagatctctgtccaacctgattcagccactagtttgccgtca

SEQ ID NO: 202943 - DNA, 55 bp, Artificial
  Synthetic oligonucleotide
cgtctgctgccttagcggtcagcattaatgtatcgtaactgttcaaattattaat

SEQ ID NO: 202944 - DNA, 55 bp, Artificial
  Synthetic oligonucleotide
cgtgtgctggatgaaccattaaatgttgcgcgattgggagaacaatctccgctac

SEQ ID NO: 202945 - DNA, 54 bp, Artificial
  Synthetic oligonucleotide
aaaacgcggtttgctatgacccggctcaatttgcgatgagtggcgtgcgtgatg

SEQ ID NO: 202946 - DNA, 54 bp, Artificial
  Synthetic oligonucleotide
acacttacactctcgtattgctgtatttgctggttcgattccaaatgaacgttt

SEQ ID NO: 202947 - DNA, 54 bp, Artificial
  Synthetic oligonucleotide
acccatagcaattgtcagcttttgccaatcatcgctcgttaaagcacccgtccg

SEQ ID NO: 202948 - DNA, 57 bp, Artificial
  Synthetic oligonucleotide
acaagccaatcagaaacaagcgtagttccacccgtcacggcacttctatccccgcca

SEQ ID NO: 202949 - DNA, 54 bp, Artificial
  Synthetic oligonucleotide
tacagattgcgttgtacctaattgacaaaagcgaggttacttctatagtcggtc

SEQ ID NO: 202950 - DNA, 54 bp, Artificial
  Synthetic oligonucleotide
acatccaagtaacgtcgcggttaaaatagctagttcaggtgtcataactcgcat

SEQ ID NO: 202951 - DNA, 54 bp, Artificial
  Synthetic oligonucleotide
cagatctagatgttcgttcagctgggacacgtgcattggacggggacgctatct

SEQ ID NO: 202952 - DNA, 54 bp, Artificial
  Synthetic oligonucleotide
ggaactactggaacttctaacggaggtacaggcataactgttacgaacatgagt

SEQ ID NO: 202953 - DNA, 54 bp, Artificial
  Synthetic oligonucleotide
ggacgtagcggcaactgttgcttcgacaatattagctagatcgcatacacaaag

SEQ ID NO: 202954 - DNA, 54 bp, Artificial
  Synthetic oligonucleotide
cacacttagcgagcttggtacagtcgtaaatgctgcgacgagaatagccaagcg

SEQ ID NO: 202955 - DNA, 54 bp, Artificial
  Synthetic oligonucleotide
ggataatcggtcctattccactgagtaaagtgctaggaacaacgccggtttgtt

SEQ ID NO: 202956 - DNA, 54 bp, Artificial
  Synthetic oligonucleotide
cctcgctatcaaacatgggccgacctttttagctgaggacggggtgcacccgac

SEQ ID NO: 202957 - DNA, 54 bp, Artificial
  Synthetic oligonucleotide
gattctactggtcttggatttgtgtgtacattgcctggaacctcttttgcgcgc

SEQ ID NO: 202958 - DNA, 54 bp, Artificial
  Synthetic oligonucleotide
atctccccttcaacgaggtagcaatgactagcatttcgaacatgctgtggatgc

SEQ ID NO: 202959 - DNA, 52 bp, Artificial
  Synthetic oligonucleotide
gctcccctcctacttaaaaagacgtttaggtgtgattggggaacaattgtat

SEQ ID NO: 202960 - DNA, 54 bp, Artificial
  Synthetic oligonucleotide
tccttattcgcgtcgcaccagctggctatgcaccaaaaggctggactccacctg

SEQ ID NO: 202961 - DNA, 54 bp, Artificial
  Synthetic oligonucleotide
ataacgccgcagatacagcagccatcccgcttgcaaaagcaaagccgtcagtgc

SEQ ID NO: 202962 - DNA, 54 bp, Artificial
  Synthetic oligonucleotide
tccgtccgaataatcattggacagactgcgcaatatcgtttcccacgttaaact

SEQ ID NO: 202963 - DNA, 54 bp, Artificial
  Synthetic oligonucleotide
gacttattagccgaagcgctcatgcaaatgcgcgaaccttggtcgattaataca

SEQ ID NO: 202964 - DNA, 54 bp, Artificial
  Synthetic oligonucleotide
agccattcagtccgtggcgcgtgttatcggaccaattatcggcgggcaacttta

SEQ ID NO: 202965 - DNA, 54 bp, Artificial
  Synthetic oligonucleotide
tagcgcgagggaaaggtttaaccgatagagctatattaatgcgtcacgctacac

SEQ ID NO: 202966 - DNA, 54 bp, Artificial
  Synthetic oligonucleotide
cggaaaggaagtcctgcaagttcaaatatctgagtggccgtcatgccttgtagg

SEQ ID NO: 202967 - DNA, 54 bp, Artificial
  Synthetic oligonucleotide
cggacaatgccaattgggattataggctcgctacttatttgtacggtgttatat

SEQ ID NO: 202968 - DNA, 53 bp, Artificial
  Synthetic oligonucleotide
ttcggctgtttgttccagtgagcggacaccttggcaatatggcggcgctcaaa

SEQ ID NO: 202969 - DNA, 53 bp, Artificial
  Synthetic oligonucleotide
tgcgggtggattaggggatatcatcgttcgtggtacaaatgctaccaacggaa

SEQ ID NO: 202970 - DNA, 59 bp, Artificial
  Synthetic oligonucleotide
tcttcctgaacataaccgactaattcatctatcgatagatggaagtaagtggcaagacg

SEQ ID NO: 202971 - DNA, 53 bp, Artificial
  Synthetic oligonucleotide
tctgaagcagtccccctatatcgctatctgggtggaatcgatttagaacttcc

SEQ ID NO: 202972 - DNA, 53 bp, Artificial
  Synthetic oligonucleotide
ttttgttgtcaaacgtagctcgccacgattcttaccaatgaaccattcccagc

SEQ ID NO: 202973 - DNA, 53 bp, Artificial
  Synthetic oligonucleotide
tactctcgtttaaagcaacctcatctgcacaaccaattcttacagcgcttact

SEQ ID NO: 202974 - DNA, 53 bp, Artificial
  Synthetic oligonucleotide
accaagtcgtttcgtggtgatagtcattcttattcactagaacgatttcggct

SEQ ID NO: 202975 - DNA, 53 bp, Artificial
  Synthetic oligonucleotide
agaacgacgtgcgaaccaactgaaggcattggttccaagccctgatcatacca

SEQ ID NO: 202976 - DNA, 53 bp, Artificial
  Synthetic oligonucleotide
agaacgataccagaccgagcttcgcgaataaccacactccagatgattttcgg

SEQ ID NO: 202977 - DNA, 53 bp, Artificial
  Synthetic oligonucleotide
agataaatagtaataccagcgcttgcaacccatccagttccaacgactttcac

SEQ ID NO: 202978 - DNA, 53 bp, Artificial
  Synthetic oligonucleotide
agctgtcgggggaagtatgtcggaagtacgcggcggaaagctgatgaacacga

SEQ ID NO: 202979 - DNA, 53 bp, Artificial
  Synthetic oligonucleotide
agggtgttccggcatacggacgcctactgtggataaacccgcagaaacattag

SEQ ID NO: 202980 - DNA, 53 bp, Artificial
  Synthetic oligonucleotide
ccaacgagactcatcgcaatatccagtcgccttgtcattccacctgaataagt

SEQ ID NO: 202981 - DNA, 53 bp, Artificial
  Synthetic oligonucleotide
cgacctcccttaatacctttgaaccgttgggggatacagactataagatcgaa

SEQ ID NO: 202982 - DNA, 53 bp, Artificial
  Synthetic oligonucleotide
ccagctgccacatatccaagtagaacgccaaactggctatctattttccgatg

SEQ ID NO: 202983 - DNA, 53 bp, Artificial
  Synthetic oligonucleotide
ccgttaagtcaaaatagatattacgcataatcgcgacagtgccttttgatacg

SEQ ID NO: 202984 - DNA, 53 bp, Artificial
  Synthetic oligonucleotide
cgaccaatcaccgtaatacataacatttcgatactgtggtacattttcagccg

SEQ ID NO: 202985 - DNA, 53 bp, Artificial
  Synthetic oligonucleotide
ctacggatccattcagcgtgcttcgagaaggtgaattcccactaaaagtactc

SEQ ID NO: 202986 - DNA, 53 bp, Artificial
  Synthetic oligonucleotide
gttacgcaagcttgtgggatgcagactttactaacgcagatttgacaggtgca

SEQ ID NO: 202987 - DNA, 53 bp, Artificial
  Synthetic oligonucleotide
ggctctctcggaatgctcccttctgctagccacgcggaaaatgggccgtcctt

SEQ ID NO: 202988 - DNA, 53 bp, Artificial
  Synthetic oligonucleotide
gtcgacttgtcttcgagttaaaccgaattttgcttgtaagttcgtactcgatg

SEQ ID NO: 202989 - DNA, 53 bp, Artificial
  Synthetic oligonucleotide
gaatgcccacgattcaaccatttataccagcgatacctggagtgccacagaca

SEQ ID NO: 202990 - DNA, 52 bp, Artificial
  Synthetic oligonucleotide
attatactattgcagctgccgaattatccattacccagcctagcttaagcca

SEQ ID NO: 202991 - DNA, 52 bp, Artificial
  Synthetic oligonucleotide
cacctttcctcagaaaacgcgtcgtactatccgaaattacgccattcgaaac

SEQ ID NO: 202992 - DNA, 59 bp, Artificial
  Synthetic oligonucleotide
agtatggtggtcggcgtgttaacgatgtttgtatcggtgctcgtccgctctacagccgc

SEQ ID NO: 202993 - DNA, 52 bp, Artificial
  Synthetic oligonucleotide
tgttgggactagtaatcagatacgatgcctctgtcgggctaaacaccgagcg

SEQ ID NO: 202994 - DNA, 52 bp, Artificial
  Synthetic oligonucleotide
tgaaccattaaatgttgcgcgattgggagaacaatctccgctactacaggga

SEQ ID NO: 202995 - DNA, 52 bp, Artificial
  Synthetic oligonucleotide
ccaaacaccttagtatcgggcgcgctttgtaaagtagttgtaactcccgctc

SEQ ID NO: 202996 - DNA, 52 bp, Artificial
  Synthetic oligonucleotide
atacgtccatctcttactggcttcccgtccgttcctttttccaactccggcc

SEQ ID NO: 202997 - DNA, 52 bp, Artificial
  Synthetic oligonucleotide
gcatgaacgtttggctgccaacgcgcacccaatccaactcccaatcggggcc

SEQ ID NO: 202998 - DNA, 52 bp, Artificial
  Synthetic oligonucleotide
gatgtccggggccttttggtgcaactaggaaaacatctacatctgtaggagg

SEQ ID NO: 202999 - DNA, 52 bp, Artificial
  Synthetic oligonucleotide
gggtgcatcgctttacatcggcaatgttcgagctacagctggcttcgggaaa

SEQ ID NO: 203000 - DNA, 52 bp, Artificial
  Synthetic oligonucleotide
tcgcatggattctgttaatagctctttgaagtgcaagtcgagccattacttc

SEQ ID NO: 203001 - DNA, 52 bp, Artificial
  Synthetic oligonucleotide
ttgcgtagatgtgtttgcaaatcgcgttcaattgaaaatcggcacaactaca

SEQ ID NO: 203002 - DNA, 52 bp, Artificial
  Synthetic oligonucleotide
tcccgacaatacggggcaatggacagtactgacacgtaataaggtaaccagt

SEQ ID NO: 203003 - DNA, 59 bp, Artificial
  Synthetic oligonucleotide
ataagcggcgttcctgttgcgacagacttgatgcatggtccagtcggctacatcggacc

SEQ ID NO: 203004 - DNA, 52 bp, Artificial
  Synthetic oligonucleotide
agcgtctaatgctgctcgaactaaggcgatttcatagctgtcccgaggtgga

SEQ ID NO: 203005 - DNA, 52 bp, Artificial
  Synthetic oligonucleotide
gtaaccgtggcacaaaaggaacaacctacaggagcagggaatttaaaactgc

SEQ ID NO: 203006 - DNA, 52 bp, Artificial
  Synthetic oligonucleotide
taccagggcgaacccttccaaactgagctgcaaacattcgaaccaatcggag

SEQ ID NO: 203007 - DNA, 52 bp, Artificial
  Synthetic oligonucleotide
actagaaacgcgcttacggaaaacatagtagctccaaatttggtaaccaaga

SEQ ID NO: 203008 - DNA, 52 bp, Artificial
  Synthetic oligonucleotide
ctgccgcatcaattagtgaaagctttccgttccacgctagaagaagcgcgtg

SEQ ID NO: 203009 - DNA, 52 bp, Artificial
  Synthetic oligonucleotide
accgaatggatcggcggaacctgttggaacaatattgacacagaagaagccg

SEQ ID NO: 203010 - DNA, 52 bp, Artificial
  Synthetic oligonucleotide
aacgcactggatgacggtagtatgaaaatggttacggatggtcggatcttga

SEQ ID NO: 203011 - DNA, 52 bp, Artificial
  Synthetic oligonucleotide
tagttgtatcattcacgagctgtccaggcgtccggtcgcgtaaaacgagttg

SEQ ID NO: 203012 - DNA, 51 bp, Artificial
  Synthetic oligonucleotide
ttgccctatcttcgatagcacgttgggtcaagcaattttcggaagtcaaaa

SEQ ID NO: 203013 - DNA, 51 bp, Artificial
  Synthetic oligonucleotide
agtagtgaagcgcgggcaaacagtgcctttagagcttgctatcacccaaaa

SEQ ID NO: 203014 - DNA, 58 bp, Artificial
  Synthetic oligonucleotide
cactcgcgatggcgaatatcccgatttacacgattgccggaacaaagggtggcatcgg

SEQ ID NO: 203015 - DNA, 59 bp, Artificial
  Synthetic oligonucleotide
ggactgtggtgggcgacacctgttgcatggattactgcgacgatgctaggagtttggcg

SEQ ID NO: 203016 - DNA, 51 bp, Artificial
  Synthetic oligonucleotide
ttagctacttccgacacgcttaacggcaaaattgatgcaccttatcaaact

SEQ ID NO: 203017 - DNA, 51 bp, Artificial
  Synthetic oligonucleotide
taccgtgccgctcgatttgctgacggacataatccgccgcgtactcaggtc

SEQ ID NO: 203018 - DNA, 51 bp, Artificial
  Synthetic oligonucleotide
aaaatccgctagaaggtgccgaatttaagttagtcaacggagcgggagcca

SEQ ID NO: 203019 - DNA, 51 bp, Artificial
  Synthetic oligonucleotide
tcgaaaagcataagtgtaacgaggaaggctcatatccggccaataagtatt

SEQ ID NO: 203020 - DNA, 51 bp, Artificial
  Synthetic oligonucleotide
cgcgggagctttactttcacctacaaccggagaaatattgataggtggaaa

SEQ ID NO: 203021 - DNA, 51 bp, Artificial
  Synthetic oligonucleotide
gaatcaattgcgaaacgtccgatgaaccgtgtcatgctaccactgcaacaa

SEQ ID NO: 203022 - DNA, 51 bp, Artificial
  Synthetic oligonucleotide
tctccccaagcgtaaatactccctagggaccaatagtggacccattacccg

SEQ ID NO: 203023 - DNA, 51 bp, Artificial
  Synthetic oligonucleotide
ctctcctgattacgatgacatatgtaaaggtcttacggcagggatagatca

SEQ ID NO: 203024 - DNA, 51 bp, Artificial
  Synthetic oligonucleotide
cccaccggcagtttctcgttcattcgcagctttattccctgcaatgatcac

SEQ ID NO: 203025 - DNA, 51 bp, Artificial
  Synthetic oligonucleotide
ctttgctaccaacattcctcagctctgtaggggttcttgtgcccgtcttaa

SEQ ID NO: 203026 - DNA, 58 bp, Artificial
  Synthetic oligonucleotide
ggcactaattttgtagccgcttacgcaagtgaccgcggacgggccatcgaaacagcac

SEQ ID NO: 203027 - DNA, 51 bp, Artificial
  Synthetic oligonucleotide
cacgtgctctcacttcttcagggtttgatgctatcatggtaatctccaatc

SEQ ID NO: 203028 - DNA, 51 bp, Artificial
  Synthetic oligonucleotide
gaatatcgcgagaagggacatgggtgtaattttctacctgtaccatttttc

SEQ ID NO: 203029 - DNA, 51 bp, Artificial
  Synthetic oligonucleotide
tgagcttatataacggtatggcagcaatacttcgggcactaggaaattcca

SEQ ID NO: 203030 - DNA, 51 bp, Artificial
  Synthetic oligonucleotide
caaaagcaatcatgacttgcggttggattttgcctgcctcactaacccctc

SEQ ID NO: 203031 - DNA, 50 bp, Artificial
  Synthetic oligonucleotide
ctgcttttcatgcggcgctagtgaacggtgggattttcctttacgttcct

SEQ ID NO: 203032 - DNA, 50 bp, Artificial
  Synthetic oligonucleotide
acgttccgcagctcgtccgtcgtattccgccactaattgccggagcagct

SEQ ID NO: 203033 - DNA, 50 bp, Artificial
  Synthetic oligonucleotide
ctcggcagttcgttccacaacatctatcatagtttgacggagttcgacag

SEQ ID NO: 203034 - DNA, 50 bp, Artificial
  Synthetic oligonucleotide
ctcccaagaagtatcgccactttccgcgcatttcccgtcaactgcttact

SEQ ID NO: 203035 - DNA, 50 bp, Artificial
  Synthetic oligonucleotide
ttttgacaacatacatacctggcttgatcgctgtttgtacacgccccttg

SEQ ID NO: 203036 - DNA, 50 bp, Artificial
  Synthetic oligonucleotide
tagtttgcgtgttccaaatgacgaagcgcttagatactgggataaacgtc

SEQ ID NO: 203037 - DNA, 55 bp, Artificial
  Synthetic oligonucleotide
ggcttaaaaggcactaattttgtagccgcttacgcaagtgaccgcggacgggcca

SEQ ID NO: 203038 - DNA, 50 bp, Artificial
  Synthetic oligonucleotide
cgaccataaatacagaagacgtaggagaacaatcacaagttgctgtgaag

SEQ ID NO: 203039 - DNA, 50 bp, Artificial
  Synthetic oligonucleotide
ggtaaccatgaagatgcactgtctgttggcacgaatctaaactcacaaca

SEQ ID NO: 203040 - DNA, 50 bp, Artificial
  Synthetic oligonucleotide
cctgtagcgacagacctaatgcatggtccagtcggctatatcgggccacg

SEQ ID NO: 203041 - DNA, 50 bp, Artificial
  Synthetic oligonucleotide
ttctcggtacattgcaactcggaggtgtgactgggatgctgtttggcccc

SEQ ID NO: 203042 - DNA, 50 bp, Artificial
  Synthetic oligonucleotide
agtctacatcataaccagattgaagcgccggtgtgtataccgcaagtggc

SEQ ID NO: 203043 - DNA, 50 bp, Artificial
  Synthetic oligonucleotide
ttccgctcgactgcgtattcatggacatacattatatggatgatttccgc

SEQ ID NO: 203044 - DNA, 50 bp, Artificial
  Synthetic oligonucleotide
ccatgtgcatagtcagtagcggaaactcgaacgataatcgggccatccca

SEQ ID NO: 203045 - DNA, 50 bp, Artificial
  Synthetic oligonucleotide
ttagaactttacctttcatcagctggtagcgggctaaaacctcttcgtct

SEQ ID NO: 203046 - DNA, 50 bp, Artificial
  Synthetic oligonucleotide
gcgcgatagctgaggtaggcgcagggtggattacacaaacagaccattgt

SEQ ID NO: 203047 - DNA, 50 bp, Artificial
  Synthetic oligonucleotide
atcgtgatccaatgcaaacgatatcgtcgtaaagaaaaagtaggcatcgc

SEQ ID NO: 203048 - DNA, 59 bp, Artificial
  Synthetic oligonucleotide
tacgattgatgccgcaccggtgacagttattccggggaaagctaacgcaggatcaggta

SEQ ID NO: 203049 - DNA, 50 bp, Artificial
  Synthetic oligonucleotide
atgcccaatgacagtaacaggagtacccttgaatgtcgcaattccaccaa

SEQ ID NO: 203050 - DNA, 50 bp, Artificial
  Synthetic oligonucleotide
tgggcggaacagactctggttcaatccacttaactggaaacggaatcccg

SEQ ID NO: 203051 - DNA, 58 bp, Artificial
  Synthetic oligonucleotide
tacccggcaacatgggcaggcttaaatgacggcttcgcaaactatggtggatctggta

SEQ ID NO: 203052 - DNA, 56 bp, Artificial
  Synthetic oligonucleotide
cctaccctttgtagtcggtagaatcgttggtgtggaagacgatcgtatttatatga

SEQ ID NO: 203053 - DNA, 58 bp, Artificial
  Synthetic oligonucleotide
ggacttacttcttacggtatcgaatttgcgcatgcaatcgaatataaagcgcaagtca

SEQ ID NO: 203054 - DNA, 55 bp, Artificial
  Synthetic oligonucleotide
aatccgagctagcgcaatacgacctcgctccccgcctgaaaaacgttcacccatt

SEQ ID NO: 203055 - DNA, 58 bp, Artificial
  Synthetic oligonucleotide
cgtgcgaacctcgcgccactcgggactgttagctttcatccagccatactgatttcga

SEQ ID NO: 203056 - DNA, 55 bp, Artificial
  Synthetic oligonucleotide
ccagtcaaaagtgctccgccgaagtttgtttcggacggtgggccatagaaagctc

SEQ ID NO: 203057 - DNA, 60 bp, Artificial
  Synthetic oligonucleotide
caccgtcttcacaagcggacgcacactcggcttttccgtttcgcaatgacgctagcgatc

SEQ ID NO: 203058 - DNA, 58 bp, Artificial
  Synthetic oligonucleotide
tctcgcgcgcttgatatgcgtggttacgtggctgaaggtatccacggcgacttaacgc

SEQ ID NO: 203059 - DNA, 57 bp, Artificial
  Synthetic oligonucleotide
tgtcccccattattgccaccataccgaataaccttatatgtcccaactgggacacaa

SEQ ID NO: 203060 - DNA, 57 bp, Artificial
  Synthetic oligonucleotide
gcccgctagatacaagcgccactcccggacttaaccctgtcacacttggcacaaaga

SEQ ID NO: 203061 - DNA, 57 bp, Artificial
  Synthetic oligonucleotide
gtgacctattaatagaagtggatagctggactcaattttcgcaagaatttatccatg

SEQ ID NO: 203062 - DNA, 56 bp, Artificial
  Synthetic oligonucleotide
gcgggttatactggcgcgcaaaatttcccggcgcactgggctggtgacgaacgttc

SEQ ID NO: 203063 - DNA, 57 bp, Artificial
  Synthetic oligonucleotide
aaccttacgtataaagaggatacggtctatcgattggatgaactatcgatcgcagct

SEQ ID NO: 203064 - DNA, 57 bp, Artificial
  Synthetic oligonucleotide
gcgaaataacataggggatttgtttcccttgatcatccagtatattaaaggtcattc

SEQ ID NO: 203065 - DNA, 56 bp, Artificial
  Synthetic oligonucleotide
attgcaactcggaggtgtgactgggatgctgtttggccccctaattggtggggcga

SEQ ID NO: 203066 - DNA, 51 bp, Artificial
  Synthetic oligonucleotide
ggaagtaacggcacgaattacctatctaaccgattttcaacaaaaaccagg

SEQ ID NO: 203067 - DNA, 54 bp, Artificial
  Synthetic oligonucleotide
ccgacggttttactaaaggaagagcttcccatactagctcccatccatcgttta

SEQ ID NO: 203068 - DNA, 60 bp, Artificial
  Synthetic oligonucleotide
aggagacctccttatgctagtgaacgatgcaatttatacgtactccgcggtgatcaacac

SEQ ID NO: 203069 - DNA, 56 bp, Artificial
  Synthetic oligonucleotide
cccgtcagacaccacgttgattaatagcaactgaacagctacaaccggcgcgcccc

SEQ ID NO: 203070 - DNA, 56 bp, Artificial
  Synthetic oligonucleotide
agttggcaaattcgcattccagtctgctgcaacctctcccgctatcacgcggtcta

SEQ ID NO: 203071 - DNA, 56 bp, Artificial
  Synthetic oligonucleotide
agtgagccacgcggactaactccgagcgcgacagaagggtgtttacgacttgcatc

SEQ ID NO: 203072 - DNA, 56 bp, Artificial
  Synthetic oligonucleotide
ctaagcctgagtacttgattggacgggcggcaagtgacggagcggcgacaaactta

SEQ ID NO: 203073 - DNA, 56 bp, Artificial
  Synthetic oligonucleotide
aggtcgaatgggtggctatgttttaacccgtcacgtaggtgaacatccgcgcgtgc

SEQ ID NO: 203074 - DNA, 56 bp, Artificial
  Synthetic oligonucleotide
taccccgcatgcgacggtaaccccggataatgcaccgcaaccacatctggctccgc

SEQ ID NO: 203075 - DNA, 55 bp, Artificial
  Synthetic oligonucleotide
gccgacaccagtcatgaatgtcttgatcgagtacgttcttttgcgcctagatggc

SEQ ID NO: 203076 - DNA, 55 bp, Artificial
  Synthetic oligonucleotide
tcaagttcgatacgtttaattggggttgccatgagtcgttcaagcgtacctgttg

SEQ ID NO: 203077 - DNA, 55 bp, Artificial
  Synthetic oligonucleotide
ctgagaataacgtttatgtgcgccagagatgaaggttagtcactcttgcagcttg

SEQ ID NO: 203078 - DNA, 55 bp, Artificial
  Synthetic oligonucleotide
tattgatttgttctaacactaattgggcagttctatcccctctgacgttggaacg

SEQ ID NO: 203079 - DNA, 60 bp, Artificial
  Synthetic oligonucleotide
acgaagtatgaacataaggtgtcaatagaatacaaattgcgtcatggcatggggacgaaa

SEQ ID NO: 203080 - DNA, 55 bp, Artificial
  Synthetic oligonucleotide
gccaaatatgcatgcgagtgaaacgagcatgtaatccttcccgtaaaatgcgccc

SEQ ID NO: 203081 - DNA, 55 bp, Artificial
  Synthetic oligonucleotide
tatcagtcgctgatttacttacaatagcgtaaccgtcgtaggaggtttgctcggt

SEQ ID NO: 203082 - DNA, 55 bp, Artificial
  Synthetic oligonucleotide
tacttcaacaaatctcatgtgttgcaattaatgcaagctgatacaatcatcggcg

SEQ ID NO: 203083 - DNA, 55 bp, Artificial
  Synthetic oligonucleotide
gcataacatgaattgcctctggttcaaacgctaagccaatcttatcacccacacg

SEQ ID NO: 203084 - DNA, 55 bp, Artificial
  Synthetic oligonucleotide
ctgggagctcccgcgtattatcgaagcgaatgaatatgcagtgagccatgggttg

SEQ ID NO: 203085 - DNA, 55 bp, Artificial
  Synthetic oligonucleotide
gcagatccggatgaaaggtattgatacacgcgatatgaccaaagatgctgtccgc

SEQ ID NO: 203086 - DNA, 55 bp, Artificial
  Synthetic oligonucleotide
cttggcttgtaagtatcggaagtgcaggattcctagtaatgttcactctaagcgc

SEQ ID NO: 203087 - DNA, 55 bp, Artificial
  Synthetic oligonucleotide
gcaccaagccctcttcttcaatccagtctgccaaacgattatcagcctcgatacg

SEQ ID NO: 203088 - DNA, 55 bp, Artificial
  Synthetic oligonucleotide
gcacatgttgtatgtccgaagtttgaatcggcgttccaattgttaggtaaacgct

SEQ ID NO: 203089 - DNA, 55 bp, Artificial
  Synthetic oligonucleotide
ctcgtgagcttattgaggcttacccaagcttaccacttggcgttattaaaccaga

SEQ ID NO: 203090 - DNA, 51 bp, Artificial
  Synthetic oligonucleotide
acgacggattaaagttcgacctattaccgtaaaacgaacgacagcggacgc

SEQ ID NO: 203091 - DNA, 55 bp, Artificial
  Synthetic oligonucleotide
ctcgccccttaggatatcttcgtattgtattgggatctacacattcacgctcagc

SEQ ID NO: 203092 - DNA, 55 bp, Artificial
  Synthetic oligonucleotide
gccgctgtatcttttattagacacccgcaactctttgtatgtccgctcgttagtt

SEQ ID NO: 203093 - DNA, 55 bp, Artificial
  Synthetic oligonucleotide
gccggcttgataaagctacctgtttcgactttataaggtcctgtaccatgccagg

SEQ ID NO: 203094 - DNA, 55 bp, Artificial
  Synthetic oligonucleotide
ctcgaattcgtgttgcgcgagtaaagttcgtccagatgttagtgcgagtttcgtt

SEQ ID NO: 203095 - DNA, 55 bp, Artificial
  Synthetic oligonucleotide
ctccccaactatgctcttctacaatagccacacttagaccagcgacttgcgtgtc

SEQ ID NO: 203096 - DNA, 55 bp, Artificial
  Synthetic oligonucleotide
tcactatgagcaatgccacgcatgtcaggattacagacagcgtatccatgtgcgc

SEQ ID NO: 203097 - DNA, 55 bp, Artificial
  Synthetic oligonucleotide
gccgtaaccaagctaactcatttgatcagtacaattacacaatgggaggtgcagc

SEQ ID NO: 203098 - DNA, 55 bp, Artificial
  Synthetic oligonucleotide
ctatacaaaatcatactctgtcgtgaatggaatgaatagcttagacagtcgtgga

SEQ ID NO: 203099 - DNA, 55 bp, Artificial
  Synthetic oligonucleotide
gccgttcaagcaatttctctcgtagatggtttgcttttaaccggtggacaagaca

SEQ ID NO: 203100 - DNA, 55 bp, Artificial
  Synthetic oligonucleotide
gcctatcacacgcgaaaccgcatatcgggttttgaaagagctagagccgatattc

SEQ ID NO: 203101 - DNA, 60 bp, Artificial
  Synthetic oligonucleotide
ggtcgttggttacttttcactcagtgaccagattcgcagacagtcggcagatgccgtggc

SEQ ID NO: 203102 - DNA, 55 bp, Artificial
  Synthetic oligonucleotide
ctagctcctgctaggaaaccctaacaagaactgcgtgttatttgataaatccccg

SEQ ID NO: 203103 - DNA, 55 bp, Artificial
  Synthetic oligonucleotide
ctagcataagcgaaatcagctacttgtaacacgagcgtatggaacgagtctgtca

SEQ ID NO: 203104 - DNA, 55 bp, Artificial
  Synthetic oligonucleotide
gcgacggcccaatcggtccaatcgtagctgatagtaacgcacaaggtcaaatcag

SEQ ID NO: 203105 - DNA, 55 bp, Artificial
  Synthetic oligonucleotide
tcatatccagccgacttatctgctaatttaaactcaggttgagttttactgtcgt

SEQ ID NO: 203106 - DNA, 55 bp, Artificial
  Synthetic oligonucleotide
gagcgaggtacaagtcacaactactggcggaacgattctggaaatccccgtggcg

SEQ ID NO: 203107 - DNA, 55 bp, Artificial
  Synthetic oligonucleotide
gagacaaccgctaacacaagggctattgcggtaatagcgatagaacttcgaaata

SEQ ID NO: 203108 - DNA, 55 bp, Artificial
  Synthetic oligonucleotide
gagaagtctggcgttactaaatggaggcattggaccgctaaagacaatccggctc

SEQ ID NO: 203109 - DNA, 55 bp, Artificial
  Synthetic oligonucleotide
gacttagaaaatcgcaacagcatagctcctcagcaagtggtagaggcatatcttg

SEQ ID NO: 203110 - DNA, 55 bp, Artificial
  Synthetic oligonucleotide
gagctttctatggcccaccatccgaaacaaacttcggcggagcacttttgactgg

SEQ ID NO: 203111 - DNA, 55 bp, Artificial
  Synthetic oligonucleotide
gagttcggattcaatcgcgatataatagtccatttggtcgccgttcatttggcag

SEQ ID NO: 203112 - DNA, 55 bp, Artificial
  Synthetic oligonucleotide
catgcctgctaccgtccagacacggctccccaaacagaactagaacaagtgaccg

SEQ ID NO: 203113 - DNA, 55 bp, Artificial
  Synthetic oligonucleotide
gatcagggaccccgaactcgcgcacagggctatcacccgaattatgaccgagtgt

SEQ ID NO: 203114 - DNA, 55 bp, Artificial
  Synthetic oligonucleotide
gccatagcccggcttgcaaaccgcaacattggactcgacggtgtccctgaccagc

SEQ ID NO: 203115 - DNA, 55 bp, Artificial
  Synthetic oligonucleotide
gcccggtgaggtaaaggttacatgatccaggcgcaaaccaaccccgtgcatcagg

SEQ ID NO: 203116 - DNA, 55 bp, Artificial
  Synthetic oligonucleotide
catgcaagcctccgtgattgtacgtgcagaactataaccgctacacgcaatcgag

SEQ ID NO: 203117 - DNA, 55 bp, Artificial
  Synthetic oligonucleotide
ggactcccaatgttatcggccttgaaaatttacctgttgtagcacctgctagagc

SEQ ID NO: 203118 - DNA, 55 bp, Artificial
  Synthetic oligonucleotide
aagagcagaagccggaactgctatgggtaggctgtgcggattcccgcgtaggccc

SEQ ID NO: 203119 - DNA, 55 bp, Artificial
  Synthetic oligonucleotide
ggagaaggtagcggccggttgttatggcggcatggatcaaataccgagatgctgg

SEQ ID NO: 203120 - DNA, 55 bp, Artificial
  Synthetic oligonucleotide
ggttgaccacatgattggtcacctgcgtattgataatttcgctggctagcgggtg

SEQ ID NO: 203121 - DNA, 55 bp, Artificial
  Synthetic oligonucleotide
caggcttcggacatgtgaaatgtatcctttccgcctgccaggagattgtctctcc

SEQ ID NO: 203122 - DNA, 55 bp, Artificial
  Synthetic oligonucleotide
gtggcgaaatatagtgcagatatgcgacgcttgtcaagcataagtgcgagttccg

SEQ ID NO: 203123 - DNA, 55 bp, Artificial
  Synthetic oligonucleotide
ccgcaaatcatgtggctccatcaagcaacgtccggagaacaagagcaaacgtggt

SEQ ID NO: 203124 - DNA, 55 bp, Artificial
  Synthetic oligonucleotide
aacacgcttgctcaggccggggatgcgggactggttatcctgcgcatggatacgc

SEQ ID NO: 203125 - DNA, 55 bp, Artificial
  Synthetic oligonucleotide
atggatgggtcagtcccgacgcagtgcgcaaagcgctaccagtcatcgcaaacgc

SEQ ID NO: 203126 - DNA, 54 bp, Artificial
  Synthetic oligonucleotide
tgcttgttttcacgaaggccaaattaccgtctcaaatcggtcgcctgactcacc

SEQ ID NO: 203127 - DNA, 53 bp, Artificial
  Synthetic oligonucleotide
gatgggccatacgctcacactgtttgccttcggctcggcagtgatgttactcg

SEQ ID NO: 203128 - DNA, 53 bp, Artificial
  Synthetic oligonucleotide
cgatcaggattatgcaactgaccgaaaagcatggaaccgaatctgtttccgga

SEQ ID NO: 203129 - DNA, 53 bp, Artificial
  Synthetic oligonucleotide
atgtaaccataatcgtgtcctttatttagctctatcagccacgcatggcctca

SEQ ID NO: 203130 - DNA, 52 bp, Artificial
  Synthetic oligonucleotide
ccagactcaacagggcatagagtaatccggtcataatgggtgaacctagatt

SEQ ID NO: 203131 - DNA, 52 bp, Artificial
  Synthetic oligonucleotide
tggttcccgatcagccggcggtactcgatgcactgggctacgcctggctatt

SEQ ID NO: 203132 - DNA, 51 bp, Artificial
  Synthetic oligonucleotide
gcttacagatacggactcggaagcccgtagagagaaagcggcactgtccct

SEQ ID NO: 203133 - DNA, 51 bp, Artificial
  Synthetic oligonucleotide
gtgacactgcgtcgttcgctcttttcatcaccttcaggggattcggccatg

SEQ ID NO: 203134 - DNA, 55 bp, Artificial
  Synthetic oligonucleotide
ccggagcatagtgggtcacatcaaatttgcccgaccagccatcagtcgagttcgc

SEQ ID NO: 203135 - DNA, 51 bp, Artificial
  Synthetic oligonucleotide
tcagttgcagcgcgtctgcgatattgtgctggtacctgccgaaggggtggg

SEQ ID NO: 203136 - DNA, 50 bp, Artificial
  Synthetic oligonucleotide
ataggtggattcgacggcaggaatgacgtccagcgacagaggtgcgccca

SEQ ID NO: 203137 - DNA, 50 bp, Artificial
  Synthetic oligonucleotide
agtcgtgccccctgcatccagctttcactggcactaacccgctcgatacg

SEQ ID NO: 203138 - DNA, 50 bp, Artificial
  Synthetic oligonucleotide
agtccaacggatgcgcgaatcaagaccaggcaccgccacgttagagctgg

SEQ ID NO: 203139 - DNA, 50 bp, Artificial
  Synthetic oligonucleotide
aggtcggcgcattacggccgcctctctgccatttatgcccaatcgaacgc

SEQ ID NO: 203140 - DNA, 50 bp, Artificial
  Synthetic oligonucleotide
aggggttgattcagatccgttccgcttcccgcgttggcagatccgacctt

SEQ ID NO: 203141 - DNA, 50 bp, Artificial
  Synthetic oligonucleotide
aaaactggatcgcgcttggaaccagcgagtgtgcgcatctgggcaactcg

SEQ ID NO: 203142 - DNA, 50 bp, Artificial
  Synthetic oligonucleotide
aacacagcgatgccccttgcgggcgcatatacgcaccttctcccacatgg

SEQ ID NO: 203143 - DNA, 50 bp, Artificial
  Synthetic oligonucleotide
aacctccggcaataccgatagtccgagatcccgggcgcaggcggttagct

SEQ ID NO: 203144 - DNA, 50 bp, Artificial
  Synthetic oligonucleotide
aacgtacgcgttgccgggtgtgtcgaaccgtagcgagcctgtttggggac

SEQ ID NO: 203145 - DNA, 55 bp, Artificial
  Synthetic oligonucleotide
ccggatgtagagatcaaggcgtgttccgttgtgacagagattaaccatacgaaca

SEQ ID NO: 203146 - DNA, 50 bp, Artificial
  Synthetic oligonucleotide
aactgccttgcatacaacccaccggcgtggccagaacagagaagctgcta

SEQ ID NO: 203147 - DNA, 50 bp, Artificial
  Synthetic oligonucleotide
aagccaccggctgaccctgtgtgagaagcgcaaatgagccagccagcgcg

SEQ ID NO: 203148 - DNA, 50 bp, Artificial
  Synthetic oligonucleotide
aagcctgcatttcccactgatgcacaaactgcgaccagcgctcggggcta

SEQ ID NO: 203149 - DNA, 50 bp, Artificial
  Synthetic oligonucleotide
acagggggccgtctacgatggtgaccctgcaacacgcgcgatcagacgta

SEQ ID NO: 203150 - DNA, 50 bp, Artificial
  Synthetic oligonucleotide
accagcgtcagttcgggtatttgggggtagcgttgggccagtcgggagaa

SEQ ID NO: 203151 - DNA, 50 bp, Artificial
  Synthetic oligonucleotide
accccactttcaggggcgtgttgccacctgtcgatgctgtggagcgcagt

SEQ ID NO: 203152 - DNA, 50 bp, Artificial
  Synthetic oligonucleotide
accgacggcaaatgccgcaatacccctgagccatacaggcccccactgag

SEQ ID NO: 203153 - DNA, 50 bp, Artificial
  Synthetic oligonucleotide
accggtgcgggtatatagacttgccaccctagttgcccggctccacgctc

SEQ ID NO: 203154 - DNA, 50 bp, Artificial
  Synthetic oligonucleotide
acctaccttcaatggagggaccgtcatctgcccgctgtgacgcggcctga

SEQ ID NO: 203155 - DNA, 50 bp, Artificial
  Synthetic oligonucleotide
acctgcaggtacctgtgctcgcacggttgaaagggcgtaagccttcgcct

SEQ ID NO: 203156 - DNA, 55 bp, Artificial
  Synthetic oligonucleotide
cgctagcatggatagcatagccattgctacgatcagaaaagaggttatttccggg

SEQ ID NO: 203157 - DNA, 50 bp, Artificial
  Synthetic oligonucleotide
agggaccgtcatctgcccgctgtgacgcggcctgagtgtgaattgccagt

SEQ ID NO: 203158 - DNA, 50 bp, Artificial
  Synthetic oligonucleotide
aggctccggactagcaggcacgcgctagaattcgtaccccagcgccagac

SEQ ID NO: 203159 - DNA, 50 bp, Artificial
  Synthetic oligonucleotide
aggcgggtagtcaattcaccattgcactcagggcgccagctcgtgtgcac

SEQ ID NO: 203160 - DNA, 50 bp, Artificial
  Synthetic oligonucleotide
aggacatccttgcctcccctgtgccggtagcaacctttgtcgcaccgcag

SEQ ID NO: 203161 - DNA, 50 bp, Artificial
  Synthetic oligonucleotide
agcttcggactcatggctgcctcacgttaggtggcgctcttgtacgccct

SEQ ID NO: 203162 - DNA, 50 bp, Artificial
  Synthetic oligonucleotide
agctccagtctgtcggccatagaggtgaagacgccgggggtggcaagtat

SEQ ID NO: 203163 - DNA, 50 bp, Artificial
  Synthetic oligonucleotide
agctacccctgtcgcaggtactggctgacatagagtggaccggggcacat

SEQ ID NO: 203164 - DNA, 50 bp, Artificial
  Synthetic oligonucleotide
agcggataccccagatcgagccgtgctgttgcatcataaacctgcccgga

SEQ ID NO: 203165 - DNA, 50 bp, Artificial
  Synthetic oligonucleotide
agcgcggggatgggcgcaacacgcttgacaacttccgttgaacaacgatt

SEQ ID NO: 203166 - DNA, 50 bp, Artificial
  Synthetic oligonucleotide
agcctgccctggtggacacaaggcgcactgacagtggactatcagctgtc

SEQ ID NO: 203167 - DNA, 55 bp, Artificial
  Synthetic oligonucleotide
cggttgttggctcattccgcataactgtgataactcatcgatacagcagcgaacc

SEQ ID NO: 203168 - DNA, 50 bp, Artificial
  Synthetic oligonucleotide
agccctcgggcgtagtgacggatgatgagcagacactgcaccgaacctga

SEQ ID NO: 203169 - DNA, 50 bp, Artificial
  Synthetic oligonucleotide
agcacagtgaggcggcccctgatcccgagtggttgtgatttaacgcctct

SEQ ID NO: 203170 - DNA, 50 bp, Artificial
  Synthetic oligonucleotide
agatgtgcatggaaggctcgcgtcagttaacgcttgccggccggtgacaa

SEQ ID NO: 203171 - DNA, 50 bp, Artificial
  Synthetic oligonucleotide
agaggatggcgacaaggtaagcgggcgtttgctacctactgccggcgaat

SEQ ID NO: 203172 - DNA, 50 bp, Artificial
  Synthetic oligonucleotide
agagcctcccggcgcgataagccaccaaccggtaaatgtgccagactgtc

SEQ ID NO: 203173 - DNA, 50 bp, Artificial
  Synthetic oligonucleotide
acgctgcgtcgccaagggacttcagagcagtacgaacgccggttacgctg

SEQ ID NO: 203174 - DNA, 50 bp, Artificial
  Synthetic oligonucleotide
acgcggcatgttccagttgtgacagtggggtcggcacgtagaactgcggt

SEQ ID NO: 203175 - DNA, 55 bp, Artificial
  Synthetic oligonucleotide
ctcggcccctttcgactgggcaaagttgtcgtagccaaccagacgcacatggttg

SEQ ID NO: 203176 - DNA, 55 bp, Artificial
  Synthetic oligonucleotide
cttgaatcaagcgctgtcattgactggcagagtgagctggtactcaatcaggcgg

SEQ ID NO: 203177 - DNA, 55 bp, Artificial
  Synthetic oligonucleotide
accggctgcatatgggtacatgcctgctctgtaggagaggtaggctcggtcaccc

SEQ ID NO: 203178 - DNA, 55 bp, Artificial
  Synthetic oligonucleotide
cagccagtatcctggggatgcggaagcgaaaacggaatgggcgattgaacaggga

SEQ ID NO: 203179 - DNA, 55 bp, Artificial
  Synthetic oligonucleotide
acggccgaataataccctcctgaagcggccatcgattccatgtaaataacgacgg

SEQ ID NO: 203180 - DNA, 55 bp, Artificial
  Synthetic oligonucleotide
gagcttctcatctacaactgccttatcgcgtgggagggaagttgcgggagtatcc

SEQ ID NO: 203181 - DNA, 55 bp, Artificial
  Synthetic oligonucleotide
gcaagcagatcgttttaagtggagacgaggccccaagctcgcttcagaacttgga

SEQ ID NO: 203182 - DNA, 55 bp, Artificial
  Synthetic oligonucleotide
gcaccgattgtgggaccggttgtaacgtgatcataggaagtagggaaaatgtcgt

SEQ ID NO: 203183 - DNA, 55 bp, Artificial
  Synthetic oligonucleotide
gcgacaaaggggtacgagagctttatcgaatatctgttacagacgtgatgagagt

SEQ ID NO: 203184 - DNA, 53 bp, Artificial
  Synthetic oligonucleotide
aacggccgcacaattaataggagctcaaccttcggaaatcgcccttttgggtc

SEQ ID NO: 203185 - DNA, 55 bp, Artificial
  Synthetic oligonucleotide
gctaggaaccaggctcataacctgcctaaaagcttagggagcgtggccggttggg

SEQ ID NO: 203186 - DNA, 53 bp, Artificial
  Synthetic oligonucleotide
ggtctaaaagccgtgtcaactggggaagggatttctgctcaattcccggaccc

SEQ ID NO: 203187 - DNA, 55 bp, Artificial
  Synthetic oligonucleotide
gtcctccacagacttccatgatccggtaacagcgttggggatcggcatagtgcag

SEQ ID NO: 203188 - DNA, 54 bp, Artificial
  Synthetic oligonucleotide
tacagtgcggaattaacccgggaatttcattgtaaacacgaggaaagatacggc

SEQ ID NO: 203189 - DNA, 55 bp, Artificial
  Synthetic oligonucleotide
atagacggccaagtccgcataggctccagggctaattactccaagcttaccagcc

SEQ ID NO: 203190 - DNA, 53 bp, Artificial
  Synthetic oligonucleotide
tagggtggcgaaattcaaggtttcgaaaccgactaagctgaccaggtcaaggt

SEQ ID NO: 203191 - DNA, 55 bp, Artificial
  Synthetic oligonucleotide
tatcaatcctctttatggcataggattctgggttaattcccttgctccctacggc

SEQ ID NO: 203192 - DNA, 55 bp, Artificial
  Synthetic oligonucleotide
aaaaggccaagaccttcctttcgctccacaggcataagccccggtcacagttgcc

SEQ ID NO: 203193 - DNA, 54 bp, Artificial
  Synthetic oligonucleotide
tccagcaaggaattaagcttgtaggtcccaattgtcccggggtcattacccctg

SEQ ID NO: 203194 - DNA, 51 bp, Artificial
  Synthetic oligonucleotide
cggtcaaccggaccaacccgtgtcttaccctataatcggcaacaaaagacc

SEQ ID NO: 203195 - DNA, 53 bp, Artificial
  Synthetic oligonucleotide
caagagtgtaggataggccttcaatccgggcttcgattttgcccctgtaggca

SEQ ID NO: 203196 - DNA, 53 bp, Artificial
  Synthetic oligonucleotide
attacgcttgtttcaaccgtccaattcgatcctcaacagaccgttgtcttttg

SEQ ID NO: 203197 - DNA, 53 bp, Artificial
  Synthetic oligonucleotide
agtttgaagtccccacccatacaaaccggtattccacgatgaagcttaagcgg

SEQ ID NO: 203198 - DNA, 51 bp, Artificial
  Synthetic oligonucleotide
actgcccgtctccaatttcaaggatgcagtaacgacatcggttctttgcct

SEQ ID NO: 203199 - DNA, 50 bp, Artificial
  Synthetic oligonucleotide
aaaacccctgctcgggcaaaccgcaatccgccaagagatggctgcccagg

SEQ ID NO: 203200 - DNA, 50 bp, Artificial
  Synthetic oligonucleotide
cccaccgatcttcgttcccaaacccagttcgcttactgggaaagttaccc

SEQ ID NO: 203201 - DNA, 50 bp, Artificial
  Synthetic oligonucleotide
aaagaggggttttgtgctcctcggttcgtaggagaatgcgggcccccggc

SEQ ID NO: 203202 - DNA, 50 bp, Artificial
  Synthetic oligonucleotide
aaccctcccgcttgctggctgtatcccgcggattgagaaaaagtgggcct

SEQ ID NO: 203203 - DNA, 50 bp, Artificial
  Synthetic oligonucleotide
aacgaaccttctcccgctcccaagtcaagaacgaaaggcccctccctgcc

SEQ ID NO: 203204 - DNA, 50 bp, Artificial
  Synthetic oligonucleotide
aacgaccaatggctgtccaacatgtagcggcaacccgcgccaagttgagg

SEQ ID NO: 203205 - DNA, 50 bp, Artificial
  Synthetic oligonucleotide
gtagttcttggtttctaagctcgttgatagcgggaatgaaagtttcgttt

SEQ ID NO: 203206 - DNA, 50 bp, Artificial
  Synthetic oligonucleotide
aacgagcgggtaggggctggatgacaggagctggaccctagcattgccgc

SEQ ID NO: 203207 - DNA, 50 bp, Artificial
  Synthetic oligonucleotide
aacggcaggctcccgcaactgccctacccgtgaaaaacccctagcaagca

SEQ ID NO: 203208 - DNA, 50 bp, Artificial
  Synthetic oligonucleotide
aagattgggcagcgtagtggcttccgtgaaccccgggccaaggatcggga

SEQ ID NO: 203209 - DNA, 50 bp, Artificial
  Synthetic oligonucleotide
acaggctctctctgtcgcaccgacgccattgctggacggactcgctaggg

SEQ ID NO: 203210 - DNA, 50 bp, Artificial
  Synthetic oligonucleotide
acccaacccaagcccggtcattcccccagaacccagggcgatcagagact

SEQ ID NO: 203211 - DNA, 55 bp, Artificial
  Synthetic oligonucleotide
cccttataaaatcgaggtaagattccgaagtgagtaaatactcgctagacatcgg

SEQ ID NO: 203212 - DNA, 50 bp, Artificial
  Synthetic oligonucleotide
acgacagagagggtttctctgccgtagccggaaaaggcaggcctcccagg

SEQ ID NO: 203213 - DNA, 50 bp, Artificial
  Synthetic oligonucleotide
actttcccggctaaggcacaggctctctctgtcgcaccgacgccattgct

SEQ ID NO: 203214 - DNA, 50 bp, Artificial
  Synthetic oligonucleotide
agacaagcggaagagggcataagggacagaaagcccgtgcagggggctcc

SEQ ID NO: 203215 - DNA, 50 bp, Artificial
  Synthetic oligonucleotide
agcggatatcggtgggcccatcaagggaactcaaggccggctagcctaca

SEQ ID NO: 203216 - DNA, 50 bp, Artificial
  Synthetic oligonucleotide
agtgggaatttgcaactgccgtgcaaccgccctcaagcccaagccagttg

SEQ ID NO: 203217 - DNA, 50 bp, Artificial
  Synthetic oligonucleotide
agttcgcttactgggaaagttacccggtccaaccccgttgccgggccatc

SEQ ID NO: 203218 - DNA, 50 bp, Artificial
  Synthetic oligonucleotide
ataccctcttgccgagggtgccccgcacaaggaccctctccacaaggcgc

SEQ ID NO: 203219 - DNA, 50 bp, Artificial
  Synthetic oligonucleotide
ccaaagggatatctcgggattccctctcgccgcccggctatgttccctgg

SEQ ID NO: 203220 - DNA, 50 bp, Artificial
  Synthetic oligonucleotide
catgtggggagcggatatcggtgggcccatcaagggaactcaaggccggc

SEQ ID NO: 203221 - DNA, 50 bp, Artificial
  Synthetic oligonucleotide
catggatccaccccttctgttacggaattccgccggggttaagtcacaac

SEQ ID NO: 203222 - DNA, 55 bp, Artificial
  Synthetic oligonucleotide
cctcaaggcatgtataactttcatgctaccgggtacggcaagagccatcccatag

SEQ ID NO: 203223 - DNA, 50 bp, Artificial
  Synthetic oligonucleotide
catgctcggagggataggaggagcggccgtaggatcgctgttcttgccgg

SEQ ID NO: 203224 - DNA, 50 bp, Artificial
  Synthetic oligonucleotide
catgagtggtgcggtaggcggcaggtcccaccatacgcatcctgaaagca

SEQ ID NO: 203225 - DNA, 50 bp, Artificial
  Synthetic oligonucleotide
cagggccgtgtccctcaagtcgatcgcggctcgaacgcttacggtcatgc

SEQ ID NO: 203226 - DNA, 50 bp, Artificial
  Synthetic oligonucleotide
atcagccttccgggtgaagattgggcagcgtagtggcttccgtgaacccc

SEQ ID NO: 203227 - DNA, 50 bp, Artificial
  Synthetic oligonucleotide
caagcccggtcattcccccagaacccagggcgatcagagactgccacagt

SEQ ID NO: 203228 - DNA, 50 bp, Artificial
  Synthetic oligonucleotide
atccagtatcgccaagcagcccggggagagttcccggaggccccgtcggt

SEQ ID NO: 203229 - DNA, 50 bp, Artificial
  Synthetic oligonucleotide
attgagcccgccgggtaaggaccgaggtggttgggattggacgccgtaag

SEQ ID NO: 203230 - DNA, 50 bp, Artificial
  Synthetic oligonucleotide
atccccggcaagaacagcgatcctacggccgctcctcctatccctccgag

SEQ ID NO: 203231 - DNA, 50 bp, Artificial
  Synthetic oligonucleotide
atcggctcaggagagagttcggggtgagtgtgaatgcgggggcgccgcag

SEQ ID NO: 203232 - DNA, 55 bp, Artificial
  Synthetic oligonucleotide
cctcacgatttgccctgaaagtcagcctaaagccgtcatggtcatcccagcacag

SEQ ID NO: 203233 - DNA, 55 bp, Artificial
  Synthetic oligonucleotide
cggtatctgtacattcctcgtccctgcgcacatcggttaatacgtactgttcatc

SEQ ID NO: 203234 - DNA, 53 bp, Artificial
  Synthetic oligonucleotide
ctctgccttaggtagggaataccgtagtcgagccttaagggcccgatgggtaa

SEQ ID NO: 203235 - DNA, 52 bp, Artificial
  Synthetic oligonucleotide
gaccgaaggcaaatatttaagtcgggcataaaccggggaaagttctcggaca

SEQ ID NO: 203236 - DNA, 57 bp, Artificial
  Synthetic oligonucleotide
gtgggcacccctgaccacgaaggacggaagtcatgcgtcaacacgacaattcccaac

SEQ ID NO: 203237 - DNA, 60 bp, Artificial
  Synthetic oligonucleotide
caagaaatgacgagcgtaagcatatgtcgaaggtaactatcgaggaggtgaaggcccatc

SEQ ID NO: 203238 - DNA, 60 bp, Artificial
  Synthetic oligonucleotide
ctcccgccaccgcaggaaaggtgaattggcatcgtgtcctcaggctgacatacagctgct

SEQ ID NO: 203239 - DNA, 60 bp, Artificial
  Synthetic oligonucleotide
ctcacgtaggcactcacgagatgagcggtcatccgcccataatccgcggctgagaccgta

SEQ ID NO: 203240 - DNA, 55 bp, Artificial
  Synthetic oligonucleotide
gctcgagtccggccgatggttaagtcggaggcgaggctaaccaccggtgggtcaa

SEQ ID NO: 203241 - DNA, 52 bp, Artificial
  Synthetic oligonucleotide
ggaaaaccccgtccgctagggttgatttcggcctacggacacgctttcatac

SEQ ID NO: 203242 - DNA, 60 bp, Artificial
  Synthetic oligonucleotide
gctcacctcagctatggccgacgtcatgacaaccctcgcttaagtcgagctaagtcttgg

SEQ ID NO: 203243 - DNA, 59 bp, Artificial
  Synthetic oligonucleotide
gctcaaactccgaaagagcggtcctagacgcatttcggccagtcatgcttcggatccct

SEQ ID NO: 203244 - DNA, 60 bp, Artificial
  Synthetic oligonucleotide
gctatctgaggtcgatcccaatggatgtgttcagtcgcggtttatgaccggactaccgat

SEQ ID NO: 203245 - DNA, 60 bp, Artificial
  Synthetic oligonucleotide
ggaccaatccaagcgcgagcgaagtaggcaaggcccgctacaggtcgtgagcggccatgt

SEQ ID NO: 203246 - DNA, 55 bp, Artificial
  Synthetic oligonucleotide
gcgccaactttgggtacatcgcctgggcaatctagcccttctaacccgtaagaaa

SEQ ID NO: 203247 - DNA, 60 bp, Artificial
  Synthetic oligonucleotide
ggatgccaatcgcagaacgaaggatgaccgggatgaccctagcctcatcgcgctcgtgga

SEQ ID NO: 203248 - DNA, 60 bp, Artificial
  Synthetic oligonucleotide
gttcagagcacggtgcgtgtaatggatatgcatctccgcagcgttcccggcttcctcgac

SEQ ID NO: 203249 - DNA, 59 bp, Artificial
  Synthetic oligonucleotide
gcccttgtcacaaatgcttttctgtatggaataacagatagcgaaagcccccccagcga

SEQ ID NO: 203250 - DNA, 60 bp, Artificial
  Synthetic oligonucleotide
ggcaccacttcgtctggcaatgcccgcactgcatcgagtggtttgtgccgcgcatgtcct

SEQ ID NO: 203251 - DNA, 60 bp, Artificial
  Synthetic oligonucleotide
gcatatacactgccataacgcgccagaagacttcccgttgacaggcggctacctgtcggg

SEQ ID NO: 203252 - DNA, 52 bp, Artificial
  Synthetic oligonucleotide
ggcataggcctacgacgggattgggtggaaaacggtccgtccgctccggggc

SEQ ID NO: 203253 - DNA, 60 bp, Artificial
  Synthetic oligonucleotide
ggcatcaaccggcagtagtcgctgagaaccacgcacactaagctgagttgctacggtccg

SEQ ID NO: 203254 - DNA, 60 bp, Artificial
  Synthetic oligonucleotide
ggcatggacgtcgagcgatccgcgctgaggtatcccgaggggcgatcgtgctctagccct

SEQ ID NO: 203255 - DNA, 57 bp, Artificial
  Synthetic oligonucleotide
gcacgaggcggagggtttcatcgcgaaaggcgttgcgatcccgctccgtctcaacgg

SEQ ID NO: 203256 - DNA, 55 bp, Artificial
  Synthetic oligonucleotide
gcaactctaggtagcttgctttagccttacgtttctgtaacgtaacgcaaaactg

SEQ ID NO: 203257 - DNA, 60 bp, Artificial
  Synthetic oligonucleotide
gatggagagcaccttcatgcaacacctattcggctatgcgtgtatacatcctaacctgca

SEQ ID NO: 203258 - DNA, 60 bp, Artificial
  Synthetic oligonucleotide
ggccgcatatctggacccgcgcgtgtattagcgtccagacccataacggtggcgcagacg

SEQ ID NO: 203259 - DNA, 59 bp, Artificial
  Synthetic oligonucleotide
atttagtcgagcatccagaaattatccgcgcagttatgaagcaggatacggtaacggac

SEQ ID NO: 203260 - DNA, 60 bp, Artificial
  Synthetic oligonucleotide
cgcctgagtggcttaggcaacctgcatttgtgggactgcactcagccgctatatggcccc

SEQ ID NO: 203261 - DNA, 57 bp, Artificial
  Synthetic oligonucleotide
cgcctcacgacggctcgcaaggtacggctatccaacgtgaacttttgagtccggctc

SEQ ID NO: 203262 - DNA, 57 bp, Artificial
  Synthetic oligonucleotide
gtaacccggtgcttcgcgtttgcctgacagttatgcgatcgaatggcccggtctacc

SEQ ID NO: 203263 - DNA, 59 bp, Artificial
  Synthetic oligonucleotide
gtaacgtctcggatggctgcttccgacacgtctcagaattgaagatcggacctcaacgg

SEQ ID NO: 203264 - DNA, 60 bp, Artificial
  Synthetic oligonucleotide
gtacaaccgcgttcgccgctaaccgtatcctatctgcatgttgtgagcatgatagacgca

SEQ ID NO: 203265 - DNA, 60 bp, Artificial
  Synthetic oligonucleotide
gtatgatccgcagccttgtcgtgagggaactccgcgaccagatgaggcccggagctatgc

SEQ ID NO: 203266 - DNA, 60 bp, Artificial
  Synthetic oligonucleotide
cgcaatatggattgcataaattgacggaaaaagcttatgtagaggcacattattggagca

SEQ ID NO: 203267 - DNA, 60 bp, Artificial
  Synthetic oligonucleotide
cgcaagtgtctcgtaagagcttctgtgagacatccgagacacggctttccgctctgctcc

SEQ ID NO: 203268 - DNA, 60 bp, Artificial
  Synthetic oligonucleotide
cgcaacgttgagtagggcttcagacggtctatgctgaggcttctctgcatctcaagcgga

SEQ ID NO: 203269 - DNA, 56 bp, Artificial
  Synthetic oligonucleotide
cgattagcggcgtacgttcgcactagtttcagcgcgaccctacttgcggccggagg

SEQ ID NO: 203270 - DNA, 60 bp, Artificial
  Synthetic oligonucleotide
attctatcgtgctctgagctccaagttcttattggcgcgccaagttagggcgccttgtcg

SEQ ID NO: 203271 - DNA, 54 bp, Artificial
  Synthetic oligonucleotide
cgatgtgttcgatttgtggtccggttggttcttgggtcgtagtacccgagtaca

SEQ ID NO: 203272 - DNA, 55 bp, Artificial
  Synthetic oligonucleotide
gtccatctcactcgggttcttcgtgtaaaaccaagcacttagctaagaccgttcc

SEQ ID NO: 203273 - DNA, 55 bp, Artificial
  Synthetic oligonucleotide
cgaggtgagcgacggacaccctttcgaaagggctgccgacgcaccttcacccggc

SEQ ID NO: 203274 - DNA, 59 bp, Artificial
  Synthetic oligonucleotide
cgaggatttggacgaagttaattatctaagggctgggttcacaattcagctgctctcac

SEQ ID NO: 203275 - DNA, 59 bp, Artificial
  Synthetic oligonucleotide
gtccgaggtggacaagctaactgcttacgaagacagggttcagcacgcaagagcgttgt

SEQ ID NO: 203276 - DNA, 55 bp, Artificial
  Synthetic oligonucleotide
cgacggaaggcactcggggacctgttcggtggcccctatgcctgagggcgttagc

SEQ ID NO: 203277 - DNA, 55 bp, Artificial
  Synthetic oligonucleotide
cgaacacgaatggaaggcaaaccggagctaagtcgatcgacatccgggggacgac

SEQ ID NO: 203278 - DNA, 60 bp, Artificial
  Synthetic oligonucleotide
ccttgagtcctaatcaatcaaccgctgagcgatcgatggatcatacattctacgtgcagt

SEQ ID NO: 203279 - DNA, 59 bp, Artificial
  Synthetic oligonucleotide
cctgcccctcgcaggtaagggcgcccggtagtccaagccttgaagctcgcgctcagagc

SEQ ID NO: 203280 - DNA, 54 bp, Artificial
  Synthetic oligonucleotide
gtccgtttgggctatgtccgtatgaaagcgtgtccgtaggccgaaatcaaccct

SEQ ID NO: 203281 - DNA, 55 bp, Artificial
  Synthetic oligonucleotide
attccgacacaactacttttacgttatcttcacgaacgagcggttcgtgataaca

SEQ ID NO: 203282 - DNA, 60 bp, Artificial
  Synthetic oligonucleotide
ctcaccgccactctgcctgttccgggcacgcttacacttcgcgacaacggagtgcacgcg

SEQ ID NO: 203283 - DNA, 59 bp, Artificial
  Synthetic oligonucleotide
ctatcgccacgtccgtaatggctttgttcacgcaactatcaaccgggcgtctctggcta

SEQ ID NO: 203284 - DNA, 60 bp, Artificial
  Synthetic oligonucleotide
ctagatcgatgcggcggcctgtatggtaatcgcgaccatcagcaccactaatgaattgag

SEQ ID NO: 203285 - DNA, 58 bp, Artificial
  Synthetic oligonucleotide
ctacgctcgcagatttttacttacgcttccttgcgcccgtgagcgtcatctaacccga

SEQ ID NO: 203286 - DNA, 53 bp, Artificial
  Synthetic oligonucleotide
gggtaactcggggatgatccgcggcgagccctgccggaataaagaaaggcccc

SEQ ID NO: 203287 - DNA, 56 bp, Artificial
  Synthetic oligonucleotide
gggtctcctacggtatagacatgaagggctcgacttcgggtttcttgaacggcgca

SEQ ID NO: 203288 - DNA, 60 bp, Artificial
  Synthetic oligonucleotide
cgtggaaaaccggcccgggatcaaatgcaccagattgacacacttgcgcgccaaggctca

SEQ ID NO: 203289 - DNA, 60 bp, Artificial
  Synthetic oligonucleotide
ggtccgagagtacgttcaaagggttgcctcattcattgacggcgcatagtgtatgcgcag

SEQ ID NO: 203290 - DNA, 55 bp, Artificial
  Synthetic oligonucleotide
cggtgggcgttgaccactcggttcctgatcgggttgaggatccagtccctcaggg

SEQ ID NO: 203291 - DNA, 60 bp, Artificial
  Synthetic oligonucleotide
cggtctacctatcgagcagactgacatgcttgtagtctcgttatctggacactaataaac

SEQ ID NO: 203292 - DNA, 59 bp, Artificial
  Synthetic oligonucleotide
attcaagcgacggtgactgatgatggttgacggtccgagtattgaaactgggggcctgc

SEQ ID NO: 203293 - DNA, 57 bp, Artificial
  Synthetic oligonucleotide
cggtaggcatattaagcttccgtaaaccaagtatgcgtatttacttgctgtcgaata

SEQ ID NO: 203294 - DNA, 57 bp, Artificial
  Synthetic oligonucleotide
ggtcgacaagtctgacgatgtctgcgaacgtcctgccgttcgactccgggagacccg

SEQ ID NO: 203295 - DNA, 60 bp, Artificial
  Synthetic oligonucleotide
cgggccgctgctagatggggcaggatccgaacgcgacttcagatatctgccccgctctag

SEQ ID NO: 203296 - DNA, 59 bp, Artificial
  Synthetic oligonucleotide
cggcgcacgaactagttggcgacttgttatcgcgtcagatccactaccacgtaccagaa

SEQ ID NO: 203297 - DNA, 60 bp, Artificial
  Synthetic oligonucleotide
cggatctctcaggtttcgaccatcactggctgaggcctgacatcaaccctttgccggtgt

SEQ ID NO: 203298 - DNA, 60 bp, Artificial
  Synthetic oligonucleotide
cggacggcattggttagagcaataaacgtgtgcttgctggccgcgctttcatctgtcgga

SEQ ID NO: 203299 - DNA, 60 bp, Artificial
  Synthetic oligonucleotide
cgctatcggaagagcggctcagggtggaattcggctggtctgcttctgggcaaggatgca

SEQ ID NO: 203300 - DNA, 60 bp, Artificial
  Synthetic oligonucleotide
cgctacgctgccctctagcccacgaggagggcaggatgcgcaagttcggaatgcttttta

SEQ ID NO: 203301 - DNA, 60 bp, Artificial
  Synthetic oligonucleotide
cgcgcttatgaattgatttgttgcaggtagggataggcgcagagggacttgatgcgtccg

SEQ ID NO: 203302 - DNA, 59 bp, Artificial
  Synthetic oligonucleotide
cgcgcgcaggtagttatactacgcgcgcgcaggggtagatcgaaggatcggttaacagc

SEQ ID NO: 203303 - DNA, 55 bp, Artificial
  Synthetic oligonucleotide
atgtcgcaacgaggtcttattcatcggacctctccgtaaactgcgaaaaactaac

SEQ ID NO: 203304 - DNA, 60 bp, Artificial
  Synthetic oligonucleotide
cgcgagaaattaagacagcgaagcatgcgcgctttctacttagggcgcttgatgcaactt

SEQ ID NO: 203305 - DNA, 60 bp, Artificial
  Synthetic oligonucleotide
aacctgtggacgataggagtaacctcgacagcgttcacgaggtgagtatgcgcaatatgg

SEQ ID NO: 203306 - DNA, 60 bp, Artificial
  Synthetic oligonucleotide
ttcggctagactatctggcgtgagatgctcgcccttgtacgtgcgtgtccggcgcacagc

SEQ ID NO: 203307 - DNA, 59 bp, Artificial
  Synthetic oligonucleotide
ttcggtatgcacctcagactgaaaacggacactcaccccatcctggggcgcaaagtcac

SEQ ID NO: 203308 - DNA, 58 bp, Artificial
  Synthetic oligonucleotide
accgaacccgcgtaacgcagcacggggcggcagctacaagccccttgtcgaatgatga

SEQ ID NO: 203309 - DNA, 60 bp, Artificial
  Synthetic oligonucleotide
aacatctcgcttcaggtcagggtgtacactgaccaatcctgatagatgccgggagcggtc

SEQ ID NO: 203310 - DNA, 54 bp, Artificial
  Synthetic oligonucleotide
aacaggcgcctttgggcgcccgcgtgcgccccctgtcacaacggccccctacag

SEQ ID NO: 203311 - DNA, 60 bp, Artificial
  Synthetic oligonucleotide
tgccactctgtcatcggttatcgggcagtgctcccggcttgagttgaagtccgcgaactc

SEQ ID NO: 203312 - DNA, 53 bp, Artificial
  Synthetic oligonucleotide
tgcacgggggtttcaaattgggcccgggaaattgcacgggcctcgcgccgccc

SEQ ID NO: 203313 - DNA, 58 bp, Artificial
  Synthetic oligonucleotide
aaatagacgtggcgtatatttttgtcgcgacggcgttgagagtcacagccccagtgcc

SEQ ID NO: 203314 - DNA, 58 bp, Artificial
  Synthetic oligonucleotide
atgtccagccgcgctgtttgtcgcgagcccgagctaggcaacgtttcgggcttgggga

SEQ ID NO: 203315 - DNA, 60 bp, Artificial
  Synthetic oligonucleotide
tgcacaactgatgtcaatccgtatgagatgctagctcttggggcattcaatattgtgtct

SEQ ID NO: 203316 - DNA, 60 bp, Artificial
  Synthetic oligonucleotide
aaagaggctagaaatctcggcgcatgataggcgcaagatagaagtctgattcaacgcttg

SEQ ID NO: 203317 - DNA, 59 bp, Artificial
  Synthetic oligonucleotide
tgatttcgacacgtctctcgcccgctcatagatccggccacctacctgtggcgttaaat

SEQ ID NO: 203318 - DNA, 60 bp, Artificial
  Synthetic oligonucleotide
tgaggaccagtcagcgctgcaccttgtgagagacgtcgctgatgacactgcggaggatcc

SEQ ID NO: 203319 - DNA, 60 bp, Artificial
  Synthetic oligonucleotide
tgagcgcctccaagactatgaactatggctgaatctcttgtgcctaggcgaattccgacg

SEQ ID NO: 203320 - DNA, 60 bp, Artificial
  Synthetic oligonucleotide
tttcacttgtcgaaacatgctctcgtgagatagcacgttcgagcgtcagaaaacgtaagt

SEQ ID NO: 203321 - DNA, 60 bp, Artificial
  Synthetic oligonucleotide
tgagagacgtgggttagggcggcgcatttcgcccatgaggcttttggcaggctcggatag

SEQ ID NO: 203322 - DNA, 60 bp, Artificial
  Synthetic oligonucleotide
acggcttaactgcgccaaacgcctatggctcgttgacattcgacgatcatatgcttttta

SEQ ID NO: 203323 - DNA, 60 bp, Artificial
  Synthetic oligonucleotide
acgggtctagacccggagattatagcgtctcataaatgcgatatcaatccatatgagacg

SEQ ID NO: 203324 - DNA, 60 bp, Artificial
  Synthetic oligonucleotide
tttcttaagcgtagcgttcagatgaggtgcataacctccgctatccattactgaccatag

SEQ ID NO: 203325 - DNA, 56 bp, Artificial
  Synthetic oligonucleotide
gtttcgcgaacgcatccaagcacgctcgtttgacgggtcgggatctgaaccagggg

SEQ ID NO: 203326 - DNA, 58 bp, Artificial
  Synthetic oligonucleotide
actccgagtagcgaccaaacgttgatgcaggcttaaatcgatcgaacaaaaaggatca

SEQ ID NO: 203327 - DNA, 54 bp, Artificial
  Synthetic oligonucleotide
aagtccgattacgcggggtacgattatgagcgcaattcgggtgaaggcggccgt

SEQ ID NO: 203328 - DNA, 60 bp, Artificial
  Synthetic oligonucleotide
tgtggcgaccgataagcccatagacgatgaggacgggtgtcctgaccttctgctcggcaa

SEQ ID NO: 203329 - DNA, 60 bp, Artificial
  Synthetic oligonucleotide
tgtgccgatagcgagatccacgggatggtggtccgcttggatagatagctcatccggtga

SEQ ID NO: 203330 - DNA, 57 bp, Artificial
  Synthetic oligonucleotide
tgtcgcacttggcgttggaccaggagagggagcggcgggacatcggcgggtctcgtt

SEQ ID NO: 203331 - DNA, 53 bp, Artificial
  Synthetic oligonucleotide
aaggcaaaccgccgttagcgccttgtggacgcgtttaggtgccttcctgccgg

SEQ ID NO: 203332 - DNA, 59 bp, Artificial
  Synthetic oligonucleotide
aagcttatgtcggggcactcatcgtgcctagggtcgatcctagagttatccggcgcaac

SEQ ID NO: 203333 - DNA, 60 bp, Artificial
  Synthetic oligonucleotide
aatacgctcctcaagaagtctgatccgcatgtctgagtcgggcatggatcctccgtgaat

SEQ ID NO: 203334 - DNA, 60 bp, Artificial
  Synthetic oligonucleotide
aatcacggagtactatatgtctatcagccagaatacacaaatatagcatatctgttatcc

SEQ ID NO: 203335 - DNA, 58 bp, Artificial
  Synthetic oligonucleotide
tgggggcaataactatcgggtcgttgcgcggttcgcgtatgcctataagacggctcaa

SEQ ID NO: 203336 - DNA, 56 bp, Artificial
  Synthetic oligonucleotide
gtttctgccaacgcatttccttcgctgaagcgggaagtccgagacagacccctaaa

SEQ ID NO: 203337 - DNA, 60 bp, Artificial
  Synthetic oligonucleotide
aagcccaagtgatggggtgatcgtgcgacgcgcagacatggcggcatccaatcagggcga

SEQ ID NO: 203338 - DNA, 57 bp, Artificial
  Synthetic oligonucleotide
tggcgctcgggacccgggtaagcgcaagtacggaacgagagacgcgcctcacgagaa

SEQ ID NO: 203339 - DNA, 55 bp, Artificial
  Synthetic oligonucleotide
aagcatagaagtttgaccccagtagaactcgctctaagaacttgaaacttcggga

SEQ ID NO: 203340 - DNA, 60 bp, Artificial
  Synthetic oligonucleotide
tggcaagaagttagatcttgtacgagcaagcgatgagctagattcatctgcagagcgtac

SEQ ID NO: 203341 - DNA, 60 bp, Artificial
  Synthetic oligonucleotide
tggatctatatgttcgagcggagaagttaaaatgcaatccttccgagaatttagcgatac

SEQ ID NO: 203342 - DNA, 57 bp, Artificial
  Synthetic oligonucleotide
ttatccgagtaggaaggagcgcttgaataactggtgcgtccgagtcttattggcctt

SEQ ID NO: 203343 - DNA, 58 bp, Artificial
  Synthetic oligonucleotide
tggacttgcggttctgtcagagccggtgtaggcggttcttgtagtgcaaccgttcact

SEQ ID NO: 203344 - DNA, 60 bp, Artificial
  Synthetic oligonucleotide
aacgcctcatctagagacagcgatgctccaccgtgggagacgctctctatgagtacccaa

SEQ ID NO: 203345 - DNA, 60 bp, Artificial
  Synthetic oligonucleotide
tgctcgcacgtcgggtgggtgtagataggcaatagtagataggccatgtgcgcacttaac

SEQ ID NO: 203346 - DNA, 60 bp, Artificial
  Synthetic oligonucleotide
ttcgaagctggaatcgccctgattggggcgattcctttcgagttcatggtgagtggtgta

SEQ ID NO: 203347 - DNA, 60 bp, Artificial
  Synthetic oligonucleotide
gtgggctcccttgcagtctgctcgcccataagcaatagggcttcgcctgagctttgctta

SEQ ID NO: 203348 - DNA, 56 bp, Artificial
  Synthetic oligonucleotide
taaaccagcgcagaaattccctgaaggtatacattccgcgcccctgcccccagacc

SEQ ID NO: 203349 - DNA, 57 bp, Artificial
  Synthetic oligonucleotide
tgcgtcgtgagacaaagttaaccttacctattcgcataagggaggcgttatgggaca

SEQ ID NO: 203350 - DNA, 60 bp, Artificial
  Synthetic oligonucleotide
acttttagcactttggctcagccgcgcttgacccgacgagtgaatagcgcgatttagcca

SEQ ID NO: 203351 - DNA, 60 bp, Artificial
  Synthetic oligonucleotide
actgcgttgcccgcgctctcggctactacgatgctactttgctcagagcgcacatgcgag

SEQ ID NO: 203352 - DNA, 60 bp, Artificial
  Synthetic oligonucleotide
tctgaggaccagggcggcagttctacgcgtcagagtgaggtcatccggatatgaccgtcc

SEQ ID NO: 203353 - DNA, 60 bp, Artificial
  Synthetic oligonucleotide
aaaacgcaacgcggctcgtgctcagagtgccgcgattgggttagcttggcatcaacctac

SEQ ID NO: 203354 - DNA, 60 bp, Artificial
  Synthetic oligonucleotide
ttttctgacttacacacgcgaggtgtggtcaaatacgatcatacccatctcaaggttcgc

SEQ ID NO: 203355 - DNA, 57 bp, Artificial
  Synthetic oligonucleotide
tctcgggagctcgggaccgcctacacctaccaggccaacggcctcacgaagaagcac

SEQ ID NO: 203356 - DNA, 58 bp, Artificial
  Synthetic oligonucleotide
agaaaatgtcggtcgcgccacagcatattccggttagtgtcgtcgagcttttatccga

SEQ ID NO: 203357 - DNA, 59 bp, Artificial
  Synthetic oligonucleotide
tacagtggagaacgatatatgtccagtgttgtcacgtgaaaatccggcaacgatcgact

SEQ ID NO: 203358 - DNA, 57 bp, Artificial
  Synthetic oligonucleotide
gacacagtgacgttccctgaccggaagaccaccaatcccatggctaccactaaagcc

SEQ ID NO: 203359 - DNA, 57 bp, Artificial
  Synthetic oligonucleotide
gtcgaaatactaaatcatctaagagtaacagtggacacgctaaagaaactcggatct

SEQ ID NO: 203360 - DNA, 58 bp, Artificial
  Synthetic oligonucleotide
gaaggaaatgtgacgtctgctaagagtatttctcgcccgcaagcggactagccgaaaa

SEQ ID NO: 203361 - DNA, 58 bp, Artificial
  Synthetic oligonucleotide
tgagggtaattgcctgatcgaagtaactcatggcccgcccccagtctcgttcggcgac

SEQ ID NO: 203362 - DNA, 56 bp, Artificial
  Synthetic oligonucleotide
ggtgagatccaaaaggtctcgaaccttatcctcaacgttaatgtctacgtgaagga

SEQ ID NO: 203363 - DNA, 59 bp, Artificial
  Synthetic oligonucleotide
gccgagtcacgtgctcgtctcgacatttacttctcgaacctgagctgagatacacgatg

SEQ ID NO: 203364 - DNA, 59 bp, Artificial
  Synthetic oligonucleotide
gcggcggaaggtgtgacattccgggtgacaggtgtgacaaccacgcgaggcatggccgg

SEQ ID NO: 203365 - DNA, 58 bp, Artificial
  Synthetic oligonucleotide
cgagcggtctcgggcgcccgttcagcgtctagccgaccgcctagcaggttatcttgtc

SEQ ID NO: 203366 - DNA, 58 bp, Artificial
  Synthetic oligonucleotide
gttacgacgtcgaacctttcggatgcatcgtcgacgcaagtcgataacaagtcgagta

SEQ ID NO: 203367 - DNA, 59 bp, Artificial
  Synthetic oligonucleotide
ttcgggactgttgggacaagggcgcgattggtaggaatagtcataacgtgatcgcatgt

SEQ ID NO: 203368 - DNA, 59 bp, Artificial
  Synthetic oligonucleotide
gaggtcccgtgtacgatcggttcaggcagatatgggccaggacgccgcgaatgagctga

SEQ ID NO: 203369 - DNA, 58 bp, Artificial
  Synthetic oligonucleotide
aagtaccaacactaaacgggggacgctggcatgccgcgactgtgagttcgatactcaa

SEQ ID NO: 203370 - DNA, 52 bp, Artificial
  Synthetic oligonucleotide
cctctctcaagaggtccgtggggtaaaggagcgggttggttctccgcgtcgt

SEQ ID NO: 203371 - DNA, 58 bp, Artificial
  Synthetic oligonucleotide
gtcgctcaacctatcctgcggctctcccaaatctggcaggactatcagcaggtccaga

SEQ ID NO: 203372 - DNA, 58 bp, Artificial
  Synthetic oligonucleotide
tgggtataccctattgcgcgaggaggctgagctatctcctcgcacgaggcactttctt

SEQ ID NO: 203373 - DNA, 58 bp, Artificial
  Synthetic oligonucleotide
tgccgccgtctgggacagagcacagatcatcgtcgcgaatggtgcgaccagaatttgg

SEQ ID NO: 203374 - DNA, 58 bp, Artificial
  Synthetic oligonucleotide
tcacatagtccttgctccgcgcaatcctagcgggagtcgtacgaggccagaccgttaa

SEQ ID NO: 203375 - DNA, 58 bp, Artificial
  Synthetic oligonucleotide
atgcaaatgccgtcaccgctctacacgcggcgttcgttgacctccaagcactggacgt

SEQ ID NO: 203376 - DNA, 58 bp, Artificial
  Synthetic oligonucleotide
gagagacacacgcagatgacagcccgaatagggaataattgtggccgtctctcaagcc

SEQ ID NO: 203377 - DNA, 58 bp, Artificial
  Synthetic oligonucleotide
caagccgactaaaagggcaacgatgttgcgaatgaggcaagcctgaaagaccgtccag

SEQ ID NO: 203378 - DNA, 58 bp, Artificial
  Synthetic oligonucleotide
ggcagggtgtcgcactcatccgcatacctacgcctcatcgctattgagattgcacgtt

SEQ ID NO: 203379 - DNA, 56 bp, Artificial
  Synthetic oligonucleotide
aaggggggcgcggttcgcctgccaagcttagaccgtgccccctccgatgctctctc

SEQ ID NO: 203380 - DNA, 58 bp, Artificial
  Synthetic oligonucleotide
cagacgcgtgacggcaaacaggtgataggcgacgctccggacctgcgcttttgccgaa

SEQ ID NO: 203381 - DNA, 56 bp, Artificial
  Synthetic oligonucleotide
ccgtccggggaagcggcgctccccgttgactccctcacagggtcatggtgatgtcc

SEQ ID NO: 203382 - DNA, 58 bp, Artificial
  Synthetic oligonucleotide
ttccctgaccggaagaccaccaatcccatggctaccactaaagccgccagagctagtg

SEQ ID NO: 203383 - DNA, 58 bp, Artificial
  Synthetic oligonucleotide
tcaaagatttggtggcagccggccgcaccatctgacagcttgccgttgcatcgagcga

SEQ ID NO: 203384 - DNA, 58 bp, Artificial
  Synthetic oligonucleotide
cagatgcaagaggttcgatctgatcggatactgcttttgcgactccatttacaggcga

SEQ ID NO: 203385 - DNA, 57 bp, Artificial
  Synthetic oligonucleotide
ctcttgtgatactcaacgtcctcgcatttagcgccgattagttcaaattcgccagag

SEQ ID NO: 203386 - DNA, 57 bp, Artificial
  Synthetic oligonucleotide
ataccgcgccttacgtcgatattgggtatacccgtgagaggcacgtcagctcaggca

SEQ ID NO: 203387 - DNA, 57 bp, Artificial
  Synthetic oligonucleotide
ggcaaggcatgccagtggcgatccacactggcgcgaccaacaccgaaccggtccgca

SEQ ID NO: 203388 - DNA, 56 bp, Artificial
  Synthetic oligonucleotide
agttcatttcctcgctcggcaccgtggatcaacgaccttctggaaaggggcaggac

SEQ ID NO: 203389 - DNA, 57 bp, Artificial
  Synthetic oligonucleotide
attcagagcggacaggtgtcgggaccacggttagctcgatcatacacgaccttagtt

SEQ ID NO: 203390 - DNA, 57 bp, Artificial
  Synthetic oligonucleotide
gcgtgtgcacgttcgcccatgtttgaggccgtatcaagcctcctcaatgggtctggc

SEQ ID NO: 203391 - DNA, 57 bp, Artificial
  Synthetic oligonucleotide
ggaagaccaccaatcccatggctaccactaaagccgccagagctagtgccgcgacca

SEQ ID NO: 203392 - DNA, 60 bp, Artificial
  Synthetic oligonucleotide
ccgtacaggaatgcgagagtgaagaactcgacatctgtcggcttacttcgccgagcccag

SEQ ID NO: 203393 - DNA, 57 bp, Artificial
  Synthetic oligonucleotide
gataactgtctttctgtaacagagactgcattcgatataggattgtggtacgaatat

SEQ ID NO: 203394 - DNA, 57 bp, Artificial
  Synthetic oligonucleotide
agcactagtcgcgagaagcgagatcaaaacagcataagcgcacctcatgattgctct

SEQ ID NO: 203395 - DNA, 55 bp, Artificial
  Synthetic oligonucleotide
aacggatcgaggtaccctcgaccgttggtgagtttcctgctccgaggactagcac

SEQ ID NO: 203396 - DNA, 57 bp, Artificial
  Synthetic oligonucleotide
aactcgacatctgtcggcttacttcgccgagcccaggctacatccatcctcgcccaa

SEQ ID NO: 203397 - DNA, 56 bp, Artificial
  Synthetic oligonucleotide
ttacttacgcttccttgcgcccgtgagcgtcatctaacccgagtcgcaagcttggc

SEQ ID NO: 203398 - DNA, 55 bp, Artificial
  Synthetic oligonucleotide
ccgagtgacttcccctcatacgccatagcaccccctggggtgtcaagtcggaacc

SEQ ID NO: 203399 - DNA, 56 bp, Artificial
  Synthetic oligonucleotide
ttctggatgatagagcgacggcacctccgcagcagtccctttcagaagcgcgacgc

SEQ ID NO: 203400 - DNA, 56 bp, Artificial
  Synthetic oligonucleotide
gacctggtaggaattccgctgggctgagtagttcgccgttacgatgcaaacgagca

SEQ ID NO: 203401 - DNA, 56 bp, Artificial
  Synthetic oligonucleotide
ctgtgagtgccataactgacctcctatggatgtgcggcagatgcctgcgggatatc

SEQ ID NO: 203402 - DNA, 56 bp, Artificial
  Synthetic oligonucleotide
gagataactggtacgcaatatacgaagagatgccggcgcggaagcaagttccggcc

SEQ ID NO: 203403 - DNA, 55 bp, Artificial
  Synthetic oligonucleotide
ccggttacagccggggttacaggctgcaagcgtagggaggatgtaaccgtggcaa

SEQ ID NO: 203404 - DNA, 56 bp, Artificial
  Synthetic oligonucleotide
tgctgcggctccacgagggttctgtgtcacccgatattgggagtatattccgtgga

SEQ ID NO: 203405 - DNA, 56 bp, Artificial
  Synthetic oligonucleotide
atagcctacgattgttttgcgggtcatatttcgtgcgctgtgtttcgccgaataag

SEQ ID NO: 203406 - DNA, 56 bp, Artificial
  Synthetic oligonucleotide
cgtttcgcatcaaagggtaggtatgagctaagtcattgagcctgctagaaccgacc

SEQ ID NO: 203407 - DNA, 56 bp, Artificial
  Synthetic oligonucleotide
gtcgtcacacaattaccccacgcagcagtataaccgcgtgggccgtcactatgtaa

SEQ ID NO: 203408 - DNA, 56 bp, Artificial
  Synthetic oligonucleotide
aggcgtaggcctcaccgagagcactggcctgctcttcggttactcgccgctcagcc

SEQ ID NO: 203409 - DNA, 56 bp, Artificial
  Synthetic oligonucleotide
ctgcgttcggtcgcctacgctcgcagatttttacttacgcttccttgcgcccgtga

SEQ ID NO: 203410 - DNA, 56 bp, Artificial
  Synthetic oligonucleotide
ttccttgcgcccgtgagcgtcatctaacccgagtcgcaagcttggcgataggtcat

SEQ ID NO: 203411 - DNA, 56 bp, Artificial
  Synthetic oligonucleotide
aaaatagtcgtacatctacgcggcccgatgggagcgctcgtcagcctaaagggcgc

SEQ ID NO: 203412 - DNA, 56 bp, Artificial
  Synthetic oligonucleotide
agcgatgctccaccgtgggagacgctctctatgagtacccaagcatattcgcggta

SEQ ID NO: 203413 - DNA, 56 bp, Artificial
  Synthetic oligonucleotide
cgaccgttgacatgctctaacccctgcgttcggtcgcctacgctcgcagattttta

SEQ ID NO: 203414 - DNA, 57 bp, Artificial
  Synthetic oligonucleotide
ccgcgatatgggcacggggggtcattggctgatcccctgattgcggcggaccgtccg

SEQ ID NO: 203415 - DNA, 55 bp, Artificial
  Synthetic oligonucleotide
ttcaccgcgaccttccggcagagcttcgcactctgatggccgacactccgaacag

SEQ ID NO: 203416 - DNA, 55 bp, Artificial
  Synthetic oligonucleotide
ttcctgatgctccgcggcaaggggaagttcgcaatcacgacctccggtgggctga

SEQ ID NO: 203417 - DNA, 55 bp, Artificial
  Synthetic oligonucleotide
cgttgccctccagaggcaaaggtctcacgttcgaaacgtgacgggtgcgccaacc

SEQ ID NO: 203418 - DNA, 55 bp, Artificial
  Synthetic oligonucleotide
ttccagcatagatgaggctcgcaccgaatttgtcgttgggacggcctggcaccat

SEQ ID NO: 203419 - DNA, 50 bp, Artificial
  Synthetic oligonucleotide
gggtaaaggagcgggttggttctccgcgtcgttcggaccctacaggcggt

SEQ ID NO: 203420 - DNA, 55 bp, Artificial
  Synthetic oligonucleotide
gggacgctggcgaggcaatcggatcaatagcttgcccagaaatttatccagacgg

SEQ ID NO: 203421 - DNA, 55 bp, Artificial
  Synthetic oligonucleotide
ctgcaatgcgcaatccccttcgcagccttgtcacacgacccgctgacaagccgtc

SEQ ID NO: 203422 - DNA, 55 bp, Artificial
  Synthetic oligonucleotide
ctccctttcgggattgccgaaccgcgagtcacgcatgggaaatgtcctccgaagt

SEQ ID NO: 203423 - DNA, 55 bp, Artificial
  Synthetic oligonucleotide
ctcgattagcgtgagatttacttcaagatcatagacaaactatgctcgatctttg

SEQ ID NO: 203424 - DNA, 55 bp, Artificial
  Synthetic oligonucleotide
gggcgcccatcttcctgaaaagatgtcctttactgaataagcggtgggactcggg

SEQ ID NO: 203425 - DNA, 60 bp, Artificial
  Synthetic oligonucleotide
ccgcagtccacgatgcggtcattcaccttttggtacagaccgacatccgcaaggtctgac

SEQ ID NO: 203426 - DNA, 55 bp, Artificial
  Synthetic oligonucleotide
ctcggcgcatgataggcgcaagatagaagtctgattcaacgcttggcggggcctt

SEQ ID NO: 203427 - DNA, 55 bp, Artificial
  Synthetic oligonucleotide
ctcataaccacatcctccgatgagcaacgtgactacaagggacgccggacatcgg

SEQ ID NO: 203428 - DNA, 55 bp, Artificial
  Synthetic oligonucleotide
ctcgtatgtgtcagagtacgcagggagcgttgaaaggcagtaatcgaacgggctt

SEQ ID NO: 203429 - DNA, 55 bp, Artificial
  Synthetic oligonucleotide
ctcagcatcttggaggcgaataagagcaccgaccgaggttcgtaggagaaggggc

SEQ ID NO: 203430 - DNA, 55 bp, Artificial
  Synthetic oligonucleotide
gggctttggtcgcggtaagcttacataattggggcagaaccatgctcgacgggct

SEQ ID NO: 203431 - DNA, 55 bp, Artificial
  Synthetic oligonucleotide
ctcgtctccaaatcgcttggttgccctgatggtttggagaagccaagcgacaagc

SEQ ID NO: 203432 - DNA, 55 bp, Artificial
  Synthetic oligonucleotide
ggggcaggttcacttcgtctggtagtcaccgcccttgcaacggccgggctcttgg

SEQ ID NO: 203433 - DNA, 55 bp, Artificial
  Synthetic oligonucleotide
ctctaccgtatctggcgccactcgaaacagaatggtcgacatcgtggtacggcgt

SEQ ID NO: 203434 - DNA, 55 bp, Artificial
  Synthetic oligonucleotide
gggagctatgactttgagaagacagaaaacggccccgcatacggcgagacttcgg

SEQ ID NO: 203435 - DNA, 55 bp, Artificial
  Synthetic oligonucleotide
aacgctggatatacggcaacgacgcagcttagtccggggttcaagcgcgggaggc

SEQ ID NO: 203436 - DNA, 60 bp, Artificial
  Synthetic oligonucleotide
ccgaccatgtgttcgcgctatgtcatctgcttgggttccggttcgcgccgcgtatcccga

SEQ ID NO: 203437 - DNA, 50 bp, Artificial
  Synthetic oligonucleotide
aacgtctgggtcgggtggaggggcctgtcgcaaacccggacggcccttcg

SEQ ID NO: 203438 - DNA, 55 bp, Artificial
  Synthetic oligonucleotide
ctgaatgcgtgttccttggccgcgtcatcgtagaagtcgagcgaatcctcatcca

SEQ ID NO: 203439 - DNA, 55 bp, Artificial
  Synthetic oligonucleotide
ctcacccgttcagagtcggttcgactgatggctcagatggcgcgaggtccaactc

SEQ ID NO: 203440 - DNA, 54 bp, Artificial
  Synthetic oligonucleotide
ctcaaccttagtcccaacgcatcaaaccgttactcggacgggctcctagtgtgg

SEQ ID NO: 203441 - DNA, 55 bp, Artificial
  Synthetic oligonucleotide
ctcaaccgtgcgcacgcggcccgctgtggctaaccgacctgccgtttcaagctta

SEQ ID NO: 203442 - DNA, 55 bp, Artificial
  Synthetic oligonucleotide
ggggtaactcttctgatactgtgagttgctcgtttgcatagttggagttctgctg

SEQ ID NO: 203443 - DNA, 55 bp, Artificial
  Synthetic oligonucleotide
ggaactgcccatagtaggcaggttccccgtcacgccaagtccggacccaagagct

SEQ ID NO: 203444 - DNA, 55 bp, Artificial
  Synthetic oligonucleotide
ctatccgaccctggtaccggcagctcacgcttgggagcctgcaccttggatggat

SEQ ID NO: 203445 - DNA, 55 bp, Artificial
  Synthetic oligonucleotide
ggtctgatctgacacccgaccgagacgaagcgacaacgaggaccgtgcgatgacc

SEQ ID NO: 203446 - DNA, 55 bp, Artificial
  Synthetic oligonucleotide
ggtctgccatcctgcgcaacgatcttgatttgatcatcaaccttcgtggaaacag

SEQ ID NO: 203447 - DNA, 58 bp, Artificial
  Synthetic oligonucleotide
gtcggtatcgcaaggcaaatacaagtccgattacgcggggtacgattatgagcgcaat

SEQ ID NO: 203448 - DNA, 55 bp, Artificial
  Synthetic oligonucleotide
gctgcgggagaggctcgcctcataccagccttgacataggtctcctcatgcgagg

SEQ ID NO: 203449 - DNA, 55 bp, Artificial
  Synthetic oligonucleotide
ttagatatgcaggtcgatctgagggcgggagggtgcgctagagcggggtccgagc

SEQ ID NO: 203450 - DNA, 55 bp, Artificial
  Synthetic oligonucleotide
ggtgatcgtgcgacgcgcagacatggcggcatccaatcagggcgaagacgtatgc

SEQ ID NO: 203451 - DNA, 55 bp, Artificial
  Synthetic oligonucleotide
cggccctctggaaagtgttctaaagcatttaggttggccgcgactggcacccatg

SEQ ID NO: 203452 - DNA, 55 bp, Artificial
  Synthetic oligonucleotide
cggccctagcctgcaccgattgtcaacgggcttcgaaccttccgcaatttcgggc

SEQ ID NO: 203453 - DNA, 55 bp, Artificial
  Synthetic oligonucleotide
cggcatcagcgtgccttctacttgcgtccatacggacagcagacgcgtgacggca

SEQ ID NO: 203454 - DNA, 55 bp, Artificial
  Synthetic oligonucleotide
gctttaggtcgtcatcaagtgcagtctgccgccggtcttcgtgtgtattcagcac

SEQ ID NO: 203455 - DNA, 55 bp, Artificial
  Synthetic oligonucleotide
ggtgcgcatgctgaagtttgttacgcgcctccacggcgcacatttcttcacacgc

SEQ ID NO: 203456 - DNA, 55 bp, Artificial
  Synthetic oligonucleotide
aagcgaagccaattcggcagccaccttactgtggtctgttcggctccagagttgg

SEQ ID NO: 203457 - DNA, 55 bp, Artificial
  Synthetic oligonucleotide
cggatcgtggctcgtttcgaagtgctcacgataaggagaacgcctagccggctca

SEQ ID NO: 203458 - DNA, 60 bp, Artificial
  Synthetic oligonucleotide
cacggggtgcggctctctagttgtctggatgcgagacctccttggcgtctgcgaccacct

SEQ ID NO: 203459 - DNA, 59 bp, Artificial
  Synthetic oligonucleotide
ccccgcaagccgtagtgccggcaagccgcgttgcctgtcctccgccatccctgcaagcc

SEQ ID NO: 203460 - DNA, 55 bp, Artificial
  Synthetic oligonucleotide
ggtggctcatttgaatgcgcgcctcgacgaaggctcacagctcctaaacggtgcc

SEQ ID NO: 203461 - DNA, 55 bp, Artificial
  Synthetic oligonucleotide
gctgtaacagctacgggcttgacccaaagcatatcattggcattgaattgcgaac

SEQ ID NO: 203462 - DNA, 55 bp, Artificial
  Synthetic oligonucleotide
cggagtaccagcgtgacttacccatccggcttccaaccctcgcccatcgacggaa

SEQ ID NO: 203463 - DNA, 55 bp, Artificial
  Synthetic oligonucleotide
gctgtcgcccggctgcgatagcatcgtctgatcaacttgcatagacccgcaatcg

SEQ ID NO: 203464 - DNA, 54 bp, Artificial
  Synthetic oligonucleotide
cggaaacaggttctctttccggggaggagcaggcgggttcgttgcgccaagcta

SEQ ID NO: 203465 - DNA, 55 bp, Artificial
  Synthetic oligonucleotide
cgctattccggaaatttagactaggttcgacttagcggcagggatgcagtgtccc

SEQ ID NO: 203466 - DNA, 55 bp, Artificial
  Synthetic oligonucleotide
gcttgctaggtgttcaaaaccgggctcataatcggcgacaaacttaggtattggc

SEQ ID NO: 203467 - DNA, 55 bp, Artificial
  Synthetic oligonucleotide
gcttgttagatgcctccgaagccattctatcattagtcaactccgcaccagcgcg

SEQ ID NO: 203468 - DNA, 55 bp, Artificial
  Synthetic oligonucleotide
gcttggctcgagccggcatcctctcgggatcggctcgtctcgcggcatgggcgtg

SEQ ID NO: 203469 - DNA, 55 bp, Artificial
  Synthetic oligonucleotide
cgcgttgttgtaaccgcactgatccaacttgccgtcgcctgtgtattattcccgc

SEQ ID NO: 203470 - DNA, 53 bp, Artificial
  Synthetic oligonucleotide
gtctacctctaggccggtaatcaagctccgtaccctacccaccgaacacgtcc

SEQ ID NO: 203471 - DNA, 55 bp, Artificial
  Synthetic oligonucleotide
cgcgtgtactgcgtccttcggcatgaggggtgtgaaacactcgaatgaaatccgg

SEQ ID NO: 203472 - DNA, 50 bp, Artificial
  Synthetic oligonucleotide
ggttggttctccgcgtcgttcggaccctacaggcggtttacgggcgggaa

SEQ ID NO: 203473 - DNA, 55 bp, Artificial
  Synthetic oligonucleotide
cgcgcgtgttatggcctggatgcatgagcattcccacactgacgatgagtcgtgc

SEQ ID NO: 203474 - DNA, 54 bp, Artificial
  Synthetic oligonucleotide
ttaccccgtcctccgacaggtcggtccctcgttcatcgcctcgttcacattcgg

SEQ ID NO: 203475 - DNA, 55 bp, Artificial
  Synthetic oligonucleotide
cgcgacaacacgcacgaccaatcgcccgaggatcgcgagagaccgatgacgcaag

SEQ ID NO: 203476 - DNA, 55 bp, Artificial
  Synthetic oligonucleotide
cgccttcctatgccaggaagtctggcgcggaccacaggttgagatattgttcaga

SEQ ID NO: 203477 - DNA, 55 bp, Artificial
  Synthetic oligonucleotide
cgcctggcacgaatgtttacggctcgtacaacagcattaccgatcggagccccaa

SEQ ID NO: 203478 - DNA, 55 bp, Artificial
  Synthetic oligonucleotide
aagagtaacagtggacacgctaaagaaactcggatcttcagtcggcctagagtct

SEQ ID NO: 203479 - DNA, 55 bp, Artificial
  Synthetic oligonucleotide
cgttaactcaaaatttgcggtcggcttatagatgtttatagagatcgtgactctg

SEQ ID NO: 203480 - DNA, 55 bp, Artificial
  Synthetic oligonucleotide
cgtgtccctcgccgcagagctataaaatccgcacaacggttctatgaattatacc

SEQ ID NO: 203481 - DNA, 59 bp, Artificial
  Synthetic oligonucleotide
ccatcagtcagcccaaatcgtctacccacacaaactaatctctcccgccgacttacatc

SEQ ID NO: 203482 - DNA, 55 bp, Artificial
  Synthetic oligonucleotide
cgtggttgttcctgacgtaggcgctcacgagagtggccgtcatgcgtccgtagtc

SEQ ID NO: 203483 - DNA, 55 bp, Artificial
  Synthetic oligonucleotide
cgtggatctgaaaagtgtttgcgaacaagctaagcccgttcactccagcaagctt

SEQ ID NO: 203484 - DNA, 55 bp, Artificial
  Synthetic oligonucleotide
gggtgaaggcaattcgtctcggaacggtctagatctgctcagcctagcgtctcag

SEQ ID NO: 203485 - DNA, 55 bp, Artificial
  Synthetic oligonucleotide
gggtgtacactgaccaatcctgatagatgccgggagcggtctgacacaaggggca

SEQ ID NO: 203486 - DNA, 55 bp, Artificial
  Synthetic oligonucleotide
cgtccgagatgcgtcgggcgatctcattgggctcgttaagcggtacgttcgtacc

SEQ ID NO: 203487 - DNA, 55 bp, Artificial
  Synthetic oligonucleotide
cgtcatgccgcagagtgagcgggaccatacccggaatggttgtttgagcgcaacc

SEQ ID NO: 203488 - DNA, 55 bp, Artificial
  Synthetic oligonucleotide
gctctcgtgagatagcacgttcgagcgtcagaaaacgtaagtagaaaatgacgct

SEQ ID NO: 203489 - DNA, 55 bp, Artificial
  Synthetic oligonucleotide
cgtatgagatgctagctcttggggcattcaatattgtgtctcatcacatcgtacc

SEQ ID NO: 203490 - DNA, 55 bp, Artificial
  Synthetic oligonucleotide
gggttgtccatgcggtatagggtatactatggaagcttgacggttggctcgcgag

SEQ ID NO: 203491 - DNA, 55 bp, Artificial
  Synthetic oligonucleotide
gctctcgtgcttgatgatcgaacgtaaggcgaactgcgaccgcgcggatgcccgt

SEQ ID NO: 203492 - DNA, 60 bp, Artificial
  Synthetic oligonucleotide
ccaggcccgtcccaaccgtctgggcatctcagagcatcacgattgagatcggccgtctta

SEQ ID NO: 203493 - DNA, 55 bp, Artificial
  Synthetic oligonucleotide
cgtagcccctggtttgctacggggtgtccctaaggatggtctcgcgcgttgactc

SEQ ID NO: 203494 - DNA, 55 bp, Artificial
  Synthetic oligonucleotide
cgtagatggatgtgttcggacggattgtgacatattttgggcagcaatcgagtga

SEQ ID NO: 203495 - DNA, 55 bp, Artificial
  Synthetic oligonucleotide
ggtacatgattaccactcccatagagagcggagcgcacgaatattccacgcccac

SEQ ID NO: 203496 - DNA, 55 bp, Artificial
  Synthetic oligonucleotide
cgtaacgacattagttctacctcgtgaactgacggagttcgataacatgttgtgg

SEQ ID NO: 203497 - DNA, 55 bp, Artificial
  Synthetic oligonucleotide
ggtcccaatggtcgaacagggtcgggtgccccggccgctcccgcatcaggcagtc

SEQ ID NO: 203498 - DNA, 55 bp, Artificial
  Synthetic oligonucleotide
aagatgctggcctgttccgtacgccgagccttcggaacgtagcggtaaccgctcc

SEQ ID NO: 203499 - DNA, 55 bp, Artificial
  Synthetic oligonucleotide
gctgaaagaataggcttaggtaacgttattcgtgagagcgcgaacagagggctgg

SEQ ID NO: 203500 - DNA, 55 bp, Artificial
  Synthetic oligonucleotide
ggtccgctgtcgattaacgagcggccattccgaaggctccgatcgaaggtcggct

SEQ ID NO: 203501 - DNA, 55 bp, Artificial
  Synthetic oligonucleotide
cggtcagatcgggtgtatgaaccataagtcggaaagagttcgtggaagccccgac

SEQ ID NO: 203502 - DNA, 55 bp, Artificial
  Synthetic oligonucleotide
gctttcacgtaggcggcaagcgttgagagtttcggatcgtttcgatcctccagcc

SEQ ID NO: 203503 - DNA, 60 bp, Artificial
  Synthetic oligonucleotide
ccaagtctgaggccggcacgtggttgttcctgacgtaggcgctcacgagagtggccgtca

SEQ ID NO: 203504 - DNA, 55 bp, Artificial
  Synthetic oligonucleotide
aagcatgccgatcggaagcttagggccagccggggacctgtgggccggtaagttg

SEQ ID NO: 203505 - DNA, 53 bp, Artificial
  Synthetic oligonucleotide
ggtccggttggttcttgggtcgtagtacccgagtacacgatgtcggtagtctg

SEQ ID NO: 203506 - DNA, 55 bp, Artificial
  Synthetic oligonucleotide
cgggtcggacctcttcaatgcatctgtcgtttagttgcattacagagcgcatctc

SEQ ID NO: 203507 - DNA, 55 bp, Artificial
  Synthetic oligonucleotide
cggggctatgcggtcttgatccgacttccatttgccgggtcgcgcactcagtagt

SEQ ID NO: 203508 - DNA, 55 bp, Artificial
  Synthetic oligonucleotide
cggggcagctaaataccgaagcaaaagatcggtcaaaggctctattccagtagct

SEQ ID NO: 203509 - DNA, 55 bp, Artificial
  Synthetic oligonucleotide
ggtctaacgacgggcctgggaccatgtacggcatactcaatcatctcatgacgcg

SEQ ID NO: 203510 - DNA, 55 bp, Artificial
  Synthetic oligonucleotide
cggctttattccttatgaattgcgtatctcggccagaccaatagagatactcgct

SEQ ID NO: 203511 - DNA, 55 bp, Artificial
  Synthetic oligonucleotide
tttccgctggtgtgggctgggcgagccgtgaagaggcgatctcgattggctatgc

SEQ ID NO: 203512 - DNA, 55 bp, Artificial
  Synthetic oligonucleotide
ggatctcgtggttcccgtctgattgctggcgtaggtcgcactgttgtaagcgtag

SEQ ID NO: 203513 - DNA, 55 bp, Artificial
  Synthetic oligonucleotide
tttgacctatcgtcggactcggttgccatgagaccccacacgttgacttaggcat

SEQ ID NO: 203514 - DNA, 54 bp, Artificial
  Synthetic oligonucleotide
ccaaggggattttcgcctttcgatggcgctccctctttaagggtcgcgttcaga

SEQ ID NO: 203515 - DNA, 55 bp, Artificial
  Synthetic oligonucleotide
gccgcgaggtagtctgcccttggcttgatcttctcagagtgctgctcaagcactg

SEQ ID NO: 203516 - DNA, 55 bp, Artificial
  Synthetic oligonucleotide
gccgcgagcaataacccatttggcgcggataataacccggattcgggcccttgcg

SEQ ID NO: 203517 - DNA, 55 bp, Artificial
  Synthetic oligonucleotide
gccgagatgggaagttgtgatgcgctctattatccattctcccggtgcataggca

SEQ ID NO: 203518 - DNA, 54 bp, Artificial
  Synthetic oligonucleotide
gccgacaccggtcgacgtaggacccggcaacgggtccagttggcacaggcgggc

SEQ ID NO: 203519 - DNA, 55 bp, Artificial
  Synthetic oligonucleotide
ttgctcggcttcgtacatctcccgtgccttcgcgccgaggtccacgcgaggtggt

SEQ ID NO: 203520 - DNA, 55 bp, Artificial
  Synthetic oligonucleotide
gcccttcgagaacagaatttggagccgcgtctcgacacccggaatcccattcggg

SEQ ID NO: 203521 - DNA, 55 bp, Artificial
  Synthetic oligonucleotide
gccctgagcaggtgacaggcatccgtgcatttgccgtagccttcccattcggcga

SEQ ID NO: 203522 - DNA, 55 bp, Artificial
  Synthetic oligonucleotide
ggaaggagcgcttgaataactggtgcgtccgagtcttattggcctttatgtcgac

SEQ ID NO: 203523 - DNA, 55 bp, Artificial
  Synthetic oligonucleotide
ttgcgtgctgaaagtcgttggggagtcacgatttatgagaaccgcaattccttcg

SEQ ID NO: 203524 - DNA, 55 bp, Artificial
  Synthetic oligonucleotide
gccagcattctgcataagcgtccaggccgcgggtacggagatctgcttcatccga

SEQ ID NO: 203525 - DNA, 60 bp, Artificial
  Synthetic oligonucleotide
catctattatgcccttgtcacgcaaatagagcgtggtctgtacatacgaccgcagaaact

SEQ ID NO: 203526 - DNA, 55 bp, Artificial
  Synthetic oligonucleotide
gcggtcgttgcatctgctgaggccgccattcgtaacctgtcatcgtatctgcagg

SEQ ID NO: 203527 - DNA, 55 bp, Artificial
  Synthetic oligonucleotide
gccagaacacgaattttggaaactgaccggcgaagtttgcgagcaaataggtcat

SEQ ID NO: 203528 - DNA, 55 bp, Artificial
  Synthetic oligonucleotide
gccacccgagacaccagcaagcgacctcgaaaatatgcaatcaacgcgtgtagca

SEQ ID NO: 203529 - DNA, 55 bp, Artificial
  Synthetic oligonucleotide
ttgcgtgacgctctcccgttgatgacgtcgcacacggatgggacctcccatggtg

SEQ ID NO: 203530 - DNA, 55 bp, Artificial
  Synthetic oligonucleotide
ggcacgtgtcggcgtaccagctcctgtaatactcctcatcgaaacccgggagcgg

SEQ ID NO: 203531 - DNA, 55 bp, Artificial
  Synthetic oligonucleotide
gcattgtttgaaacacttaatgagagaggaatagagctttcaattctcgacctcc

SEQ ID NO: 203532 - DNA, 53 bp, Artificial
  Synthetic oligonucleotide
gcatgagcgaaacacccgggaggttcgggagggacgtgttcctcccgattggg

SEQ ID NO: 203533 - DNA, 55 bp, Artificial
  Synthetic oligonucleotide
gcggtgtctattcaacgagttgcattcgagtaacaagctcggcttctatctccga

SEQ ID NO: 203534 - DNA, 55 bp, Artificial
  Synthetic oligonucleotide
ttgcccttgcgtccgctcagtggaaccataacttagaatcagcagttgggaccgg

SEQ ID NO: 203535 - DNA, 55 bp, Artificial
  Synthetic oligonucleotide
ggaagcactggatctacggcgcagggtgtgcgtagacgtggtgagccgaggtaga

SEQ ID NO: 203536 - DNA, 60 bp, Artificial
  Synthetic oligonucleotide
gtgcatgtgatccagcgacaactcaaaaacacggacggcattggttagagcaataaacgt

SEQ ID NO: 203537 - DNA, 55 bp, Artificial
  Synthetic oligonucleotide
gcaggtcatggtgaacggatcgttaccgctcacgcccgcggatagacgatgaccg

SEQ ID NO: 203538 - DNA, 55 bp, Artificial
  Synthetic oligonucleotide
gcgtctaacccttgctggcctggaccgataaacggatccttagttcaaaattgtg

SEQ ID NO: 203539 - DNA, 55 bp, Artificial
  Synthetic oligonucleotide
gcagcagtggcgccccagggttgagactgcccgtaagtactacacattcccgtgg

SEQ ID NO: 203540 - DNA, 55 bp, Artificial
  Synthetic oligonucleotide
gcggaaaaccacccttctcggtcgtaggtccttgcctcaccacacggcctgcaag

SEQ ID NO: 203541 - DNA, 55 bp, Artificial
  Synthetic oligonucleotide
gcgcttcatagcggtgctcctcgcaacaacccttataggccgtcgtcaggttgtc

SEQ ID NO: 203542 - DNA, 55 bp, Artificial
  Synthetic oligonucleotide
gcgctgtagttggtactcgcgtgccgtgtcagtagatccggctgcgtcacgagag

SEQ ID NO: 203543 - DNA, 55 bp, Artificial
  Synthetic oligonucleotide
gcgcggtcaacagtatcgatatgagccttgagagctgcatccgtcgtcgaattgc

SEQ ID NO: 203544 - DNA, 55 bp, Artificial
  Synthetic oligonucleotide
gcgcggacttggtttcgtactcgaagggatagatggcagtcacccgcatgccagg

SEQ ID NO: 203545 - DNA, 55 bp, Artificial
  Synthetic oligonucleotide
gcgcgctgaaataatttggcggagttgtcgtgatattcgcagcctctccgggagt

SEQ ID NO: 203546 - DNA, 55 bp, Artificial
  Synthetic oligonucleotide
gcgcgcaacgctccttctcaggatgtaacgcgcagtctgaccgatcgtttacgtc

SEQ ID NO: 203547 - DNA, 60 bp, Artificial
  Synthetic oligonucleotide
cagggggggctagatcaaccccagacgccaacatccgctctcgcacgcttagacaatcga

SEQ ID NO: 203548 - DNA, 55 bp, Artificial
  Synthetic oligonucleotide
gcgcccgcgaagaagcggtataactcgtagcctcaagcctctcggtccttggacc

SEQ ID NO: 203549 - DNA, 55 bp, Artificial
  Synthetic oligonucleotide
gcgcccgacacagcagtgtagtgtttgtcgcggaacgtcaacaggaattctcgca

SEQ ID NO: 203550 - DNA, 55 bp, Artificial
  Synthetic oligonucleotide
gcgccagttggattaggtaaggtcttggctatgacaagacagcggtagcgcggtg

SEQ ID NO: 203551 - DNA, 55 bp, Artificial
  Synthetic oligonucleotide
ggacgcctcctttcaggagagcgatatgatttcaggaactagccttcccagttgc

SEQ ID NO: 203552 - DNA, 55 bp, Artificial
  Synthetic oligonucleotide
ggagagacggaactcatagaccctctcacccgatgtcgaggccaatctacatcca

SEQ ID NO: 203553 - DNA, 55 bp, Artificial
  Synthetic oligonucleotide
ggagcctcgacctgtcaaacgcgtcgctgtgacaaagaccttcgatccaccgacc

SEQ ID NO: 203554 - DNA, 55 bp, Artificial
  Synthetic oligonucleotide
gcgagcaacacgcggactaacccgacatttcgtgaaattagaggtgctctcgacg

SEQ ID NO: 203555 - DNA, 55 bp, Artificial
  Synthetic oligonucleotide
gcgagaccaagcgaagggtcatgatcctggtgtcgcgattcgaccactgcctcgt

SEQ ID NO: 203556 - DNA, 55 bp, Artificial
  Synthetic oligonucleotide
ggagtcgcgtccatatctgtctcctccgggctacttggttgttatcgcgtcaacg

SEQ ID NO: 203557 - DNA, 55 bp, Artificial
  Synthetic oligonucleotide
ggagttgtacaacggttatggttgtcgtcaggtcgcgacgcatcccagctgcacc

SEQ ID NO: 203558 - DNA, 60 bp, Artificial
  Synthetic oligonucleotide
cagctcccgcgctcaaatcttctctagtcctggaagtctcattgcgcgtggcgaattttt

SEQ ID NO: 203559 - DNA, 55 bp, Artificial
  Synthetic oligonucleotide
ggagtttatcgagaaggatattggctagggctgcagtcagaaggcggtccgatcg

SEQ ID NO: 203560 - DNA, 55 bp, Artificial
  Synthetic oligonucleotide
gcgaatgataacgtgaacacaagtcgaagctgacccgtggcacagtctgcaacga

SEQ ID NO: 203561 - DNA, 55 bp, Artificial
  Synthetic oligonucleotide
gcgaacaaagcgtgaaagagggaccgagtagacccttctgcggcctgtacccgag

SEQ ID NO: 203562 - DNA, 55 bp, Artificial
  Synthetic oligonucleotide
gcggacctctgagacgagcaaaggggctttcgtgaggcaaaggccggtcgatcag

SEQ ID NO: 203563 - DNA, 55 bp, Artificial
  Synthetic oligonucleotide
ggatatgaccatccggcttcggcaccaagacgcaagccgattacatccgtgccgt

SEQ ID NO: 203564 - DNA, 55 bp, Artificial
  Synthetic oligonucleotide
gcctgcttcgccagtggtaagatcgacaccatcgatgtccaatgaagcgctatcg

SEQ ID NO: 203565 - DNA, 55 bp, Artificial
  Synthetic oligonucleotide
gcctgcgggatcgttctgttcgggacatcgcgctcactgatcgaaagtgcgattt

SEQ ID NO: 203566 - DNA, 55 bp, Artificial
  Synthetic oligonucleotide
gcctgaacactccctgcgagcaaagcatacgtgcatacacctaaacgagttgggg

SEQ ID NO: 203567 - DNA, 55 bp, Artificial
  Synthetic oligonucleotide
gcctcttctcgccgtgttggatatgtacggcgcgccacttgttcgtgcgcagagc

SEQ ID NO: 203568 - DNA, 55 bp, Artificial
  Synthetic oligonucleotide
ggatcaaacctcgacccaggaacatgacgtctagaaccacgaccttaggccgacc

SEQ ID NO: 203569 - DNA, 60 bp, Artificial
  Synthetic oligonucleotide
gtggtcgcagacgccaaggaggtctcgcatccagacaactagtgcagtgactcagacgga

SEQ ID NO: 203570 - DNA, 60 bp, Artificial
  Synthetic oligonucleotide
cagaggccacgacgcgccgtgagtgggttccgggtctcaggtgtgatcatgcatgtgaga

SEQ ID NO: 203571 - DNA, 55 bp, Artificial
  Synthetic oligonucleotide
gcggcgctgtatcgcctgagagaatattcaggatgcaggaccaggcgtaggcctc

SEQ ID NO: 203572 - DNA, 55 bp, Artificial
  Synthetic oligonucleotide
gagaaacaggaacgcaagcggaaaggaaagggttaggccatgtctgacgctcgcc

SEQ ID NO: 203573 - DNA, 55 bp, Artificial
  Synthetic oligonucleotide
gcgttccgcagagactcgatatactttccggagatgaaacaggcgctgaagtatg

SEQ ID NO: 203574 - DNA, 55 bp, Artificial
  Synthetic oligonucleotide
ttcggcccgccgcgccatttcctgttcagttccccaggcagtgtgaggcgtccca

SEQ ID NO: 203575 - DNA, 55 bp, Artificial
  Synthetic oligonucleotide
ggcgcggagggactacgcatcaaacgcaacggattagcctttagggtcgtcaatg

SEQ ID NO: 203576 - DNA, 55 bp, Artificial
  Synthetic oligonucleotide
gacatgaagggctcgacttcgggtttcttgaacggcgcaatagtcctgccggtca

SEQ ID NO: 203577 - DNA, 55 bp, Artificial
  Synthetic oligonucleotide
gaaggcggaatgccgcttatccgtgtcacggtgagacaaccccgatcaggctggt

SEQ ID NO: 203578 - DNA, 55 bp, Artificial
  Synthetic oligonucleotide
gaagcttatcacttggaagaacgctcattcaaggggtgcgctgagatcggtatcg

SEQ ID NO: 203579 - DNA, 55 bp, Artificial
  Synthetic oligonucleotide
ggcggatggttcgaagctttagaactgggcgactactcctgaactaaaatcggga

SEQ ID NO: 203580 - DNA, 55 bp, Artificial
  Synthetic oligonucleotide
ggcggcagttatcaagcgcttaatcggcttcaaagcgggaacgcgatggtgggcg

SEQ ID NO: 203581 - DNA, 60 bp, Artificial
  Synthetic oligonucleotide
taggcagagtcatgccacctctttctttcgcgaaaaaggcgcatcgttgccgatgcgcct

SEQ ID NO: 203582 - DNA, 55 bp, Artificial
  Synthetic oligonucleotide
ggctccaacttaaacgcgacgttcatagtgtagccccgttatgacgatgaaaggg

SEQ ID NO: 203583 - DNA, 55 bp, Artificial
  Synthetic oligonucleotide
gaaacatacttgtacgaagatccggactacggaaatctaatcaccggaatagttg

SEQ ID NO: 203584 - DNA, 55 bp, Artificial
  Synthetic oligonucleotide
ggctccgacaatataatggatctctgctgtacccaggctccccaaactaactgtc

SEQ ID NO: 203585 - DNA, 53 bp, Artificial
  Synthetic oligonucleotide
ctttgccttaccgccgggtttggggcatggttagagccattcgaacctaggtc

SEQ ID NO: 203586 - DNA, 55 bp, Artificial
  Synthetic oligonucleotide
ctttctgtcgaagatttcgcaacgggactcgggaggcctttgtcttctacgtcgc

SEQ ID NO: 203587 - DNA, 55 bp, Artificial
  Synthetic oligonucleotide
cttgtacttgcgaccgcctcgctcaaatacgtcgccgctccaggatgatcgtcgc

SEQ ID NO: 203588 - DNA, 55 bp, Artificial
  Synthetic oligonucleotide
cttcttcgggcacctgaccggaaccctcgtcctgacatctcgcaaatgggatggc

SEQ ID NO: 203589 - DNA, 55 bp, Artificial
  Synthetic oligonucleotide
ggctccgttcgaggtgagcttgtgaggccgcagctcggcgactgtccgcaggggt

SEQ ID NO: 203590 - DNA, 55 bp, Artificial
  Synthetic oligonucleotide
cttccgcttcgctcgattctgacaaggttagaactttagtacgcgtgcggttcgg

SEQ ID NO: 203591 - DNA, 55 bp, Artificial
  Synthetic oligonucleotide
cttcaatggcgtgagcatctgaattgccgatggtacccacatgtagcgggaagac

SEQ ID NO: 203592 - DNA, 59 bp, Artificial
  Synthetic oligonucleotide
tagggccgctcaggtggcctgggccactcacacattcggagagcccttctttggccgcc

SEQ ID NO: 203593 - DNA, 55 bp, Artificial
  Synthetic oligonucleotide
cttatggctggaccgctcgttggcagcgttaccgcactttgtgcggctctcttcc

SEQ ID NO: 203594 - DNA, 55 bp, Artificial
  Synthetic oligonucleotide
tttgacggtttcgcgttcgcttgcagcgtcggaacgagttcgatgagagtcggga

SEQ ID NO: 203595 - DNA, 55 bp, Artificial
  Synthetic oligonucleotide
ggctcgacggattgacccgatgaaggcttggttcgccctcctgatccgccgtcgt

SEQ ID NO: 203596 - DNA, 55 bp, Artificial
  Synthetic oligonucleotide
ggctggccgaacgggatcacaccggccatggaacgggctttcttgtgcaggttgt

SEQ ID NO: 203597 - DNA, 53 bp, Artificial
  Synthetic oligonucleotide
ctggcgacccggaccgttcctggggtctgaaatactgacacggttagtggacc

SEQ ID NO: 203598 - DNA, 55 bp, Artificial
  Synthetic oligonucleotide
aacgagagataggagggcgtccacgactgcttcggtcacggcaggctgaaccggt

SEQ ID NO: 203599 - DNA, 52 bp, Artificial
  Synthetic oligonucleotide
gggaccccggttcggggccagaatgtcgacgcggtacttcgtaccaagagcg

SEQ ID NO: 203600 - DNA, 55 bp, Artificial
  Synthetic oligonucleotide
ttgcccaccgacgagggccgggacgcaaaggctctcgatcaggagcggcatgtag

SEQ ID NO: 203601 - DNA, 55 bp, Artificial
  Synthetic oligonucleotide
gcactactgtcgcaatggggctgtaaccgggagcaactggtcaacatcgcagcac

SEQ ID NO: 203602 - DNA, 55 bp, Artificial
  Synthetic oligonucleotide
gcacgttggtcggcgaattctctgccagcatcgtgccgtaatggaggttggccgt

SEQ ID NO: 203603 - DNA, 58 bp, Artificial
  Synthetic oligonucleotide
tagttcggagaaattccccatactcaggtacaggtggataaaccatggatcgcctgag

SEQ ID NO: 203604 - DNA, 55 bp, Artificial
  Synthetic oligonucleotide
ttgcaatgacttagaccgaaaccatggcaatacacggctccctgctgcgacatgg

SEQ ID NO: 203605 - DNA, 55 bp, Artificial
  Synthetic oligonucleotide
gcaccctgcgacataaccacctccgtctgcgcagagagcctaattctcgctgact

SEQ ID NO: 203606 - DNA, 55 bp, Artificial
  Synthetic oligonucleotide
ggcccgaccgatggtggtcctcggggatatgccggccgacgccaaactggcaaaa

SEQ ID NO: 203607 - DNA, 55 bp, Artificial
  Synthetic oligonucleotide
ttgatccacggagacgccatgtccgcctctcgagacgatacgatcggtatcgcac

SEQ ID NO: 203608 - DNA, 55 bp, Artificial
  Synthetic oligonucleotide
ggccgacgtcatgacaaccctcgcttaagtcgagctaagtcttggtcggcgactc

SEQ ID NO: 203609 - DNA, 55 bp, Artificial
  Synthetic oligonucleotide
gcaagccgcgttgcctgtcctccgccatccctgcaagcctgagaaccgcgaacca

SEQ ID NO: 203610 - DNA, 55 bp, Artificial
  Synthetic oligonucleotide
gattacatggcaagtcgtggccgagagcacacaaagatgcttctgtccagtctag

SEQ ID NO: 203611 - DNA, 55 bp, Artificial
  Synthetic oligonucleotide
gcgtgctctctcgatctcggacgcgcgtctcagtcggcggaattacctctactcg

SEQ ID NO: 203612 - DNA, 55 bp, Artificial
  Synthetic oligonucleotide
ggccgcttatcgtatattttcagtcatgaacagtcgcggtttggacctcactgcg

SEQ ID NO: 203613 - DNA, 55 bp, Artificial
  Synthetic oligonucleotide
aacatcgctagccgtcccgcctcttatagtatcattaccgtcgtctccagatata

SEQ ID NO: 203614 - DNA, 54 bp, Artificial
  Synthetic oligonucleotide
tatatccctcgaggggccaaaaaaatagacgtggcgtatatttttgtcgcgacg

SEQ ID NO: 203615 - DNA, 55 bp, Artificial
  Synthetic oligonucleotide
ggccggacggaccctcacaatcagcgacgaacaatgaagggacccgatagggtcc

SEQ ID NO: 203616 - DNA, 55 bp, Artificial
  Synthetic oligonucleotide
ggccggcaatccaactgctatcagaaggctagctgagaatactcgaggtgatgca

SEQ ID NO: 203617 - DNA, 55 bp, Artificial
  Synthetic oligonucleotide
gagtgggccagagtgacctggcgttcgactcaagactcgcaacgagtttgggatc

SEQ ID NO: 203618 - DNA, 55 bp, Artificial
  Synthetic oligonucleotide
gaggcaaactggcaacgcgacgatcatcgacgtcacgccagaggatagcccgtac

SEQ ID NO: 203619 - DNA, 55 bp, Artificial
  Synthetic oligonucleotide
gcgtgtaatggatatgcatctccgcagcgttcccggcttcctcgacgttgccggc

SEQ ID NO: 203620 - DNA, 55 bp, Artificial
  Synthetic oligonucleotide
ggccgtgtccagaagaaggttcgggcctcgttgatcatcacaccccattctgggg

SEQ ID NO: 203621 - DNA, 54 bp, Artificial
  Synthetic oligonucleotide
ttctcacgggtcggggaactggacttgcggtaccttccctacagcgagttgcgg

SEQ ID NO: 203622 - DNA, 55 bp, Artificial
  Synthetic oligonucleotide
gagcattagcacgcacagatctcttgtagcgagcaattagtgcattcgccctgcg

SEQ ID NO: 203623 - DNA, 55 bp, Artificial
  Synthetic oligonucleotide
gagcagttttcggacatatgatttcatggcgtagttttctgacatcagccgcccc

SEQ ID NO: 203624 - DNA, 55 bp, Artificial
  Synthetic oligonucleotide
gagatggtagatcgccaaacggccaggctccgaacaagcttgaccttatctcgcg

SEQ ID NO: 203625 - DNA, 60 bp, Artificial
  Synthetic oligonucleotide
tatggacctctcccacatgcacacgccatcgcacacgcacgtccaactcctcgacatggg

SEQ ID NO: 203626 - DNA, 54 bp, Artificial
  Synthetic oligonucleotide
aaccgacaaagctatgcggcggacgcaagcgggtgttcgttagggcggacacgg

SEQ ID NO: 203627 - DNA, 55 bp, Artificial
  Synthetic oligonucleotide
gagaaccattgtaagttcctccgtgaaggcgaaatcatacacgagagtgaggcag

SEQ ID NO: 203628 - DNA, 55 bp, Artificial
  Synthetic oligonucleotide
accggcagtacaattttgggttgcaaaagcgcgcgtccgtagtgattaccgagcc

SEQ ID NO: 203629 - DNA, 55 bp, Artificial
  Synthetic oligonucleotide
atgtcatctgcttgggttccggttcgcgccgcgtatcccgaatatcgccgcacgc

SEQ ID NO: 203630 - DNA, 55 bp, Artificial
  Synthetic oligonucleotide
tgccgcaattacggattgttaatccaaccgacagaaactccacccgggctcgctt

SEQ ID NO: 203631 - DNA, 55 bp, Artificial
  Synthetic oligonucleotide
atgggaggggtgggccagggcggcatgtgtggaatgatgggccacatgatgggcg

SEQ ID NO: 203632 - DNA, 55 bp, Artificial
  Synthetic oligonucleotide
gttttcagacctcgaacgatggatttagcgcggggaggatcgagaagcggtccgc

SEQ ID NO: 203633 - DNA, 52 bp, Artificial
  Synthetic oligonucleotide
accttaacccctgaacgcggccgaatggccaaggttcatttacggctacgct

SEQ ID NO: 203634 - DNA, 55 bp, Artificial
  Synthetic oligonucleotide
tgcatggcgaccaagggcttcgcaacgtaccaggcttggccaacgtcgcatggct

SEQ ID NO: 203635 - DNA, 55 bp, Artificial
  Synthetic oligonucleotide
atctgtgtttggtagctgacctcgaacgttgcacagaagctacggattggccgga

SEQ ID NO: 203636 - DNA, 57 bp, Artificial
  Synthetic oligonucleotide
tatttcgcttcgctttttgggagctatgactttgagaagacagaaaacggccccgca

SEQ ID NO: 203637 - DNA, 55 bp, Artificial
  Synthetic oligonucleotide
atctcgtgcaagcaacgctcggccacgcatctgtggcgacgacaggccggtatct

SEQ ID NO: 203638 - DNA, 55 bp, Artificial
  Synthetic oligonucleotide
atctcgcacgagcgccttgcgacgttcgtcgccatagcggggacagaccgggatg

SEQ ID NO: 203639 - DNA, 55 bp, Artificial
  Synthetic oligonucleotide
acgaaattcggcgcggggagcgaatcatcaatttccccggaaggccacacaagcc

SEQ ID NO: 203640 - DNA, 55 bp, Artificial
  Synthetic oligonucleotide
tgcaggtgagactacatcccctgccgcgccgaaccgagccgtatcaccatagacg

SEQ ID NO: 203641 - DNA, 55 bp, Artificial
  Synthetic oligonucleotide
acgaaccgtgactcaggcggatcattgctacaatccactggcgaactgcgaccga

SEQ ID NO: 203642 - DNA, 55 bp, Artificial
  Synthetic oligonucleotide
taagcaagagccgtcgaggccacgcatctcggctgcttaccgtggccccggccag

SEQ ID NO: 203643 - DNA, 55 bp, Artificial
  Synthetic oligonucleotide
taagccccgccattgtctcggtgatcgactggatttctttgtcgaggccggtaat

SEQ ID NO: 203644 - DNA, 55 bp, Artificial
  Synthetic oligonucleotide
taagcggaagctgagcctctcggggtcagataaggcagtcacacctgccacgccc

SEQ ID NO: 203645 - DNA, 55 bp, Artificial
  Synthetic oligonucleotide
taatgtgtacgcgacgaccaaggctctcggattcgacatcgattatcgaaagctg

SEQ ID NO: 203646 - DNA, 55 bp, Artificial
  Synthetic oligonucleotide
tacactctgctcactcacgataccactcgcatgcagggacgcgccggctgcacgc

SEQ ID NO: 203647 - DNA, 60 bp, Artificial
  Synthetic oligonucleotide
tcaattatgacactttgattacatggcaagtcgtggccgagagcacacaaagatgcttct

SEQ ID NO: 203648 - DNA, 53 bp, Artificial
  Synthetic oligonucleotide
atccccgtgtgtcgtcgggatcccgcaaagaatgaacccgcctcctcccggaa

SEQ ID NO: 203649 - DNA, 55 bp, Artificial
  Synthetic oligonucleotide
acgcaggaattcgcaggagagggacgctggccagagcttagccgtttcggatccc

SEQ ID NO: 203650 - DNA, 55 bp, Artificial
  Synthetic oligonucleotide
atcaatgacacgttggccgccaacctcctatgcgagccggccgacagaacccggt

SEQ ID NO: 203651 - DNA, 54 bp, Artificial
  Synthetic oligonucleotide
atatcgccagaccctccttcgggagtcaaccgaggacgccgcttctcggaacgg

SEQ ID NO: 203652 - DNA, 55 bp, Artificial
  Synthetic oligonucleotide
atatccgtatccatccgtaaattgatgaaacgaccgcggattgacgaagcgtccc

SEQ ID NO: 203653 - DNA, 55 bp, Artificial
  Synthetic oligonucleotide
atagcctcgcaggcacggcacgcgtaacgcgggcgccggatcacaatgacccgga

SEQ ID NO: 203654 - DNA, 55 bp, Artificial
  Synthetic oligonucleotide
atacggtaacgccgtcgatcagacctggctgttcgtctcgggcttcgtgagggcc

SEQ ID NO: 203655 - DNA, 55 bp, Artificial
  Synthetic oligonucleotide
taccctcagagggtcacacggaaccagttatgcctgctcaacccatccgcctcac

SEQ ID NO: 203656 - DNA, 54 bp, Artificial
  Synthetic oligonucleotide
tacgccggtttgatccaggagcgtaataccctcaggggcccgccgggctagtaa

SEQ ID NO: 203657 - DNA, 55 bp, Artificial
  Synthetic oligonucleotide
ataagcaggaacaacgcgccccagagtgccaactgtagcccaagacggtgcgggg

SEQ ID NO: 203658 - DNA, 60 bp, Artificial
  Synthetic oligonucleotide
tcacataatccgtcttgcaacgtaagctctgccaacggcgtctgcgcgggatttcgtgac

SEQ ID NO: 203659 - DNA, 53 bp, Artificial
  Synthetic oligonucleotide
accacggggttcgtgtgggtagggtgcgaccgtgtcccatcgttcggctcgta

SEQ ID NO: 203660 - DNA, 55 bp, Artificial
  Synthetic oligonucleotide
cagaatacaatgatgatcgcagtgcttcgccgccaggatgtaaatttatcgccaa

SEQ ID NO: 203661 - DNA, 55 bp, Artificial
  Synthetic oligonucleotide
cactgctttgcgctgaaaactgcaacttggtctgccgaattatgatcgctgcgtc

SEQ ID NO: 203662 - DNA, 55 bp, Artificial
  Synthetic oligonucleotide
accatgtcgctcctgctcacaccgtcggcacagcactccgacaacgcgagggtaa

SEQ ID NO: 203663 - DNA, 55 bp, Artificial
  Synthetic oligonucleotide
cacgattacggcatgtagccgctatgttctgtccctatctttggacttgttttgg

SEQ ID NO: 203664 - DNA, 54 bp, Artificial
  Synthetic oligonucleotide
acccactcgtaaggggcacggaggagttgcgatggaaacctcacggcgacccga

SEQ ID NO: 203665 - DNA, 55 bp, Artificial
  Synthetic oligonucleotide
gtggtgcctgagctcgccagcttggccgcacagggccttcgctggctcgccggtc

SEQ ID NO: 203666 - DNA, 55 bp, Artificial
  Synthetic oligonucleotide
cacctgcgttagttttgctgcacactagcgttaggagttcgtagtactaacgggg

SEQ ID NO: 203667 - DNA, 55 bp, Artificial
  Synthetic oligonucleotide
gtgtctcacgcgggcgtctcggatgggtataccccaatgaggcggtcctatcacg

SEQ ID NO: 203668 - DNA, 55 bp, Artificial
  Synthetic oligonucleotide
caccagtctgcgacccaacgacgagttctataccttgggccgataggctctcttc

SEQ ID NO: 203669 - DNA, 60 bp, Artificial
  Synthetic oligonucleotide
agccgttatgaatcgtccaatcaatgacacgttggccgccaacctcctatgcgagccggc

SEQ ID NO: 203670 - DNA, 55 bp, Artificial
  Synthetic oligonucleotide
accccaagccgcccgtttgctcagcctcgctcgtcatgcgtcctgtccagtacga

SEQ ID NO: 203671 - DNA, 55 bp, Artificial
  Synthetic oligonucleotide
gtgtgtcgccagccgtgattgggatcgacgccagggtcaagcttcacagtggctc

SEQ ID NO: 203672 - DNA, 55 bp, Artificial
  Synthetic oligonucleotide
caatcggcctccaatcaatgcacgggctacccgtgcgaatacactgtgcgcacag

SEQ ID NO: 203673 - DNA, 55 bp, Artificial
  Synthetic oligonucleotide
accccgcaggggtgggtgccatgcacgacggattgctgcccttggccaagcagct

SEQ ID NO: 203674 - DNA, 55 bp, Artificial
  Synthetic oligonucleotide
gttacgtagccacctcagatgccacagcctggaaatcagtctaggtcgaaactcc

SEQ ID NO: 203675 - DNA, 55 bp, Artificial
  Synthetic oligonucleotide
tgcggggctgacagggggcgtcctctcgatccggtcgacaagtctgacgatgtct

SEQ ID NO: 203676 - DNA, 55 bp, Artificial
  Synthetic oligonucleotide
caagcaacgggaaagttcggctatgagacgcactggactcctctcggccgccctc

SEQ ID NO: 203677 - DNA, 55 bp, Artificial
  Synthetic oligonucleotide
caagagcgagatctcgtgaagatcactctcgtggaacgactgagcgtgcctcacg

SEQ ID NO: 203678 - DNA, 55 bp, Artificial
  Synthetic oligonucleotide
caagacaagaatcgttatcttgcgtttaagatttcagacatgtctaccgccctcg

SEQ ID NO: 203679 - DNA, 55 bp, Artificial
  Synthetic oligonucleotide
caaactaggcccaccggaagcttggtcgagaaacagtccgtctaggcgatactcg

SEQ ID NO: 203680 - DNA, 56 bp, Artificial
  Synthetic oligonucleotide
caccttctaggcgtttcattagctctaagctgacgtataagaaattcccggttcca

SEQ ID NO: 203681 - DNA, 59 bp, Artificial
  Synthetic oligonucleotide
tcacctgtcgccgacacagtgacgttccctgaccggaagaccaccaatcccatggctac

SEQ ID NO: 203682 - DNA, 55 bp, Artificial
  Synthetic oligonucleotide
atttgggtcacaagactgcgcaaaagtcagtacgactatgccaatgcaatcggcg

SEQ ID NO: 203683 - DNA, 55 bp, Artificial
  Synthetic oligonucleotide
tgcgcgacttgcagagcacactattcgagacccgcacccggggagagcggatcaa

SEQ ID NO: 203684 - DNA, 55 bp, Artificial
  Synthetic oligonucleotide
gttgtaccagcgtgccaactctctgaccggcaatgaggttttaatgtagtcgcgc

SEQ ID NO: 203685 - DNA, 55 bp, Artificial
  Synthetic oligonucleotide
tgccttgtcacctgcctctgccccggtcgccaaaccggccgtgagagcacgccgg

SEQ ID NO: 203686 - DNA, 55 bp, Artificial
  Synthetic oligonucleotide
atgtcgtccgtatcgtctcgcctgagtggacgagctggctacggctcacccgcaa

SEQ ID NO: 203687 - DNA, 50 bp, Artificial
  Synthetic oligonucleotide
acgttaggaggggccggggagggagttcgcgccgagtgtcacctaaacgg

SEQ ID NO: 203688 - DNA, 55 bp, Artificial
  Synthetic oligonucleotide
tatgccgcgccgagtctaggatcaaggaaccccgcacgcataccctctccgtcga

SEQ ID NO: 203689 - DNA, 55 bp, Artificial
  Synthetic oligonucleotide
actagcttatcgtcgcctgacaacgagaccattaagccaacagttgcagaggctt

SEQ ID NO: 203690 - DNA, 55 bp, Artificial
  Synthetic oligonucleotide
agcgctacacgggtggcaggggcgagctgattgcggagtacaccgaagttgagag

SEQ ID NO: 203691 - DNA, 55 bp, Artificial
  Synthetic oligonucleotide
agcgcgaggggtcagcagtacctcaacaacgaggcgctgatctcggatacccgca

SEQ ID NO: 203692 - DNA, 60 bp, Artificial
  Synthetic oligonucleotide
agcagttaatcgcagaacggcccatttgttcacatgtcgctcctacgcagcgtgcgtacg

SEQ ID NO: 203693 - DNA, 55 bp, Artificial
  Synthetic oligonucleotide
agcgagcacattccgaccgctgatccgtagcacccctgaaatacgcgatgccggg

SEQ ID NO: 203694 - DNA, 55 bp, Artificial
  Synthetic oligonucleotide
tcaaaccgtttcctacgggatgatgatagcgctggtcggatacctgccaagcatc

SEQ ID NO: 203695 - DNA, 55 bp, Artificial
  Synthetic oligonucleotide
tgaagcacggagcaccctgcggacctgtcatcgtgccggagcctgcaattacggt

SEQ ID NO: 203696 - DNA, 55 bp, Artificial
  Synthetic oligonucleotide
agcctcaccgtgggtgtatgcgcctatcgccgtagcttcgcttgcaagactggga

SEQ ID NO: 203697 - DNA, 55 bp, Artificial
  Synthetic oligonucleotide
tcttggactgaccgatccctgcccgcgcttttcgaaaacccgtgagccgatatag

SEQ ID NO: 203698 - DNA, 55 bp, Artificial
  Synthetic oligonucleotide
tcttagcgacctccaagcgggctgtcggcgtagcaggggtccaaacctccggcgt

SEQ ID NO: 203699 - DNA, 55 bp, Artificial
  Synthetic oligonucleotide
actgacgaggacttccctccgagaatgccgctctactcgcacacgatatcgaaga

SEQ ID NO: 203700 - DNA, 55 bp, Artificial
  Synthetic oligonucleotide
agcatggctgatccgacattcgaccaagcgcggcggcaggttgaggagacgctca

SEQ ID NO: 203701 - DNA, 55 bp, Artificial
  Synthetic oligonucleotide
tcagagcctgatcctggccacgcacccgatctggatcagaacaacggaacgggcg

SEQ ID NO: 203702 - DNA, 55 bp, Artificial
  Synthetic oligonucleotide
tcagtcgttccgagggtggcaagggtcgtatacgtcgaaatgcttaggcccttcc

SEQ ID NO: 203703 - DNA, 60 bp, Artificial
  Synthetic oligonucleotide
agattagaatgctggctatcactgcgcggtaggcccccgcggagcggccgcttgcaaact

SEQ ID NO: 203704 - DNA, 55 bp, Artificial
  Synthetic oligonucleotide
tcagtgacgcagggcggagcgtccactagcgccagcaactccgtgatcgcattcg

SEQ ID NO: 203705 - DNA, 55 bp, Artificial
  Synthetic oligonucleotide
tcattcggtcacgacatagctcaggccgtcctacggcccgcgcggattctcgaga

SEQ ID NO: 203706 - DNA, 55 bp, Artificial
  Synthetic oligonucleotide
tccacagttcgcgccgggttatcccgaatcgacgcttgcacctgcctgtacaggg

SEQ ID NO: 203707 - DNA, 55 bp, Artificial
  Synthetic oligonucleotide
agatcctgtgggccgaaccgcagagctctttcactcggtggtacaggcgggacag

SEQ ID NO: 203708 - DNA, 55 bp, Artificial
  Synthetic oligonucleotide
agactcggcacaggctgttgaactacagctgaacggcgggctcgccatgtcggca

SEQ ID NO: 203709 - DNA, 55 bp, Artificial
  Synthetic oligonucleotide
tccctctagctcgttctctctgaacggatgaggggctggttacacgctcaagaaa

SEQ ID NO: 203710 - DNA, 55 bp, Artificial
  Synthetic oligonucleotide
tctctactcacggctgatgacaggacgaagtcggcgcgtccgctgttccgaacgc

SEQ ID NO: 203711 - DNA, 55 bp, Artificial
  Synthetic oligonucleotide
tctcgtagtaggtccgcgtgggtgggatgaacgtgcccggccggtagtctggatt

SEQ ID NO: 203712 - DNA, 55 bp, Artificial
  Synthetic oligonucleotide
tcgagcctccccggtcgtcgagtgtgccgcatcgaccttcacgaaagcctaatgc

SEQ ID NO: 203713 - DNA, 55 bp, Artificial
  Synthetic oligonucleotide
tcgaggcttccgcggcagccgagatttccagccaaccggaggcgtcaaaggcacc

SEQ ID NO: 203714 - DNA, 60 bp, Artificial
  Synthetic oligonucleotide
tccacgactcagcgacgaccggtgctttgactgatagccggcgcggtacgagacggcatt

SEQ ID NO: 203715 - DNA, 55 bp, Artificial
  Synthetic oligonucleotide
tcgaggtcatcacgaaccggtggaagctcggcacagataccgcgtcgatgccctt

SEQ ID NO: 203716 - DNA, 53 bp, Artificial
  Synthetic oligonucleotide
tcgctggacccggaacgctcaatccggtgccgtgacccggtttcgtggtgggt

SEQ ID NO: 203717 - DNA, 54 bp, Artificial
  Synthetic oligonucleotide
tcgtgtaaaaccaagcacttagctaagaccgttccggggctgccacctcgggac

SEQ ID NO: 203718 - DNA, 55 bp, Artificial
  Synthetic oligonucleotide
tcggtcggcttgcgtgtccaagggctgacgacggccgaaatttcgatcggcggaa

SEQ ID NO: 203719 - DNA, 53 bp, Artificial
  Synthetic oligonucleotide
agaactgcgccgccccgattgaacccgcgcttaacggttgtggtccggcaccc

SEQ ID NO: 203720 - DNA, 55 bp, Artificial
  Synthetic oligonucleotide
tgatgtgggcttcgccgttgcgcatgagggcccggttgaccaccgtgcaggtgaa

SEQ ID NO: 203721 - DNA, 55 bp, Artificial
  Synthetic oligonucleotide
tgatcgcatgtggtgcgccgtccctggcgcgactgtgcttaggttccttgcggtt

SEQ ID NO: 203722 - DNA, 53 bp, Artificial
  Synthetic oligonucleotide
agttcgccaagggtggcccgcccgcaacccacccctcgaagcgtcgcgtcgtc

SEQ ID NO: 203723 - DNA, 54 bp, Artificial
  Synthetic oligonucleotide
agttaaccttacctattcgcataagggaggcgttatgggacaggccgcctatgg

SEQ ID NO: 203724 - DNA, 55 bp, Artificial
  Synthetic oligonucleotide
agtgggcgcaacccgttgcggatgaaggcgagccaagtatgattgatctaggacc

SEQ ID NO: 203725 - DNA, 51 bp, Artificial
  Synthetic oligonucleotide
tcccagaccggaccggcggaaaaccacccttctcggtcgtaggtccttgcc

SEQ ID NO: 203726 - DNA, 55 bp, Artificial
  Synthetic oligonucleotide
agtctgcggtcggcccgccatcacgcaatcgccccaatccccgtgcggattcggc

SEQ ID NO: 203727 - DNA, 55 bp, Artificial
  Synthetic oligonucleotide
tactcacttgtcaggcgggtattgaggcgagcgagcgccggtgggatttgacggg

SEQ ID NO: 203728 - DNA, 55 bp, Artificial
  Synthetic oligonucleotide
agtcgatctaccttgtacccctcccgtggacaagatcagaaggcgggtctccgaa

SEQ ID NO: 203729 - DNA, 55 bp, Artificial
  Synthetic oligonucleotide
tactcaggtacaggtggataaaccatggatcgcctgagtggcttaggcaacctgc

SEQ ID NO: 203730 - DNA, 55 bp, Artificial
  Synthetic oligonucleotide
tactgagcacaggaacccctcgactaatcaaatacccttcggattgcttcgaatt

SEQ ID NO: 203731 - DNA, 55 bp, Artificial
  Synthetic oligonucleotide
tacttgaagtgagtaaagactgaaaccatggccctccaggacagcagtcgcccga

SEQ ID NO: 203732 - DNA, 55 bp, Artificial
  Synthetic oligonucleotide
aggtgtggtcaaatacgatcatacccatctcaaggttcgcgaaacaggtcacccc

SEQ ID NO: 203733 - DNA, 55 bp, Artificial
  Synthetic oligonucleotide
tagaaaaggggtgaaatcactccaggccagtgtcgacaactcgctagatgcgttc

SEQ ID NO: 203734 - DNA, 55 bp, Artificial
  Synthetic oligonucleotide
tagaagatatctggcccatgtctgccgggtttcgaggggaactccgttcgccctc

SEQ ID NO: 203735 - DNA, 55 bp, Artificial
  Synthetic oligonucleotide
agggttcagcacgcaagagcgttgtttaaggcgagcaacacgcggactaacccga

SEQ ID NO: 203736 - DNA, 55 bp, Artificial
  Synthetic oligonucleotide
tccgcgcagttatgaagcaggatacggtaacggaccctggtcggtcgtttgaacg

SEQ ID NO: 203737 - DNA, 55 bp, Artificial
  Synthetic oligonucleotide
tagagttctgcgtcagccccgggttcgtccctcggtgcatcgcggcaaccctccc

SEQ ID NO: 203738 - DNA, 55 bp, Artificial
  Synthetic oligonucleotide
aggctgagaaggatcttcggacctcgatagtagaccgcatggccgagcggtcccg

SEQ ID NO: 203739 - DNA, 55 bp, Artificial
  Synthetic oligonucleotide
tgacttgctctgcggccatcgcacggagccaacgagcccatgacccaggccaata

SEQ ID NO: 203740 - DNA, 55 bp, Artificial
  Synthetic oligonucleotide
tgacgccagacggcgagttgatcatcaaatgggctcgcaaggtggtaaccctttg

SEQ ID NO: 203741 - DNA, 55 bp, Artificial
  Synthetic oligonucleotide
aggcatccccggccagagggtcgcgccgcccttcaaagtccattcggcactgatg

SEQ ID NO: 203742 - DNA, 55 bp, Artificial
  Synthetic oligonucleotide
aggaacgatcatgcgccgggcgcaaatctcgccttgtccgttggggcatacccct

SEQ ID NO: 203743 - DNA, 55 bp, Artificial
  Synthetic oligonucleotide
agctggcttggcgcctttcctcgtcgcgactagtccaccacaaggcctcgctgca

SEQ ID NO: 203744 - DNA, 55 bp, Artificial
  Synthetic oligonucleotide
agctgcgtcggttcagttttcaggggatgtgacggccgcggtgaatttcactcgc

SEQ ID NO: 203745 - DNA, 53 bp, Artificial
  Synthetic oligonucleotide
taggtcccgaaccaactcccggacactatcaccctattcggcgcgaaccccaa

SEQ ID NO: 203746 - DNA, 55 bp, Artificial
  Synthetic oligonucleotide
tagtaagttaagcagagtagcgtgaggggtcatgcttcaccgccgattcacacgg

SEQ ID NO: 203747 - DNA, 59 bp, Artificial
  Synthetic oligonucleotide
tcctaggaagcgacatcccacgcgcgttaacctcgcgcttgttgatccggcaacgagac

SEQ ID NO: 203748 - DNA, 55 bp, Artificial
  Synthetic oligonucleotide
agctgaccggatcgccacaaggtaacgggctcttcccaaacccgctgcgacacgt

SEQ ID NO: 203749 - DNA, 55 bp, Artificial
  Synthetic oligonucleotide
agctctaagctgacgtataagaaattcccggttccacaagcagggtctagcactc

SEQ ID NO: 203750 - DNA, 55 bp, Artificial
  Synthetic oligonucleotide
tgaataatcctcggggaggcacacgacctcaggcccgtgagcagatttacggacg

SEQ ID NO: 203751 - DNA, 55 bp, Artificial
  Synthetic oligonucleotide
gtcgagagcgaccgtaagttctgtagcaaccttgtgggacggaggccgacatgag

SEQ ID NO: 203752 - DNA, 55 bp, Artificial
  Synthetic oligonucleotide
ccgtgggtattcgctatcgggtggaagaaagatgtcttcgggcgggacatctatg

SEQ ID NO: 203753 - DNA, 55 bp, Artificial
  Synthetic oligonucleotide
ccgtgaaggtttggcagcaaaatgaggggcgctgggctgaacgcccaattcctgc

SEQ ID NO: 203754 - DNA, 55 bp, Artificial
  Synthetic oligonucleotide
tggccaggcccaggaatcgttccacctttgttcatgacggccgtttgcggtgaac

SEQ ID NO: 203755 - DNA, 55 bp, Artificial
  Synthetic oligonucleotide
ccggtccttccgaaacggaatgatccgctccatgcacatgcggagcgcgacggta

SEQ ID NO: 203756 - DNA, 53 bp, Artificial
  Synthetic oligonucleotide
ccggggcggttcgcggcatttgctagggcttgcgaaactggggtttcaatttc

SEQ ID NO: 203757 - DNA, 55 bp, Artificial
  Synthetic oligonucleotide
ccggatatccggcccatatatcctagagatgcgagaggtatcgggcaggcgccca

SEQ ID NO: 203758 - DNA, 57 bp, Artificial
  Synthetic oligonucleotide
agaccgaagctggttcgcagagccagctttacttcgaataggacgccggtgccgtag

SEQ ID NO: 203759 - DNA, 55 bp, Artificial
  Synthetic oligonucleotide
gtcgagtggccaagcgcgaacagacttacgtaaagaccgatgtccttcgcgctgt

SEQ ID NO: 203760 - DNA, 55 bp, Artificial
  Synthetic oligonucleotide
ccgctcctcgacattcctgtggtcgaacgtcctggtgggacggattggggagaac

SEQ ID NO: 203761 - DNA, 55 bp, Artificial
  Synthetic oligonucleotide
gtcgatcaacaatgcgctggacagctatgcgaccactgtcgcgtccagcgttatt

SEQ ID NO: 203762 - DNA, 55 bp, Artificial
  Synthetic oligonucleotide
ccgcgcttcgtgagatgaagctgagccgagtggagcacgtccagcgaaaacgagc

SEQ ID NO: 203763 - DNA, 54 bp, Artificial
  Synthetic oligonucleotide
ccgccggggactattttcctgtttcctcatccctcacgcgtctatcctttcgga

SEQ ID NO: 203764 - DNA, 55 bp, Artificial
  Synthetic oligonucleotide
ccgcacgcacctcgcaaggctggagttgacctgaccgatattttggaccgagccg

SEQ ID NO: 203765 - DNA, 55 bp, Artificial
  Synthetic oligonucleotide
ccgatgacgcgcacgtgtcgcagaaaacaaacagagccgcatctgcctttgacgt

SEQ ID NO: 203766 - DNA, 55 bp, Artificial
  Synthetic oligonucleotide
ccgataaggcgccattctggacccgtgtcggtcagcctcagggaccccgggcaat

SEQ ID NO: 203767 - DNA, 55 bp, Artificial
  Synthetic oligonucleotide
acagacacagcccgcctgcgagaacagtgcactcggcagattggcagggcgcctg

SEQ ID NO: 203768 - DNA, 55 bp, Artificial
  Synthetic oligonucleotide
ccgacaatcgtggagaaaatcgagtcccgcgggcggagcggcgaggtaaacgtgc

SEQ ID NO: 203769 - DNA, 56 bp, Artificial
  Synthetic oligonucleotide
agacccgcaggaaatttagaccgataaggcgccattctggacccgtgtcggtcagc

SEQ ID NO: 203770 - DNA, 55 bp, Artificial
  Synthetic oligonucleotide
ccctgtacgtaatcgaaccggaacgcaatcaccgcactgttgaatctttcttgtg

SEQ ID NO: 203771 - DNA, 55 bp, Artificial
  Synthetic oligonucleotide
ccctggcgccgctacagcttacagctatcgtgcttagccacccgagacaccagca

SEQ ID NO: 203772 - DNA, 55 bp, Artificial
  Synthetic oligonucleotide
ccctgattggggcgattcctttcgagttcatggtgagtggtgtagctgattaagg

SEQ ID NO: 203773 - DNA, 55 bp, Artificial
  Synthetic oligonucleotide
ccctacggatgcacgggtgtgaacagccagagcaaccctttcgtcggcaagtaca

SEQ ID NO: 203774 - DNA, 52 bp, Artificial
  Synthetic oligonucleotide
cccggataaatcccaattcctcccacgcttccgtttcgctaaatcccaggcg

SEQ ID NO: 203775 - DNA, 55 bp, Artificial
  Synthetic oligonucleotide
cccgcgtaaacaccgcacctactgccgaagccgacttatgtcgctccgcttgcga

SEQ ID NO: 203776 - DNA, 53 bp, Artificial
  Synthetic oligonucleotide
cccgcggttcccgcgccctcttgtctccgaacagatcaaccggaaaccgtatc

SEQ ID NO: 203777 - DNA, 55 bp, Artificial
  Synthetic oligonucleotide
cccgcgccgtagcgcggtggaatgatctgacaacattaggctacacctgactaaa

SEQ ID NO: 203778 - DNA, 53 bp, Artificial
  Synthetic oligonucleotide
cccgacagggacggttgcggtacgatttcaaggaactgtccgggacatggttc

SEQ ID NO: 203779 - DNA, 51 bp, Artificial
  Synthetic oligonucleotide
cccgaagacttccgggaggttccataatgggccgtttccggttccatacac

SEQ ID NO: 203780 - DNA, 58 bp, Artificial
  Synthetic oligonucleotide
tcgtagcgggaccgcaagctcggccctagcctgcaccgattgtcaacgggcttcgaac

SEQ ID NO: 203781 - DNA, 55 bp, Artificial
  Synthetic oligonucleotide
aagggtaagcccctcccgagtcgtagtgccgtgcgccggggtcgcctcagtatca

SEQ ID NO: 203782 - DNA, 55 bp, Artificial
  Synthetic oligonucleotide
tgttggccatgctcggggacaaagacgtgtccggcaccgtgagcaacgtgcgcat

SEQ ID NO: 203783 - DNA, 55 bp, Artificial
  Synthetic oligonucleotide
aaggtcagctcagcgcagactcggcttgccacctccggccaaacggggtttgagt

SEQ ID NO: 203784 - DNA, 55 bp, Artificial
  Synthetic oligonucleotide
cgccgcactccccatatagaagacgattgcagacggtcggatcattcatggcggg

SEQ ID NO: 203785 - DNA, 55 bp, Artificial
  Synthetic oligonucleotide
cgccgcaaaccactgcccggtgaataagacgggctaggaaatgcagttcgctttc

SEQ ID NO: 203786 - DNA, 55 bp, Artificial
  Synthetic oligonucleotide
tgttgcaggtagggataggcgcagagggacttgatgcgtccggtctctgccgcga

SEQ ID NO: 203787 - DNA, 55 bp, Artificial
  Synthetic oligonucleotide
cgcccctgttcgcggtcgacgccacagcgcccggctcaggcaagagcaagctcgt

SEQ ID NO: 203788 - DNA, 55 bp, Artificial
  Synthetic oligonucleotide
gtacatccctcacggcccctctcaggccgcgatccagggtccgggcaagcctttc

SEQ ID NO: 203789 - DNA, 55 bp, Artificial
  Synthetic oligonucleotide
cgcatcgcccacggagccaagaccggaatggatgagacgaggaccagcatggatg

SEQ ID NO: 203790 - DNA, 55 bp, Artificial
  Synthetic oligonucleotide
cgcacgtttacaaacactcacacatcagagcttgtcagccccgtgtactcacgag

SEQ ID NO: 203791 - DNA, 60 bp, Artificial
  Synthetic oligonucleotide
gtgtggcttccgatacgcgaagggcatcagaagctaggacaatggctgcgtgtcctcacc

SEQ ID NO: 203792 - DNA, 58 bp, Artificial
  Synthetic oligonucleotide
tcgtgctgtggctaacaaagcgtatccgtgtcgttgacagccaaccgcgaaccgggtc

SEQ ID NO: 203793 - DNA, 55 bp, Artificial
  Synthetic oligonucleotide
cgcaaccgctttcgggatcggtaccgctgtcaaccaattcgttactggcgtgagc

SEQ ID NO: 203794 - DNA, 55 bp, Artificial
  Synthetic oligonucleotide
cgattgtgaccggttcagtaatgccccagcggagagtcgatattgcatgtcgtcc

SEQ ID NO: 203795 - DNA, 54 bp, Artificial
  Synthetic oligonucleotide
cgattggcggttatatagcgatatttgtcgttaaaccgtgaacgagacggaacc

SEQ ID NO: 203796 - DNA, 55 bp, Artificial
  Synthetic oligonucleotide
cgatggccttcgcatcgctcggcgcacggcgctgagccgtggggaacacggtctt

SEQ ID NO: 203797 - DNA, 55 bp, Artificial
  Synthetic oligonucleotide
tggttaagtcggaggcgaggctaaccaccggtgggtcaagctggtctgccccatc

SEQ ID NO: 203798 - DNA, 55 bp, Artificial
  Synthetic oligonucleotide
aatcacgacgtggcgcccgcgcaaggggctccaatcggcgtaccgggcattctta

SEQ ID NO: 203799 - DNA, 55 bp, Artificial
  Synthetic oligonucleotide
gtcccaacgcatcaaaccgttactcggacgggctcctagtcgctcgcttcaacca

SEQ ID NO: 203800 - DNA, 55 bp, Artificial
  Synthetic oligonucleotide
cgagctggaagcccggcagctcgttgcagcgaacgatgccctggatctcgaactt

SEQ ID NO: 203801 - DNA, 55 bp, Artificial
  Synthetic oligonucleotide
tggtatccgccctccggtagacgcgtcgcgacaatcgcgctcttgagggaatctc

SEQ ID NO: 203802 - DNA, 55 bp, Artificial
  Synthetic oligonucleotide
aatggatggcatagcccattgcgctcacgcctcctgacgcgagaccgaccaaggc

SEQ ID NO: 203803 - DNA, 60 bp, Artificial
  Synthetic oligonucleotide
taaaccatggatcgcctgagtggcttaggcaacctgcatttgtgggactgcactcagccg

SEQ ID NO: 203804 - DNA, 55 bp, Artificial
  Synthetic oligonucleotide
cgaacgaatgtgaactggctcgtgcgttcgatagctgcgaacagggacagcttgc

SEQ ID NO: 203805 - DNA, 55 bp, Artificial
  Synthetic oligonucleotide
ccttcgctgaagcgggaagtccgagacagacccctaaaaccacagtggtctcgaa

SEQ ID NO: 203806 - DNA, 55 bp, Artificial
  Synthetic oligonucleotide
tgggagactcggtctgcaagtacgggcagacgtcgggcgctagctgtggcgttgt

SEQ ID NO: 203807 - DNA, 55 bp, Artificial
  Synthetic oligonucleotide
cctcgcggcctacgagttcatttgctaggcttggacgaaggagcccgaacgctgc

SEQ ID NO: 203808 - DNA, 55 bp, Artificial
  Synthetic oligonucleotide
cctccgccccgctttcgctgggcgcacgctctgacactctctccaaatctatcga

SEQ ID NO: 203809 - DNA, 55 bp, Artificial
  Synthetic oligonucleotide
cctcaagcgtctcgggtgacgcggtatcattgccggttcggcccaaagaactact

SEQ ID NO: 203810 - DNA, 55 bp, Artificial
  Synthetic oligonucleotide
ccgttcggcttgaccattcgtctccgctcaggctccgcctgtcaaacgatcagat

SEQ ID NO: 203811 - DNA, 55 bp, Artificial
  Synthetic oligonucleotide
acaggaggtgccatgcgggctctatggtcaacgcggggtaaacgccacgggtttg

SEQ ID NO: 203812 - DNA, 55 bp, Artificial
  Synthetic oligonucleotide
gtctctccgttcccgatcactacccaagtcttacaacattctgagtggacaccgc

SEQ ID NO: 203813 - DNA, 55 bp, Artificial
  Synthetic oligonucleotide
acatccgctcccatgatcccactgaacggaggcttcgcctagccccaagagcgtc

SEQ ID NO: 203814 - DNA, 49 bp, Artificial
  Synthetic oligonucleotide
taacgacagtggtttacaccataaatttggggccgggtttcccttagtt

SEQ ID NO: 203815 - DNA, 55 bp, Artificial
  Synthetic oligonucleotide
ccagaggggtaagagccaccgccgacggagaatcgacctatgctaccgtccgttc

SEQ ID NO: 203816 - DNA, 55 bp, Artificial
  Synthetic oligonucleotide
gtctggcgaacaataagggagatgatggacatgccacgcgctaacgtcatcaacg

SEQ ID NO: 203817 - DNA, 55 bp, Artificial
  Synthetic oligonucleotide
ccacacctaatgctacggcttagcttaaagtatgtgatctagcggcggctcatcc

SEQ ID NO: 203818 - DNA, 55 bp, Artificial
  Synthetic oligonucleotide
tggaccctagccgcggcccgtgagggaccgggatcgatgttctgtgaccagatcc

SEQ ID NO: 203819 - DNA, 55 bp, Artificial
  Synthetic oligonucleotide
ccaacattatggggccggaaattcgatagttatgttatccgacttcctcgccaag

SEQ ID NO: 203820 - DNA, 55 bp, Artificial
  Synthetic oligonucleotide
ccaacacgcgtcggaacgtgagatggtgctcgtccgtataggctctgaagggctc

SEQ ID NO: 203821 - DNA, 55 bp, Artificial
  Synthetic oligonucleotide
ccaaagaacggttcagatatttatgtcacggagtgtcaagttagatccgattgct

SEQ ID NO: 203822 - DNA, 55 bp, Artificial
  Synthetic oligonucleotide
catttgacgcccgctgtcacccatcgctttccggtggaaaatccgggcggctgaa

SEQ ID NO: 203823 - DNA, 55 bp, Artificial
  Synthetic oligonucleotide
catcttttcgagccaatgggacgtggcagagtaacggacacagaaatagacctta

SEQ ID NO: 203824 - DNA, 55 bp, Artificial
  Synthetic oligonucleotide
acatgccgaaagcgcctttgacgaggttggcaaagcctcgctgttcactcttctc

SEQ ID NO: 203825 - DNA, 60 bp, Artificial
  Synthetic oligonucleotide
atgaatcgtccaatcaatgacacgttggccgccaacctcctatgcgagccggccgacaga

SEQ ID NO: 203826 - DNA, 55 bp, Artificial
  Synthetic oligonucleotide
gtgatttctaaatgctacgctccacagagcgggcacgatgattggcctgcctcga

SEQ ID NO: 203827 - DNA, 55 bp, Artificial
  Synthetic oligonucleotide
cagtgggtgaagctctatcgcgctccttatggtccacggttttgggttcgggcgg

SEQ ID NO: 203828 - DNA, 55 bp, Artificial
  Synthetic oligonucleotide
cagtccatccggtcaaccgcatccgcccgaccctcgttctctcgccggcaatcga

SEQ ID NO: 203829 - DNA, 55 bp, Artificial
  Synthetic oligonucleotide
gtgccaggtctgaacctggtactgaaggtgagacagtcccggttcgcgagccgga

SEQ ID NO: 203830 - DNA, 55 bp, Artificial
  Synthetic oligonucleotide
gtgccctgtctctatgccttacgtcgcaggctgcgctgagcacctggcaacactc

SEQ ID NO: 203831 - DNA, 55 bp, Artificial
  Synthetic oligonucleotide
gtgccgccctctattcaatcaaagccataaagttgtgcccataatcggcaccggg

SEQ ID NO: 203832 - DNA, 55 bp, Artificial
  Synthetic oligonucleotide
gtgcgaagccagtgatcctgggacgcccgagaccttcccacatcgagcacctagc

SEQ ID NO: 203833 - DNA, 55 bp, Artificial
  Synthetic oligonucleotide
gtgcgtttacatttcgaaagctgccgaacgtacccgagtaagccacaccagccga

SEQ ID NO: 203834 - DNA, 55 bp, Artificial
  Synthetic oligonucleotide
cagcactcgtggttgcctgttactatgtagtaggcattatccatcagtcagccca

SEQ ID NO: 203835 - DNA, 55 bp, Artificial
  Synthetic oligonucleotide
gtgcttcgacccattcagagtatcgacacgcggccgacccatctgaggaccgcct

SEQ ID NO: 203836 - DNA, 54 bp, Artificial
  Synthetic oligonucleotide
atctggcccatgtctgccgggtttcgaggggaactccgttcgccctcggacggc

SEQ ID NO: 203837 - DNA, 55 bp, Artificial
  Synthetic oligonucleotide
ccccacgctcagtgagtcccacttatagcgggcgcaattcgcggtgtatttcaga

SEQ ID NO: 203838 - DNA, 53 bp, Artificial
  Synthetic oligonucleotide
ccccaacgcggtcgttatctgtattcggttcgggtttacgaggatcaggagac

SEQ ID NO: 203839 - DNA, 55 bp, Artificial
  Synthetic oligonucleotide
ccccaaatacgcggattggaataagcgcagcgtgccgactgccgcagacgtggag

SEQ ID NO: 203840 - DNA, 55 bp, Artificial
  Synthetic oligonucleotide
cccagtagaactcgctctaagaacttgaaacttcgggaacatgaaaagtcgaggc

SEQ ID NO: 203841 - DNA, 55 bp, Artificial
  Synthetic oligonucleotide
acagagggctggttgttgacggctctccaatccaggctcgcatgtacacttgcga

SEQ ID NO: 203842 - DNA, 55 bp, Artificial
  Synthetic oligonucleotide
ccccgtggggcatctggcttgacgtcagcgttggctgtcgtgacgatgacataat

SEQ ID NO: 203843 - DNA, 55 bp, Artificial
  Synthetic oligonucleotide
cccagatctcaaccttagtcccaacgcatcaaaccgttactcggacgggctccta

SEQ ID NO: 203844 - DNA, 55 bp, Artificial
  Synthetic oligonucleotide
cccctatgcctgagggcgttagctacgctcgcgatgcccccgtctttcgagtacc

SEQ ID NO: 203845 - DNA, 54 bp, Artificial
  Synthetic oligonucleotide
gtcgttaaaccgtgaacgagacggaaccgtgaatcagtacgttccatccacagt

SEQ ID NO: 203846 - DNA, 55 bp, Artificial
  Synthetic oligonucleotide
cccagaggatcgctatcgttgcacgcatgatgcttcatccgacccgtcaccgcag

SEQ ID NO: 203847 - DNA, 57 bp, Artificial
  Synthetic oligonucleotide
taagagcgtcaaccggcaggggctaagcggacctgcctgagtcggccacttagcccc

SEQ ID NO: 203848 - DNA, 53 bp, Artificial
  Synthetic oligonucleotide
acctcgcccgacaacgaaccaacccccgaagggacgacaccgatgatccggca

SEQ ID NO: 203849 - DNA, 54 bp, Artificial
  Synthetic oligonucleotide
gacatccctcgattgaacaaccgagtaattgcggccagccgttgagcgctagca

SEQ ID NO: 203850 - DNA, 54 bp, Artificial
  Synthetic oligonucleotide
gggtccgcgcttggccatctaccacctctcggctcaggtcatcagcgcaggtgc

SEQ ID NO: 203851 - DNA, 54 bp, Artificial
  Synthetic oligonucleotide
taaatcattcagccatcgaccgaacatgggcgtggcgactgtcatctgcgtttc

SEQ ID NO: 203852 - DNA, 54 bp, Artificial
  Synthetic oligonucleotide
gcgggcattcgcttagggctaccctcagttgtttagcgaagcatgttgtggatc

SEQ ID NO: 203853 - DNA, 54 bp, Artificial
  Synthetic oligonucleotide
tgtccctcggactgcgccagtgggcacatcggttataaaccgcgccgattggta

SEQ ID NO: 203854 - DNA, 54 bp, Artificial
  Synthetic oligonucleotide
gtcattcctcgccagcagtacccttcgctgggccggggagaaggcccagtgagg

SEQ ID NO: 203855 - DNA, 54 bp, Artificial
  Synthetic oligonucleotide
tctgcccgagccccgagacggctggtacgacatggccctcgtgcgggcgtagta

SEQ ID NO: 203856 - DNA, 54 bp, Artificial
  Synthetic oligonucleotide
aacggctctcagtcattactcaaagtcctgcggaggtaaggtgtttgcaaagtt

SEQ ID NO: 203857 - DNA, 54 bp, Artificial
  Synthetic oligonucleotide
cgctgtcgcacggaggtcgtgcacaggctcaaacgcgcgccccgatgtcatatt

SEQ ID NO: 203858 - DNA, 58 bp, Artificial
  Synthetic oligonucleotide
taagcaaagttcaggcggagccgtattgcttatgggcgagaagggtcgggcaactcca

SEQ ID NO: 203859 - DNA, 54 bp, Artificial
  Synthetic oligonucleotide
accagtcgcgaatacaacgaattctgggatcgactgcgcaggggtgagtaccaa

SEQ ID NO: 203860 - DNA, 54 bp, Artificial
  Synthetic oligonucleotide
agattgagccgacatggttctgtgctttctcacagtgggttaaacttcggctct

SEQ ID NO: 203861 - DNA, 54 bp, Artificial
  Synthetic oligonucleotide
actttggagacacggatcggagacgaggcacgatgcgcccgcctgagcttcccc

SEQ ID NO: 203862 - DNA, 54 bp, Artificial
  Synthetic oligonucleotide
ttagaacttacgagactaagtgcccgcgcgtccgcttggtccgatctgaacgct

SEQ ID NO: 203863 - DNA, 54 bp, Artificial
  Synthetic oligonucleotide
tctctgtcgacctgttcgttccgcaagagtgcgctcacaccttcgtcagaagca

SEQ ID NO: 203864 - DNA, 54 bp, Artificial
  Synthetic oligonucleotide
gcttgctcccatcctaactcaggaggtagcccatgagccccttgccggagcgaa

SEQ ID NO: 203865 - DNA, 54 bp, Artificial
  Synthetic oligonucleotide
agacaaggtggagtttgcggacaccactctcggacggacaaataaccacttcgc

SEQ ID NO: 203866 - DNA, 54 bp, Artificial
  Synthetic oligonucleotide
ccccgggcgtcaagcgaaagcgccaactttcgcgacggttaggctttgcctgtg

SEQ ID NO: 203867 - DNA, 54 bp, Artificial
  Synthetic oligonucleotide
cgcgactgaatcggatcccgacggctgcgacctctggtgggtcgaggggaaagt

SEQ ID NO: 203868 - DNA, 54 bp, Artificial
  Synthetic oligonucleotide
tcggttgcggtcgttgcatctgctgaggccgccattcgtaacctgtcatcgtat

SEQ ID NO: 203869 - DNA, 60 bp, Artificial
  Synthetic oligonucleotide
atcgtccagcctcattcggtcacgacatagctcaggccgtcctacggcccgcgcggattc

SEQ ID NO: 203870 - DNA, 54 bp, Artificial
  Synthetic oligonucleotide
agacattcgtaattttgcagtggcagggataaagttgagagatcgacttgatac

SEQ ID NO: 203871 - DNA, 54 bp, Artificial
  Synthetic oligonucleotide
gtcgccattgtctttcgcccgtcagtcgccgttgatttctacttacagcccagc

SEQ ID NO: 203872 - DNA, 54 bp, Artificial
  Synthetic oligonucleotide
tggacctattggagctactacaagaacaatccgccggtggcgaagcgcctgatt

SEQ ID NO: 203873 - DNA, 54 bp, Artificial
  Synthetic oligonucleotide
cggtgtgcttgtaaggcaagcagcaagtgcaatgtcggctcaagggaaacgttc

SEQ ID NO: 203874 - DNA, 54 bp, Artificial
  Synthetic oligonucleotide
cgtctgccggcacgcgacgcctcacctgcccagcgacccgtgataaggcccggt

SEQ ID NO: 203875 - DNA, 54 bp, Artificial
  Synthetic oligonucleotide
gttgcccgccgctctgatcgatagctacgacttcagcgaggatgtcgatctgcg

SEQ ID NO: 203876 - DNA, 54 bp, Artificial
  Synthetic oligonucleotide
tgcgggcgatgcgcggtcgctcccatgcgcatgatcagcgcgacggggtcctgg

SEQ ID NO: 203877 - DNA, 54 bp, Artificial
  Synthetic oligonucleotide
acatgataccgcggggccgctgaaaggcccctatggggcgcccctctcggctcc

SEQ ID NO: 203878 - DNA, 54 bp, Artificial
  Synthetic oligonucleotide
tgacacgtctcacgatgaagagcgttaacccagactcagccaaaggaggagtcc

SEQ ID NO: 203879 - DNA, 54 bp, Artificial
  Synthetic oligonucleotide
ggcgctagtggatcaggtctgacgcttggtacccatgtgcgaggtccgctgagg

SEQ ID NO: 203880 - DNA, 60 bp, Artificial
  Synthetic oligonucleotide
atcgatcgtacccgatttagagtagcggagaggctagacctgcgccgctggtacgtgaga

SEQ ID NO: 203881 - DNA, 54 bp, Artificial
  Synthetic oligonucleotide
gacgataccgtcctagttaagcctagcttggaggatataagacccgcacttgtc

SEQ ID NO: 203882 - DNA, 54 bp, Artificial
  Synthetic oligonucleotide
aatgggctggctttataccgaaggtcccccaggcctcgcgaaattggaactgtc

SEQ ID NO: 203883 - DNA, 54 bp, Artificial
  Synthetic oligonucleotide
caatttaccgaaccagcgagacgggtcgggttcatgccagcgtctcctcacgga

SEQ ID NO: 203884 - DNA, 54 bp, Artificial
  Synthetic oligonucleotide
gtgaggttatttcgattgaagtggccttgctcctgtttcagctgggtgatgatc

SEQ ID NO: 203885 - DNA, 54 bp, Artificial
  Synthetic oligonucleotide
tgccccgttatgggcatttctcaaggtgcccataacggggcacgtatcctgtta

SEQ ID NO: 203886 - DNA, 53 bp, Artificial
  Synthetic oligonucleotide
gtttgcaagtgtaggctgtcacccaatggtccgagccgaatcagggtccatta

SEQ ID NO: 203887 - DNA, 53 bp, Artificial
  Synthetic oligonucleotide
ttagtccagcgctatgataggattcgcatgacgaagacgggtttggataactt

SEQ ID NO: 203888 - DNA, 53 bp, Artificial
  Synthetic oligonucleotide
ggggccgcatttcccaaatttggggctgcacttccggaaatttggggccgcac

SEQ ID NO: 203889 - DNA, 53 bp, Artificial
  Synthetic oligonucleotide
ggcggaccaaatcgacatccgctcccatgatcccactgaacggaggcttcgcc

SEQ ID NO: 203890 - DNA, 53 bp, Artificial
  Synthetic oligonucleotide
gtcgctgtgtctgcgagcggtttggtctgtcggtgtagcgtgaacgacaaaag

SEQ ID NO: 203891 - DNA, 60 bp, Artificial
  Synthetic oligonucleotide
atcccttcatccgtgatggcctcagagatacagaacgtatatctgctatcaagaacgcac

SEQ ID NO: 203892 - DNA, 53 bp, Artificial
  Synthetic oligonucleotide
tagagttccaagggcatcatgacggcctcacatgaatggcgaagcttgcctcc

SEQ ID NO: 203893 - DNA, 53 bp, Artificial
  Synthetic oligonucleotide
tggcctgggccactcacacattcggagagcccttctttggccgccgttaggcg

SEQ ID NO: 203894 - DNA, 53 bp, Artificial
  Synthetic oligonucleotide
ggtgtcagatgctcgagaagttggcggctatcgtcggtgcgtctggcatcctc

SEQ ID NO: 203895 - DNA, 48 bp, Artificial
  Synthetic oligonucleotide
tttggggccgggtttcccttagtttggggccgcatttcccaaatttgg

SEQ ID NO: 203896 - DNA, 53 bp, Artificial
  Synthetic oligonucleotide
ggcgtgaaattaattgccatcgatgtcaggcctgatcctcaatttcggtccgg

SEQ ID NO: 203897 - DNA, 53 bp, Artificial
  Synthetic oligonucleotide
tagtggtccaaatcagacgcttggtacccacccaaatagcagacctgagatcg

SEQ ID NO: 203898 - DNA, 53 bp, Artificial
  Synthetic oligonucleotide
aaagcttagatcgagaccgagagcaaccgccagcttcacccgcatgttgtaat

SEQ ID NO: 203899 - DNA, 53 bp, Artificial
  Synthetic oligonucleotide
gatagcttccaactcactctgcttgaagcacttctctgccatgtctttaccgc

SEQ ID NO: 203900 - DNA, 53 bp, Artificial
  Synthetic oligonucleotide
agcgactggcctgcatgcacaggcatggcagagccttggcttccaggtgaatg

SEQ ID NO: 203901 - DNA, 50 bp, Artificial
  Synthetic oligonucleotide
acggagggggtaagctcttcgtggtccggacgtacgctacccgggaagat

SEQ ID NO: 203902 - DNA, 54 bp, Artificial
  Synthetic oligonucleotide
cacaggctcgtccgtatcgggaccccggttcggggccagaatgtcgacgcggta

SEQ ID NO: 203903 - DNA, 60 bp, Artificial
  Synthetic oligonucleotide
tacagtcctgaatgctcagggtcggcacttattgcgaagccttcctcggtatgtcaatga

SEQ ID NO: 203904 - DNA, 53 bp, Artificial
  Synthetic oligonucleotide
ctgttcggtggcccctatgcctgagggcgttagctacgctcgcgatgcccccg

SEQ ID NO: 203905 - DNA, 53 bp, Artificial
  Synthetic oligonucleotide
aggggccatgtccggcgttttgcgtcgcccgtcacaggatcaccggatcaggg

SEQ ID NO: 203906 - DNA, 53 bp, Artificial
  Synthetic oligonucleotide
ctaggtgtttggtcccgttgtgtggtggtacgtctgaccccgcatggagggac

SEQ ID NO: 203907 - DNA, 53 bp, Artificial
  Synthetic oligonucleotide
cggtcaggtctgatctgacacccgaccgagacgaagcgacaacgaggaccgtg

SEQ ID NO: 203908 - DNA, 53 bp, Artificial
  Synthetic oligonucleotide
atgagtttacgaatgggcgcacttatggggatattgcatatccctgtgcttcg

SEQ ID NO: 203909 - DNA, 53 bp, Artificial
  Synthetic oligonucleotide
ccatttcgtgcgaccgcgtagcgcccgttcatggctgacagcgctgacacgtg

SEQ ID NO: 203910 - DNA, 53 bp, Artificial
  Synthetic oligonucleotide
ccatgattctgggtcatttaagctgagcgatgccacttccggcttcgcaactg

SEQ ID NO: 203911 - DNA, 53 bp, Artificial
  Synthetic oligonucleotide
cagtcggcccaacacgctgcccgattggcccgtatggcggacagcctcgctat

SEQ ID NO: 203912 - DNA, 53 bp, Artificial
  Synthetic oligonucleotide
ccgtgttcgccagaattctttcgcgctgagaccccgctgtggcttcagtagag

SEQ ID NO: 203913 - DNA, 53 bp, Artificial
  Synthetic oligonucleotide
cagaggcgcatgcggccaaggctctcgaaataatcgaggccagtggttgggcc

SEQ ID NO: 203914 - DNA, 58 bp, Artificial
  Synthetic oligonucleotide
ataattgtggggatcaccaggcgttccacgtagatacgtggcgtataatgggcaccga

SEQ ID NO: 203915 - DNA, 53 bp, Artificial
  Synthetic oligonucleotide
cgagtgatacaaccggagttgaaaaatccggtgacagtagtacctctgcatca

SEQ ID NO: 203916 - DNA, 53 bp, Artificial
  Synthetic oligonucleotide
acacaacctactctgccctgaacctgctagatagtgcagcgatcccgaagtca

SEQ ID NO: 203917 - DNA, 53 bp, Artificial
  Synthetic oligonucleotide
cacccgcagagctgcttaaatcattcagccatcgaccgaacatgggcgtggcg

SEQ ID NO: 203918 - DNA, 53 bp, Artificial
  Synthetic oligonucleotide
caccatgaacgacgcgccgtggcagtagcgtgccaccgatcgcggtcctgacg

SEQ ID NO: 203919 - DNA, 53 bp, Artificial
  Synthetic oligonucleotide
cgcctattcggtcaatctcacagttatagtgcttatttcaataccgatatacc

SEQ ID NO: 203920 - DNA, 53 bp, Artificial
  Synthetic oligonucleotide
atgcggaaagcattcggtgtccccgaattcgacgcaggcatctccggacaatg

SEQ ID NO: 203921 - DNA, 53 bp, Artificial
  Synthetic oligonucleotide
acattggattggtccggctacatcttgaaggccccaatcggctctagcggcga

SEQ ID NO: 203922 - DNA, 53 bp, Artificial
  Synthetic oligonucleotide
gctggcaagccgagcgtacctaacgaaactcctcctcgtgataacgctacgtc

SEQ ID NO: 203923 - DNA, 53 bp, Artificial
  Synthetic oligonucleotide
gcctcctacggcctgtcacccgtgttcgagacagcccgaatgtatcgcggaga

SEQ ID NO: 203924 - DNA, 53 bp, Artificial
  Synthetic oligonucleotide
aaaaccgcatctaagttactgttaccaatggtgaattttcgtatagacctctt

SEQ ID NO: 203925 - DNA, 54 bp, Artificial
  Synthetic oligonucleotide
ataagaaaaagccgccccagagtcaccacgggcggctttttcaacactcaggaa

SEQ ID NO: 203926 - DNA, 53 bp, Artificial
  Synthetic oligonucleotide
gcgacttacgaaagagtagcgtaagccgcccgccagaaatttcctcttatgtc

SEQ ID NO: 203927 - DNA, 52 bp, Artificial
  Synthetic oligonucleotide
ttcacacgctacggtcaagtcacgttttctgaacgtcaatccctggctgata

SEQ ID NO: 203928 - DNA, 52 bp, Artificial
  Synthetic oligonucleotide
aacttgagcgatctggcctgggtgcggcagtcacccggcaagcccggccgaa

SEQ ID NO: 203929 - DNA, 52 bp, Artificial
  Synthetic oligonucleotide
cggagccgtttctacacgctcttggtgagaggggtccacgtccgtgatacgg

SEQ ID NO: 203930 - DNA, 52 bp, Artificial
  Synthetic oligonucleotide
cggccttctgcatggggtccttagtggcgccgtcgaacgtgaggccgttgat

SEQ ID NO: 203931 - DNA, 52 bp, Artificial
  Synthetic oligonucleotide
aacgcgtgcgggacatccgggcgggtctctcgaccacaatcatccgtatggc

SEQ ID NO: 203932 - DNA, 52 bp, Artificial
  Synthetic oligonucleotide
ggagccttttgcagtcgcctagagcagagggttcagctcacggcagtgcaga

SEQ ID NO: 203933 - DNA, 52 bp, Artificial
  Synthetic oligonucleotide
actcggacacatagtgtccaaccggttcggcagtaatgtgacttggtggcat

SEQ ID NO: 203934 - DNA, 52 bp, Artificial
  Synthetic oligonucleotide
cgggtcggttcacgagagtgagaggaggccggacgggagtaagccgacagtt

SEQ ID NO: 203935 - DNA, 52 bp, Artificial
  Synthetic oligonucleotide
aacgacagctggccgccttggagcagcgtgtcgcgaaagctcgaacttccgc

SEQ ID NO: 203936 - DNA, 60 bp, Artificial
  Synthetic oligonucleotide
agttttgagttgccgctatggcctgacagccatcggaaaccgtcgctcgatctctgcgca

SEQ ID NO: 203937 - DNA, 52 bp, Artificial
  Synthetic oligonucleotide
atcgtcgctcagatcgggttacgaactatcgaacagactctctgggcctgta

SEQ ID NO: 203938 - DNA, 52 bp, Artificial
  Synthetic oligonucleotide
accccaaaggattagcctgcggcagcggagggtcaccatggagttcaggatt

SEQ ID NO: 203939 - DNA, 52 bp, Artificial
  Synthetic oligonucleotide
cgtaattagctgcggcatcatgtggaatacgttgacgggacgaaagccaacc

SEQ ID NO: 203940 - DNA, 52 bp, Artificial
  Synthetic oligonucleotide
acccgatgcggtcctgacagcgggactcaagtggagatttcgaaggcctaga

SEQ ID NO: 203941 - DNA, 52 bp, Artificial
  Synthetic oligonucleotide
agacactgtgacgattttggcgccctctacctgcaaggctgcccgtgcaggc

SEQ ID NO: 203942 - DNA, 52 bp, Artificial
  Synthetic oligonucleotide
gctgagatcgacttagctataatgttcgtttgagcgacatgccttctcttgt

SEQ ID NO: 203943 - DNA, 52 bp, Artificial
  Synthetic oligonucleotide
aagtcttgcgtttgcaataagcttccgactgctcagaacgataaagcaacgt

SEQ ID NO: 203944 - DNA, 52 bp, Artificial
  Synthetic oligonucleotide
ccaccggtgggtcaagctggtctgccccatccgcgtagatcgccaacgacgg

SEQ ID NO: 203945 - DNA, 52 bp, Artificial
  Synthetic oligonucleotide
ttttcccttcagtacgaatatatcccgccgcagaaagtgggaaataagactt

SEQ ID NO: 203946 - DNA, 52 bp, Artificial
  Synthetic oligonucleotide
caggtggaattatttctcctgtgagtgacgcggcatcagtaaatcttgagca

SEQ ID NO: 203947 - DNA, 54 bp, Artificial
  Synthetic oligonucleotide
agttgtctaagctagagcagggtgcgggagtggtttggacccactcccgacttt

SEQ ID NO: 203948 - DNA, 52 bp, Artificial
  Synthetic oligonucleotide
cagcagacccgccaagtctacagcgagatgcccaatccgagcgggtatcata

SEQ ID NO: 203949 - DNA, 52 bp, Artificial
  Synthetic oligonucleotide
ccgttggctgagctcgagtgcagcgtctgttctggtgaggaccgaaaccatg

SEQ ID NO: 203950 - DNA, 52 bp, Artificial
  Synthetic oligonucleotide
cctgacgtaggcgctcacgagagtggccgtcatgcgtccgtagtcatgcgcc

SEQ ID NO: 203951 - DNA, 52 bp, Artificial
  Synthetic oligonucleotide
cgagcgtcgctcccgagacgagacagatcaggctcaggacgaacattccccc

SEQ ID NO: 203952 - DNA, 52 bp, Artificial
  Synthetic oligonucleotide
tttgagacaagctgcatcagcgccttatagcccgaacttaccgtaactttat

SEQ ID NO: 203953 - DNA, 52 bp, Artificial
  Synthetic oligonucleotide
tgggattgtgtgagcaccgtttcacagcggccccacaccgctgtgatcatcg

SEQ ID NO: 203954 - DNA, 52 bp, Artificial
  Synthetic oligonucleotide
gtaccaacccgccccgcctgacaactgtagctcgggcaagcgccatgtccag

SEQ ID NO: 203955 - DNA, 52 bp, Artificial
  Synthetic oligonucleotide
tcctaactttgcgattcaagcaatcttaaacgcggctggctagcgtgaatgg

SEQ ID NO: 203956 - DNA, 52 bp, Artificial
  Synthetic oligonucleotide
tccgtggtttgtaccaggaggtcacggatatcctaccttcgtgctgaacccc

SEQ ID NO: 203957 - DNA, 52 bp, Artificial
  Synthetic oligonucleotide
tggcgacaccctgacactccaccccgcgccttgccgagaccttaatccaacc

SEQ ID NO: 203958 - DNA, 57 bp, Artificial
  Synthetic oligonucleotide
agttgggccgcatggcaggtgggtagcggtacctattagacgagatggttggcgagg

SEQ ID NO: 203959 - DNA, 52 bp, Artificial
  Synthetic oligonucleotide
gttacaaccgagcgtcggcggctccatgcaacacggatgcaacacgaatcca

SEQ ID NO: 203960 - DNA, 52 bp, Artificial
  Synthetic oligonucleotide
gaaacgaaccagacaagctcctaaggtcgcatgagagcgtcttgtgcggact

SEQ ID NO: 203961 - DNA, 52 bp, Artificial
  Synthetic oligonucleotide
aacacttaccggatcacgaattgtttatgcgatttcgcggggaggggtggga

SEQ ID NO: 203962 - DNA, 52 bp, Artificial
  Synthetic oligonucleotide
tcactcgcatggaaagcggaccagcgagcagaattcaagtcactcctctcgt

SEQ ID NO: 203963 - DNA, 52 bp, Artificial
  Synthetic oligonucleotide
gaacggcgtgctctgattaacctgaagtcgaaaagcaccggtctggtttacc

SEQ ID NO: 203964 - DNA, 52 bp, Artificial
  Synthetic oligonucleotide
gaagatcagtggacatcggcgccctgactgtaacacaggttagtgattggaa

SEQ ID NO: 203965 - DNA, 52 bp, Artificial
  Synthetic oligonucleotide
acggatgtgctcgacggctggacgaccaacgccgaccccttggcgatttcta

SEQ ID NO: 203966 - DNA, 52 bp, Artificial
  Synthetic oligonucleotide
gagcgaatcagcgggtgtcggttctcgcgtgcgttacatgaggtcgcgctag

SEQ ID NO: 203967 - DNA, 52 bp, Artificial
  Synthetic oligonucleotide
gagggcgttagctacgctcgcgatgcccccgtctttcgagtaccgggatggt

SEQ ID NO: 203968 - DNA, 52 bp, Artificial
  Synthetic oligonucleotide
aaactccgctctgaacgcgacgtaggtcccgtagacgtgagtgtccgtcccc

SEQ ID NO: 203969 - DNA, 56 bp, Artificial
  Synthetic oligonucleotide
agttgacctttcaaggcccgccccgatgtccagccgccgccaactcaactggtcca

SEQ ID NO: 203970 - DNA, 52 bp, Artificial
  Synthetic oligonucleotide
agcgaatttccggccgctccgaaacctgaccgaggggcagggtttcatggcg

SEQ ID NO: 203971 - DNA, 52 bp, Artificial
  Synthetic oligonucleotide
gatccggcccttaacaaactgcggactgaaggcatgagtccttaagttgcgg

SEQ ID NO: 203972 - DNA, 52 bp, Artificial
  Synthetic oligonucleotide
acggttggcccactccctaccttcggaccctgaacggttgctacgggtgcgc

SEQ ID NO: 203973 - DNA, 52 bp, Artificial
  Synthetic oligonucleotide
ggccacgcacccgatctggatcagaacaacggaacgggcgccccgagaacgt

SEQ ID NO: 203974 - DNA, 52 bp, Artificial
  Synthetic oligonucleotide
agtccggtcaggcacgtgagaccctatgccccgttccgccctcggtgcccga

SEQ ID NO: 203975 - DNA, 52 bp, Artificial
  Synthetic oligonucleotide
agatggtgcgggctgccctcgtgtggctcggcgagccggacccttgcgatgt

SEQ ID NO: 203976 - DNA, 52 bp, Artificial
  Synthetic oligonucleotide
gccgccctctgccgtggttaagcgcgtgtcgagagccgtggtgatctcggct

SEQ ID NO: 203977 - DNA, 52 bp, Artificial
  Synthetic oligonucleotide
gggccctctcccgcggggatcagcaactcacaaccccaacaacgcagatcca

SEQ ID NO: 203978 - DNA, 52 bp, Artificial
  Synthetic oligonucleotide
gcgaaaagccccggacgtgggtccaaggcttcaagagactaaatggctgatc

SEQ ID NO: 203979 - DNA, 52 bp, Artificial
  Synthetic oligonucleotide
gggagtgcttgtaggcaggggccatgtccggcgttttgcgtcgcccgtcaca

SEQ ID NO: 203980 - DNA, 56 bp, Artificial
  Synthetic oligonucleotide
tacgcgaacgaagaagcacgcccgcacgggcttgagatttggtaaggggttataga

SEQ ID NO: 203981 - DNA, 52 bp, Artificial
  Synthetic oligonucleotide
ctacccttcttagcgaagagcaggtccaaggcctcctcaagaagcgcctgga

SEQ ID NO: 203982 - DNA, 52 bp, Artificial
  Synthetic oligonucleotide
tacgcgaaatgaggctgagcagtaggagccgctccgatccataggagggcat

SEQ ID NO: 203983 - DNA, 52 bp, Artificial
  Synthetic oligonucleotide
acgtggccggatcgcagggaactgcgacggtgaaggtcccctcctgttggtc

SEQ ID NO: 203984 - DNA, 52 bp, Artificial
  Synthetic oligonucleotide
tgcggatttcacgtccggtgaactcagaagaacatgtcgccgaacgtcaaac

SEQ ID NO: 203985 - DNA, 51 bp, Artificial
  Synthetic oligonucleotide
agccctgcgcagccgagtggccctgctgccctgtaggccgcgttccgtggg

SEQ ID NO: 203986 - DNA, 51 bp, Artificial
  Synthetic oligonucleotide
tcaatgtgtcgcgacctttccttatatcactgctcgacagaggtgatatca

SEQ ID NO: 203987 - DNA, 51 bp, Artificial
  Synthetic oligonucleotide
atacctatacggggagaacgcatgtcaatgcgcctggctatagttctactg

SEQ ID NO: 203988 - DNA, 51 bp, Artificial
  Synthetic oligonucleotide
caggcggagcgattacacgcatgagttgctagatccgcgaaatctctggac

SEQ ID NO: 203989 - DNA, 51 bp, Artificial
  Synthetic oligonucleotide
cagcttcaaatgaccagtggtggtgtgacgggttgatcctgaagtgcgtct

SEQ ID NO: 203990 - DNA, 51 bp, Artificial
  Synthetic oligonucleotide
taatcggctgctataatggcctcatgggcctcaatacttgctgagggtggt

SEQ ID NO: 203991 - DNA, 60 bp, Artificial
  Synthetic oligonucleotide
aggtggatgcctagcgcttcagagcctgatcctggccacgcacccgatctggatcagaac

SEQ ID NO: 203992 - DNA, 51 bp, Artificial
  Synthetic oligonucleotide
tgcctcagcgaacccgagggccagtcggttcagcttcatcgccagagcaga

SEQ ID NO: 203993 - DNA, 51 bp, Artificial
  Synthetic oligonucleotide
agccagtcccaagagcagtccaagcctgacgcgcggagcgatcctactcgt

SEQ ID NO: 203994 - DNA, 51 bp, Artificial
  Synthetic oligonucleotide
tcgcgtgggattcgaacgagtggttgattccgtagattccgcgaagccgct

SEQ ID NO: 203995 - DNA, 51 bp, Artificial
  Synthetic oligonucleotide
gtggcttctgaggtacttgggaatttcaaggagcagccacgccgcagggag

SEQ ID NO: 203996 - DNA, 51 bp, Artificial
  Synthetic oligonucleotide
tcgactattgctcgaaatggaataaatggctccgcagcgactgggctgaga

SEQ ID NO: 203997 - DNA, 51 bp, Artificial
  Synthetic oligonucleotide
gtgtcacaatccgcttcatatcgaacatcctctcgtaatccctgagtggcg

SEQ ID NO: 203998 - DNA, 51 bp, Artificial
  Synthetic oligonucleotide
agctgcaggatggaggatacgtccccggctctttcgaagcgacaccgcctc

SEQ ID NO: 203999 - DNA, 51 bp, Artificial
  Synthetic oligonucleotide
tgatagatgccgggagcggtctgacacaaggggcatgcaatgtcgcgtgcc

SEQ ID NO: 204000 - DNA, 51 bp, Artificial
  Synthetic oligonucleotide
agctcgccgtttcaaagaggtgtcagctaaggcgtctttgcaaagaggttc

SEQ ID NO: 204001 - DNA, 51 bp, Artificial
  Synthetic oligonucleotide
tccccgaattcgacgcaggcatctccggacaatgacactcaagcgcactct

SEQ ID NO: 204002 - DNA, 57 bp, Artificial
  Synthetic oligonucleotide
aggtgaaggaagcggctcaggcctacaccctcgaaatgctcgccgtattggtccgcg

SEQ ID NO: 204003 - DNA, 51 bp, Artificial
  Synthetic oligonucleotide
tcaggatagtgccacgcgagcatattcctgacagtagttttcctgacacgg

SEQ ID NO: 204004 - DNA, 51 bp, Artificial
  Synthetic oligonucleotide
gatcaggggcgcaacaacggtccgatatgccccacacacgacatgcctcga

SEQ ID NO: 204005 - DNA, 51 bp, Artificial
  Synthetic oligonucleotide
ggagagcaaacgcatcgttcgtccttcttgggtgtccgatcgagattgctc

SEQ ID NO: 204006 - DNA, 51 bp, Artificial
  Synthetic oligonucleotide
tttcggataaagtctcgtttcttcgttgcaggatcgcagataggcgagtct

SEQ ID NO: 204007 - DNA, 51 bp, Artificial
  Synthetic oligonucleotide
cggatatcgctctaggatgataggactttgagctttagcgaagcccgctca

SEQ ID NO: 204008 - DNA, 51 bp, Artificial
  Synthetic oligonucleotide
aaacccgcatgtctctccgggccctcagaacactggttgcgattgcgcagt

SEQ ID NO: 204009 - DNA, 51 bp, Artificial
  Synthetic oligonucleotide
ggccaccgtggctaagcggtggccgtcaccgtttgcggcttaccgtaaacg

SEQ ID NO: 204010 - DNA, 51 bp, Artificial
  Synthetic oligonucleotide
aacgcgggcagacgctcaacggaggcagacgccatgatgagccgggagcag

SEQ ID NO: 204011 - DNA, 51 bp, Artificial
  Synthetic oligonucleotide
gcactcgcggtaggatacggactcgtcgcccctcaaggcagtcgagaaact

SEQ ID NO: 204012 - DNA, 51 bp, Artificial
  Synthetic oligonucleotide
gcccgggttcccgaggggtaggatgctggcacgaggcaccgccgctcggtt

SEQ ID NO: 204013 - DNA, 60 bp, Artificial
  Synthetic oligonucleotide
caataaacgtgtgcttgctggccgcgctttcatctgtcggaccagtctgtttatgctctt

SEQ ID NO: 204014 - DNA, 50 bp, Artificial
  Synthetic oligonucleotide
agggccttcgtttagggccagtcgcgtcaacggccgaccccttaggtccc

SEQ ID NO: 204015 - DNA, 51 bp, Artificial
  Synthetic oligonucleotide
gcagccctcaatggtgctccggcgaagcaggtctcgagtgccctatttgac

SEQ ID NO: 204016 - DNA, 51 bp, Artificial
  Synthetic oligonucleotide
ggtagcatcgtggatcgaggaagctgccggattgtacgccgcacaaccagg

SEQ ID NO: 204017 - DNA, 51 bp, Artificial
  Synthetic oligonucleotide
gccaagagtgtctcacgcgggcgtctcggatgggtataccccaatgaggcg

SEQ ID NO: 204018 - DNA, 51 bp, Artificial
  Synthetic oligonucleotide
ggcaggatccgaacgcgacttcagatatctgccccgctctagcagcggtta

SEQ ID NO: 204019 - DNA, 51 bp, Artificial
  Synthetic oligonucleotide
cgtgaacggatcctgctctagagccaattcgggttgcgcggagtcgggtga

SEQ ID NO: 204020 - DNA, 51 bp, Artificial
  Synthetic oligonucleotide
gcatcccccgcgggtagcagggacctgtcggtcctccgcaagcgacgttta

SEQ ID NO: 204021 - DNA, 51 bp, Artificial
  Synthetic oligonucleotide
ctcttcgtaagcgtgaacgcctatctgcttgcggggggctcactattttag

SEQ ID NO: 204022 - DNA, 51 bp, Artificial
  Synthetic oligonucleotide
cccgagaaacggttaagggctcgctaacacggttggggagtcgcaagggcg

SEQ ID NO: 204023 - DNA, 51 bp, Artificial
  Synthetic oligonucleotide
gtcgctgggctaagtctgtccaggcacgaggcgtttggtcgtctggctgcg

SEQ ID NO: 204024 - DNA, 51 bp, Artificial
  Synthetic oligonucleotide
ctctcgctctgctgagacggtgacgacaaagtgacgctgggacacgcagat

SEQ ID NO: 204025 - DNA, 55 bp, Artificial
  Synthetic oligonucleotide
tagcgatatttgtcgttaaaccgtgaacgagacggaaccgtgaatcagtacgttc

SEQ ID NO: 204026 - DNA, 51 bp, Artificial
  Synthetic oligonucleotide
gctccttactcgctctagcgccgtcccaatcgtaagtttcacggcccttgt

SEQ ID NO: 204027 - DNA, 51 bp, Artificial
  Synthetic oligonucleotide
aagtacgtgcacaacgagaaaggtctcaattctcgaatggacccgatacaa

SEQ ID NO: 204028 - DNA, 51 bp, Artificial
  Synthetic oligonucleotide
tgttgcgagttgaatcaggaaggcgttcccacgacccgagatggtaggtag

SEQ ID NO: 204029 - DNA, 51 bp, Artificial
  Synthetic oligonucleotide
gtcgaggcgcttcgctacctccagcccgagccctcatcctcggcttcaggc

SEQ ID NO: 204030 - DNA, 51 bp, Artificial
  Synthetic oligonucleotide
aaggggtgcacgtcatggatcagtggggagcgtggcaggaaatcggcccca

SEQ ID NO: 204031 - DNA, 51 bp, Artificial
  Synthetic oligonucleotide
gcgtcggatcacacgcggatgtaacagcaccgcagctggagctaagagcct

SEQ ID NO: 204032 - DNA, 51 bp, Artificial
  Synthetic oligonucleotide
gtcaccgacaaagcgcggcggtatcacaaaccgcgggcggtacacttgcgg

SEQ ID NO: 204033 - DNA, 51 bp, Artificial
  Synthetic oligonucleotide
aacacagcgggtcgcaacgcgccccagtttctgagatggccggacaggcac

SEQ ID NO: 204034 - DNA, 51 bp, Artificial
  Synthetic oligonucleotide
cgcctatccggaggcttcgtcaatggctgttcacagtccaaggtcattagc

SEQ ID NO: 204035 - DNA, 50 bp, Artificial
  Synthetic oligonucleotide
tgagtgtcgataattaatgaaatgtctcggatctgaaactgcttacgcca

SEQ ID NO: 204036 - DNA, 60 bp, Artificial
  Synthetic oligonucleotide
gatcacgcaggcggtggatttctataaggctcagttcaaaaggctcggacgctcgatagc

SEQ ID NO: 204037 - DNA, 50 bp, Artificial
  Synthetic oligonucleotide
aacacggatgccggcaaagcacaattcgttgcctacctgaacagcagact

SEQ ID NO: 204038 - DNA, 50 bp, Artificial
  Synthetic oligonucleotide
aacatgcccggtgacccatcgaatcaccttacaggccgccctgctgtctg

SEQ ID NO: 204039 - DNA, 50 bp, Artificial
  Synthetic oligonucleotide
tgagaaaatttccgctgaagacatccggcaactagaaccgaacctgtcca

SEQ ID NO: 204040 - DNA, 50 bp, Artificial
  Synthetic oligonucleotide
acggctctccggtgggtcggtttctgcggagattaatgcagcggccaagc

SEQ ID NO: 204041 - DNA, 50 bp, Artificial
  Synthetic oligonucleotide
acggcctgatggcgtgcgaggcagatcatgtccggtggtccgacttggta

SEQ ID NO: 204042 - DNA, 50 bp, Artificial
  Synthetic oligonucleotide
aacaatgacgcggctgcaaaggtcctcctgaccgaagcctctagcgcgcg

SEQ ID NO: 204043 - DNA, 50 bp, Artificial
  Synthetic oligonucleotide
aaaacacggacggcattggttagagcaataaacgtgtgcttgctggccgc

SEQ ID NO: 204044 - DNA, 50 bp, Artificial
  Synthetic oligonucleotide
agacaaggggcgcgtgaacgaccggcgtatgatcagccgtgtcatccacg

SEQ ID NO: 204045 - DNA, 50 bp, Artificial
  Synthetic oligonucleotide
agaatggccgtcctgggccactaccctgcatcttcacatcgatggggcga

SEQ ID NO: 204046 - DNA, 50 bp, Artificial
  Synthetic oligonucleotide
acttgccccttgcgcctcctcgacggttggccccaagccctaattgcttc

SEQ ID NO: 204047 - DNA, 56 bp, Artificial
  Synthetic oligonucleotide
gagcgttgtttaaggcgagcaacacgcggactaacccgacatttcgtgaaattaga

SEQ ID NO: 204048 - DNA, 50 bp, Artificial
  Synthetic oligonucleotide
acttcggaccttggactgggggcggtgccatggctgacggatgggcattt

SEQ ID NO: 204049 - DNA, 50 bp, Artificial
  Synthetic oligonucleotide
acttcgacggagtttccagcctccgctgcgcttggcaacccccaaatgat

SEQ ID NO: 204050 - DNA, 50 bp, Artificial
  Synthetic oligonucleotide
actgtcgtgcccagcgtgagagccgttcgtgaccgggagttttgcgagca

SEQ ID NO: 204051 - DNA, 50 bp, Artificial
  Synthetic oligonucleotide
actgtaccgcccgcagtttgtgagacaccgatttccagcctacgcggcca

SEQ ID NO: 204052 - DNA, 50 bp, Artificial
  Synthetic oligonucleotide
aaaaggccactccctcaggatggccacccgtgtttgtcggtgtcaagcga

SEQ ID NO: 204053 - DNA, 50 bp, Artificial
  Synthetic oligonucleotide
aaaatggtgcggtgcatatacactgccataacgcgccagaagacttcccg

SEQ ID NO: 204054 - DNA, 50 bp, Artificial
  Synthetic oligonucleotide
actgagacgccccgatcctaccgatccgaacccaaggagcaccatgtccc

SEQ ID NO: 204055 - DNA, 50 bp, Artificial
  Synthetic oligonucleotide
aaacacgccgcaaaccactgcccggtgaataagacgggctaggaaaggca

SEQ ID NO: 204056 - DNA, 50 bp, Artificial
  Synthetic oligonucleotide
actgaccagggatagccacctttcgccgacccggagtgtggcatcgccgc

SEQ ID NO: 204057 - DNA, 50 bp, Artificial
  Synthetic oligonucleotide
ttggcggtcgccatacacctgcgcgtagagcacctctggatccgcagact

SEQ ID NO: 204058 - DNA, 60 bp, Artificial
  Synthetic oligonucleotide
gagccttccgatagcccttccaagccgtacgagcgcagcttcagagatgtcgaatctcgc

SEQ ID NO: 204059 - DNA, 50 bp, Artificial
  Synthetic oligonucleotide
aaaccctgccccgagtgccccttgaaggcattggctcgccggatggagcc

SEQ ID NO: 204060 - DNA, 50 bp, Artificial
  Synthetic oligonucleotide
aaacggacgggtccggagtttctcgcgcggaccgcacttggcagctgcgt

SEQ ID NO: 204061 - DNA, 50 bp, Artificial
  Synthetic oligonucleotide
acgtgatgcgaccgagtatggccgcgcatgctgagcgcatagtcctcgaa

SEQ ID NO: 204062 - DNA, 50 bp, Artificial
  Synthetic oligonucleotide
acggttgttcggctgctggtcacgagagggattgccacctcagtcgcaca

SEQ ID NO: 204063 - DNA, 50 bp, Artificial
  Synthetic oligonucleotide
aactcggataggcggcttagggcttgctcagaccgcatccatctgaggcc

SEQ ID NO: 204064 - DNA, 50 bp, Artificial
  Synthetic oligonucleotide
acatcggccacgacagccatcccgctacgttctacgacgccacgcactct

SEQ ID NO: 204065 - DNA, 50 bp, Artificial
  Synthetic oligonucleotide
acaggtcgcaggcgtatactagaatatatcttctcgcctcttgtagagat

SEQ ID NO: 204066 - DNA, 50 bp, Artificial
  Synthetic oligonucleotide
acagacgtatcggctcatccaggggcacgcttcgggtgtgaccgcctcct

SEQ ID NO: 204067 - DNA, 50 bp, Artificial
  Synthetic oligonucleotide
aactgccgagattgcctcccggagatcacggagggcactgaccacccgtt

SEQ ID NO: 204068 - DNA, 50 bp, Artificial
  Synthetic oligonucleotide
acactcgtccaaacggacgggtccggagtttctcgcgcggaccgcacttg

SEQ ID NO: 204069 - DNA, 60 bp, Artificial
  Synthetic oligonucleotide
gagccgcacttgaatctgcgtcgaacgatgtccccacccgcagagctgcttaaatcattc

SEQ ID NO: 204070 - DNA, 50 bp, Artificial
  Synthetic oligonucleotide
acactagcggcatgtcctgtagcccacccacgtcgcacttccagctctgg

SEQ ID NO: 204071 - DNA, 50 bp, Artificial
  Synthetic oligonucleotide
acacgcgaggagcagattgccttcaaagcaccgctctgtggccgaaggca

SEQ ID NO: 204072 - DNA, 50 bp, Artificial
  Synthetic oligonucleotide
aagagttgcttactcacggtgtcccgtccggactcgcgttgcggaaccgc

SEQ ID NO: 204073 - DNA, 50 bp, Artificial
  Synthetic oligonucleotide
acacgagcgggcgacctccgctcactaatgtgtaagtgccgtcgcgctta

SEQ ID NO: 204074 - DNA, 50 bp, Artificial
  Synthetic oligonucleotide
aagcccttgcgagcagagcgaaaggtccggggtcgcgccaaatcttcgag

SEQ ID NO: 204075 - DNA, 50 bp, Artificial
  Synthetic oligonucleotide
aagcctgatgcacggcgcgtcgtatacccctgccttgtagtgcggctcgt

SEQ ID NO: 204076 - DNA, 50 bp, Artificial
  Synthetic oligonucleotide
acacagcgcgccgtctgcatgtatctgcgcttcacccgtcgtagtcgcaa

SEQ ID NO: 204077 - DNA, 50 bp, Artificial
  Synthetic oligonucleotide
aaggcagtctcactgcggcgagagaaagacccgtgatccccaacccgttc

SEQ ID NO: 204078 - DNA, 50 bp, Artificial
  Synthetic oligonucleotide
acacaccggttcgcgattgagttcaggcgtgtctcgcttgggtcccgata

SEQ ID NO: 204079 - DNA, 50 bp, Artificial
  Synthetic oligonucleotide
aaggcattggctcgccggatggagcccaccactgtccgcggatctcgata

SEQ ID NO: 204080 - DNA, 56 bp, Artificial
  Synthetic oligonucleotide
gagacgaaacccacgaccgttgacatgctctaacccctgcgttcggtcgcctacgc

SEQ ID NO: 204081 - DNA, 50 bp, Artificial
  Synthetic oligonucleotide
aattctagcctcattccgcagggtcagcgaggcccctaccctcccgggcc

SEQ ID NO: 204082 - DNA, 50 bp, Artificial
  Synthetic oligonucleotide
aagggtcgctcatgccaagacttcacgcagccgaatggcgtgatgcaatt

SEQ ID NO: 204083 - DNA, 50 bp, Artificial
  Synthetic oligonucleotide
aatggcacagcttggtcgcaacctgctgtcggaccgagcccacgatcgga

SEQ ID NO: 204084 - DNA, 50 bp, Artificial
  Synthetic oligonucleotide
aagtcggtgtcggcgatagactgtcgaacgcaagtaagcggggccgccca

SEQ ID NO: 204085 - DNA, 50 bp, Artificial
  Synthetic oligonucleotide
aatccgggtcgcactctccgaagctctacgatccttgagtgcccgtgccg

SEQ ID NO: 204086 - DNA, 50 bp, Artificial
  Synthetic oligonucleotide
aatcaccttacaggccgccctgctgtctgcggttatcctggccacactcc

SEQ ID NO: 204087 - DNA, 50 bp, Artificial
  Synthetic oligonucleotide
aagtgtgtcgcaccgggttttcggctcggaacactctcggttcctcccgc

SEQ ID NO: 204088 - DNA, 50 bp, Artificial
  Synthetic oligonucleotide
acggactctcagagcgctgtagcaggcgggctctcttgcggagtggatcc

SEQ ID NO: 204089 - DNA, 50 bp, Artificial
  Synthetic oligonucleotide
acgccggagtgtcttcaagcgtcgcagtgtcccactctcgtccagtccga

SEQ ID NO: 204090 - DNA, 50 bp, Artificial
  Synthetic oligonucleotide
acgccacaagaggcccgcctttgaatccggctcgtctgtgcacaatcctg

SEQ ID NO: 204091 - DNA, 60 bp, Artificial
  Synthetic oligonucleotide
gactaccgatgttacacactctcactacgcgcaccaccgaggttcatgtcgtagaaaaca

SEQ ID NO: 204092 - DNA, 50 bp, Artificial
  Synthetic oligonucleotide
acgatagcagtcgggttaagccccgttgggtccgtccacataaccgggct

SEQ ID NO: 204093 - DNA, 50 bp, Artificial
  Synthetic oligonucleotide
acgacgcgctcgtgtacggctgacagatggggaatgagcccccaggcgaa

SEQ ID NO: 204094 - DNA, 50 bp, Artificial
  Synthetic oligonucleotide
aaccgctcgacatcaggaattgtcactcggcgatttgccacgattagcaa

SEQ ID NO: 204095 - DNA, 50 bp, Artificial
  Synthetic oligonucleotide
acgaaccgtcccgctatccccaaccgccattcagaccctctcggggatgg

SEQ ID NO: 204096 - DNA, 50 bp, Artificial
  Synthetic oligonucleotide
accttcccactctatagagccgccccattcgccaacccgcaccgatctga

SEQ ID NO: 204097 - DNA, 50 bp, Artificial
  Synthetic oligonucleotide
accgtcggcacagcactccgacaacgcgagggtaacatcgaatggtcgga

SEQ ID NO: 204098 - DNA, 50 bp, Artificial
  Synthetic oligonucleotide
accgggtgctgcgaggtcgagcttcctgtctccgacagtcagcgacttcc

SEQ ID NO: 204099 - DNA, 50 bp, Artificial
  Synthetic oligonucleotide
accgggctgttgtcccgtcaccatttcacgatcgagcggtgtgccaagcg

SEQ ID NO: 204100 - DNA, 50 bp, Artificial
  Synthetic oligonucleotide
aaccggaccgtgaagcgtggcgattagccggccctgtgtcaccgcggcaa

SEQ ID NO: 204101 - DNA, 50 bp, Artificial
  Synthetic oligonucleotide
accggagcgcgggactccgtgagactgcgacacgtccttcataactctgc

SEQ ID NO: 204102 - DNA, 57 bp, Artificial
  Synthetic oligonucleotide
gacgtttgatttgtccatctcactcgggttcttcgtgtaaaaccaagcacttagcta

SEQ ID NO: 204103 - DNA, 50 bp, Artificial
  Synthetic oligonucleotide
aacctccgactatcgccgcccctgcagccgagcgttcgtgcagtaaagga

SEQ ID NO: 204104 - DNA, 50 bp, Artificial
  Synthetic oligonucleotide
aacctgcggcctaagcggaagctgagcctctcggggtcagataaggcagt

SEQ ID NO: 204105 - DNA, 50 bp, Artificial
  Synthetic oligonucleotide
accctcgtcatcatgcacgccgtctagggcctgaccgcttacccggccgg

SEQ ID NO: 204106 - DNA, 50 bp, Artificial
  Synthetic oligonucleotide
acccgtgtcgttcgggtaaacgccaaggtacaagctcacgtcggggcagg

SEQ ID NO: 204107 - DNA, 50 bp, Artificial
  Synthetic oligonucleotide
aacctggtcggtaacccacttgaggaacgcgcaggaacgacactcgcgtc

SEQ ID NO: 204108 - DNA, 50 bp, Artificial
  Synthetic oligonucleotide
acccgaacacagccctctcgcttaaggcgaccgcagggggaatcaagact

SEQ ID NO: 204109 - DNA, 50 bp, Artificial
  Synthetic oligonucleotide
acccctctcaccgcgccacgcgtcattccctatgcaaccgagaaaggtcc

SEQ ID NO: 204110 - DNA, 50 bp, Artificial
  Synthetic oligonucleotide
aacgaaaattaggaacggtcgcccctgcccaacgcaccacttccgcgggg

SEQ ID NO: 204111 - DNA, 50 bp, Artificial
  Synthetic oligonucleotide
accagggatcggatgggtccccaggtttcgcggatcgcgaagtctccgtc

SEQ ID NO: 204112 - DNA, 50 bp, Artificial
  Synthetic oligonucleotide
accaacggcctacgccccttcgtgccccaagctaagctgagtttgctcaa

SEQ ID NO: 204113 - DNA, 58 bp, Artificial
  Synthetic oligonucleotide
gacggttccgcttggttcgcgattctcaagaggtcactcagaggacgaatccgtcggc

SEQ ID NO: 204114 - DNA, 50 bp, Artificial
  Synthetic oligonucleotide
ttccggaggaatcccttagtgccaggtctgaacctggtactgaaggtgag

SEQ ID NO: 204115 - DNA, 50 bp, Artificial
  Synthetic oligonucleotide
cggcggacgttcgtcgcttggcgagggtgtgaattcaaaacggatcggcg

SEQ ID NO: 204116 - DNA, 50 bp, Artificial
  Synthetic oligonucleotide
cggattctgctcacccataagcagacggcttccgcctaggttttgattat

SEQ ID NO: 204117 - DNA, 50 bp, Artificial
  Synthetic oligonucleotide
cgcgggttctggtccacaatcccgcagctctccacggattcggttgggca

SEQ ID NO: 204118 - DNA, 50 bp, Artificial
  Synthetic oligonucleotide
ggttgtgagctgggaccgggctgatcagaaatcggcacactcggttggct

SEQ ID NO: 204119 - DNA, 50 bp, Artificial
  Synthetic oligonucleotide
gtaacggaagaattttcgtaggcgactaatagttaaccagatgcaatttc

SEQ ID NO: 204120 - DNA, 50 bp, Artificial
  Synthetic oligonucleotide
cgcccgggagtgcatggcgaccaagggctccgcaacgtaccaggcttggc

SEQ ID NO: 204121 - DNA, 50 bp, Artificial
  Synthetic oligonucleotide
gtacaagagactcgtcaggatgaggcaaccgcccactcccatcccgccca

SEQ ID NO: 204122 - DNA, 50 bp, Artificial
  Synthetic oligonucleotide
gtacgtcccacctctatcctgtgggagcccggcggacgttcgtcgcttgg

SEQ ID NO: 204123 - DNA, 50 bp, Artificial
  Synthetic oligonucleotide
cgattcccgcctgcccatatcttgtatctacaggcgaatccgcctaatat

SEQ ID NO: 204124 - DNA, 57 bp, Artificial
  Synthetic oligonucleotide
caaggagacgggatcgaccgacagttcacggttgcgttctacgagcgaacactcgac

SEQ ID NO: 204125 - DNA, 58 bp, Artificial
  Synthetic oligonucleotide
gacgccaagtcgagagcagctgaccggatcgccacaaggtaacgggctcttcccaaac

SEQ ID NO: 204126 - DNA, 50 bp, Artificial
  Synthetic oligonucleotide
cgagggctggcgccatgtcaaggtcaccgatcgccataccgcggtggatt

SEQ ID NO: 204127 - DNA, 50 bp, Artificial
  Synthetic oligonucleotide
ccggactcttcggggccgacgggcaagccctgatcaccaatcccctttat

SEQ ID NO: 204128 - DNA, 50 bp, Artificial
  Synthetic oligonucleotide
gtcgcgcggtctgccgtttccgtgtcgatcatccacgggtcacccccttg

SEQ ID NO: 204129 - DNA, 50 bp, Artificial
  Synthetic oligonucleotide
cccgagatgtaagttcccggagcgtgggttccgaagtagctcggcgagta

SEQ ID NO: 204130 - DNA, 50 bp, Artificial
  Synthetic oligonucleotide
ccatgtgcgtgcgtaggaacgtagcgccgcctttgtcgcgcaataggtcc

SEQ ID NO: 204131 - DNA, 50 bp, Artificial
  Synthetic oligonucleotide
catagcacatcgcggcgccacctgagcttaaaaatacgggcccgctgaga

SEQ ID NO: 204132 - DNA, 50 bp, Artificial
  Synthetic oligonucleotide
caggatcttcgaagacttacctactgtctgcccttgcggtcgtcttatcc

SEQ ID NO: 204133 - DNA, 50 bp, Artificial
  Synthetic oligonucleotide
cagagcatctcgggtctgtcgtcgcctaggccatctggcatagcacgcgt

SEQ ID NO: 204134 - DNA, 50 bp, Artificial
  Synthetic oligonucleotide
cagacgcggatcacgggacgaggagatcatgagccattcgcggcatcggg

SEQ ID NO: 204135 - DNA, 50 bp, Artificial
  Synthetic oligonucleotide
cacgcattagagtccgtccgataagtcatagagcgccttggacgcgctct

SEQ ID NO: 204136 - DNA, 54 bp, Artificial
  Synthetic oligonucleotide
gacccaacccagtcgtaggggacggtatcagggccccctcgatagcagccgttc

SEQ ID NO: 204137 - DNA, 50 bp, Artificial
  Synthetic oligonucleotide
cacctggagatcggtcggcttgcgtgtccaagggctgacgacggccgaaa

SEQ ID NO: 204138 - DNA, 50 bp, Artificial
  Synthetic oligonucleotide
gcttggccagaggggtaagagccaccgccgacggagaatcgacctatgct

SEQ ID NO: 204139 - DNA, 50 bp, Artificial
  Synthetic oligonucleotide
gcgtctaatgaccggacgcgggttctggtccacaatcccgcagctctcca

SEQ ID NO: 204140 - DNA, 50 bp, Artificial
  Synthetic oligonucleotide
gcgggggagctctctaccgatttcctccgaattggaatttttttcgtaag

SEQ ID NO: 204141 - DNA, 50 bp, Artificial
  Synthetic oligonucleotide
gcgcagcccccacgctcagtgagtcccacttatagcgggcgcaattcgcg

SEQ ID NO: 204142 - DNA, 50 bp, Artificial
  Synthetic oligonucleotide
gcgagtcggtcgcaagacctggcctcgttttaccaaccgggctcaaggca

SEQ ID NO: 204143 - DNA, 50 bp, Artificial
  Synthetic oligonucleotide
gcgacgcaggtgaggcggcgacgaaacgagaacagcccacccccttgcac

SEQ ID NO: 204144 - DNA, 50 bp, Artificial
  Synthetic oligonucleotide
gcccggtctacctctaggccggtaatcaagctccgtaccctacccaccga

SEQ ID NO: 204145 - DNA, 50 bp, Artificial
  Synthetic oligonucleotide
gccccggctaaacgcgggcagacgctcaacggaggcagacgccatgatga

SEQ ID NO: 204146 - DNA, 50 bp, Artificial
  Synthetic oligonucleotide
gcatagccttgcgtgatgggctcggcggtacgtcaagacgcgacaggact

SEQ ID NO: 204147 - DNA, 60 bp, Artificial
  Synthetic oligonucleotide
gaaaccgactccctgctccgctgctacccaaggtcctgttgctgcgcatctcatcgaacg

SEQ ID NO: 204148 - DNA, 50 bp, Artificial
  Synthetic oligonucleotide
gcacccgagtttgcgacaagccccttccggttgcctttttgtccagcgga

SEQ ID NO: 204149 - DNA, 50 bp, Artificial
  Synthetic oligonucleotide
gacgctcaacggaggcagacgccatgatgagccgggagcagaacgaccat

SEQ ID NO: 204150 - DNA, 50 bp, Artificial
  Synthetic oligonucleotide
ggcctcctaccgacccaacctatccacctcagcggtcacccacgcactcc

SEQ ID NO: 204151 - DNA, 50 bp, Artificial
  Synthetic oligonucleotide
gaacggacgctttgacatccgtggcacacggggctggcccggtctgtaca

SEQ ID NO: 204152 - DNA, 50 bp, Artificial
  Synthetic oligonucleotide
gaaacgcacaacacctcccaagcgcccaggtagtactagagccgtggccg

SEQ ID NO: 204153 - DNA, 50 bp, Artificial
  Synthetic oligonucleotide
cttcgcaacgtaccaggcttggccaacgtcgcatggctgcccagtctgac

SEQ ID NO: 204154 - DNA, 50 bp, Artificial
  Synthetic oligonucleotide
ctggtccgcaggagccagtgccccgtcctcgtggtccggcaaccggtcga

SEQ ID NO: 204155 - DNA, 50 bp, Artificial
  Synthetic oligonucleotide
ctgatcggagcagagtctcgccccgtttcgagacaaaagcgcgcagctgc

SEQ ID NO: 204156 - DNA, 50 bp, Artificial
  Synthetic oligonucleotide
ctcgcctcattcgaggatacgtccggtggtgcaagcaaatggcgggagga

SEQ ID NO: 204157 - DNA, 50 bp, Artificial
  Synthetic oligonucleotide
ctcactggccgaatgggcgtctaatgaccggacgcgggttctggtccaca

SEQ ID NO: 204158 - DNA, 60 bp, Artificial
  Synthetic oligonucleotide
cttgcgtactgcacgttcggccacatcaatcgggtgaactacgcgctctcgacggcaccc

SEQ ID NO: 204159 - DNA, 50 bp, Artificial
  Synthetic oligonucleotide
ggggccgacgggcaagccctgatcaccaatcccctttatcgcagattcct

SEQ ID NO: 204160 - DNA, 50 bp, Artificial
  Synthetic oligonucleotide
cgttcactgaacgttcgcacaaagcgtaactgggcgaacagtcaacacga

SEQ ID NO: 204161 - DNA, 50 bp, Artificial
  Synthetic oligonucleotide
cgttactcggacgggctcctagctaacgcttaccgcccatcccgcagttg

SEQ ID NO: 204162 - DNA, 50 bp, Artificial
  Synthetic oligonucleotide
cgtcctacgggcgacgcaggtgaggcggcgacgaaacgagaacagcccac

SEQ ID NO: 204163 - DNA, 50 bp, Artificial
  Synthetic oligonucleotide
tagccgcatgacagccgtcggtcgcgcacagatggatttgacgccaaccg

SEQ ID NO: 204164 - DNA, 50 bp, Artificial
  Synthetic oligonucleotide
aggcccgcctttgaatccggctcgtctgtgcacaatcctgctcatgctcg

SEQ ID NO: 204165 - DNA, 50 bp, Artificial
  Synthetic oligonucleotide
agctgagccgagtggagcacgtccagcgaaaacgagctaacaaccgggcg

SEQ ID NO: 204166 - DNA, 50 bp, Artificial
  Synthetic oligonucleotide
tagtcccaacgcatcaaaccgttactcggacgggctcctaggcgcgcact

SEQ ID NO: 204167 - DNA, 50 bp, Artificial
  Synthetic oligonucleotide
agctacgcatgggggaggctgtgctccgggttcaatcgacgggagtgtat

SEQ ID NO: 204168 - DNA, 50 bp, Artificial
  Synthetic oligonucleotide
tatcctgtgggagcccggcggacgttcgtcgcttggcgagggtgtgaatt

SEQ ID NO: 204169 - DNA, 60 bp, Artificial
  Synthetic oligonucleotide
cttgccttggagattaagctgtcgcccggctgcgatagcatcgtctgatcaacttgcata

SEQ ID NO: 204170 - DNA, 50 bp, Artificial
  Synthetic oligonucleotide
agcggtacaggttcggtgcagcctcttcggtgcagcctcatgggatccat

SEQ ID NO: 204171 - DNA, 50 bp, Artificial
  Synthetic oligonucleotide
agcgctgggcggaaagtcatctcccgggatacgaacgagttcctttgcgg

SEQ ID NO: 204172 - DNA, 50 bp, Artificial
  Synthetic oligonucleotide
agcgaaccaccctacgctgagggcgttccacagtctcagcagcaaggaac

SEQ ID NO: 204173 - DNA, 50 bp, Artificial
  Synthetic oligonucleotide
agcctcccgacgcggcatgcctaaataattggcacacgatttgcgaaggt

SEQ ID NO: 204174 - DNA, 50 bp, Artificial
  Synthetic oligonucleotide
agccgacggccttagccgtattagccagctcttctgacgagcacgaacgc

SEQ ID NO: 204175 - DNA, 50 bp, Artificial
  Synthetic oligonucleotide
tcacgcggcggaaaactacgctcacttggatctttgcggagcccctctta

SEQ ID NO: 204176 - DNA, 50 bp, Artificial
  Synthetic oligonucleotide
agcatcgtggccctacctcatccggacctgtaccgcttgataggggcgac

SEQ ID NO: 204177 - DNA, 50 bp, Artificial
  Synthetic oligonucleotide
agcagagggtcaagcgcagcgatcgttgagcccggatcagtgtcgtcagc

SEQ ID NO: 204178 - DNA, 50 bp, Artificial
  Synthetic oligonucleotide
agatctcgctctaaacggcagatgtggtttgttaaaaccgaaacaacaga

SEQ ID NO: 204179 - DNA, 50 bp, Artificial
  Synthetic oligonucleotide
agagagggagtccacacttcggtccgccggtgttcgatcgtgtcacgcgg

SEQ ID NO: 204180 - DNA, 60 bp, Artificial
  Synthetic oligonucleotide
ctgcgtacgtacgtgcttacgtaatgaggcagccacgcgcttactaagcgcgtcgtagct

SEQ ID NO: 204181 - DNA, 50 bp, Artificial
  Synthetic oligonucleotide
agacgtcgtgtccgtctgggtgacttgggtcagttgccccgtggcgccgt

SEQ ID NO: 204182 - DNA, 50 bp, Artificial
  Synthetic oligonucleotide
agacgcgtgagagggcatcgacggactgaggtgcttccgcctctacccgt

SEQ ID NO: 204183 - DNA, 50 bp, Artificial
  Synthetic oligonucleotide
agacgccctagaacaatgggtctccaacccctgatccgggcttgttcgga

SEQ ID NO: 204184 - DNA, 50 bp, Artificial
  Synthetic oligonucleotide
agacgagatcccatagccggaaccagcggtcatccctcgacactcggccc

SEQ ID NO: 204185 - DNA, 50 bp, Artificial
  Synthetic oligonucleotide
agacctgtggatgattcgcccctggatgcgctctagcatcatgccgaggc

SEQ ID NO: 204186 - DNA, 50 bp, Artificial
  Synthetic oligonucleotide
tcggccgataacggctgatattgaaagggatcctgatagatcaattacgg

SEQ ID NO: 204187 - DNA, 50 bp, Artificial
  Synthetic oligonucleotide
agacattcgccctatgcccagccacggccctcctacagcccaacaatctg

SEQ ID NO: 204188 - DNA, 50 bp, Artificial
  Synthetic oligonucleotide
cacccggcgcctcaacggctgcacgcttatcggcccggaaccatccgtga

SEQ ID NO: 204189 - DNA, 50 bp, Artificial
  Synthetic oligonucleotide
cacaagtcgtgtcactccctcgtgcctggtttaaatgattgcaaattctt

SEQ ID NO: 204190 - DNA, 50 bp, Artificial
  Synthetic oligonucleotide
caagtgccccggtcgtgcccaaagcaagcatcagaccgaggaaatgagcc

SEQ ID NO: 204191 - DNA, 60 bp, Artificial
  Synthetic oligonucleotide
ctgagatctagttctccacacctaatgctacggcttagcttaaagtatgtgatctagcgg

SEQ ID NO: 204192 - DNA, 50 bp, Artificial
  Synthetic oligonucleotide
caactgtggggccgcgtcaggtttccagaccggacgggattattttgccc

SEQ ID NO: 204193 - DNA, 50 bp, Artificial
  Synthetic oligonucleotide
gttcccacttcccgaaccgtttcgtggccgtcacgtcgaggtttaagtaa

SEQ ID NO: 204194 - DNA, 50 bp, Artificial
  Synthetic oligonucleotide
caacggactttcgcagcctcgcccccgggaatgattgcatccgggcgccc

SEQ ID NO: 204195 - DNA, 50 bp, Artificial
  Synthetic oligonucleotide
attgtcacgggggaacctgagcggagcgcaagatcgtcagtgtggcgcct

SEQ ID NO: 204196 - DNA, 50 bp, Artificial
  Synthetic oligonucleotide
gttgttcgcctcaatagctcgcgtcaggtcgccgaatgaaagtccatagc

SEQ ID NO: 204197 - DNA, 50 bp, Artificial
  Synthetic oligonucleotide
atgtaaagcttcctatctatacgtcaggtgtcaccgatccgcatgttgca

SEQ ID NO: 204198 - DNA, 50 bp, Artificial
  Synthetic oligonucleotide
atggcgcccctcgttgggtgtgatagccggatccgtcctaagtgcgatcc

SEQ ID NO: 204199 - DNA, 50 bp, Artificial
  Synthetic oligonucleotide
atgcggggagctgcgttcacggtctaggtactcctgcgaatgggcggcaa

SEQ ID NO: 204200 - DNA, 50 bp, Artificial
  Synthetic oligonucleotide
atgccccacgccctctggacgacgcacgaaccggccgtgatccaagtctc

SEQ ID NO: 204201 - DNA, 50 bp, Artificial
  Synthetic oligonucleotide
atgcagatctacggcgcatagtgcctctgcgtgatcccggagctttggcg

SEQ ID NO: 204202 - DNA, 55 bp, Artificial
  Synthetic oligonucleotide
ctgacggaggggaccgtagcgccgaaccgccatcccggacacaggatgacggacc

SEQ ID NO: 204203 - DNA, 50 bp, Artificial
  Synthetic oligonucleotide
atcggttgccttcagcgtggagcgtttgctggcttgggacaactcccagc

SEQ ID NO: 204204 - DNA, 50 bp, Artificial
  Synthetic oligonucleotide
atcgaggttcgggcccttcggtcaaaggcgcgcagcacactgtttcttta

SEQ ID NO: 204205 - DNA, 50 bp, Artificial
  Synthetic oligonucleotide
atcgaaaggtgcctcgcgatgcgcgtgttgctctgccggttggtgaacca

SEQ ID NO: 204206 - DNA, 50 bp, Artificial
  Synthetic oligonucleotide
atccggtgcgaggggttgcccgagtctgtcagaagttatgccgcgatgtc

SEQ ID NO: 204207 - DNA, 50 bp, Artificial
  Synthetic oligonucleotide
atcattcggcaacgataggtccgcaaccgtactgattgggcggcgacccg

SEQ ID NO: 204208 - DNA, 50 bp, Artificial
  Synthetic oligonucleotide
ataggggatcggagggaccgttcggggcgaagcaccaccatgtgatcgct

SEQ ID NO: 204209 - DNA, 50 bp, Artificial
  Synthetic oligonucleotide
atacctcatgcacgagcggctactcgtctctcgcttggctggcccctgat

SEQ ID NO: 204210 - DNA, 50 bp, Artificial
  Synthetic oligonucleotide
agtgtggcatcgccgcctatcgaacccgccccggacaggttagaggcttt

SEQ ID NO: 204211 - DNA, 50 bp, Artificial
  Synthetic oligonucleotide
agtcgcccgacggagggcaggtgcagcatggtgggtcggatccgagtgac

SEQ ID NO: 204212 - DNA, 50 bp, Artificial
  Synthetic oligonucleotide
aggtctgccctcccaaaggaaggatcgcaggtcgccccgtacacgagggg

SEQ ID NO: 204213 - DNA, 60 bp, Artificial
  Synthetic oligonucleotide
ctgacgccatctcgcatgtgcgagaaaaatggtgcggtgcatatacactgccataacgcg

SEQ ID NO: 204214 - DNA, 50 bp, Artificial
  Synthetic oligonucleotide
agggttgcggctgggcagatcggagcgttgcttgaacgagcccgaacagg

SEQ ID NO: 204215 - DNA, 50 bp, Artificial
  Synthetic oligonucleotide
aggggcacggaggagttgcgatggaaacctcacggcgacccgaacccgcc

SEQ ID NO: 204216 - DNA, 50 bp, Artificial
  Synthetic oligonucleotide
tagcccatacccatatggagcatccccgtctgggagttcgggcgctagtt

SEQ ID NO: 204217 - DNA, 60 bp, Artificial
  Synthetic oligonucleotide
gggagcggtctgacacaaggggcatgcaatgtcgcgtgccccagtcgcgagtgggcgcag

SEQ ID NO: 204218 - DNA, 59 bp, Artificial
  Synthetic oligonucleotide
tcaatgggtcgatcaaccgaatcgttgcttttatgtgttgtccagttagcaaatggttc

SEQ ID NO: 204219 - DNA, 57 bp, Artificial
  Synthetic oligonucleotide
attctgagcatgagcggcactcagtcccgcacactatccgatttcagcacgaccgta

SEQ ID NO: 204220 - DNA, 55 bp, Artificial
  Synthetic oligonucleotide
tgtctttacatatgtttggagttgggtcactcgtgtttggctaagaggacgttgg

SEQ ID NO: 204221 - DNA, 55 bp, Artificial
  Synthetic oligonucleotide
ttactttaagacactcacagacattgccatggactattctatagaaagcgtaacc

SEQ ID NO: 204222 - DNA, 55 bp, Artificial
  Synthetic oligonucleotide
ttactttggcccgctcgcgaggaatgcctgccgaaactcacgatccagcgcctcc

SEQ ID NO: 204223 - DNA, 55 bp, Artificial
  Synthetic oligonucleotide
ttgcaaaatgcgttgtggcggggattaccgggcaaacgatgcggcaagtcgggta

SEQ ID NO: 204224 - DNA, 55 bp, Artificial
  Synthetic oligonucleotide
ttgtgagacgcgtccagatcggtacgatcgctgtcgctctctgtttcccggcccg

SEQ ID NO: 204225 - DNA, 55 bp, Artificial
  Synthetic oligonucleotide
tttagcgattcgtaggtaacccgcgacattataaaagtcgaaatacctccgatga

SEQ ID NO: 204226 - DNA, 55 bp, Artificial
  Synthetic oligonucleotide
tttcaaccatcagcgggccttttaaccgatacgcgccttccgcagcatatccgtg

SEQ ID NO: 204227 - DNA, 55 bp, Artificial
  Synthetic oligonucleotide
tttcaggtctacatgccttacgcgcacaattccggcgtatcccagcggattgaat

SEQ ID NO: 204228 - DNA, 55 bp, Artificial
  Synthetic oligonucleotide
gcaaggcagcctccagcactcggggtcgcatgccctaagattgctcgctcccaaa

SEQ ID NO: 204229 - DNA, 55 bp, Artificial
  Synthetic oligonucleotide
gcatagaaattcgtaccgatagcggggagttaataattctcgatgcgggtaccgg

SEQ ID NO: 204230 - DNA, 55 bp, Artificial
  Synthetic oligonucleotide
cggcatgtttggcgggctcggttataatattcggccttttgctcaatacgtaacg

SEQ ID NO: 204231 - DNA, 55 bp, Artificial
  Synthetic oligonucleotide
gcatctcgatgaaagccatgttcgggccgtgacgctacaccgtactacgggtctc

SEQ ID NO: 204232 - DNA, 54 bp, Artificial
  Synthetic oligonucleotide
gacgctcaacaaagccacgaaactggatgaacgtacgaacgtctttaaaggggc

SEQ ID NO: 204233 - DNA, 54 bp, Artificial
  Synthetic oligonucleotide
gcattgtgaaaagacggctaaagacgtgggtgttgaattcttaacgctacgggt

SEQ ID NO: 204234 - DNA, 55 bp, Artificial
  Synthetic oligonucleotide
gccagcaagcaaaacgtgatgctctgagtcggttgcacccaatcgtaggttcgta

SEQ ID NO: 204235 - DNA, 55 bp, Artificial
  Synthetic oligonucleotide
gccaggctcaagcgcacagcgcgttaatccagcacttcgtcgtcagtcgtttgag

SEQ ID NO: 204236 - DNA, 55 bp, Artificial
  Synthetic oligonucleotide
gcccgtattgcgcgcgtccaggccccacatcgttgaagcagggcacattcaccat

SEQ ID NO: 204237 - DNA, 55 bp, Artificial
  Synthetic oligonucleotide
gaccggctgttatcgctctacgccctgccagagatcaataacgaacggatagacc

SEQ ID NO: 204238 - DNA, 55 bp, Artificial
  Synthetic oligonucleotide
gccgggatgcgaccggggacggttgttgcgaacctgcaatgcgaaagaccgatga

SEQ ID NO: 204239 - DNA, 55 bp, Artificial
  Synthetic oligonucleotide
gaatgtcgttgagtgttggctataagaatattgcgcgaataggaataaccgcgga

SEQ ID NO: 204240 - DNA, 55 bp, Artificial
  Synthetic oligonucleotide
gcctcgttccattgatgtatttgcgaacttccaggtatccccattacgtcacctt

SEQ ID NO: 204241 - DNA, 55 bp, Artificial
  Synthetic oligonucleotide
cggagtatcgcggacaaggctatgggattcaaatatggaaggccggtcttggacg

SEQ ID NO: 204242 - DNA, 55 bp, Artificial
  Synthetic oligonucleotide
gcgaacgggatgaatcgggcattcctcctttgctcaaggcttattttcgtttcgg

SEQ ID NO: 204243 - DNA, 55 bp, Artificial
  Synthetic oligonucleotide
gcgaccgaattaatggctcggcatgatttcttgagtccgcaagactaatatggcg

SEQ ID NO: 204244 - DNA, 55 bp, Artificial
  Synthetic oligonucleotide
ggatgcggctaccgagactgcttagtcgaaacacaggcctcaaagcttccctaca

SEQ ID NO: 204245 - DNA, 55 bp, Artificial
  Synthetic oligonucleotide
gctcgacctccatattctgtcgatagctcagcaattggccatggagatcaaacga

SEQ ID NO: 204246 - DNA, 55 bp, Artificial
  Synthetic oligonucleotide
gctataggtctttggtgttcgatacatgaataacttctcttggaaacagtggcta

SEQ ID NO: 204247 - DNA, 55 bp, Artificial
  Synthetic oligonucleotide
gaatggcttggttcggaatgtggaagtatcgcgcctgaacggcacgtaatattgc

SEQ ID NO: 204248 - DNA, 55 bp, Artificial
  Synthetic oligonucleotide
gcggcattgcccgcattcgtcgctactataggaacctccgacttccatacgccgc

SEQ ID NO: 204249 - DNA, 49 bp, Artificial
  Synthetic oligonucleotide
gcggaccctaccgaaacaaccaaccctcgggagttgattaaaaccccga

SEQ ID NO: 204250 - DNA, 55 bp, Artificial
  Synthetic oligonucleotide
gcgcatggcagatccttggattttcaagtcaggcggattttctaaccggcggcgc

SEQ ID NO: 204251 - DNA, 54 bp, Artificial
  Synthetic oligonucleotide
tgttaaaacattagcttaccctaacgctattcaactaatagccaacctgagtat

SEQ ID NO: 204252 - DNA, 55 bp, Artificial
  Synthetic oligonucleotide
cggacgatacgaactctaatggcggttcttcgcggctgagcataagtacgccgca

SEQ ID NO: 204253 - DNA, 54 bp, Artificial
  Synthetic oligonucleotide
tattgggttttgtagaccatacccgcagtgtagattggattcgttcaaccggcg

SEQ ID NO: 204254 - DNA, 54 bp, Artificial
  Synthetic oligonucleotide
ctctgaacaatggacgcaattggttacgctgcaaaaatccgcgatgagattaaa

SEQ ID NO: 204255 - DNA, 54 bp, Artificial
  Synthetic oligonucleotide
gccatttacaaatcatacgccagacacttcatatcaattgctatgacaaggagg

SEQ ID NO: 204256 - DNA, 54 bp, Artificial
  Synthetic oligonucleotide
gcgtaaggtctgtgtcgtagtggcaagccgggcgaattatgcacggattaagca

SEQ ID NO: 204257 - DNA, 53 bp, Artificial
  Synthetic oligonucleotide
acccgccattgacagtcgaaattcgaaaatggttgaaatgctctgcgaacaat

SEQ ID NO: 204258 - DNA, 53 bp, Artificial
  Synthetic oligonucleotide
agtgttccgcatcctatgcagggcgtatcagcgggagctgaatggctagattt

SEQ ID NO: 204259 - DNA, 53 bp, Artificial
  Synthetic oligonucleotide
gcgggttgcccacggggtaatagccatagcgattttccgatcatttgtccgaa

SEQ ID NO: 204260 - DNA, 53 bp, Artificial
  Synthetic oligonucleotide
agcgaggcttatcaacatccggattagccgaacctttaagttcccgggccaca

SEQ ID NO: 204261 - DNA, 53 bp, Artificial
  Synthetic oligonucleotide
cgaagtaacggtcccgccaagactcacctcctgtcagtaccgatttctgaatg

SEQ ID NO: 204262 - DNA, 53 bp, Artificial
  Synthetic oligonucleotide
gccgcaaaacgcttcccctaagagctggttcacgacgagacgatggcgtttgc

SEQ ID NO: 204263 - DNA, 55 bp, Artificial
  Synthetic oligonucleotide
cggacaaaagagcgcgtcagcttaccatcaaatacgaccgcgcgaagtataaccg

SEQ ID NO: 204264 - DNA, 53 bp, Artificial
  Synthetic oligonucleotide
gcctaatcagcgtccctgttcgcgacatattgacgctcgctggacgcatcaag

SEQ ID NO: 204265 - DNA, 52 bp, Artificial
  Synthetic oligonucleotide
atgtcggtaaactttcgatcaagcgaacgtcgggagttgccatactgatatc

SEQ ID NO: 204266 - DNA, 52 bp, Artificial
  Synthetic oligonucleotide
atcgagccaaacgtaagttggaacgcgacatgggggcgacactcttgtcggc

SEQ ID NO: 204267 - DNA, 52 bp, Artificial
  Synthetic oligonucleotide
ttttgcacatccaaaccgaaataccagcctatttgcggattacccaggtccg

SEQ ID NO: 204268 - DNA, 52 bp, Artificial
  Synthetic oligonucleotide
attccctttataagaggccctgtcagcgcctatatcttgcgagaatggagtt

SEQ ID NO: 204269 - DNA, 52 bp, Artificial
  Synthetic oligonucleotide
atttagcacgacaccctgtgtaccctatggatggcaacggattggcgagacc

SEQ ID NO: 204270 - DNA, 52 bp, Artificial
  Synthetic oligonucleotide
ggtttatgtcgcggttacgataatcagcctattggccggcatatcgatttgc

SEQ ID NO: 204271 - DNA, 52 bp, Artificial
  Synthetic oligonucleotide
aacgggtcttgcgccgatagatcctgcatccacaaggcaaacggagcttgac

SEQ ID NO: 204272 - DNA, 52 bp, Artificial
  Synthetic oligonucleotide
tggttggctgcccaagttacaacatgcgctatctgatcagctctggaatctc

SEQ ID NO: 204273 - DNA, 51 bp, Artificial
  Synthetic oligonucleotide
ggggaagaacgggcgggtcgaatattcggtgcgccggcattcgcaggaaat

SEQ ID NO: 204274 - DNA, 55 bp, Artificial
  Synthetic oligonucleotide
cgctgtcgtcataatatcgcttccggctagatcttcatttggttaagaaccaggg

SEQ ID NO: 204275 - DNA, 51 bp, Artificial
  Synthetic oligonucleotide
agccatcgccccggcaaatgaaagttctctggtggcggagggtacggtcac

SEQ ID NO: 204276 - DNA, 51 bp, Artificial
  Synthetic oligonucleotide
tggacctgggcaaataagtgtgcgttgacttgctcttggggtgccgagata

SEQ ID NO: 204277 - DNA, 51 bp, Artificial
  Synthetic oligonucleotide
tgtcaagcgagttaccgaaccctcaacaaatctcatagctccaggaggttt

SEQ ID NO: 204278 - DNA, 51 bp, Artificial
  Synthetic oligonucleotide
tggtctgctcgtgtcaggctccagcgcatgaggggctcctactggtggatc

SEQ ID NO: 204279 - DNA, 51 bp, Artificial
  Synthetic oligonucleotide
ctggatgcttggctggcaatacaatccgccgacgaattctttacctggctg

SEQ ID NO: 204280 - DNA, 50 bp, Artificial
  Synthetic oligonucleotide
aggcgagtatccattccagaaggtgggcgaaccgtctcgtcctgcggccg

SEQ ID NO: 204281 - DNA, 50 bp, Artificial
  Synthetic oligonucleotide
aggctggggcgtatttcgtgacgatttgcgcgcacgacagggagtgtctg

SEQ ID NO: 204282 - DNA, 50 bp, Artificial
  Synthetic oligonucleotide
agggaaggtccggaaacggctgacaggggcccggctcaatcggtaggggg

SEQ ID NO: 204283 - DNA, 50 bp, Artificial
  Synthetic oligonucleotide
agggattggggcgaatacggtccgtggatgcgaatgttccgcaacgccag

SEQ ID NO: 204284 - DNA, 50 bp, Artificial
  Synthetic oligonucleotide
ggtcatggcgcgtatcaatgtcgaagtcattcgagccggttatcgcttac

SEQ ID NO: 204285 - DNA, 55 bp, Artificial
  Synthetic oligonucleotide
cgctcgttgccagaataataacgcctagcaataaggcccaggataaattcgctcg

SEQ ID NO: 204286 - DNA, 50 bp, Artificial
  Synthetic oligonucleotide
agggtacaattccgcacggaaaaatcggttctggcccgcgtcgcaagcaa

SEQ ID NO: 204287 - DNA, 50 bp, Artificial
  Synthetic oligonucleotide
aggtaccgtttcggtcgccggatggggaatgctgtcttgccgattcggga

SEQ ID NO: 204288 - DNA, 50 bp, Artificial
  Synthetic oligonucleotide
aggtgagtgcgaggaatgaacacgccgctgggtcgctgaaggctgccgtc

SEQ ID NO: 204289 - DNA, 50 bp, Artificial
  Synthetic oligonucleotide
agtagtattctggcgagagggcatgattattggtactcaatgaatctcgg

SEQ ID NO: 204290 - DNA, 50 bp, Artificial
  Synthetic oligonucleotide
attcgcgttgccgacctgtcatcgaaaagccgcaagcaatcgttaacccg

SEQ ID NO: 204291 - DNA, 50 bp, Artificial
  Synthetic oligonucleotide
atacgcccatccgtcatgatccgccgttaggcttgcaaccggccatggtt

SEQ ID NO: 204292 - DNA, 50 bp, Artificial
  Synthetic oligonucleotide
atccaccgcctgagcaaaggatgtcgacgtgtgtcgtcggaagcccttcg

SEQ ID NO: 204293 - DNA, 50 bp, Artificial
  Synthetic oligonucleotide
atcccatgccgtcgcgggaatcacttgcgctttctcccggcgaagtcttc

SEQ ID NO: 204294 - DNA, 50 bp, Artificial
  Synthetic oligonucleotide
atccgcgagcgccgttctctgaaacccgtaaggcgtcccctgctcgaggt

SEQ ID NO: 204295 - DNA, 50 bp, Artificial
  Synthetic oligonucleotide
atcgagatcggaagccggtcgaaacgaacccgctcatttccggatgccgg

SEQ ID NO: 204296 - DNA, 55 bp, Artificial
  Synthetic oligonucleotide
cgctcgcatgtgtagcactttgaagcatggacgcgcttactaaaccggctagggt

SEQ ID NO: 204297 - DNA, 50 bp, Artificial
  Synthetic oligonucleotide
tacaagaattccctacaccggtttgtagctgagttcgccaaacaagatgt

SEQ ID NO: 204298 - DNA, 50 bp, Artificial
  Synthetic oligonucleotide
atgaactttaggatcggcgactgcagtccctccaatccggcccccaggtc

SEQ ID NO: 204299 - DNA, 50 bp, Artificial
  Synthetic oligonucleotide
cgtcgcgtatgccaacgggcacggtgtatcgcatttgttaaacgtaaccc

SEQ ID NO: 204300 - DNA, 50 bp, Artificial
  Synthetic oligonucleotide
atgtcgacgtgtgtcgtcggaagcccttcgtgcacgtcacgcctctctgg

SEQ ID NO: 204301 - DNA, 50 bp, Artificial
  Synthetic oligonucleotide
attcacggctcggcaagatgtgcccccacccgtcccagtgcaataagaca

SEQ ID NO: 204302 - DNA, 50 bp, Artificial
  Synthetic oligonucleotide
aatcccccagaccaacaacgcctgattccggctatctgcgttcagcggca

SEQ ID NO: 204303 - DNA, 50 bp, Artificial
  Synthetic oligonucleotide
aatccacgactcgggtatcttgagcaccgcagaaagggcaccgcacaggc

SEQ ID NO: 204304 - DNA, 50 bp, Artificial
  Synthetic oligonucleotide
aatcatgggggcgagcctatgccgcatttcatcgagagacgccgctctcg

SEQ ID NO: 204305 - DNA, 50 bp, Artificial
  Synthetic oligonucleotide
aataggccgagtagcgatcagacgatgtgcgccgttgcacctcactgccg

SEQ ID NO: 204306 - DNA, 50 bp, Artificial
  Synthetic oligonucleotide
aatactggccgtttcgccggtcgcaggatcgcgcaaaccgcttttgctta

SEQ ID NO: 204307 - DNA, 55 bp, Artificial
  Synthetic oligonucleotide
cgctccattaaataatcgaccggtacgccggtaatctgcgctatctccactaagg

SEQ ID NO: 204308 - DNA, 50 bp, Artificial
  Synthetic oligonucleotide
aatacggcctggagctgagcataagtggcctcgcccaagcctttgccctc

SEQ ID NO: 204309 - DNA, 50 bp, Artificial
  Synthetic oligonucleotide
aataccctgcgcccggcgatctacggccaacctgccaagcaccatgaccg

SEQ ID NO: 204310 - DNA, 50 bp, Artificial
  Synthetic oligonucleotide
aagtttcgccgcgatatcaagcaagggcgaggggtaggtagcggctgggg

SEQ ID NO: 204311 - DNA, 50 bp, Artificial
  Synthetic oligonucleotide
aagtggggtcgatgcgttccaccggaatttgctgataatggcggtcgccc

SEQ ID NO: 204312 - DNA, 50 bp, Artificial
  Synthetic oligonucleotide
aagtgcgaggtgcccgcgtcgcattgtgtaactgggcgcaagtgcattgg

SEQ ID NO: 204313 - DNA, 50 bp, Artificial
  Synthetic oligonucleotide
aagtaatgcgggtaccgccgtatcggagcctgcaaaccgccagacggaat

SEQ ID NO: 204314 - DNA, 50 bp, Artificial
  Synthetic oligonucleotide
aaggttcccttgggccgagcgtttaccgtcaaagcggaacgagccggttc

SEQ ID NO: 204315 - DNA, 50 bp, Artificial
  Synthetic oligonucleotide
aaggcgtagccgccgtatagccatcaaccgcaacccagacggaatcgcct

SEQ ID NO: 204316 - DNA, 50 bp, Artificial
  Synthetic oligonucleotide
aaggaactgcgaaactctacgacgatctgcgacattggggcgcctcggct

SEQ ID NO: 204317 - DNA, 50 bp, Artificial
  Synthetic oligonucleotide
aagcggtcacacatacccaaggccatctggacgtgcctcgtgccgggcaa

SEQ ID NO: 204318 - DNA, 55 bp, Artificial
  Synthetic oligonucleotide
cgcggatcggtgtttgatgggccagtagacatgatcgcatgctactgagctgaat

SEQ ID NO: 204319 - DNA, 50 bp, Artificial
  Synthetic oligonucleotide
aagcgggctggcgcaaagttctacgaaactcgtggccgatagccggcgat

SEQ ID NO: 204320 - DNA, 50 bp, Artificial
  Synthetic oligonucleotide
aagcgctgtgtagcctccttgagtagctcgtcccccgcgtcgtgacccaa

SEQ ID NO: 204321 - DNA, 50 bp, Artificial
  Synthetic oligonucleotide
aagccgtcgttggagtgttcgattccgtaaagcggtccgcccggttgcga

SEQ ID NO: 204322 - DNA, 50 bp, Artificial
  Synthetic oligonucleotide
aagccggtcgctttatttcggtccgtcggtgcatttggatgcgcacgctt

SEQ ID NO: 204323 - DNA, 50 bp, Artificial
  Synthetic oligonucleotide
aagccggggatatgacgataagtgctcggcgggggaacgagagggagtga

SEQ ID NO: 204324 - DNA, 50 bp, Artificial
  Synthetic oligonucleotide
acatgatcggtccggatttgcaggtggcgaaacagtgcgtgcgggtacgc

SEQ ID NO: 204325 - DNA, 50 bp, Artificial
  Synthetic oligonucleotide
acagtgccgacccctggcgagactgccgtcccattttatggcaatgccgc

SEQ ID NO: 204326 - DNA, 50 bp, Artificial
  Synthetic oligonucleotide
acagtcggcattcaacccgactcggcacggccagttgactcgctggctcc

SEQ ID NO: 204327 - DNA, 50 bp, Artificial
  Synthetic oligonucleotide
acagtacgcgataatgcacttcccagggccaaaggcggttcggggtcgcc

SEQ ID NO: 204328 - DNA, 50 bp, Artificial
  Synthetic oligonucleotide
acaggtttattccgtaacgcccgcctctcccgctcggctaccatgtcgct

SEQ ID NO: 204329 - DNA, 55 bp, Artificial
  Synthetic oligonucleotide
taatgcggaactccgcaacctgaaacaagaactagaaactatgacccgccccctc

SEQ ID NO: 204330 - DNA, 55 bp, Artificial
  Synthetic oligonucleotide
cgcgcggcctttgacgtcctccattctcaggcgcggagccataacactttcggtc

SEQ ID NO: 204331 - DNA, 50 bp, Artificial
  Synthetic oligonucleotide
acagcgctggcgcgagttttggttgtttgccgaggtgtattgcccgcaaa

SEQ ID NO: 204332 - DNA, 50 bp, Artificial
  Synthetic oligonucleotide
acagccaaacccgggtgcacacgcccaacccgcagctactcaaggaaaac

SEQ ID NO: 204333 - DNA, 50 bp, Artificial
  Synthetic oligonucleotide
acaccgctatgctgctcctgcattgctgcacctcctacggccatgcagtc

SEQ ID NO: 204334 - DNA, 50 bp, Artificial
  Synthetic oligonucleotide
acaaccggctgcacggttaaggtgcacgaaacacggagaacccctcgcaa

SEQ ID NO: 204335 - DNA, 50 bp, Artificial
  Synthetic oligonucleotide
aattggacgcaatctgcatcctggaccgtaccctccgatgcgacctccgg

SEQ ID NO: 204336 - DNA, 50 bp, Artificial
  Synthetic oligonucleotide
aattgcacgctgcgttgcctatccgccgcttcaccccagcttacccgtac

SEQ ID NO: 204337 - DNA, 50 bp, Artificial
  Synthetic oligonucleotide
aattcgggtgtaaagccaataagccgggccgccctttggttggtgggtgc

SEQ ID NO: 204338 - DNA, 50 bp, Artificial
  Synthetic oligonucleotide
aatggtgttgccagccaaggcagtgatggggtaatgccgttcgcccacac

SEQ ID NO: 204339 - DNA, 50 bp, Artificial
  Synthetic oligonucleotide
aatgcgggacctttggtggaaattcggctggacgccctcagcgaaaccga

SEQ ID NO: 204340 - DNA, 50 bp, Artificial
  Synthetic oligonucleotide
aatgccccagggcgacgtaatccgtcgggatttcggcgggatagaggcgt

SEQ ID NO: 204341 - DNA, 55 bp, Artificial
  Synthetic oligonucleotide
cgccccatcacggtagtgcccaaataaaggttgttgacatcccactcgggatcag

SEQ ID NO: 204342 - DNA, 50 bp, Artificial
  Synthetic oligonucleotide
aatgcaaggcgtggaagaaaaccgctatgccgcgagttggcaagggcctt

SEQ ID NO: 204343 - DNA, 50 bp, Artificial
  Synthetic oligonucleotide
aatcgggacgccgccgggaaaggtgattaagccgtcgttggagtgttcga

SEQ ID NO: 204344 - DNA, 50 bp, Artificial
  Synthetic oligonucleotide
aatccggataggtgcctgcttgccacagcaccgcagctgtcatgacgcag

SEQ ID NO: 204345 - DNA, 50 bp, Artificial
  Synthetic oligonucleotide
aatccggacacgaacccaagcccccgcaggataggctcactggatgtcta

SEQ ID NO: 204346 - DNA, 50 bp, Artificial
  Synthetic oligonucleotide
aatccctcccaagtacccggcgcgggcggctaaccgccatatcgaaggtt

SEQ ID NO: 204347 - DNA, 50 bp, Artificial
  Synthetic oligonucleotide
aatccccgccacccaatgacaaccgccgaacataaccgggtaggtcgggc

SEQ ID NO: 204348 - DNA, 50 bp, Artificial
  Synthetic oligonucleotide
aaccatgtcctgtgccggagttgcggagacccgacgctcgcagcagggat

SEQ ID NO: 204349 - DNA, 50 bp, Artificial
  Synthetic oligonucleotide
aaccatcgccgtgaggcatcccgagcggcaaggtctgccataccgagacg

SEQ ID NO: 204350 - DNA, 50 bp, Artificial
  Synthetic oligonucleotide
aaccaccgggctgagtggctacccatccatttgccgccggaagactatcg

SEQ ID NO: 204351 - DNA, 50 bp, Artificial
  Synthetic oligonucleotide
aaccacagacctatcggtgagtactgcgacagcctcaaccgccacgccga

SEQ ID NO: 204352 - DNA, 55 bp, Artificial
  Synthetic oligonucleotide
cgcacccaacaggattaccgggctgttacttgaatagcctatgaaacccaatccg

SEQ ID NO: 204353 - DNA, 50 bp, Artificial
  Synthetic oligonucleotide
aaccaagcgtcccgcctttccaggtaatccgcggacaattgctcaggccg

SEQ ID NO: 204354 - DNA, 50 bp, Artificial
  Synthetic oligonucleotide
aaccaacccttcgctgttaaccgccatttggcgtgcgctgcaacgtaccg

SEQ ID NO: 204355 - DNA, 50 bp, Artificial
  Synthetic oligonucleotide
aacaggctaaaggcccggcccaagtaccgatcaagacctacccgtcgtga

SEQ ID NO: 204356 - DNA, 50 bp, Artificial
  Synthetic oligonucleotide
aacaaccggtgcaagctgaaactcggcaggacttgcgggccaagttggac

SEQ ID NO: 204357 - DNA, 50 bp, Artificial
  Synthetic oligonucleotide
aaatcggaaaaccaccgggctgagtggctacccatccatttgccgccgga

SEQ ID NO: 204358 - DNA, 50 bp, Artificial
  Synthetic oligonucleotide
aaagttgaacgcggcaattgccccaggctccacgtcaatacgctccggta

SEQ ID NO: 204359 - DNA, 50 bp, Artificial
  Synthetic oligonucleotide
aaagcgtgcccaacctacacgactgacagccaaatgccgccccacggtag

SEQ ID NO: 204360 - DNA, 50 bp, Artificial
  Synthetic oligonucleotide
aaagcgcctgacgctgggttttccggcgaaacggttagtggtgacgaggg

SEQ ID NO: 204361 - DNA, 50 bp, Artificial
  Synthetic oligonucleotide
aaagcaggctgacttgggtcccgcttgcgaacgactgcgatgccgtgaat

SEQ ID NO: 204362 - DNA, 50 bp, Artificial
  Synthetic oligonucleotide
aaacgcctagtgtccaactgcgtgcaggtactgccggttgcgagagccgg

SEQ ID NO: 204363 - DNA, 55 bp, Artificial
  Synthetic oligonucleotide
cgatagcccttaataagccggtttgaccttcctgcaccaaatcgtcaaagtctaa

SEQ ID NO: 204364 - DNA, 50 bp, Artificial
  Synthetic oligonucleotide
aaaccgcgccagtcttccgcacaatgccggacggcacaatcgttgattgc

SEQ ID NO: 204365 - DNA, 50 bp, Artificial
  Synthetic oligonucleotide
aaaccccgtcattgagtcccggccaggcgatttttaccaggccctggctt

SEQ ID NO: 204366 - DNA, 50 bp, Artificial
  Synthetic oligonucleotide
aaaccccacggccaaatgcgaggactcgaatgaaaccgactcacccccgc

SEQ ID NO: 204367 - DNA, 50 bp, Artificial
  Synthetic oligonucleotide
aaacaccacctcgcgctacgcttgggtggccttattccggcctactcgcc

SEQ ID NO: 204368 - DNA, 50 bp, Artificial
  Synthetic oligonucleotide
aaacaaagtggccacccgccgtcattcgggtgaagcccatggtccaggca

SEQ ID NO: 204369 - DNA, 50 bp, Artificial
  Synthetic oligonucleotide
aaaacctctgaatcggcgctacgcccgacatggtgtccgcaaggcacctc

SEQ ID NO: 204370 - DNA, 50 bp, Artificial
  Synthetic oligonucleotide
aagcccttgaccacaatcgcacgctttttgaccggagaccgcaacgagcc

SEQ ID NO: 204371 - DNA, 50 bp, Artificial
  Synthetic oligonucleotide
aagcccttcgtgcacgtcacgcctctctgggataccgttcacccagatga

SEQ ID NO: 204372 - DNA, 50 bp, Artificial
  Synthetic oligonucleotide
aagcccgcaggccctcaaacaccccgcaaccatagtgcagagtatgggtt

SEQ ID NO: 204373 - DNA, 50 bp, Artificial
  Synthetic oligonucleotide
aagccacgccccgctacgtttagcttcttgagccagcacacagggggtcg

SEQ ID NO: 204374 - DNA, 55 bp, Artificial
  Synthetic oligonucleotide
cgaggccatactcccctacgaaaccactgacaacgcttacctcaaggcacacctc

SEQ ID NO: 204375 - DNA, 50 bp, Artificial
  Synthetic oligonucleotide
aagccaagttgttgccgccggaacgcttgtggcacactccgtcgcttgaa

SEQ ID NO: 204376 - DNA, 50 bp, Artificial
  Synthetic oligonucleotide
aagaggtaccacggaaaaccagggcaccgaggcttttgtctggggcgacc

SEQ ID NO: 204377 - DNA, 50 bp, Artificial
  Synthetic oligonucleotide
aactgggacttaagggccgcgaagccgcaactcacgccctgtctgaggtt

SEQ ID NO: 204378 - DNA, 50 bp, Artificial
  Synthetic oligonucleotide
aactgcaccccgcttgcattgcgatattcggcgaaatctcgggcactcga

SEQ ID NO: 204379 - DNA, 50 bp, Artificial
  Synthetic oligonucleotide
aacggagggcaagcggtcacacatacccaaggccatctggacgtgcctcg

SEQ ID NO: 204380 - DNA, 50 bp, Artificial
  Synthetic oligonucleotide
aacgccgtcaaatagtcggtttgcagcgtggaggcattctggcgcggtac

SEQ ID NO: 204381 - DNA, 50 bp, Artificial
  Synthetic oligonucleotide
aacgccgacccggctgacttgaaccacatagcgaactcccgcgttgttga

SEQ ID NO: 204382 - DNA, 50 bp, Artificial
  Synthetic oligonucleotide
aacgcccgttaccggccagttcggaaagtcccagcgccaaggctaagctc

SEQ ID NO: 204383 - DNA, 50 bp, Artificial
  Synthetic oligonucleotide
aacgacaccgagtagcaaaggcgagcggcacatggcctctgaaccatgct

SEQ ID NO: 204384 - DNA, 50 bp, Artificial
  Synthetic oligonucleotide
aacctttcaagcgctgtgtagcctccttgagtagctcgtcccccgcgtcg

SEQ ID NO: 204385 - DNA, 55 bp, Artificial
  Synthetic oligonucleotide
gaatcgatttggctaatacaagcgagcaaaaccctctgttccgataaggacagcg

SEQ ID NO: 204386 - DNA, 50 bp, Artificial
  Synthetic oligonucleotide
aaccttaaccccggttccggatgcttgcatcggacgctggacttggcgaa

SEQ ID NO: 204387 - DNA, 50 bp, Artificial
  Synthetic oligonucleotide
aaccgtgggccgggtgcctacattcgcaacaccgtcaaactcgcatccat

SEQ ID NO: 204388 - DNA, 50 bp, Artificial
  Synthetic oligonucleotide
aaccgcatcagcagcctcgcaagacgcggctccatcaaggcgaccccata

SEQ ID NO: 204389 - DNA, 50 bp, Artificial
  Synthetic oligonucleotide
aaccgacccatttttgacgatcgcgcttctccaacgcggacgcatggcca

SEQ ID NO: 204390 - DNA, 50 bp, Artificial
  Synthetic oligonucleotide
aacccgttgaccggcgtcccatgttggattgctcgcgacactaccgttgg

SEQ ID NO: 204391 - DNA, 50 bp, Artificial
  Synthetic oligonucleotide
aacccgccccgactcaaaacacgcatgcatccgcccgatccgcaattgta

SEQ ID NO: 204392 - DNA, 50 bp, Artificial
  Synthetic oligonucleotide
aacccgacgttccagccgactccgctaacgctaagcggctgagctttgcg

SEQ ID NO: 204393 - DNA, 50 bp, Artificial
  Synthetic oligonucleotide
agcacggcgggagccaacgaaaggcgtatctcgtgggtcgcaatcgaagt

SEQ ID NO: 204394 - DNA, 50 bp, Artificial
  Synthetic oligonucleotide
agcaatgggtgtgttccgtgtcatgctccgggccgctgtcgctgtcacga

SEQ ID NO: 204395 - DNA, 50 bp, Artificial
  Synthetic oligonucleotide
agcaacggccaaatcgcctcgaaagtgctgttgcctgacgtgctcgcaac

SEQ ID NO: 204396 - DNA, 55 bp, Artificial
  Synthetic oligonucleotide
cttcgataccgcaactcgcgaaaggataacaggatcgaccgtcgggaaataatcg

SEQ ID NO: 204397 - DNA, 50 bp, Artificial
  Synthetic oligonucleotide
agatcgttaaggcatagcgtccgcgctcatttggggccgaatcccgccgg

SEQ ID NO: 204398 - DNA, 50 bp, Artificial
  Synthetic oligonucleotide
agagcagtcgggaatctcaaactaccgttcgccttcgcccctcggctgcg

SEQ ID NO: 204399 - DNA, 50 bp, Artificial
  Synthetic oligonucleotide
agaccggcttggtccaatatcctcgcaacccggttcaggtccgcggcctt

SEQ ID NO: 204400 - DNA, 50 bp, Artificial
  Synthetic oligonucleotide
agaccctgccgaacgcaggttcaaggttggtatcgcgctgcctaccgttc

SEQ ID NO: 204401 - DNA, 50 bp, Artificial
  Synthetic oligonucleotide
agacaagggctttcgcgaggtttaccgcaccttgaagcccggaggccgtt

SEQ ID NO: 204402 - DNA, 50 bp, Artificial
  Synthetic oligonucleotide
agaagctgcaaagcgggggcgtagcgtgcgtgtacttgaccacgcaaacc

SEQ ID NO: 204403 - DNA, 50 bp, Artificial
  Synthetic oligonucleotide
agaagccgtcacgccagcggtgagcatccaatgccatggaggcgaactta

SEQ ID NO: 204404 - DNA, 50 bp, Artificial
  Synthetic oligonucleotide
actttggccgccttggttttggacgcccccatgtgcttcatgacttgcgg

SEQ ID NO: 204405 - DNA, 50 bp, Artificial
  Synthetic oligonucleotide
acttctacgccagccaccgaaacgacgcccgctggaccttcgctgggccc

SEQ ID NO: 204406 - DNA, 50 bp, Artificial
  Synthetic oligonucleotide
acttaccgcgacggaatcatcggccccaagcactgccaccagcgctcgat

SEQ ID NO: 204407 - DNA, 55 bp, Artificial
  Synthetic oligonucleotide
ctggtacagcgttaaattgggcaccttacactcctgcgaactgatcgagcttact

SEQ ID NO: 204408 - DNA, 50 bp, Artificial
  Synthetic oligonucleotide
actgtgccattcgaccgcggtaacctggtaaggccagccataggctccct

SEQ ID NO: 204409 - DNA, 50 bp, Artificial
  Synthetic oligonucleotide
actgcgtgcaggtactgccggttgcgagagccgggatagcaaatcggtcg

SEQ ID NO: 204410 - DNA, 50 bp, Artificial
  Synthetic oligonucleotide
actgccgatggctgaactaaggcaaggcgctaaaccgcccgcagtgagaa

SEQ ID NO: 204411 - DNA, 50 bp, Artificial
  Synthetic oligonucleotide
actcggcttctcccggctcataccggacgctgttcgccccgaactcgaag

SEQ ID NO: 204412 - DNA, 50 bp, Artificial
  Synthetic oligonucleotide
actcggcgcggcatatgggatgaggctgtatgatgcatcgggcgaccgaa

SEQ ID NO: 204413 - DNA, 50 bp, Artificial
  Synthetic oligonucleotide
actcgcatcccgccgttgttacgcagctaggcaatcccctccgaccaacc

SEQ ID NO: 204414 - DNA, 50 bp, Artificial
  Synthetic oligonucleotide
aggccggatcgctgcaaggggtgtccctcagtctccgtatcaggacgctc

SEQ ID NO: 204415 - DNA, 50 bp, Artificial
  Synthetic oligonucleotide
aggaatgaacacgccgctgggtcgctgaaggctgccgtcctgtgcctccg

SEQ ID NO: 204416 - DNA, 50 bp, Artificial
  Synthetic oligonucleotide
agctgggaccggctgtcagagtcaatggcgtggctccgggagcgatactc

SEQ ID NO: 204417 - DNA, 50 bp, Artificial
  Synthetic oligonucleotide
agctatgggaaacggcgcgttacactattgggccccgcttgctgcgcata

SEQ ID NO: 204418 - DNA, 55 bp, Artificial
  Synthetic oligonucleotide
ctctcggaagtctgtgttctacacatttgcgccctcgttcggcagttggttacgc

SEQ ID NO: 204419 - DNA, 50 bp, Artificial
  Synthetic oligonucleotide
agcgtcacactcaccccagaccggtaatagtcctgcggaaactcgggggc

SEQ ID NO: 204420 - DNA, 50 bp, Artificial
  Synthetic oligonucleotide
agcgtattttgtcgccatcaggcagcaacctcccgaccgactgcctcgcc

SEQ ID NO: 204421 - DNA, 50 bp, Artificial
  Synthetic oligonucleotide
agcgcaatggaaccgcttccgcgtttcggatgaacatgaccgtgtgccgc

SEQ ID NO: 204422 - DNA, 50 bp, Artificial
  Synthetic oligonucleotide
agcgacggcgggttggcaaaagtaatcccaggctatcagccacgggcggc

SEQ ID NO: 204423 - DNA, 50 bp, Artificial
  Synthetic oligonucleotide
agcctctttgcaaaccgatgtttcacctctcgccctacccgcccggccta

SEQ ID NO: 204424 - DNA, 50 bp, Artificial
  Synthetic oligonucleotide
agcctcgcgccgaccgttcaaactccgtccgaatccggacaccgaaacca

SEQ ID NO: 204425 - DNA, 50 bp, Artificial
  Synthetic oligonucleotide
agcctcgatactccgccgtcacccgacccagggttgaatacgatagggct

SEQ ID NO: 204426 - DNA, 50 bp, Artificial
  Synthetic oligonucleotide
agccgtgccgcttcgcttgctgaaaacgccaatcgcatcacttgcatcca

SEQ ID NO: 204427 - DNA, 50 bp, Artificial
  Synthetic oligonucleotide
agccggtacaccctcgaatcgccgcaatgcgcggttaacacgcacgtttt

SEQ ID NO: 204428 - DNA, 50 bp, Artificial
  Synthetic oligonucleotide
agccggagccatggcggcacgcggttcctactatttggacaaagctgcgg

SEQ ID NO: 204429 - DNA, 55 bp, Artificial
  Synthetic oligonucleotide
ctcgaatcgactacgcaagccccccgttcacagtatgaactgcgagccgggtttg

SEQ ID NO: 204430 - DNA, 50 bp, Artificial
  Synthetic oligonucleotide
agccgaataacgaagcgccgcttgcgcagcctctaagtcgaaatgggcca

SEQ ID NO: 204431 - DNA, 50 bp, Artificial
  Synthetic oligonucleotide
agcccttcggctgcacttaggagagccctgtcgaaccatgggcggctaaa

SEQ ID NO: 204432 - DNA, 50 bp, Artificial
  Synthetic oligonucleotide
agcccggaggccgttacttgttccgggtttgggactcggagcgctacaat

SEQ ID NO: 204433 - DNA, 50 bp, Artificial
  Synthetic oligonucleotide
agcccagacaggcggtgaggtacccatgccaactcccccttgcgtttgtt

SEQ ID NO: 204434 - DNA, 50 bp, Artificial
  Synthetic oligonucleotide
agcagggcggggttcgcaaaccatgcgcgtcaaactaaaaacggccaacc

SEQ ID NO: 204435 - DNA, 50 bp, Artificial
  Synthetic oligonucleotide
agcaggcgtgccgaatgatgatctcgttgccccattgtctgtgcgtcgcg

SEQ ID NO: 204436 - DNA, 50 bp, Artificial
  Synthetic oligonucleotide
agcagcgctggtcggcaatcgacaaaacagtggcccgctcggcaaaacat

SEQ ID NO: 204437 - DNA, 50 bp, Artificial
  Synthetic oligonucleotide
acctattgctccccgcgcattgcaaacaccgggtggactggacatcagcc

SEQ ID NO: 204438 - DNA, 50 bp, Artificial
  Synthetic oligonucleotide
accgttgccgtttccgcgtgggcactggcgtgtccaccctaccgggctaa

SEQ ID NO: 204439 - DNA, 50 bp, Artificial
  Synthetic oligonucleotide
accgtggggcgcgcattccaatcactggatgcgagagcgaccgggttggg

SEQ ID NO: 204440 - DNA, 60 bp, Artificial
  Synthetic oligonucleotide
tggatttagttcagaaccccagcagatcaagccagctacgaatgttccgtgatcagtgtt

SEQ ID NO: 204441 - DNA, 55 bp, Artificial
  Synthetic oligonucleotide
ctcctctgctgaattgtttcgcatcgaaatcatatgcctgaccgcaccacccgtc

SEQ ID NO: 204442 - DNA, 50 bp, Artificial
  Synthetic oligonucleotide
accggtaattgggtcgtgtcaagcaaccgctcggatgaagcgttgcggga

SEQ ID NO: 204443 - DNA, 50 bp, Artificial
  Synthetic oligonucleotide
accggccgcagtcttcggaacaagggctcgatggtaccgacgggggtagc

SEQ ID NO: 204444 - DNA, 50 bp, Artificial
  Synthetic oligonucleotide
accgcgcttgttcagccgagagaaacccgccccgactcaaaacacgcatg

SEQ ID NO: 204445 - DNA, 50 bp, Artificial
  Synthetic oligonucleotide
accgcctccgaaacaccctcgcatccatgaagagagccctacctcggctt

SEQ ID NO: 204446 - DNA, 50 bp, Artificial
  Synthetic oligonucleotide
accgccccggcagactcgcttaacggaccggcattactcacggtcagagt

SEQ ID NO: 204447 - DNA, 50 bp, Artificial
  Synthetic oligonucleotide
accgccaagccgcctatggatacctgtaatggcgcgtttccggcgacagt

SEQ ID NO: 204448 - DNA, 50 bp, Artificial
  Synthetic oligonucleotide
accgcacgaacagggctcggaagtttgcaccggccaccgtaatgcgataa

SEQ ID NO: 204449 - DNA, 50 bp, Artificial
  Synthetic oligonucleotide
acccgtcatcgagactacctccctcgagttgacgcgccgcacggtagtgc

SEQ ID NO: 204450 - DNA, 50 bp, Artificial
  Synthetic oligonucleotide
acccgactcggcacggccagttgactcgctggctccaagccatagacgac

SEQ ID NO: 204451 - DNA, 50 bp, Artificial
  Synthetic oligonucleotide
accccgcgatattcatgtgccaaccgaaccaccagggcacggctttggta

SEQ ID NO: 204452 - DNA, 55 bp, Artificial
  Synthetic oligonucleotide
ctcagtgcggatcagatcgccaatctaggtattaaactcggagcgatgactaagg

SEQ ID NO: 204453 - DNA, 50 bp, Artificial
  Synthetic oligonucleotide
acccccatcggcccctatgatctgcaaatagcagcgattggccgtgccta

SEQ ID NO: 204454 - DNA, 50 bp, Artificial
  Synthetic oligonucleotide
acccacggcggctatatgcggaccttgagcgaaggacggctgggtaacat

SEQ ID NO: 204455 - DNA, 50 bp, Artificial
  Synthetic oligonucleotide
acccaaaggcaaaacaggcagcgacactccgctgttccctgctacgccat

SEQ ID NO: 204456 - DNA, 50 bp, Artificial
  Synthetic oligonucleotide
accagcaatcgcaccgtgccctcccagcctcgactggtggcaacgccggg

SEQ ID NO: 204457 - DNA, 50 bp, Artificial
  Synthetic oligonucleotide
accaatagtgcaccggcctgtacctcatgccacgcgggagggcaattcac

SEQ ID NO: 204458 - DNA, 50 bp, Artificial
  Synthetic oligonucleotide
actccgtgccaattgcgtcgtgccaacattcgaggacccccgccaattcg

SEQ ID NO: 204459 - DNA, 50 bp, Artificial
  Synthetic oligonucleotide
actcaggacagtcgataatgccctacgccgcttccagtccccgcgctccg

SEQ ID NO: 204460 - DNA, 50 bp, Artificial
  Synthetic oligonucleotide
acgtctgcacctgttgagggagctgttgccgttacgcccgcactagctga

SEQ ID NO: 204461 - DNA, 50 bp, Artificial
  Synthetic oligonucleotide
acgtcggctgccccggtgccaaacttaagacatcccgttcttccgcctta

SEQ ID NO: 204462 - DNA, 50 bp, Artificial
  Synthetic oligonucleotide
acggtgctctgttatttgcccccgacagccgctacgggacacccgacgac

SEQ ID NO: 204463 - DNA, 55 bp, Artificial
  Synthetic oligonucleotide
ctacggtcaaatgtgatccacctcggtatatgaatcagtgatagcaagtgagtcg

SEQ ID NO: 204464 - DNA, 50 bp, Artificial
  Synthetic oligonucleotide
acgggtagcggtcaaaagcccggattacgcggaacccttgggcggcaaac

SEQ ID NO: 204465 - DNA, 50 bp, Artificial
  Synthetic oligonucleotide
acggcgtttggagcaaaccacggttgcggaggcttcgaatcgggtcgatc

SEQ ID NO: 204466 - DNA, 50 bp, Artificial
  Synthetic oligonucleotide
acggccatgcgtcggcgaatgcaatagcgtcgagcgtctcttgccaaccg

SEQ ID NO: 204467 - DNA, 50 bp, Artificial
  Synthetic oligonucleotide
acggatcgaatttggttacgacacattcttaaaccatgtaaaccgcttga

SEQ ID NO: 204468 - DNA, 50 bp, Artificial
  Synthetic oligonucleotide
acggagggcgctattgccgagcgtaggatgggtacgactgcatgggcaga

SEQ ID NO: 204469 - DNA, 50 bp, Artificial
  Synthetic oligonucleotide
acggagagcgcagaccgtgctccgtctgggtgatggctggcgggtccatc

SEQ ID NO: 204470 - DNA, 50 bp, Artificial
  Synthetic oligonucleotide
acgcgccctcatgtgtcgccttgtgccgacattaggtatgcgcagcgtac

SEQ ID NO: 204471 - DNA, 50 bp, Artificial
  Synthetic oligonucleotide
acgccggtcttctgaggtgtcgtccggtatgcttgcgctgtaccctgcgg

SEQ ID NO: 204472 - DNA, 50 bp, Artificial
  Synthetic oligonucleotide
acgcacacccgtcttgctagcggtgtacttaagcggttgtccgtggccgt

SEQ ID NO: 204473 - DNA, 50 bp, Artificial
  Synthetic oligonucleotide
acgatgggggacttgcgacctcgtgcagcatgccatcggtacgaaaacgg

SEQ ID NO: 204474 - DNA, 55 bp, Artificial
  Synthetic oligonucleotide
ctacggacttgttgacgagagattgtatcatccacctagacagcgacgggccggc

SEQ ID NO: 204475 - DNA, 50 bp, Artificial
  Synthetic oligonucleotide
acgatactcaaaccgtcccgaacacacccaaatcccacgccggcctccgt

SEQ ID NO: 204476 - DNA, 50 bp, Artificial
  Synthetic oligonucleotide
acgacgctcgcgacaccttgaaactagccatggaaagctgggatgcgccc

SEQ ID NO: 204477 - DNA, 50 bp, Artificial
  Synthetic oligonucleotide
acgacgaaagaccctgccgaacgcaggttcaaggttggtatcgcgctgcc

SEQ ID NO: 204478 - DNA, 50 bp, Artificial
  Synthetic oligonucleotide
acctgggccggctgacaacccagctcgaccgttgaaaccatgaccccggt

SEQ ID NO: 204479 - DNA, 50 bp, Artificial
  Synthetic oligonucleotide
acctgcgaattgcggcaccgatttgcgcaccttccaggccggatttgagt

SEQ ID NO: 204480 - DNA, 55 bp, Artificial
  Synthetic oligonucleotide
ctaactgcccgcctaataaatggagttgcgcgagtttgacttttgcgtcgatatg

SEQ ID NO: 204481 - DNA, 55 bp, Artificial
  Synthetic oligonucleotide
cgtgttcgctcaaataatccaaactgtcacgctcctcgtaaaggcgcttcaaggc

SEQ ID NO: 204482 - DNA, 55 bp, Artificial
  Synthetic oligonucleotide
accagtgtcgttattttgatgcatgaggatagaacgcgacttgaggcaatcgcac

SEQ ID NO: 204483 - DNA, 55 bp, Artificial
  Synthetic oligonucleotide
cgtccttcttgctctggcatcgtaacagtaaagccttgtgcctctaactcggttc

SEQ ID NO: 204484 - DNA, 55 bp, Artificial
  Synthetic oligonucleotide
cggtttgactattcgaaataattgattttcggcgcagtagtctaatcggtcggtg

SEQ ID NO: 204485 - DNA, 55 bp, Artificial
  Synthetic oligonucleotide
cggttgttatttgctgccgcccctttgtcgagagtgatgcaaagacacacgcgcg

SEQ ID NO: 204486 - DNA, 56 bp, Artificial
  Synthetic oligonucleotide
cgggctatcttccggtcgactatgccgtttatcgtacagccgagtggtcgaaacat

SEQ ID NO: 204487 - DNA, 55 bp, Artificial
  Synthetic oligonucleotide
cggtccacgacagattccagacggagcgcgaattttccctgccgagtatccactc

SEQ ID NO: 204488 - DNA, 55 bp, Artificial
  Synthetic oligonucleotide
cggtattacggtgccgatattaaggaaggttgacctagtgacgatgacctactcg

SEQ ID NO: 204489 - DNA, 55 bp, Artificial
  Synthetic oligonucleotide
cccatcggattaatcgcttgcccgccgtagggaaacctgccgacagcgcgtcttt

SEQ ID NO: 204490 - DNA, 55 bp, Artificial
  Synthetic oligonucleotide
ccaggcgttctgtatcggacttacattcggcccatggtttggcgtggctagcccg

SEQ ID NO: 204491 - DNA, 55 bp, Artificial
  Synthetic oligonucleotide
ccacgctgaattgttcgcaagtcgttgtgggcccgcattctcgcaacgacagccg

SEQ ID NO: 204492 - DNA, 55 bp, Artificial
  Synthetic oligonucleotide
cattgtgagctgacagttgctcttaagcgtcacattggcttattgcaacaagtca

SEQ ID NO: 204493 - DNA, 55 bp, Artificial
  Synthetic oligonucleotide
cattgccgtcaaccccaaacgctatcccaccgctcaatacgaactggctaggcaa

SEQ ID NO: 204494 - DNA, 55 bp, Artificial
  Synthetic oligonucleotide
caggcgtcaatggacagcccttggtcgttaagcctgcttcgattagcgaaagcgt

SEQ ID NO: 204495 - DNA, 52 bp, Artificial
  Synthetic oligonucleotide
caggatgccgtccggtttcctggtatggtgtaagaccctttccgctttaccc

SEQ ID NO: 204496 - DNA, 55 bp, Artificial
  Synthetic oligonucleotide
cagagcccaatgacgaatggctgaaggctcaagtcgcaagcgcagaatacagcag

SEQ ID NO: 204497 - DNA, 58 bp, Artificial
  Synthetic oligonucleotide
cgaaggattggatggtttacgcgaacgcatggccgagtatgtgcagatgggtgctcga

SEQ ID NO: 204498 - DNA, 55 bp, Artificial
  Synthetic oligonucleotide
cactgactcgatttattcttccgcaaaataccggcgacgattatttgcacggacc

SEQ ID NO: 204499 - DNA, 55 bp, Artificial
  Synthetic oligonucleotide
cacacgcaaatcgatacagcaactttagacgatttctatagcctaatggcctgac

SEQ ID NO: 204500 - DNA, 55 bp, Artificial
  Synthetic oligonucleotide
caagttcgagatacgcaaccgggcgcatggaaccatccatctcaagagcgacccc

SEQ ID NO: 204501 - DNA, 55 bp, Artificial
  Synthetic oligonucleotide
caactggaacaaaacatattgggtctgctaccttatacgatgcaccgccttagca

SEQ ID NO: 204502 - DNA, 55 bp, Artificial
  Synthetic oligonucleotide
agatttcggttcttccccgaactctcggactgttcgtcacacgtatgagacgagc

SEQ ID NO: 204503 - DNA, 55 bp, Artificial
  Synthetic oligonucleotide
atgctcttgagtgagcttgtagcctggcatcaacacttgttttacgacacttccg

SEQ ID NO: 204504 - DNA, 55 bp, Artificial
  Synthetic oligonucleotide
atcgcaccgtgccctcccagcctcgactggtggcaacgccggggtatttcggctt

SEQ ID NO: 204505 - DNA, 55 bp, Artificial
  Synthetic oligonucleotide
aggggtgctcgtctctgacttctacgcggcatacgactcggttccctgtccccag

SEQ ID NO: 204506 - DNA, 55 bp, Artificial
  Synthetic oligonucleotide
aggaccgtccgatcgtcacctattgcgccggctttcattgcaatgcctcgaaaga

SEQ ID NO: 204507 - DNA, 55 bp, Artificial
  Synthetic oligonucleotide
cgagaccagaccagttatctaatcgtcgttaaagtcagagacagcttagggtcgc

SEQ ID NO: 204508 - DNA, 58 bp, Artificial
  Synthetic oligonucleotide
agcaacgtttgggtaccggcgagcgataaacagagcgtcaagacttcgagcggcgatg

SEQ ID NO: 204509 - DNA, 55 bp, Artificial
  Synthetic oligonucleotide
cgacgacgtgtatgtgaccctgcctttcccgcaactgaaaccgggcagcatcgca

SEQ ID NO: 204510 - DNA, 55 bp, Artificial
  Synthetic oligonucleotide
acgcattgaatacgcgacttgacttgaatcgccgccaacgaatgtccgccttgtt

SEQ ID NO: 204511 - DNA, 55 bp, Artificial
  Synthetic oligonucleotide
cctggggccatcttttactatcatccctaaatgaccatgctcccaacgggtgcgc

SEQ ID NO: 204512 - DNA, 55 bp, Artificial
  Synthetic oligonucleotide
cctgcaatgacggcaggttgatgtagcgtaaaagtttcaccgccgtatcggtttt

SEQ ID NO: 204513 - DNA, 54 bp, Artificial
  Synthetic oligonucleotide
ccgtcgtagatcaaaattcggtgcctaggtgtccgccaaaggacgccgtgaacc

SEQ ID NO: 204514 - DNA, 55 bp, Artificial
  Synthetic oligonucleotide
ccgtaaaacccagtctgaccctctgcctccaataaagtttcaccatcgacgcgac

SEQ ID NO: 204515 - DNA, 52 bp, Artificial
  Synthetic oligonucleotide
ccggggttaaaccttcggacacgtggggccgatgcgggcactccgcgagaaa

SEQ ID NO: 204516 - DNA, 49 bp, Artificial
  Synthetic oligonucleotide
ccggcaaaggttagtttaacccgaataaagcgctacgaaaggcgggccg

SEQ ID NO: 204517 - DNA, 55 bp, Artificial
  Synthetic oligonucleotide
ccgcgaatatttctttcatccgaggattgagccaccaacgttctgataacaccgg

SEQ ID NO: 204518 - DNA, 55 bp, Artificial
  Synthetic oligonucleotide
ccgccgcatagagggcaaatcggttcgacgtaatcacatcgcttgttctcgcaaa

SEQ ID NO: 204519 - DNA, 58 bp, Artificial
  Synthetic oligonucleotide
tccgcgatagcgcaaacgagcgttcatgacatagaccgaacctgcaaagtctcacgcg

SEQ ID NO: 204520 - DNA, 55 bp, Artificial
  Synthetic oligonucleotide
cccttggaattgcaaaccactgtcccatactttaaggccattcgatctggcgatc

SEQ ID NO: 204521 - DNA, 53 bp, Artificial
  Synthetic oligonucleotide
cccgatcgggcaaaggccaaactttaagcgctacgaacgcgcgaaatcaaccc

SEQ ID NO: 204522 - DNA, 55 bp, Artificial
  Synthetic oligonucleotide
ccccactggatgacgctgtcccgtggggctgatggaacggtaagacgaatcaggt

SEQ ID NO: 204523 - DNA, 55 bp, Artificial
  Synthetic oligonucleotide
cccattttccgacccgcccaaactacgggagatcctccatgcacgacgacatcgc

SEQ ID NO: 204524 - DNA, 55 bp, Artificial
  Synthetic oligonucleotide
cccatttacggttcccatgttggtaacgctcgccataatgcgctaattatcaccg

SEQ ID NO: 204525 - DNA, 55 bp, Artificial
  Synthetic oligonucleotide
cccattcacgagcgacgcacaggtcggcaaacggttgcaacgggtattggggacg

SEQ ID NO: 204526 - DNA, 55 bp, Artificial
  Synthetic oligonucleotide
aagcgattgtgcggattcctatatcttagaacgttacggaccggaagccgtgcgt

SEQ ID NO: 204527 - DNA, 55 bp, Artificial
  Synthetic oligonucleotide
aagccgtcaagactactgatatagtcgcgcaccacggctaaaattcttgatccta

SEQ ID NO: 204528 - DNA, 54 bp, Artificial
  Synthetic oligonucleotide
gggttccggttcttaatagacggatttcggttcctaatagacaggctatacaca

SEQ ID NO: 204529 - DNA, 55 bp, Artificial
  Synthetic oligonucleotide
ggtaagccctaacaatcagctcatagatagtgcgctcttggtcactaaggccgga

SEQ ID NO: 204530 - DNA, 56 bp, Artificial
  Synthetic oligonucleotide
gggctaaccctggcaaccctcggtgtgcttaaccctatcttggccgcgctatttca

SEQ ID NO: 204531 - DNA, 55 bp, Artificial
  Synthetic oligonucleotide
ggtcgttgccttccgggtggtcgctacttaagccttgctcgaatgcttggccggc

SEQ ID NO: 204532 - DNA, 55 bp, Artificial
  Synthetic oligonucleotide
ggtctaggccagaaaccccatgcaatcgccagtataacaagcgccattagtgccg

SEQ ID NO: 204533 - DNA, 52 bp, Artificial
  Synthetic oligonucleotide
ggtcttctggttttaaggccgtggatacggaagtggcttggacctgaacccg

SEQ ID NO: 204534 - DNA, 55 bp, Artificial
  Synthetic oligonucleotide
ggttccatgcgtctctgggtgagtggtcgtctgtactgaggctttgctccaggta

SEQ ID NO: 204535 - DNA, 55 bp, Artificial
  Synthetic oligonucleotide
ggttgcaaaggtcacttgagacctcgtaaaccgatcgcttcgataaaccgatatc

SEQ ID NO: 204536 - DNA, 55 bp, Artificial
  Synthetic oligonucleotide
gtagcattgatcgacaagatggaagccacgctcaaaatcatcgaacagtacccgc

SEQ ID NO: 204537 - DNA, 55 bp, Artificial
  Synthetic oligonucleotide
gtattcggcgctcgcattggtggtcagtagaacgtgacatgccatcctcttgcgc

SEQ ID NO: 204538 - DNA, 55 bp, Artificial
  Synthetic oligonucleotide
gtcatgcaagtcgcaaaatggggtaatagtttggccgtaagattgcctgcgccgg

SEQ ID NO: 204539 - DNA, 55 bp, Artificial
  Synthetic oligonucleotide
gtcggtctgtcgatcgtaccgtctggtggcgagatacccatcaatgcgtcgaagg

SEQ ID NO: 204540 - DNA, 55 bp, Artificial
  Synthetic oligonucleotide
gttgcgcatgccaccgtcagaacggacgacgcgaaagagtttaataccgctctga

SEQ ID NO: 204541 - DNA, 58 bp, Artificial
  Synthetic oligonucleotide
cacaacgcggcatctatcgctaccggaagggttgtgtaacatggccggtcgcacgatt

SEQ ID NO: 204542 - DNA, 55 bp, Artificial
  Synthetic oligonucleotide
taacggcgaatccgccctacaagagctcgcgtggagccgggtaggtcgggcaaca

SEQ ID NO: 204543 - DNA, 55 bp, Artificial
  Synthetic oligonucleotide
tacggacgcctcgagttgatagactgtcgcccgtttatccgtccgacctggtaac

SEQ ID NO: 204544 - DNA, 55 bp, Artificial
  Synthetic oligonucleotide
tacttttcagtgacatgggtaaggagtctacatgtacacggtttctaagggtgaa

SEQ ID NO: 204545 - DNA, 55 bp, Artificial
  Synthetic oligonucleotide
tagacgtcgaagtggcgctttacggggtatcagcagcagtaaaccgaacgggtcc

SEQ ID NO: 204546 - DNA, 55 bp, Artificial
  Synthetic oligonucleotide
tcatgggattcaggcgcattggcatgaactgacgcaagtacagtatccctggctg

SEQ ID NO: 204547 - DNA, 55 bp, Artificial
  Synthetic oligonucleotide
tccgttaatgcacgggtgacgggccagaaaccagtcggaagaatcaacgagcata

SEQ ID NO: 204548 - DNA, 55 bp, Artificial
  Synthetic oligonucleotide
tgcctgccgtgtggctttcggatgcatcgacaattcggttcagcggatgaaaatc

SEQ ID NO: 204549 - DNA, 55 bp, Artificial
  Synthetic oligonucleotide
tgcggatcagatatttgggttggttgatagcgtattcagcgagtcccaacttccg

SEQ ID NO: 204550 - DNA, 55 bp, Artificial
  Synthetic oligonucleotide
aacattggccgacgccaaacaagccacccagtgcgggtaatgctaagcgcggttc

SEQ ID NO: 204551 - DNA, 55 bp, Artificial
  Synthetic oligonucleotide
aaatgccatgatgcactccgcgtcttgtctagacgccgcatcctaaaggatcgtg

SEQ ID NO: 204552 - DNA, 55 bp, Artificial
  Synthetic oligonucleotide
cccggtctatcgcgtcgaccattacaaagtggactatgcgaatccgatggtgacc

SEQ ID NO: 204553 - DNA, 55 bp, Artificial
  Synthetic oligonucleotide
ctcccgcgtgatattaggcatagcggccgtccttttcggccccatgaaggagatg

SEQ ID NO: 204554 - DNA, 50 bp, Artificial
  Synthetic oligonucleotide
acggattgagtccgcccccggagcgctttcgactgaaatgggaaggcagt

SEQ ID NO: 204555 - DNA, 50 bp, Artificial
  Synthetic oligonucleotide
acgcggcaccaaattcacgtcggtctttcctcacgctaccgcccgagccg

SEQ ID NO: 204556 - DNA, 50 bp, Artificial
  Synthetic oligonucleotide
acgcgacgtgattctgtggggcgtccgctggtatgtggcgtatccgatga

SEQ ID NO: 204557 - DNA, 50 bp, Artificial
  Synthetic oligonucleotide
acgcctccattctcgcaatggagcgggtagctccccacgacggatcctga

SEQ ID NO: 204558 - DNA, 50 bp, Artificial
  Synthetic oligonucleotide
accgtagccctcgctcctgtgggccgaaacgaggcagtcagacgccgcgc

SEQ ID NO: 204559 - DNA, 50 bp, Artificial
  Synthetic oligonucleotide
acccgggggctttcccatatcgcctcagagggtcgccgcaagggaccgaa

SEQ ID NO: 204560 - DNA, 50 bp, Artificial
  Synthetic oligonucleotide
accatgcatgtcttcgttccgccgggatcagataccagcaattgtctccc

SEQ ID NO: 204561 - DNA, 50 bp, Artificial
  Synthetic oligonucleotide
accaatggtgaactgggccttcagcggagttcgcacgttgttggcctcgc

SEQ ID NO: 204562 - DNA, 50 bp, Artificial
  Synthetic oligonucleotide
acagggtcactgggcagtcccgcgtcacatggttgcgttcggctcgcgcc

SEQ ID NO: 204563 - DNA, 50 bp, Artificial
  Synthetic oligonucleotide
acagcgcaaacataggttcgctgtgcgggcgcattccctggaccggcgtg

SEQ ID NO: 204564 - DNA, 55 bp, Artificial
  Synthetic oligonucleotide
catggctgttcgaccctctcgattgatgggaaatgcgacacatttacgtcccgac

SEQ ID NO: 204565 - DNA, 50 bp, Artificial
  Synthetic oligonucleotide
acacggcccgccctttctgagcgccgaattccacgagccggtcgcttttc

SEQ ID NO: 204566 - DNA, 50 bp, Artificial
  Synthetic oligonucleotide
acacattggcgagtggaatcttgtacgcggggaccgtctgccctccggta

SEQ ID NO: 204567 - DNA, 55 bp, Artificial
  Synthetic oligonucleotide
ctgcgtgagagtctcgcgccggcgttctttcgttcgagcgaattctaatcgatcg

SEQ ID NO: 204568 - DNA, 55 bp, Artificial
  Synthetic oligonucleotide
ctgtctctcgcaatccaattgtcagaacgtgcgcactgaattgctctgtctcgtg

SEQ ID NO: 204569 - DNA, 55 bp, Artificial
  Synthetic oligonucleotide
cagcgaaaatgctctgcggaggcaagattgtagagctgaccccagtgaccgtcat

SEQ ID NO: 204570 - DNA, 55 bp, Artificial
  Synthetic oligonucleotide
gactcccctcgcttgccgaaaaggatggcatgtcgtgatgcaaatgtcatcgcac

SEQ ID NO: 204571 - DNA, 55 bp, Artificial
  Synthetic oligonucleotide
gagcgtgggcatggtatgcaaggattgattatagaacacagcctcgtgtcactcg

SEQ ID NO: 204572 - DNA, 55 bp, Artificial
  Synthetic oligonucleotide
gatcaatggaggcgaagtctgtcaagctcatgcagatgtccctagagcgaaagcg

SEQ ID NO: 204573 - DNA, 55 bp, Artificial
  Synthetic oligonucleotide
gatcgaaatccctccctgaattgagcgcaggctagacatttcgcgtgacacgagc

SEQ ID NO: 204574 - DNA, 54 bp, Artificial
  Synthetic oligonucleotide
gcctagccaagggaaattttcccgaaaacgcgccaggtctctaccgctcgaagc

SEQ ID NO: 204575 - DNA, 55 bp, Artificial
  Synthetic oligonucleotide
cccctgcgtcccggtctcacgccgtctcaccatcgaaccaacctcagccgaatct

SEQ ID NO: 204576 - DNA, 55 bp, Artificial
  Synthetic oligonucleotide
gcgacttatcgagaggcgcagattgttcacgcctatgcttcaacggaggccggag

SEQ ID NO: 204577 - DNA, 55 bp, Artificial
  Synthetic oligonucleotide
gcggaattgggagtttactgtcgtcactgggcggcttcctgaggcgggtttgaag

SEQ ID NO: 204578 - DNA, 55 bp, Artificial
  Synthetic oligonucleotide
gcgtaacctagtcaataatcgctaggcttgaacaggggcgcttacggatgaggac

SEQ ID NO: 204579 - DNA, 55 bp, Artificial
  Synthetic oligonucleotide
gctacgcttatggaagcgtttcatcatgggcgtaaagtgaaagaccggggtgaaa

SEQ ID NO: 204580 - DNA, 52 bp, Artificial
  Synthetic oligonucleotide
ggccgagtcttacgtcaggaaagtagcgttttgccgtaatcccgttcccaaa

SEQ ID NO: 204581 - DNA, 55 bp, Artificial
  Synthetic oligonucleotide
gttcggagtgacggcgcgacaaatggacggatattgatgcaggctctgacgaacc

SEQ ID NO: 204582 - DNA, 55 bp, Artificial
  Synthetic oligonucleotide
cactcatggaatcatggcctttcagctcgagggaaacggtccgagggcgtcaggg

SEQ ID NO: 204583 - DNA, 55 bp, Artificial
  Synthetic oligonucleotide
atgcacgttgtagccctctgggtcgtcactcgccgtaagtccccagcaggacggt

SEQ ID NO: 204584 - DNA, 55 bp, Artificial
  Synthetic oligonucleotide
tgccggctttagatttcggcggtccaattttgcagtacctatctgcacgttgacg

SEQ ID NO: 204585 - DNA, 55 bp, Artificial
  Synthetic oligonucleotide
tttgggagttcagtagagcgacaaggaaaccgggtagattccgagcgcgagcctc

SEQ ID NO: 204586 - DNA, 55 bp, Artificial
  Synthetic oligonucleotide
ccgatcaattttcgccgtcgtatccgacatagcgtccatgtggtccaaatccccg

SEQ ID NO: 204587 - DNA, 54 bp, Artificial
  Synthetic oligonucleotide
cggattgttaggggcggcgccgaggattctcgttctgctaacgctacaggtcga

SEQ ID NO: 204588 - DNA, 53 bp, Artificial
  Synthetic oligonucleotide
cccgtctcttccgcttcaccccggatttgtcgcctattccactaatctgcccc

SEQ ID NO: 204589 - DNA, 53 bp, Artificial
  Synthetic oligonucleotide
cctttatcacggcgaatcttttccgtttgtgtgaatggactgctagacgagca

SEQ ID NO: 204590 - DNA, 53 bp, Artificial
  Synthetic oligonucleotide
cgcccttcattctcttccacgaggccccattatgctcagtctcgaaagctcat

SEQ ID NO: 204591 - DNA, 53 bp, Artificial
  Synthetic oligonucleotide
gacgaggcctgacgcctgttctcgcgctgtattgacgggctgaggattggccg

SEQ ID NO: 204592 - DNA, 52 bp, Artificial
  Synthetic oligonucleotide
atagacagcgctctatcgggagcataagcgcgcgtcttgtccttgcacgaga

SEQ ID NO: 204593 - DNA, 52 bp, Artificial
  Synthetic oligonucleotide
tcgacgttcgccggcactatgccgctgtgcgaaagggagaggccacggaatt

SEQ ID NO: 204594 - DNA, 51 bp, Artificial
  Synthetic oligonucleotide
ctctttaccatcgacgaatttgtatacttcttcagcggcaatgatcggccg

SEQ ID NO: 204595 - DNA, 51 bp, Artificial
  Synthetic oligonucleotide
tatatgcgcctcgctcttgcgccgatggagacccaatacaatctgaaggga

SEQ ID NO: 204596 - DNA, 50 bp, Artificial
  Synthetic oligonucleotide
agggcgttcgccgctcctatggagtctcgtcggatggcgccgttttgctc

SEQ ID NO: 204597 - DNA, 55 bp, Artificial
  Synthetic oligonucleotide
ccgccgcctttgttcggccttcgcttcagaccggggaagtcatagtgcatcgagg

SEQ ID NO: 204598 - DNA, 50 bp, Artificial
  Synthetic oligonucleotide
agggtccgcccaactgcgcctgcctcgaaagtgacattcgactcgcaaaa

SEQ ID NO: 204599 - DNA, 50 bp, Artificial
  Synthetic oligonucleotide
aggtcatcggcgatgcgaattgcggtctggcataatctcccgagcggcgg

SEQ ID NO: 204600 - DNA, 50 bp, Artificial
  Synthetic oligonucleotide
agtctcgccgaattctcggactcccgtcacgcccgcacttggctagtgct

SEQ ID NO: 204601 - DNA, 50 bp, Artificial
  Synthetic oligonucleotide
ataaccgcccaatctgggaccacgccacgtcggtttacgcccccttgaca

SEQ ID NO: 204602 - DNA, 50 bp, Artificial
  Synthetic oligonucleotide
atccccaaacccccgacattctttcccgtgtcgccacatcagcgccccca

SEQ ID NO: 204603 - DNA, 50 bp, Artificial
  Synthetic oligonucleotide
atcccttctccactggggagctcgatgacggaatgggtggaccgcgagca

SEQ ID NO: 204604 - DNA, 50 bp, Artificial
  Synthetic oligonucleotide
atcgtaagtgcgccgcgtgttccacttcagccgctgataggggctcgcct

SEQ ID NO: 204605 - DNA, 50 bp, Artificial
  Synthetic oligonucleotide
atgcaatcggcgcatcgcgttgttcgctgggaatgctgactcgcaggttc

SEQ ID NO: 204606 - DNA, 50 bp, Artificial
  Synthetic oligonucleotide
atgcccgatcgccgcctataatctcactctcgctttgctgtcggccggcc

SEQ ID NO: 204607 - DNA, 50 bp, Artificial
  Synthetic oligonucleotide
atgggccgctcccgactcgataagggtcaagccgcagagaggcgaacgtg

SEQ ID NO: 204608 - DNA, 55 bp, Artificial
  Synthetic oligonucleotide
cattccgaatggtcgcccgagtggttttgcatgccgggttttgtgagacagccgg

SEQ ID NO: 204609 - DNA, 50 bp, Artificial
  Synthetic oligonucleotide
atggtcgaataataggcttcctgcgcagtactggtctcggttccgaagaa

SEQ ID NO: 204610 - DNA, 50 bp, Artificial
  Synthetic oligonucleotide
attcgcgtaaatgagccggcgccctttcagtgcgacgatatcggggctcg

SEQ ID NO: 204611 - DNA, 50 bp, Artificial
  Synthetic oligonucleotide
caccgcacccgcgtccaatcctcggcgccgcaaatcttcgttccggagag

SEQ ID NO: 204612 - DNA, 50 bp, Artificial
  Synthetic oligonucleotide
cacgcatagacatgcgtcacccttccgctcgcagcgacaccccagctcgc

SEQ ID NO: 204613 - DNA, 50 bp, Artificial
  Synthetic oligonucleotide
cacggctggccgccatacttttcggcgtacctggccacgtaacccggtcg

SEQ ID NO: 204614 - DNA, 50 bp, Artificial
  Synthetic oligonucleotide
cactggggacatggcgagcacgacatggagtcgtcggaccacgacagcag

SEQ ID NO: 204615 - DNA, 50 bp, Artificial
  Synthetic oligonucleotide
cagacccgatgggctcgacacattggcgagtggaatcttgtacgcgggga

SEQ ID NO: 204616 - DNA, 50 bp, Artificial
  Synthetic oligonucleotide
acaagctgtgaacccggtttggccccgtgctctaacgacgcactcggtgc

SEQ ID NO: 204617 - DNA, 50 bp, Artificial
  Synthetic oligonucleotide
acaagattgccgacgtagcgccacacctgcgtgggctttccgcccagaat

SEQ ID NO: 204618 - DNA, 50 bp, Artificial
  Synthetic oligonucleotide
acaaactatgccgttgggccgtgtcgcgcggaatcgttgcgcacaatccg

SEQ ID NO: 204619 - DNA, 55 bp, Artificial
  Synthetic oligonucleotide
cgaagcgcggcagtgctactggccgactttcagacctggataggcgactatacgg

SEQ ID NO: 204620 - DNA, 50 bp, Artificial
  Synthetic oligonucleotide
aattccaccgcgttgcgcttcgtgcttgactccaaggagtgacccaacga

SEQ ID NO: 204621 - DNA, 50 bp, Artificial
  Synthetic oligonucleotide
aatgtcggtggccgttagtctcgcagcgctcgcaagccgatctagcaagg

SEQ ID NO: 204622 - DNA, 50 bp, Artificial
  Synthetic oligonucleotide
aatcggtgtcgacaaatgccacgaacggcgaagcctcccccacggcgact

SEQ ID NO: 204623 - DNA, 50 bp, Artificial
  Synthetic oligonucleotide
aagttccgggcctggggcggttcagctcagaatcttcggaacccggttca

SEQ ID NO: 204624 - DNA, 50 bp, Artificial
  Synthetic oligonucleotide
aagtggaatgctcgtcagggatgcaacgccaagcgccgtcgccctaagcc

SEQ ID NO: 204625 - DNA, 50 bp, Artificial
  Synthetic oligonucleotide
aagtctttggcaggtgcggggacgcaagcgtgtctgggtttatccgccgc

SEQ ID NO: 204626 - DNA, 50 bp, Artificial
  Synthetic oligonucleotide
aagggcgtttgcatcagcccccgccgagggattggatgacgtcgacgaca

SEQ ID NO: 204627 - DNA, 50 bp, Artificial
  Synthetic oligonucleotide
aaggcgcttacagcggggccagtcgacgcactgatgcttgcgtgtatgca

SEQ ID NO: 204628 - DNA, 50 bp, Artificial
  Synthetic oligonucleotide
aagcgtgcttggcgtcactggcaatccccgcttcgctagtgtgatggcgt

SEQ ID NO: 204629 - DNA, 50 bp, Artificial
  Synthetic oligonucleotide
aagcgtcgcattcaatttcgcctttcgagcacgctcgtagcatcgcccga

SEQ ID NO: 204630 - DNA, 55 bp, Artificial
  Synthetic oligonucleotide
cgattgcggtagactacttttcccggcgtgacggcaagattattaccgacttcga

SEQ ID NO: 204631 - DNA, 50 bp, Artificial
  Synthetic oligonucleotide
aagcgagccgcatcgggggccactttaaagcttagctggggtgtggcaga

SEQ ID NO: 204632 - DNA, 50 bp, Artificial
  Synthetic oligonucleotide
aagccgtgcgcctggattgtcaacggtttccgattcgcgctcaaggctcc

SEQ ID NO: 204633 - DNA, 50 bp, Artificial
  Synthetic oligonucleotide
aagagcgctgagcgccagggacgagggtcgagcgtaagggaatgacgagc

SEQ ID NO: 204634 - DNA, 50 bp, Artificial
  Synthetic oligonucleotide
aagagcgacctcgccacaatggtcgagcggaacgacagttcccgctttcg

SEQ ID NO: 204635 - DNA, 50 bp, Artificial
  Synthetic oligonucleotide
aacgttccccgaccactgctcgcgattgtcgtgcggccccaaaaacgatc

SEQ ID NO: 204636 - DNA, 50 bp, Artificial
  Synthetic oligonucleotide
aacgggcggttcgcgacgcaaatgacgcgatcgagacgtggaaatgccag

SEQ ID NO: 204637 - DNA, 50 bp, Artificial
  Synthetic oligonucleotide
aacggcgcggaccggtgaatcatgggaacaatccgaaggttccgaacgga

SEQ ID NO: 204638 - DNA, 50 bp, Artificial
  Synthetic oligonucleotide
aacaggttaggcgacgatgcgcctgcaagcgtgcgagttttggccggaat

SEQ ID NO: 204639 - DNA, 50 bp, Artificial
  Synthetic oligonucleotide
aacagcccatgcctcggttgcgacgccatttgctccgaatcctgggcgtc

SEQ ID NO: 204640 - DNA, 50 bp, Artificial
  Synthetic oligonucleotide
aaattcacgtcggtctttcctcacgctaccgcccgagccggaagggccag

SEQ ID NO: 204641 - DNA, 55 bp, Artificial
  Synthetic oligonucleotide
accaaaggttcactccagcgcgcgatctctctgctcgtctccgcaaattcccgag

SEQ ID NO: 204642 - DNA, 50 bp, Artificial
  Synthetic oligonucleotide
aaagtcatcctccaggcggctgtccggccaccaatcggcatggaacttcg

SEQ ID NO: 204643 - DNA, 50 bp, Artificial
  Synthetic oligonucleotide
aaagggccgaaccgctgctgggataagagttcgcgtgccactggcgtcgt

SEQ ID NO: 204644 - DNA, 50 bp, Artificial
  Synthetic oligonucleotide
aaaggacgcgttctcggaacgccacattactcgacccctggatgcgtggg

SEQ ID NO: 204645 - DNA, 50 bp, Artificial
  Synthetic oligonucleotide
aaacagcgttccgaaacgctcgtcggcccgcaaggctacagacgaaacgg

SEQ ID NO: 204646 - DNA, 50 bp, Artificial
  Synthetic oligonucleotide
aggatcttcagcatgcggagccccctcggaacagcggacgccgcattcta

SEQ ID NO: 204647 - DNA, 50 bp, Artificial
  Synthetic oligonucleotide
agctgtgctcggcgaggcaaatacgcgtgggtggcgtttcgggcaggata

SEQ ID NO: 204648 - DNA, 50 bp, Artificial
  Synthetic oligonucleotide
agcgggcgctttactgtggacaacggaacctatatccgccggcgtccatt

SEQ ID NO: 204649 - DNA, 50 bp, Artificial
  Synthetic oligonucleotide
agcgaccagaggctgttgcgtgcgttgaagaggctgagccccgtgtcttg

SEQ ID NO: 204650 - DNA, 50 bp, Artificial
  Synthetic oligonucleotide
agccgcgctgagaatgtttgccgctcacactcaccgttcaagcagcgcca

SEQ ID NO: 204651 - DNA, 50 bp, Artificial
  Synthetic oligonucleotide
agccgccgtccactcgcgatcgaatcgtcgtcttgctcatgagccgccga

SEQ ID NO: 204652 - DNA, 55 bp, Artificial
  Synthetic oligonucleotide
cgtcaaagacgcgttgataacgaatgtcagcggcattcaactcaccccgtcctgg

SEQ ID NO: 204653 - DNA, 50 bp, Artificial
  Synthetic oligonucleotide
agcccgagtcggtctgctaccgcgcgcactacggctttatctttgctgct

SEQ ID NO: 204654 - DNA, 50 bp, Artificial
  Synthetic oligonucleotide
agacggcctctcggcgtcgcgggtgtaaccgcatgtgaaaccacgaccgc

SEQ ID NO: 204655 - DNA, 50 bp, Artificial
  Synthetic oligonucleotide
agacgccggagaatgaagctgcaacgagtgacgctgaggcgtcgtcacag

SEQ ID NO: 204656 - DNA, 50 bp, Artificial
  Synthetic oligonucleotide
agacgaagcgccctcttttcaggacccgggggctttcccatatcgcctca

SEQ ID NO: 204657 - DNA, 50 bp, Artificial
  Synthetic oligonucleotide
acttttcccttctcccacgaagtggagcggggtcggatgagggcgcctcc

SEQ ID NO: 204658 - DNA, 50 bp, Artificial
  Synthetic oligonucleotide
actcgggtccggacaaccactgcccgcggctattcatcgcacttgtgcgt

SEQ ID NO: 204659 - DNA, 50 bp, Artificial
  Synthetic oligonucleotide
acgtttcgggggcattcgccggagtagtgggcgtgtatcagcggcacacg

SEQ ID NO: 204660 - DNA, 50 bp, Artificial
  Synthetic oligonucleotide
acgtccgagataggggcgcctggggaaattcacgcggcctcctcttacag

SEQ ID NO: 204661 - DNA, 50 bp, Artificial
  Synthetic oligonucleotide
acgtcacctcgagagcagatggcgccagcagggtttggacaaccggttcc

SEQ ID NO: 204662 - DNA, 50 bp, Artificial
  Synthetic oligonucleotide
acgtagcgccacacctgcgtgggctttccgcccagaattggaatcgcgtc

SEQ ID NO: 204663 - DNA, 60 bp, Artificial
  Synthetic oligonucleotide
accaacgctcggagtttgtactatgcgagtctgccatgctgtagaggcgtcgcaagggat

SEQ ID NO: 204664 - DNA, 57 bp, Artificial
  Synthetic oligonucleotide
actgaaccaatacgactaccccataattcttactgtcccgctcggcatcttgaagct

SEQ ID NO: 204665 - DNA, 55 bp, Artificial
  Synthetic oligonucleotide
gctattgccgtatcttggttgacaaagacgtgaggggtgatgaacgagcgaggtc

SEQ ID NO: 204666 - DNA, 55 bp, Artificial
  Synthetic oligonucleotide
gctgaggtatcagcgcatgacaatccacagtcaccatggaaagtgtgatcacgac

SEQ ID NO: 204667 - DNA, 55 bp, Artificial
  Synthetic oligonucleotide
gctggcattggtattacccaagagcaagcacagcacacttgaggttggggcgacg

SEQ ID NO: 204668 - DNA, 55 bp, Artificial
  Synthetic oligonucleotide
gctgtattgtgcattggcatagtgttcaaggttgtcggcagggttccagcgcaag

SEQ ID NO: 204669 - DNA, 55 bp, Artificial
  Synthetic oligonucleotide
gcttaagcgcctctctgcccttttaactgatgcacctattgccccatgggcggtc

SEQ ID NO: 204670 - DNA, 55 bp, Artificial
  Synthetic oligonucleotide
gcttttgccttggctcatgcaattagcctcaggggttaaggccgtgttattggtg

SEQ ID NO: 204671 - DNA, 55 bp, Artificial
  Synthetic oligonucleotide
ggatggcgaagattcggctggtcacatgctggtgcccggtttgcctatccctggc

SEQ ID NO: 204672 - DNA, 55 bp, Artificial
  Synthetic oligonucleotide
ggattcagcgattaacgcgtataattgcactcttgcaaaccgaatgacaatcccc

SEQ ID NO: 204673 - DNA, 55 bp, Artificial
  Synthetic oligonucleotide
ggcacgcactcatcgtcgaaaatcatctttaacctgactgtcatcaatctggcac

SEQ ID NO: 204674 - DNA, 55 bp, Artificial
  Synthetic oligonucleotide
ggcagtccaacactcaagcgcggctggcacgacatggggattctcaccctctcga

SEQ ID NO: 204675 - DNA, 57 bp, Artificial
  Synthetic oligonucleotide
gatggaacaaccgactgttcccgtgatgcagactcgtttatctccaacgtggttttg

SEQ ID NO: 204676 - DNA, 55 bp, Artificial
  Synthetic oligonucleotide
ggcctgttacgcccatgaccaattgccgcacttcgctgacaggaaaatacaggtt

SEQ ID NO: 204677 - DNA, 55 bp, Artificial
  Synthetic oligonucleotide
ggggtagtagggacaatgaacatatcgaaaacttcagcagatccacgataggtag

SEQ ID NO: 204678 - DNA, 55 bp, Artificial
  Synthetic oligonucleotide
gggtagcaacctggacatcggctttaacgtcacctatatgatcgacgtactaaac

SEQ ID NO: 204679 - DNA, 54 bp, Artificial
  Synthetic oligonucleotide
gggtgagttccgggatgccgtgatagaacaccgggcgattttctttatccgccc

SEQ ID NO: 204680 - DNA, 55 bp, Artificial
  Synthetic oligonucleotide
caccgaatgtttcggacttgtcaagcaattaaaccgatctgtacggatttaactg

SEQ ID NO: 204681 - DNA, 55 bp, Artificial
  Synthetic oligonucleotide
cacgccaccgcatcgcatgccccggaaatatcggaatccgtcgccgccttgcact

SEQ ID NO: 204682 - DNA, 55 bp, Artificial
  Synthetic oligonucleotide
cacggactagtcctataggtgcaagcagacaaaacgaaaatctccggttacgcag

SEQ ID NO: 204683 - DNA, 55 bp, Artificial
  Synthetic oligonucleotide
aatcaagcgtgctggtattgtgtcattcccatacagcttggcaattgcatgagtc

SEQ ID NO: 204684 - DNA, 55 bp, Artificial
  Synthetic oligonucleotide
caataaaagactctagctgctgccgtgcgttggctttaagtagcacgcggtattt

SEQ ID NO: 204685 - DNA, 55 bp, Artificial
  Synthetic oligonucleotide
caaggtatatggcccaggggcgttgcgctattttcgcaaacaggggagcactatc

SEQ ID NO: 204686 - DNA, 60 bp, Artificial
  Synthetic oligonucleotide
cgggcacgactggaacaccacgggtgcaatcgcactattcacgatgtcttcaatgctttg

SEQ ID NO: 204687 - DNA, 54 bp, Artificial
  Synthetic oligonucleotide
caaagtaccggcacttttgcacaatcccggaatcattactgagaacccttccgg

SEQ ID NO: 204688 - DNA, 55 bp, Artificial
  Synthetic oligonucleotide
cagcgctaaattaattgtactgccagaaactgcgttgccagtcattgctagcgag

SEQ ID NO: 204689 - DNA, 55 bp, Artificial
  Synthetic oligonucleotide
acggccgagggtgcatcagcgatggactgtgacaacctagataccgtaagcactc

SEQ ID NO: 204690 - DNA, 55 bp, Artificial
  Synthetic oligonucleotide
cagcgctatggattgtgccaatgcatcaatgcggtatgccagctcaggcccggac

SEQ ID NO: 204691 - DNA, 55 bp, Artificial
  Synthetic oligonucleotide
actcaagcggcaacgcagcaccattaccttatgtgccattgattaacccactaga

SEQ ID NO: 204692 - DNA, 55 bp, Artificial
  Synthetic oligonucleotide
ataacaaacccatgcgctgggtaacggcttaccagcctgtttaaggcatcactct

SEQ ID NO: 204693 - DNA, 55 bp, Artificial
  Synthetic oligonucleotide
ccaactcgcttcagaggtcaacgcgcagcttaacaagattctttcaggtcgcgtg

SEQ ID NO: 204694 - DNA, 55 bp, Artificial
  Synthetic oligonucleotide
catcccggctatatacgtcgcctgagttagagctcatgcagccgcctaatgtgag

SEQ ID NO: 204695 - DNA, 55 bp, Artificial
  Synthetic oligonucleotide
agtcgaaagattcaggctcactcggaaactgaataatggctcctgcctctataag

SEQ ID NO: 204696 - DNA, 54 bp, Artificial
  Synthetic oligonucleotide
gcgacagcctaatgtgattgccttgttggtagggtgctcactcatggtaacggc

SEQ ID NO: 204697 - DNA, 57 bp, Artificial
  Synthetic oligonucleotide
tcccgcgtaaggttgcggctggtttgggtagcggttttgagactgcgactcacgcac

SEQ ID NO: 204698 - DNA, 54 bp, Artificial
  Synthetic oligonucleotide
aagaattgccagcttttcctgaaaggcgacaatgccttgcccgtgccctcaggc

SEQ ID NO: 204699 - DNA, 54 bp, Artificial
  Synthetic oligonucleotide
tgcgaagaagttgagcagttacgccagaatgaccccaatgtggcacgagatatc

SEQ ID NO: 204700 - DNA, 54 bp, Artificial
  Synthetic oligonucleotide
cccagtagctagcttagttgaaatctcggcagccattctagtactcaagcctgc

SEQ ID NO: 204701 - DNA, 54 bp, Artificial
  Synthetic oligonucleotide
cggatattgcgcacgcaccttttcgatggcgtttcttaaagctttgcgaacagg

SEQ ID NO: 204702 - DNA, 54 bp, Artificial
  Synthetic oligonucleotide
cacattgattgattgttgcccttacttgggcacgctatctctcaacgcaatttt

SEQ ID NO: 204703 - DNA, 54 bp, Artificial
  Synthetic oligonucleotide
cattgaaccgtgctgcaagtgtaagggactatctaacgagcaaacgggttgcta

SEQ ID NO: 204704 - DNA, 53 bp, Artificial
  Synthetic oligonucleotide
ccagcctcagttaggctcttgctagaggctccgagaggattactgttagtatc

SEQ ID NO: 204705 - DNA, 53 bp, Artificial
  Synthetic oligonucleotide
tgggtggcacgcacccagtcctgttctgccacatgctccgtcgtgtagggcaa

SEQ ID NO: 204706 - DNA, 53 bp, Artificial
  Synthetic oligonucleotide
cggttttggaagacagaggcgccacttatctagttggcatggttgatccgact

SEQ ID NO: 204707 - DNA, 53 bp, Artificial
  Synthetic oligonucleotide
acacgagggtcgtttgtgcgagaggcattactcccggcagttgcatcgttgcg

SEQ ID NO: 204708 - DNA, 60 bp, Artificial
  Synthetic oligonucleotide
tcgtggtgacaggttgcgagccttgagagccagcggaaacgcaggaggtaacaccaccca

SEQ ID NO: 204709 - DNA, 53 bp, Artificial
  Synthetic oligonucleotide
tcgtgattaaggcgatagagtagggtgatctgagcgaagttaagccgtggata

SEQ ID NO: 204710 - DNA, 53 bp, Artificial
  Synthetic oligonucleotide
ctggaaacaaggtagtgaccgtagacacgccttttggcaagctcgggctttcc

SEQ ID NO: 204711 - DNA, 53 bp, Artificial
  Synthetic oligonucleotide
tgcccgttatgaatcgctggatttgcttacggacacccccgaaatccggatca

SEQ ID NO: 204712 - DNA, 52 bp, Artificial
  Synthetic oligonucleotide
gttctgaaagcactcatggcctgcgattgcatgtaacttagcgcctggatag

SEQ ID NO: 204713 - DNA, 52 bp, Artificial
  Synthetic oligonucleotide
agtcttacttagttggaaatcttggcgcgcagtggagccatttactatatat

SEQ ID NO: 204714 - DNA, 52 bp, Artificial
  Synthetic oligonucleotide
gtataggtcgcggatttgccgaacgcccgaaagccctgagtcagttcgacgc

SEQ ID NO: 204715 - DNA, 52 bp, Artificial
  Synthetic oligonucleotide
ggtcacataggtaattgccaaggccaccagtacacgcccgaccaaggtttta

SEQ ID NO: 204716 - DNA, 52 bp, Artificial
  Synthetic oligonucleotide
ggggaataagaccctcaaatcgagatccatccaacggaagctcaccttcaac

SEQ ID NO: 204717 - DNA, 52 bp, Artificial
  Synthetic oligonucleotide
ggagattgcacccggccagcgctcgcacgctgaccaattttccgtgtaagcg

SEQ ID NO: 204718 - DNA, 52 bp, Artificial
  Synthetic oligonucleotide
cccgaatctcatgcgctcgcgtgttagaatgcacgcggaagttggctggaca

SEQ ID NO: 204719 - DNA, 57 bp, Artificial
  Synthetic oligonucleotide
aaggaaaggtgcggcttgccgaacgatgtttgttgctggtgttaccagcgaattgac

SEQ ID NO: 204720 - DNA, 52 bp, Artificial
  Synthetic oligonucleotide
tcgtctcttaagataacagacagctgttcataaccttcccgagaaatttggc

SEQ ID NO: 204721 - DNA, 52 bp, Artificial
  Synthetic oligonucleotide
tcggcgtgtaacgtccgcgcacgctcaaggtaatgcgtgttgcagcctggta

SEQ ID NO: 204722 - DNA, 51 bp, Artificial
  Synthetic oligonucleotide
agtataagcggtggattggcctattcttagtctaagtatctgggtacctat

SEQ ID NO: 204723 - DNA, 51 bp, Artificial
  Synthetic oligonucleotide
acgaagccagtccagtcgccggagaatcgcgaccatgacaccccagcatcc

SEQ ID NO: 204724 - DNA, 51 bp, Artificial
  Synthetic oligonucleotide
atgcctgaggctagtatttccgcctgactcatgcggcgacgtccgactttt

SEQ ID NO: 204725 - DNA, 51 bp, Artificial
  Synthetic oligonucleotide
aaggcagatttcacacgcgtccgcagctcaatgcctgtcaaggtgcggcta

SEQ ID NO: 204726 - DNA, 51 bp, Artificial
  Synthetic oligonucleotide
aacaggctacaaaagggcgggacgcaagaatcgtgctcgcaaggcgcatgc

SEQ ID NO: 204727 - DNA, 51 bp, Artificial
  Synthetic oligonucleotide
cctacacctggctgcacgtaaggccgaacttaaatatggctggtcgcacga

SEQ ID NO: 204728 - DNA, 51 bp, Artificial
  Synthetic oligonucleotide
agcatttgccgatgcagtaagcgtcatgaatgcgagtgccaaaacggcctg

SEQ ID NO: 204729 - DNA, 51 bp, Artificial
  Synthetic oligonucleotide
aattccagcatctcggtaaccagagaagcaagcggatgcagcctgaaatcg

SEQ ID NO: 204730 - DNA, 57 bp, Artificial
  Synthetic oligonucleotide
ccatccgtaccactaatagtggccccactggcatttccttgtggcgagttagaggta

SEQ ID NO: 204731 - DNA, 51 bp, Artificial
  Synthetic oligonucleotide
agtgttaactgccaccttgaacacggcgttaccttccatcactacggtatc

SEQ ID NO: 204732 - DNA, 51 bp, Artificial
  Synthetic oligonucleotide
cgcactggggatacgcttgttgttcatagcttagacaggctagctcgcaac

SEQ ID NO: 204733 - DNA, 51 bp, Artificial
  Synthetic oligonucleotide
aagggcgggacgcaagaatcgtgctcgcaaggcgcatgctatatagacccc

SEQ ID NO: 204734 - DNA, 51 bp, Artificial
  Synthetic oligonucleotide
tgactaaccttacgttaccctgggagggtatgccagaatcctctcgtcggc

SEQ ID NO: 204735 - DNA, 51 bp, Artificial
  Synthetic oligonucleotide
gataggttgtcattagcgcggtgtttacgtagctcaagtttacgtaaatca

SEQ ID NO: 204736 - DNA, 51 bp, Artificial
  Synthetic oligonucleotide
agctaccgggtaccgggcaatcggtgaggttaaaggcggggcaggtgtaca

SEQ ID NO: 204737 - DNA, 50 bp, Artificial
  Synthetic oligonucleotide
agcattgccgatacacttggtggccaaggctttagaatcacccgaattca

SEQ ID NO: 204738 - DNA, 50 bp, Artificial
  Synthetic oligonucleotide
tggctatgggtagacgggatgacacgcccctctgcacggaccaccatacg

SEQ ID NO: 204739 - DNA, 50 bp, Artificial
  Synthetic oligonucleotide
agccaagtttgcgcaaggggctaccaaagcctgcggttgttagtcgggct

SEQ ID NO: 204740 - DNA, 50 bp, Artificial
  Synthetic oligonucleotide
agagcatgcctcaacactcccgggccagttcacacatcggtcaggcaacg

SEQ ID NO: 204741 - DNA, 59 bp, Artificial
  Synthetic oligonucleotide
agaggtgttgggcgagttatcgcccttccatgatatgtatgggtactttgccgatcctg

SEQ ID NO: 204742 - DNA, 50 bp, Artificial
  Synthetic oligonucleotide
agccacctgccaagcggtagcccgtgaaatcagatatggtgcattgcggg

SEQ ID NO: 204743 - DNA, 50 bp, Artificial
  Synthetic oligonucleotide
ggggtctgcatgtttcagccgcagcacgttagtgacccccacggcatgta

SEQ ID NO: 204744 - DNA, 50 bp, Artificial
  Synthetic oligonucleotide
aaatggttgttcacgcttagctaaccagcgacccgcgccccaaacagcgg

SEQ ID NO: 204745 - DNA, 50 bp, Artificial
  Synthetic oligonucleotide
agccagtggtcttaggcgggcgcactatcacagcactgccggtgcatcat

SEQ ID NO: 204746 - DNA, 50 bp, Artificial
  Synthetic oligonucleotide
ggggcctagctcacttctatcccccataatgagtgcctttgcgcctaaac

SEQ ID NO: 204747 - DNA, 50 bp, Artificial
  Synthetic oligonucleotide
aaatccaattcgggatgcgggttaaaagggcggtaaagcgccggggcaga

SEQ ID NO: 204748 - DNA, 50 bp, Artificial
  Synthetic oligonucleotide
agccgtcaccaccagtgtcgtcaacgggattagcctgggtctagccacgg

SEQ ID NO: 204749 - DNA, 50 bp, Artificial
  Synthetic oligonucleotide
ggcgggcagcaatacaaactggcctttttcgcgccccagggttttcaggg

SEQ ID NO: 204750 - DNA, 50 bp, Artificial
  Synthetic oligonucleotide
agcctatcgtagcaccgtgattggagcccccgaatgcactggttggtgcc

SEQ ID NO: 204751 - DNA, 50 bp, Artificial
  Synthetic oligonucleotide
agcgccgtagagaaaaacagcggattgcggctaagcgccatgtgcaccaa

SEQ ID NO: 204752 - DNA, 60 bp, Artificial
  Synthetic oligonucleotide
ggtaatgacggtacttgagataccgcgaaagataccgtcagtgattatggactgtcaatg

SEQ ID NO: 204753 - DNA, 50 bp, Artificial
  Synthetic oligonucleotide
agcgcgatggaatgccgtaacgtacctgcccatgtagcatgcggctttgg

SEQ ID NO: 204754 - DNA, 50 bp, Artificial
  Synthetic oligonucleotide
agcgctttaggctcgttgatggcgactgcaactggcggtgcctgagtgct

SEQ ID NO: 204755 - DNA, 50 bp, Artificial
  Synthetic oligonucleotide
aaacatcccgcactgcggataccgaggctgtcgcatcctgcagcgcaagc

SEQ ID NO: 204756 - DNA, 50 bp, Artificial
  Synthetic oligonucleotide
tatctggtgttgagcggcaagttgattccgcaggttggtgcctcgcgctt

SEQ ID NO: 204757 - DNA, 50 bp, Artificial
  Synthetic oligonucleotide
aatctggcgtgccgtcatctgcaattcaccaggcgtgcggaacgagccat

SEQ ID NO: 204758 - DNA, 50 bp, Artificial
  Synthetic oligonucleotide
aagtcgcgccagacacccgggtcaaagcactggaaacctatcgcccagcc

SEQ ID NO: 204759 - DNA, 50 bp, Artificial
  Synthetic oligonucleotide
aatgcggcctgtgctgcagtaatcgcggcttcagtttccgctacgcttgc

SEQ ID NO: 204760 - DNA, 50 bp, Artificial
  Synthetic oligonucleotide
tatagatgcgattgcacgcctgaccgtcagcggtaccaatggcccggtgc

SEQ ID NO: 204761 - DNA, 50 bp, Artificial
  Synthetic oligonucleotide
tccgcctgactcatgcggcgacgtccgactttttgctacgattgcgacgc

SEQ ID NO: 204762 - DNA, 50 bp, Artificial
  Synthetic oligonucleotide
tccttgctagccggacaggatgaacacagcgtagccgcattgccctgtgt

SEQ ID NO: 204763 - DNA, 60 bp, Artificial
  Synthetic oligonucleotide
tgcccacagtagcgctatggcagccgctagctgttgaccctgttcgactgtcagggacca

SEQ ID NO: 204764 - DNA, 50 bp, Artificial
  Synthetic oligonucleotide
acaaccccaccgtaaaacgcctgctgcgtgcagtgacccctgtcccggac

SEQ ID NO: 204765 - DNA, 50 bp, Artificial
  Synthetic oligonucleotide
acaacccggaagccgggcaatacatcctgaccctcaagcaatcccagccg

SEQ ID NO: 204766 - DNA, 50 bp, Artificial
  Synthetic oligonucleotide
acacgcccctcctcaagctggagcgcattcgctgcggagacgagaaaccc

SEQ ID NO: 204767 - DNA, 50 bp, Artificial
  Synthetic oligonucleotide
acactgaccacttgcggcgccagtagctcacgacctgtcaaatgcgcgca

SEQ ID NO: 204768 - DNA, 50 bp, Artificial
  Synthetic oligonucleotide
acattggccaccctgaaggaccgcgagctaggtttgcggcgtgacatgga

SEQ ID NO: 204769 - DNA, 50 bp, Artificial
  Synthetic oligonucleotide
accgccgcgcgaaggctcacgtagcaagatagcagccaccaccaagctac

SEQ ID NO: 204770 - DNA, 50 bp, Artificial
  Synthetic oligonucleotide
aagctgttcccggcataggctggctttaatgggcgtgctcaagaggcgcg

SEQ ID NO: 204771 - DNA, 50 bp, Artificial
  Synthetic oligonucleotide
accgctagccacccccgtcatgcgcaaacaaatgtcacgtgctgccgttg

SEQ ID NO: 204772 - DNA, 50 bp, Artificial
  Synthetic oligonucleotide
acctggacaatgcactgggccagctcgaggcagcgaggctgaatctggac

SEQ ID NO: 204773 - DNA, 50 bp, Artificial
  Synthetic oligonucleotide
acgactcttgagtggacaacgccccgggtgcaaaggacacggagcaccaa

SEQ ID NO: 204774 - DNA, 60 bp, Artificial
  Synthetic oligonucleotide
cagttcaaccgcctgagttgagagcggcaccaggtgatcgatgtttgttttgctcaccct

SEQ ID NO: 204775 - DNA, 60 bp, Artificial
  Synthetic oligonucleotide
tgcgacgcctctacagcatggcagactcgcatagtacaaactccgagcgttggtaccggc

SEQ ID NO: 204776 - DNA, 50 bp, Artificial
  Synthetic oligonucleotide
acgctctcgcatgccggataaaccgaaacccgcccggggcagatgtggat

SEQ ID NO: 204777 - DNA, 50 bp, Artificial
  Synthetic oligonucleotide
acggacgggaaaccccgattccattcgggccgtacctggcactgggagga

SEQ ID NO: 204778 - DNA, 50 bp, Artificial
  Synthetic oligonucleotide
aagcactggcgctactgagcaataagcctgcaaggcgcatgccatacggc

SEQ ID NO: 204779 - DNA, 50 bp, Artificial
  Synthetic oligonucleotide
acgtggccattgcaaccccgtttattcttatgcttcggccgcgcagtggc

SEQ ID NO: 204780 - DNA, 50 bp, Artificial
  Synthetic oligonucleotide
gtacgcatcccgctggcaaagaaaccaactacccggccgatgggcgttgc

SEQ ID NO: 204781 - DNA, 50 bp, Artificial
  Synthetic oligonucleotide
actcgcccttctatcggcgcttgcgcagcctcattacccaatgcgtgcac

SEQ ID NO: 204782 - DNA, 50 bp, Artificial
  Synthetic oligonucleotide
actgctgaaatggtacctgcgcacgctcacacagcgcgataaagcgcgcg

SEQ ID NO: 204783 - DNA, 50 bp, Artificial
  Synthetic oligonucleotide
actggagcggattgcgccctggcacccctgaaaacctgccaaccattggt

SEQ ID NO: 204784 - DNA, 50 bp, Artificial
  Synthetic oligonucleotide
aacattggcagaatgtggctatttccgcctgcgagcagtcagggcgcgcc

SEQ ID NO: 204785 - DNA, 50 bp, Artificial
  Synthetic oligonucleotide
cagaacccctggcgggctaggctctagcggcaactgggtagtgggcatct

SEQ ID NO: 204786 - DNA, 60 bp, Artificial
  Synthetic oligonucleotide
tgtgggctaactgatgctcgataacgtagggatcgaagtttaagcgctcgtgcaatattg

SEQ ID NO: 204787 - DNA, 50 bp, Artificial
  Synthetic oligonucleotide
cactactggcgtccctgcccacctgatgttgggtcaagccgcgcttgaaa

SEQ ID NO: 204788 - DNA, 50 bp, Artificial
  Synthetic oligonucleotide
cgcagtcctagcgcttgcccacgagtgagtcttgcgtagctcacccaacc

SEQ ID NO: 204789 - DNA, 50 bp, Artificial
  Synthetic oligonucleotide
cgccacgtacggttgtaccaggccgtgaccttaggggcaaaacgcttccc

SEQ ID NO: 204790 - DNA, 50 bp, Artificial
  Synthetic oligonucleotide
cgccactcgcaatggctttggtaccctccgccaacacggtaagcggctca

SEQ ID NO: 204791 - DNA, 50 bp, Artificial
  Synthetic oligonucleotide
cgcggtcggtagcgtgttaaaccagtgcgcgtaagtggtgctgtccatgc

SEQ ID NO: 204792 - DNA, 50 bp, Artificial
  Synthetic oligonucleotide
cgcgtctgtcccactcagcttcggcacggtctaacgtaccgttcacggcg

SEQ ID NO: 204793 - DNA, 50 bp, Artificial
  Synthetic oligonucleotide
cggcacaaggcacgacatggccaggaacgctaggtgctcctgaccctaca

SEQ ID NO: 204794 - DNA, 50 bp, Artificial
  Synthetic oligonucleotide
caagcgcgcaccgtgaaacgtgagtaccgtgccattgtgtggggtcagct

SEQ ID NO: 204795 - DNA, 50 bp, Artificial
  Synthetic oligonucleotide
cgtccctgcccacctgatgttgggtcaagccgcgcttgaaagcggttggg

SEQ ID NO: 204796 - DNA, 50 bp, Artificial
  Synthetic oligonucleotide
caaagcaagttgggctgcctgttgctctgcgatgcggcggctagtacctt

SEQ ID NO: 204797 - DNA, 59 bp, Artificial
  Synthetic oligonucleotide
cgttcgccaagctgtatacctggctaacatttaccgccgttgatcgcgccagctttgtg

SEQ ID NO: 204798 - DNA, 50 bp, Artificial
  Synthetic oligonucleotide
atttgtccttcccaagcggccgggtcatggcagtcacggtcttctggtgc

SEQ ID NO: 204799 - DNA, 50 bp, Artificial
  Synthetic oligonucleotide
ctacgtatgagctgccttcacgcaccatcacgcgcccagccaggcttagg

SEQ ID NO: 204800 - DNA, 50 bp, Artificial
  Synthetic oligonucleotide
ctccagcgagcgaaatgctataaagggcgctattagacacgataactgcc

SEQ ID NO: 204801 - DNA, 50 bp, Artificial
  Synthetic oligonucleotide
attgccgcatcacctagcattcgatcgcccaacaaccatggggccgatcg

SEQ ID NO: 204802 - DNA, 50 bp, Artificial
  Synthetic oligonucleotide
ctcgctggcaattacggtgggcttcccaggagttccaagcggacagggca

SEQ ID NO: 204803 - DNA, 50 bp, Artificial
  Synthetic oligonucleotide
ccaagcgcccactatcggcctgggttcgtggcgttaacgcgcatctgcca

SEQ ID NO: 204804 - DNA, 50 bp, Artificial
  Synthetic oligonucleotide
ccaagccgacaaacgcccctccgctgacaacacacgcacagaacccagta

SEQ ID NO: 204805 - DNA, 50 bp, Artificial
  Synthetic oligonucleotide
ccagtgctgcctatgccaaattggcgcgggcgtatggtctgacccctacg

SEQ ID NO: 204806 - DNA, 50 bp, Artificial
  Synthetic oligonucleotide
ccaacgcatgcggcacaaggcacgacatggccaggaacgctaggtgctcc

SEQ ID NO: 204807 - DNA, 50 bp, Artificial
  Synthetic oligonucleotide
ccatgattcgtgccaccctcttcgttattcgtgacttccgccgtattcgg

SEQ ID NO: 204808 - DNA, 58 bp, Artificial
  Synthetic oligonucleotide
ggcttggcaagattcctcgggtgtaggcttttttgtgacggtcatgccatcttttgac

SEQ ID NO: 204809 - DNA, 50 bp, Artificial
  Synthetic oligonucleotide
catgccaatgcggctcacacttgtcgggcgacgtacgcaaccacagtcaa

SEQ ID NO: 204810 - DNA, 50 bp, Artificial
  Synthetic oligonucleotide
caggcagttaccgtactcattccgccgcaagccgcacatagcacgcaagc

SEQ ID NO: 204811 - DNA, 50 bp, Artificial
  Synthetic oligonucleotide
cccgctggcaaagaaaccaactacccggccgatgggcgttgcctattcgc

SEQ ID NO: 204812 - DNA, 50 bp, Artificial
  Synthetic oligonucleotide
cccgtcacgatgggtgtatggcctgagagcccttgccacaagcatgcggg

SEQ ID NO: 204813 - DNA, 50 bp, Artificial
  Synthetic oligonucleotide
ccgaccactgccagatatggattgagttcagatagacgcagggtgtaact

SEQ ID NO: 204814 - DNA, 50 bp, Artificial
  Synthetic oligonucleotide
ccgaccggtgcacaaggctcggcgctattaagctccatgtcgctagccaa

SEQ ID NO: 204815 - DNA, 50 bp, Artificial
  Synthetic oligonucleotide
ccgcacttctaagccgccggatacatccaaacgcacctgtacgcggggca

SEQ ID NO: 204816 - DNA, 50 bp, Artificial
  Synthetic oligonucleotide
cctctcgcccgaatgccgcacagctatttagcttcgccgccagtggcttt

SEQ ID NO: 204817 - DNA, 50 bp, Artificial
  Synthetic oligonucleotide
cctgatgttgggtcaagccgcgcttgaaagcggttggggcaaacgcgaat

SEQ ID NO: 204818 - DNA, 50 bp, Artificial
  Synthetic oligonucleotide
cctgggatgctccatcactcgggcgggcaaccagcactggaccatctaca

SEQ ID NO: 204819 - DNA, 55 bp, Artificial
  Synthetic oligonucleotide
accacgaattgcgactaattcggctacctttaagttatcacgtatcgactcggga

SEQ ID NO: 204820 - DNA, 50 bp, Artificial
  Synthetic oligonucleotide
cagcacacgcaggcagttaccgtactcattccgccgcaagccgcacatag

SEQ ID NO: 204821 - DNA, 50 bp, Artificial
  Synthetic oligonucleotide
cagatcggggtacgcatcccgctggcaaagaaaccaactacccggccgat

SEQ ID NO: 204822 - DNA, 50 bp, Artificial
  Synthetic oligonucleotide
agtgccccgcccactgagccatacgttgcaaggacacacctggctcccaa

SEQ ID NO: 204823 - DNA, 50 bp, Artificial
  Synthetic oligonucleotide
agtgcacccgtgatatcgccttgtgcggcaatgctgatatccccgcctcc

SEQ ID NO: 204824 - DNA, 50 bp, Artificial
  Synthetic oligonucleotide
agtagcgcagtctggccagtttggaccacggaagggatcgcgtgatgcaa

SEQ ID NO: 204825 - DNA, 50 bp, Artificial
  Synthetic oligonucleotide
agtaccccaaaattgcacaaatgcgtggctggcagggcgaagccatcgta

SEQ ID NO: 204826 - DNA, 50 bp, Artificial
  Synthetic oligonucleotide
aggttgcggaaaggctcaacaactgcgtgcgagaaggcgacactgtggct

SEQ ID NO: 204827 - DNA, 50 bp, Artificial
  Synthetic oligonucleotide
aggtcggtcctgtagcacactctctatgcgccggctaaccgattcccgca

SEQ ID NO: 204828 - DNA, 50 bp, Artificial
  Synthetic oligonucleotide
agggtagcttgaggcgcccactgtcgtcagccagtttggcatagtgctcg

SEQ ID NO: 204829 - DNA, 50 bp, Artificial
  Synthetic oligonucleotide
agggctgagcggcgtgagtgtttccaattggctaggctgtagtgcgcgtg

SEQ ID NO: 204830 - DNA, 48 bp, Artificial
  Synthetic oligonucleotide
ttccattttccgtacccccttaagaaaaaaggcccggagggcttagaa

SEQ ID NO: 204831 - DNA, 50 bp, Artificial
  Synthetic oligonucleotide
gcgtactgcgacgcgtgcacaattgggtcgtggcacagttagccacacta

SEQ ID NO: 204832 - DNA, 50 bp, Artificial
  Synthetic oligonucleotide
agggcatggtagttccgcctatgctcggggtctcttgcggcaacgcattc

SEQ ID NO: 204833 - DNA, 50 bp, Artificial
  Synthetic oligonucleotide
agggatgcgtccccaaccctcgaagaaacgtgacgcgcccctcaccgacc

SEQ ID NO: 204834 - DNA, 50 bp, Artificial
  Synthetic oligonucleotide
agggagtgccttgcgcgaactcacctcgcatgacgcgactgaggcggcga

SEQ ID NO: 204835 - DNA, 50 bp, Artificial
  Synthetic oligonucleotide
gctgggttccaagtcggtctcaaccgaagtatcgcaaaccgcgatggcgc

SEQ ID NO: 204836 - DNA, 50 bp, Artificial
  Synthetic oligonucleotide
aggcctaggtttgcacgtagcacggaggatcgcggagaatcacggtggcc

SEQ ID NO: 204837 - DNA, 50 bp, Artificial
  Synthetic oligonucleotide
aggccatgctctggctactatccctgctcgtgacatggctggataggcgc

SEQ ID NO: 204838 - DNA, 50 bp, Artificial
  Synthetic oligonucleotide
aggcacagagcaaatgggccgtcacaggtagtgaaagcgcccgagcccaa

SEQ ID NO: 204839 - DNA, 50 bp, Artificial
  Synthetic oligonucleotide
atgttgatcccagtcgcgaccccagtggtcaccccaacgtggaggcgcat

SEQ ID NO: 204840 - DNA, 50 bp, Artificial
  Synthetic oligonucleotide
atgtcgacggcatccctttaagcttcccggatggcagtggccaaccaggc

SEQ ID NO: 204841 - DNA, 59 bp, Artificial
  Synthetic oligonucleotide
tacagcatggcagactcgcatagtacaaactccgagcgttggtaccggcccaagagcat

SEQ ID NO: 204842 - DNA, 50 bp, Artificial
  Synthetic oligonucleotide
atggtggggcatgtgccagtaggtggcggcttgttagatactttgccggc

SEQ ID NO: 204843 - DNA, 50 bp, Artificial
  Synthetic oligonucleotide
cttagtcggcgtggtgcttgggccgcacacctctggcttgctaccagata

SEQ ID NO: 204844 - DNA, 50 bp, Artificial
  Synthetic oligonucleotide
atggcgtgctacgtatgagctgccttcacgcaccatcacgcgcccagcca

SEQ ID NO: 204845 - DNA, 50 bp, Artificial
  Synthetic oligonucleotide
cttgggccgcacacctctggcttgctaccagatagcgatgccaaccgtga

SEQ ID NO: 204846 - DNA, 50 bp, Artificial
  Synthetic oligonucleotide
atgccggcgcatagcgcaatgagacaaacaagttggcccccagggtgcta

SEQ ID NO: 204847 - DNA, 50 bp, Artificial
  Synthetic oligonucleotide
gaagtcctacttcacgtttgagaacctgccgcttacgatcaccatcgccc

SEQ ID NO: 204848 - DNA, 50 bp, Artificial
  Synthetic oligonucleotide
atgagcaaaactttcccggcttggttgcccttcctgctggcttccgggtc

SEQ ID NO: 204849 - DNA, 50 bp, Artificial
  Synthetic oligonucleotide
atcggccgttggaaaacaccgcgtagcgactacccaatgaccaagccggg

SEQ ID NO: 204850 - DNA, 50 bp, Artificial
  Synthetic oligonucleotide
atcaggttgccgtgcaacttacccaccacgatgcactaggcgcacacgct

SEQ ID NO: 204851 - DNA, 50 bp, Artificial
  Synthetic oligonucleotide
atcaggaggacaggcgaggctagtgacgccaccagctactgcggcttgca

SEQ ID NO: 204852 - DNA, 56 bp, Artificial
  Synthetic oligonucleotide
gatacacgccaagagcgagggttttgcgtttgtagttaaaccgataatcgaagcgc

SEQ ID NO: 204853 - DNA, 50 bp, Artificial
  Synthetic oligonucleotide
gactgtttggaatgggatggcacaccagtagcactttcgccgcgcgccgt

SEQ ID NO: 204854 - DNA, 50 bp, Artificial
  Synthetic oligonucleotide
gagcatctagggagtgccttgcgcgaactcacctcgcatgacgcgactga

SEQ ID NO: 204855 - DNA, 50 bp, Artificial
  Synthetic oligonucleotide
atagcggtttgttggtttcagagcccgcgcctaagcctagcgctgctggt

SEQ ID NO: 204856 - DNA, 50 bp, Artificial
  Synthetic oligonucleotide
ataagcagtccgacggctgcgcccaacagacaaagggtcagcacggccct

SEQ ID NO: 204857 - DNA, 50 bp, Artificial
  Synthetic oligonucleotide
ataacgcggattgcctaccacctcggacaaacctcccacattgcgcggca

SEQ ID NO: 204858 - DNA, 58 bp, Artificial
  Synthetic oligonucleotide
ttaggtgatctagcatccccggatagctttctgcagggaagccctcgatattcacaac

SEQ ID NO: 204859 - DNA, 58 bp, Artificial
  Synthetic oligonucleotide
cattgcagatcgtggcggacgtattccccgcgttcacttttgccagtgcgtgagctga

SEQ ID NO: 204860 - DNA, 58 bp, Artificial
  Synthetic oligonucleotide
gtcttctgtcacacctacgtgttgggcgaatttagtgcgggacatgaggggcacgacg

SEQ ID NO: 204861 - DNA, 58 bp, Artificial
  Synthetic oligonucleotide
tagagcgttgaacctacttggataccgcagcgtccagatgggggattagtgcaaccga

SEQ ID NO: 204862 - DNA, 56 bp, Artificial
  Synthetic oligonucleotide
gaagattatttcgtcttagtttgacaggggaaaagttccaaccatgtccatcgtga

SEQ ID NO: 204863 - DNA, 57 bp, Artificial
  Synthetic oligonucleotide
aatctgctgcaaattcctttcgcatatcagccactgctcgcactacgaagcttttta

SEQ ID NO: 204864 - DNA, 56 bp, Artificial
  Synthetic oligonucleotide
catcaggggcacatgcgagcaataggttatccatttccgatgctgtaacttgcgca

SEQ ID NO: 204865 - DNA, 56 bp, Artificial
  Synthetic oligonucleotide
agaatgtggcaagcggatcgccccgactaggtgtgcttttcccgcgatgaattcac

SEQ ID NO: 204866 - DNA, 55 bp, Artificial
  Synthetic oligonucleotide
gagccagtgacgccagagacaaaaccggatttgcaagattcctggcatgtacctg

SEQ ID NO: 204867 - DNA, 55 bp, Artificial
  Synthetic oligonucleotide
gactggtggtactaatacacgtggtagcggttatacatcgccacctaccgttaca

SEQ ID NO: 204868 - DNA, 55 bp, Artificial
  Synthetic oligonucleotide
ctcgcgcgtgaaacctctacgtttcgcttcatgattccgtttcagccaggatttt

SEQ ID NO: 204869 - DNA, 55 bp, Artificial
  Synthetic oligonucleotide
ctgccttgtttagcattattgaaccctacgccatcacctgaaggcaatactcccg

SEQ ID NO: 204870 - DNA, 55 bp, Artificial
  Synthetic oligonucleotide
gcaaatctccgccagtagtgtcgatgaccgctttataaacatccgtttccacttg

SEQ ID NO: 204871 - DNA, 60 bp, Artificial
  Synthetic oligonucleotide
cgcgctagctccggcacattttccatctgacttagattaaataccttggcataaaacaca

SEQ ID NO: 204872 - DNA, 55 bp, Artificial
  Synthetic oligonucleotide
ctggagccttgcgatgttatccaggtcaatacgacgcggaaacaccttgaccaca

SEQ ID NO: 204873 - DNA, 55 bp, Artificial
  Synthetic oligonucleotide
gatggcaattcctcggtctatcaataaggcgtgtgcatcgcggaaggcaagatag

SEQ ID NO: 204874 - DNA, 55 bp, Artificial
  Synthetic oligonucleotide
ctgtttgatgcgggagaacacgagggcgctccctatctggtgtatgcctatgtac

SEQ ID NO: 204875 - DNA, 55 bp, Artificial
  Synthetic oligonucleotide
gactacataaccctgatgcgaagattcgttatttgcacgccgagcgttatgtatc

SEQ ID NO: 204876 - DNA, 55 bp, Artificial
  Synthetic oligonucleotide
cttctacgtacatgcgcagattaatgagcgactcgagaagatcttgaatatagcg

SEQ ID NO: 204877 - DNA, 55 bp, Artificial
  Synthetic oligonucleotide
gaccatggcaattagtccgccaggcttgatatggtcgattgacttagcagcgaag

SEQ ID NO: 204878 - DNA, 55 bp, Artificial
  Synthetic oligonucleotide
gacattcaccgtgtgccccaacctcgcagaattggatacatagcgcatgatagta

SEQ ID NO: 204879 - DNA, 55 bp, Artificial
  Synthetic oligonucleotide
gaaggagatttattgcagctaacggagtctttaagtaaagctaatgtcgctgact

SEQ ID NO: 204880 - DNA, 55 bp, Artificial
  Synthetic oligonucleotide
gaggtcgggattcataggggcattataaaccctggcgtgcttaggcagtagcgct

SEQ ID NO: 204881 - DNA, 55 bp, Artificial
  Synthetic oligonucleotide
gacatcataggatggaaaatcaggccagacaggagcgacagtcagacgcccgaca

SEQ ID NO: 204882 - DNA, 57 bp, Artificial
  Synthetic oligonucleotide
gtaacggtgtcttctgtcacacctacgtgttgggcgaatttagtgcgggacatgagg

SEQ ID NO: 204883 - DNA, 55 bp, Artificial
  Synthetic oligonucleotide
ccagggcagtcgattaatagcgttggtgcatctattacctatgattggccaagct

SEQ ID NO: 204884 - DNA, 55 bp, Artificial
  Synthetic oligonucleotide
ccagttgcaaagttcgcctatgcgcatcttgtccagactcgtcgaagaacgacgt

SEQ ID NO: 204885 - DNA, 55 bp, Artificial
  Synthetic oligonucleotide
ccatttccctgctgatgttggttttacgctgctcaacccacccattgggctggac

SEQ ID NO: 204886 - DNA, 55 bp, Artificial
  Synthetic oligonucleotide
cccagcccagtcgttgttttgcctgtgcgctcatcaactctggttcccacgcggg

SEQ ID NO: 204887 - DNA, 55 bp, Artificial
  Synthetic oligonucleotide
cccagtgtcgatacatcccgcattctatcaaactcgcctatagacttgctatggg

SEQ ID NO: 204888 - DNA, 55 bp, Artificial
  Synthetic oligonucleotide
ccccggcttgctttatagcggcgctcgcccaattcgcggctatgggcgaatgtct

SEQ ID NO: 204889 - DNA, 55 bp, Artificial
  Synthetic oligonucleotide
ccgcgtggatgctaaatctcactgtatgcgatcccgatttgactgagccatccgg

SEQ ID NO: 204890 - DNA, 55 bp, Artificial
  Synthetic oligonucleotide
cctcatccatcgcgatcttggtgccctgttgggtgtatgccgtgcatttaccccg

SEQ ID NO: 204891 - DNA, 55 bp, Artificial
  Synthetic oligonucleotide
ccttcccgagaaatttggcccgaataaagatgtatatcgacatccagtgcttctg

SEQ ID NO: 204892 - DNA, 55 bp, Artificial
  Synthetic oligonucleotide
cgacgccactgaggacacaccaattgaaaccgtgtattgcacgggcaagccatcc

SEQ ID NO: 204893 - DNA, 60 bp, Artificial
  Synthetic oligonucleotide
gatacgctcataaagcgaagcattactgagtccacgatcaccttccgagggataggcatg

SEQ ID NO: 204894 - DNA, 55 bp, Artificial
  Synthetic oligonucleotide
cgattgccgccacactagcttgtggttaccaaggaatagttgaagcgctgcagcc

SEQ ID NO: 204895 - DNA, 55 bp, Artificial
  Synthetic oligonucleotide
cgcaacctttgcatgcttaccggacttggctagacctaccaatagaacagcacag

SEQ ID NO: 204896 - DNA, 55 bp, Artificial
  Synthetic oligonucleotide
cgcgattaggggatactaggcggccgttgctatcaatgaaccagcctttccagtc

SEQ ID NO: 204897 - DNA, 55 bp, Artificial
  Synthetic oligonucleotide
cgcgctgggtgtcaaggaccaacagcctatggcttactcgccacgcactggtctg

SEQ ID NO: 204898 - DNA, 55 bp, Artificial
  Synthetic oligonucleotide
cgctgcttcctaatcgtcgattatttaccgaccgtttaaatcacgccctcgcctc

SEQ ID NO: 204899 - DNA, 55 bp, Artificial
  Synthetic oligonucleotide
cggcttctaaactcatctcaggtgcatgctgggttgacactaacacggtgtcgat

SEQ ID NO: 204900 - DNA, 55 bp, Artificial
  Synthetic oligonucleotide
cgtagcccaagcccggcgcatgcaaaggaatgatcttggcgacagtcgcggtctc

SEQ ID NO: 204901 - DNA, 55 bp, Artificial
  Synthetic oligonucleotide
cgtatttggccccgctcgggtggcaatcagtctgccagagccgtaactcatggag

SEQ ID NO: 204902 - DNA, 55 bp, Artificial
  Synthetic oligonucleotide
cgtcccaagaattacctagacgctttgccatttcgcatttgctctcattggtgcg

SEQ ID NO: 204903 - DNA, 55 bp, Artificial
  Synthetic oligonucleotide
cgttaaccattctgcgtgcgcggccagttgtagcaagtagcgcatggcttcactg

SEQ ID NO: 204904 - DNA, 60 bp, Artificial
  Synthetic oligonucleotide
gatcgaacctcgcaatatgagtatgtccaggtctttcgtggcccatatctggtaatcaaa

SEQ ID NO: 204905 - DNA, 55 bp, Artificial
  Synthetic oligonucleotide
ggtatgcgcgtgattaagcgcgcctgtatacagtccttgtctcataagtaatacc

SEQ ID NO: 204906 - DNA, 55 bp, Artificial
  Synthetic oligonucleotide
ggtgagcttccttagaatctcgatacactccatatctgggagccgataatcaagc

SEQ ID NO: 204907 - DNA, 55 bp, Artificial
  Synthetic oligonucleotide
ggtgtgccagcacttaatcctgaaactgcgattttgccagtaactggtagccgtg

SEQ ID NO: 204908 - DNA, 55 bp, Artificial
  Synthetic oligonucleotide
gtaagaagccaattcgcggatatgtataaatctacggccaccattcataacggtc

SEQ ID NO: 204909 - DNA, 55 bp, Artificial
  Synthetic oligonucleotide
gtactggttgcgctattacaaggtatgcatcggtttagtgatttgcgtcgtaaat

SEQ ID NO: 204910 - DNA, 55 bp, Artificial
  Synthetic oligonucleotide
gtatcaaaactgccgcgcttttgcacaaaggtatggaccacatggtagcccagcg

SEQ ID NO: 204911 - DNA, 55 bp, Artificial
  Synthetic oligonucleotide
gtcagtatccgctgcgatgacattaaagccgagcatgacataaggttggcttaag

SEQ ID NO: 204912 - DNA, 55 bp, Artificial
  Synthetic oligonucleotide
gtccgtgttgcaaggtaagggattccgggttgcaatcgtgactgatggtcgcatg

SEQ ID NO: 204913 - DNA, 55 bp, Artificial
  Synthetic oligonucleotide
gtgcatcgcttatggaatgttttacccgagctccagcctgttcatatacgcatta

SEQ ID NO: 204914 - DNA, 55 bp, Artificial
  Synthetic oligonucleotide
gtgcgggacatgaggggcacgacggtcaattgacttgcgtcgaagtgagtgtcca

SEQ ID NO: 204915 - DNA, 60 bp, Artificial
  Synthetic oligonucleotide
tatctagatactagattctcacccaaccgaacagctacatttgatccatttcgaccaaac

SEQ ID NO: 204916 - DNA, 55 bp, Artificial
  Synthetic oligonucleotide
gtgttcagtctgggctgcgctagcattatggttactgaagttttcttgccgagca

SEQ ID NO: 204917 - DNA, 55 bp, Artificial
  Synthetic oligonucleotide
gttaagtgataatcggggagctccgtatatacatgatcctgatctagtgctaagc

SEQ ID NO: 204918 - DNA, 55 bp, Artificial
  Synthetic oligonucleotide
gttcggtatcgagaatatgtacgaacgcacgcgtcggtatcactagtaaaacccc

SEQ ID NO: 204919 - DNA, 55 bp, Artificial
  Synthetic oligonucleotide
taacaagtcacagtacgcccatataatcgcatccgaaaacacggctgagtgctca

SEQ ID NO: 204920 - DNA, 55 bp, Artificial
  Synthetic oligonucleotide
tagattctcacccaaccgaacagctacatttgatccatttcgaccaaacacaacc

SEQ ID NO: 204921 - DNA, 55 bp, Artificial
  Synthetic oligonucleotide
tagcacggttcaagccgcttgctaatgcaaatgtgatatgcactacggccgcaac

SEQ ID NO: 204922 - DNA, 55 bp, Artificial
  Synthetic oligonucleotide
tattgcgatttcttctgtggttggcgaggcatcctgcacaggcatcacgatgagt

SEQ ID NO: 204923 - DNA, 55 bp, Artificial
  Synthetic oligonucleotide
tcccgacactgctcaggatgtgcaaacttctggcggcacgaatttcacaccacga

SEQ ID NO: 204924 - DNA, 55 bp, Artificial
  Synthetic oligonucleotide
tcttgcactcccaagcccatacttagacgaaatgtagtttctttcccaatgggct

SEQ ID NO: 204925 - DNA, 55 bp, Artificial
  Synthetic oligonucleotide
tgaaatcacatcatatcgaactcgaatactgtacccaatgccgctggttgctgag

SEQ ID NO: 204926 - DNA, 60 bp, Artificial
  Synthetic oligonucleotide
tatgctcttgggccggtaccaacgctcggagtttgtactatgcgagtctgccatgctgta

SEQ ID NO: 204927 - DNA, 55 bp, Artificial
  Synthetic oligonucleotide
tgataccatgcttcagcgcgaaaacgttccgatcccttaacttgaattgcagtcc

SEQ ID NO: 204928 - DNA, 55 bp, Artificial
  Synthetic oligonucleotide
gcagcatattcaaagaaccttacgggtacttatacctacacaagcacaacgaccg

SEQ ID NO: 204929 - DNA, 55 bp, Artificial
  Synthetic oligonucleotide
gcagtcgaatgcaggaaacccatatgatcggttgtttgaatgggctgggaaatcc

SEQ ID NO: 204930 - DNA, 55 bp, Artificial
  Synthetic oligonucleotide
gccgcctgtgaaagtaggcatcaaggcagatccttgattagactcgctgtcatgt

SEQ ID NO: 204931 - DNA, 55 bp, Artificial
  Synthetic oligonucleotide
gcctggctgttgcaccctccaacgcttgttggactagggtgttaaggtcacgtcc

SEQ ID NO: 204932 - DNA, 55 bp, Artificial
  Synthetic oligonucleotide
gcgaacgcatgttgcaggcagagcagttattggcgagtgaatatcctgccgcgca

SEQ ID NO: 204933 - DNA, 55 bp, Artificial
  Synthetic oligonucleotide
gcggtagtggattatccattctctactttcaattcggcacttagcaatcctgcgc

SEQ ID NO: 204934 - DNA, 55 bp, Artificial
  Synthetic oligonucleotide
gcggtgcgcggtctctattttgttttgcgcctgaattcgccggatgcatttcaga

SEQ ID NO: 204935 - DNA, 55 bp, Artificial
  Synthetic oligonucleotide
gcgtaccgactcatgtgcattcagcgcagcccgcatttgctgaaaagtccacccc

SEQ ID NO: 204936 - DNA, 55 bp, Artificial
  Synthetic oligonucleotide
gcgtaccggctcgatcaatcgataacggcgttcccaggtccgcagcgtgacagga

SEQ ID NO: 204937 - DNA, 59 bp, Artificial
  Synthetic oligonucleotide
tcccgtaagccttgggttgcgagacgtcttgagcgcccatgcggatgttctcaccgtcg

SEQ ID NO: 204938 - DNA, 60 bp, Artificial
  Synthetic oligonucleotide
acttcggggcgtgtgaagaggcctcctggcttgatggagctgttcagttcaaccatcgcc

SEQ ID NO: 204939 - DNA, 55 bp, Artificial
  Synthetic oligonucleotide
gggagcctttcgaacaagagtccgcaccacacagcaaacggttaggtagtccaag

SEQ ID NO: 204940 - DNA, 55 bp, Artificial
  Synthetic oligonucleotide
gggcctaaatgtgaggacacaccatggaagggcgctctcacgccgatctcccctc

SEQ ID NO: 204941 - DNA, 55 bp, Artificial
  Synthetic oligonucleotide
ggggttcgcaccctctatgactggcctttcaagaccattcgtctatatcgcgctc

SEQ ID NO: 204942 - DNA, 55 bp, Artificial
  Synthetic oligonucleotide
ggtctagggacctgattatgatcttatcgggtctgtgggcctgattgtggtgcta

SEQ ID NO: 204943 - DNA, 55 bp, Artificial
  Synthetic oligonucleotide
aatgatctgtcgagtccgcgatcgtccgaccctctaatcaggcgccgcgagaccc

SEQ ID NO: 204944 - DNA, 55 bp, Artificial
  Synthetic oligonucleotide
tcgagccgcaagaacctgccggatttgctcgagtattcggaagtagcggggcgcg

SEQ ID NO: 204945 - DNA, 55 bp, Artificial
  Synthetic oligonucleotide
gtctacggagcgaaatgtcacctaatcggtgtccttgctttgggggacatgaact

SEQ ID NO: 204946 - DNA, 55 bp, Artificial
  Synthetic oligonucleotide
tccgtgagccactgagtttcgcaccagaggcacgtacgctttccactgccctccc

SEQ ID NO: 204947 - DNA, 55 bp, Artificial
  Synthetic oligonucleotide
gtgttggaacgtactcataagcgacgccgctcggctgaacggggcgagtcagttc

SEQ ID NO: 204948 - DNA, 55 bp, Artificial
  Synthetic oligonucleotide
tccggtgaacgattctgcctcaaatagaacgcctgtggtggcacgcaaggtagtg

SEQ ID NO: 204949 - DNA, 60 bp, Artificial
  Synthetic oligonucleotide
agacgaccaacagcaagagagcgggcgatcaactgtgtcgagccaggtgactggtacggg

SEQ ID NO: 204950 - DNA, 55 bp, Artificial
  Synthetic oligonucleotide
gttcgcacagcgcatcccgcacgcgatactaaccgtcacgcaactggagtacgcc

SEQ ID NO: 204951 - DNA, 55 bp, Artificial
  Synthetic oligonucleotide
tagcactcgctttcgtcgagtgccaaaatctggaagtcacccgtccgggagggac

SEQ ID NO: 204952 - DNA, 55 bp, Artificial
  Synthetic oligonucleotide
tcatcctgcgaagatgcgttagtcatgaacgcgctcggttgtcggttattgtgca

SEQ ID NO: 204953 - DNA, 55 bp, Artificial
  Synthetic oligonucleotide
tcccgatcgttagaccaaactaccaatcgctttgtcacgagcgggcgtcgtctct

SEQ ID NO: 204954 - DNA, 55 bp, Artificial
  Synthetic oligonucleotide
aggtattcatcatggtttgagagttcgcatctctcaggtcatctgattcccgaac

SEQ ID NO: 204955 - DNA, 55 bp, Artificial
  Synthetic oligonucleotide
gatctcccctaacttatctcgagcctcaaagaatcgatcgacgtacagcttctgt

SEQ ID NO: 204956 - DNA, 55 bp, Artificial
  Synthetic oligonucleotide
gattcggtcaggggtttcgtcatgggttcgggtctcacctccgctcggactgatt

SEQ ID NO: 204957 - DNA, 55 bp, Artificial
  Synthetic oligonucleotide
gcacgcgtcctagtaagtttggacgtgccctggttatacgacccgcctgcgcgtg

SEQ ID NO: 204958 - DNA, 55 bp, Artificial
  Synthetic oligonucleotide
gcagagagagatccacgtgacgcgcaagccagatgtgaccgagctcccgggaatg

SEQ ID NO: 204959 - DNA, 55 bp, Artificial
  Synthetic oligonucleotide
gcagtcatactcaaatgtgtgaacggccgcatggtcccgtgtgccaacacgttcg

SEQ ID NO: 204960 - DNA, 59 bp, Artificial
  Synthetic oligonucleotide
ggccggatggcttccctacgatccttatatgacatttcgccaagttcgtgcatccttag

SEQ ID NO: 204961 - DNA, 55 bp, Artificial
  Synthetic oligonucleotide
agcgggcgatcaactgtgtcgagccaggtgactggtacggggaccgatgacggtt

SEQ ID NO: 204962 - DNA, 55 bp, Artificial
  Synthetic oligonucleotide
agcgggccggatagagaggtgcggagcctactactgcgatagaatgaggggtcgc

SEQ ID NO: 204963 - DNA, 55 bp, Artificial
  Synthetic oligonucleotide
agcggcaccaaggtgcgaagatctcggttcgttcgtaggagtgccacgtccgctc

SEQ ID NO: 204964 - DNA, 55 bp, Artificial
  Synthetic oligonucleotide
gcccctgtaccgacagacgtgactaactggtgggttgcaacacgaagctacatgg

SEQ ID NO: 204965 - DNA, 54 bp, Artificial
  Synthetic oligonucleotide
ttcgctacgtagccgtagtggaggcctttttgacgtctccgtgttcatgcaagt

SEQ ID NO: 204966 - DNA, 54 bp, Artificial
  Synthetic oligonucleotide
cctatgtgagacggtcactcccggggaggtcgtgggagtggcgtgcacgcttcg

SEQ ID NO: 204967 - DNA, 54 bp, Artificial
  Synthetic oligonucleotide
ggggtcgttggggttccccatcagtgcgttggacatgtgtcagctcacccggat

SEQ ID NO: 204968 - DNA, 54 bp, Artificial
  Synthetic oligonucleotide
tgactcaaccgtaaacgaagcgtcagtattcgttccgcggtgatcattgctagg

SEQ ID NO: 204969 - DNA, 54 bp, Artificial
  Synthetic oligonucleotide
gactcgctgggtagatgtcgtgcctcgcctgtagaattaggggcggaacgtagt

SEQ ID NO: 204970 - DNA, 54 bp, Artificial
  Synthetic oligonucleotide
gctccggaacccagacatacactcctcgagcagtaggccgcatcctcatgtcca

SEQ ID NO: 204971 - DNA, 60 bp, Artificial
  Synthetic oligonucleotide
agcacatcaagggaagcgagcccatcataaccacgtccgtagacctcacaacacctccga

SEQ ID NO: 204972 - DNA, 54 bp, Artificial
  Synthetic oligonucleotide
ggactggaccggaactcgaccatggtcctctccgctcagaaggaggctccgcac

SEQ ID NO: 204973 - DNA, 54 bp, Artificial
  Synthetic oligonucleotide
aagtcaagactatctcacatcggtggccggctgaaatggggtagcagtattgcg

SEQ ID NO: 204974 - DNA, 54 bp, Artificial
  Synthetic oligonucleotide
ctatatgggccgaactatagaaagcgtcaacggcacgaagcccaacttagtgcg

SEQ ID NO: 204975 - DNA, 53 bp, Artificial
  Synthetic oligonucleotide
aactactagatccgagccccaggtgggccacccgacacgtggagcgcacgctt

SEQ ID NO: 204976 - DNA, 53 bp, Artificial
  Synthetic oligonucleotide
agtagttccagaccaggtacggcgccctgccgttgtcgtatccgggagcgaaa

SEQ ID NO: 204977 - DNA, 53 bp, Artificial
  Synthetic oligonucleotide
cccaaggtgatggcctggacttatatgtgcatgcacggttaagtgggccttat

SEQ ID NO: 204978 - DNA, 53 bp, Artificial
  Synthetic oligonucleotide
gtgaagacgtccaacgagtacgaatatccatggatgggtcacgccactagctc

SEQ ID NO: 204979 - DNA, 52 bp, Artificial
  Synthetic oligonucleotide
gagtgctctacgtgcactcctcccctcgcgcgctctgcccccatgtcgaatg

SEQ ID NO: 204980 - DNA, 52 bp, Artificial
  Synthetic oligonucleotide
ccatattgtggtcgacgcatgagggtctagaggagctacagcgcgatgttca

SEQ ID NO: 204981 - DNA, 52 bp, Artificial
  Synthetic oligonucleotide
aaagttccgagggatgcgtgagtcaaacgatctgcctctccccggtagcgga

SEQ ID NO: 204982 - DNA, 57 bp, Artificial
  Synthetic oligonucleotide
gcggacagtcgtgcaagaggtaacggttggtccatgacggcacgggattttgtcgac

SEQ ID NO: 204983 - DNA, 52 bp, Artificial
  Synthetic oligonucleotide
gaagatagccccgcacgggccctccctcctcagccatcgatcctcgctcctt

SEQ ID NO: 204984 - DNA, 52 bp, Artificial
  Synthetic oligonucleotide
ctcgtaccggttagttacatttatgagtagacgactagcggggtaggtgtaa

SEQ ID NO: 204985 - DNA, 52 bp, Artificial
  Synthetic oligonucleotide
agagaagcgcgccggacattccccgtctgtcgtcgcccggggccgttcactg

SEQ ID NO: 204986 - DNA, 51 bp, Artificial
  Synthetic oligonucleotide
gaactttgggatgcaggcgacgagcgcgaacggtggacgttccaacgggac

SEQ ID NO: 204987 - DNA, 51 bp, Artificial
  Synthetic oligonucleotide
gaataccgccgtagcctgtcgggctagaagggaacgtgtacacgagtgtga

SEQ ID NO: 204988 - DNA, 51 bp, Artificial
  Synthetic oligonucleotide
gcaagcgatacgacgtcgtgtacaagctctcagtctggacggtgacccatg

SEQ ID NO: 204989 - DNA, 51 bp, Artificial
  Synthetic oligonucleotide
tgccaccgctcgttcgcatatgtctggcagagtccccactcccgtccgtgc

SEQ ID NO: 204990 - DNA, 51 bp, Artificial
  Synthetic oligonucleotide
gggcatgtatcaacccctcccctagcgaacgccttcgagttgcggatctgg

SEQ ID NO: 204991 - DNA, 51 bp, Artificial
  Synthetic oligonucleotide
taagggatccctatgggacgcctctggctcgtgcggcgacgcgttgactcg

SEQ ID NO: 204992 - DNA, 51 bp, Artificial
  Synthetic oligonucleotide
tcggtacttcgactgtcggcgaatacgtcgttccggtcgacccgatggacc

SEQ ID NO: 204993 - DNA, 60 bp, Artificial
  Synthetic oligonucleotide
gccgtgtcggattcgcacggtgtgagcctcacccactacgcgatcttgcccctggaccga

SEQ ID NO: 204994 - DNA, 51 bp, Artificial
  Synthetic oligonucleotide
atcgtgaccaccagtatcccgtccgtcgctcggcacgctacccggttcatt

SEQ ID NO: 204995 - DNA, 51 bp, Artificial
  Synthetic oligonucleotide
agggcgagggatgccgggaggatccacgtcggggaatgctcctcccttcat

SEQ ID NO: 204996 - DNA, 51 bp, Artificial
  Synthetic oligonucleotide
actccgtgctcctgcacagcctgcaaggtataggcggaacacgatggatag

SEQ ID NO: 204997 - DNA, 51 bp, Artificial
  Synthetic oligonucleotide
aacgccttcgagttgcggatctggtagggacacacgcattcgccgtctgga

SEQ ID NO: 204998 - DNA, 51 bp, Artificial
  Synthetic oligonucleotide
cagctccccgatccgaccagtgggtcatcacggggagcgcgagtaaatgta

SEQ ID NO: 204999 - DNA, 51 bp, Artificial
  Synthetic oligonucleotide
ccacagggcgttagcggcaccaaggtgcgaagatctcggttcgttcgtagg

SEQ ID NO: 205000 - DNA, 51 bp, Artificial
  Synthetic oligonucleotide
cccaggccgctgcacacccgtcccacaacttccagacgtgtagttcccgct

SEQ ID NO: 205001 - DNA, 51 bp, Artificial
  Synthetic oligonucleotide
aaaacctaggaatagctccccaacttgtgcggagcaagtgccgggtgagtt

SEQ ID NO: 205002 - DNA, 50 bp, Artificial
  Synthetic oligonucleotide
accagcctgagaccgcggacttgtgggcgcttgcctcgagcgaattgaag

SEQ ID NO: 205003 - DNA, 50 bp, Artificial
  Synthetic oligonucleotide
acccccaggcgggctccgcacagggcgcagggcgaaggaagaacgtccgt

SEQ ID NO: 205004 - DNA, 60 bp, Artificial
  Synthetic oligonucleotide
ccacgtcggccccagattgatgcgagggatgcgcgcacaacagtcccctgtaccacgcaa

SEQ ID NO: 205005 - DNA, 50 bp, Artificial
  Synthetic oligonucleotide
acccctcacgtggcgagaacgagggacggcggtcacagaatgaggagggc

SEQ ID NO: 205006 - DNA, 50 bp, Artificial
  Synthetic oligonucleotide
acctagcaccgacttcgggcctgtcaaccccctcggaattctcgggtcgc

SEQ ID NO: 205007 - DNA, 50 bp, Artificial
  Synthetic oligonucleotide
acctggagccgacggtctacctccagagtcccgacctcttcacgctgccc

SEQ ID NO: 205008 - DNA, 50 bp, Artificial
  Synthetic oligonucleotide
acgagcgcactcggagaatgagccgagaaaaccagagcgagggcgtcccc

SEQ ID NO: 205009 - DNA, 50 bp, Artificial
  Synthetic oligonucleotide
acgccccgattcgcgatggcccgtctcccggcctaggctgtacccaccca

SEQ ID NO: 205010 - DNA, 50 bp, Artificial
  Synthetic oligonucleotide
acgccgtttcttgtttcctgattccgcggagccgggtgtgtctgtcgtgg

SEQ ID NO: 205011 - DNA, 50 bp, Artificial
  Synthetic oligonucleotide
acgcctacgcatcctcgaacctccggctccaagtatgggctgccgaagag

SEQ ID NO: 205012 - DNA, 50 bp, Artificial
  Synthetic oligonucleotide
agaggtgcccgatgaggttcactgtttgccgtcgacgtgagctgaggcgc

SEQ ID NO: 205013 - DNA, 50 bp, Artificial
  Synthetic oligonucleotide
acgctgattccgccacccctggtgaagtctgcggtccacactcgtgaata

SEQ ID NO: 205014 - DNA, 50 bp, Artificial
  Synthetic oligonucleotide
acgggccgctcctctgacggacgcattgcaggttaaccgctttacaggca

SEQ ID NO: 205015 - DNA, 60 bp, Artificial
  Synthetic oligonucleotide
cagatgacatcgagtcgtctgtagaggcgcacgagcccgctgcggagtctggccctagtt

SEQ ID NO: 205016 - DNA, 50 bp, Artificial
  Synthetic oligonucleotide
acggtcgtacttgacgtgccgcccgaacttcaaccacggcgggccagact

SEQ ID NO: 205017 - DNA, 50 bp, Artificial
  Synthetic oligonucleotide
acggtctacctccagagtcccgacctcttcacgctgccccaagcgctcac

SEQ ID NO: 205018 - DNA, 50 bp, Artificial
  Synthetic oligonucleotide
agagaatcgattggagcaacctcgcttcgggcccctaccagccgcacgaa

SEQ ID NO: 205019 - DNA, 50 bp, Artificial
  Synthetic oligonucleotide
actcttgggcacgaatgttacttgcggggacgtcggcgccagctcaacgt

SEQ ID NO: 205020 - DNA, 50 bp, Artificial
  Synthetic oligonucleotide
agagaaggacggcacgtatgcccaggacggggtgacccacttgtcgtcag

SEQ ID NO: 205021 - DNA, 50 bp, Artificial
  Synthetic oligonucleotide
actgaccccttgaccccgccatccgaggttgctgcacaggtccgaatccg

SEQ ID NO: 205022 - DNA, 50 bp, Artificial
  Synthetic oligonucleotide
actgggcctcgcgcagctaatcgaaggtggcgtgaagttgggtcgaaagc

SEQ ID NO: 205023 - DNA, 50 bp, Artificial
  Synthetic oligonucleotide
agaatcctagtcgcctccgctgtgacgctcgctgggtctcagcagtcgat

SEQ ID NO: 205024 - DNA, 50 bp, Artificial
  Synthetic oligonucleotide
aaacagttccatcggagaccgcgaaccacgtagcaccgggatgctcggac

SEQ ID NO: 205025 - DNA, 50 bp, Artificial
  Synthetic oligonucleotide
aaagtccgtctctcggggctagcgcggtcacgagtgtcttcgagcccgtg

SEQ ID NO: 205026 - DNA, 60 bp, Artificial
  Synthetic oligonucleotide
cgagtcgccgaacgactgaggtatcacgacgatatcacccagaatcgtggatcgtgggaa

SEQ ID NO: 205027 - DNA, 50 bp, Artificial
  Synthetic oligonucleotide
aacaagtccaccatgcgtagcgagccgccaaccgcagaaccgtaggacac

SEQ ID NO: 205028 - DNA, 50 bp, Artificial
  Synthetic oligonucleotide
aacattcggcaattgtccgtccttacttcgcggggagcccaagcccccat

SEQ ID NO: 205029 - DNA, 50 bp, Artificial
  Synthetic oligonucleotide
aaccggcgcagttttcggatttgtttccgcgtcctggcaatctggacggg

SEQ ID NO: 205030 - DNA, 50 bp, Artificial
  Synthetic oligonucleotide
aaccgtccatccacgggtccggagactctcgcgctgggctatgcacaacc

SEQ ID NO: 205031 - DNA, 50 bp, Artificial
  Synthetic oligonucleotide
aacctccggctccaagtatgggctgccgaagagaggaagggtcgcgaaca

SEQ ID NO: 205032 - DNA, 50 bp, Artificial
  Synthetic oligonucleotide
aacgctgaatggaactaagggggttctttcggggacgagcggccagcact

SEQ ID NO: 205033 - DNA, 50 bp, Artificial
  Synthetic oligonucleotide
aaggaggcccagcatggggcaggtgaggaatgtgtccggcgagcctcggt

SEQ ID NO: 205034 - DNA, 50 bp, Artificial
  Synthetic oligonucleotide
aaggccgcgcccccacgaagatcaaccatcgagacgcacccacgcaaaca

SEQ ID NO: 205035 - DNA, 50 bp, Artificial
  Synthetic oligonucleotide
aaggccggggccgtaagcgcgggtgtggacgaaggaagtggtacctctta

SEQ ID NO: 205036 - DNA, 50 bp, Artificial
  Synthetic oligonucleotide
aagggtgagtccacccggaacgaagggtgaacgatggcagagcttcccga

SEQ ID NO: 205037 - DNA, 57 bp, Artificial
  Synthetic oligonucleotide
cgatacctatatgagctaccttccgatttcggtgcttttccgcgagcaaccgtatta

SEQ ID NO: 205038 - DNA, 50 bp, Artificial
  Synthetic oligonucleotide
aataggtgcatgggactcttcatgcagcgtccggaggaaccgagtgaatg

SEQ ID NO: 205039 - DNA, 50 bp, Artificial
  Synthetic oligonucleotide
aatcccccgacgccgtcaagaaatgacgattccccaccgagactccgcct

SEQ ID NO: 205040 - DNA, 50 bp, Artificial
  Synthetic oligonucleotide
aattgaaccagcatccttagagctcctcgcgtgagcgcctgagcctccgc

SEQ ID NO: 205041 - DNA, 50 bp, Artificial
  Synthetic oligonucleotide
acaaacccatccgcgcatcacacgcggtgtccagagccgaccgccccacg

SEQ ID NO: 205042 - DNA, 50 bp, Artificial
  Synthetic oligonucleotide
acaaagccgcgcacttcggtagccgcgagggtagtcgacgatttgggtca

SEQ ID NO: 205043 - DNA, 50 bp, Artificial
  Synthetic oligonucleotide
acactccttgccaacgggcctctcagataaccggacgacctaacccgccc

SEQ ID NO: 205044 - DNA, 50 bp, Artificial
  Synthetic oligonucleotide
acagccgtcgcacccagaccctagagtgtgcagcaccgaagggtgagtcc

SEQ ID NO: 205045 - DNA, 50 bp, Artificial
  Synthetic oligonucleotide
acatagtggcatcccggacccgccgcgtcaactcggaccgcccgataggc

SEQ ID NO: 205046 - DNA, 50 bp, Artificial
  Synthetic oligonucleotide
accaacggcgcatggcggatgcgtgaactgcacggacaggtctacgcgag

SEQ ID NO: 205047 - DNA, 50 bp, Artificial
  Synthetic oligonucleotide
accacccagaggaaagccctggtcggtggacactggcgtgcgttacaggg

SEQ ID NO: 205048 - DNA, 60 bp, Artificial
  Synthetic oligonucleotide
tagcgccgtgtcagtcgaatcgagtcctgctaagggatccctatgggacgcctctggctc

SEQ ID NO: 205049 - DNA, 57 bp, Artificial
  Synthetic oligonucleotide
atggagggcctcactgttcagcgaaaaacctaggaatagctccccaacttgtgcgga

SEQ ID NO: 205050 - DNA, 50 bp, Artificial
  Synthetic oligonucleotide
tatctgcacctgtatgtaaaggaccacagcgcctacacgaactgatatca

SEQ ID NO: 205051 - DNA, 50 bp, Artificial
  Synthetic oligonucleotide
accagccgggtcagcgatagaggttctgtgacagcgagtgcagcgagtcg

SEQ ID NO: 205052 - DNA, 50 bp, Artificial
  Synthetic oligonucleotide
atacgttggggcggatgccagagcgtgtttcggatcgggtgcggaggctc

SEQ ID NO: 205053 - DNA, 50 bp, Artificial
  Synthetic oligonucleotide
atacttgtcgtcgagggccgttggcctccgaagggcgtgggaggcatcct

SEQ ID NO: 205054 - DNA, 50 bp, Artificial
  Synthetic oligonucleotide
atccgagtgccgaaaccgtggctccatgcgatccgctgcacactcccacg

SEQ ID NO: 205055 - DNA, 50 bp, Artificial
  Synthetic oligonucleotide
atccgtctctggcgcacggtctacagctcgccgcggggcacagttgggga

SEQ ID NO: 205056 - DNA, 50 bp, Artificial
  Synthetic oligonucleotide
atcctactgacgggtaacgccgcacccacggggttgcttccccacatgac

SEQ ID NO: 205057 - DNA, 50 bp, Artificial
  Synthetic oligonucleotide
atcgagccgtctggtgcggtccgggcagtgctgtaggtccgactggtggg

SEQ ID NO: 205058 - DNA, 50 bp, Artificial
  Synthetic oligonucleotide
atctgtgctgagcctcgtggtgtggatcagtgcgatgctcggggctttcg

SEQ ID NO: 205059 - DNA, 50 bp, Artificial
  Synthetic oligonucleotide
atgccctcgacacaccagaccacgttcccaccccacaaggaggcgtacta

SEQ ID NO: 205060 - DNA, 54 bp, Artificial
  Synthetic oligonucleotide
atgcgctttttcgtcgggaaccgtattatgtattagcgacctcctgaaaggtcc

SEQ ID NO: 205061 - DNA, 50 bp, Artificial
  Synthetic oligonucleotide
atgccgcgagggcatcagatcaacaagacgcgaccaagccctctgatcgc

SEQ ID NO: 205062 - DNA, 50 bp, Artificial
  Synthetic oligonucleotide
atgcgttgaacgtgggctgccctcatgcaagggtcgggaatgctgagggt

SEQ ID NO: 205063 - DNA, 50 bp, Artificial
  Synthetic oligonucleotide
atgctacctgagtcgggtgcaacgtctgctgggcacattctggtgcgcgg

SEQ ID NO: 205064 - DNA, 50 bp, Artificial
  Synthetic oligonucleotide
atggaggtcgcccaatcgcgcactccaagtgaacgacagtcacctgtgcg

SEQ ID NO: 205065 - DNA, 50 bp, Artificial
  Synthetic oligonucleotide
attggagtgggacgctctccggtgccaagcctgcgacgattgactccttc

SEQ ID NO: 205066 - DNA, 50 bp, Artificial
  Synthetic oligonucleotide
caatctcgcggatacgttggggcggatgccagagcgtgtttcggatcggg

SEQ ID NO: 205067 - DNA, 50 bp, Artificial
  Synthetic oligonucleotide
cacacatggggattcgcgggtcttccgcatcgcagcggaggctctcagcc

SEQ ID NO: 205068 - DNA, 50 bp, Artificial
  Synthetic oligonucleotide
cacaccagaccacgttcccaccccacaaggaggcgtactagcagcccgac

SEQ ID NO: 205069 - DNA, 50 bp, Artificial
  Synthetic oligonucleotide
cacccacatcagtcaagccgccacgagcaaccccatacgaagtgcccgcg

SEQ ID NO: 205070 - DNA, 50 bp, Artificial
  Synthetic oligonucleotide
cacccatgcgggcggtacgtttgtgctggtccattcgcagagggatcgtg

SEQ ID NO: 205071 - DNA, 60 bp, Artificial
  Synthetic oligonucleotide
cggttgctcgcattgtgggagacgtaagaaaagaagatgcacgcactgagagcctcacta

SEQ ID NO: 205072 - DNA, 50 bp, Artificial
  Synthetic oligonucleotide
caccggctcgctcgaaacacgaagcacaatggcggcacagtgtgtcaccg

SEQ ID NO: 205073 - DNA, 50 bp, Artificial
  Synthetic oligonucleotide
ccaggtggcaagaagtgactcaactagcccgggagggcgagcctcctacc

SEQ ID NO: 205074 - DNA, 50 bp, Artificial
  Synthetic oligonucleotide
cccgcttgggatggggctaacaagccgcttttgacgtggggcgccaacga

SEQ ID NO: 205075 - DNA, 50 bp, Artificial
  Synthetic oligonucleotide
cccggcgtttcccgcacccacatcagtcaagccgccacgagcaaccccat

SEQ ID NO: 205076 - DNA, 50 bp, Artificial
  Synthetic oligonucleotide
cccgggagggcgagcctcctaccgcattgatgaccaattcgctctttcgc

SEQ ID NO: 205077 - DNA, 50 bp, Artificial
  Synthetic oligonucleotide
agaggtgcggagcctactactgcgatagaatgaggggtcgcccgcagtcc

SEQ ID NO: 205078 - DNA, 50 bp, Artificial
  Synthetic oligonucleotide
agcacgctccgacgctagagccgcgaacgagcaaagcccagctcaggatt

SEQ ID NO: 205079 - DNA, 50 bp, Artificial
  Synthetic oligonucleotide
agcagccctccgcaggggcgccgcaacgagtacaacggctattggggact

SEQ ID NO: 205080 - DNA, 50 bp, Artificial
  Synthetic oligonucleotide
agcagccgagtcgcttcgtagccaggggtacgccggatccatcgaggtga

SEQ ID NO: 205081 - DNA, 50 bp, Artificial
  Synthetic oligonucleotide
agcattgcgcgaaacgtccgtgcaggttctgggctggccgctcatacgag

SEQ ID NO: 205082 - DNA, 60 bp, Artificial
  Synthetic oligonucleotide
cgtggcgctgtcaactacgacatgaagttcagaggtggcgatgccacgggtcactccgtg

SEQ ID NO: 205083 - DNA, 50 bp, Artificial
  Synthetic oligonucleotide
agccggtgcaggggtctgaggtggccggtcccgcgagtgtgcgcgtcgac

SEQ ID NO: 205084 - DNA, 50 bp, Artificial
  Synthetic oligonucleotide
agcctggctcatccgagtgccgaaaccgtggctccatgcgatccgctgca

SEQ ID NO: 205085 - DNA, 50 bp, Artificial
  Synthetic oligonucleotide
agcgaacaggtttccatcaagtgggccgtcgagtgggattgcgagtcggc

SEQ ID NO: 205086 - DNA, 50 bp, Artificial
  Synthetic oligonucleotide
agcgagggtgacgttttcatcctactgacgggtaacgccgcacccacggg

SEQ ID NO: 205087 - DNA, 50 bp, Artificial
  Synthetic oligonucleotide
agcgtcggccatccaagtagccccggtatgccggagcccgtgatgagtca

SEQ ID NO: 205088 - DNA, 50 bp, Artificial
  Synthetic oligonucleotide
agctgcgtcaggtggggtctgccgagtctctggacgatcttcgggttcca

SEQ ID NO: 205089 - DNA, 50 bp, Artificial
  Synthetic oligonucleotide
agggagggactccgtcgccaatggaaggctgtgcgggtttagccgcgagc

SEQ ID NO: 205090 - DNA, 50 bp, Artificial
  Synthetic oligonucleotide
agggatgggccggggcttgttggtgtgtggtgttaggcgtgcatcgctcc

SEQ ID NO: 205091 - DNA, 50 bp, Artificial
  Synthetic oligonucleotide
agggccctgctgcgcttgccctagaacgcgatattctggctccaattgca

SEQ ID NO: 205092 - DNA, 50 bp, Artificial
  Synthetic oligonucleotide
agggggaggccgtttccccgccgtgacgcaagtgtttccagcgtgttacg

SEQ ID NO: 205093 - DNA, 59 bp, Artificial
  Synthetic oligonucleotide
ctcaaggaatgacctgctgggtaatgtttcgggcttcaggagtgcgtgtgaaaagcgtc

SEQ ID NO: 205094 - DNA, 50 bp, Artificial
  Synthetic oligonucleotide
agggggcgtgtcagcaccgctatgcacatcccgccatgatttagggcagg

SEQ ID NO: 205095 - DNA, 50 bp, Artificial
  Synthetic oligonucleotide
agtaccaacctccggttcattcccgcttgggatggggctaacaagccgct

SEQ ID NO: 205096 - DNA, 50 bp, Artificial
  Synthetic oligonucleotide
agtagcttcaagcggtcaacgcagatcacccttggcagatcgggcgagga

SEQ ID NO: 205097 - DNA, 50 bp, Artificial
  Synthetic oligonucleotide
agtccccctctcacaagttcgcctctcccgctctgctgaacggctagcga

SEQ ID NO: 205098 - DNA, 50 bp, Artificial
  Synthetic oligonucleotide
agtcgcgtcacccaaccgcagactgttgccatgccactaagggttgtggc

SEQ ID NO: 205099 - DNA, 50 bp, Artificial
  Synthetic oligonucleotide
agtctgacatgggacacgcggcactctctgtttcgcgcctcgcggtgtca

SEQ ID NO: 205100 - DNA, 50 bp, Artificial
  Synthetic oligonucleotide
agtgaccctcgagttctcccatccctggagcgccgaggtcgttcatctcc

SEQ ID NO: 205101 - DNA, 50 bp, Artificial
  Synthetic oligonucleotide
agtggtcaaacaagtccaccatgcgtagcgagccgccaaccgcagaaccg

SEQ ID NO: 205102 - DNA, 50 bp, Artificial
  Synthetic oligonucleotide
agtgtcttgcgcgatctccccatgattcgacgcctcccggcctagacgga

SEQ ID NO: 205103 - DNA, 50 bp, Artificial
  Synthetic oligonucleotide
agttctcccatccctggagcgccgaggtcgttcatctccgggaatcgcac

SEQ ID NO: 205104 - DNA, 59 bp, Artificial
  Synthetic oligonucleotide
cttaatatgtatgcctggacggttctccacacggtcgatcttgtagttactcgtctcat

SEQ ID NO: 205105 - DNA, 59 bp, Artificial
  Synthetic oligonucleotide
cttcccacgttatcctccccaacgcgtacagttgcacccaatgaggcacagtgctttgc

SEQ ID NO: 205106 - DNA, 59 bp, Artificial
  Synthetic oligonucleotide
gacccccgcctgagcgcacggcatggcctcagaggagcggtctactcccctagttacat

SEQ ID NO: 205107 - DNA, 58 bp, Artificial
  Synthetic oligonucleotide
gcaattgtaattctcgttccgattctcggtcctattgcgtggttcgccatcggacgaa

SEQ ID NO: 205108 - DNA, 58 bp, Artificial
  Synthetic oligonucleotide
aggcacgtgtcactacgaatcgtccgcacatacggcgagtcttgtccctctcgtgggg

SEQ ID NO: 205109 - DNA, 56 bp, Artificial
  Synthetic oligonucleotide
accgaggcggcatgtgggaagcacgcgtcctagtaagtttggacgtgccctggtta

SEQ ID NO: 205110 - DNA, 60 bp, Artificial
  Synthetic oligonucleotide
gcattaccgtgggacatcgaggcctcctggcgatggttgaactgaacagctccatcaagc

SEQ ID NO: 205111 - DNA, 60 bp, Artificial
  Synthetic oligonucleotide
gccaggtatcaccccgtgccgaaaccagaggctcaacgtggtctgacgaatacgcagcaa

SEQ ID NO: 205112 - DNA, 58 bp, Artificial
  Synthetic oligonucleotide
gccggtactaatattccggtgaacgattctgcctcaaatagaacgcctgtggtggcac

SEQ ID NO: 205113 - DNA, 57 bp, Artificial
  Synthetic oligonucleotide
tccgcactacgaacgcgggtagttgttagggcgagccaccattcacttctcgttcac

SEQ ID NO: 205114 - DNA, 60 bp, Artificial
  Synthetic oligonucleotide
tccgcattggctcgagccgcaagaacctgccggatttgctcgagtattcggaagtagcgg

SEQ ID NO: 205115 - DNA, 59 bp, Artificial
  Synthetic oligonucleotide
tctcacgtccggtgagggattgcgtcccggaatgagctagcggccattgggtaacttga

SEQ ID NO: 205116 - DNA, 55 bp, Artificial
  Synthetic oligonucleotide
aaatctggcggttcgcaccccgtacggttatggtaggagaactggcgtcctagca

SEQ ID NO: 205117 - DNA, 56 bp, Artificial
  Synthetic oligonucleotide
acaaagtgccactctcggagtagacactaccgcccgcggggtcgtctgcgatcggt

SEQ ID NO: 205118 - DNA, 60 bp, Artificial
  Synthetic oligonucleotide
aatggcaagaacgcgtatcacgccacttacggcgtccttgagtggctcacctcgcaccga

SEQ ID NO: 205119 - DNA, 60 bp, Artificial
  Synthetic oligonucleotide
tctgagctctggtacacatcgcagtatccggagtcgcggtggatctccgactggaggatg

SEQ ID NO: 205120 - DNA, 60 bp, Artificial
  Synthetic oligonucleotide
gtgagccacttgacgatggtcctgaagatccggatgcaaccggtccctccgagctgtctg

SEQ ID NO: 205121 - DNA, 58 bp, Artificial
  Synthetic oligonucleotide
tgccaattcgaagctacgtggtgcacgaacggactcgaaacgatgacgtgctttaacc

SEQ ID NO: 205122 - DNA, 60 bp, Artificial
  Synthetic oligonucleotide
ttgttgagtgcaacaagacaattgcgcgggcatgtatcaacccctcccctagcgaacgcc

SEQ ID NO: 205123 - DNA, 60 bp, Artificial
  Synthetic oligonucleotide
tggcttgatggagctgttcagttcaaccatcgccaggaggcctcgatgtcccacggtaat

SEQ ID NO: 205124 - DNA, 58 bp, Artificial
  Synthetic oligonucleotide
ctaggggtcgaggagagtacccacttgcgatattggcgtaggcgaggctgaagtagtg

SEQ ID NO: 205125 - DNA, 58 bp, Artificial
  Synthetic oligonucleotide
gctcgtccactcaactcccacgcataaagagtaccacaaaagtagggccacacagaat

SEQ ID NO: 205126 - DNA, 57 bp, Artificial
  Synthetic oligonucleotide
accacgtccgtagacctcacaacacctccgacacgcaagacacgtgcgtatttccgc

SEQ ID NO: 205127 - DNA, 56 bp, Artificial
  Synthetic oligonucleotide
ttgaggtcgggacagtcatctgggaatcgccagacaccgacctctcgattatccgg

SEQ ID NO: 205128 - DNA, 56 bp, Artificial
  Synthetic oligonucleotide
tcttggtgcgtaccgctcctcctcgagtgacgcttgattaacacaggctaggagaa

SEQ ID NO: 205129 - DNA, 55 bp, Artificial
  Synthetic oligonucleotide
aagggggttgacacctttaccgtacatgcgtaggttcgtagatgtcagatctacc

SEQ ID NO: 205130 - DNA, 55 bp, Artificial
  Synthetic oligonucleotide
ggcatacgtcgcggcgtggggggagtagtcgaacttatgggcgaccgaggcctcc

SEQ ID NO: 205131 - DNA, 60 bp, Artificial
  Synthetic oligonucleotide
gtcataatgtcgactgttctccaattcgtggtggcggagcgacgtatagcgccgctaggg

SEQ ID NO: 205132 - DNA, 56 bp, Artificial
  Synthetic oligonucleotide
atcaattgggaagacatcctcattcctggtctctctatacggccgtactcgcgttg

SEQ ID NO: 205133 - DNA, 56 bp, Artificial
  Synthetic oligonucleotide
tggctcgtaattcgttgcctgtacgggcgggtactcgcctcgtcttcagcgacagt

SEQ ID NO: 205134 - DNA, 55 bp, Artificial
  Synthetic oligonucleotide
tgtaggcctcgcttaccagagccacggaccccgattgcgctgcaatgacgcagtc

SEQ ID NO: 205135 - DNA, 55 bp, Artificial
  Synthetic oligonucleotide
cggtcgggtctgtggagaacgcgcgtctcctgcttgctttgtcgctattgtccgc

SEQ ID NO: 205136 - DNA, 55 bp, Artificial
  Synthetic oligonucleotide
atagctcgaagcacgcgacctagcactgtggcgctcctgcctggccgctgatgtt

SEQ ID NO: 205137 - DNA, 55 bp, Artificial
  Synthetic oligonucleotide
cgggaggactcgccgtgtccagtccaattcttgacgcgtttgcggacctgcggta

SEQ ID NO: 205138 - DNA, 55 bp, Artificial
  Synthetic oligonucleotide
cggcacgtatgcccaggacggggtgacccacttgtcgtcagagtttgtgtagccg

SEQ ID NO: 205139 - DNA, 55 bp, Artificial
  Synthetic oligonucleotide
ctgctgcttcgccacgtctctcgtccttgcctggagtgaatctaagattacctgc

SEQ ID NO: 205140 - DNA, 55 bp, Artificial
  Synthetic oligonucleotide
cggatgccgattggtagaccgtggggaagacctcttcgtagagcacgacaccgtc

SEQ ID NO: 205141 - DNA, 55 bp, Artificial
  Synthetic oligonucleotide
agttctggcggcacgttggagactcgtcgcgctgtggcctctcggttcgtctgga

SEQ ID NO: 205142 - DNA, 60 bp, Artificial
  Synthetic oligonucleotide
gtacgacacgtgaacaataggatcgattttaatcaacgctagatcgacgttatctgatct

SEQ ID NO: 205143 - DNA, 55 bp, Artificial
  Synthetic oligonucleotide
gaagcaggcatagtcgtgggcggcataaatgacacgatcatgacacgccccgagg

SEQ ID NO: 205144 - DNA, 55 bp, Artificial
  Synthetic oligonucleotide
gaattcgctgcaacaatatcgcggatttcttaggttggaagtcagaactcaacgc

SEQ ID NO: 205145 - DNA, 55 bp, Artificial
  Synthetic oligonucleotide
cggatatcgaagatagggcccttgaaagcgaccttaagcgcgtgccccaagatga

SEQ ID NO: 205146 - DNA, 55 bp, Artificial
  Synthetic oligonucleotide
gatcgattttaatcaacgctagatcgacgttatctgatctccaatagaccgttcc

SEQ ID NO: 205147 - DNA, 55 bp, Artificial
  Synthetic oligonucleotide
cggagatccggtcccggtggtcgttcctcaccactcacccgctgtcgtctctgca

SEQ ID NO: 205148 - DNA, 54 bp, Artificial
  Synthetic oligonucleotide
cccggggttactgcggcccggctaggaaagtgtaacaagcgccggctccgcaca

SEQ ID NO: 205149 - DNA, 55 bp, Artificial
  Synthetic oligonucleotide
cccgtgaccgatcagtgtcgcgctagcaccaatccggtcgcttaggcggtacgaa

SEQ ID NO: 205150 - DNA, 55 bp, Artificial
  Synthetic oligonucleotide
cccgtgtgaggagagagccgccgtttcgtcggtttggttggtgtgacgcacctga

SEQ ID NO: 205151 - DNA, 55 bp, Artificial
  Synthetic oligonucleotide
ccgacaaatcttccgctcatcgaggggtccacaacgtgaagttccaagtcaacag

SEQ ID NO: 205152 - DNA, 55 bp, Artificial
  Synthetic oligonucleotide
ccccgtgccgaaaccagaggctcaacgtggtctgacgaatacgcagcaacgtctg

SEQ ID NO: 205153 - DNA, 58 bp, Artificial
  Synthetic oligonucleotide
gtacacgatcatactcacgcttactaggtaggcactaccccgatcgcagggcccccga

SEQ ID NO: 205154 - DNA, 55 bp, Artificial
  Synthetic oligonucleotide
ccccagttcattgtgcgatccgccagttttgcggagccgaatgaagtactacgca

SEQ ID NO: 205155 - DNA, 55 bp, Artificial
  Synthetic oligonucleotide
ccgagctgtgagggcaatgagcgcgatatagacgaatggtcttgaaaggccagtc

SEQ ID NO: 205156 - DNA, 55 bp, Artificial
  Synthetic oligonucleotide
ccgccttcggtcggtagggcaggtgcgacacccgttctcgggatgccacgactca

SEQ ID NO: 205157 - DNA, 55 bp, Artificial
  Synthetic oligonucleotide
ccacgtcctgggaccgttggacaagcaatctggggagttcaagttgaggtcgcgg

SEQ ID NO: 205158 - DNA, 55 bp, Artificial
  Synthetic oligonucleotide
ccacataggtttacagccgtcgcacccagaccctagagtgtgcagcaccgaaggg

SEQ ID NO: 205159 - DNA, 55 bp, Artificial
  Synthetic oligonucleotide
ccgctctcagtgtgttgccgccgactcagtcggtgagataagcccagtacggacg

SEQ ID NO: 205160 - DNA, 55 bp, Artificial
  Synthetic oligonucleotide
ccaaccaacggcatagaacgtaagttcggcaacaaggttggggagctagatcagg

SEQ ID NO: 205161 - DNA, 55 bp, Artificial
  Synthetic oligonucleotide
cagttcgtgcgctctgtcgaggatggtcttccgggtgataccgcccaggaaactg

SEQ ID NO: 205162 - DNA, 55 bp, Artificial
  Synthetic oligonucleotide
cagttccagacgcactggtctccgggcgggaacaacgtccgggccatccgagtct

SEQ ID NO: 205163 - DNA, 55 bp, Artificial
  Synthetic oligonucleotide
cagggccctgcgtacactcgaagaggcgggtgcctgcacatggcgcccgatggaa

SEQ ID NO: 205164 - DNA, 56 bp, Artificial
  Synthetic oligonucleotide
acgggctgccggatgggtctacatccgggacgcgaagggcagtcacgaggtctggg

SEQ ID NO: 205165 - DNA, 55 bp, Artificial
  Synthetic oligonucleotide
ttgcgagacgtcttgagcgcccatgcggatgttctcaccgtcggaccgggttgca

SEQ ID NO: 205166 - DNA, 55 bp, Artificial
  Synthetic oligonucleotide
cactggttgttgtcgggactgctcacttgtggcaagtgtggcgcacccatgtacg

SEQ ID NO: 205167 - DNA, 55 bp, Artificial
  Synthetic oligonucleotide
cctccccaacgcgtacagttgcacccaatgaggcacagtgctttgcggtaagcac

SEQ ID NO: 205168 - DNA, 55 bp, Artificial
  Synthetic oligonucleotide
aaagcgatccgtgacacgtacgccgacctatacggcagacggtgactgtcgatca

SEQ ID NO: 205169 - DNA, 55 bp, Artificial
  Synthetic oligonucleotide
aaagctgaccgctgcaccccgtcctgaattacgacgccttctgaccacactggat

SEQ ID NO: 205170 - DNA, 55 bp, Artificial
  Synthetic oligonucleotide
cgatcgatctcctctgcgactctcctgctgaaatcgttagcttcgccgactgccc

SEQ ID NO: 205171 - DNA, 55 bp, Artificial
  Synthetic oligonucleotide
cgccatccgggtaacggttgggtaaagtcatgcggagccatgggtagacacacga

SEQ ID NO: 205172 - DNA, 55 bp, Artificial
  Synthetic oligonucleotide
cgctcccgtcggggtgatggtatccacacgacatgaagacggggaacgatggcag

SEQ ID NO: 205173 - DNA, 55 bp, Artificial
  Synthetic oligonucleotide
caatcactgatacagttgtgcgctcacaagctggtcgaataattcaaaatgcgac

SEQ ID NO: 205174 - DNA, 55 bp, Artificial
  Synthetic oligonucleotide
caaggagatctcgcacacccttgtgcacttgcaggtgggcgtcccactgctgagc

SEQ ID NO: 205175 - DNA, 59 bp, Artificial
  Synthetic oligonucleotide
gggaagcgagcccatcataaccacgtccgtagaccacacaacacctccgacacgcaaga

SEQ ID NO: 205176 - DNA, 55 bp, Artificial
  Synthetic oligonucleotide
cgcttcggctagtaatgtaaattgccctaacccgaacagctgtctcgcgaggtcg

SEQ ID NO: 205177 - DNA, 55 bp, Artificial
  Synthetic oligonucleotide
attggaccagcttccggggccccgaaccccagcccagccacggtgacatacattc

SEQ ID NO: 205178 - DNA, 55 bp, Artificial
  Synthetic oligonucleotide
tctgtagaggcgcacgagcccgctgcggagtctggccctagttccgtcgtgcatt

SEQ ID NO: 205179 - DNA, 55 bp, Artificial
  Synthetic oligonucleotide
gccttcgccgtgttgtgagacggggtgttaccggatacgcggggacgcatgaggt

SEQ ID NO: 205180 - DNA, 55 bp, Artificial
  Synthetic oligonucleotide
agactctctgatgcactctgctcgccggagtgactacgcgtgcccgcaaccctct

SEQ ID NO: 205181 - DNA, 55 bp, Artificial
  Synthetic oligonucleotide
ggcgtcatgcaggtaatcttagattcactccaggcaaggacgagagacgtggcga

SEQ ID NO: 205182 - DNA, 55 bp, Artificial
  Synthetic oligonucleotide
acttgaggggactcaagggactgggctcagcctgttccacgggcactaccctcac

SEQ ID NO: 205183 - DNA, 55 bp, Artificial
  Synthetic oligonucleotide
tcgcgtcacacgcggtcgcggggcgtcacgcgacgtaacgggctggcgggacgca

SEQ ID NO: 205184 - DNA, 55 bp, Artificial
  Synthetic oligonucleotide
aatctgcgcgcaggggctagctgtgctgcccagggacgttggttgaggtgtgacg

SEQ ID NO: 205185 - DNA, 55 bp, Artificial
  Synthetic oligonucleotide
actgcgcgcggattcggttctctgctgtcaatctggctagtcaaaggcattcctg

SEQ ID NO: 205186 - DNA, 57 bp, Artificial
  Synthetic oligonucleotide
ccgggcggggattcagaagcttagcgccggatctgttgaagtttggaagaccgatca

SEQ ID NO: 205187 - DNA, 58 bp, Artificial
  Synthetic oligonucleotide
gacccatcgaagggatctggcaagtcttactctctattcaaccctgaaatggaggtta

SEQ ID NO: 205188 - DNA, 55 bp, Artificial
  Synthetic oligonucleotide
tggggttgctgagtaaattgctccggtcttgacctatacctatttcccggaagta

SEQ ID NO: 205189 - DNA, 58 bp, Artificial
  Synthetic oligonucleotide
tgggttcgtcgggctcgattagggattgccaacgtcaggggtgccttcgctgagcgaa

SEQ ID NO: 205190 - DNA, 60 bp, Artificial
  Synthetic oligonucleotide
tttgcaggaccgatgatcgctggcgcacaaacagtcgctgccgaattcggctacttactg

SEQ ID NO: 205191 - DNA, 60 bp, Artificial
  Synthetic oligonucleotide
tgtaattgcattcatggttgatctgatttggcacatgactgaagctacgccgcttgggtt

SEQ ID NO: 205192 - DNA, 60 bp, Artificial
  Synthetic oligonucleotide
gatcgtgatgagatgccccgcaaatatgcactccccccattgaattggtgtcgtccctgc

SEQ ID NO: 205193 - DNA, 60 bp, Artificial
  Synthetic oligonucleotide
gatgactcaccgctctatggtggaactcgggatggctccaccggaccccatgttcgcgct

SEQ ID NO: 205194 - DNA, 57 bp, Artificial
  Synthetic oligonucleotide
gatggctaccagtcaaagaccgaccttacgcagcccaaaaggcggtcaaagtcgcac

SEQ ID NO: 205195 - DNA, 60 bp, Artificial
  Synthetic oligonucleotide
tgtgccagccttgctgctaggtctgctggccccccctgtgggttttggagggcttgtgtc

SEQ ID NO: 205196 - DNA, 57 bp, Artificial
  Synthetic oligonucleotide
gctacccagaaaagacgatcccaacgtggtacctcgtagagctctgcttgaagttcc

SEQ ID NO: 205197 - DNA, 58 bp, Artificial
  Synthetic oligonucleotide
tttctgattcgccgcacacatggggtgcaacgggcccctggagtgttcacccacctcc

SEQ ID NO: 205198 - DNA, 56 bp, Artificial
  Synthetic oligonucleotide
tcaggccaggcacaagggcccgcgtaacccgataccttactcctgactccggtcaa

SEQ ID NO: 205199 - DNA, 60 bp, Artificial
  Synthetic oligonucleotide
cggtagaggttgtcgggtcgccctagccgtctatttgactgcttcatctgcgagatagct

SEQ ID NO: 205200 - DNA, 58 bp, Artificial
  Synthetic oligonucleotide
cggtgagacccgcctcatagcacaacccgctgctattgatttacacttaccccggata

SEQ ID NO: 205201 - DNA, 59 bp, Artificial
  Synthetic oligonucleotide
catttccggagcatcagggtatccacgcccccacatggagctccccgagcacgggagaa

SEQ ID NO: 205202 - DNA, 59 bp, Artificial
  Synthetic oligonucleotide
gtcctggcgagtccgcagttcgcgggctagaacgtcctgagcaaacggcgcgatgatag

SEQ ID NO: 205203 - DNA, 57 bp, Artificial
  Synthetic oligonucleotide
acccacatgaatggccatccggaaattcgggagggctttactgtcacgccagggcca

SEQ ID NO: 205204 - DNA, 59 bp, Artificial
  Synthetic oligonucleotide
ttggctagcaactatagggtttatgttctcatgttagctatgcgggaaggctaatggta

SEQ ID NO: 205205 - DNA, 59 bp, Artificial
  Synthetic oligonucleotide
ggtccacctagctccaaaaggacgttcgtagcttgctgatgaccttcacctgcggtgta

SEQ ID NO: 205206 - DNA, 59 bp, Artificial
  Synthetic oligonucleotide
gattgcttcccgctgaatagccggcagccgagggaaatgttggcgcccctggattcctg

SEQ ID NO: 205207 - DNA, 59 bp, Artificial
  Synthetic oligonucleotide
gacgggggaagatacttcgaaccgtcgcctgactcatcgagcagggtgatcaaggagga

SEQ ID NO: 205208 - DNA, 56 bp, Artificial
  Synthetic oligonucleotide
ggccggactccacacaccgtttatcggacagtccccctcagtcgcttcttagcgcc

SEQ ID NO: 205209 - DNA, 60 bp, Artificial
  Synthetic oligonucleotide
ccgcatctacacaggagccattggtggattcaaacgacgtccaggcagacctcaagcacg

SEQ ID NO: 205210 - DNA, 59 bp, Artificial
  Synthetic oligonucleotide
ggagcgtgatggccatgtgtggcactgttcgcttgccatccgacctgacgaccgtggtg

SEQ ID NO: 205211 - DNA, 55 bp, Artificial
  Synthetic oligonucleotide
attgccgttacgtaaagttagcggcaatagtactatcagtggtaaattcaagccg

SEQ ID NO: 205212 - DNA, 58 bp, Artificial
  Synthetic oligonucleotide
cttacctgctgacgagcggcccataacaatacgaacatcttgtcatccagcacgataa

SEQ ID NO: 205213 - DNA, 57 bp, Artificial
  Synthetic oligonucleotide
gtagcgtgtcgctagccttttgctatcaacatcggcagtagtttgagaggcatgatc

SEQ ID NO: 205214 - DNA, 57 bp, Artificial
  Synthetic oligonucleotide
gtagatgatcgcgtacttgtcataccgggtcgccagaccccgccactgcttcaggtg

SEQ ID NO: 205215 - DNA, 57 bp, Artificial
  Synthetic oligonucleotide
gtacttgtcataccgggtcgccagaccccgccactgcttcaggtgagcgtactgacg

SEQ ID NO: 205216 - DNA, 56 bp, Artificial
  Synthetic oligonucleotide
ggagctcggcatttccgttaccgcgttgaaacgctgggtgcgactgtcccgtgaag

SEQ ID NO: 205217 - DNA, 57 bp, Artificial
  Synthetic oligonucleotide
ccccccgtggaacaccctctgatatccccagtgatgccccctgttgagatcccctca

SEQ ID NO: 205218 - DNA, 57 bp, Artificial
  Synthetic oligonucleotide
gcagcttcgctgcgaacccttcctggatgcgaccaggctgtcaggacagtggcgact

SEQ ID NO: 205219 - DNA, 57 bp, Artificial
  Synthetic oligonucleotide
cttcggcgcaaaatgactctttcggcaccccccaggcccatcaaggaacatgcgtag

SEQ ID NO: 205220 - DNA, 56 bp, Artificial
  Synthetic oligonucleotide
gacgacacactctcgaagtgcgtggtcacccgaggggaaaggatccggcaacaagg

SEQ ID NO: 205221 - DNA, 57 bp, Artificial
  Synthetic oligonucleotide
tcgcggtgccgaaagtcattccgatattgtcgaaaacgacgtcactgtcgtgtccta

SEQ ID NO: 205222 - DNA, 57 bp, Artificial
  Synthetic oligonucleotide
gtgtcaagagccggcacggtcatctgcagacacgcagttctaccttacgtagaatta

SEQ ID NO: 205223 - DNA, 56 bp, Artificial
  Synthetic oligonucleotide
gccttctgcgcgtggtccctcaaaaacctgcttccgggtgtcagcagtggccggta

SEQ ID NO: 205224 - DNA, 56 bp, Artificial
  Synthetic oligonucleotide
ccctgacctgccccttgaaggaggcacactgtgagtgcaccgaaccgtaagggaat

SEQ ID NO: 205225 - DNA, 56 bp, Artificial
  Synthetic oligonucleotide
cgagccggtcttctaggacgaccgcggtccattccgatacctggacgagagactat

SEQ ID NO: 205226 - DNA, 56 bp, Artificial
  Synthetic oligonucleotide
tcgtctgagatggcatgactcgacatgccctcagacttgcgcacccacctccccga

SEQ ID NO: 205227 - DNA, 55 bp, Artificial
  Synthetic oligonucleotide
tttgcccttcacgggacagtcgcacccagcgtttcaacgcggtaacggaaatgcc

SEQ ID NO: 205228 - DNA, 56 bp, Artificial
  Synthetic oligonucleotide
tgacttggaatccgggtttgacgtagcgactcacatcaccgtttcccgtgagataa

SEQ ID NO: 205229 - DNA, 56 bp, Artificial
  Synthetic oligonucleotide
gcaaatctgttagtctgtaacttagtaaggtccgaactacgcagttcatagactcc

SEQ ID NO: 205230 - DNA, 56 bp, Artificial
  Synthetic oligonucleotide
gggacagtcgcacccagcgtttcaacgcggtaacggaaatgccgagctccggagcg

SEQ ID NO: 205231 - DNA, 60 bp, Artificial
  Synthetic oligonucleotide
cgctgccctgccgctgtataggtgtgttcattcgctttgcctggaccgtgcaaatacgct

SEQ ID NO: 205232 - DNA, 56 bp, Artificial
  Synthetic oligonucleotide
atcgtcgtggccccagcttaaaggcagcccgggacaggtctcatgggcagaatcga

SEQ ID NO: 205233 - DNA, 55 bp, Artificial
  Synthetic oligonucleotide
ccacgggtggaggctgtcgaggtatccggggcgaagcgtcatgcttccgtcgtcg

SEQ ID NO: 205234 - DNA, 55 bp, Artificial
  Synthetic oligonucleotide
ccactcactctatatagacccggattctctcgggcagagtattgggcacaccctc

SEQ ID NO: 205235 - DNA, 55 bp, Artificial
  Synthetic oligonucleotide
gatgggaagaattactggatccgcatacttcgcgcggagcctcaggacaatgtgg

SEQ ID NO: 205236 - DNA, 53 bp, Artificial
  Synthetic oligonucleotide
ccacctcctatagtttagccccttatgatacctccgcgtgaccgtttgaacgg

SEQ ID NO: 205237 - DNA, 55 bp, Artificial
  Synthetic oligonucleotide
ccacattggccgtctctgctagatcgactggccgcctgccctctaacgcagagca

SEQ ID NO: 205238 - DNA, 55 bp, Artificial
  Synthetic oligonucleotide
ccacagtcatggtgtcctggaccacacgcatcgacggaacggggtatcttcctga

SEQ ID NO: 205239 - DNA, 55 bp, Artificial
  Synthetic oligonucleotide
gattgaaggcactgtggtcgaggcactgcccaatgcgtcgttccgtgttgagctg

SEQ ID NO: 205240 - DNA, 55 bp, Artificial
  Synthetic oligonucleotide
ccacacaactcccgttgaaagcgcaatcgaggctacgcgcgtcgactagcgtcgt

SEQ ID NO: 205241 - DNA, 55 bp, Artificial
  Synthetic oligonucleotide
ccaagctgcccagaggcggaaactagcgaacccgttttgtctgagaccacggaaa

SEQ ID NO: 205242 - DNA, 57 bp, Artificial
  Synthetic oligonucleotide
tccagttgtctcataacctcagtgtctcgaatccctagggtttcgagacccccagcg

SEQ ID NO: 205243 - DNA, 55 bp, Artificial
  Synthetic oligonucleotide
cggtaacaggccgcccattaacactgatggttacttcacgcattcctatactccc

SEQ ID NO: 205244 - DNA, 55 bp, Artificial
  Synthetic oligonucleotide
ccaaacgggcttgcatcccaacactggagcggattttggatgtcgcgggaccctc

SEQ ID NO: 205245 - DNA, 55 bp, Artificial
  Synthetic oligonucleotide
cggtgtgttgttctactcctgtacagacagtgaggctagtgatggccccgcgttg

SEQ ID NO: 205246 - DNA, 53 bp, Artificial
  Synthetic oligonucleotide
cggttacgggtggccagcacctttaaactcgcaaagaaatgtgtaccgaagag

SEQ ID NO: 205247 - DNA, 55 bp, Artificial
  Synthetic oligonucleotide
cattccccgaaggcatgactttgccgactcgattcgtcggttatttagtggccgt

SEQ ID NO: 205248 - DNA, 55 bp, Artificial
  Synthetic oligonucleotide
cggtttcaacttcgaagcgaagctcggcgctttcagttgtaatcgctggagtcgg

SEQ ID NO: 205249 - DNA, 55 bp, Artificial
  Synthetic oligonucleotide
cggctattgaaaatcgtccctgcggcgtgtagagccctgaaagggccttcgggtg

SEQ ID NO: 205250 - DNA, 55 bp, Artificial
  Synthetic oligonucleotide
ctgctctggtggggtggatttcgacggatgacccgaatgccggtaaggtccccag

SEQ ID NO: 205251 - DNA, 55 bp, Artificial
  Synthetic oligonucleotide
ccccattttgaggcgccggtaccctcggcagttcccgagcacatttcgaggtcga

SEQ ID NO: 205252 - DNA, 55 bp, Artificial
  Synthetic oligonucleotide
gaggtgagtgaaatcccggtgggtgaaaatttcgttgacgagttagctgcagaaa

SEQ ID NO: 205253 - DNA, 58 bp, Artificial
  Synthetic oligonucleotide
tccccgtgtaggagtccggtgactatgtgagtttcgtgtccgagaatggacgcaggag

SEQ ID NO: 205254 - DNA, 55 bp, Artificial
  Synthetic oligonucleotide
gaggtgttacctcaccgtcggcaaaagtccgaattcgaaccagttcgggtgcatg

SEQ ID NO: 205255 - DNA, 55 bp, Artificial
  Synthetic oligonucleotide
cggctcgatgttccagtctgttagagacgataaaacgcgtagggaatacggggag

SEQ ID NO: 205256 - DNA, 55 bp, Artificial
  Synthetic oligonucleotide
cccagtgcgagcttttcgcttctggtcccgcaaccagtcatggagacgtgtctcc

SEQ ID NO: 205257 - DNA, 55 bp, Artificial
  Synthetic oligonucleotide
cccaggacacgcggctaattccgtggaaagtgaggctcctgccgatggcgtgaca

SEQ ID NO: 205258 - DNA, 55 bp, Artificial
  Synthetic oligonucleotide
cgggactcggccacgactcttcggctgggctcataacaagtgggtcgttaccagc

SEQ ID NO: 205259 - DNA, 53 bp, Artificial
  Synthetic oligonucleotide
ccattggtaggcctaataacgacgaccttggaatccgtacggcgacccagacg

SEQ ID NO: 205260 - DNA, 55 bp, Artificial
  Synthetic oligonucleotide
gatagctgttgccctgactggcagcttgtaacatcagcaacttacgacccgttag

SEQ ID NO: 205261 - DNA, 55 bp, Artificial
  Synthetic oligonucleotide
ctgcatgacatgttgcccgatggacaacatatgtttaccgtagacccagatcgtg

SEQ ID NO: 205262 - DNA, 55 bp, Artificial
  Synthetic oligonucleotide
ctgatcgctgttccacgtcacagcgttctcgctcgactcgtctcacccgcacgga

SEQ ID NO: 205263 - DNA, 55 bp, Artificial
  Synthetic oligonucleotide
ccatgaggttaccctgtatttccgcccgttagctggccgtgacaccacgcagttt

SEQ ID NO: 205264 - DNA, 53 bp, Artificial
  Synthetic oligonucleotide
cgcttgggtttactaccctgtgggccggtattcttgttccttgtactgccgtc

SEQ ID NO: 205265 - DNA, 55 bp, Artificial
  Synthetic oligonucleotide
ccatcgtagggaccatgcgctgacactcagagcgggcagaattggcgcttgtagc

SEQ ID NO: 205266 - DNA, 55 bp, Artificial
  Synthetic oligonucleotide
ctgacgcttttatccctgcctcctgacgtcaggttggggtgtgccccattcgaac

SEQ ID NO: 205267 - DNA, 55 bp, Artificial
  Synthetic oligonucleotide
ccatagtgttcagcgacaggaaattggccgccgaacctactccgacaatgagccc

SEQ ID NO: 205268 - DNA, 55 bp, Artificial
  Synthetic oligonucleotide
gatcggtcttttaccgtggaacacaaaagcgacggcactccagtgaccgaggtgg

SEQ ID NO: 205269 - DNA, 55 bp, Artificial
  Synthetic oligonucleotide
ctcttcgtacaaccatcgcaagatttcgcgggaaaagtctgcgttgagggaaact

SEQ ID NO: 205270 - DNA, 55 bp, Artificial
  Synthetic oligonucleotide
ctctggtcccaacgttgagataaaccccagtcgttatacgcaatttgaccggaga

SEQ ID NO: 205271 - DNA, 54 bp, Artificial
  Synthetic oligonucleotide
ctcgtggatcgataggaaggtacggaacttcccagaaaacctcgtccacagtct

SEQ ID NO: 205272 - DNA, 55 bp, Artificial
  Synthetic oligonucleotide
cggggtatgtgtgaggttgaagaatgatatgcgcaccgcgtattgaggtggtgag

SEQ ID NO: 205273 - DNA, 51 bp, Artificial
  Synthetic oligonucleotide
ccactgtcggaacggacgttctccgggatcaaaggaacccggtccggatcg

SEQ ID NO: 205274 - DNA, 55 bp, Artificial
  Synthetic oligonucleotide
caggaccacagcggccctgtagatgatcgcgtacttgtcataccgggtcgccaga

SEQ ID NO: 205275 - DNA, 54 bp, Artificial
  Synthetic oligonucleotide
actgaccctcgcatacccaattacgttgccggacacgtcaaaaagcctccaccg

SEQ ID NO: 205276 - DNA, 55 bp, Artificial
  Synthetic oligonucleotide
ctcaagtcgacctcacggcccgttactgacacatcacgaacgcgttactaccggg

SEQ ID NO: 205277 - DNA, 55 bp, Artificial
  Synthetic oligonucleotide
cgtgtttgcgtccgttcagtccttggctcggctaggtgtcgccacgttgtctccg

SEQ ID NO: 205278 - DNA, 55 bp, Artificial
  Synthetic oligonucleotide
ctcaaggtttgatcggatcaactctcttgcttgctgttcctaacgagttgactcg

SEQ ID NO: 205279 - DNA, 54 bp, Artificial
  Synthetic oligonucleotide
ctcaaaagggctgtttagggaccaaaagtgatcgggcaacgcggggtttgcatg

SEQ ID NO: 205280 - DNA, 55 bp, Artificial
  Synthetic oligonucleotide
cagcgcgagtggggcgttaatcacgagagcgagctgattgttgtcccagaccgca

SEQ ID NO: 205281 - DNA, 55 bp, Artificial
  Synthetic oligonucleotide
cagcctatgtggcacgtctgttgagtgcagcccctaaggcaggccctgtgagtcc

SEQ ID NO: 205282 - DNA, 55 bp, Artificial
  Synthetic oligonucleotide
gcacgtcacccgcctccggccctaccggtttcgggtggtcagacactgtggtgtg

SEQ ID NO: 205283 - DNA, 55 bp, Artificial
  Synthetic oligonucleotide
cagatacccgcggatctcccgtccatgctcctgccgcgtttcctcacgtgttcca

SEQ ID NO: 205284 - DNA, 55 bp, Artificial
  Synthetic oligonucleotide
ctaactgagcttgttggattacctgagcttgtcggattacctgcggttgtcgggt

SEQ ID NO: 205285 - DNA, 55 bp, Artificial
  Synthetic oligonucleotide
cagagaccacgcggaccatcacatgggtgtgctattggacccacggggaccgttc

SEQ ID NO: 205286 - DNA, 60 bp, Artificial
  Synthetic oligonucleotide
actgcttgcacctaccaagccctctgtcatcgtgggaatcggacataatggcggaaacca

SEQ ID NO: 205287 - DNA, 55 bp, Artificial
  Synthetic oligonucleotide
cactgcatatatcacgagctcggacacatctacttggagagctttcggattccta

SEQ ID NO: 205288 - DNA, 55 bp, Artificial
  Synthetic oligonucleotide
gcagattacgagtctttacgcacattttgccctgtgggtgcgctaaatattgtca

SEQ ID NO: 205289 - DNA, 52 bp, Artificial
  Synthetic oligonucleotide
ctacccagaggttgctcggtaccggaactcggttgaatttaggttcaacgtg

SEQ ID NO: 205290 - DNA, 55 bp, Artificial
  Synthetic oligonucleotide
cactatatcttgagaggttcagtctcgccgcgtcgctgataaaactggctcggat

SEQ ID NO: 205291 - DNA, 55 bp, Artificial
  Synthetic oligonucleotide
ctactgatgtgagacacagtttgaaaggattgtgctcatgtctgctcgacttacc

SEQ ID NO: 205292 - DNA, 55 bp, Artificial
  Synthetic oligonucleotide
cacgtcgaacttgtctgccgtctggtgatggacgtacttggacatctccgcgagc

SEQ ID NO: 205293 - DNA, 55 bp, Artificial
  Synthetic oligonucleotide
gcagcgggagctcctgtggtgctaggagtttgtgttctcctgcaaccattggtcc

SEQ ID NO: 205294 - DNA, 55 bp, Artificial
  Synthetic oligonucleotide
gcagcgttgagttggagctcatgtcccacgagtaggtcgatagcgaactggagcc

SEQ ID NO: 205295 - DNA, 55 bp, Artificial
  Synthetic oligonucleotide
ctactcactccgggcaccaaaagggcccctgatcggcgtttctcatgatcagggg

SEQ ID NO: 205296 - DNA, 55 bp, Artificial
  Synthetic oligonucleotide
ctccggtcttgacctatacctatttcccggaagtagtgtcaaatgaccgcagaac

SEQ ID NO: 205297 - DNA, 55 bp, Artificial
  Synthetic oligonucleotide
tacggggagtacggtttcaacttcgaagcgaagctcggcgctttcagttgtaatc

SEQ ID NO: 205298 - DNA, 53 bp, Artificial
  Synthetic oligonucleotide
acttctagcctcgggatttcatcgggggtgtgaccggagtccgtaattaaagc

SEQ ID NO: 205299 - DNA, 55 bp, Artificial
  Synthetic oligonucleotide
gcaaactctaccgaatggtgctgtagataatcgttgttaaacgatcgtgggcccc

SEQ ID NO: 205300 - DNA, 55 bp, Artificial
  Synthetic oligonucleotide
cgtaccatgcagacgcttcgcagcgcatttatgtcttcgctcgctttagaactta

SEQ ID NO: 205301 - DNA, 55 bp, Artificial
  Synthetic oligonucleotide
cgtagtcaaggcgcacaccacacaacgggcaatcagtcagttgttcgcggtgcgc

SEQ ID NO: 205302 - DNA, 55 bp, Artificial
  Synthetic oligonucleotide
gcaacggtggacgcactccggggatggggtaccaccactacactgccgtcgttaa

SEQ ID NO: 205303 - DNA, 55 bp, Artificial
  Synthetic oligonucleotide
catagaggtaccgcgacccagccagcataggggccaatcgctcgggcgtgcgagt

SEQ ID NO: 205304 - DNA, 55 bp, Artificial
  Synthetic oligonucleotide
cataatcgggaatcccgcgtcggtaggctcagcgcatgagacggaccacgtacct

SEQ ID NO: 205305 - DNA, 55 bp, Artificial
  Synthetic oligonucleotide
gcaagaccgtatggcgcatgccggttcgcggtaaaccatctgtagacccaggtca

SEQ ID NO: 205306 - DNA, 55 bp, Artificial
  Synthetic oligonucleotide
cgtcatggtgtgtccttcgtggtgagagtgcctcgtgatgacagtgaaagggtcg

SEQ ID NO: 205307 - DNA, 55 bp, Artificial
  Synthetic oligonucleotide
ctcactcgcactggctggctcaagtgtcgccgtagcttccctcacggccttcggt

SEQ ID NO: 205308 - DNA, 55 bp, Artificial
  Synthetic oligonucleotide
gcaatgacgtacgtctgacacccaccgagtggaacatcctggagctcatggtccg

SEQ ID NO: 205309 - DNA, 54 bp, Artificial
  Synthetic oligonucleotide
aagggcgggtgaggtctgcaaccccgcagttctaccttacgtagaattagtaca

SEQ ID NO: 205310 - DNA, 55 bp, Artificial
  Synthetic oligonucleotide
ctcacgtgttcccatgggctctcacctaaccccaatcgcccgagtgcaaccggta

SEQ ID NO: 205311 - DNA, 55 bp, Artificial
  Synthetic oligonucleotide
ctcaccgggccgcgcgctctagggctcgtgcaaataatggtaaggggctgctgat

SEQ ID NO: 205312 - DNA, 55 bp, Artificial
  Synthetic oligonucleotide
cagttccctccaagcgaaagacttttagcggtgacagacagtcagaaatccgacg

SEQ ID NO: 205313 - DNA, 55 bp, Artificial
  Synthetic oligonucleotide
cagtgcacggcggatcctcactgacgccgaagctcgatacgaggcagcattcgga

SEQ ID NO: 205314 - DNA, 55 bp, Artificial
  Synthetic oligonucleotide
gcaatgatcgatcgtgctccgctaccgaattcgccgattagacattccagcgaat

SEQ ID NO: 205315 - DNA, 55 bp, Artificial
  Synthetic oligonucleotide
cagggctattcgcaaccggatgagactgccccggctttgatcaatatcgccccgc

SEQ ID NO: 205316 - DNA, 55 bp, Artificial
  Synthetic oligonucleotide
cagggagccggacataagaccagtattccaaactggctatggaatacaaggccag

SEQ ID NO: 205317 - DNA, 55 bp, Artificial
  Synthetic oligonucleotide
cgtggcggtccaacgaagactattcccttggcatttagcggtaagtactcgcgct

SEQ ID NO: 205318 - DNA, 55 bp, Artificial
  Synthetic oligonucleotide
gcacagcgagttttcgccaagaggttggaatcatgagcacagtttcggagactac

SEQ ID NO: 205319 - DNA, 55 bp, Artificial
  Synthetic oligonucleotide
gcacaggcgattggtcgttttgtgcgagcccgtaaacgtggggaaaccgcatctg

SEQ ID NO: 205320 - DNA, 60 bp, Artificial
  Synthetic oligonucleotide
agaggcttagagatcgcgccaataggtgtgcaacatccgcagtaagtattaatgacagcg

SEQ ID NO: 205321 - DNA, 55 bp, Artificial
  Synthetic oligonucleotide
cctgagttctccggaaatcgactcccgagtgcccgcctgccgggtacttagatcg

SEQ ID NO: 205322 - DNA, 55 bp, Artificial
  Synthetic oligonucleotide
cgcataacttaagtctacgccgcaggcataacagcccacagaaaaggccgtgccg

SEQ ID NO: 205323 - DNA, 52 bp, Artificial
  Synthetic oligonucleotide
cttctcgtaattccggtcccggggaacgtatcaccactgagcgtcggaccgg

SEQ ID NO: 205324 - DNA, 54 bp, Artificial
  Synthetic oligonucleotide
cgcccctctggcaacgcgggcggggtagtaaccgtaaactatccagatggacac

SEQ ID NO: 205325 - DNA, 55 bp, Artificial
  Synthetic oligonucleotide
gacacagtgcagcgaggatgaacgttcgagtgatatagggcacgatggtcgggtg

SEQ ID NO: 205326 - DNA, 55 bp, Artificial
  Synthetic oligonucleotide
cctgaaggtacgaagttcgatggtgagtcattggtccttcctgacagctcgtccg

SEQ ID NO: 205327 - DNA, 55 bp, Artificial
  Synthetic oligonucleotide
cgcccgaaacgttagcgactgcgtgggtgactcctgtcgcggtgccgaaagtcat

SEQ ID NO: 205328 - DNA, 55 bp, Artificial
  Synthetic oligonucleotide
cctccaagcgaaagacttttagcggtgacagacagtcagaaatccgacgaaacag

SEQ ID NO: 205329 - DNA, 55 bp, Artificial
  Synthetic oligonucleotide
cctcaaagcgacatctactgcgacctacattgaccaaccaccctgaattgaagga

SEQ ID NO: 205330 - DNA, 55 bp, Artificial
  Synthetic oligonucleotide
cctagtcagcgctaatttagacgtagggcccatgcggcgtagaactatgggtggc

SEQ ID NO: 205331 - DNA, 59 bp, Artificial
  Synthetic oligonucleotide
agcctccgacgggggaagatacttcgaaccgtcgcctgactcatcgagcagggtgatca

SEQ ID NO: 205332 - DNA, 52 bp, Artificial
  Synthetic oligonucleotide
cctacggcaacgtagtaggaaacgttccacccggaaatcgaggacttgaaca

SEQ ID NO: 205333 - DNA, 55 bp, Artificial
  Synthetic oligonucleotide
cctaacggatgcgcgcttaacccattcgtgccgtgagcaggtggtttctggtacg

SEQ ID NO: 205334 - DNA, 53 bp, Artificial
  Synthetic oligonucleotide
ccgtctggtaacgctttagccctgtgtcgaaggaatcgatggtccccggaagg

SEQ ID NO: 205335 - DNA, 55 bp, Artificial
  Synthetic oligonucleotide
ccgtcgcaccacagaaggccattcggtcatcatgggccgacggacgtgggagtca

SEQ ID NO: 205336 - DNA, 55 bp, Artificial
  Synthetic oligonucleotide
ccggggctggtgttctttcagtagggacgacaccaattcactggggagtggactc

SEQ ID NO: 205337 - DNA, 55 bp, Artificial
  Synthetic oligonucleotide
cttcccgtccgcctaagttcagcgtgcaaggttgcgccagcaagtgggttggcgg

SEQ ID NO: 205338 - DNA, 54 bp, Artificial
  Synthetic oligonucleotide
ccgggcagaggaccccggaagaaccaccatcttcggtgtgtacgcgcaaacgta

SEQ ID NO: 205339 - DNA, 55 bp, Artificial
  Synthetic oligonucleotide
cgcctgctgagttgtcgatcgcatcagtatttagaatgacgccatgcaaggctgc

SEQ ID NO: 205340 - DNA, 55 bp, Artificial
  Synthetic oligonucleotide
cgcgcatgaacttcctccccgtgtagttacaagctcatattttgacgaacaattg

SEQ ID NO: 205341 - DNA, 55 bp, Artificial
  Synthetic oligonucleotide
cgcggattcgcttgtcctgcgcggatggggcagctgtattttcgctcatgctggg

SEQ ID NO: 205342 - DNA, 57 bp, Artificial
  Synthetic oligonucleotide
cccggataatcccatgccacttcacaccggacgtgggccttgtgactcaataaggcc

SEQ ID NO: 205343 - DNA, 55 bp, Artificial
  Synthetic oligonucleotide
cgcgggagacgcatcacagtgcattcacggagctgccctacactgtgtgcatatg

SEQ ID NO: 205344 - DNA, 55 bp, Artificial
  Synthetic oligonucleotide
cgaaccaaactcgacgaattgccctgacgccaggagtccaaggcacaaaggtggg

SEQ ID NO: 205345 - DNA, 55 bp, Artificial
  Synthetic oligonucleotide
cgaagcaagtttcggttgttccgagaggtgcaaccacaattaggagagcagggac

SEQ ID NO: 205346 - DNA, 55 bp, Artificial
  Synthetic oligonucleotide
cgacagactacatacatgctccgcacatgcacaactcatcgcctgtacgctccgg

SEQ ID NO: 205347 - DNA, 55 bp, Artificial
  Synthetic oligonucleotide
cgacatggcatcaaccctgtctaccgacaacaaccgccgaagctcactcaaaccg

SEQ ID NO: 205348 - DNA, 55 bp, Artificial
  Synthetic oligonucleotide
cgaccgtgaccgatacccgctacctaaagtttgcggtgggtgactctgcaagcgc

SEQ ID NO: 205349 - DNA, 55 bp, Artificial
  Synthetic oligonucleotide
ccttgttaacggctcggtactccatcgatgtctcgtgcctggacggagttgttgc

SEQ ID NO: 205350 - DNA, 55 bp, Artificial
  Synthetic oligonucleotide
cttgatgtaaccgatgcaccctatgcactaatggatgtatggaatatctcgtgca

SEQ ID NO: 205351 - DNA, 55 bp, Artificial
  Synthetic oligonucleotide
cgactcaccctcggatacggacgagctgtcaggaaggaccaatgactcaccatcg

SEQ ID NO: 205352 - DNA, 55 bp, Artificial
  Synthetic oligonucleotide
gaaacacgtactgaccagtcgggtacccagccgcgttaggcctggctgtgatgcg

SEQ ID NO: 205353 - DNA, 56 bp, Artificial
  Synthetic oligonucleotide
agctgggaacgcgtctgaattgtctccgggagtcataacggcacgaacggtcaaaa

SEQ ID NO: 205354 - DNA, 55 bp, Artificial
  Synthetic oligonucleotide
cgactttcatatgtgccacgtacaacttgccaataactccgccaacgttgtggcg

SEQ ID NO: 205355 - DNA, 55 bp, Artificial
  Synthetic oligonucleotide
ccttcggcgtgcacagttgaccgacaaaactcaccgagttttcttgcaacgaagc

SEQ ID NO: 205356 - DNA, 55 bp, Artificial
  Synthetic oligonucleotide
ccttcctacggaccgtgtttgggatgctcgggttcgattcgaccgatattgtgcg

SEQ ID NO: 205357 - DNA, 55 bp, Artificial
  Synthetic oligonucleotide
cgagcgcgtcaacctggttacaccccataatcccgggcctcttcgagactttcta

SEQ ID NO: 205358 - DNA, 55 bp, Artificial
  Synthetic oligonucleotide
cgagctcgattcgcgtgcacagtctgaattctcgaaggttgtcggtaaccgcgag

SEQ ID NO: 205359 - DNA, 55 bp, Artificial
  Synthetic oligonucleotide
cgataacgcatacacgttacgaacggcatctacggtttaacgcggtttgcagacc

SEQ ID NO: 205360 - DNA, 55 bp, Artificial
  Synthetic oligonucleotide
cgatctcagtaccgtcatttacgtgagtctccgatattaagaaaccgtgtgcacc

SEQ ID NO: 205361 - DNA, 53 bp, Artificial
  Synthetic oligonucleotide
ccttaacggtgaacggctcacttccttccacgacggtggcggagccaggaccc

SEQ ID NO: 205362 - DNA, 54 bp, Artificial
  Synthetic oligonucleotide
cctgtgtacaacagaggttcagggtacgacgtccgtggtttcctatcgaaggcc

SEQ ID NO: 205363 - DNA, 55 bp, Artificial
  Synthetic oligonucleotide
cctggcactcgttcttcagctatctagcaagtggcccaccgccagctagacttcg

SEQ ID NO: 205364 - DNA, 58 bp, Artificial
  Synthetic oligonucleotide
ctgggatcgtcggggccggcagctttaggtatgtcctcacggacgcaagcgagacgga

SEQ ID NO: 205365 - DNA, 55 bp, Artificial
  Synthetic oligonucleotide
cgatgagttcccagcgatgagtgcgtaacgatgacaactttgttgcgctctgcaa

SEQ ID NO: 205366 - DNA, 55 bp, Artificial
  Synthetic oligonucleotide
cgcaaatccgcaggagcacctcctactcaaagggtcacatgaggggcaatgcgac

SEQ ID NO: 205367 - DNA, 55 bp, Artificial
  Synthetic oligonucleotide
cctgattgaggcttcggtaatgcggacgtcacttgagctagtgtcggagccgccc

SEQ ID NO: 205368 - DNA, 55 bp, Artificial
  Synthetic oligonucleotide
gagatagccccagtccatggccgggaagacaactgtcgtcgcgagcaggttgacc

SEQ ID NO: 205369 - DNA, 55 bp, Artificial
  Synthetic oligonucleotide
gagcaagcccggacaagagcccacggagcgcattatgacgctcacgacctgtcac

SEQ ID NO: 205370 - DNA, 55 bp, Artificial
  Synthetic oligonucleotide
ccctcgttgggtccactatccccatagatatggtctcaattcgggtaatcctgat

SEQ ID NO: 205371 - DNA, 53 bp, Artificial
  Synthetic oligonucleotide
ccctcccgactccacggccaagttcagggccaggacagtcacggaaaacgtag

SEQ ID NO: 205372 - DNA, 55 bp, Artificial
  Synthetic oligonucleotide
gagcagacatgagcacaatcctttcaaactgtgtctcacatcagtagtacacctc

SEQ ID NO: 205373 - DNA, 55 bp, Artificial
  Synthetic oligonucleotide
ctgtgcgagataccggacattcatcggcgcaagtcacaccgcctagcaggcgacg

SEQ ID NO: 205374 - DNA, 55 bp, Artificial
  Synthetic oligonucleotide
cccgtctgcgcaagccgtagctagagcctgcggacatgcgattgccatagcccat

SEQ ID NO: 205375 - DNA, 60 bp, Artificial
  Synthetic oligonucleotide
tctgcagtgcgaaacgcaccgcagtttcgcactcgtcttccagcatcggccaggttccga

SEQ ID NO: 205376 - DNA, 55 bp, Artificial
  Synthetic oligonucleotide
gagcatgcgtggctcccactgacggagtgtccacaaaacgtggtgcgagcgtcag

SEQ ID NO: 205377 - DNA, 55 bp, Artificial
  Synthetic oligonucleotide
gagcccgcatggaagatgttcctgtcgaataagattctgctcgccgctctatggg

SEQ ID NO: 205378 - DNA, 55 bp, Artificial
  Synthetic oligonucleotide
cccggcgctgcacagtaggtggcagcttcagaagtcgtaaagtgttcgagacctg

SEQ ID NO: 205379 - DNA, 55 bp, Artificial
  Synthetic oligonucleotide
ctggtccagtctgtttggccagccagccgcgtagatagctgtacttgtgcgcctg

SEQ ID NO: 205380 - DNA, 55 bp, Artificial
  Synthetic oligonucleotide
cccgccgctgagaggcgttgtctttgcggttcatacggcagtcctatcgaggctg

SEQ ID NO: 205381 - DNA, 55 bp, Artificial
  Synthetic oligonucleotide
cggccgggtacggcatataagaactgaaaccgtcggcgtatgccctgagtaaggc

SEQ ID NO: 205382 - DNA, 55 bp, Artificial
  Synthetic oligonucleotide
cggcgcttacacgggtgatatctccggtcagttcctcagcaagttgggctgcgcc

SEQ ID NO: 205383 - DNA, 55 bp, Artificial
  Synthetic oligonucleotide
cccctgcagcgtcagtagacttgaatcgtggcagatccagctagttaccgacccc

SEQ ID NO: 205384 - DNA, 55 bp, Artificial
  Synthetic oligonucleotide
cccctcgcccacttgtgcacggcaaaagcccaaccgctccgctgcttttcccgca

SEQ ID NO: 205385 - DNA, 55 bp, Artificial
  Synthetic oligonucleotide
gagcccgcgtactatggatacagcggtcatagtagaggcaagaacatctgctatg

SEQ ID NO: 205386 - DNA, 60 bp, Artificial
  Synthetic oligonucleotide
ggacagtctcaaactggctgacagtccaaggcgctaagaagcgactgagggggactgtcc

SEQ ID NO: 205387 - DNA, 55 bp, Artificial
  Synthetic oligonucleotide
cccctcccctacaatgagacaggcgacacccgggcctccaaggtaagtagatctg

SEQ ID NO: 205388 - DNA, 55 bp, Artificial
  Synthetic oligonucleotide
cccctactggtggggtgcatattcgatttcggagtaatcgtgctctttgaggtgc

SEQ ID NO: 205389 - DNA, 55 bp, Artificial
  Synthetic oligonucleotide
cggcgttatcctcccttccgtgggagggatcgggttcgagcgtgagctgccttat

SEQ ID NO: 205390 - DNA, 55 bp, Artificial
  Synthetic oligonucleotide
gagggtgggcagtcgtagtagaagatccgatacaaccgtgagcgggtcttacgcg

SEQ ID NO: 205391 - DNA, 55 bp, Artificial
  Synthetic oligonucleotide
ccgctgtctagttggctcatagttatattccctggctcggacattttgcgcacga

SEQ ID NO: 205392 - DNA, 55 bp, Artificial
  Synthetic oligonucleotide
gacccaccctagctgttgtgggtcatgaggttcttgccacggggtacgggctgag

SEQ ID NO: 205393 - DNA, 55 bp, Artificial
  Synthetic oligonucleotide
ctgttcgcactctgttgagtggtgactgtcggcaacgaaggaatcgttacatcgg

SEQ ID NO: 205394 - DNA, 54 bp, Artificial
  Synthetic oligonucleotide
ccgccctcgacagcagttacttggtgaggacggctttagtagacccaccggtct

SEQ ID NO: 205395 - DNA, 55 bp, Artificial
  Synthetic oligonucleotide
ccgcccgtatacctcagagacagctcggcgtgaggcgttggcagtgtgggtgaac

SEQ ID NO: 205396 - DNA, 55 bp, Artificial
  Synthetic oligonucleotide
ccgcccgattcgaaccgagggctcaggaactatcggccagagctctggagacact

SEQ ID NO: 205397 - DNA, 56 bp, Artificial
  Synthetic oligonucleotide
acccagtgggtgactttgctgtaccccgaagggagtagctgctgtctatcgtaccg

SEQ ID NO: 205398 - DNA, 55 bp, Artificial
  Synthetic oligonucleotide
gaccctaaggctcatcaggccactttggcccgtatgcgaaacgaagcgatcgccc

SEQ ID NO: 205399 - DNA, 53 bp, Artificial
  Synthetic oligonucleotide
cgcggggagccctggacggtggtctgtttaaggatcgagtcccggtagccaaa

SEQ ID NO: 205400 - DNA, 55 bp, Artificial
  Synthetic oligonucleotide
cgctaaaataggaggagcgaaaacacaccgacacgaggagatatatggctcgccg

SEQ ID NO: 205401 - DNA, 55 bp, Artificial
  Synthetic oligonucleotide
ctgtggagaccgagtccttctctttcgtcgttagggctgctacggatttagtgtg

SEQ ID NO: 205402 - DNA, 55 bp, Artificial
  Synthetic oligonucleotide
ccgataagcgcccaagacacaccggctctccttgcagaggctactcccctgtcca

SEQ ID NO: 205403 - DNA, 55 bp, Artificial
  Synthetic oligonucleotide
cggaacaatttccgacacggtgcccaagttgttacacgtggacttgcaaatcgtc

SEQ ID NO: 205404 - DNA, 55 bp, Artificial
  Synthetic oligonucleotide
cggaagcctgctcatctccgagccacgtctatcaagcaagcgagaacagccggcc

SEQ ID NO: 205405 - DNA, 55 bp, Artificial
  Synthetic oligonucleotide
ccgaggaacggtcaaccttcagttcaagggccatattggccgcagtgataggtcc

SEQ ID NO: 205406 - DNA, 55 bp, Artificial
  Synthetic oligonucleotide
gacttcaatatcttagtgcatctggaccggataggcgattcacgcttgactcaag

SEQ ID NO: 205407 - DNA, 55 bp, Artificial
  Synthetic oligonucleotide
ccgacgttagtccctggcatcaatccccgctgaccgtccagagggtgcgtaatcc

SEQ ID NO: 205408 - DNA, 60 bp, Artificial
  Synthetic oligonucleotide
tagaatcggcatcagccatggtcgaggctccttatcagcttcgttgtggttagggactgc

SEQ ID NO: 205409 - DNA, 60 bp, Artificial
  Synthetic oligonucleotide
cgaaaatactcgactcgcagtccgcagtgccgtcctccagggaaagtgcggcagagtcat

SEQ ID NO: 205410 - DNA, 54 bp, Artificial
  Synthetic oligonucleotide
gagaggacgcggggtcgttctctgttttctaaggacggatggacccacccggca

SEQ ID NO: 205411 - DNA, 55 bp, Artificial
  Synthetic oligonucleotide
ccgacctaacacgtgtcaagcgtcacaatgccacgatgcgtaatgcgacgctctc

SEQ ID NO: 205412 - DNA, 55 bp, Artificial
  Synthetic oligonucleotide
ccgaattagcatgcgcgcatgggactgctactgggatacgtgagggtgtctacga

SEQ ID NO: 205413 - DNA, 55 bp, Artificial
  Synthetic oligonucleotide
cggaattcggtctttactgcgagccttaagaaaatctgcgaactgcccctgcggt

SEQ ID NO: 205414 - DNA, 55 bp, Artificial
  Synthetic oligonucleotide
cggacgggaattcctggttcggcgcactacacgtcttctaaggctgctctggacg

SEQ ID NO: 205415 - DNA, 55 bp, Artificial
  Synthetic oligonucleotide
ccgaaaatgcggtatcatcgaacgttgttcgtgtgcgcgcactcgtgtgtgcccg

SEQ ID NO: 205416 - DNA, 52 bp, Artificial
  Synthetic oligonucleotide
cccttttcggttgaagtacggacaacaattggctggagaacgcctatttccc

SEQ ID NO: 205417 - DNA, 55 bp, Artificial
  Synthetic oligonucleotide
accgtcgcctatggacctacaacccgagggtccgctagcagacgcgccctgtaca

SEQ ID NO: 205418 - DNA, 55 bp, Artificial
  Synthetic oligonucleotide
gtaagtgtcggaagcctggtttcgtggctcagacgtgtggcgagtgctgctacgt

SEQ ID NO: 205419 - DNA, 55 bp, Artificial
  Synthetic oligonucleotide
gtacgtgctcatgtgcacacccctcatcgttgagtattgtccttctcaggccagc

SEQ ID NO: 205420 - DNA, 52 bp, Artificial
  Synthetic oligonucleotide
acccgaacctaggtctggatttcaaaggagtgggggaccggggctgtgtcgc

SEQ ID NO: 205421 - DNA, 55 bp, Artificial
  Synthetic oligonucleotide
gtatgaccgattagcaaggattggctcaggggaatgcaggctatgacggctagcg

SEQ ID NO: 205422 - DNA, 55 bp, Artificial
  Synthetic oligonucleotide
gtatgcttcatgtattcgatgcggctaaccagcgtggcagctggaacggcactgg

SEQ ID NO: 205423 - DNA, 55 bp, Artificial
  Synthetic oligonucleotide
gtccgcacgagacggggcgtgagggcggctctgccccggtcctcatcctacgggg

SEQ ID NO: 205424 - DNA, 55 bp, Artificial
  Synthetic oligonucleotide
gtcgggtcgcgtgttcatgcaggtctcagatttacccgccagattgtcggttcgc

SEQ ID NO: 205425 - DNA, 55 bp, Artificial
  Synthetic oligonucleotide
gtgaatttcctcctgcgtccattctcggacacgaaactcacatagtcaccggact

SEQ ID NO: 205426 - DNA, 53 bp, Artificial
  Synthetic oligonucleotide
acccgacccatgtgacctcgcgtgtcccggactgaggggcccctaccctctta

SEQ ID NO: 205427 - DNA, 55 bp, Artificial
  Synthetic oligonucleotide
gtgacgctggaacccagtacgcaagcataaaccctaacaccgccataacaacttg

SEQ ID NO: 205428 - DNA, 55 bp, Artificial
  Synthetic oligonucleotide
gtgacgtgtaccagatcgaatcaattgagtcggaaaccggttcagtactattcgc

SEQ ID NO: 205429 - DNA, 55 bp, Artificial
  Synthetic oligonucleotide
accagtcgccgtcgaatgttggtctctcgttcagccgcgaaccatgtgggaatgc

SEQ ID NO: 205430 - DNA, 55 bp, Artificial
  Synthetic oligonucleotide
gtgcgcgcacacgaacaacgttcgatgataccgcattctcggcgtgcggaccagc

SEQ ID NO: 205431 - DNA, 52 bp, Artificial
  Synthetic oligonucleotide
ctttaagctagttcgaataaagggtcggggttgagaagcctataagaaattc

SEQ ID NO: 205432 - DNA, 55 bp, Artificial
  Synthetic oligonucleotide
gtgcgggatactttgctccgcaccgattagttgtcgaaagcatgatgttgagacc

SEQ ID NO: 205433 - DNA, 55 bp, Artificial
  Synthetic oligonucleotide
gtgcgttgtgtatctgtggcacgctgacctgcagaacttggccgatgcacacgga

SEQ ID NO: 205434 - DNA, 55 bp, Artificial
  Synthetic oligonucleotide
gtggaaagagtcctcacggaactaccgaagccttcagagccgcccattaggtgca

SEQ ID NO: 205435 - DNA, 55 bp, Artificial
  Synthetic oligonucleotide
gtggaaccagtccctattaagcgcggtagtaagtctgctagctgtggtctgaagc

SEQ ID NO: 205436 - DNA, 55 bp, Artificial
  Synthetic oligonucleotide
gtggcaggcatccgaatgagggagagcggccctgaatggatacgcctctacccca

SEQ ID NO: 205437 - DNA, 55 bp, Artificial
  Synthetic oligonucleotide
gtggcttcaagagttggcgctcggaagacttttgcgaagaatcgctcacctctag

SEQ ID NO: 205438 - DNA, 55 bp, Artificial
  Synthetic oligonucleotide
gtgggccggtattcttgttccttgtactgccgtcttgatctttgccaccgtaccg

SEQ ID NO: 205439 - DNA, 55 bp, Artificial
  Synthetic oligonucleotide
gtgtgcgatgtatgtcctccgcgaacacacaagagaccgcgtatgtgcaaacagc

SEQ ID NO: 205440 - DNA, 55 bp, Artificial
  Synthetic oligonucleotide
gttagtagtaaaattcggcggtactcgcgcacagtgcccatacctaaatatcgac

SEQ ID NO: 205441 - DNA, 55 bp, Artificial
  Synthetic oligonucleotide
acagacatccagctgatcggatgaaccagggtgccatcgcctgggttcagggcac

SEQ ID NO: 205442 - DNA, 55 bp, Artificial
  Synthetic oligonucleotide
ctttagaagattcgaagactctcccgtcgtccctcaggaagttcccgatgaccta

SEQ ID NO: 205443 - DNA, 55 bp, Artificial
  Synthetic oligonucleotide
gttatggcatgcttccgaactatttatcagcaaatcaccctgtgaaggtcttcta

SEQ ID NO: 205444 - DNA, 51 bp, Artificial
  Synthetic oligonucleotide
acaccgttttccaggaaattcacgggaacggggcttcacgaggcaggggta

SEQ ID NO: 205445 - DNA, 55 bp, Artificial
  Synthetic oligonucleotide
ggctcaaatccggagtttctgtctcggcatctattgatcgccaatttaatcgatc

SEQ ID NO: 205446 - DNA, 55 bp, Artificial
  Synthetic oligonucleotide
ggctcgctatctcgcacgacgcttcgcactacctgctggtacctgccggaatcgt

SEQ ID NO: 205447 - DNA, 55 bp, Artificial
  Synthetic oligonucleotide
actcatccgctaatctaggatgagaacgtaggacatgcaactatcgaactcgggg

SEQ ID NO: 205448 - DNA, 55 bp, Artificial
  Synthetic oligonucleotide
acgttgcgagggcgatgctcgcattgaatacacggtctggtctgacactgttgtc

SEQ ID NO: 205449 - DNA, 55 bp, Artificial
  Synthetic oligonucleotide
ggctctgaagtcaaccgtgggatcgacccctatggaggattcctcctcatcgccc

SEQ ID NO: 205450 - DNA, 55 bp, Artificial
  Synthetic oligonucleotide
acggtgcaagttatgtcgacgcagcgcaggtgcctatttggctcgatgtcccacc

SEQ ID NO: 205451 - DNA, 55 bp, Artificial
  Synthetic oligonucleotide
ggctggatggcataagccgcagttttaagctccccgcccctatacgttttcgcag

SEQ ID NO: 205452 - DNA, 55 bp, Artificial
  Synthetic oligonucleotide
gggagctgtggttgaacggctgtaaagagggaaccaacgccctccgcgacacgtc

SEQ ID NO: 205453 - DNA, 50 bp, Artificial
  Synthetic oligonucleotide
acccgaccggggcaactaatcgtcgtctcgtaacccttgggaaacgagac

SEQ ID NO: 205454 - DNA, 55 bp, Artificial
  Synthetic oligonucleotide
gggatttcgaaggtgtgtggcgactcgcgatgggattttagtccagattctaggg

SEQ ID NO: 205455 - DNA, 55 bp, Artificial
  Synthetic oligonucleotide
gggccttgtacgttcgatcgaaacgctggacgtaatatcggtagtcccgcggcga

SEQ ID NO: 205456 - DNA, 55 bp, Artificial
  Synthetic oligonucleotide
gggcgtttgtagaatatgtgaatcgtagtcagttgcataggccacatgagtacag

SEQ ID NO: 205457 - DNA, 55 bp, Artificial
  Synthetic oligonucleotide
gggcttgcagtaggttctcctcagcgatcaccgatcgaacttttgcccagtggcg

SEQ ID NO: 205458 - DNA, 55 bp, Artificial
  Synthetic oligonucleotide
ggggaagatcttcttgacgaacttgtttggtaccgcgctcctatacttatggggc

SEQ ID NO: 205459 - DNA, 55 bp, Artificial
  Synthetic oligonucleotide
ggggaaggccacaaccgttcgtcgtactgtatggatactggggctgacctaggcg

SEQ ID NO: 205460 - DNA, 55 bp, Artificial
  Synthetic oligonucleotide
acggaggtgactcccttgagcagtagcggatggtgcgtgatcaggagttccgcgc

SEQ ID NO: 205461 - DNA, 55 bp, Artificial
  Synthetic oligonucleotide
ggggaggcggtcccgatgcacaggaaccggagttcacgcttcgcgtcacctcagt

SEQ ID NO: 205462 - DNA, 55 bp, Artificial
  Synthetic oligonucleotide
ggggatctgtggacattgtcattccggtggttttgggtcgtcttcttgctcaagt

SEQ ID NO: 205463 - DNA, 55 bp, Artificial
  Synthetic oligonucleotide
ggggcgtccgcccaaaagtatgcgagagcgccggaaatcgaattgttcccgcttg

SEQ ID NO: 205464 - DNA, 60 bp, Artificial
  Synthetic oligonucleotide
cttttcagctcaatgtagttgcggtgttcgctgaagcccacaccatgggagattcctttg

SEQ ID NO: 205465 - DNA, 55 bp, Artificial
  Synthetic oligonucleotide
gggtccgtgaaccagtaaggcacacctcagtgagatacgcaaggcgagtgttgtg

SEQ ID NO: 205466 - DNA, 55 bp, Artificial
  Synthetic oligonucleotide
acgccccagatggacctgaaaacggacaaacagccctcgctccgtgaacgcaaca

SEQ ID NO: 205467 - DNA, 55 bp, Artificial
  Synthetic oligonucleotide
ggtacggctcacgcgggacacgtgaggctggctaggcttcgagcgtggagaccct

SEQ ID NO: 205468 - DNA, 55 bp, Artificial
  Synthetic oligonucleotide
ggtctcatcaactcgcaccagcacctgtacgaaggcgcaatgcgggcgattcccc

SEQ ID NO: 205469 - DNA, 52 bp, Artificial
  Synthetic oligonucleotide
ggtgcttctggtccgaaggctcgaaccgggtcccgtcccaggtcccggtcca

SEQ ID NO: 205470 - DNA, 55 bp, Artificial
  Synthetic oligonucleotide
ggtgtgccaccaaccaacggggtagccaggagtcccgttcagccttagcattggg

SEQ ID NO: 205471 - DNA, 55 bp, Artificial
  Synthetic oligonucleotide
gtaagccccacggtcaattatgagatctatacgggaaggcgcgctatcggccgcc

SEQ ID NO: 205472 - DNA, 55 bp, Artificial
  Synthetic oligonucleotide
tgccttccgaaatgaggctctcctgacgcttccgtgggtgttctggcgagccgtt

SEQ ID NO: 205473 - DNA, 55 bp, Artificial
  Synthetic oligonucleotide
tgcgaaccgggtaagtacggggacgggatgcctagctgccaggccatactggagg

SEQ ID NO: 205474 - DNA, 55 bp, Artificial
  Synthetic oligonucleotide
tgcgagcaaccatcacgtgcagtgttgacctcagcgcagctgccctcccgggctt

SEQ ID NO: 205475 - DNA, 56 bp, Artificial
  Synthetic oligonucleotide
cttggagcgcagttgacggactttgtccgtttgcgagttcgaacctcgtcctctcc

SEQ ID NO: 205476 - DNA, 55 bp, Artificial
  Synthetic oligonucleotide
tggccgtgccgacggctgaggcttgggatacgctcacagtatgaccatacgtccc

SEQ ID NO: 205477 - DNA, 55 bp, Artificial
  Synthetic oligonucleotide
aacggctcgccagaacacccacggaagcgtcaggagagcccgatatttggtcggg

SEQ ID NO: 205478 - DNA, 52 bp, Artificial
  Synthetic oligonucleotide
aacggacgagaagacacttgcccgggtaatcggaggaacccaggtaggcgcg

SEQ ID NO: 205479 - DNA, 55 bp, Artificial
  Synthetic oligonucleotide
tgtctccgggagtcataacggcacgaacggtcaaaagtccggcacaactgccagt

SEQ ID NO: 205480 - DNA, 55 bp, Artificial
  Synthetic oligonucleotide
tgtgctcgcagagtatgccgcggctcttacctgggcgttctcactgttggcgtac

SEQ ID NO: 205481 - DNA, 55 bp, Artificial
  Synthetic oligonucleotide
aacgcaccgcagtttcgcactcgtcttccagcatcggccaggttccgaggccaag

SEQ ID NO: 205482 - DNA, 55 bp, Artificial
  Synthetic oligonucleotide
tgtggcgcatgcggtccgcgacccttgacggccaccgatattgtgtggaatacgc

SEQ ID NO: 205483 - DNA, 55 bp, Artificial
  Synthetic oligonucleotide
tgttccccagtatgaagaggaatcaaaccatgacgagttcagtccgtcggccggt

SEQ ID NO: 205484 - DNA, 55 bp, Artificial
  Synthetic oligonucleotide
tgttgtcctgaagaccacacgcgcgtgacagccccgtccgcgccccatgatctga

SEQ ID NO: 205485 - DNA, 55 bp, Artificial
  Synthetic oligonucleotide
ttactttactcggttccaccgggtctattggcacccaagcagtacaggttataga

SEQ ID NO: 205486 - DNA, 51 bp, Artificial
  Synthetic oligonucleotide
acccggccggtgtcccggagggtgtagcggttgatcggcccgtaggtgtcc

SEQ ID NO: 205487 - DNA, 51 bp, Artificial
  Synthetic oligonucleotide
ttatggcgtaggcgggtgggaccagtaggccggaacctcggtaggtacccc

SEQ ID NO: 205488 - DNA, 55 bp, Artificial
  Synthetic oligonucleotide
aacccggcgaagtgtgcaaaatcaaggagacagctgacccggttgagaccacagg

SEQ ID NO: 205489 - DNA, 55 bp, Artificial
  Synthetic oligonucleotide
ttcaccctagccaagtagcagtgatcagcgctgggtatgcgccttcagctacgca

SEQ ID NO: 205490 - DNA, 55 bp, Artificial
  Synthetic oligonucleotide
ttcattaccctgtcggatgccgcgcgaacttgactaaggggccgttcgccccacc

SEQ ID NO: 205491 - DNA, 55 bp, Artificial
  Synthetic oligonucleotide
ttcgaccatcggtcggacggggttttctcattgccggctcgcagcctgagcgtcc

SEQ ID NO: 205492 - DNA, 55 bp, Artificial
  Synthetic oligonucleotide
ttctgacatacgctcggcaggtctccgaaaagagttgtggacttgtccgttaggt

SEQ ID NO: 205493 - DNA, 54 bp, Artificial
  Synthetic oligonucleotide
aaagctactcacccgagaaggccaacgttgacgtcgccatggagggttctaacg

SEQ ID NO: 205494 - DNA, 55 bp, Artificial
  Synthetic oligonucleotide
aaagccccagactttgggcattgaggcttggccagtgatctcccgctcggttgaa

SEQ ID NO: 205495 - DNA, 55 bp, Artificial
  Synthetic oligonucleotide
tttcactgacaccacgctgcatgtccgctgcgactccacggcttgggccactcag

SEQ ID NO: 205496 - DNA, 55 bp, Artificial
  Synthetic oligonucleotide
tttcgtgtaggaaacggcggcgtgtcgcggtgctttcgtgtgagaaacggcgccg

SEQ ID NO: 205497 - DNA, 56 bp, Artificial
  Synthetic oligonucleotide
ccttggccgggcggggattcagaagcttagcgccggatctgttgaagtttggaaga

SEQ ID NO: 205498 - DNA, 55 bp, Artificial
  Synthetic oligonucleotide
tttgtggggagcatcggcgacacgactgttgtctacaagccgataaccggggaga

SEQ ID NO: 205499 - DNA, 55 bp, Artificial
  Synthetic oligonucleotide
gtttcagcgagcacttcgggatggagatctaacagtgcgtatcccactttcctgg

SEQ ID NO: 205500 - DNA, 55 bp, Artificial
  Synthetic oligonucleotide
gtttggggccgctgttggggatgacttcagcaccgcatctcgctccgggcttggt

SEQ ID NO: 205501 - DNA, 55 bp, Artificial
  Synthetic oligonucleotide
gttttcgacaatatcggaatgactttcggcaccgcgacaggagtcacccacgcag

SEQ ID NO: 205502 - DNA, 55 bp, Artificial
  Synthetic oligonucleotide
taactcaacacacaatcacatagagtatcgaccacgaacgcacgggctaggcaaa

SEQ ID NO: 205503 - DNA, 55 bp, Artificial
  Synthetic oligonucleotide
tacacatgaggtctgtaccgggccgcctgagatagcccggaccgagggatctgtc

SEQ ID NO: 205504 - DNA, 55 bp, Artificial
  Synthetic oligonucleotide
tacgcgaagcgtccctaccccgagagcacggagcttctgacgcagttgcgtacga

SEQ ID NO: 205505 - DNA, 55 bp, Artificial
  Synthetic oligonucleotide
tagagagttgcgtaattctgggcgtcgtgaggtggaaagccgtctgccccgggcc

SEQ ID NO: 205506 - DNA, 55 bp, Artificial
  Synthetic oligonucleotide
aatacccgaccgtaggctcggggtggacattgcgtccagcatgcgacatgaccgg

SEQ ID NO: 205507 - DNA, 55 bp, Artificial
  Synthetic oligonucleotide
tcactgtgagagccgtcacagggtggtgtgcgctagcgtgaacacgccatggcgt

SEQ ID NO: 205508 - DNA, 57 bp, Artificial
  Synthetic oligonucleotide
acattcgggcgcagagtgccggcggtccccgctacgagcgggactaccctcgcgaca

SEQ ID NO: 205509 - DNA, 55 bp, Artificial
  Synthetic oligonucleotide
tccaaagctggacggtcatcgtgtcgccttgcgtgggcggctatacccggatcag

SEQ ID NO: 205510 - DNA, 55 bp, Artificial
  Synthetic oligonucleotide
tccacggcgtcgtgtgatagccagcggtggactacgggtaaggtgtgtgcccgaa

SEQ ID NO: 205511 - DNA, 55 bp, Artificial
  Synthetic oligonucleotide
tccggccatgccggagcggaacgagagaaggctggtccgtcatgacagtgcagtt

SEQ ID NO: 205512 - DNA, 55 bp, Artificial
  Synthetic oligonucleotide
tcgaaggcgtaagcagcaggatgtttacaccccggggcagagggcccctaccgta

SEQ ID NO: 205513 - DNA, 53 bp, Artificial
  Synthetic oligonucleotide
aagggaacccaacgaagaaaggcacgtgtccccgtacgcccgctgatccactc

SEQ ID NO: 205514 - DNA, 55 bp, Artificial
  Synthetic oligonucleotide
tcggcggatcacaggtccgtcaaggcggtccgttatcttttctatgcgatagggg

SEQ ID NO: 205515 - DNA, 55 bp, Artificial
  Synthetic oligonucleotide
tcgtagtccgcggcaaccgtgttgtacgccgttctggtcgtggtcagatgcgtgg

SEQ ID NO: 205516 - DNA, 55 bp, Artificial
  Synthetic oligonucleotide
tcgtgctacctctgtccgtgcttcggccttcggaagtccctgccctacgagctct

SEQ ID NO: 205517 - DNA, 55 bp, Artificial
  Synthetic oligonucleotide
tcttggcgacagaaaggggtgtgcggttcaagagaatggcggccacggatggttc

SEQ ID NO: 205518 - DNA, 55 bp, Artificial
  Synthetic oligonucleotide
tgaccccagaactcgatccgacgtgggaggtcgtgcgtcccgactgtgaagatgc

SEQ ID NO: 205519 - DNA, 60 bp, Artificial
  Synthetic oligonucleotide
tagatgtgacggtctgacgatcgcctttatgcatccgtgccatgggtcctcctagttcgg

SEQ ID NO: 205520 - DNA, 57 bp, Artificial
  Synthetic oligonucleotide
gaacacgcacccgtctcccatcagccgtccctgcgaatccagtcccgtgccggtaaa

SEQ ID NO: 205521 - DNA, 55 bp, Artificial
  Synthetic oligonucleotide
tgacgggtaaagaggggtatacagcgttgcgtgtggcgtaccgtgccgcactcac

SEQ ID NO: 205522 - DNA, 55 bp, Artificial
  Synthetic oligonucleotide
tgactgcagcccgcagacccttcgttcctacgcattcgacctactgcgctggtgg

SEQ ID NO: 205523 - DNA, 55 bp, Artificial
  Synthetic oligonucleotide
aactagtccccattggctccgagccttcacaagctcagtccggggccctcgccaa

SEQ ID NO: 205524 - DNA, 55 bp, Artificial
  Synthetic oligonucleotide
tgccaaccggccgaagggatgccggtcagtccttggatgacctgatacgactcca

SEQ ID NO: 205525 - DNA, 55 bp, Artificial
  Synthetic oligonucleotide
tgccaccggagcatccaaggtgttcagtcatccggcgagtgtagtggcgcagagg

SEQ ID NO: 205526 - DNA, 55 bp, Artificial
  Synthetic oligonucleotide
gcgcggctaggaatcctcgtaaccaggcacgactactggcggttctcggtagcac

SEQ ID NO: 205527 - DNA, 55 bp, Artificial
  Synthetic oligonucleotide
gccatggaatattgttccaggccgtccttggatgcccgctaccgtcggggtgtgc

SEQ ID NO: 205528 - DNA, 55 bp, Artificial
  Synthetic oligonucleotide
caacttattgcggtgacagatcctctgggtgcccggagtgagtttgactacgact

SEQ ID NO: 205529 - DNA, 55 bp, Artificial
  Synthetic oligonucleotide
gcggcaataggctccactgcatagtcctgccaccacttatcgaagtggcgtgcga

SEQ ID NO: 205530 - DNA, 55 bp, Artificial
  Synthetic oligonucleotide
gcgggaggtatctatgtcgaaggcatggaatctctaaccccgcttcttgtcgata

SEQ ID NO: 205531 - DNA, 59 bp, Artificial
  Synthetic oligonucleotide
accgctggctccaaaccggagtgattcctgcctaccaagtcgagaagacatggttgatc

SEQ ID NO: 205532 - DNA, 55 bp, Artificial
  Synthetic oligonucleotide
gcggtctgaggtgtactactgatgtgagacacagtttgaaaggattgtgctcatg

SEQ ID NO: 205533 - DNA, 55 bp, Artificial
  Synthetic oligonucleotide
atccaaatagcaaggccgacgttacggagtgcccatgctcaaggtatgcggcttc

SEQ ID NO: 205534 - DNA, 55 bp, Artificial
  Synthetic oligonucleotide
atcatgctcgagtggttggacgcaggcccacggcccatgtgatctcccgaccgct

SEQ ID NO: 205535 - DNA, 55 bp, Artificial
  Synthetic oligonucleotide
atatgccgtgattaggccgagagctttgcgcgacccttaccgcggcggctcgaca

SEQ ID NO: 205536 - DNA, 55 bp, Artificial
  Synthetic oligonucleotide
cacagtagtacgtgcattatgcattgacacgcatattatcggggtgtgctccccg

SEQ ID NO: 205537 - DNA, 55 bp, Artificial
  Synthetic oligonucleotide
gctagggtgtcatcctcgcagtatcggtcaaagagttgcccaacaaagtcgctca

SEQ ID NO: 205538 - DNA, 55 bp, Artificial
  Synthetic oligonucleotide
gctcacctgaagcagtggcggggtctggcgacccggtatgacaagtacgcgatca

SEQ ID NO: 205539 - DNA, 55 bp, Artificial
  Synthetic oligonucleotide
agttctcgacaggtgcggtcatggttgggagtgtgtcacaccgcgccggagttcc

SEQ ID NO: 205540 - DNA, 53 bp, Artificial
  Synthetic oligonucleotide
agttccgacaggggtcgacccacgtcaaacatcgccccagaagccctagaacg

SEQ ID NO: 205541 - DNA, 55 bp, Artificial
  Synthetic oligonucleotide
gctcggagcttcggagatacgtacggagcggggaacaactgcagagagcacctgt

SEQ ID NO: 205542 - DNA, 60 bp, Artificial
  Synthetic oligonucleotide
gaacgtatcccgcgatcttgagtggtccactctgtgcatccttcatgagctaaccgtaca

SEQ ID NO: 205543 - DNA, 55 bp, Artificial
  Synthetic oligonucleotide
agtgcacagagcatagcgctagaaaatggcagtgacattacggggcgcaacgttg

SEQ ID NO: 205544 - DNA, 55 bp, Artificial
  Synthetic oligonucleotide
gctggacgtagggccaccagatcactccgtgcctcaccacccattcgttgggaat

SEQ ID NO: 205545 - DNA, 55 bp, Artificial
  Synthetic oligonucleotide
gctggcaagagcgtctgcggcctccctgcgagtaaggaaactgcactgggaaccg

SEQ ID NO: 205546 - DNA, 55 bp, Artificial
  Synthetic oligonucleotide
gcttcagatcacaccccaaagcgaggtaggaccagtgtccaacgaacagccctct

SEQ ID NO: 205547 - DNA, 55 bp, Artificial
  Synthetic oligonucleotide
cacatacaacattagagctaaggttcaaggtaaaggctcgccgtgaaagtaccca

SEQ ID NO: 205548 - DNA, 55 bp, Artificial
  Synthetic oligonucleotide
ggaaccactgagcagacctgagtccgaacgtgtacggaagtgcgtgctgcgtcag

SEQ ID NO: 205549 - DNA, 55 bp, Artificial
  Synthetic oligonucleotide
aggtccttgccagcgtgaatcacgcgtattgaaaagcgggacgtacctacttggc

SEQ ID NO: 205550 - DNA, 54 bp, Artificial
  Synthetic oligonucleotide
attcccatggggtacgccacagtcaacgggtggtactacgttgccccgcccaca

SEQ ID NO: 205551 - DNA, 55 bp, Artificial
  Synthetic oligonucleotide
attcacgcatgccgccatgctagcgaccgtgtgtttccggcacatcacgtcccac

SEQ ID NO: 205552 - DNA, 55 bp, Artificial
  Synthetic oligonucleotide
gcccgtggacatttccccaccgaactgaggtgtactactgatgtgagacacagtt

SEQ ID NO: 205553 - DNA, 51 bp, Artificial
  Synthetic oligonucleotide
ggtttcgctcttagggtttcaacccgggcaccaaccccttcattcactcgt

SEQ ID NO: 205554 - DNA, 55 bp, Artificial
  Synthetic oligonucleotide
gccctcactgcgcaaacgaatgtgagaacaccatggcaatgaccgcacgtcaacg

SEQ ID NO: 205555 - DNA, 55 bp, Artificial
  Synthetic oligonucleotide
gcccgagttctagacttgcgactcattggctactcaacttaatattcattgcggc

SEQ ID NO: 205556 - DNA, 55 bp, Artificial
  Synthetic oligonucleotide
gccggctacatgcattcggtaagccaggtcacattcctgtgcggtaggcaggcca

SEQ ID NO: 205557 - DNA, 55 bp, Artificial
  Synthetic oligonucleotide
atgttcccattagcggcaagcgagaagacgtcgaatttaggattcgaacgcagtg

SEQ ID NO: 205558 - DNA, 55 bp, Artificial
  Synthetic oligonucleotide
gccgggaccacccactgggaaattcggaatcacctgataagggcacaggaacctc

SEQ ID NO: 205559 - DNA, 55 bp, Artificial
  Synthetic oligonucleotide
gccggttggtgccctcgctcgagagctgatattcgctttagtgggcagtcacgaa

SEQ ID NO: 205560 - DNA, 55 bp, Artificial
  Synthetic oligonucleotide
gccgtagcgcacaaacgcacactaatactttactcggacccgagcttgctacccg

SEQ ID NO: 205561 - DNA, 55 bp, Artificial
  Synthetic oligonucleotide
atggagcatgtggctcagcaatcccgctttactttggactatgcgcgggtgagcc

SEQ ID NO: 205562 - DNA, 55 bp, Artificial
  Synthetic oligonucleotide
atgccatgaccagccactactttggtggccagtacgcgaagcgggccccaaggac

SEQ ID NO: 205563 - DNA, 55 bp, Artificial
  Synthetic oligonucleotide
gcgaacccttatctctagtcagagggtgttacttcacgaaactgcactcaattgg

SEQ ID NO: 205564 - DNA, 60 bp, Artificial
  Synthetic oligonucleotide
cttgaccacgacggacgaagcaacagcatctgcacgtgttgggttgtgtccgtcctcgga

SEQ ID NO: 205565 - DNA, 55 bp, Artificial
  Synthetic oligonucleotide
gcgaccgtgatagcaagactccccagtcctcaatactccgaaccgctgcttgcgg

SEQ ID NO: 205566 - DNA, 55 bp, Artificial
  Synthetic oligonucleotide
gcgacgcggtcaatatcctgcggggtcggggtatgatccaccactcgacgaatgt

SEQ ID NO: 205567 - DNA, 55 bp, Artificial
  Synthetic oligonucleotide
gccccggtgaatcgccctggtgaatcgctccggtgtgtccggagggtttctcaga

SEQ ID NO: 205568 - DNA, 55 bp, Artificial
  Synthetic oligonucleotide
gcgcacggcaatgactgcagcgcatcagctcttggtcctcactcagtcgagtcaa

SEQ ID NO: 205569 - DNA, 55 bp, Artificial
  Synthetic oligonucleotide
gccccacgtgagtccattgatttccacagggtcacctttcggcgtcaggggtcag

SEQ ID NO: 205570 - DNA, 55 bp, Artificial
  Synthetic oligonucleotide
gcgcatccacccctcaatcaggcccattccgaaatgcaccgcaaacactgccgaa

SEQ ID NO: 205571 - DNA, 55 bp, Artificial
  Synthetic oligonucleotide
gcgcccttccggttgcgaagtctaaactgtacgaatgactacagcagctacccct

SEQ ID NO: 205572 - DNA, 55 bp, Artificial
  Synthetic oligonucleotide
atcctgacctgccggactcaccgttgcaggtccgcatgcgacaaaccgcgtaacg

SEQ ID NO: 205573 - DNA, 55 bp, Artificial
  Synthetic oligonucleotide
gcgcgctacaagtgagtcggaagcagtctcgttattggttatgtgcacgtgaatg

SEQ ID NO: 205574 - DNA, 55 bp, Artificial
  Synthetic oligonucleotide
ggaggttcgcatgaaccagtcaacagagagcaccaccgaaagcaatccgttcacc

SEQ ID NO: 205575 - DNA, 60 bp, Artificial
  Synthetic oligonucleotide
cgatggagctgctgtagtgcacgcagatcggaacgtcgcagtcatgcatcagcggaccga

SEQ ID NO: 205576 - DNA, 55 bp, Artificial
  Synthetic oligonucleotide
ggatgtgactcgggtcccggcgaaaacaggtagcagcaagtgtcgttttggggcg

SEQ ID NO: 205577 - DNA, 55 bp, Artificial
  Synthetic oligonucleotide
agcgcggaatcggtccgctgaccccgggtggggcgcatccctccgctaggctgga

SEQ ID NO: 205578 - DNA, 55 bp, Artificial
  Synthetic oligonucleotide
caccggggtgcaacgcacattccatgggcaccacatcaggaggaaacgtcatggg

SEQ ID NO: 205579 - DNA, 55 bp, Artificial
  Synthetic oligonucleotide
ggcaaaatctggtgaggcctactggcaaatcccgcttgagtcctacttgcgtgcc

SEQ ID NO: 205580 - DNA, 55 bp, Artificial
  Synthetic oligonucleotide
cacctttcgcagtgagcggttctgtgcgtattagccgtgattagatgttgaaccc

SEQ ID NO: 205581 - DNA, 55 bp, Artificial
  Synthetic oligonucleotide
ggcaatggcagcaagttccataggtgtacgtttcacctttccaccgtacggcggc

SEQ ID NO: 205582 - DNA, 55 bp, Artificial
  Synthetic oligonucleotide
agccccgtacgtccatcagacggccggaagctcgtgacttcagagtagacccgtg

SEQ ID NO: 205583 - DNA, 55 bp, Artificial
  Synthetic oligonucleotide
ggcacctcggggacctttgcttggggtgccgcacacatgttcccggagtaacgtc

SEQ ID NO: 205584 - DNA, 55 bp, Artificial
  Synthetic oligonucleotide
ggcagcgtctcaggttccgcccaaccctgtcggcaccgcaagccaaaccctggac

SEQ ID NO: 205585 - DNA, 55 bp, Artificial
  Synthetic oligonucleotide
ggcagttagcaactccgtggcgtaccggtttagagggactccatggtttgccgcc

SEQ ID NO: 205586 - DNA, 54 bp, Artificial
  Synthetic oligonucleotide
gtttcgagtgcgaactttgccgaacttcactgcgtaagcccaaacggacgtttg

SEQ ID NO: 205587 - DNA, 55 bp, Artificial
  Synthetic oligonucleotide
ggcatcgtcagttacctgcggggtgccaaggcttggagtgttcacgtcgtgctac

SEQ ID NO: 205588 - DNA, 55 bp, Artificial
  Synthetic oligonucleotide
ggccttccgcgttgtgggtccccatggcccttgacgtcgattccctttacgagca

SEQ ID NO: 205589 - DNA, 55 bp, Artificial
  Synthetic oligonucleotide
ggcgatatgaagaaccggctggctaagccgggaccttcgttgtacctatcggacc

SEQ ID NO: 205590 - DNA, 55 bp, Artificial
  Synthetic oligonucleotide
agacctgaaaaccctcgaaacgatagccgctcacactgcggcgcggtgccccgaa

SEQ ID NO: 205591 - DNA, 55 bp, Artificial
  Synthetic oligonucleotide
ggcgcgctatggagagaacgattgacgatttgacggaagttggagaagttcatcg

SEQ ID NO: 205592 - DNA, 55 bp, Artificial
  Synthetic oligonucleotide
acttcgaaccgtcgcctgactcatcgagcagggtgatcaaggaggaatcgcctct

SEQ ID NO: 205593 - DNA, 55 bp, Artificial
  Synthetic oligonucleotide
acttatgtgcggaatccgggtggcacttcctcgatggggacgtgcggtagaaccg

SEQ ID NO: 205594 - DNA, 50 bp, Artificial
  Synthetic oligonucleotide
actcgttttgccggggtagtcgtttcccgccaagggacgtgaccccagga

SEQ ID NO: 205595 - DNA, 55 bp, Artificial
  Synthetic oligonucleotide
ggcgcggtcatttcatcagtcctgggtcagtgctactcagctcggaatcttcgct

SEQ ID NO: 205596 - DNA, 55 bp, Artificial
  Synthetic oligonucleotide
ggcgcggttctgtctcacaccgtgaccgagtggaacccggttctgggtaccatct

SEQ ID NO: 205597 - DNA, 60 bp, Artificial
  Synthetic oligonucleotide
acacacgattcagcacatgccataatgtgcgcatggatgcagatatgaaagtatgcggcc

SEQ ID NO: 205598 - DNA, 55 bp, Artificial
  Synthetic oligonucleotide
ggacaggctccgatgcatatgccacctacgtacccgctcaggttttgggccttcg

SEQ ID NO: 205599 - DNA, 53 bp, Artificial
  Synthetic oligonucleotide
aggggtgacgtgctccgatcggtcctcgttggttcagggccggggttcaattg

SEQ ID NO: 205600 - DNA, 55 bp, Artificial
  Synthetic oligonucleotide
aggggtcgagactgcgggtcacacccacccgtcagtgggctgatgacgtgttccg

SEQ ID NO: 205601 - DNA, 55 bp, Artificial
  Synthetic oligonucleotide
aggctcatggtccgttttctcctagtcgttcaccggcacacatgcgtagaaccgg

SEQ ID NO: 205602 - DNA, 55 bp, Artificial
  Synthetic oligonucleotide
ggacgtacgtctgtgcagttccgcggtgagaacgcccaaccgacggaaggctccc

SEQ ID NO: 205603 - DNA, 55 bp, Artificial
  Synthetic oligonucleotide
ggactatttctcccgggcgtaaggccgtgccggtctggtaatcgactctgcctgc

SEQ ID NO: 205604 - DNA, 55 bp, Artificial
  Synthetic oligonucleotide
gcatgttgagtcaagtcgatccagcactcggccactggcacatgagtccttcacg

SEQ ID NO: 205605 - DNA, 55 bp, Artificial
  Synthetic oligonucleotide
ggactgcgcggcagaccacagctctctgttatttcggcgactggtgatgcttcgc

SEQ ID NO: 205606 - DNA, 55 bp, Artificial
  Synthetic oligonucleotide
ggactgcggaacagctgaggcgaacctatgcgaccgctgggagtgtcgcaactgt

SEQ ID NO: 205607 - DNA, 55 bp, Artificial
  Synthetic oligonucleotide
gcaggtaatccgagcataggtgggagtttgataggctcggtactcgggctgagac

SEQ ID NO: 205608 - DNA, 59 bp, Artificial
  Synthetic oligonucleotide
acaaccagcaccggcttctgggaagtctgggatgcagtgggagtagtcaccgtactagc

SEQ ID NO: 205609 - DNA, 55 bp, Artificial
  Synthetic oligonucleotide
gcaggagctctcgtattccacggtgcgtgattacgtaagggtccgtcgggcccag

SEQ ID NO: 205610 - DNA, 55 bp, Artificial
  Synthetic oligonucleotide
ggagcgagatgcggtgctgaagtcatccccaacagcggccccaaactccgtgacc

SEQ ID NO: 205611 - DNA, 55 bp, Artificial
  Synthetic oligonucleotide
ggagccctctatgctgccgcgaacctaatcgccatgacgtctgcaggtaaccccg

SEQ ID NO: 205612 - DNA, 54 bp, Artificial
  Synthetic oligonucleotide
cccgagaccggctctcacagctagagctcgatcccgatacgttcagtgcactca

SEQ ID NO: 205613 - DNA, 54 bp, Artificial
  Synthetic oligonucleotide
aaattcggttcagagagaagttcggtccctacgagcccgggtggtcaggcacga

SEQ ID NO: 205614 - DNA, 54 bp, Artificial
  Synthetic oligonucleotide
cagtggcggggtctggcgacccggtatgacaagtacgcgatcatctacagggcc

SEQ ID NO: 205615 - DNA, 54 bp, Artificial
  Synthetic oligonucleotide
cgccggcggacccaacttgccccgcagatacctttgattgtcaggacaacatcg

SEQ ID NO: 205616 - DNA, 53 bp, Artificial
  Synthetic oligonucleotide
agattcgagcgtccttgctccgtaagggtgtagtaacggcggggtggcctctt

SEQ ID NO: 205617 - DNA, 54 bp, Artificial
  Synthetic oligonucleotide
cgactcaggttcacttgacagtccaccaccccggtggcaacctgagtcatgaag

SEQ ID NO: 205618 - DNA, 54 bp, Artificial
  Synthetic oligonucleotide
tctctcggccgagggactgcctgcgggagagtacgccaggatcagcggagcgtt

SEQ ID NO: 205619 - DNA, 57 bp, Artificial
  Synthetic oligonucleotide
gtttgcggaaggactattccgacttctcatagatggtcaaagttccggctaggtcca

SEQ ID NO: 205620 - DNA, 54 bp, Artificial
  Synthetic oligonucleotide
ggagtactccccttgataggaatatattagccgaaccaaaagcatggtcctaac

SEQ ID NO: 205621 - DNA, 54 bp, Artificial
  Synthetic oligonucleotide
attgtgggacgggtcacatttcagtgatctgcttcggttcaaccgacaaggaag

SEQ ID NO: 205622 - DNA, 54 bp, Artificial
  Synthetic oligonucleotide
gcgagtggtaccggaatcaggtttgtgtgactcggaggtgttcgacatgagggg

SEQ ID NO: 205623 - DNA, 54 bp, Artificial
  Synthetic oligonucleotide
gcgtcagtacgctcacctgaagcagtggcggggtctggcgacccggtatgacaa

SEQ ID NO: 205624 - DNA, 54 bp, Artificial
  Synthetic oligonucleotide
tatcgagtccgctgcattcgatgcaggcaccgactaagcgctaaagcctagcta

SEQ ID NO: 205625 - DNA, 54 bp, Artificial
  Synthetic oligonucleotide
catgctgatccgaaccggcgtggacacgtacggtgtcacccctgaacgctgtta

SEQ ID NO: 205626 - DNA, 54 bp, Artificial
  Synthetic oligonucleotide
gcgcaaatagcaacgcaggattcctcgccaaaaggcccgttcaaggggctagta

SEQ ID NO: 205627 - DNA, 54 bp, Artificial
  Synthetic oligonucleotide
ttttccagtgtgtccctattgtgggcaggtctattcacactgtcacgacgagtg

SEQ ID NO: 205628 - DNA, 54 bp, Artificial
  Synthetic oligonucleotide
cgcgagcttgcacaagacgtcaagaaagagtcccagagctacggggcttcggcg

SEQ ID NO: 205629 - DNA, 54 bp, Artificial
  Synthetic oligonucleotide
ggggctcctctccccatacggcggtctcctccttctaaagacggccgctacgct

SEQ ID NO: 205630 - DNA, 54 bp, Artificial
  Synthetic oligonucleotide
acgggaatagtggacgacgtaccgaaacctatgccggattcgattcctcgaaca

SEQ ID NO: 205631 - DNA, 59 bp, Artificial
  Synthetic oligonucleotide
gacacaccattccccggcttggcctcggaacctggccgatgctggaagacgagtgcgaa

SEQ ID NO: 205632 - DNA, 54 bp, Artificial
  Synthetic oligonucleotide
cgctcggtgagaatcaccggtagaatagcgtcccactggtcgtagggaatggtt

SEQ ID NO: 205633 - DNA, 54 bp, Artificial
  Synthetic oligonucleotide
aagtctgctagctgtggtctgaagccccggctaaatcgcaagcccaataacgtt

SEQ ID NO: 205634 - DNA, 54 bp, Artificial
  Synthetic oligonucleotide
cctatcacggttgataggggttcttcggggaatatatgcctcgtttcatgcgcg

SEQ ID NO: 205635 - DNA, 54 bp, Artificial
  Synthetic oligonucleotide
gtttactaggatgctgtgtgcatcgacgagctaggaaaacctgagactatcttc

SEQ ID NO: 205636 - DNA, 53 bp, Artificial
  Synthetic oligonucleotide
ttcccgaggaagaaccgtcgtcagaaccgttcagcaggtcatcggagggccaa

SEQ ID NO: 205637 - DNA, 53 bp, Artificial
  Synthetic oligonucleotide
ttgcatagtcagttcgaatgaatagtccacgatctcgggacgccgagtcacgt

SEQ ID NO: 205638 - DNA, 53 bp, Artificial
  Synthetic oligonucleotide
ttcgctgcgacgtcgcactacaacccgaatgagaaatctttcccctcggtctg

SEQ ID NO: 205639 - DNA, 53 bp, Artificial
  Synthetic oligonucleotide
ctatgtttggcgtttgccattgttcagcgaaaactaactgttcagcggaatta

SEQ ID NO: 205640 - DNA, 53 bp, Artificial
  Synthetic oligonucleotide
ttttgtgagcggtcacgaaggttatctgcctgggttcccgggtacaggtggct

SEQ ID NO: 205641 - DNA, 53 bp, Artificial
  Synthetic oligonucleotide
tttcgggcggtcacccacacgaccatagggatcatcacagcccagactgtcat

SEQ ID NO: 205642 - DNA, 60 bp, Artificial
  Synthetic oligonucleotide
taaagcttctagcagcgatgccacattggccgtctctgctagatcgactggccgcctgcc

SEQ ID NO: 205643 - DNA, 53 bp, Artificial
  Synthetic oligonucleotide
tgttcggtctgttccgctgaggctgcgccggtaggccggggagagcttttcct

SEQ ID NO: 205644 - DNA, 53 bp, Artificial
  Synthetic oligonucleotide
ggcccgcgtaacccatcttcttctcgtaccgcctcaccaagcatggaagacgt

SEQ ID NO: 205645 - DNA, 53 bp, Artificial
  Synthetic oligonucleotide
ggggactccagtgctgtcaagtcattgggcggcccgcttacgggacacgatta

SEQ ID NO: 205646 - DNA, 53 bp, Artificial
  Synthetic oligonucleotide
ggggtacgcgtgcattaccgagtttatcgtgtctgcgtggtgtacgcatgcgt

SEQ ID NO: 205647 - DNA, 53 bp, Artificial
  Synthetic oligonucleotide
ggtaagtcgtattgccgcttgggtatcgagggaacgtgcgcgtgaaatatagg

SEQ ID NO: 205648 - DNA, 53 bp, Artificial
  Synthetic oligonucleotide
gacaagggtttgtgcacattgttcagactgtgattgtctgacctgttgtaaag

SEQ ID NO: 205649 - DNA, 53 bp, Artificial
  Synthetic oligonucleotide
gacaacgcatattggcgatcctgatttctgtcgagccgggtatgcccaaagcc

SEQ ID NO: 205650 - DNA, 53 bp, Artificial
  Synthetic oligonucleotide
ggacttgcggttgcctgtcgacaaggctgacgcgtgggacgcattgtgtgagg

SEQ ID NO: 205651 - DNA, 53 bp, Artificial
  Synthetic oligonucleotide
gtatagtcacgccctgcacaataaaggcaccttacctaactcaaatggatgta

SEQ ID NO: 205652 - DNA, 53 bp, Artificial
  Synthetic oligonucleotide
gagcgcccgtctgcgctagccctcagggcactgacgaaaacgaggatctaacc

SEQ ID NO: 205653 - DNA, 56 bp, Artificial
  Synthetic oligonucleotide
taactaggtggataattttcactgatcctctaaatcccgcggattactagggcaaa

SEQ ID NO: 205654 - DNA, 53 bp, Artificial
  Synthetic oligonucleotide
gtccattaaggggcgcgctaactagccaccgaattcgcacgttccagaagagt

SEQ ID NO: 205655 - DNA, 53 bp, Artificial
  Synthetic oligonucleotide
ggaccaacaaacggtcaccgtcgtagggacaaacgctgccacgatcgtgctgc

SEQ ID NO: 205656 - DNA, 53 bp, Artificial
  Synthetic oligonucleotide
gataatccaggcgggccaagtgaaaatactcgctgacctgtaccccaagagcc

SEQ ID NO: 205657 - DNA, 53 bp, Artificial
  Synthetic oligonucleotide
cttggttctgggacggctactttgtacgcaggggtgtggacctgacgcacaaa

SEQ ID NO: 205658 - DNA, 53 bp, Artificial
  Synthetic oligonucleotide
gtttacggtccgtcggggtctctggatgcaacggattctctcgatgccgcgag

SEQ ID NO: 205659 - DNA, 53 bp, Artificial
  Synthetic oligonucleotide
taagactagacgctggtcttagcccaagaaatcctagctaccaagcagctcgg

SEQ ID NO: 205660 - DNA, 53 bp, Artificial
  Synthetic oligonucleotide
taatagtgcatggccgtaggcgcagcatcgttcagaaacggattcttgacggc

SEQ ID NO: 205661 - DNA, 53 bp, Artificial
  Synthetic oligonucleotide
tagccaggggatgctatcgcccctgttcctaacgtcatttagatagccactgt

SEQ ID NO: 205662 - DNA, 53 bp, Artificial
  Synthetic oligonucleotide
taggcgatcggttacggcgctactagcccaagacgcgtgtcgactcgggcggc

SEQ ID NO: 205663 - DNA, 53 bp, Artificial
  Synthetic oligonucleotide
tcctcactgacgccgaagctcgatacgaggcagcattcggaatccagccggca

SEQ ID NO: 205664 - DNA, 57 bp, Artificial
  Synthetic oligonucleotide
ggtatgcggaggccggcccggtgttacggaccggtgaccctgagcagtgatggctag

SEQ ID NO: 205665 - DNA, 53 bp, Artificial
  Synthetic oligonucleotide
tcgatgtgtgctcgtggccaacctgcattgagatgaacttggtgtcatatccg

SEQ ID NO: 205666 - DNA, 53 bp, Artificial
  Synthetic oligonucleotide
tcgggcgtgtctgtacccgtcgtctcatgtgccatgcgcccagtctctcacgg

SEQ ID NO: 205667 - DNA, 53 bp, Artificial
  Synthetic oligonucleotide
tctaagaacagttacggcaacgatccgcggaacgtcccgggctgattgctgag

SEQ ID NO: 205668 - DNA, 53 bp, Artificial
  Synthetic oligonucleotide
gccggccaaagaggcatttatgtgaccatgatgactgatgtgggcccgagggg

SEQ ID NO: 205669 - DNA, 53 bp, Artificial
  Synthetic oligonucleotide
ctcgcccacgctgttcaataagaatgttctcggtcatagcgtccctcgcctcc

SEQ ID NO: 205670 - DNA, 53 bp, Artificial
  Synthetic oligonucleotide
atccaacgccggcgatttgctggttagactgcgaagccaccacttgcctgttt

SEQ ID NO: 205671 - DNA, 53 bp, Artificial
  Synthetic oligonucleotide
ccttccctcgcacttgagctattacgcccggtgggccgaaagttgggagttcc

SEQ ID NO: 205672 - DNA, 53 bp, Artificial
  Synthetic oligonucleotide
agatgcgcttttattcctgtcccgtagcttattttatgcctcgactaggtgtt

SEQ ID NO: 205673 - DNA, 53 bp, Artificial
  Synthetic oligonucleotide
cggatctcccgtccatgctcctgccgcgtttcctcacgtgttccatactcgtc

SEQ ID NO: 205674 - DNA, 53 bp, Artificial
  Synthetic oligonucleotide
cggctgtgcggtggtcacagagagccgtcgtctcggagagcagaacgttcggc

SEQ ID NO: 205675 - DNA, 59 bp, Artificial
  Synthetic oligonucleotide
acgattgcactctacaggtacgctccgaagtggctcctgatgaaattggggcttacatt

SEQ ID NO: 205676 - DNA, 53 bp, Artificial
  Synthetic oligonucleotide
attaccatcaattcgtaaggacgcatatgtgaacccacctcctttgggctaag

SEQ ID NO: 205677 - DNA, 53 bp, Artificial
  Synthetic oligonucleotide
ccctgtccacttttgtgagtcgagcggtttcccggttacgcgtcacaacaaaa

SEQ ID NO: 205678 - DNA, 53 bp, Artificial
  Synthetic oligonucleotide
acttggtcttagaaggtgcgcgttagccataggaaaggggcaggcgacctagt

SEQ ID NO: 205679 - DNA, 53 bp, Artificial
  Synthetic oligonucleotide
cgggctatgaactgccccgatccatgttctaggctgatccccacggccgcccc

SEQ ID NO: 205680 - DNA, 53 bp, Artificial
  Synthetic oligonucleotide
actcctgttgaagtgcatcgaagtactcctgacccaagggggtaagccggaag

SEQ ID NO: 205681 - DNA, 53 bp, Artificial
  Synthetic oligonucleotide
accaggtggtcagagagttctggcgtaatcgccagtcggtaatcgcgagccta

SEQ ID NO: 205682 - DNA, 53 bp, Artificial
  Synthetic oligonucleotide
cgtaacccttgggaaacgagacgcctcaccgaggcaatggacgtctgacctgc

SEQ ID NO: 205683 - DNA, 53 bp, Artificial
  Synthetic oligonucleotide
acggagagtgcagtccaagcgggcagtaacgggtgtaatacctctttatggcc

SEQ ID NO: 205684 - DNA, 52 bp, Artificial
  Synthetic oligonucleotide
cctttcattagtgccgtgtaggcgatgggcgttccttccccgcttaccattt

SEQ ID NO: 205685 - DNA, 52 bp, Artificial
  Synthetic oligonucleotide
aactaacgaatgggtgatcttcataggtcttactatacctatgtagacttga

SEQ ID NO: 205686 - DNA, 57 bp, Artificial
  Synthetic oligonucleotide
ggtaataagagccgctttgccgtcctgccggacattaggtgcggccctcaggtaggc

SEQ ID NO: 205687 - DNA, 52 bp, Artificial
  Synthetic oligonucleotide
atccgctcgtgtccggcgaagttggattcaatgaattcggacgttgctgttc

SEQ ID NO: 205688 - DNA, 52 bp, Artificial
  Synthetic oligonucleotide
atcgatgttttgcgctcggggcaagcacagaagctgagtatcgagccgaaaa

SEQ ID NO: 205689 - DNA, 52 bp, Artificial
  Synthetic oligonucleotide
gacaaaattcgacggcccctgtaacgtctctcatgtagcgcgtctcacgtga

SEQ ID NO: 205690 - DNA, 52 bp, Artificial
  Synthetic oligonucleotide
tgttggcaggagacacggcgcaggcatacggcaaaatgaccggcttagtgga

SEQ ID NO: 205691 - DNA, 52 bp, Artificial
  Synthetic oligonucleotide
atcgctgcacccctctgaaggccgcgaggactggggctacaacggcattgtt

SEQ ID NO: 205692 - DNA, 52 bp, Artificial
  Synthetic oligonucleotide
cctgacgtcaggttggggttgtaagcatttgacgactcacgtcccatgaacc

SEQ ID NO: 205693 - DNA, 52 bp, Artificial
  Synthetic oligonucleotide
tgcaagtacggtctggacaagttcttaggctaaatgcaggccggcaacgggg

SEQ ID NO: 205694 - DNA, 52 bp, Artificial
  Synthetic oligonucleotide
ccggatggtcaggacgttttgctcgacgtttacgtcaatggatccagggtcg

SEQ ID NO: 205695 - DNA, 52 bp, Artificial
  Synthetic oligonucleotide
tgccttcactggtgtggctggtcattgaatgtcctcctcgacattgataact

SEQ ID NO: 205696 - DNA, 52 bp, Artificial
  Synthetic oligonucleotide
catgcccaatcagttgactgtcggaaaacctcgatacggaagcctctcaacc

SEQ ID NO: 205697 - DNA, 57 bp, Artificial
  Synthetic oligonucleotide
cctcgtcgtgaggttgactgtgaccccagaactcgatccgacgtgggaggtcgtgcg

SEQ ID NO: 205698 - DNA, 52 bp, Artificial
  Synthetic oligonucleotide
ccattcccgaacccttcgccggcttgcttcgagagcaccttaaaggccgtcc

SEQ ID NO: 205699 - DNA, 52 bp, Artificial
  Synthetic oligonucleotide
tgtacgcccaggccccttcttcgatgtcagggttgttcccggtgtatgggga

SEQ ID NO: 205700 - DNA, 52 bp, Artificial
  Synthetic oligonucleotide
gataaacggtaccgcacaccgcggtatcaagccggatgatgccgtttagctg

SEQ ID NO: 205701 - DNA, 52 bp, Artificial
  Synthetic oligonucleotide
ccgccccgaggtaccacaaggtgccttgggtcctacgtatggaagaggtgcg

SEQ ID NO: 205702 - DNA, 52 bp, Artificial
  Synthetic oligonucleotide
attaccgccctcaacgctcggacccaccctgaaagcaaccgaaacgtcgcta

SEQ ID NO: 205703 - DNA, 52 bp, Artificial
  Synthetic oligonucleotide
cacgagccaaaacacccatccaacagcgggaaatacggccagttccgcgggt

SEQ ID NO: 205704 - DNA, 52 bp, Artificial
  Synthetic oligonucleotide
ccccgaacgtatccccacttcattggacgtgcaactacttgggcgcacgacg

SEQ ID NO: 205705 - DNA, 52 bp, Artificial
  Synthetic oligonucleotide
gaggacacttttgcgttacgtcaagcaaaagttgcgtgttcaattcgtactt

SEQ ID NO: 205706 - DNA, 52 bp, Artificial
  Synthetic oligonucleotide
tgctgacggaaaactcttccgaaatggatccgaacaccgactcttaggcggc

SEQ ID NO: 205707 - DNA, 52 bp, Artificial
  Synthetic oligonucleotide
cacattggtctacaccgcccgccatcaaggctcaccgatcccactatgctta

SEQ ID NO: 205708 - DNA, 56 bp, Artificial
  Synthetic oligonucleotide
tacacgttggtctttcctgaaggtacgaagttcgatggtgagtcattggtccttcc

SEQ ID NO: 205709 - DNA, 52 bp, Artificial
  Synthetic oligonucleotide
tgcttcgcccacaacggatgaacagggcttaaccgcggaatcgtgccgtgag

SEQ ID NO: 205710 - DNA, 52 bp, Artificial
  Synthetic oligonucleotide
ggtgtagggctgccggtaggtaaatccgccggctgtatgcctgagacctgat

SEQ ID NO: 205711 - DNA, 52 bp, Artificial
  Synthetic oligonucleotide
ggtgtgggcaagacagaatgcgggatccacctgtgagcaccacgactgcccc

SEQ ID NO: 205712 - DNA, 52 bp, Artificial
  Synthetic oligonucleotide
cgttcgttgtggcggccccgcttgtctgctggtccagggtctatctccggga

SEQ ID NO: 205713 - DNA, 52 bp, Artificial
  Synthetic oligonucleotide
acccgtttgaaacatgcctacgattatagttgtccttcagatcctcataacg

SEQ ID NO: 205714 - DNA, 52 bp, Artificial
  Synthetic oligonucleotide
ctcctcggatctcaaggtatccgatcctaaggaagtaccttacggaaacggc

SEQ ID NO: 205715 - DNA, 52 bp, Artificial
  Synthetic oligonucleotide
acggtgtagcgactaccgtctcctactacttgtcgcgacgttttacgttcgg

SEQ ID NO: 205716 - DNA, 52 bp, Artificial
  Synthetic oligonucleotide
cgggcatcttcgcacaaatggcaattgggttttaccagcaaaatcacggcgt

SEQ ID NO: 205717 - DNA, 52 bp, Artificial
  Synthetic oligonucleotide
ctggcctcactcggtaatgagggttgtggctaggctgtgccataacgatgcc

SEQ ID NO: 205718 - DNA, 52 bp, Artificial
  Synthetic oligonucleotide
agccttcgcacggagaggtgcggccaaaggccggtaggctaggagacgcagt

SEQ ID NO: 205719 - DNA, 56 bp, Artificial
  Synthetic oligonucleotide
ccgtcaaccagcagaagaaccggcacatagaaaccgacactgggtttcgctacaaa

SEQ ID NO: 205720 - DNA, 52 bp, Artificial
  Synthetic oligonucleotide
aggacacgcgacaatgcgcaaaatccatttgcgctaatcgtctatcgactaa

SEQ ID NO: 205721 - DNA, 52 bp, Artificial
  Synthetic oligonucleotide
agtagatctccgccgtgtccaggacttcatggaagtgacccttggtcatgtg

SEQ ID NO: 205722 - DNA, 52 bp, Artificial
  Synthetic oligonucleotide
ggaccagccaatacgaaccccacgcatgtcagtctccaggctggaccgaaaa

SEQ ID NO: 205723 - DNA, 52 bp, Artificial
  Synthetic oligonucleotide
aattctaccggccgtagaacaactcgcaccagcccgggtactcacggggcca

SEQ ID NO: 205724 - DNA, 51 bp, Artificial
  Synthetic oligonucleotide
caagcaacaacgtcggtcaggttgtatgcgggggtagcagcggtgacccac

SEQ ID NO: 205725 - DNA, 51 bp, Artificial
  Synthetic oligonucleotide
atccctcggccttgctctgaaggtgatgcgggtcctcggtctagacatcac

SEQ ID NO: 205726 - DNA, 51 bp, Artificial
  Synthetic oligonucleotide
aaggcgagtcgtgagcgtgattgtcggtccccgtgtgatagatgcgggcgt

SEQ ID NO: 205727 - DNA, 51 bp, Artificial
  Synthetic oligonucleotide
cacccggcgagtcggcaggtgggctcaaatcaaaccaggcggattctaacc

SEQ ID NO: 205728 - DNA, 48 bp, Artificial
  Synthetic oligonucleotide
acccggttacgggggttgacgttcgttggttgcgagaacccggccaaa

SEQ ID NO: 205729 - DNA, 51 bp, Artificial
  Synthetic oligonucleotide
accggggaccgcggggaagtcctggtcgacgggagccttcgcagtactaat

SEQ ID NO: 205730 - DNA, 56 bp, Artificial
  Synthetic oligonucleotide
tgttgaccactaatgccctttgacacggacacgttaagttttgtcctgacctatgg

SEQ ID NO: 205731 - DNA, 51 bp, Artificial
  Synthetic oligonucleotide
tcttcaccgtgttcagttatcaggtcgtactctcggtaacccaagaacgtg

SEQ ID NO: 205732 - DNA, 51 bp, Artificial
  Synthetic oligonucleotide
acgcccccacatggagctccccgagcacgggagaatggccctatgcccacc

SEQ ID NO: 205733 - DNA, 51 bp, Artificial
  Synthetic oligonucleotide
cagtaccgaaatgacgatatggcgtcgggtcgattcgccctcagattccga

SEQ ID NO: 205734 - DNA, 51 bp, Artificial
  Synthetic oligonucleotide
acgcatgagaaccagtaagcagtatcgattgaccggaggcgcaagtgtttt

SEQ ID NO: 205735 - DNA, 51 bp, Artificial
  Synthetic oligonucleotide
accgtgttgagagctcggccgaaggatccggtgtacccagaggcggaccag

SEQ ID NO: 205736 - DNA, 51 bp, Artificial
  Synthetic oligonucleotide
tatggatccagtgtgtcccgcgggacctgagaggacccttaacccggttga

SEQ ID NO: 205737 - DNA, 51 bp, Artificial
  Synthetic oligonucleotide
tgagggacagataccgtcgtattccgcacaaacacaacgaaaggacatagg

SEQ ID NO: 205738 - DNA, 51 bp, Artificial
  Synthetic oligonucleotide
ggtgttcgctgaagcccacaccatgggagattcctttgagcccgactgcgc

SEQ ID NO: 205739 - DNA, 51 bp, Artificial
  Synthetic oligonucleotide
aatccgtgtcgttaaggctgatgaggctgtcacctacaaaccgtgccgcgt

SEQ ID NO: 205740 - DNA, 51 bp, Artificial
  Synthetic oligonucleotide
agctgaaccggcaacggtggacgcactccggggatggggtaccaccactac

SEQ ID NO: 205741 - DNA, 60 bp, Artificial
  Synthetic oligonucleotide
gacagagaaaccgactcaccctcggatacggacgagctgtcaggaaggaccaatgactca

SEQ ID NO: 205742 - DNA, 60 bp, Artificial
  Synthetic oligonucleotide
atcgcgtgtgcggtgccaccggagcatccaaggtgttcagtcatccggcgagtgtagtgg

SEQ ID NO: 205743 - DNA, 51 bp, Artificial
  Synthetic oligonucleotide
acaccgcctcgggtaccaccaacaccgtctctgacggctcctcctactcgg

SEQ ID NO: 205744 - DNA, 51 bp, Artificial
  Synthetic oligonucleotide
atgaggggcggaacctgtcgggatcggtggctagagttgctccctgagcct

SEQ ID NO: 205745 - DNA, 51 bp, Artificial
  Synthetic oligonucleotide
taagagacggggccgccggaaattacacaattgcgtgaatgcattgccgca

SEQ ID NO: 205746 - DNA, 50 bp, Artificial
  Synthetic oligonucleotide
ggcaataccctggaccggacccgcttggttttaagggaaccccggtcaga

SEQ ID NO: 205747 - DNA, 51 bp, Artificial
  Synthetic oligonucleotide
accaaagtcggggtaatcatcggaatgaagccgtagctagtcgcctgatct

SEQ ID NO: 205748 - DNA, 51 bp, Artificial
  Synthetic oligonucleotide
gccttagcgtgtttgttttagtcggtattctcgacacgcgggtggcgctta

SEQ ID NO: 205749 - DNA, 51 bp, Artificial
  Synthetic oligonucleotide
tcccctaggaccggctctgacgatttctcccgtatcctcgtggaggtcccc

SEQ ID NO: 205750 - DNA, 51 bp, Artificial
  Synthetic oligonucleotide
tcccgccattcaaagatagccccccgtcattcaaagatactttccccccat

SEQ ID NO: 205751 - DNA, 51 bp, Artificial
  Synthetic oligonucleotide
atcccgctcgctcacgtccatcacataggcgtcagtcagtcactctggcaa

SEQ ID NO: 205752 - DNA, 51 bp, Artificial
  Synthetic oligonucleotide
ggccgcgcatattggatcgggccacgagaacgacacggacaggattgtttt

SEQ ID NO: 205753 - DNA, 56 bp, Artificial
  Synthetic oligonucleotide
atcggcggccgtagagttggctgactcaggttttggtccgacgccttagagcgacc

SEQ ID NO: 205754 - DNA, 51 bp, Artificial
  Synthetic oligonucleotide
ggccgttcgccctgcttgggccgctccgctacggagtacccgacaatcacg

SEQ ID NO: 205755 - DNA, 51 bp, Artificial
  Synthetic oligonucleotide
agacggtcccaatcgggtccgttggacacaagcgtcggagggtctaagacg

SEQ ID NO: 205756 - DNA, 51 bp, Artificial
  Synthetic oligonucleotide
agacgatgcaagcaacaacgtcggtcaggttgtatgcgggggtagcagcgg

SEQ ID NO: 205757 - DNA, 51 bp, Artificial
  Synthetic oligonucleotide
attcacatcgacggatgtgagcacaaccgaatcgatcctgcatcggtacgg

SEQ ID NO: 205758 - DNA, 51 bp, Artificial
  Synthetic oligonucleotide
tcgaggtggcatcgactcttggagtactaaggtcgctcagcattgagcgca

SEQ ID NO: 205759 - DNA, 51 bp, Artificial
  Synthetic oligonucleotide
caacgttccggaccgtcggcaatccggtaactgtacctccgccacaacgct

SEQ ID NO: 205760 - DNA, 51 bp, Artificial
  Synthetic oligonucleotide
aaccgaaggaacctcagtcaccgggttctcaggggtgctcacccacggagc

SEQ ID NO: 205761 - DNA, 51 bp, Artificial
  Synthetic oligonucleotide
tggctcacagaaataccttcctcggttcagccgcatacgtcctcgtatgcg

SEQ ID NO: 205762 - DNA, 51 bp, Artificial
  Synthetic oligonucleotide
ctttgacgcgcttctccaaccaagcggatagcgctaattcgatcttcctgg

SEQ ID NO: 205763 - DNA, 51 bp, Artificial
  Synthetic oligonucleotide
aaacgcggttcttgtgggaggtccggggcaaggcaagtcaacggtgctcca

SEQ ID NO: 205764 - DNA, 60 bp, Artificial
  Synthetic oligonucleotide
gccagcgttctgatttcactggtcaagagttcacgtatctcgatgtaggactccctgtac

SEQ ID NO: 205765 - DNA, 51 bp, Artificial
  Synthetic oligonucleotide
gacgtactcgcaaacaattccaagtggcttaacttcaccactgtccgcaac

SEQ ID NO: 205766 - DNA, 51 bp, Artificial
  Synthetic oligonucleotide
ttctgtcggaatttgctagccgtgtaccgcgaatattggacctattcaccc

SEQ ID NO: 205767 - DNA, 51 bp, Artificial
  Synthetic oligonucleotide
cgcctccggccctaccggtttcgggtggtcagacactgtggtgtggaatgc

SEQ ID NO: 205768 - DNA, 51 bp, Artificial
  Synthetic oligonucleotide
tttaacctccatcgaagcctccctgaacgacacaaaccgcctctggcatgc

SEQ ID NO: 205769 - DNA, 51 bp, Artificial
  Synthetic oligonucleotide
gaagcccacaccatgggagattcctttgagcccgactgcgcggagcatgac

SEQ ID NO: 205770 - DNA, 51 bp, Artificial
  Synthetic oligonucleotide
ccccaaccggagccctctatgctgccgcgaacctaatcgccatgacgtctg

SEQ ID NO: 205771 - DNA, 51 bp, Artificial
  Synthetic oligonucleotide
tgtaccaggagttctccccgcagggagtgaagttcctcgggattaacgtcc

SEQ ID NO: 205772 - DNA, 51 bp, Artificial
  Synthetic oligonucleotide
ccaggagccctgtccgggccttcctggtgcatcctgaacgattgagggcca

SEQ ID NO: 205773 - DNA, 51 bp, Artificial
  Synthetic oligonucleotide
cgtgtggcatgctcgaaggcgtaagcagcaggatgtttacaccccggggca

SEQ ID NO: 205774 - DNA, 51 bp, Artificial
  Synthetic oligonucleotide
aacgttccccagagctcggcaactgcacaaccgtggccagctcaatttcta

SEQ ID NO: 205775 - DNA, 53 bp, Artificial
  Synthetic oligonucleotide
atcggtgggatacgaggcctaatcgaaagccttaagaatcgtttgtcccctat

SEQ ID NO: 205776 - DNA, 51 bp, Artificial
  Synthetic oligonucleotide
ttctttagcgtaatacactacttcgtgttctgtcggtgggatgtctccgat

SEQ ID NO: 205777 - DNA, 50 bp, Artificial
  Synthetic oligonucleotide
aacacgtctccgagcactgaaagccacgcattgacgcgtccccgctgttc

SEQ ID NO: 205778 - DNA, 50 bp, Artificial
  Synthetic oligonucleotide
aacagcgaaggactgacgttcatggccagggacccgggttcatagctgcc

SEQ ID NO: 205779 - DNA, 50 bp, Artificial
  Synthetic oligonucleotide
acagtccggcgtgtggagcccacactcgttcctagggcaagtacacggca

SEQ ID NO: 205780 - DNA, 50 bp, Artificial
  Synthetic oligonucleotide
accacagtggaggcgagcactgcggaacggggcacaccgctgcgctcaat

SEQ ID NO: 205781 - DNA, 50 bp, Artificial
  Synthetic oligonucleotide
aaccacccattgcccatccaggcctggcataagtccgtccacacgttggc

SEQ ID NO: 205782 - DNA, 50 bp, Artificial
  Synthetic oligonucleotide
acatcgctgtctgcgccggtgaagtctgttccggtctgcgaatcccggta

SEQ ID NO: 205783 - DNA, 50 bp, Artificial
  Synthetic oligonucleotide
accacaactggcagcgggggactgccttggggtgaagtccgtcagcagca

SEQ ID NO: 205784 - DNA, 50 bp, Artificial
  Synthetic oligonucleotide
aaccacttccgacaacgatggggccagcagtggggtcgccacctcgcctc

SEQ ID NO: 205785 - DNA, 50 bp, Artificial
  Synthetic oligonucleotide
gtggtgcattgtcggcgttatcctcccttccgtgggagggatcgggttcg

SEQ ID NO: 205786 - DNA, 58 bp, Artificial
  Synthetic oligonucleotide
atctgatttggcacatgactgaagctacgccgcttgggtttactaccctgtgggccgg

SEQ ID NO: 205787 - DNA, 50 bp, Artificial
  Synthetic oligonucleotide
aaccatggcagcagtgtgtcgggcgactaaaccggtgtccgcgccaaacg

SEQ ID NO: 205788 - DNA, 50 bp, Artificial
  Synthetic oligonucleotide
aatgccctccgcttgtgactcgacaacggcagaaggccagatgtccccct

SEQ ID NO: 205789 - DNA, 50 bp, Artificial
  Synthetic oligonucleotide
aatgcctagcagggaagtggatcgggggaccagggctactccgcgcctcg

SEQ ID NO: 205790 - DNA, 50 bp, Artificial
  Synthetic oligonucleotide
aattaccggcggacgccaaccaccccactttgacgcagacgtccttgtct

SEQ ID NO: 205791 - DNA, 50 bp, Artificial
  Synthetic oligonucleotide
taacatcgttagcgtcccttcgtccaaacgatgcggattagtcgaggaca

SEQ ID NO: 205792 - DNA, 50 bp, Artificial
  Synthetic oligonucleotide
aattcgactctcagccatccgcaggatccgcctccgccccaagctcgatc

SEQ ID NO: 205793 - DNA, 50 bp, Artificial
  Synthetic oligonucleotide
aaccagtggactcggcgggcgctcagggaagttcagcaaacgactgcgct

SEQ ID NO: 205794 - DNA, 50 bp, Artificial
  Synthetic oligonucleotide
ttcgtgattgcatgtgtccccctcacatctgctcgtcggctgcttcgcct

SEQ ID NO: 205795 - DNA, 50 bp, Artificial
  Synthetic oligonucleotide
aattgcattcctgagccctctgaggtgccgtggaacaaccgcgcagctcc

SEQ ID NO: 205796 - DNA, 50 bp, Artificial
  Synthetic oligonucleotide
aaccaggttcgcccggacggcttgtaccaggccaacgttagcgtcctagg

SEQ ID NO: 205797 - DNA, 60 bp, Artificial
  Synthetic oligonucleotide
atcttacgccgctgcttccgccgagtgagcccaagaagttctatagtgcagctatcgacg

SEQ ID NO: 205798 - DNA, 50 bp, Artificial
  Synthetic oligonucleotide
aatttgggaccgtttcgccagtacgccggacgaggccactgcaccacgtc

SEQ ID NO: 205799 - DNA, 50 bp, Artificial
  Synthetic oligonucleotide
gtttcgcactcgtcttccagcatcggccaggttccgaggccaagccgggg

SEQ ID NO: 205800 - DNA, 50 bp, Artificial
  Synthetic oligonucleotide
aaccagcaccggggtgcaacgcacattccatgggcaccacatcaggagga

SEQ ID NO: 205801 - DNA, 50 bp, Artificial
  Synthetic oligonucleotide
acacctacggttcgctcctagatccagcgccgaagcacacggttgcccac

SEQ ID NO: 205802 - DNA, 50 bp, Artificial
  Synthetic oligonucleotide
acacctgtggcacaatggacgggtactcgaaccgtgcggaccctctcacc

SEQ ID NO: 205803 - DNA, 50 bp, Artificial
  Synthetic oligonucleotide
acacgggggttggctgcgtcacacgatgaggtcatgaattcggcacagcg

SEQ ID NO: 205804 - DNA, 50 bp, Artificial
  Synthetic oligonucleotide
acagcctttggcgccgaaccttttagccagctcgccaggacttgctccgc

SEQ ID NO: 205805 - DNA, 50 bp, Artificial
  Synthetic oligonucleotide
aaaccgtacgccgatccggggccacaccgaagtccaaccccgcgaaggct

SEQ ID NO: 205806 - DNA, 50 bp, Artificial
  Synthetic oligonucleotide
accctggttagcaggctcgtcctgagcccacacaacgtcggtagcgttcg

SEQ ID NO: 205807 - DNA, 50 bp, Artificial
  Synthetic oligonucleotide
accgaagaagctcttggccgccagtctgaagcggtcaggacgatgtccct

SEQ ID NO: 205808 - DNA, 53 bp, Artificial
  Synthetic oligonucleotide
cgtcagagacggtcctaaaccgggccgttggacacaagtgtcggagggtctaa

SEQ ID NO: 205809 - DNA, 50 bp, Artificial
  Synthetic oligonucleotide
accgcctaatcccggaccttcgtcgtggggtgtttacggtaggtcgcggc

SEQ ID NO: 205810 - DNA, 50 bp, Artificial
  Synthetic oligonucleotide
aaaccgggagtgatgagcgcgccctgcaagtcaataacgcgcatcttggc

SEQ ID NO: 205811 - DNA, 50 bp, Artificial
  Synthetic oligonucleotide
aaacccactgccacgaacacgcagtcttcgggtcgggctcccagaaacgg

SEQ ID NO: 205812 - DNA, 50 bp, Artificial
  Synthetic oligonucleotide
aaaccacggcgtccacggtgctcgaatcgccaacgatatagcccaagcga

SEQ ID NO: 205813 - DNA, 50 bp, Artificial
  Synthetic oligonucleotide
accgtaggttcaggggttggttccggagtcggctccaccgtaggttccga

SEQ ID NO: 205814 - DNA, 50 bp, Artificial
  Synthetic oligonucleotide
accgtgcccaaagccgggcaccaaacccctgggagtatcagtggtagcac

SEQ ID NO: 205815 - DNA, 50 bp, Artificial
  Synthetic oligonucleotide
aaacaatccaggaacgaaccctggcggcaatccaggtaccaaccccggta

SEQ ID NO: 205816 - DNA, 50 bp, Artificial
  Synthetic oligonucleotide
aaaagttgcatcgcgcagggggtccgagcaagccagctgcagggcaacta

SEQ ID NO: 205817 - DNA, 50 bp, Artificial
  Synthetic oligonucleotide
aaaactacaccctgcccaacgttcccggcccggtcagccaacctgcatac

SEQ ID NO: 205818 - DNA, 50 bp, Artificial
  Synthetic oligonucleotide
accgtttccggcgctgcgacctggggcgagctcttcttgcctgcgttggt

SEQ ID NO: 205819 - DNA, 58 bp, Artificial
  Synthetic oligonucleotide
ctactgggccacgggccgaagcttcgatatgcgccatgttcctggtccggtctacgta

SEQ ID NO: 205820 - DNA, 50 bp, Artificial
  Synthetic oligonucleotide
aaaacctagaggtactgggggctgacacgactccggcaccgggcgctttt

SEQ ID NO: 205821 - DNA, 50 bp, Artificial
  Synthetic oligonucleotide
accacgccgagaggttcgtggaaggttagtgccacccctccggcaaccgg

SEQ ID NO: 205822 - DNA, 50 bp, Artificial
  Synthetic oligonucleotide
aacaacatcctggtctcgcctcacgcctccggtgacctgattggatggcg

SEQ ID NO: 205823 - DNA, 50 bp, Artificial
  Synthetic oligonucleotide
aacaacacgcgttcgatgcagggcggaacctggcacagaaccgggccaca

SEQ ID NO: 205824 - DNA, 50 bp, Artificial
  Synthetic oligonucleotide
aaaggtctcggctgacgctgaggacaccgttgcccagctggcttctaccc

SEQ ID NO: 205825 - DNA, 50 bp, Artificial
  Synthetic oligonucleotide
accagagttggtggacctgagggacgcgttttggacgagcgtgtagccct

SEQ ID NO: 205826 - DNA, 50 bp, Artificial
  Synthetic oligonucleotide
accagcatccgtgacgtagcgtcgcacagctgagtcggtccagcccgcct

SEQ ID NO: 205827 - DNA, 50 bp, Artificial
  Synthetic oligonucleotide
accaggtctcccgtcggaggacgcactcaagttcgcttccgtgatggacc

SEQ ID NO: 205828 - DNA, 50 bp, Artificial
  Synthetic oligonucleotide
aaaggactcgctcaatcgtgttgccaccctggtacggcatttgcccgcag

SEQ ID NO: 205829 - DNA, 50 bp, Artificial
  Synthetic oligonucleotide
gtgatttgtcgtgggctggggttttccgttgacgcagcgggagctcctgt

SEQ ID NO: 205830 - DNA, 60 bp, Artificial
  Synthetic oligonucleotide
atgccgaacgctgacatgcccagatacccgcggatctcccgtccatgctcctgccgcgtt

SEQ ID NO: 205831 - DNA, 50 bp, Artificial
  Synthetic oligonucleotide
acccagatgcaccggatcacggggtccctcgcgccttcgactttagagcc

SEQ ID NO: 205832 - DNA, 50 bp, Artificial
  Synthetic oligonucleotide
acccccgcctcggttttgtgacggttaccgatgcccgggtcacgaatgac

SEQ ID NO: 205833 - DNA, 50 bp, Artificial
  Synthetic oligonucleotide
gtgaccctgcggtaaccacgccggcctaaagaaacaggcaggacccggga

SEQ ID NO: 205834 - DNA, 50 bp, Artificial
  Synthetic oligonucleotide
acccgcggtgaggcccgaactgacttggcaggtgattatgggatcagccg

SEQ ID NO: 205835 - DNA, 50 bp, Artificial
  Synthetic oligonucleotide
acccggcaacgtggaacgtgttgaagtggggcgcgttgtagcagcctccg

SEQ ID NO: 205836 - DNA, 50 bp, Artificial
  Synthetic oligonucleotide
aaagcgagcgccactctacgacgagaagccgcggtgggtcagactccaga

SEQ ID NO: 205837 - DNA, 50 bp, Artificial
  Synthetic oligonucleotide
acccgggcgcctcatgcactgagacgcagccgtagagacgcttttcgacc

SEQ ID NO: 205838 - DNA, 50 bp, Artificial
  Synthetic oligonucleotide
tcggcgggaacgtccgaacttgtacgtgcgacgtccacagcgaggtttcc

SEQ ID NO: 205839 - DNA, 50 bp, Artificial
  Synthetic oligonucleotide
aaggcttcccgtggtgtccggccattaactgtgttctccgcctcgtgtct

SEQ ID NO: 205840 - DNA, 50 bp, Artificial
  Synthetic oligonucleotide
aacgtctgcgtttcgcatcagctccaagaccttcgcttgcccggtgggat

SEQ ID NO: 205841 - DNA, 60 bp, Artificial
  Synthetic oligonucleotide
atgcggctgagagcgaagcacgtcgaacttgtctgccgtctggtgatggacgtacttgga

SEQ ID NO: 205842 - DNA, 50 bp, Artificial
  Synthetic oligonucleotide
aagggtcctggacgcggatttccgatgcgtcactccctggggtctgctcc

SEQ ID NO: 205843 - DNA, 50 bp, Artificial
  Synthetic oligonucleotide
aaggtcaggtctccaacgagtaagcgagtcggcctagccgttgccaaggc

SEQ ID NO: 205844 - DNA, 50 bp, Artificial
  Synthetic oligonucleotide
aacgtcgctcaaaccgactccatgcacggtaggctccgctgccgagactg

SEQ ID NO: 205845 - DNA, 50 bp, Artificial
  Synthetic oligonucleotide
aacgtaaggggagtccgccgttcctgcctggttgcccgagcgtgaatagg

SEQ ID NO: 205846 - DNA, 50 bp, Artificial
  Synthetic oligonucleotide
aacggtgtaggtgcgtggaacctgggtactgggcaaggcacatccgttct

SEQ ID NO: 205847 - DNA, 50 bp, Artificial
  Synthetic oligonucleotide
aagtcccggacttcaccttcactcccccacgactggcaacctccgccctg

SEQ ID NO: 205848 - DNA, 50 bp, Artificial
  Synthetic oligonucleotide
tggtcctgccctcactacgaccgatacacaggcccgtcgcaaccttctga

SEQ ID NO: 205849 - DNA, 50 bp, Artificial
  Synthetic oligonucleotide
aacggtagacaaagggcactgacgcgactgccgttgatctggcagccagg

SEQ ID NO: 205850 - DNA, 50 bp, Artificial
  Synthetic oligonucleotide
aagtccgtgccgggaattcgactctcagccatccgcaggatccgcctccg

SEQ ID NO: 205851 - DNA, 50 bp, Artificial
  Synthetic oligonucleotide
aagtcgctgcagtgctccgcgtagttgccggagacctggacgggcagtga

SEQ ID NO: 205852 - DNA, 59 bp, Artificial
  Synthetic oligonucleotide
taggcggtattcgtccaaaagttatggcatgcttccgaactatttatcagcaaatcacc

SEQ ID NO: 205853 - DNA, 56 bp, Artificial
  Synthetic oligonucleotide
gccttcgcggcttggtcgtaccgtctcgaaagcacacctggaccgctggccgaaac

SEQ ID NO: 205854 - DNA, 50 bp, Artificial
  Synthetic oligonucleotide
tgtcgacgcagcgcaggtgcctatttggctcgatgtcccaccaggtacgc

SEQ ID NO: 205855 - DNA, 50 bp, Artificial
  Synthetic oligonucleotide
aacgccagtgcgtcctagcattggtgaaccgtcggtagcggtgaggcggg

SEQ ID NO: 205856 - DNA, 50 bp, Artificial
  Synthetic oligonucleotide
tgcaccagtcagttacctacacggcaaagctgtggttcggacagcgcata

SEQ ID NO: 205857 - DNA, 50 bp, Artificial
  Synthetic oligonucleotide
aactcgcgctagctcgtgcggcaaggaacgcggggatcagactggttctg

SEQ ID NO: 205858 - DNA, 50 bp, Artificial
  Synthetic oligonucleotide
aactggagaatgccggtaagtgagcacatggaaggaccggctgccgcgaa

SEQ ID NO: 205859 - DNA, 50 bp, Artificial
  Synthetic oligonucleotide
aacgttcacgtgacgcacgtacaagcctagccgttcggtccctgcatggg

SEQ ID NO: 205860 - DNA, 50 bp, Artificial
  Synthetic oligonucleotide
aactgtacttggccggtggtgaattgactttcgcccagggccgaatgggc

SEQ ID NO: 205861 - DNA, 50 bp, Artificial
  Synthetic oligonucleotide
aactttaggggatggcacggggagggccccttttgttgcctgcgaacagg

SEQ ID NO: 205862 - DNA, 50 bp, Artificial
  Synthetic oligonucleotide
aagaccggaggagcgttcatcaaggaaccgccactactgagcgcgcatcc

SEQ ID NO: 205863 - DNA, 50 bp, Artificial
  Synthetic oligonucleotide
aacgtgcgcacagcgcatccaacattcgtgcatcctaggggaagcgcgtc

SEQ ID NO: 205864 - DNA, 56 bp, Artificial
  Synthetic oligonucleotide
gccttccggtatggcgcccgaaacgttagcgactgcgtgggtgactcctgtcgcgg

SEQ ID NO: 205865 - DNA, 50 bp, Artificial
  Synthetic oligonucleotide
aagacggtctaaaaggccgggggttcgttccagctggcgcctgaaacgct

SEQ ID NO: 205866 - DNA, 50 bp, Artificial
  Synthetic oligonucleotide
aagcagcagcggagttcccgaagcaaagggggcaacaccgtgctcacggc

SEQ ID NO: 205867 - DNA, 50 bp, Artificial
  Synthetic oligonucleotide
aagcaggaataccgagtcgaatcgcagtcggctttgcgccaggtacgcct

SEQ ID NO: 205868 - DNA, 50 bp, Artificial
  Synthetic oligonucleotide
aagcccggtgccaggactcggcactcatggtcttcagcgctctgatcttg

SEQ ID NO: 205869 - DNA, 50 bp, Artificial
  Synthetic oligonucleotide
aagccggccggtcccactcttcctccacaacggcgtaaccagtcatggcc

SEQ ID NO: 205870 - DNA, 50 bp, Artificial
  Synthetic oligonucleotide
tcgtgatgctcattccaatctaccgcaccgaccgggcgaacccgtatccg

SEQ ID NO: 205871 - DNA, 50 bp, Artificial
  Synthetic oligonucleotide
aagcgacggttcagtgtgggcgtgggggtacaacggggagggccagcttg

SEQ ID NO: 205872 - DNA, 50 bp, Artificial
  Synthetic oligonucleotide
aacgtctgtacaggtgggagtcgtagcgcggatgccctcccgagccgaaa

SEQ ID NO: 205873 - DNA, 50 bp, Artificial
  Synthetic oligonucleotide
aaggaccttcaggctagcgtccacgccccgcatagtcagccccgttgtca

SEQ ID NO: 205874 - DNA, 50 bp, Artificial
  Synthetic oligonucleotide
tggagtgaccacgggttacgggagtgtacccgcgtacctcaaccttgggg

SEQ ID NO: 205875 - DNA, 55 bp, Artificial
  Synthetic oligonucleotide
cagggatacccctgccggtaggcttaagactctgaacaacctgcacggaagggag

SEQ ID NO: 205876 - DNA, 50 bp, Artificial
  Synthetic oligonucleotide
taggaagtcgatgtacccaggagcgactgcacggtaagcgcgacaggcct

SEQ ID NO: 205877 - DNA, 50 bp, Artificial
  Synthetic oligonucleotide
aatcccgggccgagtagcacgccgctcaatctgggacttctcgtcaatga

SEQ ID NO: 205878 - DNA, 50 bp, Artificial
  Synthetic oligonucleotide
aatccgcggaggcttacagcggtccccgtttgtgtgcgactcgccgagtc

SEQ ID NO: 205879 - DNA, 50 bp, Artificial
  Synthetic oligonucleotide
aatccgggctaagtcactggcgtcaccaaacgcatgccgagtccgcaaga

SEQ ID NO: 205880 - DNA, 50 bp, Artificial
  Synthetic oligonucleotide
aaccctcaacgggtggttcccagagtggcgcagtgtccccgaaacgggag

SEQ ID NO: 205881 - DNA, 50 bp, Artificial
  Synthetic oligonucleotide
tacttatcggctgtcttattgcataaatatgtggagaactccgtgtacct

SEQ ID NO: 205882 - DNA, 50 bp, Artificial
  Synthetic oligonucleotide
aatcgatgacgtgtgggcgtcgcacccggaggcatctcactgacgacaag

SEQ ID NO: 205883 - DNA, 50 bp, Artificial
  Synthetic oligonucleotide
aacccgaaggcttaaagcaaaacgtccccgggttgcgatgccaagtggct

SEQ ID NO: 205884 - DNA, 50 bp, Artificial
  Synthetic oligonucleotide
aaccccgccgattgcctaactggcaaagatgcgatgtgcccaagggctgc

SEQ ID NO: 205885 - DNA, 50 bp, Artificial
  Synthetic oligonucleotide
aatcgcggacatacccgaggcgcagagccgattaaccgttatgccgggaa

SEQ ID NO: 205886 - DNA, 56 bp, Artificial
  Synthetic oligonucleotide
ttcttccaaggcaatcgactggggatcaaagacccacaccgggccagtcttggccc

SEQ ID NO: 205887 - DNA, 50 bp, Artificial
  Synthetic oligonucleotide
aatcggcgctgaatgggctcaccgggaggtcagttgtgtccctccggtat

SEQ ID NO: 205888 - DNA, 50 bp, Artificial
  Synthetic oligonucleotide
aatctccgcttgaccgccgttaagtgccgcacgtacctcctgcgcagtac

SEQ ID NO: 205889 - DNA, 50 bp, Artificial
  Synthetic oligonucleotide
taccgacaagacacgtagaacgctggcactaggcatcctcggcgcactga

SEQ ID NO: 205890 - DNA, 50 bp, Artificial
  Synthetic oligonucleotide
aatctcggtgtgccatgaggagcgctggaacacgggttctccacccgacc

SEQ ID NO: 205891 - DNA, 50 bp, Artificial
  Synthetic oligonucleotide
aacccaactgagggacagcacctgcttgggtttacgtgaacgccccggct

SEQ ID NO: 205892 - DNA, 50 bp, Artificial
  Synthetic oligonucleotide
aatgaccgagcaacttcgcggttatccgtgcctggcatctctgcggccac

SEQ ID NO: 205893 - DNA, 50 bp, Artificial
  Synthetic oligonucleotide
aatgattccgaacatcacccgcggttcgcgcatgggtggcctgatggttt

SEQ ID NO: 205894 - DNA, 50 bp, Artificial
  Synthetic oligonucleotide
aacgcagctcgtggcgttatggttcgtgaactgcagaaacggtctggcgc

SEQ ID NO: 205895 - DNA, 50 bp, Artificial
  Synthetic oligonucleotide
aacgagcctgccagtacccgcaggatccgcccccggagaatactccgtcg

SEQ ID NO: 205896 - DNA, 50 bp, Artificial
  Synthetic oligonucleotide
aacgaaccctgctggcaagtctaatgacgctttgagtgcccgcggctgta

SEQ ID NO: 205897 - DNA, 56 bp, Artificial
  Synthetic oligonucleotide
ttcttcctgggccgtgtccgacttcttggaaggtcgaggtgtcttcagtaagccga

SEQ ID NO: 205898 - DNA, 50 bp, Artificial
  Synthetic oligonucleotide
aagtcggaaccaagccggggcaacgcttcagactctagccgacacgccgg

SEQ ID NO: 205899 - DNA, 50 bp, Artificial
  Synthetic oligonucleotide
aagtcggcaaaactcactcggcaggctagatcgcgggtgactcggcggtg

SEQ ID NO: 205900 - DNA, 50 bp, Artificial
  Synthetic oligonucleotide
aagtctccgcttggcgttacccgacggcggctccgaaccggtagattcga

SEQ ID NO: 205901 - DNA, 50 bp, Artificial
  Synthetic oligonucleotide
aacctggttagctgcctgaatagtcgcggcttggcgtgctggcgtcctac

SEQ ID NO: 205902 - DNA, 50 bp, Artificial
  Synthetic oligonucleotide
aagtcttgcacggccgcgccctttccatgcgccgatagcgcttcttccga

SEQ ID NO: 205903 - DNA, 50 bp, Artificial
  Synthetic oligonucleotide
tcatcagtcctccgcgacccgagggctcctacgtaccctaccgccggcaa

SEQ ID NO: 205904 - DNA, 50 bp, Artificial
  Synthetic oligonucleotide
aaccggcgacttctggcactgcgaactgcttggcgctcggcaacaatcct

SEQ ID NO: 205905 - DNA, 50 bp, Artificial
  Synthetic oligonucleotide
aagttcgtcaactaccgccatggctccggggcttcggatccgtcgtaccg

SEQ ID NO: 205906 - DNA, 50 bp, Artificial
  Synthetic oligonucleotide
aagttgcctcgcgggtgaccttccaagcggaaggaagctgagctaccagc

SEQ ID NO: 205907 - DNA, 50 bp, Artificial
  Synthetic oligonucleotide
aaccgccaacgttgcacgtcagcacccccagtgccgcttggacaaagggg

SEQ ID NO: 205908 - DNA, 60 bp, Artificial
  Synthetic oligonucleotide
cagcggaggtgcgaagcatttccccgagttcggctcgcagcttgtcggacatgcgatggg

SEQ ID NO: 205909 - DNA, 50 bp, Artificial
  Synthetic oligonucleotide
tcaccgttgctaacgttccccagagctcggcaactgcacaaccgtggcca

SEQ ID NO: 205910 - DNA, 50 bp, Artificial
  Synthetic oligonucleotide
aatacatcggaggggtgcaacggccctgtcacgttcccgggaggaagcgc

SEQ ID NO: 205911 - DNA, 50 bp, Artificial
  Synthetic oligonucleotide
aataccgtgaactgagcgggccccaagcttcaacactgtccacccccgaa

SEQ ID NO: 205912 - DNA, 50 bp, Artificial
  Synthetic oligonucleotide
aatccaggtaacctgtgagacccccgctcacggaggtgcactcgttgcac

SEQ ID NO: 205913 - DNA, 50 bp, Artificial
  Synthetic oligonucleotide
ccacaggagctcccgctgcgtcaacggaaaaccccagcccacgacaaatc

SEQ ID NO: 205914 - DNA, 50 bp, Artificial
  Synthetic oligonucleotide
ccactctacgacgagaagccgcggtgggtcagactccagaatcgcgccgt

SEQ ID NO: 205915 - DNA, 50 bp, Artificial
  Synthetic oligonucleotide
gatggcggcgcccttccgatgaggaccttcagaccgatcccacgcccggt

SEQ ID NO: 205916 - DNA, 50 bp, Artificial
  Synthetic oligonucleotide
gatgaaggttacggacatcatgtgtccgagtcaactactatggacgatat

SEQ ID NO: 205917 - DNA, 50 bp, Artificial
  Synthetic oligonucleotide
ccagggcgcatgagagcggcgtagtgcggtgccacactggcttcgtagtc

SEQ ID NO: 205918 - DNA, 50 bp, Artificial
  Synthetic oligonucleotide
ccatacccaggtaggatgcgtgaacctccaggccgtcacctagacgcggg

SEQ ID NO: 205919 - DNA, 60 bp, Artificial
  Synthetic oligonucleotide
caggcctattcggcaagaacagtgcacggcggatcctcactgacgccgaagctcgatacg

SEQ ID NO: 205920 - DNA, 50 bp, Artificial
  Synthetic oligonucleotide
cccacaatagcgggtacggtaagtgcggccagggttccggcacgcatctt

SEQ ID NO: 205921 - DNA, 50 bp, Artificial
  Synthetic oligonucleotide
cccggggagattagggccggtgtcggaaactgtcgaaaatgtgcgtcccg

SEQ ID NO: 205922 - DNA, 50 bp, Artificial
  Synthetic oligonucleotide
cccgggtcaagtagaacgggcttcgtcgagaggtccgtggaccgcatgag

SEQ ID NO: 205923 - DNA, 50 bp, Artificial
  Synthetic oligonucleotide
ccctagaacacgggatacgagcgttcccgccgccataatggcgcttgagc

SEQ ID NO: 205924 - DNA, 50 bp, Artificial
  Synthetic oligonucleotide
ccctgagggtgctgtaattgcgccttggccctcggccgtagctttgcgga

SEQ ID NO: 205925 - DNA, 50 bp, Artificial
  Synthetic oligonucleotide
ccgacctcaggttgctcgtaatcggcccgggaaccaggctattcacccga

SEQ ID NO: 205926 - DNA, 50 bp, Artificial
  Synthetic oligonucleotide
gagacattgctgtaagtgaccccgtcatccgagggttttactttccagtc

SEQ ID NO: 205927 - DNA, 50 bp, Artificial
  Synthetic oligonucleotide
ccgaggaaagtcgcatggtgcgacctctgcgcggtccgaatcacgtggtt

SEQ ID NO: 205928 - DNA, 50 bp, Artificial
  Synthetic oligonucleotide
gacgtctccgcctaaacccgcggtgaggcccgaactgacttggcaggtga

SEQ ID NO: 205929 - DNA, 50 bp, Artificial
  Synthetic oligonucleotide
ccgcagttttaggcgcaacgtctgctatcttaccgcgtgtgctgccgcta

SEQ ID NO: 205930 - DNA, 58 bp, Artificial
  Synthetic oligonucleotide
ttggattctctatccgggatttcgaaggtgtgtggcgactcgcgatgggattttagtc

SEQ ID NO: 205931 - DNA, 50 bp, Artificial
  Synthetic oligonucleotide
gacctgctgtcccgggcgctaggcggctttggttgtatgcgtctctatgc

SEQ ID NO: 205932 - DNA, 50 bp, Artificial
  Synthetic oligonucleotide
gacccggcagacgacagtcaatctgacgcccaacccccaacgtactcgcg

SEQ ID NO: 205933 - DNA, 50 bp, Artificial
  Synthetic oligonucleotide
attgcgctgccaggtctcatcaactcgcaccagcacctgtacgaaggcgc

SEQ ID NO: 205934 - DNA, 50 bp, Artificial
  Synthetic oligonucleotide
caactgtcatatgaccgtgcccaaagccgggcaccaaacccctgggagta

SEQ ID NO: 205935 - DNA, 50 bp, Artificial
  Synthetic oligonucleotide
caagtcctgacacggaggtgatctgagggtcggtcgtggcaaggcgcccc

SEQ ID NO: 205936 - DNA, 50 bp, Artificial
  Synthetic oligonucleotide
cacagccgaggcacggggaaagcagtcactcgcggtgtaatgcctgcgca

SEQ ID NO: 205937 - DNA, 50 bp, Artificial
  Synthetic oligonucleotide
caccactccaaagctggacggtcatcgtgtcgccttgcgtgggcggctat

SEQ ID NO: 205938 - DNA, 50 bp, Artificial
  Synthetic oligonucleotide
cacccactaccactgcgcggaaccttgataccccggttgtcccggcagat

SEQ ID NO: 205939 - DNA, 50 bp, Artificial
  Synthetic oligonucleotide
caccccgtgcagggagtcacagccgaacagggcggatacattctgcagga

SEQ ID NO: 205940 - DNA, 50 bp, Artificial
  Synthetic oligonucleotide
cacctagtccgtcgaacccggtcgttcatcaagcgcaccgcaagcaagca

SEQ ID NO: 205941 - DNA, 57 bp, Artificial
  Synthetic oligonucleotide
aacacccggaattccggccatgccggagcggaacgagagaaggctggtccgtcatga

SEQ ID NO: 205942 - DNA, 50 bp, Artificial
  Synthetic oligonucleotide
cacgctcctccctggcgtcacggttaggtgtgtgtggttcccggaggttt

SEQ ID NO: 205943 - DNA, 50 bp, Artificial
  Synthetic oligonucleotide
cacgtttgaacattagcggcatgaggtagcgcgagaagcgagcgcgcgta

SEQ ID NO: 205944 - DNA, 50 bp, Artificial
  Synthetic oligonucleotide
cactctgggaaactcccacggcgtcggcaagtcctgacacggaggtgatc

SEQ ID NO: 205945 - DNA, 50 bp, Artificial
  Synthetic oligonucleotide
gcacgtgttgggttgtgtccgtcctcggaagcacgcgtcgcaggtagcgc

SEQ ID NO: 205946 - DNA, 50 bp, Artificial
  Synthetic oligonucleotide
cagcatctgcacgtgttgggttgtgtccgtcctcggaagcacgcgtcgca

SEQ ID NO: 205947 - DNA, 50 bp, Artificial
  Synthetic oligonucleotide
cagcgggatgcgcataggggttgtcgttcgggtcgagcctcgtgaagacg

SEQ ID NO: 205948 - DNA, 50 bp, Artificial
  Synthetic oligonucleotide
caggacgagggcccgtacatccttccagcggccatcgggaatcggagcgt

SEQ ID NO: 205949 - DNA, 50 bp, Artificial
  Synthetic oligonucleotide
cagttcgccgcagaatcagcccttgacacccgtcttcgccccctcttacg

SEQ ID NO: 205950 - DNA, 50 bp, Artificial
  Synthetic oligonucleotide
cagttttcgcacgctcgctaccggagggatcaccgtggcaacacccgcag

SEQ ID NO: 205951 - DNA, 50 bp, Artificial
  Synthetic oligonucleotide
catgacgacggggtacctgcggaagtcgggcgttggcttggaggacggat

SEQ ID NO: 205952 - DNA, 60 bp, Artificial
  Synthetic oligonucleotide
ttggcaattggcgtggacgtggggtcgtggcgatccagtgtcgggatccctaagctgtgc

SEQ ID NO: 205953 - DNA, 50 bp, Artificial
  Synthetic oligonucleotide
ccaacgcaacgctgcattcgaccgcttcactcccgttggcgacaagtcaa

SEQ ID NO: 205954 - DNA, 50 bp, Artificial
  Synthetic oligonucleotide
cggagggcggtggcagtcgagggcgtcttcgtgaggttagacctccttgc

SEQ ID NO: 205955 - DNA, 50 bp, Artificial
  Synthetic oligonucleotide
cggatactaagggcgaggcccgagctatcccctgccgacgtcatttcgcc

SEQ ID NO: 205956 - DNA, 50 bp, Artificial
  Synthetic oligonucleotide
cggctccacgagtacccggctcacctcgcatgcacatgttaccggaacgt

SEQ ID NO: 205957 - DNA, 50 bp, Artificial
  Synthetic oligonucleotide
cggcttgttctttccagggcgcatgagagcggcgtagtgcggtgccacac

SEQ ID NO: 205958 - DNA, 50 bp, Artificial
  Synthetic oligonucleotide
cgggagcgaaagcaagctcatccctcgcggtgaacggtaagagcccggat

SEQ ID NO: 205959 - DNA, 50 bp, Artificial
  Synthetic oligonucleotide
cgggccgttggacacaagtgtcggagggtctaaggcgtggttggacagac

SEQ ID NO: 205960 - DNA, 50 bp, Artificial
  Synthetic oligonucleotide
cggggacaggtagctgcaggtcgtcctttcgcgggatgcattgcgtcggg

SEQ ID NO: 205961 - DNA, 50 bp, Artificial
  Synthetic oligonucleotide
cggggcatcaatcgtccatagcggaccaaccagcgactgcggcacctcgg

SEQ ID NO: 205962 - DNA, 50 bp, Artificial
  Synthetic oligonucleotide
ctcgtcttccagcatcggccaggttccgaggccaagccggggaatggtgt

SEQ ID NO: 205963 - DNA, 60 bp, Artificial
  Synthetic oligonucleotide
gaccatgcgagcacagcattcaggaccacagcggccctgtagatgatcgcgtacttgtca

SEQ ID NO: 205964 - DNA, 58 bp, Artificial
  Synthetic oligonucleotide
gccctagtggtatcggatggcggcgcccttccgatgaggaccttcagaccgatcccac

SEQ ID NO: 205965 - DNA, 50 bp, Artificial
  Synthetic oligonucleotide
cgggtccataggaagctggcgggtcgaatgtggggtccaccacgatcctg

SEQ ID NO: 205966 - DNA, 50 bp, Artificial
  Synthetic oligonucleotide
cgggtgctctcatgtccgcgtgtcattggaagactgagccggggtcgtct

SEQ ID NO: 205967 - DNA, 50 bp, Artificial
  Synthetic oligonucleotide
ctcaggggaactacagcgcggatgaaccgatgcaggctacgcgccgtctg

SEQ ID NO: 205968 - DNA, 50 bp, Artificial
  Synthetic oligonucleotide
cgtctggacatgacgacggggtacctgcggaagtcgggcgttggcttgga

SEQ ID NO: 205969 - DNA, 50 bp, Artificial
  Synthetic oligonucleotide
cgtgcggtaacagtgtcagggcagtccgcacacatgggggaggtgagcaa

SEQ ID NO: 205970 - DNA, 50 bp, Artificial
  Synthetic oligonucleotide
cgtggagtgggccttcgcaactaggacgagcaatcaatcgtccagcgcgg

SEQ ID NO: 205971 - DNA, 50 bp, Artificial
  Synthetic oligonucleotide
cgttggcgcgcagttgagtacgggtgcaagggctaaaatcggcagcccaa

SEQ ID NO: 205972 - DNA, 50 bp, Artificial
  Synthetic oligonucleotide
cgttggcttggaggacggatcccctgaggccccggatgtccacattagcg

SEQ ID NO: 205973 - DNA, 50 bp, Artificial
  Synthetic oligonucleotide
ctacgcctgtttactggttgtgggggcggggagtgctgtgtccggctccg

SEQ ID NO: 205974 - DNA, 50 bp, Artificial
  Synthetic oligonucleotide
gacccgagggctcctacgtaccctaccgccggcaacttgagagccacctc

SEQ ID NO: 205975 - DNA, 55 bp, Artificial
  Synthetic oligonucleotide
aaatggcttggcgtgtcgcaactcttcggagaaccagccccgggcgttccatttc

SEQ ID NO: 205976 - DNA, 50 bp, Artificial
  Synthetic oligonucleotide
ccgccctggatatgaggctcgtggatcccgcactgttccagcacggaccc

SEQ ID NO: 205977 - DNA, 50 bp, Artificial
  Synthetic oligonucleotide
ccgccgaacggggaaggtttgacgccgctcacgaattgggccacttagtt

SEQ ID NO: 205978 - DNA, 50 bp, Artificial
  Synthetic oligonucleotide
cctgcggaagtcgggcgttggcttggaggacggatcccctgaggccccgg

SEQ ID NO: 205979 - DNA, 50 bp, Artificial
  Synthetic oligonucleotide
cctggcaagggaagaaaccatgcgagcgacacgccatgttcccgtcacgt

SEQ ID NO: 205980 - DNA, 50 bp, Artificial
  Synthetic oligonucleotide
cctgggcgcgtatgaacaacacgcgttcgatgcagggcggaacctggcac

SEQ ID NO: 205981 - DNA, 50 bp, Artificial
  Synthetic oligonucleotide
ccttattcgaagcatcgagcacgacccgtgggtcccctccagccgggtac

SEQ ID NO: 205982 - DNA, 50 bp, Artificial
  Synthetic oligonucleotide
ccttggtctaggcgtggcgggtcccggactatgtgtgcggagtggaagct

SEQ ID NO: 205983 - DNA, 50 bp, Artificial
  Synthetic oligonucleotide
cgaaggttgcgtcctagttggcagcacgagtaatcctgcgatgtacgttc

SEQ ID NO: 205984 - DNA, 50 bp, Artificial
  Synthetic oligonucleotide
cgaccgcgctgagaaggccaccgctgcacgggacgaacgggaaatgcacc

SEQ ID NO: 205985 - DNA, 50 bp, Artificial
  Synthetic oligonucleotide
cgacgacgattgttaggctgataagtccgcttgctcacggtggtcaactc

SEQ ID NO: 205986 - DNA, 54 bp, Artificial
  Synthetic oligonucleotide
ttgggtagccctcagcctacgaacccaccggacgtgataaccgccgtcctcacg

SEQ ID NO: 205987 - DNA, 50 bp, Artificial
  Synthetic oligonucleotide
cgacgccttagccgcgctgcgaagctagcttcaccacaacactctccctg

SEQ ID NO: 205988 - DNA, 50 bp, Artificial
  Synthetic oligonucleotide
cgcccacaaccgacttccgggccttgagcgttgcagcccgaaatgagaga

SEQ ID NO: 205989 - DNA, 50 bp, Artificial
  Synthetic oligonucleotide
cttcgtcgctgcttcccttgtcatcggagcaacgatcgcagctgggccat

SEQ ID NO: 205990 - DNA, 50 bp, Artificial
  Synthetic oligonucleotide
cgcccgtactcttccacagccccaaagcccttgtctccggaaacggcggc

SEQ ID NO: 205991 - DNA, 50 bp, Artificial
  Synthetic oligonucleotide
cgcgggatgctccactgtcggaacggacgttctccgggatcaaaggaacc

SEQ ID NO: 205992 - DNA, 50 bp, Artificial
  Synthetic oligonucleotide
gggatcgggttcgagcgtgagctgccttattggttggaccgggtggaggt

SEQ ID NO: 205993 - DNA, 50 bp, Artificial
  Synthetic oligonucleotide
acgggtgggtacggctcacgcgggacacgtgaggctggctaggcttcgag

SEQ ID NO: 205994 - DNA, 50 bp, Artificial
  Synthetic oligonucleotide
acggtaagtgcggccagggttccggcacgcatctttctgatgcgggtcat

SEQ ID NO: 205995 - DNA, 50 bp, Artificial
  Synthetic oligonucleotide
ggctgacccaggggcttcggctacagtacctccagcgttgggttgaagtc

SEQ ID NO: 205996 - DNA, 50 bp, Artificial
  Synthetic oligonucleotide
actcccacggcgtcggcaagtcctgacacggaggtgatctgagggtcggt

SEQ ID NO: 205997 - DNA, 59 bp, Artificial
  Synthetic oligonucleotide
ttgtagcggcggtagacaccccacgccagacagtccttgcacgagcctgggtattgtgg

SEQ ID NO: 205998 - DNA, 50 bp, Artificial
  Synthetic oligonucleotide
actcctagcaccacaggagctcccgctgcgtcaacggaaaaccccagccc

SEQ ID NO: 205999 - DNA, 50 bp, Artificial
  Synthetic oligonucleotide
actcctccactcggtgtgtgtgggacatcacgctaccccacgggggtacg

SEQ ID NO: 206000 - DNA, 50 bp, Artificial
  Synthetic oligonucleotide
ggcgaatgaagttcagcgaattcgttccgcctagaatggcatcgtagagg

SEQ ID NO: 206001 - DNA, 50 bp, Artificial
  Synthetic oligonucleotide
agagggcacgcccaagaatacgcacccacccggattcagtatctgtggct

SEQ ID NO: 206002 - DNA, 50 bp, Artificial
  Synthetic oligonucleotide
ggccacgctgagtactaggccttcgccggggcacgacatctgtagaacac

SEQ ID NO: 206003 - DNA, 50 bp, Artificial
  Synthetic oligonucleotide
ggccacaattgaccaggcccggctaggactgcggacaaccaggttccaag

SEQ ID NO: 206004 - DNA, 50 bp, Artificial
  Synthetic oligonucleotide
agattactcttatgagggcgccaagcgagggtttgaggagtcgcgccgga

SEQ ID NO: 206005 - DNA, 50 bp, Artificial
  Synthetic oligonucleotide
agcaggcgggggagtaacatcgcgtggtgcgtagcgtacgaagccaacag

SEQ ID NO: 206006 - DNA, 50 bp, Artificial
  Synthetic oligonucleotide
agccagtacgacgcaacgattgcggacgaagcaaccaaagaacgaatcct

SEQ ID NO: 206007 - DNA, 50 bp, Artificial
  Synthetic oligonucleotide
agcccttctcgcggggtgaagcccactcggaaagaccagttggcccactg

SEQ ID NO: 206008 - DNA, 58 bp, Artificial
  Synthetic oligonucleotide
gcccctacacaacgccttggcacaaatagacgcgaccgtcatgggatcggacgtattc

SEQ ID NO: 206009 - DNA, 50 bp, Artificial
  Synthetic oligonucleotide
agcctgtccacggctgttgctgggagcccttgcgtccagggtggtaatcg

SEQ ID NO: 206010 - DNA, 50 bp, Artificial
  Synthetic oligonucleotide
agctcagggggtacgctcagcggactaaaagtactcggtgcggcgggagt

SEQ ID NO: 206011 - DNA, 50 bp, Artificial
  Synthetic oligonucleotide
ggatgcgacagctgaaccggcaacggtggacgcactccggggatggggta

SEQ ID NO: 206012 - DNA, 50 bp, Artificial
  Synthetic oligonucleotide
acctatttggtggcgtcggtgagtttctggcgaaactgttcttcggtgtt

SEQ ID NO: 206013 - DNA, 50 bp, Artificial
  Synthetic oligonucleotide
acctctgcgccggtcatcaatccttgcacgacgggcttggttggcacgat

SEQ ID NO: 206014 - DNA, 50 bp, Artificial
  Synthetic oligonucleotide
acctgtagaaggggccctcggtcaggacaaaacccccggactccgtgggc

SEQ ID NO: 206015 - DNA, 50 bp, Artificial
  Synthetic oligonucleotide
ggtcaaccgcttcacaccaccctcgtcctaagcgctggaactgcccaact

SEQ ID NO: 206016 - DNA, 50 bp, Artificial
  Synthetic oligonucleotide
acgaaaagggtgcacctaccccggccgcttggaccaagatgacttccccg

SEQ ID NO: 206017 - DNA, 50 bp, Artificial
  Synthetic oligonucleotide
ggtaggacaccgctcccggtaaccgacgagcagcagtcaacccttgatga

SEQ ID NO: 206018 - DNA, 50 bp, Artificial
  Synthetic oligonucleotide
acgccatgtcggccccaatgcctcgcgggccatcgctactcggtacggtt

SEQ ID NO: 206019 - DNA, 57 bp, Artificial
  Synthetic oligonucleotide
cagcggttctcatactggctgggacgtatgaacaacgttcccgacacccccagaaca

SEQ ID NO: 206020 - DNA, 50 bp, Artificial
  Synthetic oligonucleotide
acgcccgcgttcggagattgaagctcagctagcgtccgcagggttcactc

SEQ ID NO: 206021 - DNA, 50 bp, Artificial
  Synthetic oligonucleotide
gggtaattgtccctaactggcggggtcacggactctcgccctgcgaggtc

SEQ ID NO: 206022 - DNA, 50 bp, Artificial
  Synthetic oligonucleotide
ggggtttcttaggatgcgacagctgaaccggcaacggtggacgcactccg

SEQ ID NO: 206023 - DNA, 50 bp, Artificial
  Synthetic oligonucleotide
acgcccgctcactcgtggcggttaaccttgggacgcgcgctcactcgtgg

SEQ ID NO: 206024 - DNA, 50 bp, Artificial
  Synthetic oligonucleotide
acgcggtccaagacctcagcccgagttccgtgcgccaagaattcggtagg

SEQ ID NO: 206025 - DNA, 50 bp, Artificial
  Synthetic oligonucleotide
acgcgtcctgagttctccggaaatcgactcccgagtgcccgcctgccggg

SEQ ID NO: 206026 - DNA, 50 bp, Artificial
  Synthetic oligonucleotide
acgctggatcccatgacgcaacctcgtttggcccagtccacgcccaccgg

SEQ ID NO: 206027 - DNA, 50 bp, Artificial
  Synthetic oligonucleotide
acggaaacaggacgatgaccgggcccccggaatttagaggtgaggctccg

SEQ ID NO: 206028 - DNA, 50 bp, Artificial
  Synthetic oligonucleotide
acggccactgaccctggttagcaggctcgtcctgagcccacacaacgtcg

SEQ ID NO: 206029 - DNA, 50 bp, Artificial
  Synthetic oligonucleotide
acggctccagagacggcccccgatccctcatgagcgccggatcacggtta

SEQ ID NO: 206030 - DNA, 58 bp, Artificial
  Synthetic oligonucleotide
tttagctgttcgtcaaggtctccggccaagggcgatcttgaatccgtgaatccgcgga

SEQ ID NO: 206031 - DNA, 50 bp, Artificial
  Synthetic oligonucleotide
acggctgttgctgggagcccttgcgtccagggtggtaatcgcgtggtact

SEQ ID NO: 206032 - DNA, 50 bp, Artificial
  Synthetic oligonucleotide
acgggagagaagtggttcgcgtcttgggaaacgtcctggatccccgcccc

SEQ ID NO: 206033 - DNA, 50 bp, Artificial
  Synthetic oligonucleotide
acggggccgccaaaagtgtacacatcgctcacgtggtagcgtgaggcaaa

SEQ ID NO: 206034 - DNA, 50 bp, Artificial
  Synthetic oligonucleotide
acgggggccggaatactgttggtccaaattgggctggcggaaccagtctg

SEQ ID NO: 206035 - DNA, 50 bp, Artificial
  Synthetic oligonucleotide
atagccgctgctgagcacgggttgttaaggcgtcccgtccaacgacacct

SEQ ID NO: 206036 - DNA, 50 bp, Artificial
  Synthetic oligonucleotide
atagcggaccaaccagcgactgcggcacctcggggacctttgcttggggt

SEQ ID NO: 206037 - DNA, 50 bp, Artificial
  Synthetic oligonucleotide
atagtgccgcggccaacgaaccgcagttggggatctgcctggtagatcgc

SEQ ID NO: 206038 - DNA, 50 bp, Artificial
  Synthetic oligonucleotide
atcaagtggccctgaatctcggtgtgccatgaggagcgctggaacacggg

SEQ ID NO: 206039 - DNA, 50 bp, Artificial
  Synthetic oligonucleotide
atcaatccaggtgagggttcgcggaccgtaccccgttgcgagcaccaact

SEQ ID NO: 206040 - DNA, 50 bp, Artificial
  Synthetic oligonucleotide
atcccgccagttggaggcgattctcgctaaggctctcggagtcccggttc

SEQ ID NO: 206041 - DNA, 56 bp, Artificial
  Synthetic oligonucleotide
agggtttctgcagcggaggttagtagggtcgctgtaatggcgacggagaatcccac

SEQ ID NO: 206042 - DNA, 50 bp, Artificial
  Synthetic oligonucleotide
gcggacctcgacagttagaggccgtttgtgggaccagttgcgttcgccta

SEQ ID NO: 206043 - DNA, 50 bp, Artificial
  Synthetic oligonucleotide
atcgagcgaacccctgtggcgcattctcgtgccctgagcctcaaactggg

SEQ ID NO: 206044 - DNA, 50 bp, Artificial
  Synthetic oligonucleotide
atgacgcagtccccattttgaggcgccggtaccctcggcagttcccgagc

SEQ ID NO: 206045 - DNA, 50 bp, Artificial
  Synthetic oligonucleotide
atgacgggggtgttcccgacaaacgtggagcagtagctgccggaagtgga

SEQ ID NO: 206046 - DNA, 50 bp, Artificial
  Synthetic oligonucleotide
atgcacattatggcgtaggcgggtgggaccagtaggccggaacctcggta

SEQ ID NO: 206047 - DNA, 50 bp, Artificial
  Synthetic oligonucleotide
atgctcaaagtctcctccgacggccgcaaagccgccctggatatgaggct

SEQ ID NO: 206048 - DNA, 50 bp, Artificial
  Synthetic oligonucleotide
atggattccccctggaccgaccttcgcttcacctcgggtcggagattgca

SEQ ID NO: 206049 - DNA, 50 bp, Artificial
  Synthetic oligonucleotide
gccgtactccagaacgtgcggacctcgacagttagaggccgtttgtggga

SEQ ID NO: 206050 - DNA, 50 bp, Artificial
  Synthetic oligonucleotide
atgtgtactacgtggtacgttacccaggcaccgcgcaaccgcccatccac

SEQ ID NO: 206051 - DNA, 50 bp, Artificial
  Synthetic oligonucleotide
atgtgtgcggactccgccttcacaatcaccgcctagtgcgctcgggagta

SEQ ID NO: 206052 - DNA, 57 bp, Artificial
  Synthetic oligonucleotide
ctgcgtccattctcggacacgaaactcacatagtcaccggactcctacacggggacc

SEQ ID NO: 206053 - DNA, 50 bp, Artificial
  Synthetic oligonucleotide
attcttggcaaccccgtcaagaaccagatccccggtaggttgtgccgcga

SEQ ID NO: 206054 - DNA, 50 bp, Artificial
  Synthetic oligonucleotide
ggagtcgggtccgttgccccatcccccagccgcgttgctgttagccggca

SEQ ID NO: 206055 - DNA, 50 bp, Artificial
  Synthetic oligonucleotide
aggaacgtgctcggcagccccgcttggcctgggagtcttatgcccggccc

SEQ ID NO: 206056 - DNA, 50 bp, Artificial
  Synthetic oligonucleotide
aggacgccttgcactccacaacgcaaccccacgaatgatgccgccgtgcg

SEQ ID NO: 206057 - DNA, 50 bp, Artificial
  Synthetic oligonucleotide
aggacggcacatatgccgacaacgaccatgtacccaggctctggccgacc

SEQ ID NO: 206058 - DNA, 50 bp, Artificial
  Synthetic oligonucleotide
aggaggaaggttcctgggcggtgcaccaagggcggatgcttgcgggtaac

SEQ ID NO: 206059 - DNA, 50 bp, Artificial
  Synthetic oligonucleotide
aggcaaggtgacactaatccggtagtgcctaaatgcccctaaaacgcccc

SEQ ID NO: 206060 - DNA, 50 bp, Artificial
  Synthetic oligonucleotide
aggcactcccgcccacaaccgacttccgggccttgagcgttgcagcccga

SEQ ID NO: 206061 - DNA, 50 bp, Artificial
  Synthetic oligonucleotide
aggcctgcccttggcgagtgggcttcaaaggtacttgcgggtgcttagtt

SEQ ID NO: 206062 - DNA, 50 bp, Artificial
  Synthetic oligonucleotide
aggcgaccgcaatttacggggaggaagcaaaagcggctcggcgcagtatc

SEQ ID NO: 206063 - DNA, 60 bp, Artificial
  Synthetic oligonucleotide
gcagtggcggcgtgttccgtaagctcttgatgtgttgccctcttgtcatcgaggggcttc

SEQ ID NO: 206064 - DNA, 50 bp, Artificial
  Synthetic oligonucleotide
agggagcgctcgttgagtcagcgacgaaagccggacacggagtgtaggac

SEQ ID NO: 206065 - DNA, 50 bp, Artificial
  Synthetic oligonucleotide
aggggttaccgcattcgaaccattgggcatcacgggggtttcaggcgttc

SEQ ID NO: 206066 - DNA, 50 bp, Artificial
  Synthetic oligonucleotide
aggtgtccatggtccatgagtatcacccgccggggacacgcacagcgtgt

SEQ ID NO: 206067 - DNA, 50 bp, Artificial
  Synthetic oligonucleotide
aggttggacgccccagatggacctgaaaacggacaaacagccctcgctcc

SEQ ID NO: 206068 - DNA, 50 bp, Artificial
  Synthetic oligonucleotide
agtcaccggactcctacacggggacccaaccaactacgctccgttgctga

SEQ ID NO: 206069 - DNA, 50 bp, Artificial
  Synthetic oligonucleotide
agtgcttcggtgtacgccagccgggagtatccatcgactgccgagtgcaa

SEQ ID NO: 206070 - DNA, 50 bp, Artificial
  Synthetic oligonucleotide
ataaggaggcaatccctatccaatcggtttacatttagggtcaagctaac

SEQ ID NO: 206071 - DNA, 50 bp, Artificial
  Synthetic oligonucleotide
gctcccgctgcgtcaacggaaaaccccagcccacgacaaatcactgatga

SEQ ID NO: 206072 - DNA, 57 bp, Artificial
  Synthetic oligonucleotide
acgggtgacgcgcgtggacgtctgagtacgagaagttcgtttcaccacggatcttga

SEQ ID NO: 206073 - DNA, 58 bp, Artificial
  Synthetic oligonucleotide
ggaagaccgatcagatctggcgatatgaagaaccggctggctaagccgggaccttcgt

SEQ ID NO: 206074 - DNA, 60 bp, Artificial
  Synthetic oligonucleotide
gccaatacgctgacttgaaggcgctccgttggatcatttctgcctcgttaacagcgcaag

SEQ ID NO: 206075 - DNA, 57 bp, Artificial
  Synthetic oligonucleotide
cgggacaagtcccggatttccttcccgcagagcgtgaggaggctagtcatggagttc

SEQ ID NO: 206076 - DNA, 60 bp, Artificial
  Synthetic oligonucleotide
aactaacaactgattggtatcactgcatctggcacccggacatctcagccgaggaaatat

SEQ ID NO: 206077 - DNA, 53 bp, Artificial
  Synthetic oligonucleotide
cccaaatgtgccctgcctgggcacgtcacccgcctccggccctaccggtttcg

SEQ ID NO: 206078 - DNA, 58 bp, Artificial
  Synthetic oligonucleotide
gctgatattcctccgaataggtggaaccagtccctattaagcgcggtagtaagtctgc

SEQ ID NO: 206079 - DNA, 59 bp, Artificial
  Synthetic oligonucleotide
caataagccagcattttccttacgaggaatcgcttggccgaccatctttggtgcgctaa

SEQ ID NO: 206080 - DNA, 59 bp, Artificial
  Synthetic oligonucleotide
agtgaggtgggacacggccaggaatgcagaatagaagaggtgtatacgcgcaaagttac

SEQ ID NO: 206081 - DNA, 60 bp, Artificial
  Synthetic oligonucleotide
gctcctattgcggttaggcaactggtgcggagtgagaggacgcttgtcgctgtccggtac

SEQ ID NO: 206082 - DNA, 60 bp, Artificial
  Synthetic oligonucleotide
tggcttgttgcgctgcctctaggccgttgattccgaggtcacttacgtgagtgctaccga

SEQ ID NO: 206083 - DNA, 60 bp, Artificial
  Synthetic oligonucleotide
acagcggtgttcatgaccatccgcaggaaccggtacgactgagagatggatgtgcggcca

SEQ ID NO: 206084 - DNA, 56 bp, Artificial
  Synthetic oligonucleotide
ctcgggccaccggagttctggctctaactttggatggcgctcaccggttcaggtgg

SEQ ID NO: 206085 - DNA, 55 bp, Artificial
  Synthetic oligonucleotide
accgaggtagcaagtcgatgcacccatccgtaacaaacgaaaactaatatgccgt

SEQ ID NO: 206086 - DNA, 55 bp, Artificial
  Synthetic oligonucleotide
gtgaatcgacgcgggagtttccgccgattgtgtaggtcaatcagccgatcggtct

SEQ ID NO: 206087 - DNA, 55 bp, Artificial
  Synthetic oligonucleotide
gtgagatcttccacaggtccattcaccccggtcacggcacgaggttaccgtggcg

SEQ ID NO: 206088 - DNA, 55 bp, Artificial
  Synthetic oligonucleotide
gttcgaactggatggccaggaagagtgctttctgcacgtcccgggagaagattcc

SEQ ID NO: 206089 - DNA, 54 bp, Artificial
  Synthetic oligonucleotide
gttcgaccgactctccggtagcgtcgggcctgttctccgagggttcctcgtgtc

SEQ ID NO: 206090 - DNA, 55 bp, Artificial
  Synthetic oligonucleotide
gtttctcgtgcggccccacgtaggtgtgcgttcgggtaacttgcgctccacgatc

SEQ ID NO: 206091 - DNA, 55 bp, Artificial
  Synthetic oligonucleotide
taccggccgcggttcaggaactgtcgtggcaagacctgacgactgctactgacgg

SEQ ID NO: 206092 - DNA, 55 bp, Artificial
  Synthetic oligonucleotide
tacgatcggtcgtccgggtcgtatcgggcagactcttcgcggcttgtcgcaaagg

SEQ ID NO: 206093 - DNA, 55 bp, Artificial
  Synthetic oligonucleotide
tactgacgggtccaccgcgatgagcgtactgagcgtagctgcggcgtctgatccc

SEQ ID NO: 206094 - DNA, 55 bp, Artificial
  Synthetic oligonucleotide
tcaccaacgccatgtcaaccgaggtaagcactctaaatgcctataaagtggcttt

SEQ ID NO: 206095 - DNA, 58 bp, Artificial
  Synthetic oligonucleotide
ctgaggacgacccgagttgctcccgagtcggggaggaacatcagccgaagcaacatcc

SEQ ID NO: 206096 - DNA, 55 bp, Artificial
  Synthetic oligonucleotide
tcccgagtcggggaggaacatcagccgaagcaacatcctactggtccgctactcc

SEQ ID NO: 206097 - DNA, 55 bp, Artificial
  Synthetic oligonucleotide
accacacccgcgaagaatgtctagtccgtggagaccagattttctcgtcggccga

SEQ ID NO: 206098 - DNA, 55 bp, Artificial
  Synthetic oligonucleotide
tctgagccgccgcgaaggggtgccgagtggtggttctatcgcccgcgcacagtaa

SEQ ID NO: 206099 - DNA, 55 bp, Artificial
  Synthetic oligonucleotide
tgaccactccgaccacccgccctgccacacatgtgtacgagcagctgagctaacc

SEQ ID NO: 206100 - DNA, 55 bp, Artificial
  Synthetic oligonucleotide
tgacgagtcccggactgaccagggccatgcggacacgtcttcacccgttctcgac

SEQ ID NO: 206101 - DNA, 55 bp, Artificial
  Synthetic oligonucleotide
tgcagcattcggcctgaattagttgggtcctgccccggcaatccacacatgtagg

SEQ ID NO: 206102 - DNA, 55 bp, Artificial
  Synthetic oligonucleotide
tgcatcggtgcgggactccctaggagacggtgactgtttcgaccccagcctacgt

SEQ ID NO: 206103 - DNA, 55 bp, Artificial
  Synthetic oligonucleotide
tgcccgaaagtatcgcgtcgcgtcgatccattgtgggtgttagcggtaacacgtt

SEQ ID NO: 206104 - DNA, 55 bp, Artificial
  Synthetic oligonucleotide
tgccgcgagaagaggacacttcctgaccgctatgcctgcgagggtggacccgtac

SEQ ID NO: 206105 - DNA, 55 bp, Artificial
  Synthetic oligonucleotide
tggaccgaccgcagtccccagggaaacggtactgcctggacagggcccgtcgaga

SEQ ID NO: 206106 - DNA, 57 bp, Artificial
  Synthetic oligonucleotide
ctgatatatgacgcggtcgccaaaaaccccgcacttcttgacgacaagaacgaacca

SEQ ID NO: 206107 - DNA, 55 bp, Artificial
  Synthetic oligonucleotide
aattaagtcaagcctgaactatgcggtgctgtgctgatccgccgtacaccatgcg

SEQ ID NO: 206108 - DNA, 55 bp, Artificial
  Synthetic oligonucleotide
tggtgaaggttgacaggcggcacgtgcggagcgacttgggcagccgaccgtcatt

SEQ ID NO: 206109 - DNA, 55 bp, Artificial
  Synthetic oligonucleotide
ttacgatggcggcgggcattaatacggctcaatcaagcagtatgcgcaaccctcg

SEQ ID NO: 206110 - DNA, 55 bp, Artificial
  Synthetic oligonucleotide
ttcgtcgcatgagtgagcagcaaggtgatatgccggagttgtggatgctgagcgc

SEQ ID NO: 206111 - DNA, 55 bp, Artificial
  Synthetic oligonucleotide
ttgcacgtcctcgtccgctactgagaggtgtgggagacgtcgtgctgcgttgtga

SEQ ID NO: 206112 - DNA, 55 bp, Artificial
  Synthetic oligonucleotide
aaacccgcctccgctcgaataccagcttcccgggcaatccgatcgatagtctgca

SEQ ID NO: 206113 - DNA, 55 bp, Artificial
  Synthetic oligonucleotide
gacctccgccggaatggggtacgacaagacgaagcctcgattcggatgaggtgac

SEQ ID NO: 206114 - DNA, 55 bp, Artificial
  Synthetic oligonucleotide
gaggactgtaaatgctccacgtcgatcctacggcgcagtcacgacggaacaaggc

SEQ ID NO: 206115 - DNA, 55 bp, Artificial
  Synthetic oligonucleotide
aacggtgtacagcatcggaccgggccctcgataccggttgccctgcgagtcttga

SEQ ID NO: 206116 - DNA, 55 bp, Artificial
  Synthetic oligonucleotide
gagtaacccaaagtgaatgtctgggtacaccgtacgtgcgttatcatgctcgctg

SEQ ID NO: 206117 - DNA, 60 bp, Artificial
  Synthetic oligonucleotide
gaccgagcaatcaccataggaccagctacctacgcggtgctactgtcacgtactcgtcgg

SEQ ID NO: 206118 - DNA, 55 bp, Artificial
  Synthetic oligonucleotide
gcacgcgtctctgacgcgcgcctttgctaccggagcaccggaaggccttactcgt

SEQ ID NO: 206119 - DNA, 55 bp, Artificial
  Synthetic oligonucleotide
gcatgatcctgaggcactgggtgttgcactggtgccagtattgggcgccgctcgt

SEQ ID NO: 206120 - DNA, 55 bp, Artificial
  Synthetic oligonucleotide
gccaccctgatgaatcgaacgtgcgaacagccgtccgatatggtgtctccggcgc

SEQ ID NO: 206121 - DNA, 55 bp, Artificial
  Synthetic oligonucleotide
gccatctgtcctccgggacgatcaatgagatcccattattcggtgatacttgcca

SEQ ID NO: 206122 - DNA, 55 bp, Artificial
  Synthetic oligonucleotide
gccccgagtacggatttcacgcggcaatgctatcggcgtatatcgactcctgagg

SEQ ID NO: 206123 - DNA, 55 bp, Artificial
  Synthetic oligonucleotide
gcccggacgccaagagctgactgagtccgatattttggcgccacaaaccccacac

SEQ ID NO: 206124 - DNA, 55 bp, Artificial
  Synthetic oligonucleotide
gccgcaacaactaccatcggcgggcgggaaaatcactgcgtcgaaacatcaggcg

SEQ ID NO: 206125 - DNA, 55 bp, Artificial
  Synthetic oligonucleotide
gccggatagccggactggcatttcatcggatgctactcgccagtaaccaacacga

SEQ ID NO: 206126 - DNA, 55 bp, Artificial
  Synthetic oligonucleotide
gccggccatcgtgagtagatcggagctgttctatcgaaaacagtatcgaaacccg

SEQ ID NO: 206127 - DNA, 55 bp, Artificial
  Synthetic oligonucleotide
gcctcgcacgagccgaactcagcgatgtccggcacaaccctgctgtgaccagcaa

SEQ ID NO: 206128 - DNA, 60 bp, Artificial
  Synthetic oligonucleotide
gaggacttacgcccctgggtggtgtagcagttcatcggatcactcccgagacgatctgcc

SEQ ID NO: 206129 - DNA, 54 bp, Artificial
  Synthetic oligonucleotide
ggtcgggaccggatgcgtgactccgacctcgggtacgcacggacgttcctacgc

SEQ ID NO: 206130 - DNA, 54 bp, Artificial
  Synthetic oligonucleotide
gggaggggactgtgggaatgacgcgactgttgcccatggtggttaccccgtcgt

SEQ ID NO: 206131 - DNA, 55 bp, Artificial
  Synthetic oligonucleotide
ggctagggcaatcgtagaaagcaggtcgacgtctttaatgctaacaactacgatg

SEQ ID NO: 206132 - DNA, 53 bp, Artificial
  Synthetic oligonucleotide
ggcgttgagtacggattccagggtcgacaaccgggaggcgactaccatttccc

SEQ ID NO: 206133 - DNA, 55 bp, Artificial
  Synthetic oligonucleotide
ggcgtactacgcgggaatctagctaagggacgtctcgcaactcggtcggatgtcc

SEQ ID NO: 206134 - DNA, 55 bp, Artificial
  Synthetic oligonucleotide
ggcagacagtcgtacgtgcacggcactctcctggcgttcatgtcctgagcggaag

SEQ ID NO: 206135 - DNA, 55 bp, Artificial
  Synthetic oligonucleotide
aacgagcgtgggctgcggtgagtggaacgctatgggtgtcaaatgggcgctgagg

SEQ ID NO: 206136 - DNA, 55 bp, Artificial
  Synthetic oligonucleotide
ggagcggcaatcgtaggaacggcaaccgtgggaacggcgacagtgggagtaccga

SEQ ID NO: 206137 - DNA, 55 bp, Artificial
  Synthetic oligonucleotide
gcgtgagcacatttcgctacatagggtccggcgctcattgtgacgtcaccaatac

SEQ ID NO: 206138 - DNA, 55 bp, Artificial
  Synthetic oligonucleotide
gccttgacatccggcaggtagtacgcaagtgcagcgagcagtagatcctcaatcg

SEQ ID NO: 206139 - DNA, 54 bp, Artificial
  Synthetic oligonucleotide
gcatgatggacctctctcccccggggttactcggttcgcacccggggcccctga

SEQ ID NO: 206140 - DNA, 55 bp, Artificial
  Synthetic oligonucleotide
gcggtgggtcataggctcgggatacgtgggccagtcaggccgtctcggacgtcaa

SEQ ID NO: 206141 - DNA, 55 bp, Artificial
  Synthetic oligonucleotide
gcgggtgacgttggccctatcatcactcgggtcggctcaccccatttgccgtgag

SEQ ID NO: 206142 - DNA, 54 bp, Artificial
  Synthetic oligonucleotide
tctcgcagtcgcgaacgaaagggtgaccgagtgaccaccccaggcaagacccgt

SEQ ID NO: 206143 - DNA, 54 bp, Artificial
  Synthetic oligonucleotide
ctcccaaatctctgtcagggccaaggaaagcgctctccctccgtgctataaagg

SEQ ID NO: 206144 - DNA, 54 bp, Artificial
  Synthetic oligonucleotide
tgaacagttctcatcccgaacagtcaagggccggagtacccgagacccgaaaca

SEQ ID NO: 206145 - DNA, 54 bp, Artificial
  Synthetic oligonucleotide
tcgtctcggccttgtggcagtcggcggcgctcttggtgatgtacttcgtgatgt

SEQ ID NO: 206146 - DNA, 54 bp, Artificial
  Synthetic oligonucleotide
gacaaatcgcctgactctcagtcgtcaatacgtcagaagagcgtctcctccccg

SEQ ID NO: 206147 - DNA, 54 bp, Artificial
  Synthetic oligonucleotide
cgaaagtgcccctccaagggcggtttcgtaccaagattcagatcggctcagccg

SEQ ID NO: 206148 - DNA, 54 bp, Artificial
  Synthetic oligonucleotide
ccctgcggaacggtggcactcggtacagacatggtgcacccagtgtgttattgg

SEQ ID NO: 206149 - DNA, 54 bp, Artificial
  Synthetic oligonucleotide
aagattcttaggctagagccccgctatgcttccgaattctgggacgaatgatcc

SEQ ID NO: 206150 - DNA, 60 bp, Artificial
  Synthetic oligonucleotide
ggacaagcgcgaaaaccgaagatgcgccattgagcatgtccgtgtcgtatctgatatatg

SEQ ID NO: 206151 - DNA, 53 bp, Artificial
  Synthetic oligonucleotide
gcacggtccaactctgttccacgtcaccctcccttaaaccgcgaacgtcgttc

SEQ ID NO: 206152 - DNA, 54 bp, Artificial
  Synthetic oligonucleotide
agatggcagcgaaggatggaagatcagaggtggtttccgcggaggcgagggaat

SEQ ID NO: 206153 - DNA, 54 bp, Artificial
  Synthetic oligonucleotide
tcatggcggtacacaggcggggagtcacccacgcggtcgacagtgtgcctagtg

SEQ ID NO: 206154 - DNA, 53 bp, Artificial
  Synthetic oligonucleotide
tacgagtacggacgctagcgtgccaattcgggcccgggagcgaaacgaatgag

SEQ ID NO: 206155 - DNA, 53 bp, Artificial
  Synthetic oligonucleotide
cgcttcccgcgtcggaggataccggcctgctgctagcggccaacgttctcagt

SEQ ID NO: 206156 - DNA, 53 bp, Artificial
  Synthetic oligonucleotide
tccttcaggtcgtaggtctcgagaacctccgctcgggcgacatcccatgtccg

SEQ ID NO: 206157 - DNA, 53 bp, Artificial
  Synthetic oligonucleotide
tcgagacgagcacccctcgatacggccaccctatcgccgcacacgacggttac

SEQ ID NO: 206158 - DNA, 53 bp, Artificial
  Synthetic oligonucleotide
gcgtacgaacaactggtagtcagaggccggacaatcagtcgtggcgctaccct

SEQ ID NO: 206159 - DNA, 53 bp, Artificial
  Synthetic oligonucleotide
cgccaccgatgttcaccgcacgcaacagagcgacgtatctcgtcatgacccgg

SEQ ID NO: 206160 - DNA, 53 bp, Artificial
  Synthetic oligonucleotide
agcgaaaaaagtcccatctgcgcgttctacgggggtcaccggcagtaggttca

SEQ ID NO: 206161 - DNA, 56 bp, Artificial
  Synthetic oligonucleotide
ggatggagttgccgaacggttgcggtgggtgggtggttgggagctgccatcccgtc

SEQ ID NO: 206162 - DNA, 53 bp, Artificial
  Synthetic oligonucleotide
cctgcaacatcctccggaagaccacggcccaccccttcgtcggtcttgcacat

SEQ ID NO: 206163 - DNA, 53 bp, Artificial
  Synthetic oligonucleotide
ccgacccggtgtgagtcagagggacccgcatgcgactaaccgttctcggttgt

SEQ ID NO: 206164 - DNA, 53 bp, Artificial
  Synthetic oligonucleotide
atcggcagtggacggtcgggtggttgacgatgggctgtggagcgtcggagtcc

SEQ ID NO: 206165 - DNA, 53 bp, Artificial
  Synthetic oligonucleotide
agacctaagcagcggcgaccgaccgtactctatcgacagcaacttgctacaca

SEQ ID NO: 206166 - DNA, 53 bp, Artificial
  Synthetic oligonucleotide
cacgaccgaaactcgtcgttctagcagcatgcgcctcagcatcagtcgctgca

SEQ ID NO: 206167 - DNA, 53 bp, Artificial
  Synthetic oligonucleotide
acccggagagcatggatctagcggtgcttccgccctgaaccaacgggcgtgcg

SEQ ID NO: 206168 - DNA, 52 bp, Artificial
  Synthetic oligonucleotide
gtcacagtgaggtggcccatggggaatatgccgggattcgtgtccatccggg

SEQ ID NO: 206169 - DNA, 52 bp, Artificial
  Synthetic oligonucleotide
gtcccgagggcacgcgaccggggtaccgcagcaacgaccatccgaatgagga

SEQ ID NO: 206170 - DNA, 52 bp, Artificial
  Synthetic oligonucleotide
aagttgtctctcatcgaagggcctccacgtgcgtggtccaggtttgttcggg

SEQ ID NO: 206171 - DNA, 52 bp, Artificial
  Synthetic oligonucleotide
agccgggtcgtatcgtcccttcgtgtcctctccgcactttaagtccgcagca

SEQ ID NO: 206172 - DNA, 60 bp, Artificial
  Synthetic oligonucleotide
ggcgactttcaaggtgcaggcaggcactaagctgttgcgtcgaatgtattggacaagcgc

SEQ ID NO: 206173 - DNA, 52 bp, Artificial
  Synthetic oligonucleotide
tcgaggacgttgataaccgcaacaatggaggcatttacccgtggctgacacg

SEQ ID NO: 206174 - DNA, 52 bp, Artificial
  Synthetic oligonucleotide
agccgcgttgagctgcggcgagacccgtaccggaaaagtaggtgtttcctcc

SEQ ID NO: 206175 - DNA, 52 bp, Artificial
  Synthetic oligonucleotide
tcgaatacctccggtactcgcagcgttcggtgtcgctgaaattaccgaccga

SEQ ID NO: 206176 - DNA, 52 bp, Artificial
  Synthetic oligonucleotide
tcagcgtccaaccggttcgcggaaggctcgcgcgacgggaatccccttattg

SEQ ID NO: 206177 - DNA, 52 bp, Artificial
  Synthetic oligonucleotide
tatcgcgatgagatggcccgatcccggcgccctccgtcgaagcaagcttgaa

SEQ ID NO: 206178 - DNA, 52 bp, Artificial
  Synthetic oligonucleotide
ggactcaaggatcaacaccatcggaagcccggtaggtcgatccatcgcacgt

SEQ ID NO: 206179 - DNA, 52 bp, Artificial
  Synthetic oligonucleotide
tacgctccgccatcacgagccgtggtaggtgtgcgggttcacatcgaggtgg

SEQ ID NO: 206180 - DNA, 52 bp, Artificial
  Synthetic oligonucleotide
cgactaccgcgctcacaggccctgactatggctgtgggctaaccgagccctc

SEQ ID NO: 206181 - DNA, 52 bp, Artificial
  Synthetic oligonucleotide
acgtctcacccaaggggcggatcttccactttgagattgaggctacaagctc

SEQ ID NO: 206182 - DNA, 52 bp, Artificial
  Synthetic oligonucleotide
acgaccgggtagggtctgacgccgtgcccggcaatccacgtcccacaaccgt

SEQ ID NO: 206183 - DNA, 60 bp, Artificial
  Synthetic oligonucleotide
tctcaccgcgaccggtgagggatacttgttggcgtctctgccaagttcgatgaggaagac

SEQ ID NO: 206184 - DNA, 52 bp, Artificial
  Synthetic oligonucleotide
gtttcttgagccggcggaagtatctgctccgctcgtccacctcatgcccctt

SEQ ID NO: 206185 - DNA, 51 bp, Artificial
  Synthetic oligonucleotide
agagtttgtggcatgcagcgtacgcagagtcctgtgctgtcccggttggca

SEQ ID NO: 206186 - DNA, 51 bp, Artificial
  Synthetic oligonucleotide
gatcaggcgtttgtcctcaacgatgaatcatattcgggtgcctcgattctt

SEQ ID NO: 206187 - DNA, 51 bp, Artificial
  Synthetic oligonucleotide
taactatccgtaaccgagacacggcggtatgcggtttgccccatccgcgag

SEQ ID NO: 206188 - DNA, 51 bp, Artificial
  Synthetic oligonucleotide
acgcgcgggtgacgttgacccctatcatcactcgggttggctcaccccgtt

SEQ ID NO: 206189 - DNA, 51 bp, Artificial
  Synthetic oligonucleotide
aaagcgcttaccccaccccgtctgccgagagggcgagcgtgccaccagtga

SEQ ID NO: 206190 - DNA, 51 bp, Artificial
  Synthetic oligonucleotide
tgactaggatcttgctggacatcgagctccaatccgagaatctgtgtctgt

SEQ ID NO: 206191 - DNA, 51 bp, Artificial
  Synthetic oligonucleotide
tgttgaaggatcttcggaggtgctagcgtcggtcgcacattttcacctccg

SEQ ID NO: 206192 - DNA, 51 bp, Artificial
  Synthetic oligonucleotide
cccggaatgaatccggctgaatggacgccccgcgaattacggcacagtttc

SEQ ID NO: 206193 - DNA, 51 bp, Artificial
  Synthetic oligonucleotide
atcgtcaggtcagacacagccctactagcccctgtgtccatcgcgtgcttg

SEQ ID NO: 206194 - DNA, 58 bp, Artificial
  Synthetic oligonucleotide
agcatcgttgcgggtcgcgcgaaagcacttctagaactcttcggttagcccgactgga

SEQ ID NO: 206195 - DNA, 59 bp, Artificial
  Synthetic oligonucleotide
tgaagcctcaagttccgttcgcaggtctcccgccagcggacaccgatcttcgggctgtc

SEQ ID NO: 206196 - DNA, 51 bp, Artificial
  Synthetic oligonucleotide
atgcgggcgaacctactttacattcgttactcgattgtaacggcgagatgt

SEQ ID NO: 206197 - DNA, 51 bp, Artificial
  Synthetic oligonucleotide
acaaacccgcgtgaaagaggcgattaccggccgtgtcgacccagcagactt

SEQ ID NO: 206198 - DNA, 50 bp, Artificial
  Synthetic oligonucleotide
ggcaggcttaccggaacgtgagcagactttccctcgtcgttcggatcggg

SEQ ID NO: 206199 - DNA, 50 bp, Artificial
  Synthetic oligonucleotide
aacgaaggttctcctgccacggcgccctccggtgcgtgatctgtcaggaa

SEQ ID NO: 206200 - DNA, 50 bp, Artificial
  Synthetic oligonucleotide
acccgaacaacgaggattcgccggaacgggttacgggtggcctcatcccg

SEQ ID NO: 206201 - DNA, 50 bp, Artificial
  Synthetic oligonucleotide
acctttcgttcgcgactgcggggctcgcaaaaccggctcactcctcgcgc

SEQ ID NO: 206202 - DNA, 50 bp, Artificial
  Synthetic oligonucleotide
accttggctgcatgcggggtgcgtcttgcgccgggttcgctaccagggga

SEQ ID NO: 206203 - DNA, 50 bp, Artificial
  Synthetic oligonucleotide
acccgccatctgttgctccctcgctgcgattcgagtgtctgtctgcaccc

SEQ ID NO: 206204 - DNA, 50 bp, Artificial
  Synthetic oligonucleotide
accttgcccctgttcgaccgactctccggtagcgtcgggcctgttctccg

SEQ ID NO: 206205 - DNA, 50 bp, Artificial
  Synthetic oligonucleotide
acccggggtaggggcctcgtctgtgagtcggaacggatagccggtgacca

SEQ ID NO: 206206 - DNA, 58 bp, Artificial
  Synthetic oligonucleotide
ttaatgccgggaacgctcgcaagagacatcaaccggctagagcaaagccccgaagtcg

SEQ ID NO: 206207 - DNA, 50 bp, Artificial
  Synthetic oligonucleotide
acccttcccacgaaatccgctcagggtccgtcagcacatcccatgtcgcc

SEQ ID NO: 206208 - DNA, 50 bp, Artificial
  Synthetic oligonucleotide
accgagtcggttcgggtgcccttgttggttcccgccccttttcagagtcc

SEQ ID NO: 206209 - DNA, 50 bp, Artificial
  Synthetic oligonucleotide
accttagagccggaccgcacacgcacaagccgtagggtggaaggccaccg

SEQ ID NO: 206210 - DNA, 50 bp, Artificial
  Synthetic oligonucleotide
accgccgagctattgagccactccgatccaacggacggacgtttgccggg

SEQ ID NO: 206211 - DNA, 50 bp, Artificial
  Synthetic oligonucleotide
acctgcgatggggaacgacccgagcgtaggacccttgtccgaaggttcga

SEQ ID NO: 206212 - DNA, 50 bp, Artificial
  Synthetic oligonucleotide
acctgcacgctcgggacacagggaggccagacccatgcgactcaccatgc

SEQ ID NO: 206213 - DNA, 50 bp, Artificial
  Synthetic oligonucleotide
acctcgctcacacgggccactcaggtgtctaacaggttcggggcctaacc

SEQ ID NO: 206214 - DNA, 50 bp, Artificial
  Synthetic oligonucleotide
accgctccgtcaggggcgaccagtctgagctcgtacgaacccggaatctg

SEQ ID NO: 206215 - DNA, 50 bp, Artificial
  Synthetic oligonucleotide
aagtttgatccaccgggagggggcccgccgtgtacgtctcggctcgcacg

SEQ ID NO: 206216 - DNA, 50 bp, Artificial
  Synthetic oligonucleotide
aatcgcacaaaggaggcgggccgaaacgtggaatcgaacgccggttcgac

SEQ ID NO: 206217 - DNA, 60 bp, Artificial
  Synthetic oligonucleotide
tttgatcgacggcggtaagatcgatcatgagtgacgaggaggtaccacacgtgaccgaac

SEQ ID NO: 206218 - DNA, 50 bp, Artificial
  Synthetic oligonucleotide
aatcgggaagagaccccgattgcggcctacacctccgactcgcggttccc

SEQ ID NO: 206219 - DNA, 50 bp, Artificial
  Synthetic oligonucleotide
aatcgtctctcccgtcggtgcccgatcgtgtcctcgggacaccttaggcc

SEQ ID NO: 206220 - DNA, 50 bp, Artificial
  Synthetic oligonucleotide
aaatcccgtgccatgagcacccaggcagtcagcggtaactgggacgtcaa

SEQ ID NO: 206221 - DNA, 50 bp, Artificial
  Synthetic oligonucleotide
aatggcgacggactcgaggcattgaaaggggcggggttatacgcccgaag

SEQ ID NO: 206222 - DNA, 50 bp, Artificial
  Synthetic oligonucleotide
aattgatcgggggttgcgtcgtacccaaggggcgagcataggctcacgtc

SEQ ID NO: 206223 - DNA, 50 bp, Artificial
  Synthetic oligonucleotide
acacccggctaggtcgcccgtcctacgtgacgcgtcggcaagagcgctcc

SEQ ID NO: 206224 - DNA, 50 bp, Artificial
  Synthetic oligonucleotide
acacctgttggccctcccacacgttgcctccgcgttgggcgagatagtag

SEQ ID NO: 206225 - DNA, 50 bp, Artificial
  Synthetic oligonucleotide
acacggaagacccccacggcccggagacgatggcccacgttgcgagcggt

SEQ ID NO: 206226 - DNA, 50 bp, Artificial
  Synthetic oligonucleotide
acagaccggtaacttgcgcccggctgaggtcaaatgcaccccaccatcgt

SEQ ID NO: 206227 - DNA, 50 bp, Artificial
  Synthetic oligonucleotide
acagacgtagtgggcagccagtccggtacggatcacgtacatgccgcctg

SEQ ID NO: 206228 - DNA, 58 bp, Artificial
  Synthetic oligonucleotide
aaaagggcgggactgaatacgacaccggcctagaggttcatcaactgcaattccatgc

SEQ ID NO: 206229 - DNA, 50 bp, Artificial
  Synthetic oligonucleotide
aaccctccgggaaggcacagcacagtactgggagtgtccgaatgccgtct

SEQ ID NO: 206230 - DNA, 50 bp, Artificial
  Synthetic oligonucleotide
acatcctcgacggtagggagaaacgcgtccccgcgaatgggcagaaccac

SEQ ID NO: 206231 - DNA, 50 bp, Artificial
  Synthetic oligonucleotide
acatgctgggagtactcgggggtgcctgggtatccgaagggttcgcgagt

SEQ ID NO: 206232 - DNA, 50 bp, Artificial
  Synthetic oligonucleotide
aaccgtagggggtgttgctcgaacgggggctctaatcccctccacgaaga

SEQ ID NO: 206233 - DNA, 50 bp, Artificial
  Synthetic oligonucleotide
accacaggcgtgacgaaagcctcaaccgttcgggtagccgggtctgccga

SEQ ID NO: 206234 - DNA, 50 bp, Artificial
  Synthetic oligonucleotide
accacgtgtccacatcgggtcgaagatctcggggaggcagtacgcccgag

SEQ ID NO: 206235 - DNA, 50 bp, Artificial
  Synthetic oligonucleotide
accactccgtacgctccgaaaggatctccacccgtcggccacaggtcgcc

SEQ ID NO: 206236 - DNA, 50 bp, Artificial
  Synthetic oligonucleotide
accagacggcacccggcgacctagcctcgccatacaggctcacattgccc

SEQ ID NO: 206237 - DNA, 50 bp, Artificial
  Synthetic oligonucleotide
accaggcatcgcatgagtagcgagggggcgccggatgagtcgacccggac

SEQ ID NO: 206238 - DNA, 50 bp, Artificial
  Synthetic oligonucleotide
accatcgtcactgaaacggtatcgggttgcgtcgagcccgcgctagaccg

SEQ ID NO: 206239 - DNA, 59 bp, Artificial
  Synthetic oligonucleotide
ctgcccgcacagagacagggtgcattcatggcgtgacctggtacgcccacagacttggc

SEQ ID NO: 206240 - DNA, 50 bp, Artificial
  Synthetic oligonucleotide
acccagggccccggcaaagtcctcaggtgatgccgagtagggacagtggt

SEQ ID NO: 206241 - DNA, 50 bp, Artificial
  Synthetic oligonucleotide
acccatgtgaagctccagtcgcttgtgtcaacgggggtggttccgcagcc

SEQ ID NO: 206242 - DNA, 50 bp, Artificial
  Synthetic oligonucleotide
accccacggatttcgtggcacccggtatggtcggccctacccacggtgac

SEQ ID NO: 206243 - DNA, 50 bp, Artificial
  Synthetic oligonucleotide
accccctcgtcaggacgcagattctaacacccggctaggtcgcccgtcct

SEQ ID NO: 206244 - DNA, 50 bp, Artificial
  Synthetic oligonucleotide
accccgatagaagtcacccacattctttcgcacggtggccgggttgtgcc

SEQ ID NO: 206245 - DNA, 50 bp, Artificial
  Synthetic oligonucleotide
aacgtccgtcactagtcgccccgtgcgctgtttgccctcacgccagccgt

SEQ ID NO: 206246 - DNA, 50 bp, Artificial
  Synthetic oligonucleotide
aagtgcggaatccacacgcgtgaacacccgtcgtgccagacagcccgaac

SEQ ID NO: 206247 - DNA, 50 bp, Artificial
  Synthetic oligonucleotide
agccataccggtgattctcctgtcactgggcgagcctgtcgcctggcccc

SEQ ID NO: 206248 - DNA, 50 bp, Artificial
  Synthetic oligonucleotide
agccgacagcggtcccgcctattccggggtgccaaccaggggaggaacat

SEQ ID NO: 206249 - DNA, 50 bp, Artificial
  Synthetic oligonucleotide
ctgtaggcggggtgatgtggcagatcgcaactcagatggtcacggagcgg

SEQ ID NO: 206250 - DNA, 59 bp, Artificial
  Synthetic oligonucleotide
ttttgaagctgagcgctggtgacgacatcgggctatctcgcgtgctggccgagggacga

SEQ ID NO: 206251 - DNA, 50 bp, Artificial
  Synthetic oligonucleotide
aacgtgtggataccggtctgagcacccaccgcccacaggtgatcttgcta

SEQ ID NO: 206252 - DNA, 50 bp, Artificial
  Synthetic oligonucleotide
aactggcagggacctgcacgctcgggacacagggaggccagacccatgcg

SEQ ID NO: 206253 - DNA, 50 bp, Artificial
  Synthetic oligonucleotide
aacttcgctttgacggttggcggacccgtggcatcattgagtcggtccca

SEQ ID NO: 206254 - DNA, 50 bp, Artificial
  Synthetic oligonucleotide
ctcgctggacaggcaacgtcatactcgtcccacacgtctagcaagcggga

SEQ ID NO: 206255 - DNA, 50 bp, Artificial
  Synthetic oligonucleotide
ctcgcccccactctgcacggtcgatcatgaggttagcggcgacaaaacgg

SEQ ID NO: 206256 - DNA, 50 bp, Artificial
  Synthetic oligonucleotide
agccgtgatccgttcgtgatctgtgtcgcattcggcgttcccaggtgcag

SEQ ID NO: 206257 - DNA, 50 bp, Artificial
  Synthetic oligonucleotide
aggaggctctacgcattccccaccatcgctgagggacacatcggtcgacg

SEQ ID NO: 206258 - DNA, 50 bp, Artificial
  Synthetic oligonucleotide
ctcaaggtcccccagccgagtcacccgtcaatcctacccccggtagtaga

SEQ ID NO: 206259 - DNA, 50 bp, Artificial
  Synthetic oligonucleotide
aggcgtcaacaggggcccttccttacagatggttggcgtggtgtcatggc

SEQ ID NO: 206260 - DNA, 50 bp, Artificial
  Synthetic oligonucleotide
aagctccagtcgcttgtgtcaacgggggtggttccgcagcccatcgtacg

SEQ ID NO: 206261 - DNA, 58 bp, Artificial
  Synthetic oligonucleotide
ctaggccgactcggagcgcttcctgtgatctgttgccgaattggcctgtactagatca

SEQ ID NO: 206262 - DNA, 50 bp, Artificial
  Synthetic oligonucleotide
ctacgggcccgactggaaaagaccggtgacagctgatggtgttccgcgta

SEQ ID NO: 206263 - DNA, 50 bp, Artificial
  Synthetic oligonucleotide
aagcactgaggcgctgcgataggtagccattacgccaaggctatcccgga

SEQ ID NO: 206264 - DNA, 50 bp, Artificial
  Synthetic oligonucleotide
ccaggcgtcggcccgtgcgtctccacaggtcggcgcgagttgttcggtac

SEQ ID NO: 206265 - DNA, 50 bp, Artificial
  Synthetic oligonucleotide
ccccagtcaggacgagatccgtcggcagaacctgggcgcattgctccgct

SEQ ID NO: 206266 - DNA, 50 bp, Artificial
  Synthetic oligonucleotide
cgtagcctggcacattgctcaggtcacgacagcccaggcaccctattcct

SEQ ID NO: 206267 - DNA, 50 bp, Artificial
  Synthetic oligonucleotide
cggtgtgtcacgtgcttgagacgacgagtgctcacatgcgtcactccgcg

SEQ ID NO: 206268 - DNA, 50 bp, Artificial
  Synthetic oligonucleotide
ccgtgttgagcgtagtgccccgcgcagtctggcgtatttcgtggcgactg

SEQ ID NO: 206269 - DNA, 50 bp, Artificial
  Synthetic oligonucleotide
aagattccaggggtgcgcctctgattaccgctcacgtgcgcctagactgg

SEQ ID NO: 206270 - DNA, 50 bp, Artificial
  Synthetic oligonucleotide
cgaatcttgacgtgcccccaggtgcgtgtgaccgtgggtcgcgaggccgt

SEQ ID NO: 206271 - DNA, 50 bp, Artificial
  Synthetic oligonucleotide
cggaggcgatggcaggtcggggcatagcgtagcctggcacattgctcagg

SEQ ID NO: 206272 - DNA, 58 bp, Artificial
  Synthetic oligonucleotide
ggagttgttgttcgtggcttcgcctgagcctccggcctgtgacggacaggagggccat

SEQ ID NO: 206273 - DNA, 50 bp, Artificial
  Synthetic oligonucleotide
cgagtccgcatccaggcgtcggcccgtgcgtctccacaggtcggcgcgag

SEQ ID NO: 206274 - DNA, 50 bp, Artificial
  Synthetic oligonucleotide
cgcacccggggcccctgaggacgacccgagttgctcccgagtcggggagg

SEQ ID NO: 206275 - DNA, 50 bp, Artificial
  Synthetic oligonucleotide
cgcagtcatgccccggaatgtagcatctctactacaatacgaggtacccc

SEQ ID NO: 206276 - DNA, 50 bp, Artificial
  Synthetic oligonucleotide
acgaaatccgctcagggtccgtcagcacatcccatgtcgccacgccgtca

SEQ ID NO: 206277 - DNA, 50 bp, Artificial
  Synthetic oligonucleotide
acgacacggtttcccccaagtttgcctcggcacagcacgccgactcgtta

SEQ ID NO: 206278 - DNA, 50 bp, Artificial
  Synthetic oligonucleotide
ggagcgtgtcagactggacgcgccatgacgagtcttccgctgatctccgt

SEQ ID NO: 206279 - DNA, 50 bp, Artificial
  Synthetic oligonucleotide
acgacggctcagcatatggggcgaaacggacatcgaggggcgagggaatg

SEQ ID NO: 206280 - DNA, 50 bp, Artificial
  Synthetic oligonucleotide
ggactggctgacaggtgaacttgcaaggctaccagtgcgggtcgcgtcga

SEQ ID NO: 206281 - DNA, 50 bp, Artificial
  Synthetic oligonucleotide
aacgcgactcaccgatagacaccacactccccctgcgttgtgacgcacgg

SEQ ID NO: 206282 - DNA, 50 bp, Artificial
  Synthetic oligonucleotide
acgcacaagccgtagggtggaaggccaccgacgtacgacgtgagggggcg

SEQ ID NO: 206283 - DNA, 57 bp, Artificial
  Synthetic oligonucleotide
agccaacccgagtgatgataggggtcaacgtcacccgcgcgtggcaagtccgttaca

SEQ ID NO: 206284 - DNA, 50 bp, Artificial
  Synthetic oligonucleotide
gcgtagtgccccgcgcagtctggcgtatttcgtggcgactggctattccg

SEQ ID NO: 206285 - DNA, 50 bp, Artificial
  Synthetic oligonucleotide
acgcaccctcatccaggcatcgcagccgtggcagacagccaccaaaccgg

SEQ ID NO: 206286 - DNA, 50 bp, Artificial
  Synthetic oligonucleotide
acgcctgcaccggtctgcggcctctgtagcctcttgcgcgacgggggtaa

SEQ ID NO: 206287 - DNA, 50 bp, Artificial
  Synthetic oligonucleotide
gcggtctcctcgattggtgcggactggctgacaggtgaacttgcaaggct

SEQ ID NO: 206288 - DNA, 50 bp, Artificial
  Synthetic oligonucleotide
acgcgcagtggacgtgtgacccgctcgagttcgtggaagaaccggatgag

SEQ ID NO: 206289 - DNA, 50 bp, Artificial
  Synthetic oligonucleotide
acgcgcgggtgacgttggccctatcatcactcgggtcgactcaccccatt

SEQ ID NO: 206290 - DNA, 50 bp, Artificial
  Synthetic oligonucleotide
acgcggaccgattggttcatccacgccggtggtaataccccacaccctga

SEQ ID NO: 206291 - DNA, 50 bp, Artificial
  Synthetic oligonucleotide
acgcgggtccccaccaacctaccagcgcacacgatcaagatcggaatgcc

SEQ ID NO: 206292 - DNA, 50 bp, Artificial
  Synthetic oligonucleotide
acgctcccagtcgggacgctacctgcaccggaggtgtttcacagcggttc

SEQ ID NO: 206293 - DNA, 50 bp, Artificial
  Synthetic oligonucleotide
acggagcgcttctgccgacctgacgtgcaccacctgttgttcgcgtacgg

SEQ ID NO: 206294 - DNA, 57 bp, Artificial
  Synthetic oligonucleotide
tcactcatgtcggaaatccttgtttcgcggacttggctccctgcgagggtagccagt

SEQ ID NO: 206295 - DNA, 50 bp, Artificial
  Synthetic oligonucleotide
acggaggtccgcactgggcgaatgttccggcatgcacgatgtctggccgg

SEQ ID NO: 206296 - DNA, 50 bp, Artificial
  Synthetic oligonucleotide
acggtacgaccggtcaaggtggacgactcacccgttcagccctttcccac

SEQ ID NO: 206297 - DNA, 50 bp, Artificial
  Synthetic oligonucleotide
acggtctctgcgggggatctgcggagcgtggcgtagtcggcacactaagt

SEQ ID NO: 206298 - DNA, 50 bp, Artificial
  Synthetic oligonucleotide
acgtcagaggcacccccagaccgggtacacgccggctcgcttcagcgtcc

SEQ ID NO: 206299 - DNA, 50 bp, Artificial
  Synthetic oligonucleotide
aacggcgcatctcggcgccacgggaggagaatgatgtccgacgggcagtc

SEQ ID NO: 206300 - DNA, 50 bp, Artificial
  Synthetic oligonucleotide
acgtcgggattcgaggctaactcggtctcgcgaggggcaatcatggcgta

SEQ ID NO: 206301 - DNA, 50 bp, Artificial
  Synthetic oligonucleotide
gcaggtcggggcatagcgtagcctggcacattgctcaggtcacgacagcc

SEQ ID NO: 206302 - DNA, 50 bp, Artificial
  Synthetic oligonucleotide
gcacggtcgatcatgaggttagcggcgacaaaacggacaccgagtgccgc

SEQ ID NO: 206303 - DNA, 50 bp, Artificial
  Synthetic oligonucleotide
acgtgcttgagacgacgagtgctcacatgcgtcactccgcgggtgccgag

SEQ ID NO: 206304 - DNA, 50 bp, Artificial
  Synthetic oligonucleotide
actcgacttgggatcgctgcacgccctagccttgcacatccgtccacata

SEQ ID NO: 206305 - DNA, 55 bp, Artificial
  Synthetic oligonucleotide
aggcccctgaatcgcccgccgattgccattcgggctaaccgcctaagctcttggt

SEQ ID NO: 206306 - DNA, 55 bp, Artificial
  Synthetic oligonucleotide
aggcacgaggtaggcgaagaaaccagcgccctgggtccacaggtagtgggcttgg

SEQ ID NO: 206307 - DNA, 50 bp, Artificial
  Synthetic oligonucleotide
actcgctggtggctcgaatgtcgagaaggtggctcacccacaggccgtgc

SEQ ID NO: 206308 - DNA, 50 bp, Artificial
  Synthetic oligonucleotide
acttgggcgttgacgggcacctatgcgacctgcagagatcgcctggaagg

SEQ ID NO: 206309 - DNA, 50 bp, Artificial
  Synthetic oligonucleotide
acttgtgccgccggtgtgagccaccggttgtttcgaacgaagtggacgca

SEQ ID NO: 206310 - DNA, 55 bp, Artificial
  Synthetic oligonucleotide
acgtagggtagcgaggacataacttcgagggaccttttgccggaggtcgcgatga

SEQ ID NO: 206311 - DNA, 55 bp, Artificial
  Synthetic oligonucleotide
cgtgttgtcacctggtctgaccatacaatggctctcgtcaccacttggggtaaat

SEQ ID NO: 206312 - DNA, 55 bp, Artificial
  Synthetic oligonucleotide
atcgaccggaggcgcccctcgagtcggtcaagaaggtgcgagccgctgatctgat

SEQ ID NO: 206313 - DNA, 55 bp, Artificial
  Synthetic oligonucleotide
cgtgaggagaaccctcgtggtacgcacaagactgacctggctcgcccttattgtc

SEQ ID NO: 206314 - DNA, 55 bp, Artificial
  Synthetic oligonucleotide
cgtgagcagcaatccgacgcgggctccacccaacgggcttcgcccgacgatcaat

SEQ ID NO: 206315 - DNA, 55 bp, Artificial
  Synthetic oligonucleotide
cgtccacataggtcatatcagccggatgtcgcttcgagcgcgcaatgggcgaggg

SEQ ID NO: 206316 - DNA, 55 bp, Artificial
  Synthetic oligonucleotide
attggaccgccgtacgccccggctctcatcggtacgcgtgcgccggcgcaacttg

SEQ ID NO: 206317 - DNA, 55 bp, Artificial
  Synthetic oligonucleotide
atttggcggacgtgtcgtttctcgactgtgccggtctgcggacgttggagcgtgc

SEQ ID NO: 206318 - DNA, 55 bp, Artificial
  Synthetic oligonucleotide
caaggagatcactctcagtttccgctacgtctcggtaacttcgggcttgacgagc

SEQ ID NO: 206319 - DNA, 60 bp, Artificial
  Synthetic oligonucleotide
aaggtgagtgtcattactcccgtgcataggtcgtctgcatcattcctcggtgatgtctac

SEQ ID NO: 206320 - DNA, 55 bp, Artificial
  Synthetic oligonucleotide
caccggatccgtcaccaactcgactatgttgtccaaacctgcccatttcggcgga

SEQ ID NO: 206321 - DNA, 55 bp, Artificial
  Synthetic oligonucleotide
cgtccacaaggctggctacagtggatggctcacgttggctcgggcggaattccac

SEQ ID NO: 206322 - DNA, 55 bp, Artificial
  Synthetic oligonucleotide
cacgcccaaccaaccaggactaagcccgagtcagcttccaggtccattgccgcgt

SEQ ID NO: 206323 - DNA, 55 bp, Artificial
  Synthetic oligonucleotide
cacgccccttacgctctcccatcgggcctgaagcgtagctagtccatcctcggtt

SEQ ID NO: 206324 - DNA, 55 bp, Artificial
  Synthetic oligonucleotide
cacggtctgagaacggaggaggactctgcgtgatccgccatagggaacagggtgc

SEQ ID NO: 206325 - DNA, 55 bp, Artificial
  Synthetic oligonucleotide
atcacgaggcgcgtaccgcccgctgtgtgaccaaccgacgatgatctctgatgcc

SEQ ID NO: 206326 - DNA, 55 bp, Artificial
  Synthetic oligonucleotide
ctagcgagcctactgtgcgtagccaccaaggaacgtacccactctgctctcgggg

SEQ ID NO: 206327 - DNA, 55 bp, Artificial
  Synthetic oligonucleotide
agtcgatgtgtgcagatccctcaggcgaggctgggacgtgcgcggagtcaagcaa

SEQ ID NO: 206328 - DNA, 55 bp, Artificial
  Synthetic oligonucleotide
aagtctgtcggcctgggagcgccttcgacccagttagccggcatcagctagaagg

SEQ ID NO: 206329 - DNA, 53 bp, Artificial
  Synthetic oligonucleotide
aggcacaaacgtgagggaccgttctaggctccgtaccggacctggacggctag

SEQ ID NO: 206330 - DNA, 59 bp, Artificial
  Synthetic oligonucleotide
ataccagtgggagaaggatcgtgtccatcagccggaagagatgcgacgacaaaagggcg

SEQ ID NO: 206331 - DNA, 55 bp, Artificial
  Synthetic oligonucleotide
aggatgaggcggaggtaagcagcgtcgaacggtgcgggtgcgttacgttgctcgt

SEQ ID NO: 206332 - DNA, 55 bp, Artificial
  Synthetic oligonucleotide
ctcgactaccgatcagccaaccgtgatcgctcaagcgggagaacataccgcctcc

SEQ ID NO: 206333 - DNA, 55 bp, Artificial
  Synthetic oligonucleotide
ctcgcaagtcgtctcccagcggtcgtgaggttctctgcgaggcagatttcgaaca

SEQ ID NO: 206334 - DNA, 55 bp, Artificial
  Synthetic oligonucleotide
ctctatgcgtccgtcgtggcctttccgacacgacgcagggaacaaatcaccgctg

SEQ ID NO: 206335 - DNA, 55 bp, Artificial
  Synthetic oligonucleotide
aacgtcgtgttatcgctcacagtcgatagtgaagacggacgatatctgtggctgt

SEQ ID NO: 206336 - DNA, 55 bp, Artificial
  Synthetic oligonucleotide
cttccgccaactatgcaccctgcgccgactccggacctgtcgttgtgactgcact

SEQ ID NO: 206337 - DNA, 55 bp, Artificial
  Synthetic oligonucleotide
agccccgtagggcagcagcgtgccattcgcggacccggctggccgtcacctcccg

SEQ ID NO: 206338 - DNA, 55 bp, Artificial
  Synthetic oligonucleotide
cttcgtgtgccgttggcgagaggattctccatacagtaagcgcgttgtcaccctg

SEQ ID NO: 206339 - DNA, 55 bp, Artificial
  Synthetic oligonucleotide
cttgccagcgaccgtggagcgccgtatgttaccgatcacatcaacggagcaccgg

SEQ ID NO: 206340 - DNA, 55 bp, Artificial
  Synthetic oligonucleotide
cttgtttcgcggacttggctccctgcgagggtagccagtacccctgtacgtcgtg

SEQ ID NO: 206341 - DNA, 55 bp, Artificial
  Synthetic oligonucleotide
atcctgcggacggaaccgggcgattggattctgtccatccggaagatttcaacgg

SEQ ID NO: 206342 - DNA, 55 bp, Artificial
  Synthetic oligonucleotide
gacacctcacgcgaccgcgagcccaactcggggtccatgtccatcacccggcact

SEQ ID NO: 206343 - DNA, 55 bp, Artificial
  Synthetic oligonucleotide
cgggtgtggtctgtcgagttgccgacgtggtgtggggtgcacgtccgggcggacg

SEQ ID NO: 206344 - DNA, 55 bp, Artificial
  Synthetic oligonucleotide
cctcacgcccacgatcttgcagttttggtcgcctaaatgcccgtcttgacccatt

SEQ ID NO: 206345 - DNA, 55 bp, Artificial
  Synthetic oligonucleotide
cctcaggtcgttggttatcctaccaatagttggggcacaaacagttggcccgcca

SEQ ID NO: 206346 - DNA, 52 bp, Artificial
  Synthetic oligonucleotide
cctccacttaaagtaccggaagtatcttgtgccgtagacgttaaggtacctc

SEQ ID NO: 206347 - DNA, 50 bp, Artificial
  Synthetic oligonucleotide
cctcgaacggaccaccaggggcgaataaaaggccaggtaggggcgaggtt

SEQ ID NO: 206348 - DNA, 55 bp, Artificial
  Synthetic oligonucleotide
cgggtgagtgaggctgaagcgacccggaccggcagcaagcgtgtgctcctggcga

SEQ ID NO: 206349 - DNA, 55 bp, Artificial
  Synthetic oligonucleotide
cgggtagagcgttaacaaattgacatgggtcaacaatgttgtcatgtcgaccgac

SEQ ID NO: 206350 - DNA, 55 bp, Artificial
  Synthetic oligonucleotide
cggcggtacgtcatctcagtcacgcgatcaaccctatgccaggcgttaggagggg

SEQ ID NO: 206351 - DNA, 55 bp, Artificial
  Synthetic oligonucleotide
cggagttctgatctcgttcagtccggatgactgctgccggttgtcgttctcacgc

SEQ ID NO: 206352 - DNA, 58 bp, Artificial
  Synthetic oligonucleotide
cacttgcccagtgatcccaggatcagtttcgggtcaggccgatcgggcgggccaggcg

SEQ ID NO: 206353 - DNA, 55 bp, Artificial
  Synthetic oligonucleotide
cgagcccggagtcacccaaccggcggtacgtcatctcagtcacgagatccaccct

SEQ ID NO: 206354 - DNA, 55 bp, Artificial
  Synthetic oligonucleotide
cgatataaatttctatctctcagaccaggactaccggatgcgaagcgtgattcgc

SEQ ID NO: 206355 - DNA, 55 bp, Artificial
  Synthetic oligonucleotide
cgatttactggtacacactggagcccaccattcgctctttcgacagcacgatggg

SEQ ID NO: 206356 - DNA, 55 bp, Artificial
  Synthetic oligonucleotide
cgcaaacgcaggttctccacagtttgcacaggaccgatgaagacgactagttatc

SEQ ID NO: 206357 - DNA, 55 bp, Artificial
  Synthetic oligonucleotide
cgcctgaatgagtggttgagccgtggtcacccttcgaccctagccatcaggtccg

SEQ ID NO: 206358 - DNA, 55 bp, Artificial
  Synthetic oligonucleotide
cgcagtatgtccaatacgtgccctgtatccacgagcttgtccacacgtgaacgcg

SEQ ID NO: 206359 - DNA, 55 bp, Artificial
  Synthetic oligonucleotide
cgccgatggccacagtattggaggcccggttcatcctgtcaacgagttccggaaa

SEQ ID NO: 206360 - DNA, 55 bp, Artificial
  Synthetic oligonucleotide
aagacagcagtcgacccagggccccggcaaagtcctcaggtgatgccgagtaggg

SEQ ID NO: 206361 - DNA, 53 bp, Artificial
  Synthetic oligonucleotide
cactgactcgtcagtaaccggggtggcgtggttccctagcttccgttcgaccc

SEQ ID NO: 206362 - DNA, 55 bp, Artificial
  Synthetic oligonucleotide
cagcgctgctacgcgcagagcgaaattcgaccgcctccggatcaacccacgacgt

SEQ ID NO: 206363 - DNA, 56 bp, Artificial
  Synthetic oligonucleotide
cgaagtcgggtggacaacgtcgcgtgtcttggatctcctccctgatgggtccgtaa

SEQ ID NO: 206364 - DNA, 55 bp, Artificial
  Synthetic oligonucleotide
cagctgtcgtggtgaatgtcggacaacagattgtgcatgtattcggagcggacac

SEQ ID NO: 206365 - DNA, 55 bp, Artificial
  Synthetic oligonucleotide
catcctcctcgtagatacaggccgcgcaaatggaaaggtcccgactgtccggcct

SEQ ID NO: 206366 - DNA, 55 bp, Artificial
  Synthetic oligonucleotide
ccacatgtgaatcaccggtggataactctctcaccagcgcaaacgcaggttctcc

SEQ ID NO: 206367 - DNA, 52 bp, Artificial
  Synthetic oligonucleotide
ccactaacggcgaccaattccgacgtccgccaactggtacccgcccaccctg

SEQ ID NO: 206368 - DNA, 55 bp, Artificial
  Synthetic oligonucleotide
cgtcaggaggtactcgccaagcagtgccccatcaagatctctacagtgattgacg

SEQ ID NO: 206369 - DNA, 55 bp, Artificial
  Synthetic oligonucleotide
ccagtgagactgactcaccaccgacaaacacgcccctgatcagcgttcgtgctgg

SEQ ID NO: 206370 - DNA, 55 bp, Artificial
  Synthetic oligonucleotide
cccctatcttcgtgtcgcctgagtcacatcgggaacaacttcccgtgcggaggcg

SEQ ID NO: 206371 - DNA, 55 bp, Artificial
  Synthetic oligonucleotide
cccgaagcacggttgtaatgtttcgccgccacagcgacgctacacacggaccgag

SEQ ID NO: 206372 - DNA, 55 bp, Artificial
  Synthetic oligonucleotide
cccgaaggttccactggtcgattcgacaatcatggctcccgggctgagatcacct

SEQ ID NO: 206373 - DNA, 55 bp, Artificial
  Synthetic oligonucleotide
cccgcgcggtgagtttgtaggtgcctggacgctctgctttaagcgaccaagccca

SEQ ID NO: 206374 - DNA, 56 bp, Artificial
  Synthetic oligonucleotide
cgcccggaggcggagtctcgaagcacgacctcggcgcgtccacgtccttgggcttc

SEQ ID NO: 206375 - DNA, 55 bp, Artificial
  Synthetic oligonucleotide
cggttaacgtgaatgcgtggttggtgggcgtagcagatcactcccgccagcttgt

SEQ ID NO: 206376 - DNA, 53 bp, Artificial
  Synthetic oligonucleotide
cccgtgcgtagttaccgaaggtctcaccggccgcccggtcatccaaccaggta

SEQ ID NO: 206377 - DNA, 55 bp, Artificial
  Synthetic oligonucleotide
cggtgtgatcgaatcgggtcgccacgcgaggagtgccatgcgagaagtgccggat

SEQ ID NO: 206378 - DNA, 55 bp, Artificial
  Synthetic oligonucleotide
ccgccccattgtcaagcgatcaggtagtactcacgcgcgtcccggaataccgtgc

SEQ ID NO: 206379 - DNA, 54 bp, Artificial
  Synthetic oligonucleotide
ccgggcgattggattctgtccatccggaagatttcaacgggtgtggacgggaag

SEQ ID NO: 206380 - DNA, 55 bp, Artificial
  Synthetic oligonucleotide
ggtggatccgtgtaggtgggaggccgggcgtccgactgaagcgttcggatcgcgt

SEQ ID NO: 206381 - DNA, 55 bp, Artificial
  Synthetic oligonucleotide
gtagtccggggccattcaccgcataggtcccggtcactccgtactccctgagaag

SEQ ID NO: 206382 - DNA, 55 bp, Artificial
  Synthetic oligonucleotide
gtatcgcccacggtacgctccgtaagcatcgtcggagttccggtccgcaacgtcc

SEQ ID NO: 206383 - DNA, 55 bp, Artificial
  Synthetic oligonucleotide
gtcggaagtaggatcgatagccagatccttgcaggacgttcgctcgtcgtcccac

SEQ ID NO: 206384 - DNA, 55 bp, Artificial
  Synthetic oligonucleotide
gtctcctaccaagatctcgccagagctgagcgtcacacctcacgcgtgacctgaa

SEQ ID NO: 206385 - DNA, 59 bp, Artificial
  Synthetic oligonucleotide
gctaaaactggcttccagaccgagcgaagcgagcaaaaagctttatgagcgaagcgaat

SEQ ID NO: 206386 - DNA, 60 bp, Artificial
  Synthetic oligonucleotide
atcactggtagcagctacccctgcatagattacggtactacacaccgccacaagactgtc

SEQ ID NO: 206387 - DNA, 56 bp, Artificial
  Synthetic oligonucleotide
cccagttttctttaggggtttcaaatatagttatctcaacatcatttgaatcaata

SEQ ID NO: 206388 - DNA, 53 bp, Artificial
  Synthetic oligonucleotide
aaatcggcgcaggcataagcacgtctgtttcacggcttgcataaccgaacatt

SEQ ID NO: 206389 - DNA, 53 bp, Artificial
  Synthetic oligonucleotide
tgacaactgctctaccacaagacagtgaagcatttactcgtattcaaggtgaa

SEQ ID NO: 206390 - DNA, 53 bp, Artificial
  Synthetic oligonucleotide
cttcagacattccagcttatgatgtttggacgcagttaaaagacgagccttgc

SEQ ID NO: 206391 - DNA, 53 bp, Artificial
  Synthetic oligonucleotide
gtccaacttcggcagaagttttactccttagacagcagatagacctactaaaa

SEQ ID NO: 206392 - DNA, 53 bp, Artificial
  Synthetic oligonucleotide
aactttgaatcatacaccgtatctactaaagggcgacccaagcttggaccttg

SEQ ID NO: 206393 - DNA, 53 bp, Artificial
  Synthetic oligonucleotide
gcggttacagcaacgaacgcccgctaccgattcgctattgggaccgcgcaggc

SEQ ID NO: 206394 - DNA, 53 bp, Artificial
  Synthetic oligonucleotide
aacgctaaagacactaccaaagtgctgccacccaacagacttaacattccggc

SEQ ID NO: 206395 - DNA, 53 bp, Artificial
  Synthetic oligonucleotide
ggccagtccgtcttgcaagctcttgatatactggaactgctgacaatgccatt

SEQ ID NO: 206396 - DNA, 53 bp, Artificial
  Synthetic oligonucleotide
ctctgggacattgtccactcgcacatctttagcaccgtggtaagttaaagcac

SEQ ID NO: 206397 - DNA, 52 bp, Artificial
  Synthetic oligonucleotide
acggattctaacggagtccccagacccacgcttaataaataaagttccacca

SEQ ID NO: 206398 - DNA, 56 bp, Artificial
  Synthetic oligonucleotide
cacgttgcaaagtgtggcagtgccacaacacaaaaaacgtggtttatttggccgtg

SEQ ID NO: 206399 - DNA, 53 bp, Artificial
  Synthetic oligonucleotide
tacggcttaaatatggcacaacttccggcttccatgcgccgtaaacgtgcggc

SEQ ID NO: 206400 - DNA, 53 bp, Artificial
  Synthetic oligonucleotide
ctctatcaaaatccaaaactaggaccatcaaatcccttcgttttttcttgtgc

SEQ ID NO: 206401 - DNA, 53 bp, Artificial
  Synthetic oligonucleotide
tacgggcgccgtacatcggtgagttcgcaaggcccatagacagtagtgcttcg

SEQ ID NO: 206402 - DNA, 53 bp, Artificial
  Synthetic oligonucleotide
tagacccttggaacgctgactcagatgcagccagaccttgtactgccgtgcca

SEQ ID NO: 206403 - DNA, 53 bp, Artificial
  Synthetic oligonucleotide
ctcagtggacggtaagaccttattaaaagcacaacagtcacgcaagcttatgg

SEQ ID NO: 206404 - DNA, 53 bp, Artificial
  Synthetic oligonucleotide
ctcaggcgcgccgacttgctttactcggcatgcgttttgagggccatacagca

SEQ ID NO: 206405 - DNA, 53 bp, Artificial
  Synthetic oligonucleotide
ggggatgtagaacccaattcaggcggtattcgtaagattagatggactagtgg

SEQ ID NO: 206406 - DNA, 53 bp, Artificial
  Synthetic oligonucleotide
tcctatattgctggtaaactctggaatcagtgggtaattgccggtcagatccc

SEQ ID NO: 206407 - DNA, 53 bp, Artificial
  Synthetic oligonucleotide
tcctgccggcgaaaagcctattgtgggtgcagacagccgtactctagcgcgta

SEQ ID NO: 206408 - DNA, 53 bp, Artificial
  Synthetic oligonucleotide
ctatcaacaggtccttacggcgcataaggaacaggttcgtaaagccaatattc

SEQ ID NO: 206409 - DNA, 59 bp, Artificial
  Synthetic oligonucleotide
cccatttttgacccaaaaaactcaaatcacgcaaccatcacgcagaataattcagctca

SEQ ID NO: 206410 - DNA, 53 bp, Artificial
  Synthetic oligonucleotide
tatacgttattacaacgagatgaagcgttaacgccacatatggaccccttacc

SEQ ID NO: 206411 - DNA, 53 bp, Artificial
  Synthetic oligonucleotide
tatagtgacagatttataatgacgtttctatgtgttttccggtctgggcgaca

SEQ ID NO: 206412 - DNA, 53 bp, Artificial
  Synthetic oligonucleotide
ggctcataaagcgttagataaggccgttgatagtgcttatggttatcgtggca

SEQ ID NO: 206413 - DNA, 53 bp, Artificial
  Synthetic oligonucleotide
tcgtttatctgcggcgatgggtgtacgccgttcagaggcgcttcatttacggc

SEQ ID NO: 206414 - DNA, 53 bp, Artificial
  Synthetic oligonucleotide
agccccacgcccaatgaatctcatgcacggtccagacggctgctagcggagta

SEQ ID NO: 206415 - DNA, 53 bp, Artificial
  Synthetic oligonucleotide
tcagggcgcgtggagtggtacggttggcgaggtttcagacttacatgctgtga

SEQ ID NO: 206416 - DNA, 53 bp, Artificial
  Synthetic oligonucleotide
tcagataaaatgcacgatgacatatctgccacgatgggcgtatcaacctttgg

SEQ ID NO: 206417 - DNA, 53 bp, Artificial
  Synthetic oligonucleotide
tacatcgaccgatttgtttaagccttggtgtgcagatgcacaggtggtgtcta

SEQ ID NO: 206418 - DNA, 53 bp, Artificial
  Synthetic oligonucleotide
ggcaggggcaattgcaagcacttgtgcaaccgcaggcgttttaggatcaccac

SEQ ID NO: 206419 - DNA, 53 bp, Artificial
  Synthetic oligonucleotide
tacccgatacaacatcaatacgggcgccgtacatcggtgagttcgcaaggccc

SEQ ID NO: 206420 - DNA, 60 bp, Artificial
  Synthetic oligonucleotide
gggtaaacgctgagcccacaggcagctatgcccgtagaatggctttcttgtatgaatggc

SEQ ID NO: 206421 - DNA, 53 bp, Artificial
  Synthetic oligonucleotide
ctaccgcccttgcgttagcgtcaagtatggttttaaccacgtcgtgtagtacg

SEQ ID NO: 206422 - DNA, 53 bp, Artificial
  Synthetic oligonucleotide
ggcatcgtagttaccccaagtggcggtcgtacgggcttatcagccggtgcagt

SEQ ID NO: 206423 - DNA, 53 bp, Artificial
  Synthetic oligonucleotide
ccatactcctacaggcgtcataggttttttggtgtcaatctcaaagaatgatg

SEQ ID NO: 206424 - DNA, 53 bp, Artificial
  Synthetic oligonucleotide
ccatagcgagtggctagggactagtgaaagcgatgattttgccgagtgtaaac

SEQ ID NO: 206425 - DNA, 53 bp, Artificial
  Synthetic oligonucleotide
tcggatttgttctgcattgagtggacttgtattgacccaatctaggattttcg

SEQ ID NO: 206426 - DNA, 52 bp, Artificial
  Synthetic oligonucleotide
tcccgaggcgtacacccccaatcccatcttgagtgcttgccctttggttgcc

SEQ ID NO: 206427 - DNA, 52 bp, Artificial
  Synthetic oligonucleotide
agggctttaaatggtcaggtcaactgcctttatcccgctttgttcgtatcgc

SEQ ID NO: 206428 - DNA, 52 bp, Artificial
  Synthetic oligonucleotide
aggcctgtccgagtacttggcctccaaacacccgtttaccgaccaggttgcg

SEQ ID NO: 206429 - DNA, 52 bp, Artificial
  Synthetic oligonucleotide
tcccaacaacgtagcaaagaggttagtaacgtcattaagccatcgagaaaat

SEQ ID NO: 206430 - DNA, 52 bp, Artificial
  Synthetic oligonucleotide
tccaactagacgagcagctacattaattcgaattttagatgctcacccaagc

SEQ ID NO: 206431 - DNA, 54 bp, Artificial
  Synthetic oligonucleotide
cacggcaccctctacctaccagaacccaaactggggacaggcaaacaaaatgaa

SEQ ID NO: 206432 - DNA, 52 bp, Artificial
  Synthetic oligonucleotide
tcaagtgcaagtaatggcgagcctcctctcgttgctacacgggttgagcgcg

SEQ ID NO: 206433 - DNA, 52 bp, Artificial
  Synthetic oligonucleotide
acagggttacccgcaccagagtcccagcctactgaaacgttacccgcccact

SEQ ID NO: 206434 - DNA, 52 bp, Artificial
  Synthetic oligonucleotide
agcttggggtgtttgcaacccgaagtatgtaccgtccagcgccagtgggcct

SEQ ID NO: 206435 - DNA, 52 bp, Artificial
  Synthetic oligonucleotide
acgtttgggcctaggtgctgacagccggattggttcaagctatttacaaccg

SEQ ID NO: 206436 - DNA, 52 bp, Artificial
  Synthetic oligonucleotide
acattgagtcataccctctggaacgacctcgttcaaccgacttagaaacaag

SEQ ID NO: 206437 - DNA, 52 bp, Artificial
  Synthetic oligonucleotide
tccgagcagcacgcatggcagcagtcgagtagccaaacagctaagcagactt

SEQ ID NO: 206438 - DNA, 52 bp, Artificial
  Synthetic oligonucleotide
agctcggccttcacgaatactgcgcagacgacggttacgcacggtttgtggc

SEQ ID NO: 206439 - DNA, 52 bp, Artificial
  Synthetic oligonucleotide
aaaagagccagaaacgcaaaatatgggccaagaagcgcatattcaagatgaa

SEQ ID NO: 206440 - DNA, 52 bp, Artificial
  Synthetic oligonucleotide
agcgcacggtttcatttgaccattgatcgcctaagctaagcgccatttcggt

SEQ ID NO: 206441 - DNA, 52 bp, Artificial
  Synthetic oligonucleotide
tctacgctattcgctaaatgatccaaatctgacgacccaatagccgcgtcct

SEQ ID NO: 206442 - DNA, 57 bp, Artificial
  Synthetic oligonucleotide
cccgatcggttcaaatggtcgaccctcatttgcttctcgttgatcacggtatttagc

SEQ ID NO: 206443 - DNA, 52 bp, Artificial
  Synthetic oligonucleotide
aatcgcatgtcgcggcatcacccgcacacgaattgcatttggccaagctcgt

SEQ ID NO: 206444 - DNA, 52 bp, Artificial
  Synthetic oligonucleotide
atctggtttaccgctttaggtaaagttttatctgggtctcgtgcttctgccg

SEQ ID NO: 206445 - DNA, 52 bp, Artificial
  Synthetic oligonucleotide
tcgtaaacactatcaagacggtagtgagaacgcaccaaccctggctcagtta

SEQ ID NO: 206446 - DNA, 52 bp, Artificial
  Synthetic oligonucleotide
tcggcctgtaagccatcaatcacagagcgtgcttgcttgcccgatccaccat

SEQ ID NO: 206447 - DNA, 52 bp, Artificial
  Synthetic oligonucleotide
atccaaaggtaatgtttgctgataagcagttggttgaagtaaaaacacaatc

SEQ ID NO: 206448 - DNA, 52 bp, Artificial
  Synthetic oligonucleotide
aatcctatgtgttttcctgttggaagctctacatcaatacgaagttttccgc

SEQ ID NO: 206449 - DNA, 52 bp, Artificial
  Synthetic oligonucleotide
atcatcgattgataggaactgttctagtaggtgtggatcctattaataggat

SEQ ID NO: 206450 - DNA, 52 bp, Artificial
  Synthetic oligonucleotide
taataaccacttcacacaccgccaaacactcaaacaaggcggacgatatttg

SEQ ID NO: 206451 - DNA, 52 bp, Artificial
  Synthetic oligonucleotide
aataacaagcataacgagtcacatcaaagttaggcagtaacgcctcctcaaa

SEQ ID NO: 206452 - DNA, 52 bp, Artificial
  Synthetic oligonucleotide
tgatatacgcaactgcgggctgattggcgctgtgcaattggcaccccgtgac

SEQ ID NO: 206453 - DNA, 59 bp, Artificial
  Synthetic oligonucleotide
ggggatgccttgggtacggaattaggaattcattctaatcaatatggaggtggagcatc

SEQ ID NO: 206454 - DNA, 52 bp, Artificial
  Synthetic oligonucleotide
tacgatgcaagtggtgaccgtgttgcaccggaaccaagtcagggcgattttt

SEQ ID NO: 206455 - DNA, 52 bp, Artificial
  Synthetic oligonucleotide
tacggacagcaggatgcgccacttcgacggagcactcgatatcttgcgggta

SEQ ID NO: 206456 - DNA, 52 bp, Artificial
  Synthetic oligonucleotide
tgatcatgacacggaaagtctacgcatcgaaatcatgtcacaagtacgtgca

SEQ ID NO: 206457 - DNA, 52 bp, Artificial
  Synthetic oligonucleotide
attcgtaaggctcatcaagttgaagattatccggctgttttacgtcaagcat

SEQ ID NO: 206458 - DNA, 52 bp, Artificial
  Synthetic oligonucleotide
aacgttcctgttttggcgttgcggctaggcaggcacgtcccatagagctgtt

SEQ ID NO: 206459 - DNA, 52 bp, Artificial
  Synthetic oligonucleotide
tagcaccgtaggtatctttcgcgtactgcaaacggtagtcattatgatctac

SEQ ID NO: 206460 - DNA, 52 bp, Artificial
  Synthetic oligonucleotide
acacgaagttaaccgcgcgcttgcaaccggtcaggtggctattcacgcacgc

SEQ ID NO: 206461 - DNA, 52 bp, Artificial
  Synthetic oligonucleotide
tcgacatccagcacactcgaaagtgtcccactcccgtcctaccgctacggga

SEQ ID NO: 206462 - DNA, 52 bp, Artificial
  Synthetic oligonucleotide
acagagcccgcgctatttgggagccgtgctttagcgcatatttgtgccccag

SEQ ID NO: 206463 - DNA, 52 bp, Artificial
  Synthetic oligonucleotide
taggttcaatagcgacagaggcggattatcgctatgagtaatcaaaatgacc

SEQ ID NO: 206464 - DNA, 60 bp, Artificial
  Synthetic oligonucleotide
ccgactggagtaatgctattcgtcatgggcaattttatcgtccagtgaagcaacaaacat

SEQ ID NO: 206465 - DNA, 52 bp, Artificial
  Synthetic oligonucleotide
acttgccggccatgcgggcttggtttgcgactgcctacaatcgcgatctggg

SEQ ID NO: 206466 - DNA, 52 bp, Artificial
  Synthetic oligonucleotide
tcgaagggcgtaagtctcaagtggatgagcgcgttgcagcacgtaagcgtcg

SEQ ID NO: 206467 - DNA, 52 bp, Artificial
  Synthetic oligonucleotide
tgtacagcgtggcgttaaaataccgcccaagctcgtcaatcgccccaaggta

SEQ ID NO: 206468 - DNA, 52 bp, Artificial
  Synthetic oligonucleotide
cctctatgcgaattactgtgtaacccatcttctcagctacgtcgtaacgatc

SEQ ID NO: 206469 - DNA, 52 bp, Artificial
  Synthetic oligonucleotide
gcaaatcaacgaattatatcagcgagccaatcccacagatgagctttttcgc

SEQ ID NO: 206470 - DNA, 52 bp, Artificial
  Synthetic oligonucleotide
ggctgtgaagcctaaataagcgtaaatcacatgcagaaaattgagcctagat

SEQ ID NO: 206471 - DNA, 52 bp, Artificial
  Synthetic oligonucleotide
gctaatgtggtgaccacgctcaaataagtgtttagcaacacgctgagatgtt

SEQ ID NO: 206472 - DNA, 52 bp, Artificial
  Synthetic oligonucleotide
gtcgtaccagactaatacgtctttatcccgaaatagcacctgtagagccata

SEQ ID NO: 206473 - DNA, 52 bp, Artificial
  Synthetic oligonucleotide
catgtgcctaagctgactacagacatgacttacgacttcgatgccatgactg

SEQ ID NO: 206474 - DNA, 52 bp, Artificial
  Synthetic oligonucleotide
cgccccaatcgctcagcgattcttcaggttgcggccgtaatcaagcgtgcgt

SEQ ID NO: 206475 - DNA, 53 bp, Artificial
  Synthetic oligonucleotide
gggaatctcccgttttcctattgaacggtattggcttaataactcataaatac

SEQ ID NO: 206476 - DNA, 52 bp, Artificial
  Synthetic oligonucleotide
cacgtggtacgtagccgacgtcatgcggagtttgacgagcatgcgcctagcc

SEQ ID NO: 206477 - DNA, 52 bp, Artificial
  Synthetic oligonucleotide
gtcaacatctcttacttgacccgctctatgggcaaaggcgctagtaaaactg

SEQ ID NO: 206478 - DNA, 52 bp, Artificial
  Synthetic oligonucleotide
cgtgatgccacctctatcaaacgcgatgtaccagactatgtcgctgaaatgc

SEQ ID NO: 206479 - DNA, 52 bp, Artificial
  Synthetic oligonucleotide
ccggcgcttatcttgctcgattggatgttacccgggggcgtaagtggggtcg

SEQ ID NO: 206480 - DNA, 52 bp, Artificial
  Synthetic oligonucleotide
gctcagatgattgccaacgaagtcagatcagttatactaaagctgtctctgg

SEQ ID NO: 206481 - DNA, 52 bp, Artificial
  Synthetic oligonucleotide
cacgataaggttttaaagcctctttgaccagaacctgatctgtctgagttag

SEQ ID NO: 206482 - DNA, 52 bp, Artificial
  Synthetic oligonucleotide
cccgtttcaggcgagctggcattggccatacgcttacgtggcatacgacccg

SEQ ID NO: 206483 - DNA, 52 bp, Artificial
  Synthetic oligonucleotide
gaaaagtgggcgaaaactctctaatattagggttcacgcagatcccaactac

SEQ ID NO: 206484 - DNA, 51 bp, Artificial
  Synthetic oligonucleotide
ggggtaaattgtatagatgctatttcacattggataatgaatcctgcgctg

SEQ ID NO: 206485 - DNA, 51 bp, Artificial
  Synthetic oligonucleotide
ccccttatctggatcaattaaccccgcctcccgatttgcccctactattgg

SEQ ID NO: 206486 - DNA, 60 bp, Artificial
  Synthetic oligonucleotide
ccgaggcttgactctatacggacttgtgtgcgtgcgcttcagtcgggttcccagaccaca

SEQ ID NO: 206487 - DNA, 51 bp, Artificial
  Synthetic oligonucleotide
agttggcgccatggtacttcttgggcgtttgcctccttccacacggttggc

SEQ ID NO: 206488 - DNA, 51 bp, Artificial
  Synthetic oligonucleotide
gactgcttcgctgccctcatctcatcacggcgttggcgggagatgacacct

SEQ ID NO: 206489 - DNA, 51 bp, Artificial
  Synthetic oligonucleotide
cgcctcatctagcgtctcacggtcgcctgccaaaaacatgagagcgtccga

SEQ ID NO: 206490 - DNA, 51 bp, Artificial
  Synthetic oligonucleotide
ccgtggcctcgttactaccagagggtaccaatttacaggattttgatgcac

SEQ ID NO: 206491 - DNA, 51 bp, Artificial
  Synthetic oligonucleotide
ctgtacgttttcccttgaatcacagaaagcacatggtttagagagttgaat

SEQ ID NO: 206492 - DNA, 51 bp, Artificial
  Synthetic oligonucleotide
gagattcaatagagtttgagcgtagcgaaaaccaagggcaatttttcattc

SEQ ID NO: 206493 - DNA, 51 bp, Artificial
  Synthetic oligonucleotide
tacgttgaacatttcagtggtacgaaacttgatagacccgcacttactcta

SEQ ID NO: 206494 - DNA, 51 bp, Artificial
  Synthetic oligonucleotide
atcaccagcgagtgctcagtggcatattacaacaagttagacttcccaaag

SEQ ID NO: 206495 - DNA, 51 bp, Artificial
  Synthetic oligonucleotide
atcacctagtgggctttcaccactttcgacttgtgtacggctcacaacggc

SEQ ID NO: 206496 - DNA, 51 bp, Artificial
  Synthetic oligonucleotide
ccgttctagtgcatttcggcttatctatacacttgaagcttgcggttactt

SEQ ID NO: 206497 - DNA, 54 bp, Artificial
  Synthetic oligonucleotide
tacgacttggcgttaatccaagctcaaatcttagaaaaactgccccaaaagcct

SEQ ID NO: 206498 - DNA, 60 bp, Artificial
  Synthetic oligonucleotide
gggaaaggtgcaagacctttagtccttgtctgccatgtgtgcgaagcatggtgcggatac

SEQ ID NO: 206499 - DNA, 51 bp, Artificial
  Synthetic oligonucleotide
aacggttccctcatgaaatgctagggttgcatcaatccctcctttgccaat

SEQ ID NO: 206500 - DNA, 51 bp, Artificial
  Synthetic oligonucleotide
gactaacctgaaattagaaggttcgagtggttcagcgttaagacaatgtat

SEQ ID NO: 206501 - DNA, 51 bp, Artificial
  Synthetic oligonucleotide
cgaaacggctgcggcaaccgtccctttggacacctccgatgacatcaacgc

SEQ ID NO: 206502 - DNA, 51 bp, Artificial
  Synthetic oligonucleotide
atcacggtagttggggtggtcactctagatccttacttagctgatacttat

SEQ ID NO: 206503 - DNA, 51 bp, Artificial
  Synthetic oligonucleotide
tcactatctgttatcgagctttcaaacctctatggaatgactcgtcaagcc

SEQ ID NO: 206504 - DNA, 51 bp, Artificial
  Synthetic oligonucleotide
aacctaatgggctgacggagccacgcatcggtcgtatccgcaccatgcttc

SEQ ID NO: 206505 - DNA, 51 bp, Artificial
  Synthetic oligonucleotide
cgcgcacgctcagactgacgctgcttactcacgcgataacgcggtacatcc

SEQ ID NO: 206506 - DNA, 51 bp, Artificial
  Synthetic oligonucleotide
gctgctgcaactcccccaacgggtcttgggctggcgaatactgcatgtttt

SEQ ID NO: 206507 - DNA, 51 bp, Artificial
  Synthetic oligonucleotide
cgttgttcctgtactgcaattgccagtaaatgtttcataagatcgtcttgt

SEQ ID NO: 206508 - DNA, 51 bp, Artificial
  Synthetic oligonucleotide
tcgcttcattgcagccgccagtcatgacctactccagcccatgcatgcagc

SEQ ID NO: 206509 - DNA, 60 bp, Artificial
  Synthetic oligonucleotide
gtagagccttctgcaactcgctcaccatgaacgcgcgtatctcatccgatgctaccacgc

SEQ ID NO: 206510 - DNA, 51 bp, Artificial
  Synthetic oligonucleotide
aggccagctgaagcacccacctctgcttggtatgcatgcgcagtacctgtg

SEQ ID NO: 206511 - DNA, 51 bp, Artificial
  Synthetic oligonucleotide
agctcgcgggtatgtaaacgctcgtataactgaccggccatgataaatagc

SEQ ID NO: 206512 - DNA, 51 bp, Artificial
  Synthetic oligonucleotide
ccgcttctgccaatagcagcaaccgccgtcgtaacagtccaccgatgggaa

SEQ ID NO: 206513 - DNA, 51 bp, Artificial
  Synthetic oligonucleotide
aatgagatctggagagatagtaaatcgcttgcctgtgcacgtctgtttgtc

SEQ ID NO: 206514 - DNA, 51 bp, Artificial
  Synthetic oligonucleotide
ccgctaactaaaggcgctccattactcgctttcacatgacgaagaacaccc

SEQ ID NO: 206515 - DNA, 51 bp, Artificial
  Synthetic oligonucleotide
aggtagcgcggattcgccacatgtaagtgcgcttttgacacatgcacgggc

SEQ ID NO: 206516 - DNA, 51 bp, Artificial
  Synthetic oligonucleotide
cgccgcgccaatttttaacgcatccaccaagggcacacctgactgggtcaa

SEQ ID NO: 206517 - DNA, 51 bp, Artificial
  Synthetic oligonucleotide
agcgtctcacggtcgcctgccaaaaacatgagagcgtccgacactcgcacc

SEQ ID NO: 206518 - DNA, 51 bp, Artificial
  Synthetic oligonucleotide
aggtgcgagctcggcaatcattcgaccgaccaagcctctaattgtggcgct

SEQ ID NO: 206519 - DNA, 51 bp, Artificial
  Synthetic oligonucleotide
aggtgcgcccgtcgaatgacgtccgcgagctttcaagacttggcccatgta

SEQ ID NO: 206520 - DNA, 60 bp, Artificial
  Synthetic oligonucleotide
catccgaatcattagtgcaaggcaagtcactaaagcggagcgaaacaaatatgagcatgg

SEQ ID NO: 206521 - DNA, 51 bp, Artificial
  Synthetic oligonucleotide
agcgctctcgcaagcccggtaaatgccgtcgactcactgctaggcgctcat

SEQ ID NO: 206522 - DNA, 51 bp, Artificial
  Synthetic oligonucleotide
aagcgtccaccatatcgtacacataacattcaagagtagctccgttgtggc

SEQ ID NO: 206523 - DNA, 51 bp, Artificial
  Synthetic oligonucleotide
gagcatacaccaaccgaactaaaatcattggcaatcgccttcaatgctatg

SEQ ID NO: 206524 - DNA, 51 bp, Artificial
  Synthetic oligonucleotide
agacattagtatccttagagacgtagatagagaacctagcaacgttatacc

SEQ ID NO: 206525 - DNA, 51 bp, Artificial
  Synthetic oligonucleotide
gagcagtacgcggattttcaagccccttggacttcaccgcagcctttgccc

SEQ ID NO: 206526 - DNA, 51 bp, Artificial
  Synthetic oligonucleotide
tagggccattggtaggtgcgctttttcgtcccgttggtggttgggtgtctg

SEQ ID NO: 206527 - DNA, 51 bp, Artificial
  Synthetic oligonucleotide
ccctactgcaaccagtgcggtctcccaagcgattgtgccctgctgccaaat

SEQ ID NO: 206528 - DNA, 51 bp, Artificial
  Synthetic oligonucleotide
agtgcagccgatgctcccagtaagccaccgcctatcacgaccacgtcacat

SEQ ID NO: 206529 - DNA, 51 bp, Artificial
  Synthetic oligonucleotide
taggaaccatagcaggaacaggagaaagcatcttcttaaatcggattatgg

SEQ ID NO: 206530 - DNA, 51 bp, Artificial
  Synthetic oligonucleotide
agttagggattgatattagtcaagatacgcctgaacagatgaagaatcgca

SEQ ID NO: 206531 - DNA, 60 bp, Artificial
  Synthetic oligonucleotide
catagctcctacctttagctcggccacctttagcacctctagtagcttgaagcttagaga

SEQ ID NO: 206532 - DNA, 51 bp, Artificial
  Synthetic oligonucleotide
gtcacacaaggctatgccagtgataccgatgagacagcgcttaaggtacag

SEQ ID NO: 206533 - DNA, 51 bp, Artificial
  Synthetic oligonucleotide
caggaatcttggaattgctggtttggccgcgtgcagcatgggctaatgcag

SEQ ID NO: 206534 - DNA, 51 bp, Artificial
  Synthetic oligonucleotide
gtcagggcagccgggttataactctcgcccatttgccgggcgaccagtcgt

SEQ ID NO: 206535 - DNA, 51 bp, Artificial
  Synthetic oligonucleotide
aaacgccgctgtaccaaagtttacgtcttgagctaaaattcgacagtctgg

SEQ ID NO: 206536 - DNA, 51 bp, Artificial
  Synthetic oligonucleotide
caaccgtggcaagtgacagccctgccaccaaacgattacggcggggaaaag

SEQ ID NO: 206537 - DNA, 51 bp, Artificial
  Synthetic oligonucleotide
tgcactatcgtggtcgattatattaatgacactggctacggtatgtattgc

SEQ ID NO: 206538 - DNA, 51 bp, Artificial
  Synthetic oligonucleotide
tgagcgtgtcttgcaaggtgagcaggtagactggttgcaagaatatgaaaa

SEQ ID NO: 206539 - DNA, 51 bp, Artificial
  Synthetic oligonucleotide
gtccgtctgcgcgtggttcgactgaacttctgcgttggttagcgacgcgtg

SEQ ID NO: 206540 - DNA, 51 bp, Artificial
  Synthetic oligonucleotide
gcagttggttctttacttaaagatggcaatagagcattaggactaatgcag

SEQ ID NO: 206541 - DNA, 51 bp, Artificial
  Synthetic oligonucleotide
gaagcggttagaggcgagggtgggcggctcattaatgctcaaggcgaacgc

SEQ ID NO: 206542 - DNA, 58 bp, Artificial
  Synthetic oligonucleotide
cataccatccaacaacaaggacaccgtaaatggctaagttatcgctaagcgaagtatc

SEQ ID NO: 206543 - DNA, 51 bp, Artificial
  Synthetic oligonucleotide
gaagcatggtgcggatacgaccgatgcgtggctccgtcagcccattaggtt

SEQ ID NO: 206544 - DNA, 51 bp, Artificial
  Synthetic oligonucleotide
tttgcaacccgaagtatgtaccgtccagcgccagtgggcctgtcagtggta

SEQ ID NO: 206545 - DNA, 51 bp, Artificial
  Synthetic oligonucleotide
gaagcataattcaaatgtagaaataagttcctagacgagcgtaagcgagca

SEQ ID NO: 206546 - DNA, 51 bp, Artificial
  Synthetic oligonucleotide
aaaacggctcgctcttaaagggtctgcgtgagaaggcgtgggcggatgggg

SEQ ID NO: 206547 - DNA, 51 bp, Artificial
  Synthetic oligonucleotide
ttttaatcaaataagaaccgagcaaaattttacgtcgggtgtcatctttgc

SEQ ID NO: 206548 - DNA, 51 bp, Artificial
  Synthetic oligonucleotide
caagtgacgggaacccataccgcacagcctgttactttccgccgtgctcaa

SEQ ID NO: 206549 - DNA, 51 bp, Artificial
  Synthetic oligonucleotide
gcacagttgctggcgtcgccttgctccgtggtgtacctgtaggccctctta

SEQ ID NO: 206550 - DNA, 51 bp, Artificial
  Synthetic oligonucleotide
cctcctacataactggttccgatgggcattgtggtaggccggcccttgggc

SEQ ID NO: 206551 - DNA, 51 bp, Artificial
  Synthetic oligonucleotide
ttttcaaccacctgtgcagtaaatgtgattcagtattggacagtacgctca

SEQ ID NO: 206552 - DNA, 51 bp, Artificial
  Synthetic oligonucleotide
gtgccattgcaactgcacgtttgctgccaaaccactggattggccgggtgg

SEQ ID NO: 206553 - DNA, 56 bp, Artificial
  Synthetic oligonucleotide
gtagatttcgtcataacgtccaatttaggaatgtagaaaaccactcaagcataaaa

SEQ ID NO: 206554 - DNA, 51 bp, Artificial
  Synthetic oligonucleotide
cacgcggggtgcttgagtggcagcgacatattgtggagcgcttcttggttg

SEQ ID NO: 206555 - DNA, 51 bp, Artificial
  Synthetic oligonucleotide
caccttcaatttctgaataagtaaagcagcccactcgatcaagcttggcct

SEQ ID NO: 206556 - DNA, 51 bp, Artificial
  Synthetic oligonucleotide
gtgcttagcaatgctggctcaatgacgcctatcagcacaaccatacgaaaa

SEQ ID NO: 206557 - DNA, 51 bp, Artificial
  Synthetic oligonucleotide
cgaaaagttaagcgataaggtatctttagtccatgccttatttggtagcgc

SEQ ID NO: 206558 - DNA, 51 bp, Artificial
  Synthetic oligonucleotide
atcagtcaataggtatggtgacttaatactggatggtacgtttctagatac

SEQ ID NO: 206559 - DNA, 51 bp, Artificial
  Synthetic oligonucleotide
atcagtttggcaggtccagcagtggccaatcctcgcttggtgcgtaccact

SEQ ID NO: 206560 - DNA, 51 bp, Artificial
  Synthetic oligonucleotide
ccagtccagacgttgggtacggtccacttcaaacatacggtccgggcggga

SEQ ID NO: 206561 - DNA, 51 bp, Artificial
  Synthetic oligonucleotide
gacccagccctgttcggggttaatgccataacccgcactcagactgtcgcc

SEQ ID NO: 206562 - DNA, 51 bp, Artificial
  Synthetic oligonucleotide
aacaccgttgcctctggcctagcctcacatgccagcgcgtcacgtttactg

SEQ ID NO: 206563 - DNA, 51 bp, Artificial
  Synthetic oligonucleotide
aacaccccagcgaagtcacgacctgtaccaagcggccaagtgatcggcaca

SEQ ID NO: 206564 - DNA, 59 bp, Artificial
  Synthetic oligonucleotide
catcggctaaattacttttcggatctagtggtggctgcccaccttgaggcgacgccagc

SEQ ID NO: 206565 - DNA, 51 bp, Artificial
  Synthetic oligonucleotide
ttggcgttgcggctaggcaggcacgtcccatagagctgttatgcaagggta

SEQ ID NO: 206566 - DNA, 51 bp, Artificial
  Synthetic oligonucleotide
cctgcatatagttttccctcactaagcagtttaaatagagcgtagacttcg

SEQ ID NO: 206567 - DNA, 51 bp, Artificial
  Synthetic oligonucleotide
tcagcgcttacacccctcagctacaacatctttccaatacttaaagctaaa

SEQ ID NO: 206568 - DNA, 51 bp, Artificial
  Synthetic oligonucleotide
ctccaaactgtcgggataccggtacctcaatattatcgataagttgccagt

SEQ ID NO: 206569 - DNA, 51 bp, Artificial
  Synthetic oligonucleotide
attgccgttatagtcaaagacctttaagactttaccgccattgtttacctc

SEQ ID NO: 206570 - DNA, 51 bp, Artificial
  Synthetic oligonucleotide
taaattacacgccacttgtagcatggggacaggcaggtgccaagccggtgg

SEQ ID NO: 206571 - DNA, 51 bp, Artificial
  Synthetic oligonucleotide
gtatgatcaagtgctagataatttacctgacgtcaacttgatcgaaataca

SEQ ID NO: 206572 - DNA, 51 bp, Artificial
  Synthetic oligonucleotide
tttaacaacccgtacggttgcttctggtcaacatgaggcagagttccgcgg

SEQ ID NO: 206573 - DNA, 51 bp, Artificial
  Synthetic oligonucleotide
cagttggcttaagcccacgtgtagctttacgggcagaagggttatatcgta

SEQ ID NO: 206574 - DNA, 51 bp, Artificial
  Synthetic oligonucleotide
aaacggcgacccaccattgtggtcggctccgcagggatgccaatcaatgca

SEQ ID NO: 206575 - DNA, 60 bp, Artificial
  Synthetic oligonucleotide
gtagccgttctgccattcgcctgcgttcttgttgatctgaatacataggcgctgtgcttt

SEQ ID NO: 206576 - DNA, 51 bp, Artificial
  Synthetic oligonucleotide
gacacctgttaaagattctctataatgcacctcacaaacgatgaagacgtt

SEQ ID NO: 206577 - DNA, 51 bp, Artificial
  Synthetic oligonucleotide
cataagccgtttggtgggaaagcacgcggggtgcttgagtggcagcgacat

SEQ ID NO: 206578 - DNA, 51 bp, Artificial
  Synthetic oligonucleotide
ggcacgattggggttctgtaattgcgtctagtgtagctatgaagtatccac

SEQ ID NO: 206579 - DNA, 51 bp, Artificial
  Synthetic oligonucleotide
aaaggctgtgtcatccgctctgcgttggtatatgtcaaaactttttgccgt

SEQ ID NO: 206580 - DNA, 51 bp, Artificial
  Synthetic oligonucleotide
atgcaacgacgccacatcttgcttcaggtgcaggcctcgcaattgaggggg

SEQ ID NO: 206581 - DNA, 51 bp, Artificial
  Synthetic oligonucleotide
atgatacaagcgtgcggcattgccactactgtgggcatgcgttggcaacct

SEQ ID NO: 206582 - DNA, 50 bp, Artificial
  Synthetic oligonucleotide
gcatagtgtgttgttagttgatagcgaccaacaaggtagtgcgcgtgatt

SEQ ID NO: 206583 - DNA, 50 bp, Artificial
  Synthetic oligonucleotide
ctaccgcttcacgtaaacggcgacccaccattgtggtcggctccgcaggg

SEQ ID NO: 206584 - DNA, 50 bp, Artificial
  Synthetic oligonucleotide
tggtccgcatacaggttttgctgggtccagtcccggtcatgcaaacgcga

SEQ ID NO: 206585 - DNA, 50 bp, Artificial
  Synthetic oligonucleotide
accaactatatccgatgatacttagcgctgtcgtagcccttattattggt

SEQ ID NO: 206586 - DNA, 58 bp, Artificial
  Synthetic oligonucleotide
cagtgtagccgccaactccacctaagcccccaccgatggctgcctcagtccgattacg

SEQ ID NO: 206587 - DNA, 50 bp, Artificial
  Synthetic oligonucleotide
gcagttgcagcgcactggcaggtttaaacttgaccccacggagtgccagc

SEQ ID NO: 206588 - DNA, 50 bp, Artificial
  Synthetic oligonucleotide
gcctgccaaaccttgacccggaacctcctcacgaatcgaatgccgtgtga

SEQ ID NO: 206589 - DNA, 50 bp, Artificial
  Synthetic oligonucleotide
cgtaatcggacagccttaaccagcgacttgcccaatagccaatcaggaaa

SEQ ID NO: 206590 - DNA, 50 bp, Artificial
  Synthetic oligonucleotide
gccgttcagggactggcggcttcacaaatcgcttttcagggcgcacttga

SEQ ID NO: 206591 - DNA, 50 bp, Artificial
  Synthetic oligonucleotide
acgggcggtacgtgctgcgtgtggcaaacaccccaagcttagtattgccg

SEQ ID NO: 206592 - DNA, 50 bp, Artificial
  Synthetic oligonucleotide
acggcgtagcagttgcagcgcactggcaggtttaaacttgaccccacgga

SEQ ID NO: 206593 - DNA, 50 bp, Artificial
  Synthetic oligonucleotide
tgattagcagattctggacaatagtaatttgttctttgttataaggcagc

SEQ ID NO: 206594 - DNA, 50 bp, Artificial
  Synthetic oligonucleotide
acggcccagtcagccaagcgcctattagctgtagccactgaggcacgtcg

SEQ ID NO: 206595 - DNA, 50 bp, Artificial
  Synthetic oligonucleotide
gccgtgtcaaaatggggttagacggcggtgcttggtacatggacccacgc

SEQ ID NO: 206596 - DNA, 50 bp, Artificial
  Synthetic oligonucleotide
acgcttacgagactcaccgccaacccgtaccccttcagggtggtcgccat

SEQ ID NO: 206597 - DNA, 60 bp, Artificial
  Synthetic oligonucleotide
catgagacgtctcaaaagtgtctcgtggtgcatcattgagacgtgtcaaaggtgtatcat

SEQ ID NO: 206598 - DNA, 50 bp, Artificial
  Synthetic oligonucleotide
acgctgcaccgccaggctatgagcgaacaactcaaatgcggcgccactta

SEQ ID NO: 206599 - DNA, 50 bp, Artificial
  Synthetic oligonucleotide
tgccgcaaggagcagagttcacgggcgtggtatcaccaagtgttggcacg

SEQ ID NO: 206600 - DNA, 50 bp, Artificial
  Synthetic oligonucleotide
acgccacgcagtagcgtgtatttggcaaccgacagcaccgctgacacagc

SEQ ID NO: 206601 - DNA, 50 bp, Artificial
  Synthetic oligonucleotide
tgctgcagccgctagaaccgttgcccgtattgcgagcgacaagggcattg

SEQ ID NO: 206602 - DNA, 50 bp, Artificial
  Synthetic oligonucleotide
acgcataatagtcgcctgtgacagctgacgcgcttgcgatatctcagcga

SEQ ID NO: 206603 - DNA, 50 bp, Artificial
  Synthetic oligonucleotide
acgcagatcacgcaaggtcacaaactggcctgaacgggatgacatttgta

SEQ ID NO: 206604 - DNA, 50 bp, Artificial
  Synthetic oligonucleotide
gcccaaaccgcacacaagcgtcgacgacatcaactgctggcactacgacc

SEQ ID NO: 206605 - DNA, 50 bp, Artificial
  Synthetic oligonucleotide
gccacaggcggttggcgcttcggcaatattatagacgggacgcaggcaga

SEQ ID NO: 206606 - DNA, 50 bp, Artificial
  Synthetic oligonucleotide
acctatgcccccgatatgctctaccccattccgcgcgcattaggacgggc

SEQ ID NO: 206607 - DNA, 50 bp, Artificial
  Synthetic oligonucleotide
tggacggtgaccttcggtgcagtagcatgcagggggtgcgtgcggtgaag

SEQ ID NO: 206608 - DNA, 50 bp, Artificial
  Synthetic oligonucleotide
tacggttaaaaatggggtagacctaggggaacggttcacccatcttataa

SEQ ID NO: 206609 - DNA, 60 bp, Artificial
  Synthetic oligonucleotide
gtaggcgataatctagctaaatgggtgcgtgatgtttgcttggctaatccaattcaagag

SEQ ID NO: 206610 - DNA, 50 bp, Artificial
  Synthetic oligonucleotide
acctactataatgttctatgtctgtacctaataatacatcactgtctata

SEQ ID NO: 206611 - DNA, 50 bp, Artificial
  Synthetic oligonucleotide
gccacacgtccccagacatcgggaatccagctagcctgaacccctgtgct

SEQ ID NO: 206612 - DNA, 50 bp, Artificial
  Synthetic oligonucleotide
tgggcgtggtctcagcgcgtttaggcggtgcaccagttgtccctgcaacg

SEQ ID NO: 206613 - DNA, 50 bp, Artificial
  Synthetic oligonucleotide
gactgaccaccctagcagcctgtgggcgtgtgcccaaaactttctgcgca

SEQ ID NO: 206614 - DNA, 50 bp, Artificial
  Synthetic oligonucleotide
ctgtttcggtcgtcttttgggttggtggtgcgtgcagatcaccccctggc

SEQ ID NO: 206615 - DNA, 50 bp, Artificial
  Synthetic oligonucleotide
aacgtcggtacgctgcaagtagatagctgcaccgtccgtccaagcctgcc

SEQ ID NO: 206616 - DNA, 50 bp, Artificial
  Synthetic oligonucleotide
cttaccattagggctgctgaccatcccaccgttttaagtaagagaagggt

SEQ ID NO: 206617 - DNA, 50 bp, Artificial
  Synthetic oligonucleotide
ttcttagagattcgatgggaatctcccgttttcctattgaacggtattgg

SEQ ID NO: 206618 - DNA, 50 bp, Artificial
  Synthetic oligonucleotide
aacgcccaaatgacccgatagccattcgcctgtgggctcatcgagaggct

SEQ ID NO: 206619 - DNA, 50 bp, Artificial
  Synthetic oligonucleotide
aaccggctgcgagtattcggtgaagttagagtaggcgcacgcggactgga

SEQ ID NO: 206620 - DNA, 60 bp, Artificial
  Synthetic oligonucleotide
gtaatggacgtttatcacgctccagtgatggacacttcgatctagcagaggtcatacgat

SEQ ID NO: 206621 - DNA, 50 bp, Artificial
  Synthetic oligonucleotide
cttacgacttgtatttcattcaagtcaaagttgcgtaaggggattcccct

SEQ ID NO: 206622 - DNA, 50 bp, Artificial
  Synthetic oligonucleotide
ttgcacatttgctgggctatccaggcaagcgcggtgacggagcctatcgg

SEQ ID NO: 206623 - DNA, 50 bp, Artificial
  Synthetic oligonucleotide
cttagctagctgctcgtcaatgcgtagtttcctaggtggcattgcgatat

SEQ ID NO: 206624 - DNA, 50 bp, Artificial
  Synthetic oligonucleotide
ttggggccgccccgcttaggcaatactgcaaactgctaacgtcttgcgtc

SEQ ID NO: 206625 - DNA, 50 bp, Artificial
  Synthetic oligonucleotide
ttggtggcctagatggagagcgcaccctaggcagtatcctaatgcgcgcc

SEQ ID NO: 206626 - DNA, 50 bp, Artificial
  Synthetic oligonucleotide
aaatgcacgcccaagcacttgcccgcttaggcctagataagcccttgcct

SEQ ID NO: 206627 - DNA, 50 bp, Artificial
  Synthetic oligonucleotide
gaccacgtccgcctgattgggtatcggcagtcaacaaatggggtcggcta

SEQ ID NO: 206628 - DNA, 50 bp, Artificial
  Synthetic oligonucleotide
aaagccgcctgaccgattagcataccgtagccctcagagacttgggcgga

SEQ ID NO: 206629 - DNA, 50 bp, Artificial
  Synthetic oligonucleotide
gacaatgccagccaacctaaaacatgttagtctttaaatcgcttgacgga

SEQ ID NO: 206630 - DNA, 50 bp, Artificial
  Synthetic oligonucleotide
tttccgagcaggctttctttggcacccgcacaagcccagcttgaaaggct

SEQ ID NO: 206631 - DNA, 60 bp, Artificial
  Synthetic oligonucleotide
catgtggatagatcaaccatttacagagctgtacgtaatggacgtttatcacgctccagt

SEQ ID NO: 206632 - DNA, 50 bp, Artificial
  Synthetic oligonucleotide
gacaaggcggtgccacggttcatgctactctatgggcggtgggactcagc

SEQ ID NO: 206633 - DNA, 50 bp, Artificial
  Synthetic oligonucleotide
tttcgtttgactcaacgatactgatacttgttttgccatcactactggca

SEQ ID NO: 206634 - DNA, 50 bp, Artificial
  Synthetic oligonucleotide
gaagtgccgcttccgtaacaaccgtggcaagtgacagccctgccaccaaa

SEQ ID NO: 206635 - DNA, 50 bp, Artificial
  Synthetic oligonucleotide
gaaagctacagaaatgagcttgaacagcgtatttcaagagttcgagacga

SEQ ID NO: 206636 - DNA, 50 bp, Artificial
  Synthetic oligonucleotide
ctttggcgtaatggagaaaacgtcacgcatgaccgatgcaataaacggga

SEQ ID NO: 206637 - DNA, 50 bp, Artificial
  Synthetic oligonucleotide
aaaaaagccgtgccaaatctccaccttgacacggcgatctaatctcattt

SEQ ID NO: 206638 - DNA, 50 bp, Artificial
  Synthetic oligonucleotide
gcagccgtctttgcgcctacgccaggtacacccataatgccgtcagatgc

SEQ ID NO: 206639 - DNA, 50 bp, Artificial
  Synthetic oligonucleotide
gcaccaaagagtcactggagacttgcgccaaatctgccgcacccgccata

SEQ ID NO: 206640 - DNA, 50 bp, Artificial
  Synthetic oligonucleotide
ctcaagatacttaccgatcaacctttgattttcttcggtgttttccagga

SEQ ID NO: 206641 - DNA, 50 bp, Artificial
  Synthetic oligonucleotide
ctcaccgccttggccattggcattaacgccgaagctgaaccagcccctac

SEQ ID NO: 206642 - DNA, 59 bp, Artificial
  Synthetic oligonucleotide
cagtctattcaagcaaatactgaggcctcgacgttggcacaagtactttaccaaatgtg

SEQ ID NO: 206643 - DNA, 50 bp, Artificial
  Synthetic oligonucleotide
acaccattctacccaacaccgctggctgttttgacgcggctagcgccgtt

SEQ ID NO: 206644 - DNA, 50 bp, Artificial
  Synthetic oligonucleotide
acaagcgcccatggctggcggtgcaacaacccctgagctaatcgcagccg

SEQ ID NO: 206645 - DNA, 50 bp, Artificial
  Synthetic oligonucleotide
acaaagtcctatcaaattcaaggcgcaactcgggtgtgaggtcgacctaa

SEQ ID NO: 206646 - DNA, 50 bp, Artificial
  Synthetic oligonucleotide
ctctctcacgtgtaagtgtgtatatgctcacgtgtgaggtatggtgcgcc

SEQ ID NO: 206647 - DNA, 50 bp, Artificial
  Synthetic oligonucleotide
aatgttttggttagctgatggatatgttacctatgctagattaatagagg

SEQ ID NO: 206648 - DNA, 50 bp, Artificial
  Synthetic oligonucleotide
aatgttgatggttcggtcgcttaccgagcgttaaaggaagcatcagagcg

SEQ ID NO: 206649 - DNA, 50 bp, Artificial
  Synthetic oligonucleotide
ctgatgccattgcttgggtcacccatgctgtgcccgcgcaaagcttgtca

SEQ ID NO: 206650 - DNA, 50 bp, Artificial
  Synthetic oligonucleotide
ttaagccgatgagcgcaccccctaaaaatcccccacgggcagcttcaccg

SEQ ID NO: 206651 - DNA, 50 bp, Artificial
  Synthetic oligonucleotide
gatagccgactggtggcccattttcaagcaacgatacgcgggtccgcgct

SEQ ID NO: 206652 - DNA, 50 bp, Artificial
  Synthetic oligonucleotide
gatactccactcaaaagcactaggcgagatgttctcggaacagagctaaa

SEQ ID NO: 206653 - DNA, 60 bp, Artificial
  Synthetic oligonucleotide
gtataatttcaatagacttagctaaacttggttcaactgtgacagcgtgatctggagaca

SEQ ID NO: 206654 - DNA, 50 bp, Artificial
  Synthetic oligonucleotide
aatgcctacgttgcgtgagcataaggttgaggtgcaaggggcagcccccg

SEQ ID NO: 206655 - DNA, 50 bp, Artificial
  Synthetic oligonucleotide
ctgcccgttaccgctagggcaaccaaggatctgccaaatgcacgacggct

SEQ ID NO: 206656 - DNA, 50 bp, Artificial
  Synthetic oligonucleotide
ttacgtaaagaacgagagcaacaagaacaacgctatgcacaagaacgaga

SEQ ID NO: 206657 - DNA, 50 bp, Artificial
  Synthetic oligonucleotide
ctggccgtccagctttagatggtcagagtgccgggccaaaacgtgcctgt

SEQ ID NO: 206658 - DNA, 50 bp, Artificial
  Synthetic oligonucleotide
ctgggccttgtcccttatgggatctcatttcatgtgggcagtcagcaaaa

SEQ ID NO: 206659 - DNA, 50 bp, Artificial
  Synthetic oligonucleotide
aagtataaaaccaatatcaagaagtagcggacgaagtgccgttgctagta

SEQ ID NO: 206660 - DNA, 50 bp, Artificial
  Synthetic oligonucleotide
ctgggctatccaggcaagcgcggtgacggagcctatcgggttccggaata

SEQ ID NO: 206661 - DNA, 50 bp, Artificial
  Synthetic oligonucleotide
ctgggtatgcacgtgattgggcctgctgcgtctgatatagtacaccaagg

SEQ ID NO: 206662 - DNA, 50 bp, Artificial
  Synthetic oligonucleotide
aagcgcccacttctagccattccgttgggctggccgttagacgcataccg

SEQ ID NO: 206663 - DNA, 50 bp, Artificial
  Synthetic oligonucleotide
ccagcacgcttgccattggtgcggattgggtgaactctgcccgtggtttt

SEQ ID NO: 206664 - DNA, 55 bp, Artificial
  Synthetic oligonucleotide
cattggttgttctacaacagcaagggcctagtttaggtcgtcctttagtagatac

SEQ ID NO: 206665 - DNA, 50 bp, Artificial
  Synthetic oligonucleotide
tacatccttattaagggcaagcatactcaagccccacaaagtgtgcttga

SEQ ID NO: 206666 - DNA, 50 bp, Artificial
  Synthetic oligonucleotide
ccagtgaacgaccgggccatatccgaattggcgtctgggataccgggccc

SEQ ID NO: 206667 - DNA, 50 bp, Artificial
  Synthetic oligonucleotide
ccagttggttaggcggatacagccggcggaggcttgacgactgatgcgct

SEQ ID NO: 206668 - DNA, 50 bp, Artificial
  Synthetic oligonucleotide
atcagggagtgccatccccgatttcacctaaccacaacgtactgtcaagg

SEQ ID NO: 206669 - DNA, 50 bp, Artificial
  Synthetic oligonucleotide
taccgacattgcaaaacaagtcggtattagtaagtctagcctttatcgct

SEQ ID NO: 206670 - DNA, 50 bp, Artificial
  Synthetic oligonucleotide
taccgactcaagccctgaaaggataccttcgtcgccgaaaccaggggcca

SEQ ID NO: 206671 - DNA, 50 bp, Artificial
  Synthetic oligonucleotide
taccgccgttacagcctcagatgcgatgctggacgttgcgattaccgcaa

SEQ ID NO: 206672 - DNA, 50 bp, Artificial
  Synthetic oligonucleotide
ggtatgaggtctgcctaattccgtaaacctattgagtacggctacgcgtg

SEQ ID NO: 206673 - DNA, 50 bp, Artificial
  Synthetic oligonucleotide
ccatgggtctggtggccggctttatggcctataaggtgcgcctgccttgg

SEQ ID NO: 206674 - DNA, 50 bp, Artificial
  Synthetic oligonucleotide
tacggcgactgtggcccaaagcgcttgtgagggatcgacaaagtaccagg

SEQ ID NO: 206675 - DNA, 60 bp, Artificial
  Synthetic oligonucleotide
gtatgcaagcagctcgatcgctcgcattcgtagcaggacttcatgcttatgtgtcgtcat

SEQ ID NO: 206676 - DNA, 50 bp, Artificial
  Synthetic oligonucleotide
cccacgatggcgcctaccgcccagaaacagctcgaacccttatggccgat

SEQ ID NO: 206677 - DNA, 50 bp, Artificial
  Synthetic oligonucleotide
ccccagcaggttcaacgggtaaaaccgcgactgcacgtgtcacgctttcg

SEQ ID NO: 206678 - DNA, 50 bp, Artificial
  Synthetic oligonucleotide
atatctgccgcctttgggacaccaacagcgggctcaggtaagctaccgcc

SEQ ID NO: 206679 - DNA, 50 bp, Artificial
  Synthetic oligonucleotide
gggtgcgcgcatgccagtataatcccgtacctgcgcccacacagactagc

SEQ ID NO: 206680 - DNA, 50 bp, Artificial
  Synthetic oligonucleotide
cccctgttcagactttaataacccttgcacgtactgcatacgataatggg

SEQ ID NO: 206681 - DNA, 50 bp, Artificial
  Synthetic oligonucleotide
agttcgccggcacgttgggccatgtcacacccccatattccggtaaggct

SEQ ID NO: 206682 - DNA, 50 bp, Artificial
  Synthetic oligonucleotide
ggggcggtgttggcttagtcgagaaaatgcgtaagagtgcaaaccctgaa

SEQ ID NO: 206683 - DNA, 50 bp, Artificial
  Synthetic oligonucleotide
gggcttaaaccgcgtttgtcagccgagcaaatggcttggtggcagacggg

SEQ ID NO: 206684 - DNA, 50 bp, Artificial
  Synthetic oligonucleotide
gggcaagcagggagtcatgcagcgattgcctgtaccgcagtgaccgttca

SEQ ID NO: 206685 - DNA, 50 bp, Artificial
  Synthetic oligonucleotide
ccgaccagcactttcctcggcgaagatatctcgcgtgcacaacgcgccta

SEQ ID NO: 206686 - DNA, 55 bp, Artificial
  Synthetic oligonucleotide
gtcaccgataggcggatttttaagcgtcagggttaaaaacacaaagcgatgtgtc

SEQ ID NO: 206687 - DNA, 50 bp, Artificial
  Synthetic oligonucleotide
ccgagtttagcccccagtcagtgccagagtctacgcacaccgcagagcta

SEQ ID NO: 206688 - DNA, 50 bp, Artificial
  Synthetic oligonucleotide
ccgcaccggctcgggtgtagactactagctcactggcacgaggcaaggca

SEQ ID NO: 206689 - DNA, 50 bp, Artificial
  Synthetic oligonucleotide
tatacggacttgtgtgcgtgcgcttcagtcggactccctaaccacaagta

SEQ ID NO: 206690 - DNA, 50 bp, Artificial
  Synthetic oligonucleotide
ccgcggccagtcccattacggatgcttgcgctctaaaggccattgagcta

SEQ ID NO: 206691 - DNA, 50 bp, Artificial
  Synthetic oligonucleotide
ccgctaacacctgagcctactaagctttcgcccccgacagagccgaagcc

SEQ ID NO: 206692 - DNA, 50 bp, Artificial
  Synthetic oligonucleotide
ggctcaggcctgggaacaaggtgctttagccggctggatctggaacaagc

SEQ ID NO: 206693 - DNA, 50 bp, Artificial
  Synthetic oligonucleotide
gtgggaaagcacgcggggtgcttgagtggcagcgacatattgtggagcgc

SEQ ID NO: 206694 - DNA, 50 bp, Artificial
  Synthetic oligonucleotide
cacccagttacagcgcaccccaacccacattgcagcgggcaataagctga

SEQ ID NO: 206695 - DNA, 50 bp, Artificial
  Synthetic oligonucleotide
gtgaccttagaactcggtcgattatgtcgcttcaacattatggtatgtcg

SEQ ID NO: 206696 - DNA, 50 bp, Artificial
  Synthetic oligonucleotide
gttccgtgaggagttcaaatgatttacctcttagacacaaatatttgtat

SEQ ID NO: 206697 - DNA, 60 bp, Artificial
  Synthetic oligonucleotide
catttcgatttaatagctgctgattatctagataggtggtatggccttcttgagaatgga

SEQ ID NO: 206698 - DNA, 50 bp, Artificial
  Synthetic oligonucleotide
cactgtgccagcgccgggtggtacttttagatgagggctggacccgtcag

SEQ ID NO: 206699 - DNA, 50 bp, Artificial
  Synthetic oligonucleotide
gtcgtccattgtcgtacagcgtcctgattgtctttgtgagcaaaccaaag

SEQ ID NO: 206700 - DNA, 50 bp, Artificial
  Synthetic oligonucleotide
gttgccaatccgaccaagctctaaaattaatgctcgctctgtcttgctat

SEQ ID NO: 206701 - DNA, 50 bp, Artificial
  Synthetic oligonucleotide
caagtcacagaccgccgtggccgctctattccgccgctggataagtggca

SEQ ID NO: 206702 - DNA, 50 bp, Artificial
  Synthetic oligonucleotide
gttgcgttacaatctggatagaaaaaaaccgttgtcgagtttagtggctc

SEQ ID NO: 206703 - DNA, 50 bp, Artificial
  Synthetic oligonucleotide
cagcaacgccaagcagacagtgtggcgagtgcgctgcgttatgagccagg

SEQ ID NO: 206704 - DNA, 50 bp, Artificial
  Synthetic oligonucleotide
caagcttgcacagtcatagttttgataggtgctaggcggaatgtactgcg

SEQ ID NO: 206705 - DNA, 50 bp, Artificial
  Synthetic oligonucleotide
caagcgggctggggcggacaccattaggctgtgaggctagagcgactgcg

SEQ ID NO: 206706 - DNA, 50 bp, Artificial
  Synthetic oligonucleotide
caagcgacccattagttcttatttgccctgtgacacatgagctagtccgc

SEQ ID NO: 206707 - DNA, 50 bp, Artificial
  Synthetic oligonucleotide
gtttgcgtaagtgttggcgcaggcgtcatttcaacagctcaagcggcgcc

SEQ ID NO: 206708 - DNA, 56 bp, Artificial
  Synthetic oligonucleotide
ccaaaagtcgccataaactcatcaggggttatgtcgtggtctcggtaagattgccc

SEQ ID NO: 206709 - DNA, 50 bp, Artificial
  Synthetic oligonucleotide
cagccggcggaggcttgacgactgatgcgctcaggatccggtgatccatg

SEQ ID NO: 206710 - DNA, 50 bp, Artificial
  Synthetic oligonucleotide
cagccgtcggtgaggtacaaggcgatttaccggctgccgccaatgatcct

SEQ ID NO: 206711 - DNA, 50 bp, Artificial
  Synthetic oligonucleotide
cagcgccgggtggtacttttagatgagggctggacccgtcagagctgcta

SEQ ID NO: 206712 - DNA, 50 bp, Artificial
  Synthetic oligonucleotide
cagtgcggcgttttgtgtggccctattgagccgcgagctaggcgaatggc

SEQ ID NO: 206713 - DNA, 50 bp, Artificial
  Synthetic oligonucleotide
atgcggcgtgcacccggcagattcagactgaccaccgaggcacactcgga

SEQ ID NO: 206714 - DNA, 50 bp, Artificial
  Synthetic oligonucleotide
atgccaagcgagcgagaactcggcagcgcgattcagaccgactatgaccc

SEQ ID NO: 206715 - DNA, 50 bp, Artificial
  Synthetic oligonucleotide
catccccataagacagtaactttgatagtgtctgctttaggatggggtat

SEQ ID NO: 206716 - DNA, 50 bp, Artificial
  Synthetic oligonucleotide
catgataatgccaaacccagtccggttccgccagtcgcccgggtacgaga

SEQ ID NO: 206717 - DNA, 50 bp, Artificial
  Synthetic oligonucleotide
ccaacgccagctgtcagtcagctgccttcaaccgcgctacagactcgcaa

SEQ ID NO: 206718 - DNA, 50 bp, Artificial
  Synthetic oligonucleotide
ccaactgtcgcgctgcaccactaaacgaaccatggccgacaacactggcg

SEQ ID NO: 206719 - DNA, 57 bp, Artificial
  Synthetic oligonucleotide
tacggttaaaagtatggctcaagccgcccttaccgcaggtgtaacagcgagtctaga

SEQ ID NO: 206720 - DNA, 60 bp, Artificial
  Synthetic oligonucleotide
ggtgtacattaggactgcaactacttgtgatgatagcttccaacatcgcatagacccctt

SEQ ID NO: 206721 - DNA, 50 bp, Artificial
  Synthetic oligonucleotide
ccacgaccactgcaggtaaatgctcatctgcgcgctcaagcttggctccg

SEQ ID NO: 206722 - DNA, 50 bp, Artificial
  Synthetic oligonucleotide
atcgtgtgcatcagtccatcacgccacaccgtcacctcaacgcgtgtgga

SEQ ID NO: 206723 - DNA, 50 bp, Artificial
  Synthetic oligonucleotide
atcgccgcagggtagcggttttctggggcaaggcgatattcgggcgctac

SEQ ID NO: 206724 - DNA, 50 bp, Artificial
  Synthetic oligonucleotide
ccacgctgacgggtttgcggctttgattcgcctgttggggtacgggttaa

SEQ ID NO: 206725 - DNA, 50 bp, Artificial
  Synthetic oligonucleotide
cgaccactcacttgccatctgcgcctgtgcaaacaggggtcgggggcttg

SEQ ID NO: 206726 - DNA, 50 bp, Artificial
  Synthetic oligonucleotide
cgcactggcaagaagccctgacgctttgagccatattcgacaaatacggc

SEQ ID NO: 206727 - DNA, 50 bp, Artificial
  Synthetic oligonucleotide
gctatgtgaagcgcgtctaccgctgcaagtcgttggcgcactcgcttgtg

SEQ ID NO: 206728 - DNA, 50 bp, Artificial
  Synthetic oligonucleotide
cgcccgatgtggcgctatatcacaccgccgtgccaggggtgatttggggc

SEQ ID NO: 206729 - DNA, 50 bp, Artificial
  Synthetic oligonucleotide
cgccgattgccacgcagtattcagcgagcactcagtgcacagtgcgacta

SEQ ID NO: 206730 - DNA, 50 bp, Artificial
  Synthetic oligonucleotide
agagccggtgggttcaatgggagacgatacccctgttgcggtgctgtcta

SEQ ID NO: 206731 - DNA, 59 bp, Artificial
  Synthetic oligonucleotide
ggtgtaaatacctacaatgcgattggttcacaattattgcgagaaaagcgagatccaag

SEQ ID NO: 206732 - DNA, 50 bp, Artificial
  Synthetic oligonucleotide
gcgttttgtcctgcatggcattccaccaatgactgccggtcaggcacgta

SEQ ID NO: 206733 - DNA, 50 bp, Artificial
  Synthetic oligonucleotide
cgcctcattttcgaaaacgctggggatgggtgcacgcgtcggttgggtgt

SEQ ID NO: 206734 - DNA, 50 bp, Artificial
  Synthetic oligonucleotide
cgcgagtcaccacccagttacagcgcaccccaacccacattgcagcgggc

SEQ ID NO: 206735 - DNA, 50 bp, Artificial
  Synthetic oligonucleotide
agaaaaaacccctgttatcggacagtttggcgaccggtgataacaagggt

SEQ ID NO: 206736 - DNA, 50 bp, Artificial
  Synthetic oligonucleotide
tctggattagctcaccgaagcaatcccggttataacgtggctgatatgga

SEQ ID NO: 206737 - DNA, 50 bp, Artificial
  Synthetic oligonucleotide
tcttgaatgtacacatacacacgctttctagtgttttgcgtccatagctt

SEQ ID NO: 206738 - DNA, 50 bp, Artificial
  Synthetic oligonucleotide
cgcgccgccaaccattgaggcattacagcgagtagctgagcgtgtcgacc

SEQ ID NO: 206739 - DNA, 50 bp, Artificial
  Synthetic oligonucleotide
acttggcctgtcgtattcaagccgcaggcatggggttgggcgcagtcttt

SEQ ID NO: 206740 - DNA, 50 bp, Artificial
  Synthetic oligonucleotide
gcggtgtcgcccgcatttagcgtaggcgtgtcagcagcatgagcccccaa

SEQ ID NO: 206741 - DNA, 50 bp, Artificial
  Synthetic oligonucleotide
cgcggacgggcgctacctaaagccacccgactgaggacacgttcgatgtc

SEQ ID NO: 206742 - DNA, 58 bp, Artificial
  Synthetic oligonucleotide
ggtgcttaatacttggtctatccaaatccacaccttcaaaatagctagtatccacgat

SEQ ID NO: 206743 - DNA, 50 bp, Artificial
  Synthetic oligonucleotide
gcggtctgatcgggatgggaattggtgctttacagccatggcgttggcga

SEQ ID NO: 206744 - DNA, 50 bp, Artificial
  Synthetic oligonucleotide
gcgggcgtattcacctcaggtggcacccaatccaacttgatgggcgtgtt

SEQ ID NO: 206745 - DNA, 50 bp, Artificial
  Synthetic oligonucleotide
gcgcgctatagtcgcaccctgtctacaacctttgctgcgggtgtgccctt

SEQ ID NO: 206746 - DNA, 50 bp, Artificial
  Synthetic oligonucleotide
gcgccgataatcacacgtttcgcccctgctccaatatgctgggtcgcggc

SEQ ID NO: 206747 - DNA, 50 bp, Artificial
  Synthetic oligonucleotide
gcgcagcttgcggttagcgctggggtctggggcagtgtattactcgacat

SEQ ID NO: 206748 - DNA, 50 bp, Artificial
  Synthetic oligonucleotide
tgagcggccaatagcaacgcaaaagacaaacccacatgtccgccccctgc

SEQ ID NO: 206749 - DNA, 50 bp, Artificial
  Synthetic oligonucleotide
gcgactcgctgtactttctccgctgcatccagttgggtgtccccagccgg

SEQ ID NO: 206750 - DNA, 50 bp, Artificial
  Synthetic oligonucleotide
gcgacgctcacagtagtggcaatattgaccccactgcacccatcgccgct

SEQ ID NO: 206751 - DNA, 50 bp, Artificial
  Synthetic oligonucleotide
acgtgggcagtccgtggtctctacgctaaccgcttggctagcgttgtcgg

SEQ ID NO: 206752 - DNA, 50 bp, Artificial
  Synthetic oligonucleotide
cgggtgccgacttaccgtatgcatgtaaaggtggggtgtgcgcgacctgt

SEQ ID NO: 206753 - DNA, 60 bp, Artificial
  Synthetic oligonucleotide
caagcgatgtacgatcagctaaatagcgttctaggtggctgtgccatgatgtagtcccat

SEQ ID NO: 206754 - DNA, 50 bp, Artificial
  Synthetic oligonucleotide
cggtgcttttagctcaagcctttatggtgcaaggttttgagtggataaaa

SEQ ID NO: 206755 - DNA, 50 bp, Artificial
  Synthetic oligonucleotide
agggggtcggcacccttatcagccgcgacttaggggcggcgctcagctaa

SEQ ID NO: 206756 - DNA, 50 bp, Artificial
  Synthetic oligonucleotide
agggacagccgcctaagcctgcgactgaagtatcatactgcgccacgcct

SEQ ID NO: 206757 - DNA, 50 bp, Artificial
  Synthetic oligonucleotide
tatggaccctcgccctgtggacaaccccacctcccacacagtagaacccg

SEQ ID NO: 206758 - DNA, 50 bp, Artificial
  Synthetic oligonucleotide
aggcgtagataccactcgcctacgctaccctgaagccgatagcgccgcct

SEQ ID NO: 206759 - DNA, 50 bp, Artificial
  Synthetic oligonucleotide
ccgcttgtagatttggccattaagccgcctgagcagctaacgcccaccga

SEQ ID NO: 206760 - DNA, 50 bp, Artificial
  Synthetic oligonucleotide
aggcatgactctaatcgatgccggctcagcgactttccagcgcgacggta

SEQ ID NO: 206761 - DNA, 50 bp, Artificial
  Synthetic oligonucleotide
aggcaaatgcgcactgcggttgggaaacttgccactgtccaagcccaaca

SEQ ID NO: 206762 - DNA, 50 bp, Artificial
  Synthetic oligonucleotide
ccggtcaaaaagcagcgcgccgtaccttggacattgccctacccctgctg

SEQ ID NO: 206763 - DNA, 50 bp, Artificial
  Synthetic oligonucleotide
ggccatgcccccataaatccaaaccggaggtagctcgccataacagcggg

SEQ ID NO: 206764 - DNA, 60 bp, Artificial
  Synthetic oligonucleotide
ggacgctcaagcgacagatagagccattacagcgacaaatagcggacttagagaccgaaa

SEQ ID NO: 206765 - DNA, 50 bp, Artificial
  Synthetic oligonucleotide
ccgtcacagggatttggctgccatcgtagctgacccagtgctgcagctga

SEQ ID NO: 206766 - DNA, 50 bp, Artificial
  Synthetic oligonucleotide
agctccaccatcgatgctgcagccgctagaaccgttgcccgtattgcgag

SEQ ID NO: 206767 - DNA, 50 bp, Artificial
  Synthetic oligonucleotide
agcgcaccccctaaaaatcccccacgggcagcttcaccgacatacatggt

SEQ ID NO: 206768 - DNA, 50 bp, Artificial
  Synthetic oligonucleotide
agcctccacggcaacttgctgggctttaatcgtggcacgctgtgcgatca

SEQ ID NO: 206769 - DNA, 50 bp, Artificial
  Synthetic oligonucleotide
agccgccagaagtgctctgtttaacgccatgctaggcaagcgtgtggctg

SEQ ID NO: 206770 - DNA, 50 bp, Artificial
  Synthetic oligonucleotide
cctactaagctttcgcccccgacagagccgaagcctagacggcggttgcc

SEQ ID NO: 206771 - DNA, 50 bp, Artificial
  Synthetic oligonucleotide
tcagcccctgattgatgcacctgcggaggccagtttccaacgcgttgatt

SEQ ID NO: 206772 - DNA, 50 bp, Artificial
  Synthetic oligonucleotide
agcccctaacccatctcgactgtctgtgctggcaggcgctatgacccaag

SEQ ID NO: 206773 - DNA, 50 bp, Artificial
  Synthetic oligonucleotide
cctcacagcgtaccgacaccctgcttgcagccagtctcgccagtagcaat

SEQ ID NO: 206774 - DNA, 50 bp, Artificial
  Synthetic oligonucleotide
agccagctcgctacgaatggccgcatcttctgacttacgggcccactctt

SEQ ID NO: 206775 - DNA, 60 bp, Artificial
  Synthetic oligonucleotide
caagactgtctatgccttcaaggcgctgttatgctagcaagggcttacaacccaatatac

SEQ ID NO: 206776 - DNA, 50 bp, Artificial
  Synthetic oligonucleotide
cctcacggaccaccatatccggagcaccgggcttgtccaccacgctttgc

SEQ ID NO: 206777 - DNA, 50 bp, Artificial
  Synthetic oligonucleotide
tcattttagatcgagatgcacatgcagtcattccacctaggaagaatgca

SEQ ID NO: 206778 - DNA, 50 bp, Artificial
  Synthetic oligonucleotide
tccaagcggcgggggtgatatcctgatgggctcagtggttacgcgagata

SEQ ID NO: 206779 - DNA, 50 bp, Artificial
  Synthetic oligonucleotide
tccaatcgtacaagcgcccatggctggcggtgcaacaacccctgagctaa

SEQ ID NO: 206780 - DNA, 50 bp, Artificial
  Synthetic oligonucleotide
tccaccatcgtgatctgggcttagggtgatgggggcacccgaacgccagc

SEQ ID NO: 206781 - DNA, 50 bp, Artificial
  Synthetic oligonucleotide
agccaatacccaacgccagctgtcagtcagctgccttcaaccgcgctaca

SEQ ID NO: 206782 - DNA, 50 bp, Artificial
  Synthetic oligonucleotide
ccttgctgcgcagactggacgcagagcctttagcgggggtggttatcctc

SEQ ID NO: 206783 - DNA, 50 bp, Artificial
  Synthetic oligonucleotide
ggaaactaatgaaccatcactgttataggcacggtctgcaaatgcttcgg

SEQ ID NO: 206784 - DNA, 50 bp, Artificial
  Synthetic oligonucleotide
cgaccaagccgcgggtatcaacattttacgccgtgcgatggaagccccac

SEQ ID NO: 206785 - DNA, 54 bp, Artificial
  Synthetic oligonucleotide
ggaacattgatcaaataacaagcgtggaacgtgaaaaatcaacaaaaaaaccta

SEQ ID NO: 206786 - DNA, 60 bp, Artificial
  Synthetic oligonucleotide
caagaacgcaaacagcgtgagaaagccgaacgattagcacaggagcaacaggacaaagag

SEQ ID NO: 206787 - DNA, 58 bp, Artificial
  Synthetic oligonucleotide
caacttggacgacccaaaaccctgataacggacacgcacacatagcgtacgcactcaa

SEQ ID NO: 206788 - DNA, 58 bp, Artificial
  Synthetic oligonucleotide
caacttgcgacactaaactgggtagattggttcaataaaaagcgtgtacacagtgcac

SEQ ID NO: 206789 - DNA, 60 bp, Artificial
  Synthetic oligonucleotide
atattttcgttttgtggcactcagggctgaatctgtcacttctgcatgaaatttagggtc

SEQ ID NO: 206790 - DNA, 60 bp, Artificial
  Synthetic oligonucleotide
caacgtgctaataaatacgcctaacccgctcagccagatcatgtatgcatgagaagttga

SEQ ID NO: 206791 - DNA, 59 bp, Artificial
  Synthetic oligonucleotide
gttttctgtgcccgtaactgacggactatgacgctgccgtgagaacctataagagcgag

SEQ ID NO: 206792 - DNA, 58 bp, Artificial
  Synthetic oligonucleotide
taaacggtgctataatgcaaggtaaacggtgctataatgcaaggtaaacggtgctata

SEQ ID NO: 206793 - DNA, 60 bp, Artificial
  Synthetic oligonucleotide
caaagtctctaaagataacgaaatagaatggacatcgttgtcatggctgcaagttgctgg

SEQ ID NO: 206794 - DNA, 59 bp, Artificial
  Synthetic oligonucleotide
taaactcgccaagttccaagcttgtagtgagcatttgttatgtccgttttgtgctggta

SEQ ID NO: 206795 - DNA, 60 bp, Artificial
  Synthetic oligonucleotide
caaaaccctaactgcagcaataagtaatacatctcgtgaatctgatcgttatagtacgcg

SEQ ID NO: 206796 - DNA, 60 bp, Artificial
  Synthetic oligonucleotide
caaaaatgttgccatagagccggacacgttttggctttgaatgctcatcagctggcggtg

SEQ ID NO: 206797 - DNA, 51 bp, Artificial
  Synthetic oligonucleotide
caaaaaaactagtagatcggtccttttcatacgttaatgatagggggaaaa

SEQ ID NO: 206798 - DNA, 60 bp, Artificial
  Synthetic oligonucleotide
atttgattagacagggattaaccacgcaccgacaagccgagcaggatgagcaagaacgca

SEQ ID NO: 206799 - DNA, 60 bp, Artificial
  Synthetic oligonucleotide
gcttctgcattgtcgctaatgatttctgtgcttgctgtaagctttgctgatcgctcttga

SEQ ID NO: 206800 - DNA, 60 bp, Artificial
  Synthetic oligonucleotide
atatgtctaatatgtctccagatcacgctgtcacagttgaaccaagtttagctaagtcta

SEQ ID NO: 206801 - DNA, 59 bp, Artificial
  Synthetic oligonucleotide
atttcagcaaatagctcaatcagagttaaaagctttgccctattgtctagaactttcac

SEQ ID NO: 206802 - DNA, 60 bp, Artificial
  Synthetic oligonucleotide
atttatggcgcgtagtacactgtccataaactccgagccattaccttgttgcaatgccat

SEQ ID NO: 206803 - DNA, 55 bp, Artificial
  Synthetic oligonucleotide
taaagggttttagctcttatatgtccacgtttaccttgcaatatgtccacgttta

SEQ ID NO: 206804 - DNA, 59 bp, Artificial
  Synthetic oligonucleotide
cgacgagcaccagtgaaagtgcccatatagctgggttctagtttacgtttaagtgcaga

SEQ ID NO: 206805 - DNA, 53 bp, Artificial
  Synthetic oligonucleotide
taaccatgactacacgccttagcaatcccatttaagcgcaaaaaaacgggggt

SEQ ID NO: 206806 - DNA, 60 bp, Artificial
  Synthetic oligonucleotide
ggctggctcttcggaatacgtgaaatagctgccaagacgatacgctgttctacagcactt

SEQ ID NO: 206807 - DNA, 60 bp, Artificial
  Synthetic oligonucleotide
gtgctataatgcaaggtaaacggtgctataatgcaaggtaaacggtgctataatgcaagg

SEQ ID NO: 206808 - DNA, 60 bp, Artificial
  Synthetic oligonucleotide
gtgctggtattagagcttctaaggcaattcaaaaatactctgagcgtgttgatcaagtct

SEQ ID NO: 206809 - DNA, 54 bp, Artificial
  Synthetic oligonucleotide
ccgcgtttttcctctatataataggtatcgactttaaattttggtcgatatgaa

SEQ ID NO: 206810 - DNA, 57 bp, Artificial
  Synthetic oligonucleotide
ggcggttatacgaaattgacaatatgtacaggattctgtacatttaggattgtaaag

SEQ ID NO: 206811 - DNA, 55 bp, Artificial
  Synthetic oligonucleotide
tacgtttctgcttgggacgtgtgacttccgttgtgcgtacccaaccttcaacgcc

SEQ ID NO: 206812 - DNA, 60 bp, Artificial
  Synthetic oligonucleotide
ggcgagacttgtttgagacattccattacattctacgctattgttttagagtgatagcgt

SEQ ID NO: 206813 - DNA, 57 bp, Artificial
  Synthetic oligonucleotide
ggccatgccgactacaccacttacctcctacatatccgaaaagcctgggaaaatcac

SEQ ID NO: 206814 - DNA, 57 bp, Artificial
  Synthetic oligonucleotide
cacaggaacaggtgaacactatgttattgacaaagcggtacgcctttttatcaatag

SEQ ID NO: 206815 - DNA, 60 bp, Artificial
  Synthetic oligonucleotide
ggcatacaagaccctagcaggggtagcaatggggattttgttatcaatcctgatagcatt

SEQ ID NO: 206816 - DNA, 55 bp, Artificial
  Synthetic oligonucleotide
caattggaacgcagaaactgctaaaatgttactcttaaactctattcaaggttta

SEQ ID NO: 206817 - DNA, 52 bp, Artificial
  Synthetic oligonucleotide
gtgggtgtttttggtcttggggcaatagacaatcgggtcttttttagtctta

SEQ ID NO: 206818 - DNA, 58 bp, Artificial
  Synthetic oligonucleotide
gtggttccgctagggtataccttcactggttcggtgcactataagggcatcggatagc

SEQ ID NO: 206819 - DNA, 53 bp, Artificial
  Synthetic oligonucleotide
ccgttaacttcgttaaatccaaacttgagccaaccactacaatccgtcatacg

SEQ ID NO: 206820 - DNA, 54 bp, Artificial
  Synthetic oligonucleotide
caatgaccgtctacgcctcgaaaatgagcaaaaacgcgaagttttaaataaatc

SEQ ID NO: 206821 - DNA, 60 bp, Artificial
  Synthetic oligonucleotide
gtgtgtttaacgtgcaagaatttcctgcatttatcgagcaaccgattccagaagttgcaa

SEQ ID NO: 206822 - DNA, 60 bp, Artificial
  Synthetic oligonucleotide
atatccctcttgccaccagatgatccagtgcaaacagtagtcataatatttgtagaagta

SEQ ID NO: 206823 - DNA, 58 bp, Artificial
  Synthetic oligonucleotide
caatacagctcgaaaacgaccgaaaagatcgtgaatctagagaacagcagttacgtaa

SEQ ID NO: 206824 - DNA, 60 bp, Artificial
  Synthetic oligonucleotide
ggcaatggtggatttgccttgacagtacacttagatgtcacgctttcaggtatttcacaa

SEQ ID NO: 206825 - DNA, 57 bp, Artificial
  Synthetic oligonucleotide
gttcgttctcgaactgctttgctcgtttgttttcttgttcctgtcctgacatttcaa

SEQ ID NO: 206826 - DNA, 58 bp, Artificial
  Synthetic oligonucleotide
gttgccctcaatgcttgcccgtcggtacggtcgcatcgtcaagggagggtatcactgg

SEQ ID NO: 206827 - DNA, 60 bp, Artificial
  Synthetic oligonucleotide
ggataatgctctaattcaagcaagttataccttagatacagttgaacaaagactgatcct

SEQ ID NO: 206828 - DNA, 60 bp, Artificial
  Synthetic oligonucleotide
ccttcttctgtgaaagatagtctacaaatgcatgtaactctgcgatttgtaaaagttgtg

SEQ ID NO: 206829 - DNA, 57 bp, Artificial
  Synthetic oligonucleotide
gtttacgaatgttcacttcaaaaagtgcgtattttatgctgctatttttagagattg

SEQ ID NO: 206830 - DNA, 60 bp, Artificial
  Synthetic oligonucleotide
ttaagacgtcagatggtcagacgttcattaatccgctcattattccgttatttgatgttc

SEQ ID NO: 206831 - DNA, 56 bp, Artificial
  Synthetic oligonucleotide
gaggattactccaacatgcaacttaaccaacctatacaactacttccaacgcctcc

SEQ ID NO: 206832 - DNA, 56 bp, Artificial
  Synthetic oligonucleotide
ttaataatactagtaagtcggtgaaatcagggagtgccatccccgatttcacctaa

SEQ ID NO: 206833 - DNA, 57 bp, Artificial
  Synthetic oligonucleotide
atagggcatcttttacagctctaagatagctttcggctttagtacttgagttacctc

SEQ ID NO: 206834 - DNA, 59 bp, Artificial
  Synthetic oligonucleotide
aatgcgcagggtttggacttgcacgccatctcggctggtggcgggctatccgttcccta

SEQ ID NO: 206835 - DNA, 60 bp, Artificial
  Synthetic oligonucleotide
ttaatggcacgtagtacataattgtattaacttgcgctgcattaaatcctatatccctct

SEQ ID NO: 206836 - DNA, 58 bp, Artificial
  Synthetic oligonucleotide
ttaatttgacgttataacgctgatagatatcaccttgcgaacttggtactaattggga

SEQ ID NO: 206837 - DNA, 56 bp, Artificial
  Synthetic oligonucleotide
ttacgggcagaagggttatatcgtaatgctggtaactataaaactcctcattacca

SEQ ID NO: 206838 - DNA, 57 bp, Artificial
  Synthetic oligonucleotide
ctggagaactttcagatgattagaaaaccacgaattataagtaacactcctatggaa

SEQ ID NO: 206839 - DNA, 56 bp, Artificial
  Synthetic oligonucleotide
gaggaaagggcaatactcaccctaagagcttgtaagtacaagcccttagcgttgcc

SEQ ID NO: 206840 - DNA, 60 bp, Artificial
  Synthetic oligonucleotide
gagcgaaataaagaggtattttgactttagatagatgcatagagcgagtgtctacgagcg

SEQ ID NO: 206841 - DNA, 59 bp, Artificial
  Synthetic oligonucleotide
ttatggagcaagcctttcaacgtctaactatgacggattgactactaactatgacggat

SEQ ID NO: 206842 - DNA, 60 bp, Artificial
  Synthetic oligonucleotide
ttattgtgaagcgtctactcaagaagtatggctacccacctgatatggctttactggcta

SEQ ID NO: 206843 - DNA, 60 bp, Artificial
  Synthetic oligonucleotide
aagcgtggtatagataaagcctgctctatcttaagcactgcatcatttgacaattccacc

SEQ ID NO: 206844 - DNA, 59 bp, Artificial
  Synthetic oligonucleotide
tactaactatgacggattgactactaactatgacggattgactacttaactatgacgga

SEQ ID NO: 206845 - DNA, 60 bp, Artificial
  Synthetic oligonucleotide
ttcagctcaaaaacacagcaaatcgagcttttctgtatgcgtcactactcggaagtagtg

SEQ ID NO: 206846 - DNA, 59 bp, Artificial
  Synthetic oligonucleotide
ttccacttatccatatagtccagcctaatataattaaagactcaaccatactaaattca

SEQ ID NO: 206847 - DNA, 60 bp, Artificial
  Synthetic oligonucleotide
aagcgactgctcaacctgagcgtaatttaatagcgtggcttgggcgagctgtgcttttgg

SEQ ID NO: 206848 - DNA, 57 bp, Artificial
  Synthetic oligonucleotide
aagccagtaccggtgggggcttaatgctcgcctcaatcgcactaggactggtgtcgt

SEQ ID NO: 206849 - DNA, 60 bp, Artificial
  Synthetic oligonucleotide
ctgtgaaatcatccgaatcattagtgcaaggcaagtcactaaagcggagcgaaacaaata

SEQ ID NO: 206850 - DNA, 60 bp, Artificial
  Synthetic oligonucleotide
aagatgcatgtaagagtctatttgatcgtagattcagctatcaaaaactaactcagaagg

SEQ ID NO: 206851 - DNA, 55 bp, Artificial
  Synthetic oligonucleotide
ttccgtagtccgtactgtcagcctcgtagtgtagtaattgtccaaacctccaccc

SEQ ID NO: 206852 - DNA, 56 bp, Artificial
  Synthetic oligonucleotide
aagagcgagttttcgacttgggaacaaatccaagtcccactctaatatttgcgcgc

SEQ ID NO: 206853 - DNA, 60 bp, Artificial
  Synthetic oligonucleotide
tgtaaaagccaatgatttagttgtggctggttatgagctgacagcaaatgaacaacgcct

SEQ ID NO: 206854 - DNA, 58 bp, Artificial
  Synthetic oligonucleotide
acatagacaccaacataacaaaccgtccgcttcgataatcgcaaaagtgcgtattcta

SEQ ID NO: 206855 - DNA, 55 bp, Artificial
  Synthetic oligonucleotide
cgcctcgttttccacataggagacgctttgaacccaacggctcgtaatcgtctcc

SEQ ID NO: 206856 - DNA, 55 bp, Artificial
  Synthetic oligonucleotide
gcgtggtgtgtgaaccaaaaattgccggtatgtaccggctcccaatccatttaat

SEQ ID NO: 206857 - DNA, 60 bp, Artificial
  Synthetic oligonucleotide
tgtaaagtttcaatcactaccgcctaggtagtctagctagcagcgttttgacgcagctta

SEQ ID NO: 206858 - DNA, 55 bp, Artificial
  Synthetic oligonucleotide
acagcgagcgtaaattacttgttaggcaaggatagggataggcaaggggctaggg

SEQ ID NO: 206859 - DNA, 59 bp, Artificial
  Synthetic oligonucleotide
gatctttaagattactttaagatcagtagcttacattgagtcataccctctggaacgac

SEQ ID NO: 206860 - DNA, 58 bp, Artificial
  Synthetic oligonucleotide
tgtaggatagttttggcggataatatcagggtctaatgggtgcttttgtattgtctcc

SEQ ID NO: 206861 - DNA, 56 bp, Artificial
  Synthetic oligonucleotide
tgtatcaaaggtttgcgagacctaactaggagggattgactaccaaataggaggga

SEQ ID NO: 206862 - DNA, 58 bp, Artificial
  Synthetic oligonucleotide
acacgcttagaagaacacttcacaagctaccaagccaaacaagtcgcacacttaacaa

SEQ ID NO: 206863 - DNA, 60 bp, Artificial
  Synthetic oligonucleotide
ctgataggtaccggcaagataatccgcgtaacaggcatgatgatcgggggcgggatggct

SEQ ID NO: 206864 - DNA, 55 bp, Artificial
  Synthetic oligonucleotide
gatcaagtcttatctgaaaatcctcgtttaaagcccgttatgatcacgtttacgg

SEQ ID NO: 206865 - DNA, 60 bp, Artificial
  Synthetic oligonucleotide
gagtgtatctagcctatgcttatcccaaacgctatcacgggcggatacggacgctaaaga

SEQ ID NO: 206866 - DNA, 59 bp, Artificial
  Synthetic oligonucleotide
acaatctgatgagttagggtctgagctgttaggcaaaagtctaaatgttagtaatcagt

SEQ ID NO: 206867 - DNA, 60 bp, Artificial
  Synthetic oligonucleotide
tactggggacagtgattagcgagtgtctacgagcgaagtattgatgcttttgctcgtcaa

SEQ ID NO: 206868 - DNA, 60 bp, Artificial
  Synthetic oligonucleotide
ctgcgaacctcaaatgagattcagctattcgatggattgcggacatctatcgaacgttcg

SEQ ID NO: 206869 - DNA, 60 bp, Artificial
  Synthetic oligonucleotide
acaagagctagaacgctacttgtcatcgctagagacggaaaatcggacgctcaagcgaca

SEQ ID NO: 206870 - DNA, 60 bp, Artificial
  Synthetic oligonucleotide
tgttgatggcgtgagtaaaccttgtgtccgcatcatgcgaaatcagtgcaactatgatgg

SEQ ID NO: 206871 - DNA, 58 bp, Artificial
  Synthetic oligonucleotide
acaaactttttgtccatatctttatggagtttcgttatagcatctaacttatcagatc

SEQ ID NO: 206872 - DNA, 57 bp, Artificial
  Synthetic oligonucleotide
aatttaatagcgtggcttgggcgagctgtgcttttgggtctgtcgcttccctttggc

SEQ ID NO: 206873 - DNA, 60 bp, Artificial
  Synthetic oligonucleotide
gagtgaatatcataaaataagttacaggttctgggagcaagtaagattactatcatcaaa

SEQ ID NO: 206874 - DNA, 56 bp, Artificial
  Synthetic oligonucleotide
aattcggcacattccgaaaaaatcaccgcaacagtttcggacagtagccgatgtac

SEQ ID NO: 206875 - DNA, 58 bp, Artificial
  Synthetic oligonucleotide
gagggtttgattcggctacgcgtgcaaggggttttggatcagttgccaacggatcagc

SEQ ID NO: 206876 - DNA, 58 bp, Artificial
  Synthetic oligonucleotide
gagggattgactactcaaataggagggattgactactcaaataggagggattgactac

SEQ ID NO: 206877 - DNA, 60 bp, Artificial
  Synthetic oligonucleotide
tgtttttttagtgtgtcatgagacgtctcaaaagtgtctcgtggtgcatcattgagacgt

SEQ ID NO: 206878 - DNA, 60 bp, Artificial
  Synthetic oligonucleotide
atacatcaaggctttccagagtaatgacctacgccattggcacataccgcagtaacgaac

SEQ ID NO: 206879 - DNA, 52 bp, Artificial
  Synthetic oligonucleotide
aaattcacggaaacattaacctaaaaattgccccgacgaatcgagcgaaagc

SEQ ID NO: 206880 - DNA, 53 bp, Artificial
  Synthetic oligonucleotide
aaatgggttggaaagccaccgaattagaacggcagggcattagaaccgaagta

SEQ ID NO: 206881 - DNA, 58 bp, Artificial
  Synthetic oligonucleotide
ttgtaacacggccaataagttcgggctgctattgattaaaaagcccatcgagccatgt

SEQ ID NO: 206882 - DNA, 59 bp, Artificial
  Synthetic oligonucleotide
aaatcaagcaggtcgtccactcagcattggtgtttttttcgagcctaatcaaactcata

SEQ ID NO: 206883 - DNA, 60 bp, Artificial
  Synthetic oligonucleotide
gaacatttgccccaacaggctatgactatatgcagtggctagtcaagcaaacaccaaaca

SEQ ID NO: 206884 - DNA, 59 bp, Artificial
  Synthetic oligonucleotide
ttgtagatgtgtggaaacaggtaattaactatgactatgggctacacgacccagacgac

SEQ ID NO: 206885 - DNA, 60 bp, Artificial
  Synthetic oligonucleotide
aaaggcgtactaatgttattggtggctcacaccatttttgatgaagatgactgtgaaatc

SEQ ID NO: 206886 - DNA, 58 bp, Artificial
  Synthetic oligonucleotide
aaagcgtaggtatcaaaataggcgacagaggcattttgcaactgtcgtcggcaacaat

SEQ ID NO: 206887 - DNA, 60 bp, Artificial
  Synthetic oligonucleotide
ttgtctattatgtgaaccaagatacatcaacaaacagtcaaccgctacatatacagtcga

SEQ ID NO: 206888 - DNA, 59 bp, Artificial
  Synthetic oligonucleotide
aaagaatgcttatgccgaccaaataggggcaacggctgaacatcgagagaatttgatta

SEQ ID NO: 206889 - DNA, 52 bp, Artificial
  Synthetic oligonucleotide
attacaagttccctttagcctaagaacgggagttaccgagctttgctcgccg

SEQ ID NO: 206890 - DNA, 50 bp, Artificial
  Synthetic oligonucleotide
ctttgattagtacacctaaacaagccttttacccattaggtaagaaaaac

SEQ ID NO: 206891 - DNA, 52 bp, Artificial
  Synthetic oligonucleotide
aaacgctatcacgggcggatacggacgctaaagaaacgtctacgctttcggg

SEQ ID NO: 206892 - DNA, 55 bp, Artificial
  Synthetic oligonucleotide
tttcaaactccttgaagaaataaagaacctagttgacactaacaccgcattcaaa

SEQ ID NO: 206893 - DNA, 58 bp, Artificial
  Synthetic oligonucleotide
gaaagaatcagaaaaagcatgatatctctttcgaaacggcaagccttgtttttgaaga

SEQ ID NO: 206894 - DNA, 60 bp, Artificial
  Synthetic oligonucleotide
tttcgcattgttgcatcgccagcagatagctatcgtgctgcgcggatgcattggcaatca

SEQ ID NO: 206895 - DNA, 60 bp, Artificial
  Synthetic oligonucleotide
tttgaatgctctgggctattttctcgtcgactgttggatagcggtcgcagtgatattggc

SEQ ID NO: 206896 - DNA, 55 bp, Artificial
  Synthetic oligonucleotide
cttttcgtgtaagacttcccctttttgcacgtttatcagcacttcataccgtcca

SEQ ID NO: 206897 - DNA, 52 bp, Artificial
  Synthetic oligonucleotide
ctttttcgtattaggtgtttaggtataactcctgtcgtacctcacgtcctgg

SEQ ID NO: 206898 - DNA, 54 bp, Artificial
  Synthetic oligonucleotide
gaaaagtaagatggtttaaccatcaaaataacgtgaaaatgtgggtgtgcgtgg

SEQ ID NO: 206899 - DNA, 52 bp, Artificial
  Synthetic oligonucleotide
aaaaaccggcttaaccaccctcttttcggctgctccagttcaacctgctccg

SEQ ID NO: 206900 - DNA, 60 bp, Artificial
  Synthetic oligonucleotide
gctgtgctttgctgtctggtcgcttgcatgtgctgatcgtcaaactgcctcccgatcggt

SEQ ID NO: 206901 - DNA, 60 bp, Artificial
  Synthetic oligonucleotide
gaaacagactcagacggtagtagcaggcagaggctatgatagtagcgacattagagcgtg

SEQ ID NO: 206902 - DNA, 58 bp, Artificial
  Synthetic oligonucleotide
aagactggcttgactactacatttcagccattgccgagatttatgaaaaacaaagttg

SEQ ID NO: 206903 - DNA, 58 bp, Artificial
  Synthetic oligonucleotide
gagaataccggtctatttacgaatgcttcacagcggttcttaatcacttatcgtagtc

SEQ ID NO: 206904 - DNA, 59 bp, Artificial
  Synthetic oligonucleotide
aagaaggacgcaacctgttggtgagcatggacgggcgaggagcgagcgacgctgggagg

SEQ ID NO: 206905 - DNA, 58 bp, Artificial
  Synthetic oligonucleotide
ttcgaggtaatatacaggtgtctaccactgtctataccaaataaaaagctatgtccaa

SEQ ID NO: 206906 - DNA, 59 bp, Artificial
  Synthetic oligonucleotide
aactatatacttgtcatagttagtagtcaatccgtcatagttaagtagtcaatccgtca

SEQ ID NO: 206907 - DNA, 50 bp, Artificial
  Synthetic oligonucleotide
aactaggtttatcgacccataaaactaggtttatcgacccataaaactag

SEQ ID NO: 206908 - DNA, 56 bp, Artificial
  Synthetic oligonucleotide
aactagacagggaaaagcatttcccacctgtaagcattgattaataataggtccaa

SEQ ID NO: 206909 - DNA, 60 bp, Artificial
  Synthetic oligonucleotide
cttaacatacaattcacgttctatgaatatgactttcattgtcgctgttcagttgaaaga

SEQ ID NO: 206910 - DNA, 57 bp, Artificial
  Synthetic oligonucleotide
ttcggatgtgaattggtttatatcagaaaaaggtggataacctcttagagctagaaa

SEQ ID NO: 206911 - DNA, 58 bp, Artificial
  Synthetic oligonucleotide
taactgcaccggaagtgtcggacttttatacgcggattcatcgcgaacagggtgtgac

SEQ ID NO: 206912 - DNA, 57 bp, Artificial
  Synthetic oligonucleotide
ttctaattctttaaaatagatagtggtactagcctttaaggtgaatatcagtatgag

SEQ ID NO: 206913 - DNA, 52 bp, Artificial
  Synthetic oligonucleotide
cttaatccttccatgttattcctaagtagaaatgtcctaccttaaaaccaaa

SEQ ID NO: 206914 - DNA, 60 bp, Artificial
  Synthetic oligonucleotide
cttacaatgaagtctaatgccctcagacaagagcaattacacatacccgccaattggaac

SEQ ID NO: 206915 - DNA, 57 bp, Artificial
  Synthetic oligonucleotide
cttacatttcttagaatctttacttgcttcggatctttattatgaaaagcaattagc

SEQ ID NO: 206916 - DNA, 55 bp, Artificial
  Synthetic oligonucleotide
gaccctctgaaaaccttatgcagcaatagtttcaagcgttaaaagggtacaaata

SEQ ID NO: 206917 - DNA, 58 bp, Artificial
  Synthetic oligonucleotide
cttcggacgtggcgttttgttgatgccaatcgataacccttgggatgtcatgttagaa

SEQ ID NO: 206918 - DNA, 59 bp, Artificial
  Synthetic oligonucleotide
aacattttggcacaagctgctgataacaaccccacaggacccgcaccataaatagctac

SEQ ID NO: 206919 - DNA, 60 bp, Artificial
  Synthetic oligonucleotide
gacacggagcaacagcagaaccgcaagggagattgttatcaatatcccccacgagcttat

SEQ ID NO: 206920 - DNA, 58 bp, Artificial
  Synthetic oligonucleotide
ttgcaccgctcacaccaaaagagcgagagttagggctagggcgtaactgcaccctatt

SEQ ID NO: 206921 - DNA, 59 bp, Artificial
  Synthetic oligonucleotide
gacaatgaagcaactgtagacggcagagtaaaacttgaagtgcgacataaaccacctaa

SEQ ID NO: 206922 - DNA, 54 bp, Artificial
  Synthetic oligonucleotide
atgttagcaacccatttttatacaagcaaaaaaaatggcagtcttactttaagc

SEQ ID NO: 206923 - DNA, 60 bp, Artificial
  Synthetic oligonucleotide
gacaaataggtaagcgtgaaatctctgttgagaacttacgaagcatgttggagcttggca

SEQ ID NO: 206924 - DNA, 60 bp, Artificial
  Synthetic oligonucleotide
ctttatcgttagcagattccatgtaggctacgctctatcgttaattcgttatcagaagaa

SEQ ID NO: 206925 - DNA, 59 bp, Artificial
  Synthetic oligonucleotide
aacaaccaagggattagtgcatcagcaaatataaatgtagctcgtattgatgggaaaac

SEQ ID NO: 206926 - DNA, 60 bp, Artificial
  Synthetic oligonucleotide
agaaacataccgcttataccgtactcagagaggcatctaaaagcttatttgatcgctatg

SEQ ID NO: 206927 - DNA, 60 bp, Artificial
  Synthetic oligonucleotide
tctgaatacataggcgctgtgctttgctgtctggtcgcttgcatgtgctgatcgtcaaac

SEQ ID NO: 206928 - DNA, 60 bp, Artificial
  Synthetic oligonucleotide
ctaatctctgctgattaatcgcttgaatgtactgattaagctgcctaatgtactcttctg

SEQ ID NO: 206929 - DNA, 58 bp, Artificial
  Synthetic oligonucleotide
acttgtcatagttagtagtcaatccgtcatagttaagtagtcaatccgtcatagttag

SEQ ID NO: 206930 - DNA, 54 bp, Artificial
  Synthetic oligonucleotide
ctacaatttctttgttataagactacaatttctttgttataagactacaatttc

SEQ ID NO: 206931 - DNA, 56 bp, Artificial
  Synthetic oligonucleotide
tctttagcactatcaaacatacttttagggctatacctccctctacggctaaggct

SEQ ID NO: 206932 - DNA, 60 bp, Artificial
  Synthetic oligonucleotide
tgaatctacacaagagaaagtactcgcagcgttggtcgttctacagcaacagggaccaag

SEQ ID NO: 206933 - DNA, 59 bp, Artificial
  Synthetic oligonucleotide
atgtgatgaaagatgaggattggaaaagagttgtgatttggtttagcccacaagttata

SEQ ID NO: 206934 - DNA, 60 bp, Artificial
  Synthetic oligonucleotide
gcatacagatttttacttgggttacataatgaaagcactatctgttattgagttatcaca

SEQ ID NO: 206935 - DNA, 58 bp, Artificial
  Synthetic oligonucleotide
tgaccgcacaattctaaaattgccgcttaatcgggttaagttggatcctcagaatgta

SEQ ID NO: 206936 - DNA, 57 bp, Artificial
  Synthetic oligonucleotide
actggctctactcctattatagaggtaagtgatttccgtcaaagaattggcgtactc

SEQ ID NO: 206937 - DNA, 60 bp, Artificial
  Synthetic oligonucleotide
ctaggtatcacacgagtaatgatagcacacaggcctgaaacgattaagagcgctgattgg

SEQ ID NO: 206938 - DNA, 57 bp, Artificial
  Synthetic oligonucleotide
actcctatatttgaagtttctgactttcgttcgaagcttggcttaacttcagatgat

SEQ ID NO: 206939 - DNA, 60 bp, Artificial
  Synthetic oligonucleotide
actcattcagccgccatctttcttgtgtaaccccagtagatggcttataatcacgttatg

SEQ ID NO: 206940 - DNA, 60 bp, Artificial
  Synthetic oligonucleotide
tgactacttagccaagatacaagcaggaatggcgagaaaactaggggcggatacaggcta

SEQ ID NO: 206941 - DNA, 58 bp, Artificial
  Synthetic oligonucleotide
gcactcaaaacgcctgtagtaaccacagaacaaggcagtaaccgagctattgactact

SEQ ID NO: 206942 - DNA, 58 bp, Artificial
  Synthetic oligonucleotide
ctatatcaaccattttaacgttcatagaaatacagcctataaagtccttaaagatgca

SEQ ID NO: 206943 - DNA, 60 bp, Artificial
  Synthetic oligonucleotide
tgatagcattaggggcgttcagtctgtacttgggcaagaaaatagccacacagcaagggc

SEQ ID NO: 206944 - DNA, 60 bp, Artificial
  Synthetic oligonucleotide
atgccattcgactctatgagttgcttatagcatggcgtgaagtcggtaacactcctatat

SEQ ID NO: 206945 - DNA, 59 bp, Artificial
  Synthetic oligonucleotide
acgtgaagaacggttaatgcaacaaattgaccgtatgcaaacactcattgagctgaaaa

SEQ ID NO: 206946 - DNA, 60 bp, Artificial
  Synthetic oligonucleotide
tgatattggctctagcaagctgtctctgatagtctgtgacgtttgttcgataccgctcag

SEQ ID NO: 206947 - DNA, 60 bp, Artificial
  Synthetic oligonucleotide
tgatcagttacatgttaaggatgaacaaattgaggctatgcaacgcttattagaagcccc

SEQ ID NO: 206948 - DNA, 60 bp, Artificial
  Synthetic oligonucleotide
tcagctgcaatcatccaggaacgcagggtttctactgaaagatcgaatccatgtacggtg

SEQ ID NO: 206949 - DNA, 60 bp, Artificial
  Synthetic oligonucleotide
tcagtcgcggagatttttgagaagataacccaaactgtcaccagcaccgctgcagacgta

SEQ ID NO: 206950 - DNA, 60 bp, Artificial
  Synthetic oligonucleotide
agccatgttttgacggcgtgagctgccctaaacgcaagccaaactgatcggatgcggaca

SEQ ID NO: 206951 - DNA, 60 bp, Artificial
  Synthetic oligonucleotide
tcagtgggacgaaaagattgcacgctgtttcatcctgcaaggtgaaactactaagcgtgc

SEQ ID NO: 206952 - DNA, 56 bp, Artificial
  Synthetic oligonucleotide
agcaaggtaaacggtgtcatattgcaaggtaaacggtgtcatattgcaaggtaaac

SEQ ID NO: 206953 - DNA, 52 bp, Artificial
  Synthetic oligonucleotide
agcaacgccaaacgaaaaagccttggtatggggacaacccaagacgaaatta

SEQ ID NO: 206954 - DNA, 59 bp, Artificial
  Synthetic oligonucleotide
tccctgccaaatacgttcttcataattagccataagcatcttttgccagaatacaaatt

SEQ ID NO: 206955 - DNA, 60 bp, Artificial
  Synthetic oligonucleotide
cgatttattcttagcagtataggtgcaggatatcttcgtccagtgatcgactgttgcttt

SEQ ID NO: 206956 - DNA, 57 bp, Artificial
  Synthetic oligonucleotide
agatgttgaacttaaccaaaatcaagtaggcaaggtgcttgccttagagtatccaaa

SEQ ID NO: 206957 - DNA, 60 bp, Artificial
  Synthetic oligonucleotide
agatacagagctaggggcggtagcgtggcatgatgctgatttaccgctaccaacttggac

SEQ ID NO: 206958 - DNA, 50 bp, Artificial
  Synthetic oligonucleotide
cgtggtactggtcagtttaaaggttcaacgctttattggggtaaaggttc

SEQ ID NO: 206959 - DNA, 56 bp, Artificial
  Synthetic oligonucleotide
gccattggatttcatccaatggtgcgacaaggggtaaatcccctttgtaatcccca

SEQ ID NO: 206960 - DNA, 60 bp, Artificial
  Synthetic oligonucleotide
tctaagcaactttgcaatcgaaccataaggattattggaatcgagcaattgatattctga

SEQ ID NO: 206961 - DNA, 53 bp, Artificial
  Synthetic oligonucleotide
agacgttacttccgtctttctacgaagttgataggtgtgaaaagccaaactac

SEQ ID NO: 206962 - DNA, 55 bp, Artificial
  Synthetic oligonucleotide
agacggattagagggtaacactacattacgttttaatactggcagtaatgagaag

SEQ ID NO: 206963 - DNA, 52 bp, Artificial
  Synthetic oligonucleotide
agaccaccgtagccacaaagacaggggattagagaccctacccaccgttaaa

SEQ ID NO: 206964 - DNA, 60 bp, Artificial
  Synthetic oligonucleotide
cgtttaagtattcggttaattgaactgtacttgcgtctgtagtgctcattagctcacata

SEQ ID NO: 206965 - DNA, 55 bp, Artificial
  Synthetic oligonucleotide
tctccttattacctttcggtgttagcttctgataagtaaacctgcgttcaaacaa

SEQ ID NO: 206966 - DNA, 59 bp, Artificial
  Synthetic oligonucleotide
atcccgacatgacgtcgggattttttattgccatttgcaaagtcattcaatcagattta

SEQ ID NO: 206967 - DNA, 60 bp, Artificial
  Synthetic oligonucleotide
taataatgacgctcttcaaagtgacttaattattggagaattctatggagattcagactt

SEQ ID NO: 206968 - DNA, 59 bp, Artificial
  Synthetic oligonucleotide
agaatggctgtaggcgtttgcctgttgaaagctcaacattaggaatcacaaaattaagc

SEQ ID NO: 206969 - DNA, 59 bp, Artificial
  Synthetic oligonucleotide
agaagttgaccacagcaggtgtaacagttggcttaagcccacatgtagctttacgggca

SEQ ID NO: 206970 - DNA, 60 bp, Artificial
  Synthetic oligonucleotide
ctaaccatgctcatgtttgtttcgctccgctttagtgacttgccttgcactaatgattcg

SEQ ID NO: 206971 - DNA, 59 bp, Artificial
  Synthetic oligonucleotide
acgcgcgccgaaaattagcagagtcgtggtaattcagtaagctggcaattgcctcgacc

SEQ ID NO: 206972 - DNA, 60 bp, Artificial
  Synthetic oligonucleotide
gcaaggtaatatacatgagtactctctattcaactcaagtcaaagcagtcggtggacgtt

SEQ ID NO: 206973 - DNA, 60 bp, Artificial
  Synthetic oligonucleotide
ctcaagctggaattgcatatcgaatgggagtttctactagaactgtacaacgaacattag

SEQ ID NO: 206974 - DNA, 58 bp, Artificial
  Synthetic oligonucleotide
ctcaccctaagagcttgtaagtacaagcccttagcgttgccctcaatgcttgcccgtc

SEQ ID NO: 206975 - DNA, 57 bp, Artificial
  Synthetic oligonucleotide
acgagggaatattgagaactatagatcccgttgggttagtgaaattggatatgtaga

SEQ ID NO: 206976 - DNA, 56 bp, Artificial
  Synthetic oligonucleotide
acgaagcgactaaagacctgatttatcggccgatggagtttatgggcaatttggtc

SEQ ID NO: 206977 - DNA, 58 bp, Artificial
  Synthetic oligonucleotide
acctttatcttgcaataagtacacctttatcttgcaataagtacacctttatcttgca

SEQ ID NO: 206978 - DNA, 60 bp, Artificial
  Synthetic oligonucleotide
taatatgggtgaacttagatacatcacgttgagttcgacattgattaaaagattgcgaag

SEQ ID NO: 206979 - DNA, 55 bp, Artificial
  Synthetic oligonucleotide
tggaatagagaaccgactttagctccccaaaaggatcgttacactcctagattac

SEQ ID NO: 206980 - DNA, 55 bp, Artificial
  Synthetic oligonucleotide
acctattttttaattcgatttaggtttccagcagtgtggcagtaactcttcaatc

SEQ ID NO: 206981 - DNA, 59 bp, Artificial
  Synthetic oligonucleotide
tggacagcgaacgcacactacaaccttggatagagttaggaattagtagacggacatac

SEQ ID NO: 206982 - DNA, 60 bp, Artificial
  Synthetic oligonucleotide
tggacagtcattacaacggatctgtttaacgaatggcttgtacagcaagatgaatctaca

SEQ ID NO: 206983 - DNA, 59 bp, Artificial
  Synthetic oligonucleotide
tggctaagaggcttgtttaggtgtactaatcaaagctgtggaactttgatcaaagaata

SEQ ID NO: 206984 - DNA, 60 bp, Artificial
  Synthetic oligonucleotide
ctcgaaatacctaagtcttcccaaggcttcatagattgctctgacgtagctataggctta

SEQ ID NO: 206985 - DNA, 58 bp, Artificial
  Synthetic oligonucleotide
gattgaccctgaagactgaatgtttatcgctgtaaaacgctaaaggcttaccgtgctg

SEQ ID NO: 206986 - DNA, 60 bp, Artificial
  Synthetic oligonucleotide
accagtagcgtgtcacccttgacaagcttagagagcagtttagcaagctctgggcggtct

SEQ ID NO: 206987 - DNA, 60 bp, Artificial
  Synthetic oligonucleotide
gattagtggtactgctgaatctgaatatattggtctttataagcagattccttttcgtgt

SEQ ID NO: 206988 - DNA, 60 bp, Artificial
  Synthetic oligonucleotide
accaagcccaatctaagactcaccgttgaagcgatgttatatcgcatacgattgagctgt

SEQ ID NO: 206989 - DNA, 60 bp, Artificial
  Synthetic oligonucleotide
gctatcgtgtttttcatgaaatgcgcacttacgacttggatttcatccaagtcaaagttg

SEQ ID NO: 206990 - DNA, 60 bp, Artificial
  Synthetic oligonucleotide
ctgacgtgttggatatgtctaatatgtccccagatcacgctgtcacagttgaaccaagtt

SEQ ID NO: 206991 - DNA, 60 bp, Artificial
  Synthetic oligonucleotide
tgatctatcatccgaacagcaaacaaatcatagggctagatatatcgaatggcagtcagc

SEQ ID NO: 206992 - DNA, 60 bp, Artificial
  Synthetic oligonucleotide
ctatattcgccagtagctctaaagccttgctcataaatctcgccctctaaacggatggga

SEQ ID NO: 206993 - DNA, 60 bp, Artificial
  Synthetic oligonucleotide
tgcagtatccagaaatccttccactgaggtatagaagcggtggaaaggaaccagtgcacc

SEQ ID NO: 206994 - DNA, 60 bp, Artificial
  Synthetic oligonucleotide
gcaagttagtagtcttagtagcgcttatgccattcgcttatatgagcttctaattcagtg

SEQ ID NO: 206995 - DNA, 58 bp, Artificial
  Synthetic oligonucleotide
tgcatccctctctccgtggattacagtgcgttccgttttacctggcttttccgataga

SEQ ID NO: 206996 - DNA, 51 bp, Artificial
  Synthetic oligonucleotide
acggagaaacccctgaaatcaaacggagaaacccctgaaatcaaacggaga

SEQ ID NO: 206997 - DNA, 59 bp, Artificial
  Synthetic oligonucleotide
ctatcacaaccaactctatataaacttggaccaatgttttcttctaagcatccccatgc

SEQ ID NO: 206998 - DNA, 60 bp, Artificial
  Synthetic oligonucleotide
tgcccgtcggtacggtcgcatcgtcaagggagggtatcactggtagcagctacccctgca

SEQ ID NO: 206999 - DNA, 60 bp, Artificial
  Synthetic oligonucleotide
acgctccagtgatggacaattcgatctagcagaggtcatccgatgctttggagaacctga

SEQ ID NO: 207000 - DNA, 59 bp, Artificial
  Synthetic oligonucleotide
atgagccgtatttgccgtatcatcgaccgccgttgtccaagacctttttatgcggtgca

SEQ ID NO: 207001 - DNA, 59 bp, Artificial
  Synthetic oligonucleotide
ctccttatattgatttaaatactcgacgttatgatgtgcgtggagaattcactcaacca

SEQ ID NO: 207002 - DNA, 59 bp, Artificial
  Synthetic oligonucleotide
cattgacccagaacactacctttgccatgtgttaagggtgctagagcaaaggagaattg

SEQ ID NO: 207003 - DNA, 59 bp, Artificial
  Synthetic oligonucleotide
tcgaagtacgatactgttgctcaggtaatgtctcgcgccagtgaagccggactgagcga

SEQ ID NO: 207004 - DNA, 59 bp, Artificial
  Synthetic oligonucleotide
gtggtctgggaacccgactgaagcgcacgcacacaagtccgtatagagtcaagcctcgg

SEQ ID NO: 207005 - DNA, 59 bp, Artificial
  Synthetic oligonucleotide
cagccactgccaatcgcttaaacttcaatcaatccacgagcagtgcagacaatattagc

SEQ ID NO: 207006 - DNA, 59 bp, Artificial
  Synthetic oligonucleotide
tatcatcaaagtatattaattcagaacagtcgctaaaaaaaatcgaggcatgtgccccg

SEQ ID NO: 207007 - DNA, 59 bp, Artificial
  Synthetic oligonucleotide
acgccgtgcgggtctagaggcatctgaaggggtgcgctggattagtggtggtacaggcg

SEQ ID NO: 207008 - DNA, 59 bp, Artificial
  Synthetic oligonucleotide
cgaactttgataatatgcgccacgaagtgggctggacggtcgctgctgtggaggtctcc

SEQ ID NO: 207009 - DNA, 59 bp, Artificial
  Synthetic oligonucleotide
cacccagttgaggtgcaaactcgctacctgtttgagtggctagcacgcccgtaagcact

SEQ ID NO: 207010 - DNA, 59 bp, Artificial
  Synthetic oligonucleotide
ctgtacgtattgctgagatgctacaagatcccgctcaattcaaagagctatacccatac

SEQ ID NO: 207011 - DNA, 58 bp, Artificial
  Synthetic oligonucleotide
atgagagatttagttgtaaaggacaatgccttaatcaacgcaagctataacttagact

SEQ ID NO: 207012 - DNA, 59 bp, Artificial
  Synthetic oligonucleotide
cgactatttaccatgtcagacgtttgagctaatgcattagatacacttacatttcttag

SEQ ID NO: 207013 - DNA, 59 bp, Artificial
  Synthetic oligonucleotide
tgcccacgatggtgcacaaaccagcgttgcaatcgaagcgggtaagtcactaatgcagt

SEQ ID NO: 207014 - DNA, 59 bp, Artificial
  Synthetic oligonucleotide
aacgcatcaccagtacgtctgcgcaatcgttgtgctatcacgggtcgtcctcacggtta

SEQ ID NO: 207015 - DNA, 59 bp, Artificial
  Synthetic oligonucleotide
cacgcttttaggctggtagcccaaaccaagatcacgcaaatattgagaagctgataaat

SEQ ID NO: 207016 - DNA, 58 bp, Artificial
  Synthetic oligonucleotide
tttacgagcatcagtcggtacgactggtgattcatacgataatgctttggctgaaacg

SEQ ID NO: 207017 - DNA, 58 bp, Artificial
  Synthetic oligonucleotide
ggcactcatttcaatgcgccagctcttggatcacgctgcggaacataactacggcgta

SEQ ID NO: 207018 - DNA, 58 bp, Artificial
  Synthetic oligonucleotide
tcaatgcgccagctcttggatcacgctgcggaacataactacggcgtaccagcattta

SEQ ID NO: 207019 - DNA, 57 bp, Artificial
  Synthetic oligonucleotide
atacgtattaccgatacaaaatacgcctcccaaacgcactcaatcagaaccagtaca

SEQ ID NO: 207020 - DNA, 53 bp, Artificial
  Synthetic oligonucleotide
tttaaagaacgacataaggggagtaaattggataaaattactaatggcttata

SEQ ID NO: 207021 - DNA, 56 bp, Artificial
  Synthetic oligonucleotide
ttttcgcccctaaaagtccacgccaccaccaagagccgagcttgattactcatacc

SEQ ID NO: 207022 - DNA, 59 bp, Artificial
  Synthetic oligonucleotide
atgaagaaggaacttgttgtcaaagacaatgcactaataaatgccagttataatttaga

SEQ ID NO: 207023 - DNA, 58 bp, Artificial
  Synthetic oligonucleotide
gattagcagaacatacataggcaatgatatagagaatagccctattatcaaagaagcc

SEQ ID NO: 207024 - DNA, 53 bp, Artificial
  Synthetic oligonucleotide
ggttgggttaggttccgcgcccgggaaaatatggctcgctacgcctgcttcgg

SEQ ID NO: 207025 - DNA, 58 bp, Artificial
  Synthetic oligonucleotide
tgttgccccagagtgtccccaggtttgtcgtttttcaccatgccagccctgttgtgct

SEQ ID NO: 207026 - DNA, 58 bp, Artificial
  Synthetic oligonucleotide
ttcttggctctgtatttgctcgtttaattgcgttaaatggctcaatttcgattgcagc

SEQ ID NO: 207027 - DNA, 58 bp, Artificial
  Synthetic oligonucleotide
aaccttcagtaaatcctccaactccactgaatagatcagcaaatctaagggatacacg

SEQ ID NO: 207028 - DNA, 55 bp, Artificial
  Synthetic oligonucleotide
ctaacgatagagctatcggagtcactaaataccgttctgacccgatttaatttcg

SEQ ID NO: 207029 - DNA, 57 bp, Artificial
  Synthetic oligonucleotide
aaccgcctggcaagcagtaaacaatgcccaagttggtcgaggttccagtgtggcgat

SEQ ID NO: 207030 - DNA, 54 bp, Artificial
  Synthetic oligonucleotide
tatacacaaacaccactgccagacctaacgaaatgaaccctttgggggttattc

SEQ ID NO: 207031 - DNA, 50 bp, Artificial
  Synthetic oligonucleotide
cctttaccacaccaaaaagtcacctttaccacaccaaaaagtcacctatt

SEQ ID NO: 207032 - DNA, 56 bp, Artificial
  Synthetic oligonucleotide
ggcattaagcggtagtagccgtaccaaacaacactctaatcatcgtgtttaggcgt

SEQ ID NO: 207033 - DNA, 60 bp, Artificial
  Synthetic oligonucleotide
cgccctcacatgatagagattagagacgctattcgcatggtcaacgagaaaaaagacccc

SEQ ID NO: 207034 - DNA, 54 bp, Artificial
  Synthetic oligonucleotide
tctatggaaaagaacaagactacacaaaaaaaactggtgtcgaatttacagaaa

SEQ ID NO: 207035 - DNA, 58 bp, Artificial
  Synthetic oligonucleotide
tacaaactcccctttgctgctgagactgagatacagagcatcccggagggtgcgaaca

SEQ ID NO: 207036 - DNA, 58 bp, Artificial
  Synthetic oligonucleotide
gaagactgaatgtttatcgctgtaaaacgctaaaggcttaccgtgctgttcgacatat

SEQ ID NO: 207037 - DNA, 54 bp, Artificial
  Synthetic oligonucleotide
gccaggttatacccagaaccggatatggagtttaaagtccgatccgtacaacca

SEQ ID NO: 207038 - DNA, 54 bp, Artificial
  Synthetic oligonucleotide
gagaccgaaaacagcaagctaacgaccgaaaacaacgaacagttgaaattattg

SEQ ID NO: 207039 - DNA, 57 bp, Artificial
  Synthetic oligonucleotide
cgttttggcttacagcgtttcacgaaattgtctgtatctatcccccgatgaagctct

SEQ ID NO: 207040 - DNA, 57 bp, Artificial
  Synthetic oligonucleotide
gagacggatattataattggttgtgctcatagcattacttatcgcttatttatgtac

SEQ ID NO: 207041 - DNA, 57 bp, Artificial
  Synthetic oligonucleotide
ggtggttgcgattgatcgggcagcgcgcagtacactacaagatggcagtacgcttgc

SEQ ID NO: 207042 - DNA, 54 bp, Artificial
  Synthetic oligonucleotide
gccttaatcaacgcaagctataacttagacttagtagaacaacgtttaatttta

SEQ ID NO: 207043 - DNA, 54 bp, Artificial
  Synthetic oligonucleotide
gggtgcgtaccgtaccctcgttaaatagactctcaggcggtattagggcattaa

SEQ ID NO: 207044 - DNA, 55 bp, Artificial
  Synthetic oligonucleotide
gctaccacgcccctagccttgcacagccctaggtaagcccctttgagttcttccg

SEQ ID NO: 207045 - DNA, 57 bp, Artificial
  Synthetic oligonucleotide
cggttgagccttcattggctaggcggtgtggtcgctcgtcaaaaatagggtgtcctg

SEQ ID NO: 207046 - DNA, 57 bp, Artificial
  Synthetic oligonucleotide
cctgatagaggtgacctaatcaagaatggcggtggtattcgcaaagtacgttgtgct

SEQ ID NO: 207047 - DNA, 57 bp, Artificial
  Synthetic oligonucleotide
tcagaaagtacaaagcgagtgtctacgagcgacatcaccaaaattagcgcctcgact

SEQ ID NO: 207048 - DNA, 57 bp, Artificial
  Synthetic oligonucleotide
tctcttagcatttctttgattgttgcagctagatcatcgtaactttctccttgagtc

SEQ ID NO: 207049 - DNA, 57 bp, Artificial
  Synthetic oligonucleotide
gttagtagtcaatccgtcatagttaagtagtcaatccgtcatagttagtagtcaatc

SEQ ID NO: 207050 - DNA, 57 bp, Artificial
  Synthetic oligonucleotide
tgctgattccgatcatgctgattgcatcgtaccaggataaaaaggcgctaaagaaag

SEQ ID NO: 207051 - DNA, 57 bp, Artificial
  Synthetic oligonucleotide
tgctgcctaaagtagcaatcagtaaccctactattatatagcgttgctgctttaccc

SEQ ID NO: 207052 - DNA, 57 bp, Artificial
  Synthetic oligonucleotide
cacgttctatgaatatgactttcattgtcgctgttcagttgaaagatagtattgtcg

SEQ ID NO: 207053 - DNA, 57 bp, Artificial
  Synthetic oligonucleotide
aattagccctaccgctaatttattgtcaataacatcattgaagatagactccatata

SEQ ID NO: 207054 - DNA, 57 bp, Artificial
  Synthetic oligonucleotide
ttagatagatgcatagagcgagtgtctacgagcgaactatcaaaatttgcgcctaga

SEQ ID NO: 207055 - DNA, 60 bp, Artificial
  Synthetic oligonucleotide
atcttaacctattaggcatagctgtctgtctcaagtaaatcaaccaccgatatagtcaga

SEQ ID NO: 207056 - DNA, 50 bp, Artificial
  Synthetic oligonucleotide
aaccagtacccggtaaacctactgttgttcgagttcccttcttactaaca

SEQ ID NO: 207057 - DNA, 55 bp, Artificial
  Synthetic oligonucleotide
aaatagcatgataaagggtacaaatagcatgattttatcgtttaaaagggtacaa

SEQ ID NO: 207058 - DNA, 57 bp, Artificial
  Synthetic oligonucleotide
aaacgatctttttggctaatggcagggcacatatatgttgagttatcacgggaataa

SEQ ID NO: 207059 - DNA, 57 bp, Artificial
  Synthetic oligonucleotide
ttttctgtttatcctggtcagataaatcatgctcataaaaggacaaacaaccactgg

SEQ ID NO: 207060 - DNA, 56 bp, Artificial
  Synthetic oligonucleotide
gatttcgcctacacagcttgacccaaacactggctacgaaattaccgctaaggagt

SEQ ID NO: 207061 - DNA, 56 bp, Artificial
  Synthetic oligonucleotide
accctatttgatacggtgcgaaaatgggcgtatatcgctatcagagagcatagggg

SEQ ID NO: 207062 - DNA, 54 bp, Artificial
  Synthetic oligonucleotide
gtttagaacaccaaccaccgaccacaacacgctcaaaaatgcccctagaaacgc

SEQ ID NO: 207063 - DNA, 56 bp, Artificial
  Synthetic oligonucleotide
aaggtggagggatgtgcgagctctatcatacaatcgggatattcgctccaagatca

SEQ ID NO: 207064 - DNA, 56 bp, Artificial
  Synthetic oligonucleotide
cagacaatacttggactagtgttgaagaaacattacgaccatgaaattgatttggg

SEQ ID NO: 207065 - DNA, 56 bp, Artificial
  Synthetic oligonucleotide
ggtacgctcggattatcctggatagacgataatacttatttaggagtttcttatac

SEQ ID NO: 207066 - DNA, 60 bp, Artificial
  Synthetic oligonucleotide
taatgattcggatgatttcacagtcatcttcatcaaaaatggtgtgagccaccaataaca

SEQ ID NO: 207067 - DNA, 56 bp, Artificial
  Synthetic oligonucleotide
atcttagaaacagcgatgtacaggctaaccagccatttgtacaacccaacggcaaa

SEQ ID NO: 207068 - DNA, 56 bp, Artificial
  Synthetic oligonucleotide
ccttagcgttgccctcaatgcttgcccgtcggtacggtcgcatcgtcaagggaggg

SEQ ID NO: 207069 - DNA, 56 bp, Artificial
  Synthetic oligonucleotide
atccgatgctaccacgcccctagccttgcacagccctaggtaagcccctttgagtt

SEQ ID NO: 207070 - DNA, 56 bp, Artificial
  Synthetic oligonucleotide
ctctcataatgctccttatattgacttaaatactcgacgttatgatatgcgtggag

SEQ ID NO: 207071 - DNA, 56 bp, Artificial
  Synthetic oligonucleotide
gacggtacatctgcctgagtttcagatgtaacacgtcagctgtaaccccgcggatc

SEQ ID NO: 207072 - DNA, 56 bp, Artificial
  Synthetic oligonucleotide
gatacttagaaccttatagggagcttaatacgatgttattagctatctttgactag

SEQ ID NO: 207073 - DNA, 56 bp, Artificial
  Synthetic oligonucleotide
tagatgccactgtcaacactacgcccgtatcaacgcagcgtacaccagatactcta

SEQ ID NO: 207074 - DNA, 56 bp, Artificial
  Synthetic oligonucleotide
agttcggtactctgtctagcagtatgcataacgcatttatgagactaacagcgggt

SEQ ID NO: 207075 - DNA, 53 bp, Artificial
  Synthetic oligonucleotide
ggggctgttaaatgacaatttggcttgggtcgattttctggttactaccccac

SEQ ID NO: 207076 - DNA, 56 bp, Artificial
  Synthetic oligonucleotide
gtaaaggacaatgccttaatcaacgcaagctataacttagacttagtagaacaacg

SEQ ID NO: 207077 - DNA, 56 bp, Artificial
  Synthetic oligonucleotide
atccatcgaaaatggcattagggaaagcttttgggattagtcgtcaggcggtatac

SEQ ID NO: 207078 - DNA, 60 bp, Artificial
  Synthetic oligonucleotide
taatgggacaagatcattacgatagcttaatggaaacgttatatctcctttcatctccaa

SEQ ID NO: 207079 - DNA, 56 bp, Artificial
  Synthetic oligonucleotide
gatcgctgataagaagttttgagccaatttatcattgcgtgtggcaatggcacgat

SEQ ID NO: 207080 - DNA, 56 bp, Artificial
  Synthetic oligonucleotide
caggcttaataaacgaccgatagaaagtgatcgagtagatttatttgcaagatagg

SEQ ID NO: 207081 - DNA, 56 bp, Artificial
  Synthetic oligonucleotide
catcagttaagtttccgggttaagctagatttaattggttatgtgcatactaatcc

SEQ ID NO: 207082 - DNA, 56 bp, Artificial
  Synthetic oligonucleotide
cggacgaagatgaaaagcctaaagttgttaataatgacagactacatacttttgcc

SEQ ID NO: 207083 - DNA, 56 bp, Artificial
  Synthetic oligonucleotide
gttctttgcgagaacaagataaagcaactaatgtggttccgttaattagaccactc

SEQ ID NO: 207084 - DNA, 56 bp, Artificial
  Synthetic oligonucleotide
atagccaagtgcccaccgtgcaagcaaacggggtttgcccttgcatcggttgggca

SEQ ID NO: 207085 - DNA, 56 bp, Artificial
  Synthetic oligonucleotide
cgtactcgatacagagtacaagcgtatggaacgctttaaaactagtgtacttgagc

SEQ ID NO: 207086 - DNA, 55 bp, Artificial
  Synthetic oligonucleotide
gcccaactaccagcaccgccaaaggtgagtgcttggctagatatggatgcactcg

SEQ ID NO: 207087 - DNA, 55 bp, Artificial
  Synthetic oligonucleotide
tcgatttaggtttccagcagtgtggcagtaactcttcaatctgggtcactttatg

SEQ ID NO: 207088 - DNA, 55 bp, Artificial
  Synthetic oligonucleotide
gcccactgttggcaggcggttcaggctatacgtacctttagaaaccatatgacgc

SEQ ID NO: 207089 - DNA, 58 bp, Artificial
  Synthetic oligonucleotide
taatttagacctttcagaacaacgtctaatattgttagcaatccttgaagctagacaa

SEQ ID NO: 207090 - DNA, 55 bp, Artificial
  Synthetic oligonucleotide
gccgaccaaataggggcaacggctgaacatcgagagaatttgattagacagggat

SEQ ID NO: 207091 - DNA, 55 bp, Artificial
  Synthetic oligonucleotide
gccattggcgacgatatgcaggctgatgtttcttacgcttccattcgccttcacc

SEQ ID NO: 207092 - DNA, 55 bp, Artificial
  Synthetic oligonucleotide
tcaccaaacaaggtgagccgaagattgtggctgagctgacctatccggtaacggg

SEQ ID NO: 207093 - DNA, 55 bp, Artificial
  Synthetic oligonucleotide
gcccttaatcaagcgaatgcttataccgatagtcgtgtaaatgccttgaaccgag

SEQ ID NO: 207094 - DNA, 55 bp, Artificial
  Synthetic oligonucleotide
gccgcgtactgagtttcgtccttatacctcaagtcgtgtgtttcggattatgacg

SEQ ID NO: 207095 - DNA, 55 bp, Artificial
  Synthetic oligonucleotide
gcagtgccagagctgtcatttgtgtatcacgcaggtcaaactcgccacgctggaa

SEQ ID NO: 207096 - DNA, 55 bp, Artificial
  Synthetic oligonucleotide
gcagtgcgttttaagcgagcttcaaattgctcgttaacacggctcgtcggtacag

SEQ ID NO: 207097 - DNA, 55 bp, Artificial
  Synthetic oligonucleotide
tgacaatagacggtaagcatccaacgtcaggaacacattactggcctttaccgac

SEQ ID NO: 207098 - DNA, 55 bp, Artificial
  Synthetic oligonucleotide
gcatcgccatgaccgattagggcatctaggctgcaagtagctccgcatgctgggc

SEQ ID NO: 207099 - DNA, 55 bp, Artificial
  Synthetic oligonucleotide
gcatgactgttaaccatccacatggagcgtacaatggtaaacatgcccacgactg

SEQ ID NO: 207100 - DNA, 58 bp, Artificial
  Synthetic oligonucleotide
atcggcctaatggcattaagcggtagtagccgtaccaaacaacactctaatcatcgtg

SEQ ID NO: 207101 - DNA, 55 bp, Artificial
  Synthetic oligonucleotide
tcttgtgtaaccccagtagatggcttataatcacgttatgcagggctggcgtctc

SEQ ID NO: 207102 - DNA, 55 bp, Artificial
  Synthetic oligonucleotide
tcttgagtttaaagataacctgacctcagaccagattgaagcctgtgtaaaccgg

SEQ ID NO: 207103 - DNA, 55 bp, Artificial
  Synthetic oligonucleotide
gccaaaactttaacttgacggaagcatcggctgcactctacacatctcaatcggg

SEQ ID NO: 207104 - DNA, 55 bp, Artificial
  Synthetic oligonucleotide
gccaagatcagcggacattgcactgactttgggtctgtccgaagaagcatgcccc

SEQ ID NO: 207105 - DNA, 55 bp, Artificial
  Synthetic oligonucleotide
tcttatcacgcattgttcagactccttagatcttttgaccttgagcacggagatc

SEQ ID NO: 207106 - DNA, 55 bp, Artificial
  Synthetic oligonucleotide
tctcttctaatgaactataagaaactggattccgattaccatcccacatattggg

SEQ ID NO: 207107 - DNA, 55 bp, Artificial
  Synthetic oligonucleotide
gccaagcgacaacagttcgtacacgcgaactctatcaagagcagtacaaactcgg

SEQ ID NO: 207108 - DNA, 55 bp, Artificial
  Synthetic oligonucleotide
gaaagaagtgaagtctgttggtgtacggaacaagtggcaagctcatttcaatgct

SEQ ID NO: 207109 - DNA, 55 bp, Artificial
  Synthetic oligonucleotide
gccaattgatcgtagaattctgctacttgtggatctaacctgactgcataagttt

SEQ ID NO: 207110 - DNA, 55 bp, Artificial
  Synthetic oligonucleotide
tctattcgttttcctgttagaggcagcaaatttaggagcatcagtcggtacaact

SEQ ID NO: 207111 - DNA, 60 bp, Artificial
  Synthetic oligonucleotide
atcgctacaagagctagaacgctacttgtcatcgctagagacggaaaatcggacgctcaa

SEQ ID NO: 207112 - DNA, 55 bp, Artificial
  Synthetic oligonucleotide
gccaattgcggagtttgtgtttgaccactcacatagcgcatagcactagattcgc

SEQ ID NO: 207113 - DNA, 55 bp, Artificial
  Synthetic oligonucleotide
tctagaccgccttccatgttgtcacgccatacactggtacgttgtaaacggtctg

SEQ ID NO: 207114 - DNA, 55 bp, Artificial
  Synthetic oligonucleotide
gccataacgcaggcttgcacctattgccccaccgcaggcaaccaataaccagttc

SEQ ID NO: 207115 - DNA, 55 bp, Artificial
  Synthetic oligonucleotide
tcgtatacaagctatgaagtcacgtgtgctcactgctcagttaggcggtgctgtg

SEQ ID NO: 207116 - DNA, 55 bp, Artificial
  Synthetic oligonucleotide
gcgaacctcacatgagtttcacttactgttttcagaagtgccccaatctacgaac

SEQ ID NO: 207117 - DNA, 55 bp, Artificial
  Synthetic oligonucleotide
tatcacgctccagtgatggacacttcgatctagcagaggtcatacgatgctttgg

SEQ ID NO: 207118 - DNA, 55 bp, Artificial
  Synthetic oligonucleotide
gcgaagcacaaatcaagcgtaatgaggaaaacagacgcaaatacgagttaggtgg

SEQ ID NO: 207119 - DNA, 55 bp, Artificial
  Synthetic oligonucleotide
gcgacgctactatcactacaaggttgtgcagcggttatggcaagtaaccaaccgc

SEQ ID NO: 207120 - DNA, 55 bp, Artificial
  Synthetic oligonucleotide
gcgactattggcctgtttgtgcgctatatactcacttcaggtgcgatcctgattg

SEQ ID NO: 207121 - DNA, 55 bp, Artificial
  Synthetic oligonucleotide
gcgactctcgcatcgacataacctttcatttgcacgctagaaatttgtgcatcgt

SEQ ID NO: 207122 - DNA, 53 bp, Artificial
  Synthetic oligonucleotide
atcgccaagtttaacaggtgcgacgaagtttaggttgagtttatagatagggg

SEQ ID NO: 207123 - DNA, 55 bp, Artificial
  Synthetic oligonucleotide
gcgactggctactgtatgacatgtggagcgacacgaccagtcacgccaaggggct

SEQ ID NO: 207124 - DNA, 55 bp, Artificial
  Synthetic oligonucleotide
tatagttaccagcattacgatataacccttctgcccgtaaagctacatgtgggct

SEQ ID NO: 207125 - DNA, 55 bp, Artificial
  Synthetic oligonucleotide
tatagcgtcctaagccgaatcgagaccttttgggtgagtacacactaacgttata

SEQ ID NO: 207126 - DNA, 55 bp, Artificial
  Synthetic oligonucleotide
tagtggtactagcctttaaggtgaatatcagtatgagttgcaagctctgccgtat

SEQ ID NO: 207127 - DNA, 55 bp, Artificial
  Synthetic oligonucleotide
gcgagtgcatagtttggaccttgctcaatcaccatgcagtcggaaatgccatatt

SEQ ID NO: 207128 - DNA, 55 bp, Artificial
  Synthetic oligonucleotide
gcgcaggagtacagacgggtggtccaccacctatttcagaacgtgataagcgcga

SEQ ID NO: 207129 - DNA, 55 bp, Artificial
  Synthetic oligonucleotide
gcgcatgttcgaagttgaccgtactcaacgtttagactgggacactttacgtgcc

SEQ ID NO: 207130 - DNA, 55 bp, Artificial
  Synthetic oligonucleotide
gcgcattaaacgctgcatcatgaagtttcacgactcgagcgatcggattcgaact

SEQ ID NO: 207131 - DNA, 55 bp, Artificial
  Synthetic oligonucleotide
taggcatagctgtctgtctcaagtaaatcaaccaccgatatagtcagagcgattc

SEQ ID NO: 207132 - DNA, 55 bp, Artificial
  Synthetic oligonucleotide
gcgccatcggatatgttgcctgaccgtgattgggttgcgagtttattcaaacgtg

SEQ ID NO: 207133 - DNA, 60 bp, Artificial
  Synthetic oligonucleotide
cggattgaggattgactactaactatgacggattgactactaactatgacggattgacta

SEQ ID NO: 207134 - DNA, 55 bp, Artificial
  Synthetic oligonucleotide
taggcacgcggattattatcttgtgctacgtcagcttttaacaattccggttgtt

SEQ ID NO: 207135 - DNA, 55 bp, Artificial
  Synthetic oligonucleotide
gcgctgtcggtgcatcagtcatcaccttacagtttgaactcagtgccgagttagg

SEQ ID NO: 207136 - DNA, 55 bp, Artificial
  Synthetic oligonucleotide
gccgctcaagattcacggttctgggtagtgcgtccacggattgggacaagtgggg

SEQ ID NO: 207137 - DNA, 55 bp, Artificial
  Synthetic oligonucleotide
gccggtatgctcttgatagtatttagcgaccatcggctctaaggtattgccccaa

SEQ ID NO: 207138 - DNA, 55 bp, Artificial
  Synthetic oligonucleotide
gccgtagatatgatgccaattttgtcagaatggcaaggtttcggtaaaccggtaa

SEQ ID NO: 207139 - DNA, 55 bp, Artificial
  Synthetic oligonucleotide
gccgtagttatgttccgcagcgtgatccaagagctggcgcattgaaatgagtgcc

SEQ ID NO: 207140 - DNA, 55 bp, Artificial
  Synthetic oligonucleotide
gccgtatatcgacctgcataaataatccgaccactgaaagtgtctctgacatctc

SEQ ID NO: 207141 - DNA, 55 bp, Artificial
  Synthetic oligonucleotide
tcaagtgtctcgtctacgccgcttaattgaagataacccggcacgcgcacgttac

SEQ ID NO: 207142 - DNA, 55 bp, Artificial
  Synthetic oligonucleotide
gcctaacccgctcagccagatcatgtatgcatgagaagttgaccactcgactttc

SEQ ID NO: 207143 - DNA, 55 bp, Artificial
  Synthetic oligonucleotide
gcctaaccgtagctaaagtgattgcgctgtttagtggtgcggatggttcaatcgg

SEQ ID NO: 207144 - DNA, 60 bp, Artificial
  Synthetic oligonucleotide
tatataacattacacatcttgcctgtatcaccctcatcctgtattgcacttaatcgcata

SEQ ID NO: 207145 - DNA, 55 bp, Artificial
  Synthetic oligonucleotide
gcctagagcaccaaaaccgattagtaatgcaactgcgataactgtgtaaccacct

SEQ ID NO: 207146 - DNA, 55 bp, Artificial
  Synthetic oligonucleotide
gcctatcacgggtgaaattttcagcgctttagaacttggtgaattaacgagaagc

SEQ ID NO: 207147 - DNA, 55 bp, Artificial
  Synthetic oligonucleotide
tcaactgagccaaacgctcatattcttgtgcgacctgattgtctaatctgacggc

SEQ ID NO: 207148 - DNA, 55 bp, Artificial
  Synthetic oligonucleotide
gcctcatagtacggtttatacagctcataacgattctcagctctcaaccgattaa

SEQ ID NO: 207149 - DNA, 55 bp, Artificial
  Synthetic oligonucleotide
tcaaaggtcagctgattcctgacaaaggattggtgcaagtctataccacaacagc

SEQ ID NO: 207150 - DNA, 55 bp, Artificial
  Synthetic oligonucleotide
gcctgaaggcaacattaaggagcgatttgtctgatgtgtatcagtttacgttcca

SEQ ID NO: 207151 - DNA, 55 bp, Artificial
  Synthetic oligonucleotide
gcctgtagtaaccacagaacaaggcagtaaccgagctattgactacttagccaag

SEQ ID NO: 207152 - DNA, 55 bp, Artificial
  Synthetic oligonucleotide
tatttgcaggcgggtcgcctgattgcggcggattgtgtgaatcgtccgcaggagt

SEQ ID NO: 207153 - DNA, 55 bp, Artificial
  Synthetic oligonucleotide
tatttagcttggttttatattgggatatgttgggtgctagggcggtttcctgcgg

SEQ ID NO: 207154 - DNA, 55 bp, Artificial
  Synthetic oligonucleotide
gccttgatattacgacctggctcaaagtcagttgctgcatcgctgtcacttaagc

SEQ ID NO: 207155 - DNA, 60 bp, Artificial
  Synthetic oligonucleotide
tatatgacaccatttaccttgcaatatgacaccgtttaccttgcaatatgacaccgttta

SEQ ID NO: 207156 - DNA, 55 bp, Artificial
  Synthetic oligonucleotide
gcgaaaagaacagtgatcactgaaacagatgtggcattagctcgtagaaaggctc

SEQ ID NO: 207157 - DNA, 55 bp, Artificial
  Synthetic oligonucleotide
gactcgagttatatcagggcgtaccccatcaataaaggtggtcggaccttgtacg

SEQ ID NO: 207158 - DNA, 55 bp, Artificial
  Synthetic oligonucleotide
ttcgagcaaggtgctagcgatatccatctagaacctcgcaaggaaaagggtaagg

SEQ ID NO: 207159 - DNA, 55 bp, Artificial
  Synthetic oligonucleotide
ttccgggttaagctagatttaattggttatgtgcatactaatccaatcctgggct

SEQ ID NO: 207160 - DNA, 54 bp, Artificial
  Synthetic oligonucleotide
ttcccgccctagtggttgggtttatgtagacgtacaaggacgtgacttagcttc

SEQ ID NO: 207161 - DNA, 55 bp, Artificial
  Synthetic oligonucleotide
ttcatcaactgtgggtaggttcaacactgatttccgattatgtaacccctgccac

SEQ ID NO: 207162 - DNA, 55 bp, Artificial
  Synthetic oligonucleotide
gagccagtactttacgactatgccaatctataattgcacacagatagacaaagcc

SEQ ID NO: 207163 - DNA, 55 bp, Artificial
  Synthetic oligonucleotide
gagcccacagcctcaagaattgtccgtcatgttgaagactgcctgcttcggtcca

SEQ ID NO: 207164 - DNA, 55 bp, Artificial
  Synthetic oligonucleotide
ttatgcatttcgctacttggtctatagtcatagtcagttgagctacgtttcggca

SEQ ID NO: 207165 - DNA, 55 bp, Artificial
  Synthetic oligonucleotide
gaaagccgaacgattagcacaggagcaacaggacaaagagcggttagagctggca

SEQ ID NO: 207166 - DNA, 59 bp, Artificial
  Synthetic oligonucleotide
tatcaaagaccctgatggggggcgaaacatacgactaaagggcgaaatctatgagcaga

SEQ ID NO: 207167 - DNA, 55 bp, Artificial
  Synthetic oligonucleotide
ttagagtcgactcatgtagaatcgcctaaaagattttcctaagctgtcggttacg

SEQ ID NO: 207168 - DNA, 55 bp, Artificial
  Synthetic oligonucleotide
ttaagcgagcacgtcgcaaaagaaacccgtaaagcgttacaggccataggtcaag

SEQ ID NO: 207169 - DNA, 55 bp, Artificial
  Synthetic oligonucleotide
tgttggtacctcagcaagtgcttgccaaaattcggtcaaatccagcttaggtgcg

SEQ ID NO: 207170 - DNA, 55 bp, Artificial
  Synthetic oligonucleotide
gaggtattttgactttagatagatgcatagagcgagtgtctacgagcgaactatc

SEQ ID NO: 207171 - DNA, 55 bp, Artificial
  Synthetic oligonucleotide
tgttgccaaagtggtttcttcattctcaaaacctacagccagcttatgtacctta

SEQ ID NO: 207172 - DNA, 55 bp, Artificial
  Synthetic oligonucleotide
tgttcggtcgctattctattagtccgatcaatctaatactacagattgtttggct

SEQ ID NO: 207173 - DNA, 55 bp, Artificial
  Synthetic oligonucleotide
tgtcggtagtatcatggggttaaaaccatctgctcgcgagaccatgcgtgataat

SEQ ID NO: 207174 - DNA, 55 bp, Artificial
  Synthetic oligonucleotide
gagtgtgggctgatatgacgatcggctataaatccttgtgatcgcatccaaaaca

SEQ ID NO: 207175 - DNA, 55 bp, Artificial
  Synthetic oligonucleotide
gagttaaacgtgtctttaaggagacatcttttgggagaacagttgagtaggcagg

SEQ ID NO: 207176 - DNA, 55 bp, Artificial
  Synthetic oligonucleotide
tttgagccattagggtattggcaaggtcagccttactgcttgcgtctgtggtaag

SEQ ID NO: 207177 - DNA, 56 bp, Artificial
  Synthetic oligonucleotide
cgggatggctaaactgaatcaccgcctcggtcagcggtcgtccaacaataaattcg

SEQ ID NO: 207178 - DNA, 55 bp, Artificial
  Synthetic oligonucleotide
ttgtacacagtgagcattccatagaacctgcgtaccatagggtagctctatcgtg

SEQ ID NO: 207179 - DNA, 55 bp, Artificial
  Synthetic oligonucleotide
ttggccatatttgtaggggatactttgtttgctccagatgttggcaccgcacgtg

SEQ ID NO: 207180 - DNA, 55 bp, Artificial
  Synthetic oligonucleotide
gaaggatatggtgcttgggtactcgatgagtctttaaacggtaaggccgcgtttg

SEQ ID NO: 207181 - DNA, 55 bp, Artificial
  Synthetic oligonucleotide
ttggaaattcccctacgccttaagttttccaagcgtcctgctctgtgtagcgata

SEQ ID NO: 207182 - DNA, 55 bp, Artificial
  Synthetic oligonucleotide
ttgcgtcaatcaagtaactttcttcaccctgtttcacacgctgaaaacttgctgg

SEQ ID NO: 207183 - DNA, 55 bp, Artificial
  Synthetic oligonucleotide
ttgacgcagcttgttgtaaatgagttgtaggtctttaatcaattgtcctgcgttg

SEQ ID NO: 207184 - DNA, 55 bp, Artificial
  Synthetic oligonucleotide
gacagggaacctgcgtatagtaacgtcctgcatactgtaaatttgtactgcgtac

SEQ ID NO: 207185 - DNA, 55 bp, Artificial
  Synthetic oligonucleotide
gacagtaaagatagtgcttggccaaaagagatcctgactattgtgtgtctaaggg

SEQ ID NO: 207186 - DNA, 55 bp, Artificial
  Synthetic oligonucleotide
gaccctcaccacgtttacttcaagatcgttccatctacagatccaaacattaccc

SEQ ID NO: 207187 - DNA, 55 bp, Artificial
  Synthetic oligonucleotide
ttgtggatagtagtcagtcacttgtaagcatcctacctaatgacagctatttgat

SEQ ID NO: 207188 - DNA, 60 bp, Artificial
  Synthetic oligonucleotide
tacataggcgctgtgctttgctgtctggtcgcttgcatgtgctgatcgtcaaactgcctc

SEQ ID NO: 207189 - DNA, 60 bp, Artificial
  Synthetic oligonucleotide
tatgaatggctcatgggtcagcagttagcagtaccgagtaatttaggcggtaactatgtg

SEQ ID NO: 207190 - DNA, 55 bp, Artificial
  Synthetic oligonucleotide
ttgaagctgggtgtcactcagtaactcgtcaccaatattgagttgatcacgaatg

SEQ ID NO: 207191 - DNA, 55 bp, Artificial
  Synthetic oligonucleotide
gaccgaaaagatcgtgaatctagagaacagcagttacgtaaagaacgagagcaac

SEQ ID NO: 207192 - DNA, 55 bp, Artificial
  Synthetic oligonucleotide
gaccgttcgtatttatgtgagagcaagcactaaggatcaagacgctaagagagcc

SEQ ID NO: 207193 - DNA, 55 bp, Artificial
  Synthetic oligonucleotide
gacgcacatcgtagtctttagttaagccggatgtatcgagcgttatacttgaggc

SEQ ID NO: 207194 - DNA, 55 bp, Artificial
  Synthetic oligonucleotide
gactatatgcagtggctagtcaagcaaacaccaaacatcctacccttaagataca

SEQ ID NO: 207195 - DNA, 55 bp, Artificial
  Synthetic oligonucleotide
ttgaaccgtaccgggtttgtcggagaccaactttcttgagagaatgtcccgatga

SEQ ID NO: 207196 - DNA, 55 bp, Artificial
  Synthetic oligonucleotide
ttctgagaatcgtccgactcatgtagacgagcctcaaatccccgctatccccgac

SEQ ID NO: 207197 - DNA, 55 bp, Artificial
  Synthetic oligonucleotide
ttctccgattgctagaaatgtcgatgcaagtgaacaagatcaaatcttaatatct

SEQ ID NO: 207198 - DNA, 55 bp, Artificial
  Synthetic oligonucleotide
ttcggaacttaaactctttgaacgcccctatcgatcagtaagatcattgaggtca

SEQ ID NO: 207199 - DNA, 55 bp, Artificial
  Synthetic oligonucleotide
gcaacaatcacttcagctactacgtcttttgcagaatcccaagcctcacccgcga

SEQ ID NO: 207200 - DNA, 60 bp, Artificial
  Synthetic oligonucleotide
tatggcgtacatttcctgaataatgagtgtatctagcctatgcttatcccaaacgctatc

SEQ ID NO: 207201 - DNA, 55 bp, Artificial
  Synthetic oligonucleotide
gcaacattcccaatagcggtcatgttaatagttttaaaaccgagtacggcagtaa

SEQ ID NO: 207202 - DNA, 55 bp, Artificial
  Synthetic oligonucleotide
gcaactacttgtgatgatagcttccaacatcgcatagaccccttacaagcgacct

SEQ ID NO: 207203 - DNA, 55 bp, Artificial
  Synthetic oligonucleotide
tggaacggttgaatcgttcattaacaatccagtccttgccaaattcttgttccaa

SEQ ID NO: 207204 - DNA, 55 bp, Artificial
  Synthetic oligonucleotide
tttggtaacaacttcccaagtagtcgcacccatgccatacgctgactcttttagc

SEQ ID NO: 207205 - DNA, 55 bp, Artificial
  Synthetic oligonucleotide
gcaagcggaccatgcgagtcatgcaggtgcttaatctgctcaaactcagcatcac

SEQ ID NO: 207206 - DNA, 55 bp, Artificial
  Synthetic oligonucleotide
ttttaagctcagttggttttatccaaagtttacagagcgagtgtctacgagcgaa

SEQ ID NO: 207207 - DNA, 55 bp, Artificial
  Synthetic oligonucleotide
tgccacctcatgttttcactcaaagccgatgacggcatagaacgaagtccggaac

SEQ ID NO: 207208 - DNA, 55 bp, Artificial
  Synthetic oligonucleotide
tgcatcactaccacgcagacgtctttaagcgagcggctccactcaatactcaagt

SEQ ID NO: 207209 - DNA, 55 bp, Artificial
  Synthetic oligonucleotide
tgatggtgcgtgcttgggtcgggtttggttctatcatgacgacatgggatgcccc

SEQ ID NO: 207210 - DNA, 55 bp, Artificial
  Synthetic oligonucleotide
tgatagcacacaggcctgaaacgattaagagcgctgattgggtactgaaccttgg

SEQ ID NO: 207211 - DNA, 60 bp, Artificial
  Synthetic oligonucleotide
tattgccgatcagcaatacgaacttcatctttcaactttaggagatcaatctaatggcta

SEQ ID NO: 207212 - DNA, 55 bp, Artificial
  Synthetic oligonucleotide
gcaccgttttcaaccgccgcgcaaatagcccctttggtgacgttgtagcatgagc

SEQ ID NO: 207213 - DNA, 55 bp, Artificial
  Synthetic oligonucleotide
tgagtgtaagactatcgccaaatggagcaatccagtcaataaaccagtttcggtc

SEQ ID NO: 207214 - DNA, 55 bp, Artificial
  Synthetic oligonucleotide
tgaccgcttccaattattattagggcataaagagtccgaagagaaaatgtctcat

SEQ ID NO: 207215 - DNA, 55 bp, Artificial
  Synthetic oligonucleotide
gcagaaggagatcctacgcgaactcgctgttgttctgactgattccattcgtaag

SEQ ID NO: 207216 - DNA, 55 bp, Artificial
  Synthetic oligonucleotide
gcaggggcaatatgttgaatatttgaaattgttggattttgtgccgtctgattgg

SEQ ID NO: 207217 - DNA, 55 bp, Artificial
  Synthetic oligonucleotide
gcagtaagcgtctgatctgacgttctgaaatatgaagtagctgagcagcctggga

SEQ ID NO: 207218 - DNA, 55 bp, Artificial
  Synthetic oligonucleotide
tgtcatggtatgtgacatagcgatcaaataagcttttagatgcctccctgagtac

SEQ ID NO: 207219 - DNA, 55 bp, Artificial
  Synthetic oligonucleotide
gatccagcgaaacatgagacgagcacgaagtattcggatcgctcgcatccatgcg

SEQ ID NO: 207220 - DNA, 55 bp, Artificial
  Synthetic oligonucleotide
tgtcacctttagagattcttccttacgatgaacaagcaatttggcattacgccaa

SEQ ID NO: 207221 - DNA, 55 bp, Artificial
  Synthetic oligonucleotide
tgtacccagttgggatgaaattaaacaacgtagagaattggctgaacgctacaat

SEQ ID NO: 207222 - DNA, 56 bp, Artificial
  Synthetic oligonucleotide
gccttaagggtgcaataggcggtaagaagtccaaacgcccaccaatggtggacagc

SEQ ID NO: 207223 - DNA, 55 bp, Artificial
  Synthetic oligonucleotide
gatgaggattggaaaagagttgtgatttggtttagcccacaagttataccattct

SEQ ID NO: 207224 - DNA, 55 bp, Artificial
  Synthetic oligonucleotide
gatgtgggcatgggttaaacgtaagcgtaaagaatggttgatcgattcagtcgat

SEQ ID NO: 207225 - DNA, 55 bp, Artificial
  Synthetic oligonucleotide
tggtctagtagatttaatgcggtttgctgactatcaagggacttatagcgattgc

SEQ ID NO: 207226 - DNA, 55 bp, Artificial
  Synthetic oligonucleotide
tggtatgaccttcgtatcgaagcgatgttgttgcaagcgcaaatgcataccagtc

SEQ ID NO: 207227 - DNA, 49 bp, Artificial
  Synthetic oligonucleotide
tgggtgggaatgtttttaaaccccgtagggcgaggttttgatttgaaat

SEQ ID NO: 207228 - DNA, 55 bp, Artificial
  Synthetic oligonucleotide
gattccatgtaggctacgctctatcgttaattcgttatcagaagaagtcatcggt

SEQ ID NO: 207229 - DNA, 55 bp, Artificial
  Synthetic oligonucleotide
gattctgctctctgattccaaatatcgatcgcgcggttttgtctctcgttgtatt

SEQ ID NO: 207230 - DNA, 55 bp, Artificial
  Synthetic oligonucleotide
tggggtatcgataacgagccttatgcaatcgcggcttatgaaaatgagacgggta

SEQ ID NO: 207231 - DNA, 55 bp, Artificial
  Synthetic oligonucleotide
gattgataataactcgggttgtaaaggtgcatgtgatcgcgttgagcaataccag

SEQ ID NO: 207232 - DNA, 55 bp, Artificial
  Synthetic oligonucleotide
gatttatcggccgatggagtttatgggcaatttggtcttgctaattgtcggcggc

SEQ ID NO: 207233 - DNA, 60 bp, Artificial
  Synthetic oligonucleotide
gcctccgcctatgtgagatcccctgtaagcggtttagccttcgagctatcgctacgatgc

SEQ ID NO: 207234 - DNA, 55 bp, Artificial
  Synthetic oligonucleotide
tgggactatgtttattatctctggattcgcgaactacaatggaggagttcgtttt

SEQ ID NO: 207235 - DNA, 55 bp, Artificial
  Synthetic oligonucleotide
gatttctttactagtattcttgagtatgttgctacgactgggaaactacctgtca

SEQ ID NO: 207236 - DNA, 55 bp, Artificial
  Synthetic oligonucleotide
gatttgaatcaattgcgattgttgtcgtaccgaaagttgatgggtcttatcgatc

SEQ ID NO: 207237 - DNA, 55 bp, Artificial
  Synthetic oligonucleotide
gcaaaaggggcgcactggactgctattggctgggttgcacaaggaacggctttaa

SEQ ID NO: 207238 - DNA, 55 bp, Artificial
  Synthetic oligonucleotide
gcaaacagaataagacggacatgaaaagtacagaacgtggcaacagcacaccatt

SEQ ID NO: 207239 - DNA, 55 bp, Artificial
  Synthetic oligonucleotide
gggcgttgttaagtgactaccgtggttcagggtatgaccgtgggcacatggcacc

SEQ ID NO: 207240 - DNA, 55 bp, Artificial
  Synthetic oligonucleotide
gtgatagcttgttcgcttgactgcttagcatataaagcgttgttatcgttgctat

SEQ ID NO: 207241 - DNA, 55 bp, Artificial
  Synthetic oligonucleotide
ggggcattacgcctgacttgggtgttccgcagtggcctttaagcaatattcactc

SEQ ID NO: 207242 - DNA, 55 bp, Artificial
  Synthetic oligonucleotide
gtgatagatttaaaatgcaataacccgatgctgcttgcatagaagccggagaagc

SEQ ID NO: 207243 - DNA, 50 bp, Artificial
  Synthetic oligonucleotide
ggggtagacctaggggaacggttcacccatcttataaaatcgtttagaac

SEQ ID NO: 207244 - DNA, 56 bp, Artificial
  Synthetic oligonucleotide
tcaaccattgtaccaaaatagggcttgcccctaagtccgtcagcattgtttgaacg

SEQ ID NO: 207245 - DNA, 55 bp, Artificial
  Synthetic oligonucleotide
ggggttctggttatcacccaattgaagtaaagcctcgacacctttattgtctcgc

SEQ ID NO: 207246 - DNA, 55 bp, Artificial
  Synthetic oligonucleotide
gtgagactttattacaaaccttaactcatctacctaccagtccgctttggcgtgc

SEQ ID NO: 207247 - DNA, 55 bp, Artificial
  Synthetic oligonucleotide
gggtcagactgtactggatgtaatcacccgccaacctggctttagtagcttctct

SEQ ID NO: 207248 - DNA, 55 bp, Artificial
  Synthetic oligonucleotide
gtctgattatcgaccactatggtttactaggaactccacctcggaaagtagaccg

SEQ ID NO: 207249 - DNA, 55 bp, Artificial
  Synthetic oligonucleotide
gggttcgtgaaatgattacctttgtagagcaaaacttaggtaaagctgatatagc

SEQ ID NO: 207250 - DNA, 55 bp, Artificial
  Synthetic oligonucleotide
gtctctaatggcaggagcagtcttgatgtgggcttcagtaccaactctggcagtc

SEQ ID NO: 207251 - DNA, 54 bp, Artificial
  Synthetic oligonucleotide
gtctacttgtccgtcacgggtaaaaggagtcacaggtgctggggttaatccacg

SEQ ID NO: 207252 - DNA, 52 bp, Artificial
  Synthetic oligonucleotide
ggtaaacgtagtcatattggtaggtaaacgtagtcatattggtaggtaaacg

SEQ ID NO: 207253 - DNA, 55 bp, Artificial
  Synthetic oligonucleotide
ggtacaccttcattaatatttgaagacggttcaatggtgcctggagcagtgggtg

SEQ ID NO: 207254 - DNA, 55 bp, Artificial
  Synthetic oligonucleotide
ggtatacaaggtgtttggcgaggtaagaataaacaaactacccatagccgagatg

SEQ ID NO: 207255 - DNA, 60 bp, Artificial
  Synthetic oligonucleotide
aggagatcaatctaatggctaagagcttacaagaattattggctagtcgctctccagaga

SEQ ID NO: 207256 - DNA, 55 bp, Artificial
  Synthetic oligonucleotide
ggtatgaccacacgcatgaaccccttgctaagcccacttgagcttgccagtttat

SEQ ID NO: 207257 - DNA, 55 bp, Artificial
  Synthetic oligonucleotide
ggtcaaaacgttgttcactcatggcttgttccaaccaaggcgactctaagggatg

SEQ ID NO: 207258 - DNA, 55 bp, Artificial
  Synthetic oligonucleotide
ggtcaatgcctgtcgtctccgtatccataatcagctgacgttctgacgccccacg

SEQ ID NO: 207259 - DNA, 55 bp, Artificial
  Synthetic oligonucleotide
ggtcattcgggttagtacgcaaaacatagatgcgactcgcactagcagatagagg

SEQ ID NO: 207260 - DNA, 55 bp, Artificial
  Synthetic oligonucleotide
ggctacgcactgagccactacctgtacatttcccgactcatgcaatacgaaggca

SEQ ID NO: 207261 - DNA, 55 bp, Artificial
  Synthetic oligonucleotide
ggctcaatggtacggttgacaagcgcttcagttaagctttctaacttggcacggg

SEQ ID NO: 207262 - DNA, 55 bp, Artificial
  Synthetic oligonucleotide
ggctctttggtaagcgcgctaatgctgagtcaatgttccgtgaggcgaaaggtgg

SEQ ID NO: 207263 - DNA, 55 bp, Artificial
  Synthetic oligonucleotide
ggctgcacaatatggtttgagtgtgcgttcaattcaagaccttgtggcaaccagt

SEQ ID NO: 207264 - DNA, 55 bp, Artificial
  Synthetic oligonucleotide
gtggacgtgcaaaatccgataaatatgttgaaatgaggcgcacggctgcgcgttt

SEQ ID NO: 207265 - DNA, 55 bp, Artificial
  Synthetic oligonucleotide
gtgctaatggtggcgatgttatcgtacgtccgtcagtcaaagcctagttgagggg

SEQ ID NO: 207266 - DNA, 60 bp, Artificial
  Synthetic oligonucleotide
tcaagcgacagatagagccattacagcgacaaatagcggacttagagaccgaaaacagca

SEQ ID NO: 207267 - DNA, 55 bp, Artificial
  Synthetic oligonucleotide
ggctggtatcaatagagcatgccaagcacgtgccgatcagatgggttgggcgcct

SEQ ID NO: 207268 - DNA, 55 bp, Artificial
  Synthetic oligonucleotide
ggcttaccatgctgctcaacatacaagcgtgttgaaatcatataatcaaaggctg

SEQ ID NO: 207269 - DNA, 55 bp, Artificial
  Synthetic oligonucleotide
ggcttagccaaccaagcttttgctagtagcgatgaggtactaagcacggcgcgcc

SEQ ID NO: 207270 - DNA, 55 bp, Artificial
  Synthetic oligonucleotide
ggcttgcaccatgacgagcattcacagggtgttgtaaagtagtacctgcaaggtc

SEQ ID NO: 207271 - DNA, 55 bp, Artificial
  Synthetic oligonucleotide
ggcttgctatcgactctcagcatagagcaccccggatttgcctaagatgcatgcc

SEQ ID NO: 207272 - DNA, 55 bp, Artificial
  Synthetic oligonucleotide
gtgcgggcttatattaaccgggctggaaccaaagtcacttttcacatatgactta

SEQ ID NO: 207273 - DNA, 55 bp, Artificial
  Synthetic oligonucleotide
gtgcagcctctaaccgaacaacggtatatcccattgactcagcaacatcgtaacg

SEQ ID NO: 207274 - DNA, 55 bp, Artificial
  Synthetic oligonucleotide
gggacgggtcagcatagtgtgtattttgcaccgagattggcccatttaacatggc

SEQ ID NO: 207275 - DNA, 55 bp, Artificial
  Synthetic oligonucleotide
gggcagagtcgagagtaggtacgcttggattatcctggatagacgataatactta

SEQ ID NO: 207276 - DNA, 55 bp, Artificial
  Synthetic oligonucleotide
gggcagcattatcttaatcagggcataacagccgagctgatctgtttatcaaccg

SEQ ID NO: 207277 - DNA, 60 bp, Artificial
  Synthetic oligonucleotide
tcaaggttaggctgacaccgtccgagttggagcaactcaagcaacggcaggtaggcgata

SEQ ID NO: 207278 - DNA, 55 bp, Artificial
  Synthetic oligonucleotide
gggccggttgcaatcacaccgatgccagcaattgggatttactatgagcttaata

SEQ ID NO: 207279 - DNA, 55 bp, Artificial
  Synthetic oligonucleotide
gggcctagaggctcttactactgcaaattgggtaaacaaagtgacctatgtagat

SEQ ID NO: 207280 - DNA, 55 bp, Artificial
  Synthetic oligonucleotide
gggcgaaacatacgactaaagggcgaaatctatgagcagactttcacagctaacc

SEQ ID NO: 207281 - DNA, 55 bp, Artificial
  Synthetic oligonucleotide
gtcatcacagcgaccgagtcattgggcggatcaagtgctaaattctccaagaagt

SEQ ID NO: 207282 - DNA, 55 bp, Artificial
  Synthetic oligonucleotide
ggttgggcaccagcggcatcttcgtattatcgactatttctgggctagcagacgt

SEQ ID NO: 207283 - DNA, 55 bp, Artificial
  Synthetic oligonucleotide
gtcagtgcgtgtgccggtttaaccgaacatattcgtttgggaaccgcggtgtgtg

SEQ ID NO: 207284 - DNA, 55 bp, Artificial
  Synthetic oligonucleotide
ggttgggtaggcaaaagtgccaagtgtggtaatgtttgtgcgaccgtcaggcgat

SEQ ID NO: 207285 - DNA, 55 bp, Artificial
  Synthetic oligonucleotide
gtatgattggtcaagcgagtgccgttctcggtaccatccttggtacgggttcgcc

SEQ ID NO: 207286 - DNA, 55 bp, Artificial
  Synthetic oligonucleotide
ggtttacgcattaacttaatcgctgcactggtaaatcggatgaacttgcaataac

SEQ ID NO: 207287 - DNA, 55 bp, Artificial
  Synthetic oligonucleotide
gtatctgtattcgttccaatgaagggcttaattgatcctaaagcggaattgggtc

SEQ ID NO: 207288 - DNA, 59 bp, Artificial
  Synthetic oligonucleotide
tcaagtcgaaaactcgcacttagtcagtgggacgaaaagattgcacttagtcagtggga

SEQ ID NO: 207289 - DNA, 55 bp, Artificial
  Synthetic oligonucleotide
gtagtcaatccgtcatagttagtagtcaatccgtcatagttaaactttgaaaggc

SEQ ID NO: 207290 - DNA, 55 bp, Artificial
  Synthetic oligonucleotide
gtaaattagccgtgccaccaccgactgttacttgcggttttgagttatgacctga

SEQ ID NO: 207291 - DNA, 55 bp, Artificial
  Synthetic oligonucleotide
gtaacctgaatacagcgatgcctcatttggacgcgttgagataagccccttttag

SEQ ID NO: 207292 - DNA, 55 bp, Artificial
  Synthetic oligonucleotide
gtaacgcttataaaaccgcctctgggtatgatgcaaatattacgcgtgatacggc

SEQ ID NO: 207293 - DNA, 55 bp, Artificial
  Synthetic oligonucleotide
gtaaggcacgtgttggaatgctacaacccgcacggcccagagcaatacgggcatc

SEQ ID NO: 207294 - DNA, 55 bp, Artificial
  Synthetic oligonucleotide
gtaggcttcaaagctgcatagaagatagacttgctgatttgtctattagacagtc

SEQ ID NO: 207295 - DNA, 55 bp, Artificial
  Synthetic oligonucleotide
gtacaacgagcatttggctcatggtgctttaagccgcgattcagtaaataagctc

SEQ ID NO: 207296 - DNA, 55 bp, Artificial
  Synthetic oligonucleotide
gtagcgcttatgccattcgcttatatgagcttctaattcagtggcgaagcactgg

SEQ ID NO: 207297 - DNA, 55 bp, Artificial
  Synthetic oligonucleotide
gtacaagcccttagcgttgccctcaatgcttgcccgtcggtacggtcgcatcgtc

SEQ ID NO: 207298 - DNA, 55 bp, Artificial
  Synthetic oligonucleotide
gtaccccaagcgccgcccaaataagttgccatactaagcgcacctttatcagaca

SEQ ID NO: 207299 - DNA, 60 bp, Artificial
  Synthetic oligonucleotide
tacattcatatgaatttgaacatatggagcaatcaataagtaaatccattagcgacacta

SEQ ID NO: 207300 - DNA, 54 bp, Artificial
  Synthetic oligonucleotide
cgtaatttatgggtctgtctggtcaactcataaaaccattcacgggctttaggg

SEQ ID NO: 207301 - DNA, 55 bp, Artificial
  Synthetic oligonucleotide
gtagcaagtgcggtggattgatgcgtataaatatcatcccactctgtatcaacgg

SEQ ID NO: 207302 - DNA, 55 bp, Artificial
  Synthetic oligonucleotide
gtacgattgtccatgcggcaccccaaggataaggctgatcgattttaacccatgc

SEQ ID NO: 207303 - DNA, 55 bp, Artificial
  Synthetic oligonucleotide
gtactcgcagcgttggtcgttctacagcaacagggaccaagtttaggtcgtcctt

SEQ ID NO: 207304 - DNA, 55 bp, Artificial
  Synthetic oligonucleotide
gtcgggctgccagaaaattccttcaatatgcggggcttgtccttgatgtttgaac

SEQ ID NO: 207305 - DNA, 55 bp, Artificial
  Synthetic oligonucleotide
ggtcatttatgacgggcgttacggtggtcacaacctgtaaagaagatggaacgcc

SEQ ID NO: 207306 - DNA, 55 bp, Artificial
  Synthetic oligonucleotide
ggtcctaccaagcagagaatcggaccttttaaggtatccacgcgagattgcactg

SEQ ID NO: 207307 - DNA, 53 bp, Artificial
  Synthetic oligonucleotide
ggtcggtctaacttcgtaccactatagttttccacgtacacaatggtttcgcc

SEQ ID NO: 207308 - DNA, 55 bp, Artificial
  Synthetic oligonucleotide
ggtctatccaaatccacaccttcaaaatagctagtatccacgattataccgttgc

SEQ ID NO: 207309 - DNA, 55 bp, Artificial
  Synthetic oligonucleotide
ggtctgcgcgtatttaatgctattgtgagcgccactgcaacagaaaggtatcctg

SEQ ID NO: 207310 - DNA, 55 bp, Artificial
  Synthetic oligonucleotide
ggtctggtctaatgggacaatgattcgtcaagttgatacaactaatacggattat

SEQ ID NO: 207311 - DNA, 59 bp, Artificial
  Synthetic oligonucleotide
tcaagttgaacatactgggcgagtacaagatcccttacttccacaacataggattgtaa

SEQ ID NO: 207312 - DNA, 55 bp, Artificial
  Synthetic oligonucleotide
ggtgacatgatggaaattctgtcgaatggtaaatatcttgccaccaagcaccgcg

SEQ ID NO: 207313 - DNA, 55 bp, Artificial
  Synthetic oligonucleotide
ggtgagcttttcatgcgctaaagtgggaccgaaaccatggaattggtcagcaacc

SEQ ID NO: 207314 - DNA, 55 bp, Artificial
  Synthetic oligonucleotide
gtcgccattgcagcctatgggtacgctacagcgcgatacacacaatcgtattcgc

SEQ ID NO: 207315 - DNA, 55 bp, Artificial
  Synthetic oligonucleotide
ggtgataaagctacctgcccaacacataaagttgtcgcaacaattatctctggtg

SEQ ID NO: 207316 - DNA, 55 bp, Artificial
  Synthetic oligonucleotide
ggtgatcgtggttatgtaggtaagaactggaaatctcgtcttgcagaagttgggg

SEQ ID NO: 207317 - DNA, 55 bp, Artificial
  Synthetic oligonucleotide
gtcgagggtcgaatattgctagttcgctcgtagacactcgctctgtaagatcatg

SEQ ID NO: 207318 - DNA, 53 bp, Artificial
  Synthetic oligonucleotide
ggtgcgacgaagtttaggttgagtttatagataggggtgcgtaccgtaccctc

SEQ ID NO: 207319 - DNA, 55 bp, Artificial
  Synthetic oligonucleotide
gtcccaaacatgaggtagaccagtaccacgcgctacacgaaatttaagaggatag

SEQ ID NO: 207320 - DNA, 55 bp, Artificial
  Synthetic oligonucleotide
ggtggatttatgcgaagcaaagggtgagccatatgatgtgttaggtagcatttac

SEQ ID NO: 207321 - DNA, 55 bp, Artificial
  Synthetic oligonucleotide
gtccaagacgtaagccaaaccacgcaactgtcgcaggttcttccattacaatagg

SEQ ID NO: 207322 - DNA, 60 bp, Artificial
  Synthetic oligonucleotide
tcaataaactgattactaacatttagacttttgcctaacagctcagaccctaactcatca

SEQ ID NO: 207323 - DNA, 55 bp, Artificial
  Synthetic oligonucleotide
gtcatctgtggtacaccatttgacaaggcgagcgtataggctattaccgcccttg

SEQ ID NO: 207324 - DNA, 55 bp, Artificial
  Synthetic oligonucleotide
gtcatcataatcaaatttgtctgtacgcatagtaatcttccgcttggttgtgtcc

SEQ ID NO: 207325 - DNA, 55 bp, Artificial
  Synthetic oligonucleotide
ggttattcgtccctacttatatgaaatacatccttggatagtggacgtcacctgt

SEQ ID NO: 207326 - DNA, 55 bp, Artificial
  Synthetic oligonucleotide
gctagatattcaacttttcccgtaatgaattaatacgaggtggggcatcgtagcc

SEQ ID NO: 207327 - DNA, 55 bp, Artificial
  Synthetic oligonucleotide
gctatgggtaataacccggaacaagcagctcagcaaacagaaggctcaacttatc

SEQ ID NO: 207328 - DNA, 55 bp, Artificial
  Synthetic oligonucleotide
gctcaagttggttcagagctgtggtcactaatctcgcacctgaggcaccgagtgg

SEQ ID NO: 207329 - DNA, 55 bp, Artificial
  Synthetic oligonucleotide
gctcaccatgaacgcgcgtatctcatccgatgctaccacgcccctagccttgcac

SEQ ID NO: 207330 - DNA, 55 bp, Artificial
  Synthetic oligonucleotide
gctcagctccaaggttactaccaactagcatactagctaaggtttatgcgaagtt

SEQ ID NO: 207331 - DNA, 55 bp, Artificial
  Synthetic oligonucleotide
gctcaggtgcgtcaaagacctcacggaaggctgtaggcgtgagcaagcgctgttc

SEQ ID NO: 207332 - DNA, 55 bp, Artificial
  Synthetic oligonucleotide
gctcccgactaaaatacagtttgggccacctcgtacatttgacattcccgcccac

SEQ ID NO: 207333 - DNA, 60 bp, Artificial
  Synthetic oligonucleotide
tcacactgtatgttgatggtgcatgtcgtggcaatccgggtttaggtggttggggcgcat

SEQ ID NO: 207334 - DNA, 55 bp, Artificial
  Synthetic oligonucleotide
gctcgtttgttttcttgttcctgtcctgacatttcaatctaccctgctttggctt

SEQ ID NO: 207335 - DNA, 52 bp, Artificial
  Synthetic oligonucleotide
gctctaacaaggccacctgttccaagttttattccaccgtaccaacggttaa

SEQ ID NO: 207336 - DNA, 55 bp, Artificial
  Synthetic oligonucleotide
taagactcaccgttgaagcgatgttatatcgcatacgattgagctgtccatggcg

SEQ ID NO: 207337 - DNA, 55 bp, Artificial
  Synthetic oligonucleotide
gctctttcacacgcttaacgaagtcacgagtgatcggtaaagcaacgtccgcctc

SEQ ID NO: 207338 - DNA, 55 bp, Artificial
  Synthetic oligonucleotide
gctgagcagcctgggattgagttatgcgttgatcgcagatttcctgcacgaccga

SEQ ID NO: 207339 - DNA, 55 bp, Artificial
  Synthetic oligonucleotide
gctgagcgtcatgcatgtcctcaaagttaaagcaacagtcgatcactggacgaag

SEQ ID NO: 207340 - DNA, 55 bp, Artificial
  Synthetic oligonucleotide
gctgcacctaaccacatttggtaaagtacttgtgccaacgtcgaggcctcagtat

SEQ ID NO: 207341 - DNA, 55 bp, Artificial
  Synthetic oligonucleotide
taacttgggtcacccaatcaaaatcggctgcggtaatttctaatacgggcgttgc

SEQ ID NO: 207342 - DNA, 55 bp, Artificial
  Synthetic oligonucleotide
gctggaaatggtattgtctaaagccgatgccaatattgcactctactacgagtct

SEQ ID NO: 207343 - DNA, 55 bp, Artificial
  Synthetic oligonucleotide
taacgtccaatttcgggatatagaaaaccactcaagcataaggctctatgaattg

SEQ ID NO: 207344 - DNA, 59 bp, Artificial
  Synthetic oligonucleotide
gccgattaatggcttagttcatcaactgtgggtaggttcaacactgatttccgattatg

SEQ ID NO: 207345 - DNA, 55 bp, Artificial
  Synthetic oligonucleotide
taaatgctcgtggcattattgctagcgtcaaccaagacgatacgctatttgccgg

SEQ ID NO: 207346 - DNA, 55 bp, Artificial
  Synthetic oligonucleotide
gctgttaaatcaaggggatttagctgtaaaaggttatattcaacacccaacgaga

SEQ ID NO: 207347 - DNA, 55 bp, Artificial
  Synthetic oligonucleotide
tagcgacaccgacccggtaaggcaggactcacaaagcgctgataaccgtgaataa

SEQ ID NO: 207348 - DNA, 55 bp, Artificial
  Synthetic oligonucleotide
gcgggtcgcgtttatagtggtgtacctgcaccgctcaacttacctgtcccagatt

SEQ ID NO: 207349 - DNA, 55 bp, Artificial
  Synthetic oligonucleotide
gcggtgcgtgagacgatgtaccaagcccaatcccctattactatcgttgacactg

SEQ ID NO: 207350 - DNA, 55 bp, Artificial
  Synthetic oligonucleotide
tagaaaaccacgaattataagtaacactcctatggaaagcctggatgaagcatgt

SEQ ID NO: 207351 - DNA, 55 bp, Artificial
  Synthetic oligonucleotide
gcgtacccgaatttatgctcgaccacgtcagttggcgatggggcttgcccgcgaa

SEQ ID NO: 207352 - DNA, 55 bp, Artificial
  Synthetic oligonucleotide
gcgtgagtatctaaccatgctcatatttatctcgctccgctttagtcacttgcct

SEQ ID NO: 207353 - DNA, 55 bp, Artificial
  Synthetic oligonucleotide
gcgtggcatgttgacctcagccattggcttggtttcgtcactttcaaggcgtgac

SEQ ID NO: 207354 - DNA, 55 bp, Artificial
  Synthetic oligonucleotide
gcgtggtacacgccacaccaaccaacaaaatcaacgcttgtttggcaacgacttt

SEQ ID NO: 207355 - DNA, 58 bp, Artificial
  Synthetic oligonucleotide
tcacgttatgcagggctggcgtctctaattgccttccaccccctgcacccgcccccag

SEQ ID NO: 207356 - DNA, 55 bp, Artificial
  Synthetic oligonucleotide
tacccgcaaagctcccactttgataaagagcaatgttgaatcgagctgctgtacg

SEQ ID NO: 207357 - DNA, 55 bp, Artificial
  Synthetic oligonucleotide
taccaaccaagagtatggcttaatcaccgccccgacctcaggtaaattagggcaa

SEQ ID NO: 207358 - DNA, 55 bp, Artificial
  Synthetic oligonucleotide
gcgtgtgagttacccaaatagtgcctcattaggtaaaacggtattcgatacagag

SEQ ID NO: 207359 - DNA, 55 bp, Artificial
  Synthetic oligonucleotide
gcgtgttgtatccaagtgaccgatgcaatggatggcatgacggtacatctgcctg

SEQ ID NO: 207360 - DNA, 55 bp, Artificial
  Synthetic oligonucleotide
gcgttgttattcgcccttactattggtagcgcgtctacattgtatgcggcgcccg

SEQ ID NO: 207361 - DNA, 55 bp, Artificial
  Synthetic oligonucleotide
tacaagctccctttcgattttaaatggtaattacagagcatcccgaatgggtgcg

SEQ ID NO: 207362 - DNA, 55 bp, Artificial
  Synthetic oligonucleotide
gctacattctccgagcagttataagcacatgatccagacgctttggatacgcaag

SEQ ID NO: 207363 - DNA, 55 bp, Artificial
  Synthetic oligonucleotide
gctacttgtcatcgctagagacggaaaatcggacgctcaagcgacagatagagcc

SEQ ID NO: 207364 - DNA, 55 bp, Artificial
  Synthetic oligonucleotide
taatgatatcaccgagctgatgagtactagatggctcgcccaccagacaccaggt

SEQ ID NO: 207365 - DNA, 55 bp, Artificial
  Synthetic oligonucleotide
gctagagcagggcacttttacattaatcctctagaatcaagtttcctgaagcacc

SEQ ID NO: 207366 - DNA, 60 bp, Artificial
  Synthetic oligonucleotide
gcccggagttagctcggctttggctgaacgactcacaggtggtcgatatgttgatgtcga

SEQ ID NO: 207367 - DNA, 55 bp, Artificial
  Synthetic oligonucleotide
gttgcggttagttgcttctactagacgttgctgagctgttaaacgctcgccaatg

SEQ ID NO: 207368 - DNA, 55 bp, Artificial
  Synthetic oligonucleotide
ggatgatacatgaccttcaagccggtgaagtagttattgcagagcgaattgaccg

SEQ ID NO: 207369 - DNA, 55 bp, Artificial
  Synthetic oligonucleotide
ggcacaactttccgaaacttcatctctcatgcctgttagtgactacgaagagcgc

SEQ ID NO: 207370 - DNA, 55 bp, Artificial
  Synthetic oligonucleotide
gtgtctagcatgcgatagagttgacgtttgtcgaaaggttgatacagtcccatcg

SEQ ID NO: 207371 - DNA, 54 bp, Artificial
  Synthetic oligonucleotide
ggcactcgacctaagttagattcacgtttagtaacgcgcaaaggtgaaattggg

SEQ ID NO: 207372 - DNA, 55 bp, Artificial
  Synthetic oligonucleotide
ggcagaaccgaactgaaacagttacatccgcgagcctttcgtgcagtcacgccga

SEQ ID NO: 207373 - DNA, 55 bp, Artificial
  Synthetic oligonucleotide
gtggttgtggctgtcaaatgaaacaaattggcgaagacgtacaagacaaactcgg

SEQ ID NO: 207374 - DNA, 55 bp, Artificial
  Synthetic oligonucleotide
gtgggcttaagccaactgttacacctgctgtggtcaacttctcattactgccagt

SEQ ID NO: 207375 - DNA, 55 bp, Artificial
  Synthetic oligonucleotide
ggcatcatacctttggcggtagccacaatgttgggattgccttatataacggcgg

SEQ ID NO: 207376 - DNA, 55 bp, Artificial
  Synthetic oligonucleotide
gtggcctatgtgagctaatgagcactacagacgcaagtacagttcaattaaccga

SEQ ID NO: 207377 - DNA, 56 bp, Artificial
  Synthetic oligonucleotide
atacaaatttaagctcagggatcattttactaggcgaatctgggaacttctcttta

SEQ ID NO: 207378 - DNA, 55 bp, Artificial
  Synthetic oligonucleotide
ggcatttagtgataagtaagcgggacgccatcgcacagcgatcaataatcggcac

SEQ ID NO: 207379 - DNA, 55 bp, Artificial
  Synthetic oligonucleotide
gtggattgcgacttactcggatagcttgcatttcttgctcgctatatcgtttgtc

SEQ ID NO: 207380 - DNA, 55 bp, Artificial
  Synthetic oligonucleotide
ggcctacatggagtatgaaattgccctaccgaatgagttcacgtcagaacagcgt

SEQ ID NO: 207381 - DNA, 55 bp, Artificial
  Synthetic oligonucleotide
ggcctgaactcgatgcaatttgccagacaaccaatagaacaatcgggaaaatcca

SEQ ID NO: 207382 - DNA, 55 bp, Artificial
  Synthetic oligonucleotide
gtggatgtgcagcatttaacggagggttcgacggtttaaatggtcaaagctcatt

SEQ ID NO: 207383 - DNA, 55 bp, Artificial
  Synthetic oligonucleotide
ggcggcaacgataccacacgcaactcgatgacgggtggggtatacgcacttaacc

SEQ ID NO: 207384 - DNA, 55 bp, Artificial
  Synthetic oligonucleotide
gtggagcgctctccggccctaattaagcccatcgctaaagggattcgtaagcaag

SEQ ID NO: 207385 - DNA, 55 bp, Artificial
  Synthetic oligonucleotide
ggcgtatcttgactaatatcaatccctaactccttgaaagcagctaacacagcac

SEQ ID NO: 207386 - DNA, 55 bp, Artificial
  Synthetic oligonucleotide
ggcgtgtgcctacgaagaatatggcaaatatcactgaatatatgctcgctagccg

SEQ ID NO: 207387 - DNA, 55 bp, Artificial
  Synthetic oligonucleotide
gcttaagatacaaagcgctgtcgtcagttgatcacagatcgaaacgcccatgcga

SEQ ID NO: 207388 - DNA, 56 bp, Artificial
  Synthetic oligonucleotide
ataagggagagcttagtaatacctcccttttgtctcaatttgataacacctataca

SEQ ID NO: 207389 - DNA, 55 bp, Artificial
  Synthetic oligonucleotide
gcttatcccaaacgctatcacgggcggatacggacgctaaagaaacgtctacgct

SEQ ID NO: 207390 - DNA, 55 bp, Artificial
  Synthetic oligonucleotide
gcttctccattgccacttggatgagaaaagatgggctaattagccagtaataaac

SEQ ID NO: 207391 - DNA, 55 bp, Artificial
  Synthetic oligonucleotide
taaagaacctagttgacactaacaccgcattcaaacagaataatggtgctctgcc

SEQ ID NO: 207392 - DNA, 55 bp, Artificial
  Synthetic oligonucleotide
gcttgcaaatccccagtagtatcaaagttacgtgtcagtggtacaaacaatcgag

SEQ ID NO: 207393 - DNA, 55 bp, Artificial
  Synthetic oligonucleotide
ggaacaaatccaagtcccactctaatatttgcgcgcgtggtggcttgcgctcccc

SEQ ID NO: 207394 - DNA, 55 bp, Artificial
  Synthetic oligonucleotide
taaacccggaccacagcttggtacttgatctggtggtaaatgctgtagccaaaca

SEQ ID NO: 207395 - DNA, 55 bp, Artificial
  Synthetic oligonucleotide
gtttgtaaagctcgattaactgcatgacgtgttgcacgtgtgatcaatgagttta

SEQ ID NO: 207396 - DNA, 55 bp, Artificial
  Synthetic oligonucleotide
ggacactatggctgcattaccctcactaagacagctatcatatttagttacgttg

SEQ ID NO: 207397 - DNA, 55 bp, Artificial
  Synthetic oligonucleotide
ggacatgaccagcaggtactttaacgccattaaattccaagtcagctctggccct

SEQ ID NO: 207398 - DNA, 55 bp, Artificial
  Synthetic oligonucleotide
gtttcaggcgatctgtttctgtgattattggcggtcgggcgacggttcataggct

SEQ ID NO: 207399 - DNA, 53 bp, Artificial
  Synthetic oligonucleotide
agtttctcctaatcggagaaactagtacgcaatggggcgattcccccttgacc

SEQ ID NO: 207400 - DNA, 55 bp, Artificial
  Synthetic oligonucleotide
ggacggaagtattcctaaagacaacccaagctttaacggagtagtgagtcatatc

SEQ ID NO: 207401 - DNA, 55 bp, Artificial
  Synthetic oligonucleotide
ggactcctgcgctttctctggtatacacccctaaagcaagctaccgaagagcaaa

SEQ ID NO: 207402 - DNA, 52 bp, Artificial
  Synthetic oligonucleotide
gtttaacataaacggcctttaaacagtcgctggtctaattggcctcggtagg

SEQ ID NO: 207403 - DNA, 55 bp, Artificial
  Synthetic oligonucleotide
ggacttgtagcgaccctgcacttggattaagcacatagctgctacgcggactgtg

SEQ ID NO: 207404 - DNA, 51 bp, Artificial
  Synthetic oligonucleotide
ggagaaacccctgaaatcaaacggagaaacccctgaaatcaaacggagaaa

SEQ ID NO: 207405 - DNA, 55 bp, Artificial
  Synthetic oligonucleotide
ggagcatgtttagctggaacatgatgcgaaagtaaatcgtaagatgaggggtcca

SEQ ID NO: 207406 - DNA, 55 bp, Artificial
  Synthetic oligonucleotide
ggagctggcatagagtgtcctaatattcggatagaagtatggaggataagaggag

SEQ ID NO: 207407 - DNA, 55 bp, Artificial
  Synthetic oligonucleotide
gttgggcaattacgggtattgaaagtagcactcaagttgaacgtatgatgcatcg

SEQ ID NO: 207408 - DNA, 55 bp, Artificial
  Synthetic oligonucleotide
ggagtcggtttcctaaatgcataccataagggttgacacgtaaattatcttgctg

SEQ ID NO: 207409 - DNA, 55 bp, Artificial
  Synthetic oligonucleotide
ccggtgatgctcggttttggagtagggcaatgattcaaaccgaaagtatgctcga

SEQ ID NO: 207410 - DNA, 60 bp, Artificial
  Synthetic oligonucleotide
cgcctgagcaacaggttaccacgcgccaagtagcggcattgctggatcgcagtcattatc

SEQ ID NO: 207411 - DNA, 60 bp, Artificial
  Synthetic oligonucleotide
cgcgcgtatctcatccgatgctaccacgcccctagccttgcacagccctaggtaagcccc

SEQ ID NO: 207412 - DNA, 55 bp, Artificial
  Synthetic oligonucleotide
ccgtacacgcgttggaaccaaattgacaaagcacttccgaatgaaccgatcaccc

SEQ ID NO: 207413 - DNA, 55 bp, Artificial
  Synthetic oligonucleotide
ccgtcaatgtcatagttattaacttccggtgccagactcataagtgccacagcgt

SEQ ID NO: 207414 - DNA, 55 bp, Artificial
  Synthetic oligonucleotide
ccgtgacgagtctcgacaaatcctaatgaacgcaactcagtaattgcttcgcgaa

SEQ ID NO: 207415 - DNA, 55 bp, Artificial
  Synthetic oligonucleotide
agccttggcattggcccgttcaaaggtgtccgctgcttgccagaattcaaccgga

SEQ ID NO: 207416 - DNA, 55 bp, Artificial
  Synthetic oligonucleotide
cctattaccggactctagatctcacagtaaatccagaacatcgagcgaaacggga

SEQ ID NO: 207417 - DNA, 55 bp, Artificial
  Synthetic oligonucleotide
cctattgcctgtggtgttacttcaatgccgaactcgcttttaaggtgttcagcaa

SEQ ID NO: 207418 - DNA, 55 bp, Artificial
  Synthetic oligonucleotide
cctcagctggccaatatggcacgcttattaccgatattaaggtggagttggatgg

SEQ ID NO: 207419 - DNA, 55 bp, Artificial
  Synthetic oligonucleotide
cctgtactagatccttttgcagggagtggcactactttaatggaagctcagcgtt

SEQ ID NO: 207420 - DNA, 55 bp, Artificial
  Synthetic oligonucleotide
cctgtgcgtcttaaatgctcaaagcttaacgcattaacatagttccacgcatagt

SEQ ID NO: 207421 - DNA, 55 bp, Artificial
  Synthetic oligonucleotide
ccttctcgtgtgtagcattcaacgaaatagactgtgcctgatgcgtcacgttggt

SEQ ID NO: 207422 - DNA, 59 bp, Artificial
  Synthetic oligonucleotide
tagaacatattgaacctggtcgatgtatgcctgcctttgtaaaagatcccattgatttt

SEQ ID NO: 207423 - DNA, 55 bp, Artificial
  Synthetic oligonucleotide
ccttgacaagcttagagagcagtttagcaagctctgggcggtctgtacttgcccc

SEQ ID NO: 207424 - DNA, 55 bp, Artificial
  Synthetic oligonucleotide
ccttgagtacagtttatcgcctaataatttgatgcaatacatcttggtttcgacc

SEQ ID NO: 207425 - DNA, 54 bp, Artificial
  Synthetic oligonucleotide
agatttacgtggattaaccccagcacctgtgactccttttacccgtgacggaca

SEQ ID NO: 207426 - DNA, 55 bp, Artificial
  Synthetic oligonucleotide
cctttgagcatatgcatttcctctagtttgcattaattggatgtctcctcgatcg

SEQ ID NO: 207427 - DNA, 55 bp, Artificial
  Synthetic oligonucleotide
cgaaggcctaggcggtgggactaaggctccacgttttgaagtgacttctgcaccg

SEQ ID NO: 207428 - DNA, 55 bp, Artificial
  Synthetic oligonucleotide
cgacagggtcagtctctaaaattccgacagttcgcaacatataaccgatcgaaag

SEQ ID NO: 207429 - DNA, 55 bp, Artificial
  Synthetic oligonucleotide
cgacatcatgtcacagcatagtgtgattcgtcgaattgcgaacattgtcccagca

SEQ ID NO: 207430 - DNA, 55 bp, Artificial
  Synthetic oligonucleotide
agtgcatacaaaccaatagcgcgatttgtctgctcggtatgacctaacttatgcg

SEQ ID NO: 207431 - DNA, 55 bp, Artificial
  Synthetic oligonucleotide
agtccttgtctgccatgtgtgcgaagcatggtgcggatacgaccgatgcgtggct

SEQ ID NO: 207432 - DNA, 55 bp, Artificial
  Synthetic oligonucleotide
ccctgtagctaaggcttggcgtgccaacaataagcgtaactgggcttctttaagc

SEQ ID NO: 207433 - DNA, 59 bp, Artificial
  Synthetic oligonucleotide
agttgaaatagaaaataagcggattccagtgccggagcaggttgaactggagcagccga

SEQ ID NO: 207434 - DNA, 55 bp, Artificial
  Synthetic oligonucleotide
cccttaacctttgtttctgcacgattagtgcgagttttatcacctgaggctaagg

SEQ ID NO: 207435 - DNA, 55 bp, Artificial
  Synthetic oligonucleotide
cccttataggataaggctttggagcctttatctttagatgcgtggtgtgtgaacc

SEQ ID NO: 207436 - DNA, 55 bp, Artificial
  Synthetic oligonucleotide
ccgaaggctctgaattcatactttctcttgcgtagggattaaccttaagcgtata

SEQ ID NO: 207437 - DNA, 55 bp, Artificial
  Synthetic oligonucleotide
agtagcgcagctcaataatagcaaatccgagcactttaacaacttgaataagctt

SEQ ID NO: 207438 - DNA, 55 bp, Artificial
  Synthetic oligonucleotide
ccgagacgagctattcggcattaaggaaccgcgcgcctatttgacgtcgattgct

SEQ ID NO: 207439 - DNA, 55 bp, Artificial
  Synthetic oligonucleotide
ccgataccgaatgttacaaggaagccaagcgtccataacattggagtagtaaagg

SEQ ID NO: 207440 - DNA, 55 bp, Artificial
  Synthetic oligonucleotide
ccgatagaaagagatccgaatacgttagatctctttacaaagatgactgatgcac

SEQ ID NO: 207441 - DNA, 55 bp, Artificial
  Synthetic oligonucleotide
ccgattaatgaggcgcatgttatcaaacgtgtggattatcgccaccctgtgtatg

SEQ ID NO: 207442 - DNA, 55 bp, Artificial
  Synthetic oligonucleotide
agtaagtcggtgaaatcagggagtgccatccccgatttcacctaaccacaacgta

SEQ ID NO: 207443 - DNA, 55 bp, Artificial
  Synthetic oligonucleotide
ccgcctaagcgtaacatcttaagcggattgattcagctctcaagtatcaaacgat

SEQ ID NO: 207444 - DNA, 60 bp, Artificial
  Synthetic oligonucleotide
gcggcacacgcttcgttcatatcctcggtttcaacctctggcataccgttatctctaaca

SEQ ID NO: 207445 - DNA, 51 bp, Artificial
  Synthetic oligonucleotide
ccgctaaaggccgggtgcttttaggtgtattacgttccagtgaacgaccgg

SEQ ID NO: 207446 - DNA, 55 bp, Artificial
  Synthetic oligonucleotide
aggtgcaggatatcttcgtccagtgatcgactgttgctttaactttgaggacatg

SEQ ID NO: 207447 - DNA, 55 bp, Artificial
  Synthetic oligonucleotide
ccggccagaggtataaaatgccgcttggtctgggttgtctagcgcatgtaaatgt

SEQ ID NO: 207448 - DNA, 55 bp, Artificial
  Synthetic oligonucleotide
aggccataaccattgaaggaacaaggaaaacctatttggcagatcgtttagtctc

SEQ ID NO: 207449 - DNA, 55 bp, Artificial
  Synthetic oligonucleotide
ccggctacatttagccttagcttcgattctcgtctgtgatgtaggcaatactgct

SEQ ID NO: 207450 - DNA, 55 bp, Artificial
  Synthetic oligonucleotide
agacagcaggcgtcatctgaacatgcatgacataaccttgcacgtttacaggttc

SEQ ID NO: 207451 - DNA, 55 bp, Artificial
  Synthetic oligonucleotide
agaatcgtctagcccttctgccatcgaagtttgaggatttctctaactggctagt

SEQ ID NO: 207452 - DNA, 55 bp, Artificial
  Synthetic oligonucleotide
cgcctgacttgggtgttccgcagtggcctttaagcaatattcactctaaagccta

SEQ ID NO: 207453 - DNA, 55 bp, Artificial
  Synthetic oligonucleotide
cgcgaaccaaattcgattcaattgtgtacgttagtgagtaaaccatctcgccgtg

SEQ ID NO: 207454 - DNA, 55 bp, Artificial
  Synthetic oligonucleotide
actttcccaatctaaattacccactaatcatctccttcactcggttcagcttcta

SEQ ID NO: 207455 - DNA, 60 bp, Artificial
  Synthetic oligonucleotide
tagatcttggtatgtcatctcaagattttaggtagcaagtgctataccaagcacccaaag

SEQ ID NO: 207456 - DNA, 55 bp, Artificial
  Synthetic oligonucleotide
acttgttggccatcaatcactgtagagtcgtaaattgctgcaacggtgaaaggta

SEQ ID NO: 207457 - DNA, 55 bp, Artificial
  Synthetic oligonucleotide
cgcgcggttaaacattatatgcagcgcactgcaattcaaggctctccaaatagcc

SEQ ID NO: 207458 - DNA, 55 bp, Artificial
  Synthetic oligonucleotide
acttaaccaacctatacaactacttccaacgcctccgcctatgtgagatcccctg

SEQ ID NO: 207459 - DNA, 53 bp, Artificial
  Synthetic oligonucleotide
cgcggggtaaatcactccttaaaccggattggattggtcacggtgaaagacat

SEQ ID NO: 207460 - DNA, 55 bp, Artificial
  Synthetic oligonucleotide
cgcgttatgcaacagctcctgatttctatacggtgcgttcaggagatacattgag

SEQ ID NO: 207461 - DNA, 55 bp, Artificial
  Synthetic oligonucleotide
cgctatgacgtaatcgcagatttagccatccatgaaccgagtaaaggcggtaatg

SEQ ID NO: 207462 - DNA, 54 bp, Artificial
  Synthetic oligonucleotide
cgctcgctacctagacgaaacttttccggatacacctcgactttatcccgaaga

SEQ ID NO: 207463 - DNA, 55 bp, Artificial
  Synthetic oligonucleotide
actggggtggcaatagtaaatggtagtttacaacctgctcataggcatttccgag

SEQ ID NO: 207464 - DNA, 55 bp, Artificial
  Synthetic oligonucleotide
cgctctagattgccacgcgtaaaagagccaaccgtactaatacctttcgataaag

SEQ ID NO: 207465 - DNA, 55 bp, Artificial
  Synthetic oligonucleotide
cgctgaaccacctgtattgtaagcgacacaagcgttttaaaaggactacgaatag

SEQ ID NO: 207466 - DNA, 60 bp, Artificial
  Synthetic oligonucleotide
agttcatgcagatagttatatcaatcaatttggtgtacaccgtaatacagcttatcaagc

SEQ ID NO: 207467 - DNA, 55 bp, Artificial
  Synthetic oligonucleotide
cgcttgcatgtgctgatcgtcaaactgcctcccgatcggttcaaatggtcgaccc

SEQ ID NO: 207468 - DNA, 55 bp, Artificial
  Synthetic oligonucleotide
cgctttggtctgggtgtacaagtaacaccagttcgtaatgtcgcattatgactcc

SEQ ID NO: 207469 - DNA, 55 bp, Artificial
  Synthetic oligonucleotide
cgaccaacgctgcgagtactttctcttgtgtagattcatcttgctgtacaagcca

SEQ ID NO: 207470 - DNA, 55 bp, Artificial
  Synthetic oligonucleotide
cgaccgatcaaacgggtatagctacacggaatgatcgcggttctttgcctgagtg

SEQ ID NO: 207471 - DNA, 55 bp, Artificial
  Synthetic oligonucleotide
cgacgccatctacagcttggacgctaagtcccatgaagtcttgctgctgggctcg

SEQ ID NO: 207472 - DNA, 55 bp, Artificial
  Synthetic oligonucleotide
cgacgcccaatatttgtcgtaatcaaacagcgcttttggcgcagtctgcatggtg

SEQ ID NO: 207473 - DNA, 55 bp, Artificial
  Synthetic oligonucleotide
cgactgtgagcaagcaatggtcgatttctggttattcccttgccctatcgagctt

SEQ ID NO: 207474 - DNA, 55 bp, Artificial
  Synthetic oligonucleotide
cgagaaacgatcggcatagaaactgcgagaatatagcttaatgtccagtagccag

SEQ ID NO: 207475 - DNA, 55 bp, Artificial
  Synthetic oligonucleotide
cgagtatccaccgccgagcaaaatacagaccgccagcttgacggtatcatgctag

SEQ ID NO: 207476 - DNA, 55 bp, Artificial
  Synthetic oligonucleotide
cgataagagtaaggatttagcgattagacgctaccatgaggcgatggggaaagca

SEQ ID NO: 207477 - DNA, 58 bp, Artificial
  Synthetic oligonucleotide
gcggattccagtgccggagcaggttgaactggagcagccgaaaagagggtggttaagc

SEQ ID NO: 207478 - DNA, 55 bp, Artificial
  Synthetic oligonucleotide
cgattttgcgattttccctgataactcaataccccaacctctgaaactatccgca

SEQ ID NO: 207479 - DNA, 55 bp, Artificial
  Synthetic oligonucleotide
cgcaatcgtcgtgtactcgctcaatagtttgttgtgttcgtgctgtaagctctcg

SEQ ID NO: 207480 - DNA, 55 bp, Artificial
  Synthetic oligonucleotide
cgcacaataaatggttcccgttccactgactcgacggtatctagcacggatgcgg

SEQ ID NO: 207481 - DNA, 55 bp, Artificial
  Synthetic oligonucleotide
agagtgtgacatccctttgggacatgcggatttaagcattgatgccacggtagcg

SEQ ID NO: 207482 - DNA, 55 bp, Artificial
  Synthetic oligonucleotide
cgcaggcaagataagcggtatccgtgccttctttacgcgtccagaccgcatagcc

SEQ ID NO: 207483 - DNA, 55 bp, Artificial
  Synthetic oligonucleotide
cgcagtgaggcacttacgcccaatcaaatgaactactggtatcgccctgtcagtg

SEQ ID NO: 207484 - DNA, 55 bp, Artificial
  Synthetic oligonucleotide
cgcatctttctgtatagccgtcgtgatttctttcgtaggcggtcgtccagctatg

SEQ ID NO: 207485 - DNA, 55 bp, Artificial
  Synthetic oligonucleotide
cgccaattgcatctaataatcccgtaaatgagttgaattgacgtccacgcatgcc

SEQ ID NO: 207486 - DNA, 55 bp, Artificial
  Synthetic oligonucleotide
agaggtaagtgatttccgtcaaagaattggcgtactcgatacagagtacaagcgt

SEQ ID NO: 207487 - DNA, 54 bp, Artificial
  Synthetic oligonucleotide
agagcggcaaaaggaaggaataaaactcgcctctgctcaggggaagtacaaagg

SEQ ID NO: 207488 - DNA, 56 bp, Artificial
  Synthetic oligonucleotide
tagcatgataaagggtacaaataaattattgtacccttatgtttattggtgtacat

SEQ ID NO: 207489 - DNA, 55 bp, Artificial
  Synthetic oligonucleotide
cgcctcagattgcatgggcaatagggttgccgagccaaaggcggctaaccatagg

SEQ ID NO: 207490 - DNA, 55 bp, Artificial
  Synthetic oligonucleotide
cagacgagaatcgaagctaaggctaaatgtagccggtaacagatgactcagacca

SEQ ID NO: 207491 - DNA, 55 bp, Artificial
  Synthetic oligonucleotide
cagatagccaaagcaaataatgctggcgatatgatagaattgccaattaaccagt

SEQ ID NO: 207492 - DNA, 55 bp, Artificial
  Synthetic oligonucleotide
caagctttcttcaaaggctgcacgtgcaatgcctacctcaatcgatgcatgcatg

SEQ ID NO: 207493 - DNA, 55 bp, Artificial
  Synthetic oligonucleotide
caagcgataggtctcgtacacgggcagacagttttattggtggctcatactgtac

SEQ ID NO: 207494 - DNA, 55 bp, Artificial
  Synthetic oligonucleotide
caagaccgctacaacattttgtgggttgaacacaccgataaagaccgcctagagc

SEQ ID NO: 207495 - DNA, 55 bp, Artificial
  Synthetic oligonucleotide
caagaaaacagcgacctggattaggttacaatcacggattatggatataaggaca

SEQ ID NO: 207496 - DNA, 55 bp, Artificial
  Synthetic oligonucleotide
caaccatttacagagctgtacgtaatggacgtttatcacgctccagtgatggaca

SEQ ID NO: 207497 - DNA, 55 bp, Artificial
  Synthetic oligonucleotide
cagctacccctgcatagattacggtactacacaccgccacaagactgtctatgcc

SEQ ID NO: 207498 - DNA, 54 bp, Artificial
  Synthetic oligonucleotide
cagcttacttaagcataacggcaaattagtacgtccagttcgtttgcctaacgg

SEQ ID NO: 207499 - DNA, 56 bp, Artificial
  Synthetic oligonucleotide
cgctcatggcagggttaaaccaagaccgctacaacattttgtgggttgaacacacc

SEQ ID NO: 207500 - DNA, 55 bp, Artificial
  Synthetic oligonucleotide
caacaactagattatgcagctccttacacaattaacgcattaaaacgagcgggtc

SEQ ID NO: 207501 - DNA, 55 bp, Artificial
  Synthetic oligonucleotide
caaaatcaagtaggcaaggtgcttgccttagagtatccaaaggtaatgtttgctg

SEQ ID NO: 207502 - DNA, 55 bp, Artificial
  Synthetic oligonucleotide
atttcgattaccgcatagttaggcgcatgagcattaatctcagtacggctgcttg

SEQ ID NO: 207503 - DNA, 55 bp, Artificial
  Synthetic oligonucleotide
atttaacagagtttgcacgagctaaagatagacgttcgttcaatgcacgtggacc

SEQ ID NO: 207504 - DNA, 55 bp, Artificial
  Synthetic oligonucleotide
caggcagtcttcaacatgacggacaattcttgaggctgtgggctctgaaaccccg

SEQ ID NO: 207505 - DNA, 55 bp, Artificial
  Synthetic oligonucleotide
caggtaattaactatgactatgggctacacgacccagacgaccccaagaaccgcc

SEQ ID NO: 207506 - DNA, 55 bp, Artificial
  Synthetic oligonucleotide
caggtccatgactacccacctgatgcaaaacaatcaaacgtgggcggtcatcatc

SEQ ID NO: 207507 - DNA, 55 bp, Artificial
  Synthetic oligonucleotide
cagtctgactaagcaaaggcgtggaactttggttaagaaataggcgtggaacgtg

SEQ ID NO: 207508 - DNA, 55 bp, Artificial
  Synthetic oligonucleotide
cagtgcctgtatatcaagaattggcacgtcgtattggtccaagcttaatgcaaag

SEQ ID NO: 207509 - DNA, 53 bp, Artificial
  Synthetic oligonucleotide
attaagtccaagctataacttaggtttactttgggagccaaacgacgatttca

SEQ ID NO: 207510 - DNA, 60 bp, Artificial
  Synthetic oligonucleotide
gcgcgcgtggtggcttgcgctcccccgaccgccaacgcacacgcgcgcaaataagggaga

SEQ ID NO: 207511 - DNA, 55 bp, Artificial
  Synthetic oligonucleotide
cacactgtcatgaatcaacctaaggcgtgcgatggcatcagggttatttgtaccc

SEQ ID NO: 207512 - DNA, 55 bp, Artificial
  Synthetic oligonucleotide
caccagtccattctcaagaaggccataccacctatctagataatcagcagctatt

SEQ ID NO: 207513 - DNA, 55 bp, Artificial
  Synthetic oligonucleotide
cacacaaaatctaccgcacaaccaattggcccgcatataaccgagcactcattag

SEQ ID NO: 207514 - DNA, 52 bp, Artificial
  Synthetic oligonucleotide
cacccggtagtaagcgggtcaaatcacgagtacggtaacgaataatcggtaa

SEQ ID NO: 207515 - DNA, 55 bp, Artificial
  Synthetic oligonucleotide
cacctgacccatggacaaattgacaggtctgttgcttttcacagcgggcatcctg

SEQ ID NO: 207516 - DNA, 55 bp, Artificial
  Synthetic oligonucleotide
caattcgatctagcagaggtcatccgatgctttggagaacctgagcaaacacccc

SEQ ID NO: 207517 - DNA, 55 bp, Artificial
  Synthetic oligonucleotide
caattaagtgccgtagagcaacgaattgtcttagctgccatttcacggattccaa

SEQ ID NO: 207518 - DNA, 53 bp, Artificial
  Synthetic oligonucleotide
cacgaggttgggctcttggtactcagttagaaaatttcaaaacaaacgggatg

SEQ ID NO: 207519 - DNA, 55 bp, Artificial
  Synthetic oligonucleotide
caatgttatggacgcttggcttccttgtaacattcggtatcggtggtttaactgg

SEQ ID NO: 207520 - DNA, 55 bp, Artificial
  Synthetic oligonucleotide
caatagtaatgcagaaggttgtcaccatctcattcgagaaggggctactttggtc

SEQ ID NO: 207521 - DNA, 56 bp, Artificial
  Synthetic oligonucleotide
tacccaaggcatcccctagagttgtcgaacgctgtttaagtttactagtatcaata

SEQ ID NO: 207522 - DNA, 57 bp, Artificial
  Synthetic oligonucleotide
agtctaatgagcagtttcaaacgggcaagcagtttttgcatggtcaagtgacccgtt

SEQ ID NO: 207523 - DNA, 55 bp, Artificial
  Synthetic oligonucleotide
caatactcaaaacccaaagcatgtggcccttataggtctgataattatcacaaac

SEQ ID NO: 207524 - DNA, 55 bp, Artificial
  Synthetic oligonucleotide
cacgctgtacagttgctcgattgatgcaaaagctaggtatacaaggtgtttggcg

SEQ ID NO: 207525 - DNA, 55 bp, Artificial
  Synthetic oligonucleotide
cacgcttattaagattgctgggcaaatgaagcttagcacgcgccctttaaggctg

SEQ ID NO: 207526 - DNA, 55 bp, Artificial
  Synthetic oligonucleotide
cacggatagaccaaaacagttggttgaattgaaaccgtagatatgaggaacggct

SEQ ID NO: 207527 - DNA, 55 bp, Artificial
  Synthetic oligonucleotide
cacggcggaatagacaattggaaatgctgcgaataaccctgcaccaccgagtacc

SEQ ID NO: 207528 - DNA, 55 bp, Artificial
  Synthetic oligonucleotide
caatacagattcagctcatgccttaccaatgctgcattctaacaacctattcgcc

SEQ ID NO: 207529 - DNA, 55 bp, Artificial
  Synthetic oligonucleotide
caataaggtaagccgcctacctggtcatattcaggcggcgtttcaatcggactaa

SEQ ID NO: 207530 - DNA, 54 bp, Artificial
  Synthetic oligonucleotide
caaggtgtttggcgaggtaagaacaaacaaaccacccgtagccgagatgaccaa

SEQ ID NO: 207531 - DNA, 55 bp, Artificial
  Synthetic oligonucleotide
cagacagtaagttagaaatccatgcttctgattatgcttctcgctttgatgtgac

SEQ ID NO: 207532 - DNA, 55 bp, Artificial
  Synthetic oligonucleotide
ccaccgcccacaggactatattggggccttacgttcttcaaacattgttcgccag

SEQ ID NO: 207533 - DNA, 60 bp, Artificial
  Synthetic oligonucleotide
agtcgtgctaccttcgcctctgcttctgctagttgctgttcaagtgttaccatttttagc

SEQ ID NO: 207534 - DNA, 55 bp, Artificial
  Synthetic oligonucleotide
atctctgcgatgagaagcattgcttcgcaagggaacatcgagcgaaacgagattt

SEQ ID NO: 207535 - DNA, 55 bp, Artificial
  Synthetic oligonucleotide
atcgaacggattaaactctcgcgccactgatcagtgcttaatgctgctcttccac

SEQ ID NO: 207536 - DNA, 53 bp, Artificial
  Synthetic oligonucleotide
ccagacgaccccaagaaccgccaaacgcttgtaaccgtcaaagacctgccaaa

SEQ ID NO: 207537 - DNA, 55 bp, Artificial
  Synthetic oligonucleotide
ccatccatacgggttgagctaacgaccattgtacgaccggcgtatgaaactccat

SEQ ID NO: 207538 - DNA, 55 bp, Artificial
  Synthetic oligonucleotide
ccatcgataagctcacctttggcactgcgatactcggccacagtcagctttaacg

SEQ ID NO: 207539 - DNA, 55 bp, Artificial
  Synthetic oligonucleotide
ccatgctcagcagacaccgaaccaccatatttctgcaccgtctcaaacacatgct

SEQ ID NO: 207540 - DNA, 54 bp, Artificial
  Synthetic oligonucleotide
ccattcggcaaatgaaacggatataggctaaaacctaacagcccgcccgctttg

SEQ ID NO: 207541 - DNA, 55 bp, Artificial
  Synthetic oligonucleotide
ccatttatatcagcgaccctaattttgctgggctaattctccctaggtctggact

SEQ ID NO: 207542 - DNA, 54 bp, Artificial
  Synthetic oligonucleotide
cccaatcataaaactcggttggtgtataggtaaaaccgattgggttgatgtctg

SEQ ID NO: 207543 - DNA, 55 bp, Artificial
  Synthetic oligonucleotide
cccacccaaatgtttggcattctcgccatagaatgctccagtcagattgttactc

SEQ ID NO: 207544 - DNA, 60 bp, Artificial
  Synthetic oligonucleotide
cgctggactggcaagagtgcaagataacaagcgtatgcggtaactattataagccaccaa

SEQ ID NO: 207545 - DNA, 54 bp, Artificial
  Synthetic oligonucleotide
ccccactgtttctgatgtcgcaaaacgtaaagcaccactaaaaccaagacggaa

SEQ ID NO: 207546 - DNA, 55 bp, Artificial
  Synthetic oligonucleotide
ataggcattgattaaccctcctgagcaaactatgatgctgtcacgaattcgtcac

SEQ ID NO: 207547 - DNA, 55 bp, Artificial
  Synthetic oligonucleotide
ccccatcgcaggaacgcaatattgagcgcttggtgcagtgccgtgtgcttgatag

SEQ ID NO: 207548 - DNA, 55 bp, Artificial
  Synthetic oligonucleotide
atactcgtttacggcgttaccgcttatgggtaagattgtcgccaatgactctgag

SEQ ID NO: 207549 - DNA, 55 bp, Artificial
  Synthetic oligonucleotide
agttgctcgaagtgataagttccccgcagatttcggtataaagtcacgtgcttgg

SEQ ID NO: 207550 - DNA, 55 bp, Artificial
  Synthetic oligonucleotide
ccccttgccaagtcggtggtgctactaaagtagaaacatgggtggttctggtgtc

SEQ ID NO: 207551 - DNA, 55 bp, Artificial
  Synthetic oligonucleotide
agttattgctagatagttagcagcactgtggcgcaacgtatgaaaactaaagcca

SEQ ID NO: 207552 - DNA, 55 bp, Artificial
  Synthetic oligonucleotide
cccggattgccacgacatgcaccatcaacatacagtgtgattgtttgagacataa

SEQ ID NO: 207553 - DNA, 55 bp, Artificial
  Synthetic oligonucleotide
cccggtgtatcatcaaatctgagttgcccaaacccaccacctgacacgtctttag

SEQ ID NO: 207554 - DNA, 55 bp, Artificial
  Synthetic oligonucleotide
cataagcagagcacaaataaatacgagagtcttacatgttagagtacgtcagcgg

SEQ ID NO: 207555 - DNA, 56 bp, Artificial
  Synthetic oligonucleotide
agtccagttctcgaccgatcaaacgggtatagctacacggaatgatcgcggttctt

SEQ ID NO: 207556 - DNA, 55 bp, Artificial
  Synthetic oligonucleotide
catcatactaggacactatggctgcattaccctcactaagacagctatcatattt

SEQ ID NO: 207557 - DNA, 55 bp, Artificial
  Synthetic oligonucleotide
catcccctgaagtgggtggttttacggcgaccggtgataaaagccatagatatgg

SEQ ID NO: 207558 - DNA, 55 bp, Artificial
  Synthetic oligonucleotide
catctgttaccggctacatttagccttagcttcgattctcgtctgtgatgtaggc

SEQ ID NO: 207559 - DNA, 55 bp, Artificial
  Synthetic oligonucleotide
catctttcagcgtggttacaatatccacttcgcctgtgttatcattgacacgcag

SEQ ID NO: 207560 - DNA, 55 bp, Artificial
  Synthetic oligonucleotide
catgcttagatatcgtctattgttttaacaccaagtgacccgacgaacagggtac

SEQ ID NO: 207561 - DNA, 55 bp, Artificial
  Synthetic oligonucleotide
catgggtcagcagttagcagtaccgagtaatttaggcggtaactatgtggacgct

SEQ ID NO: 207562 - DNA, 55 bp, Artificial
  Synthetic oligonucleotide
catgtacggtaataggcattgattaaccctcctgagcaaactatgatgctgtcac

SEQ ID NO: 207563 - DNA, 55 bp, Artificial
  Synthetic oligonucleotide
atgcagggacatattctttatttgctcgtgcaagagcattaccataggtgctaag

SEQ ID NO: 207564 - DNA, 55 bp, Artificial
  Synthetic oligonucleotide
cattgctacgtgagggtctgtcgatatttcatggatgcatgcgacagtagatatt

SEQ ID NO: 207565 - DNA, 55 bp, Artificial
  Synthetic oligonucleotide
cattggccagttgacgggccgcatggtccccaagtgcaagttgggctttgtctgt

SEQ ID NO: 207566 - DNA, 60 bp, Artificial
  Synthetic oligonucleotide
tagtgctttatcaccagtccattctcaagaaggccataccacctatctagataatcagca

SEQ ID NO: 207567 - DNA, 55 bp, Artificial
  Synthetic oligonucleotide
cattgttaaacgactataaccaaacccagctaatcaaagcgcgtttgcagattcg

SEQ ID NO: 207568 - DNA, 55 bp, Artificial
  Synthetic oligonucleotide
catttacatctccttaagcgggcagagtaaaacttgaagtgcgacataaaccacc

SEQ ID NO: 207569 - DNA, 55 bp, Artificial
  Synthetic oligonucleotide
ccaaaagagattaccgccgccatttggggtatggagtcatcatacggtgctggca

SEQ ID NO: 207570 - DNA, 55 bp, Artificial
  Synthetic oligonucleotide
ccaaacaacgtgttcggcaggtagcttacgtcttctaatgctcgctttgcccgta

SEQ ID NO: 207571 - DNA, 55 bp, Artificial
  Synthetic oligonucleotide
ccaaacggagagattaaacacgagcttgtcgacttaactgtcgaagattctcgac

SEQ ID NO: 207572 - DNA, 55 bp, Artificial
  Synthetic oligonucleotide
ccaaccgcgggtactgcaacctataccgttgcagggattaacggctctggaagca

SEQ ID NO: 207573 - DNA, 55 bp, Artificial
  Synthetic oligonucleotide
atcttattcaaccatgcccaaatctaaatgaattggcaggaacaactggcaaaga

SEQ ID NO: 207574 - DNA, 55 bp, Artificial
  Synthetic oligonucleotide
ccaagatacaagcaggaatggcgagaaaactaggggcggatacaggctatagcgg

SEQ ID NO: 207575 - DNA, 53 bp, Artificial
  Synthetic oligonucleotide
ccaccgaattagaacggcagggcattagaaccgaagtaggcgaccaaaaccga

SEQ ID NO: 207576 - DNA, 55 bp, Artificial
  Synthetic oligonucleotide
ctgcacgtaatcgctgtttgtcagaattacaatctgatctcaaggcagcacctaa

SEQ ID NO: 207577 - DNA, 57 bp, Artificial
  Synthetic oligonucleotide
cggataatgcagcgtgtgagttacccaaatagtgcctcattaggtaaaacggtattc

SEQ ID NO: 207578 - DNA, 55 bp, Artificial
  Synthetic oligonucleotide
aatgtgccccgtatgtcgtcagcgacttgagctggtaaacaaaacatggcggtgt

SEQ ID NO: 207579 - DNA, 55 bp, Artificial
  Synthetic oligonucleotide
ctgatacacatcagacaaatcgatccttaatgttgccttcaggctaaagcgttga

SEQ ID NO: 207580 - DNA, 54 bp, Artificial
  Synthetic oligonucleotide
ctgaggccttaccgaccacttgtaaaacttgtgggtcgtgacgaaccaagtcac

SEQ ID NO: 207581 - DNA, 55 bp, Artificial
  Synthetic oligonucleotide
ctgactgagtacatcttgcatcaatgtccactgatattgaccccagaacttagtc

SEQ ID NO: 207582 - DNA, 55 bp, Artificial
  Synthetic oligonucleotide
ctgacccaagctaggtgccaaggtctaaaagcaagtccgcatttcgtcacacacc

SEQ ID NO: 207583 - DNA, 55 bp, Artificial
  Synthetic oligonucleotide
ctcttgagatgtaattttcccttcagccgcaactgaacgcaattcgcctacagta

SEQ ID NO: 207584 - DNA, 54 bp, Artificial
  Synthetic oligonucleotide
aattggttgagcaccacatttaggtcggttttggcgcctaattgtatgttcccc

SEQ ID NO: 207585 - DNA, 55 bp, Artificial
  Synthetic oligonucleotide
ctctagaccgcgcgtaaaccactctacacgctgttggctagtaccatgagtaaag

SEQ ID NO: 207586 - DNA, 55 bp, Artificial
  Synthetic oligonucleotide
ctcgccctcacctagaaacttcatgcctgtagagtccatgagtagatgtagccca

SEQ ID NO: 207587 - DNA, 52 bp, Artificial
  Synthetic oligonucleotide
ctcccttttacaccttaacgagattaaccgagcgaagcgacgatataaactt

SEQ ID NO: 207588 - DNA, 60 bp, Artificial
  Synthetic oligonucleotide
agtaatagaggtagcgttatgaccgttcgtatttatgtgagagcaagcactaaggatcaa

SEQ ID NO: 207589 - DNA, 55 bp, Artificial
  Synthetic oligonucleotide
ctcattaccgaaactaaagagactttacagcaacctgcaaaagttcaagaatcgg

SEQ ID NO: 207590 - DNA, 55 bp, Artificial
  Synthetic oligonucleotide
ctcagcatggcgtttctgtactggattgtctagtcccagctttaaatactcagca

SEQ ID NO: 207591 - DNA, 55 bp, Artificial
  Synthetic oligonucleotide
ctcagaaccaactggcccatcgatgaattacgccaaagatatctacagtttctcg

SEQ ID NO: 207592 - DNA, 55 bp, Artificial
  Synthetic oligonucleotide
ctcacgaccatcattgagtaagggtaatgcaagttctaaagttcggcgtgcggcc

SEQ ID NO: 207593 - DNA, 55 bp, Artificial
  Synthetic oligonucleotide
acacgcgctggcaatagaatgtgaaacaccctgtaacttgaatgctacgcctacg

SEQ ID NO: 207594 - DNA, 55 bp, Artificial
  Synthetic oligonucleotide
acagagtttaatcaggctttgagcaaagccagtgaccatacgtaaagaaagacgg

SEQ ID NO: 207595 - DNA, 55 bp, Artificial
  Synthetic oligonucleotide
acagcaatatccgcactcatacgccatacacaacgtaaaatcacgtatcagtggc

SEQ ID NO: 207596 - DNA, 55 bp, Artificial
  Synthetic oligonucleotide
ctatacggtttccgctatggcgctgaacatatgctggatggtgttcctgaacagg

SEQ ID NO: 207597 - DNA, 55 bp, Artificial
  Synthetic oligonucleotide
ctagtagtgtgactcgttgaggcgcattggagacatcttgaatacgtgcgacggg

SEQ ID NO: 207598 - DNA, 55 bp, Artificial
  Synthetic oligonucleotide
ctagtaggtgaacttctgacaacttttgtgtttcggttgtctgtgaactgttcac

SEQ ID NO: 207599 - DNA, 54 bp, Artificial
  Synthetic oligonucleotide
aggttccgcgcccgggaaaatatggctcgctacgcctgcttcggttaaatagct

SEQ ID NO: 207600 - DNA, 55 bp, Artificial
  Synthetic oligonucleotide
ctagctaaatgggtgcgtgatgtttgcttggctaatccaattcaagagcctaaga

SEQ ID NO: 207601 - DNA, 55 bp, Artificial
  Synthetic oligonucleotide
ctagcgtattaaattgctcattcgatggcatccaagtttgtagccatggcagttc

SEQ ID NO: 207602 - DNA, 55 bp, Artificial
  Synthetic oligonucleotide
ctagatacttgatagcattaccaggacttgcttttgtacgattgagcgacttgaa

SEQ ID NO: 207603 - DNA, 55 bp, Artificial
  Synthetic oligonucleotide
ctactccaatgttatggacgcttggcttccttgtaacattcggtatcggtggttt

SEQ ID NO: 207604 - DNA, 55 bp, Artificial
  Synthetic oligonucleotide
accaactatgaatacaaggtttgatcctatcgtgtcagagtttgaaagttctgac

SEQ ID NO: 207605 - DNA, 55 bp, Artificial
  Synthetic oligonucleotide
accacgcaccgacaagccgagcaggatgagcaagaacgcaaacagcgtgagaaag

SEQ ID NO: 207606 - DNA, 55 bp, Artificial
  Synthetic oligonucleotide
ctacattacgttttaatactggcagtaatgagaagttgaccacagcaggtgtaac

SEQ ID NO: 207607 - DNA, 55 bp, Artificial
  Synthetic oligonucleotide
ctaagatagctttcggctttagtacttgagttacctccaatacctacaggtgtgg

SEQ ID NO: 207608 - DNA, 55 bp, Artificial
  Synthetic oligonucleotide
ctaacggcaacccagccgcgctcataaataaaggcgtacgcataaacactatccg

SEQ ID NO: 207609 - DNA, 54 bp, Artificial
  Synthetic oligonucleotide
ctaacagggacggtgtcaggcgaatttaagccgaccgacaaagtcaaagtatcg

SEQ ID NO: 207610 - DNA, 60 bp, Artificial
  Synthetic oligonucleotide
gcgagcgtataggctattaccgcccttgtcaggcaacgactgcaaaattgcggacatacg

SEQ ID NO: 207611 - DNA, 54 bp, Artificial
  Synthetic oligonucleotide
ctttgggaattctactgtgccacttgttggaaatagtagtttctttgggaaatc

SEQ ID NO: 207612 - DNA, 55 bp, Artificial
  Synthetic oligonucleotide
ctttcatggtgtgatcttgacgtagctcctgggttagctgagctagagatgcaac

SEQ ID NO: 207613 - DNA, 55 bp, Artificial
  Synthetic oligonucleotide
aaaagaaacatggttatggaacagctctactaaaggaactttgccattttgggca

SEQ ID NO: 207614 - DNA, 55 bp, Artificial
  Synthetic oligonucleotide
cttgtaccaaggtcggcgagaccacactgatacccgcaaaggtatacttatcagt

SEQ ID NO: 207615 - DNA, 55 bp, Artificial
  Synthetic oligonucleotide
cttgtaatcgccttgtagattgcggttaaatatgggttcgtggtgggcaatgcgg

SEQ ID NO: 207616 - DNA, 55 bp, Artificial
  Synthetic oligonucleotide
aaaaggcttgtggtgtagctcgttttgcctataattgggcattggcagcgtggaa

SEQ ID NO: 207617 - DNA, 55 bp, Artificial
  Synthetic oligonucleotide
cttgtaaagcatctgatgtcttactccataagacaggatactgctatgctaaaag

SEQ ID NO: 207618 - DNA, 55 bp, Artificial
  Synthetic oligonucleotide
aaagaacgtaagagagcatgaattaattaagccaacgttagacaatgggcactac

SEQ ID NO: 207619 - DNA, 55 bp, Artificial
  Synthetic oligonucleotide
cttggttatatgattactctgctcaccgttgcagcaacattaggctatatcgtca

SEQ ID NO: 207620 - DNA, 55 bp, Artificial
  Synthetic oligonucleotide
cttgatggcgatggctcaaccacttacatgatttgcgtggcagccatgctccctc

SEQ ID NO: 207621 - DNA, 59 bp, Artificial
  Synthetic oligonucleotide
cagcccaatttgggctgattttcctataatggagtggcttatggctcaaaaacgctcaa

SEQ ID NO: 207622 - DNA, 55 bp, Artificial
  Synthetic oligonucleotide
cttgactctctggagagcgactagccaataattcttgtagggtcttagccattag

SEQ ID NO: 207623 - DNA, 55 bp, Artificial
  Synthetic oligonucleotide
aacacgcaacgacaggagcaacgcatttggcgttagggagcctgcttttgccgag

SEQ ID NO: 207624 - DNA, 55 bp, Artificial
  Synthetic oligonucleotide
cttctgctgttggcaaaccacctaaatatgacaaacggtcacccatagtctgagt

SEQ ID NO: 207625 - DNA, 55 bp, Artificial
  Synthetic oligonucleotide
cttcgagatagctttccttctttgatcgctctgtaaacagttgaacggctcacct

SEQ ID NO: 207626 - DNA, 53 bp, Artificial
  Synthetic oligonucleotide
aacactagagcctgttttaatacaaggaccaccagagttactttcggcaattt

SEQ ID NO: 207627 - DNA, 55 bp, Artificial
  Synthetic oligonucleotide
aacagcacccaaccgtttattctcaacaatctctcgctgattcagctgacttaat

SEQ ID NO: 207628 - DNA, 55 bp, Artificial
  Synthetic oligonucleotide
aatgctctccctacattcaatagaaatatatcgactttaattggtcttacagctg

SEQ ID NO: 207629 - DNA, 55 bp, Artificial
  Synthetic oligonucleotide
ctgcactgaccgtatagtcaaacgtgtcatacacatagacgggtaatgcaactcg

SEQ ID NO: 207630 - DNA, 55 bp, Artificial
  Synthetic oligonucleotide
aatgctattagtccagtcgtggcggaagagcttttagatactggtgtgaactgtg

SEQ ID NO: 207631 - DNA, 55 bp, Artificial
  Synthetic oligonucleotide
ctgccacgctgtagacgagtgcatccatataacgcttacgatagagtaaccatgg

SEQ ID NO: 207632 - DNA, 60 bp, Artificial
  Synthetic oligonucleotide
cgcctgatctgacgttctgaaatatgaagtagctgagcagcctgggactgggtgatgcgt

SEQ ID NO: 207633 - DNA, 60 bp, Artificial
  Synthetic oligonucleotide
cagcaagggcaattagacgatatacaacaggcgatagacaacagccccctacaagccaaa

SEQ ID NO: 207634 - DNA, 55 bp, Artificial
  Synthetic oligonucleotide
ctgcctactacacaggtcagccgggtatatgcggccatttcaataatagtcggaa

SEQ ID NO: 207635 - DNA, 55 bp, Artificial
  Synthetic oligonucleotide
ctgcgtatgtagtaagggacttagaagttgtgacggtaacacgtgactatcgtgg

SEQ ID NO: 207636 - DNA, 55 bp, Artificial
  Synthetic oligonucleotide
ctgctccggtgttcgctcaataccatcaacatggcgttcactgtaaatcaaatgc

SEQ ID NO: 207637 - DNA, 55 bp, Artificial
  Synthetic oligonucleotide
ctgcttacgacattgaatctttacgaccccacgtacaagtgatggataaccaacc

SEQ ID NO: 207638 - DNA, 55 bp, Artificial
  Synthetic oligonucleotide
ctggaccaaagcacgtcaaaccatacagacgttactttctagcgactgcgatacc

SEQ ID NO: 207639 - DNA, 55 bp, Artificial
  Synthetic oligonucleotide
ctggactatcatgttcggcaggcggctgagttaaatgtcccgattatggtcgcag

SEQ ID NO: 207640 - DNA, 55 bp, Artificial
  Synthetic oligonucleotide
aagctcacgcgagccccgaacaacttgcttggtggcagactgcaaccgactactt

SEQ ID NO: 207641 - DNA, 55 bp, Artificial
  Synthetic oligonucleotide
aagcggtcacgcacctagacaatgacgagatgagtgtgtcgggtctgttggcacg

SEQ ID NO: 207642 - DNA, 51 bp, Artificial
  Synthetic oligonucleotide
aagccttggtatggggacaacccaagacgaaattaaacagattcgggaaac

SEQ ID NO: 207643 - DNA, 55 bp, Artificial
  Synthetic oligonucleotide
aagataacgaaatagaatggacatcgttgtcatggctgcaagttgctggttcaca

SEQ ID NO: 207644 - DNA, 56 bp, Artificial
  Synthetic oligonucleotide
ggtgatttttcgccgataagcacttggtgatacaccaaaccagcgtttaaacgcgc

SEQ ID NO: 207645 - DNA, 55 bp, Artificial
  Synthetic oligonucleotide
ctgtcgccctaccctgatttatgcttgattgaaaactgcgtcaatttgggcatta

SEQ ID NO: 207646 - DNA, 55 bp, Artificial
  Synthetic oligonucleotide
aagaattaagccaaataccgggtaatgcaagggtatgataaagcccaagagaggc

SEQ ID NO: 207647 - DNA, 55 bp, Artificial
  Synthetic oligonucleotide
aacgtcaaggtgtaacggttaataaccatgtatgcgaacacttcccatactcacg

SEQ ID NO: 207648 - DNA, 55 bp, Artificial
  Synthetic oligonucleotide
cggcaccgcgtaatttagcagttacttccatcatgacacctattaacgtttagac

SEQ ID NO: 207649 - DNA, 55 bp, Artificial
  Synthetic oligonucleotide
cggcatggcagtcatacatattgatggaaccactgtcgaagtagatagcgcggac

SEQ ID NO: 207650 - DNA, 55 bp, Artificial
  Synthetic oligonucleotide
cgtaattggttagtacagcctcaagttcaggggtttaaagctcacccaatgatga

SEQ ID NO: 207651 - DNA, 55 bp, Artificial
  Synthetic oligonucleotide
acctcccttttgtctcaatttgataacacctatacacaaacaccactgccagacc

SEQ ID NO: 207652 - DNA, 55 bp, Artificial
  Synthetic oligonucleotide
cggtaggacgggagagggacactttcgggtgtgctagtttgagatattactagtc

SEQ ID NO: 207653 - DNA, 55 bp, Artificial
  Synthetic oligonucleotide
cggtaagtatcttgagttcctggaatacccggatggtactgtagccatcatgcat

SEQ ID NO: 207654 - DNA, 55 bp, Artificial
  Synthetic oligonucleotide
cgtgcaactcggatggctagataggccttaaagcaccattgcattaaaatggggc

SEQ ID NO: 207655 - DNA, 57 bp, Artificial
  Synthetic oligonucleotide
cagatcaaaaataaaacccaagttgaaacgctctcaaatgcgatttcagccacattt

SEQ ID NO: 207656 - DNA, 55 bp, Artificial
  Synthetic oligonucleotide
cggctacgagatgtggttaaccatgtttcagtacggtcttcaaataaccagctac

SEQ ID NO: 207657 - DNA, 55 bp, Artificial
  Synthetic oligonucleotide
cgtcacgtttgtaggtgacagttgttaaacgttctcttaaatcaatacgctcgac

SEQ ID NO: 207658 - DNA, 55 bp, Artificial
  Synthetic oligonucleotide
acgctgaacttcttctggtgccgtcatcttgacacgaatccagtcaggtttacgc

SEQ ID NO: 207659 - DNA, 55 bp, Artificial
  Synthetic oligonucleotide
acggagtatggactggttcggtgttgtactaattgcctgtgtgacggccttgggg

SEQ ID NO: 207660 - DNA, 55 bp, Artificial
  Synthetic oligonucleotide
cgtgaagcctcgttatctactcaggcattggtggtctcagaggcgggtgcatcgg

SEQ ID NO: 207661 - DNA, 54 bp, Artificial
  Synthetic oligonucleotide
cgtctaatatcttcggggagatcttcaggtttcggtaatttaccgccttcagga

SEQ ID NO: 207662 - DNA, 55 bp, Artificial
  Synthetic oligonucleotide
cgtccacgtgagaatgaatagctgaagctcgttgctttacgcttgatatagttat

SEQ ID NO: 207663 - DNA, 55 bp, Artificial
  Synthetic oligonucleotide
cggggcactttgcatttggaatatttcgctcgctgccggcctagctgtgatcatg

SEQ ID NO: 207664 - DNA, 55 bp, Artificial
  Synthetic oligonucleotide
cgggaaacgtgggcaaatttagccaatcacgcattagaacgagcaggctttcagg

SEQ ID NO: 207665 - DNA, 55 bp, Artificial
  Synthetic oligonucleotide
cgtcctcaccagctgtctgtgactaccatgcgtactcagactttggtgctcgtta

SEQ ID NO: 207666 - DNA, 56 bp, Artificial
  Synthetic oligonucleotide
ccactacactttatttacaatcctatgttgtggaagtaagggatcttgtactcgcc

SEQ ID NO: 207667 - DNA, 55 bp, Artificial
  Synthetic oligonucleotide
cgtccttttcttatgataaggattccaagaattataatcgcattggcggcaatac

SEQ ID NO: 207668 - DNA, 55 bp, Artificial
  Synthetic oligonucleotide
cggctagttaggttattgaccgcgcttgaatcggctttatttgccagtgttccac

SEQ ID NO: 207669 - DNA, 55 bp, Artificial
  Synthetic oligonucleotide
cggttaaggctctacgtgttcaggaataggaattcgcttattctcgattacccag

SEQ ID NO: 207670 - DNA, 53 bp, Artificial
  Synthetic oligonucleotide
cggttcgtcctaattataatgccaagaggaccgctttaaatacagtaaaaggc

SEQ ID NO: 207671 - DNA, 55 bp, Artificial
  Synthetic oligonucleotide
cggacgccaggtctgaaacacggccgacttgccgactagagaaggttcaatcgag

SEQ ID NO: 207672 - DNA, 55 bp, Artificial
  Synthetic oligonucleotide
cggttgaagtgccgcgtaaacctgactggattcgtgtcaagatgacggcaccaga

SEQ ID NO: 207673 - DNA, 55 bp, Artificial
  Synthetic oligonucleotide
cggtttgcgaacagccctgtatcgcattcgtatcacaagtcggtttaaatggttg

SEQ ID NO: 207674 - DNA, 55 bp, Artificial
  Synthetic oligonucleotide
actacgtgaatactcacagcaagaccctaatgatttacgtattagacgacgaaaa

SEQ ID NO: 207675 - DNA, 55 bp, Artificial
  Synthetic oligonucleotide
cgttgtagttcgaatccgatcgctcgagtcgtaaaacttcatgatgcagccttta

SEQ ID NO: 207676 - DNA, 55 bp, Artificial
  Synthetic oligonucleotide
cgtaaactttccaccgctattaattgcaagtatctgggcatatttggtttcgccc

SEQ ID NO: 207677 - DNA, 56 bp, Artificial
  Synthetic oligonucleotide
ccatcaaataaaaaggacaccgtaaatggctaagttatcactaagtgaagtatcta

SEQ ID NO: 207678 - DNA, 55 bp, Artificial
  Synthetic oligonucleotide
cgttctcaatcatgcgacactttaatcgctatcccatatttaattagggaatggg

SEQ ID NO: 207679 - DNA, 55 bp, Artificial
  Synthetic oligonucleotide
cgttcgaagatatcttcacgcgataagatacggccggcatttgatgcaagcaacc

SEQ ID NO: 207680 - DNA, 55 bp, Artificial
  Synthetic oligonucleotide
cggatctgtttaacgaatggcttgtacagcaagatgaatctacacaagagaaagt

SEQ ID NO: 207681 - DNA, 55 bp, Artificial
  Synthetic oligonucleotide
acggtgctggcatgggtagtatggatttggtcagtgcgttatcaagcctagcgta

SEQ ID NO: 207682 - DNA, 55 bp, Artificial
  Synthetic oligonucleotide
cggacgttaggaaagtaatcatgcctcgtcctattaccgcagtgatccaccgtca

SEQ ID NO: 207683 - DNA, 55 bp, Artificial
  Synthetic oligonucleotide
cggtggcgcgatttcttggaacgctaacccatatgtaggggtaacactaggctat

SEQ ID NO: 207684 - DNA, 55 bp, Artificial
  Synthetic oligonucleotide
cgttcaaaagctcgcccataagtggatgagaacacttgagcagaatacgcgcacc

SEQ ID NO: 207685 - DNA, 54 bp, Artificial
  Synthetic oligonucleotide
gaggtgtaatcgttgtatcgactgagctgttgctagttgccacgacgtttgatc

SEQ ID NO: 207686 - DNA, 54 bp, Artificial
  Synthetic oligonucleotide
taagtattgccgattaacctgtaattgggctgacggagccacgcatcggtcgta

SEQ ID NO: 207687 - DNA, 53 bp, Artificial
  Synthetic oligonucleotide
gtacttacggcgttttaaccgcgaaaatcacaggtaaacattctggcgttgcc

SEQ ID NO: 207688 - DNA, 56 bp, Artificial
  Synthetic oligonucleotide
gtcggtaccaaacgccaatgaacaggccaaaattgcctcggcgaccttgtgtggct

SEQ ID NO: 207689 - DNA, 54 bp, Artificial
  Synthetic oligonucleotide
tctagaagcggtccatcttctggcgactggacgttcgtttagaacccatatgcc

SEQ ID NO: 207690 - DNA, 54 bp, Artificial
  Synthetic oligonucleotide
agacagtctaatagacactaattttttacaagattaggcagagatttacacatg

SEQ ID NO: 207691 - DNA, 54 bp, Artificial
  Synthetic oligonucleotide
ctgtggggattagtctgcttgtcccactaagtaacgcatgagcatgggtacagg

SEQ ID NO: 207692 - DNA, 54 bp, Artificial
  Synthetic oligonucleotide
ccataataatgcgtaagtacacaggacaagccccaagatgaacgggaaaatgac

SEQ ID NO: 207693 - DNA, 54 bp, Artificial
  Synthetic oligonucleotide
tgtcgaagccaaacgtgattggatactacgtgccaaaacaggctgggatggtca

SEQ ID NO: 207694 - DNA, 54 bp, Artificial
  Synthetic oligonucleotide
gatgcttgaacatcagtccaaacgtaattacgctgaaaatctggtataaaaata

SEQ ID NO: 207695 - DNA, 54 bp, Artificial
  Synthetic oligonucleotide
gagcgttttacgttgttctacggtgaattcattcggtagggcaatttcgtattc

SEQ ID NO: 207696 - DNA, 54 bp, Artificial
  Synthetic oligonucleotide
cccctctttctgccctacttctcgaggccagttatcacccactgaatttggttc

SEQ ID NO: 207697 - DNA, 54 bp, Artificial
  Synthetic oligonucleotide
gatcgtgttataggctcgatcataacctgccacaatggcctgtttgggtgaggc

SEQ ID NO: 207698 - DNA, 54 bp, Artificial
  Synthetic oligonucleotide
cagtcatattgcctgtgttgtagcaagaaaacgctctttgcattctcgtaccct

SEQ ID NO: 207699 - DNA, 60 bp, Artificial
  Synthetic oligonucleotide
ggtaggaaccgtgcaccatagccctcgcccgcccaaggtgtcaggacatcaatccatgca

SEQ ID NO: 207700 - DNA, 54 bp, Artificial
  Synthetic oligonucleotide
acgtgcgccataaccctcacctgcccatggggttaatacatcgacccaagccga

SEQ ID NO: 207701 - DNA, 54 bp, Artificial
  Synthetic oligonucleotide
aagccacgcacgctgtatcgaccaccgatactcatccgctcactgggtactagg

SEQ ID NO: 207702 - DNA, 54 bp, Artificial
  Synthetic oligonucleotide
cagtggtacagccaaccatcattatcgggatgatacttattgcaagaacaccct

SEQ ID NO: 207703 - DNA, 54 bp, Artificial
  Synthetic oligonucleotide
gccgtgtggagttagcactatgagccgaggtactcgcaccattgagatttaccg

SEQ ID NO: 207704 - DNA, 54 bp, Artificial
  Synthetic oligonucleotide
attaacagcaaggagttttcctagtcaggtgaatgagattcacgcacgtgtggc

SEQ ID NO: 207705 - DNA, 54 bp, Artificial
  Synthetic oligonucleotide
actcctcataaagactcgcttgatagtcgttacgcaaaggtcggaacaattaac

SEQ ID NO: 207706 - DNA, 54 bp, Artificial
  Synthetic oligonucleotide
aaacgatgaatctattcgcgccatgaaaactgcccaaaaattaaatgggtgcgg

SEQ ID NO: 207707 - DNA, 54 bp, Artificial
  Synthetic oligonucleotide
cactacttaatgcacgagaaacatggttttgccccactaactcattgaaattac

SEQ ID NO: 207708 - DNA, 54 bp, Artificial
  Synthetic oligonucleotide
gttcttgctgttctaaaaactctacaaatgcatgtaactcagcaatctgtaaca

SEQ ID NO: 207709 - DNA, 54 bp, Artificial
  Synthetic oligonucleotide
cagaatagggtgctaatagctcgactgttttggctaacccggcttcactaatat

SEQ ID NO: 207710 - DNA, 54 bp, Artificial
  Synthetic oligonucleotide
gtcgtgtacccaaacgagcaggaggtaatctaggagtgtaacgatccttttggg

SEQ ID NO: 207711 - DNA, 54 bp, Artificial
  Synthetic oligonucleotide
gcgcacgctgtccatagagaggaccatttcttgcgccccaatcgctcagcgatt

SEQ ID NO: 207712 - DNA, 54 bp, Artificial
  Synthetic oligonucleotide
cgtgattgtcagtgctgagtggtcggatgttgcgggtacggcacaagcgaatga

SEQ ID NO: 207713 - DNA, 54 bp, Artificial
  Synthetic oligonucleotide
aggtgacccctatgcggaccgttgtcgagtgacggcacgtctagtggcagaagc

SEQ ID NO: 207714 - DNA, 54 bp, Artificial
  Synthetic oligonucleotide
tcatattcacgctttgagcgtgcttaagtactgaactgtaccattgatcccaag

SEQ ID NO: 207715 - DNA, 54 bp, Artificial
  Synthetic oligonucleotide
gcagatagctatcgtgctgcgcggatgcattggcaatcaagcacaactcggtcg

SEQ ID NO: 207716 - DNA, 54 bp, Artificial
  Synthetic oligonucleotide
ctagctgcaacccttggaattaaacagccgtcattatcagcaatcgaaaatcgt

SEQ ID NO: 207717 - DNA, 54 bp, Artificial
  Synthetic oligonucleotide
cgtttgacttatcagcgtcaataatcccaatggatcgttttcactttgcggcaa

SEQ ID NO: 207718 - DNA, 54 bp, Artificial
  Synthetic oligonucleotide
tgataagggcgacttaatcaagaatggtggtggaattcgtaaagtacgttgtgc

SEQ ID NO: 207719 - DNA, 54 bp, Artificial
  Synthetic oligonucleotide
agatgattacccaagactagatacatttaaacgacgtgtacttgaatcagcagt

SEQ ID NO: 207720 - DNA, 54 bp, Artificial
  Synthetic oligonucleotide
ttttagcgagtgtctacgagtgacacaacgaaaggttgcttattccccctctga

SEQ ID NO: 207721 - DNA, 56 bp, Artificial
  Synthetic oligonucleotide
cccactcaccccaagcaatctttttaatgagaattagccaccgtatcaaggtagta

SEQ ID NO: 207722 - DNA, 54 bp, Artificial
  Synthetic oligonucleotide
cagctcagctttatgtttttgcgtggtacgacgcgctaatttaaggcgcacact

SEQ ID NO: 207723 - DNA, 54 bp, Artificial
  Synthetic oligonucleotide
ttttatgcagtgggtgattgatcatgccattgtgtcggctgacaaggatttatt

SEQ ID NO: 207724 - DNA, 54 bp, Artificial
  Synthetic oligonucleotide
cttatgcagcaatagtttcaagcgttaaaagggtacaaatagcatgataaaggg

SEQ ID NO: 207725 - DNA, 54 bp, Artificial
  Synthetic oligonucleotide
ctatgcgcgcgatttcatcaggtcatgatgctgctacggttcatcgtctgctcg

SEQ ID NO: 207726 - DNA, 54 bp, Artificial
  Synthetic oligonucleotide
acccgtactacaacaattagtcacaacaggacatttaagacgtcgtgcccgtgt

SEQ ID NO: 207727 - DNA, 54 bp, Artificial
  Synthetic oligonucleotide
acccgtagactacaactatggtcatgctgcggtattgggtctttcccaatggac

SEQ ID NO: 207728 - DNA, 53 bp, Artificial
  Synthetic oligonucleotide
aaaacgccatagatgcgagattctccgatagtttatccaatgcacatgcccga

SEQ ID NO: 207729 - DNA, 53 bp, Artificial
  Synthetic oligonucleotide
catggctactcacagtataaatcttcaacttaccaccgaacaattagtgcatt

SEQ ID NO: 207730 - DNA, 53 bp, Artificial
  Synthetic oligonucleotide
gaagcgtttacgaatctcaggattctctaccgcagtacgccattcgtcttgat

SEQ ID NO: 207731 - DNA, 50 bp, Artificial
  Synthetic oligonucleotide
aaaactcggtacgaaaataactttgtcggcgcccttcacaacttaaagtc

SEQ ID NO: 207732 - DNA, 55 bp, Artificial
  Synthetic oligonucleotide
cactgctaccgttatcggatttactgctttactactaaccttgttaattcaacat

SEQ ID NO: 207733 - DNA, 53 bp, Artificial
  Synthetic oligonucleotide
gtaacattctccaggctaccgtgtatgacgtcgctatccagacacctttagat

SEQ ID NO: 207734 - DNA, 53 bp, Artificial
  Synthetic oligonucleotide
acgtagccgacgtcatgcggagtttgacgagcatgcgcctagcccaaatccac

SEQ ID NO: 207735 - DNA, 53 bp, Artificial
  Synthetic oligonucleotide
aaggcaatagatggaatgccacgtcccgccgaaaactgaacattgccaatggt

SEQ ID NO: 207736 - DNA, 53 bp, Artificial
  Synthetic oligonucleotide
tttctcggtcaattccccaatctcgctcaagggtcgcatcatctcttgcgtaa

SEQ ID NO: 207737 - DNA, 53 bp, Artificial
  Synthetic oligonucleotide
gtgacttcactactgctatgaggccgctctggcaaattgctgtctaaggtaaa

SEQ ID NO: 207738 - DNA, 53 bp, Artificial
  Synthetic oligonucleotide
taaggacacggctgttgtcacgccaggatgtgcaatgtgcatctcaccggact

SEQ ID NO: 207739 - DNA, 53 bp, Artificial
  Synthetic oligonucleotide
gttgaatatttggcacaggcttctttggccagacgcgctgcttcacggttaat

SEQ ID NO: 207740 - DNA, 53 bp, Artificial
  Synthetic oligonucleotide
actgtaccctctgcggtgacgatagggcgcagtttggttaacttctcaagcgt

SEQ ID NO: 207741 - DNA, 53 bp, Artificial
  Synthetic oligonucleotide
gacatatcgtatcaagctcgagtgtgcttacaccagctttaatatgcggcttg

SEQ ID NO: 207742 - DNA, 53 bp, Artificial
  Synthetic oligonucleotide
agaacgtaagttacgaggaatagctcgatccgacataacccaagttgtcatat

SEQ ID NO: 207743 - DNA, 55 bp, Artificial
  Synthetic oligonucleotide
cggtttacggcagttgcagttgtcttcggtaaagtgtgggcagagtaatacggac

SEQ ID NO: 207744 - DNA, 53 bp, Artificial
  Synthetic oligonucleotide
catcgataaagatttagggtacccaagggctgaccaagtaacgaaacaacgct

SEQ ID NO: 207745 - DNA, 55 bp, Artificial
  Synthetic oligonucleotide
cgtcaaactaacgcagtcgacgcattacgacgttatgtcgtgagcttacctatcg

SEQ ID NO: 207746 - DNA, 55 bp, Artificial
  Synthetic oligonucleotide
cacaactatccctcgtctatagttaggcccatttgggtcgccaagttagcatagc

SEQ ID NO: 207747 - DNA, 53 bp, Artificial
  Synthetic oligonucleotide
agtaaacgcgtatgtaactcttcactgacgccccaatccccacccggtctaag

SEQ ID NO: 207748 - DNA, 55 bp, Artificial
  Synthetic oligonucleotide
ctattgtcggcaagctattacgccaattaggcgataaaacccaagtcatgtgtgt

SEQ ID NO: 207749 - DNA, 55 bp, Artificial
  Synthetic oligonucleotide
gtgatatgcataataatcggaaccccggtatacagagcccgtaccgaaaatgcta

SEQ ID NO: 207750 - DNA, 55 bp, Artificial
  Synthetic oligonucleotide
aggccacgtaatgcttcaatcgcaagatccgcggggtttgattctgctaacaagg

SEQ ID NO: 207751 - DNA, 55 bp, Artificial
  Synthetic oligonucleotide
ggtaattgccgaagcatcaacacccgagatctgcactgctgagttaaccggaata

SEQ ID NO: 207752 - DNA, 55 bp, Artificial
  Synthetic oligonucleotide
gatccatggcaggcatatctaagctggcactcaccccaggattttgcatcacggg

SEQ ID NO: 207753 - DNA, 55 bp, Artificial
  Synthetic oligonucleotide
gccctaatggctggaacggaactaatgctagaatcggacctaataagaagtacgc

SEQ ID NO: 207754 - DNA, 55 bp, Artificial
  Synthetic oligonucleotide
cggagccggaaatacccgttgctaatgcacccaactctttggcatagtcacgcac

SEQ ID NO: 207755 - DNA, 55 bp, Artificial
  Synthetic oligonucleotide
gcttgcgcaaaagccgattgcacaaaacttggctgttactggtgctatcgaccag

SEQ ID NO: 207756 - DNA, 55 bp, Artificial
  Synthetic oligonucleotide
tcgaggtcagtttaattgtgtatctgtggccattattgttagctacgcttgtagc

SEQ ID NO: 207757 - DNA, 55 bp, Artificial
  Synthetic oligonucleotide
tgatgtcgttttcatctcaatgcgcggcactcgtttactaagtataaaagactgg

SEQ ID NO: 207758 - DNA, 54 bp, Artificial
  Synthetic oligonucleotide
gcctagcgctgcattcacctctgcgtgtacaaaccttagctgtgaactcactga

SEQ ID NO: 207759 - DNA, 54 bp, Artificial
  Synthetic oligonucleotide
gctaatcgacaatgtctctcaacatcctaatatcaccctaatggaacgctttaa

SEQ ID NO: 207760 - DNA, 53 bp, Artificial
  Synthetic oligonucleotide
gacattgaccaactctccggtctctaagaacgccgggatccgaccgcgtaatg

SEQ ID NO: 207761 - DNA, 52 bp, Artificial
  Synthetic oligonucleotide
aggtagccacgaataaagcatccttgtccataccggttttagccattaattc

SEQ ID NO: 207762 - DNA, 52 bp, Artificial
  Synthetic oligonucleotide
tcagttcaacaccaacgatctctggtagacgcatgtatgacgcacggcctaa

SEQ ID NO: 207763 - DNA, 50 bp, Artificial
  Synthetic oligonucleotide
ggtatacacgaaccacagcccgtccccgctttactgcacccacctaccgc

SEQ ID NO: 207764 - DNA, 50 bp, Artificial
  Synthetic oligonucleotide
gggacagcttaatggcgagtgcacgaccaatcccttctgacgcgcctgta

SEQ ID NO: 207765 - DNA, 55 bp, Artificial
  Synthetic oligonucleotide
cgctgttacctgttgttcttctgattgtttaagtaccgcataactcacgcccgtc

SEQ ID NO: 207766 - DNA, 50 bp, Artificial
  Synthetic oligonucleotide
gcttgatgccgtgtttgctccatcgcatccagtaatgaacgctgacgacg

SEQ ID NO: 207767 - DNA, 50 bp, Artificial
  Synthetic oligonucleotide
gtagcagtgagctaaccaccactgatgccgccccgccacctatcgcttgc

SEQ ID NO: 207768 - DNA, 50 bp, Artificial
  Synthetic oligonucleotide
gtgcgagcgagtaaggccgccgagcatagagcgcgaactcactctcatcg

SEQ ID NO: 207769 - DNA, 50 bp, Artificial
  Synthetic oligonucleotide
taaacgcttgcgggccaacccaagagaccagttgtccgcgtaaggcttgc

SEQ ID NO: 207770 - DNA, 50 bp, Artificial
  Synthetic oligonucleotide
tacaaccgataccgcatcccgtgcgttggggcgattatgcaggcacagta

SEQ ID NO: 207771 - DNA, 50 bp, Artificial
  Synthetic oligonucleotide
tacaggcattcggcaatagctcgccgggcttacccgcagaaccctgcata

SEQ ID NO: 207772 - DNA, 50 bp, Artificial
  Synthetic oligonucleotide
tagcacctaacgtagcggcgtcaacacccgctaagctaccgccgaaacta

SEQ ID NO: 207773 - DNA, 50 bp, Artificial
  Synthetic oligonucleotide
taggcatgggctcgtgccagggtgaactgtgtacctatcgtgctgccagt

SEQ ID NO: 207774 - DNA, 50 bp, Artificial
  Synthetic oligonucleotide
tccgccaataactcacccgcgtggctcgcaacaatcgtaaccccgaggat

SEQ ID NO: 207775 - DNA, 50 bp, Artificial
  Synthetic oligonucleotide
tgggtattcgcgactggtgtacctattgacacaacccctttcccttcttg

SEQ ID NO: 207776 - DNA, 55 bp, Artificial
  Synthetic oligonucleotide
ggttgcccataccaaatgtgtggcattcgccaaactgtcactaagttgcatccgc

SEQ ID NO: 207777 - DNA, 50 bp, Artificial
  Synthetic oligonucleotide
aaccgtgtgggcacaaatgcgcgccaatgactcagtcacctgccgctctt

SEQ ID NO: 207778 - DNA, 50 bp, Artificial
  Synthetic oligonucleotide
aactgcgctggattaagcggcggcaacccccaattctgtcctaaaggccc

SEQ ID NO: 207779 - DNA, 50 bp, Artificial
  Synthetic oligonucleotide
aagcacccagccccgaagtggtaataaccttaacgcaagccgcctgctga

SEQ ID NO: 207780 - DNA, 50 bp, Artificial
  Synthetic oligonucleotide
acccctcgcacggttaggaggcggggagtacgcatcaattactgccccgt

SEQ ID NO: 207781 - DNA, 50 bp, Artificial
  Synthetic oligonucleotide
acgaaaaagtccaaacgcgtcaccccaatcggccgttagcgccgacagga

SEQ ID NO: 207782 - DNA, 50 bp, Artificial
  Synthetic oligonucleotide
acgcgtcaccccaatcggccgttagcgccgacaggatgcctgggatacgt

SEQ ID NO: 207783 - DNA, 50 bp, Artificial
  Synthetic oligonucleotide
agcgtccgatcacataaccaccgagtccgatttccacgggctgcataaaa

SEQ ID NO: 207784 - DNA, 50 bp, Artificial
  Synthetic oligonucleotide
agggtgcagctcgttccccctgcaatgccgctaggtgccaacaatcgata

SEQ ID NO: 207785 - DNA, 50 bp, Artificial
  Synthetic oligonucleotide
cacgtatcagcagcaggcggtgtgtggaatgcccctaaaaacgcccacga

SEQ ID NO: 207786 - DNA, 50 bp, Artificial
  Synthetic oligonucleotide
ccctttactgacgcattactggcgaatagccctgccgctatgcaggccgc

SEQ ID NO: 207787 - DNA, 55 bp, Artificial
  Synthetic oligonucleotide
ccgttattagcggttgtgttgacttcagcctgtactgtgattgaagagcctaatc

SEQ ID NO: 207788 - DNA, 50 bp, Artificial
  Synthetic oligonucleotide
cgcaaggtatgcccccgacgattgcccgacaaaataacctcgacgggcca

SEQ ID NO: 207789 - DNA, 50 bp, Artificial
  Synthetic oligonucleotide
gaccattcatgatgttctgagccgcggccccgacgcacaagcgttgatcc

SEQ ID NO: 207790 - DNA, 50 bp, Artificial
  Synthetic oligonucleotide
gcgatatgccgggatcgcctgttcacccgatatagccaccagcacccgtt

SEQ ID NO: 207791 - DNA, 50 bp, Artificial
  Synthetic oligonucleotide
gcgatcgcggtaacgcactaaccaacatgtggcacggcgaatgtagcggc

SEQ ID NO: 207792 - DNA, 50 bp, Artificial
  Synthetic oligonucleotide
gctaaccaccactgatgccgccccgccacctatcgcttgcaataaccgta

SEQ ID NO: 207793 - DNA, 50 bp, Artificial
  Synthetic oligonucleotide
gctaccaccgatccgcactaacggttgggttaagcggtcacgcgtgcccg

SEQ ID NO: 207794 - DNA, 50 bp, Artificial
  Synthetic oligonucleotide
gctcaatttgctgacagggtgcagctcgttccccctgcaatgccgctagg

SEQ ID NO: 207795 - DNA, 50 bp, Artificial
  Synthetic oligonucleotide
gctctatcgcggtattacgcgcacctgaagcacccagccccgaagtggta

SEQ ID NO: 207796 - DNA, 50 bp, Artificial
  Synthetic oligonucleotide
gcttatcgtggcccgatgccaccgcccaactttgcgacttaggcgcacct

SEQ ID NO: 207797 - DNA, 55 bp, Artificial
  Synthetic oligonucleotide
ccgacgtacattcggtacacgcaggcaccgataaaggatcatgcggcgcgttatg

SEQ ID NO: 207798 - DNA, 55 bp, Artificial
  Synthetic oligonucleotide
gcgtctggtctgtatgcattccgtgaaggcacagagattgaccgtgtggtacttg

SEQ ID NO: 207799 - DNA, 55 bp, Artificial
  Synthetic oligonucleotide
ccccagttgttttatgctaatgccgagcgatatgaactcgattcaagctatatct

SEQ ID NO: 207800 - DNA, 55 bp, Artificial
  Synthetic oligonucleotide
ccaggtcggcttggtattcagccacagtgccacgctcaacgccgtaacacatgat

SEQ ID NO: 207801 - DNA, 60 bp, Artificial
  Synthetic oligonucleotide
acgcctaatcgatgcaatggagcagttaccgacctactggacagaaaagcagccgcctgg

SEQ ID NO: 207802 - DNA, 59 bp, Artificial
  Synthetic oligonucleotide
gctcatccgacgggcatcgacgttcaacacgacacggatcgaccacctctacgttgacc

SEQ ID NO: 207803 - DNA, 60 bp, Artificial
  Synthetic oligonucleotide
tggtcgcacatttcagtacgagagcccgaatctgtggtggcccgaagatagacgctggtg

SEQ ID NO: 207804 - DNA, 50 bp, Artificial
  Synthetic oligonucleotide
aaagccgagggcgcgaattccaccaagccgcagcaagaatgaccgtacgg

SEQ ID NO: 207805 - DNA, 50 bp, Artificial
  Synthetic oligonucleotide
aaagcggggcacccacgaacgtaggtcaggagaccgttgctggacggcgt

SEQ ID NO: 207806 - DNA, 50 bp, Artificial
  Synthetic oligonucleotide
ttcgggggcgacacctaacatactggtcgtcaacctaccgcgacaccgct

SEQ ID NO: 207807 - DNA, 50 bp, Artificial
  Synthetic oligonucleotide
aaagcgtccgcatagcgtctaccgtgccacagccgactcaccgcacggaa

SEQ ID NO: 207808 - DNA, 50 bp, Artificial
  Synthetic oligonucleotide
aaagggtgagcgcgtcatccacacagccgtatcagagggcaagctgtcgc

SEQ ID NO: 207809 - DNA, 50 bp, Artificial
  Synthetic oligonucleotide
tgacttcacgcttgaagttattccgggcgactgatccacgcgactaatct

SEQ ID NO: 207810 - DNA, 50 bp, Artificial
  Synthetic oligonucleotide
aaccgaccgggctgtgagtcgttgtgtccacgaagggggcacctaacggt

SEQ ID NO: 207811 - DNA, 50 bp, Artificial
  Synthetic oligonucleotide
aaccgcaggtcctccggaatatcggccttaccatgacagcgccggggatc

SEQ ID NO: 207812 - DNA, 50 bp, Artificial
  Synthetic oligonucleotide
aaccgccaaggaacggacatgaagcgacgccggcacacccattggcccca

SEQ ID NO: 207813 - DNA, 50 bp, Artificial
  Synthetic oligonucleotide
aaccgcttactttcagtgcgtgcccctggaaccgccccgtagagggcgaa

SEQ ID NO: 207814 - DNA, 60 bp, Artificial
  Synthetic oligonucleotide
ttcgagtcagtggattcacgccggcagttcctttcgctccgtagcgctctgtgagcctga

SEQ ID NO: 207815 - DNA, 50 bp, Artificial
  Synthetic oligonucleotide
aaccggaccatgaaatgcatgagcgcccaaggcgattcactgacgcgagc

SEQ ID NO: 207816 - DNA, 50 bp, Artificial
  Synthetic oligonucleotide
aaccgtagtctcggcgcccggtcagtcgttatgcggtgacttctcgcgaa

SEQ ID NO: 207817 - DNA, 50 bp, Artificial
  Synthetic oligonucleotide
aaccgtcagatcaactgcccggtactggaccggtgctcacagctgtggcc

SEQ ID NO: 207818 - DNA, 50 bp, Artificial
  Synthetic oligonucleotide
aaccgtgtcacacgtggtgtacctgggtgcctcgacgcaggtccatgtcg

SEQ ID NO: 207819 - DNA, 50 bp, Artificial
  Synthetic oligonucleotide
aacctacgcgcaccacgtgcacccgtcaagagaagccccgacgcgcattg

SEQ ID NO: 207820 - DNA, 50 bp, Artificial
  Synthetic oligonucleotide
aacctcccgggcaagcaaggaacctgcctgcatttgcgacgctacaggcc

SEQ ID NO: 207821 - DNA, 50 bp, Artificial
  Synthetic oligonucleotide
aacctcccggggcttagtttcaggaccgatggtcggctgtccccgttacg

SEQ ID NO: 207822 - DNA, 50 bp, Artificial
  Synthetic oligonucleotide
aacctcgaactgggcccgttgtgggatggccggtgacagctgcaccccgt

SEQ ID NO: 207823 - DNA, 50 bp, Artificial
  Synthetic oligonucleotide
aacgaagcacacggcagcgagggcacaccgggaccttcttgggcgggctt

SEQ ID NO: 207824 - DNA, 50 bp, Artificial
  Synthetic oligonucleotide
aacgaagccggtaggcgacggggtttccgtagcttctcttgggctgcaat

SEQ ID NO: 207825 - DNA, 60 bp, Artificial
  Synthetic oligonucleotide
ttgctcgttggtgcttcgtctggtcaggagattagatcgcgttgtttcgatctcctctga

SEQ ID NO: 207826 - DNA, 50 bp, Artificial
  Synthetic oligonucleotide
aacgaagcgccgttgtggataacggttgtcgccgtccccgcctacagtgt

SEQ ID NO: 207827 - DNA, 50 bp, Artificial
  Synthetic oligonucleotide
tctcattgatgtcccacgtgtcattgtcggttctggccatcacggtccct

SEQ ID NO: 207828 - DNA, 50 bp, Artificial
  Synthetic oligonucleotide
aacgaagctgaagtgcttgttgcggagttcatcccggatcctggcggggg

SEQ ID NO: 207829 - DNA, 50 bp, Artificial
  Synthetic oligonucleotide
tctacgcataaaacgctttatggctggagtaatcgagcgggacggctgta

SEQ ID NO: 207830 - DNA, 50 bp, Artificial
  Synthetic oligonucleotide
aacgaagtcacagcgaaatgaggtcacgtggaagagcccggacggtggcg

SEQ ID NO: 207831 - DNA, 50 bp, Artificial
  Synthetic oligonucleotide
aacgatcccccggctacgctggtagcacagaccgcccggctcgtaccgta

SEQ ID NO: 207832 - DNA, 50 bp, Artificial
  Synthetic oligonucleotide
aacgcaaagacagcgccttccccctaccgagggttactgattgccgcgca

SEQ ID NO: 207833 - DNA, 50 bp, Artificial
  Synthetic oligonucleotide
aacgcatccggatgagacagagccgctgtaacccacactgttcgggagcc

SEQ ID NO: 207834 - DNA, 50 bp, Artificial
  Synthetic oligonucleotide
aacgcccccggatcccgagacggtgcacgaaccaccttccagcacttcga

SEQ ID NO: 207835 - DNA, 50 bp, Artificial
  Synthetic oligonucleotide
aacgcctggtatgggccgcgtttagttgacctgtgcagatggatcgcgcg

SEQ ID NO: 207836 - DNA, 60 bp, Artificial
  Synthetic oligonucleotide
tgctgtaggctgtgatcggatgcgacacgtgtccagttcacgccaccattcttggagaac

SEQ ID NO: 207837 - DNA, 50 bp, Artificial
  Synthetic oligonucleotide
aacgctgaggcccgttgcacccgcgtatatttcggcgaaccgctacgaca

SEQ ID NO: 207838 - DNA, 50 bp, Artificial
  Synthetic oligonucleotide
aacagtgtggcgtctgggaggatctctcacacactgggcctgcacggtcc

SEQ ID NO: 207839 - DNA, 50 bp, Artificial
  Synthetic oligonucleotide
aacatccgcggttcagcggtcacgccgacttgcggctcatccaccattcg

SEQ ID NO: 207840 - DNA, 50 bp, Artificial
  Synthetic oligonucleotide
tgggctcgcggctgagcgaatcactcgaaagacaatccccatgacacgcc

SEQ ID NO: 207841 - DNA, 50 bp, Artificial
  Synthetic oligonucleotide
tgggccaactccacgaagggtcctcgcaactggagcagggagcggatccg

SEQ ID NO: 207842 - DNA, 50 bp, Artificial
  Synthetic oligonucleotide
aacatgctctgcttgcttggcgtgatggaggggtgccggtaaatgaccga

SEQ ID NO: 207843 - DNA, 50 bp, Artificial
  Synthetic oligonucleotide
aaccaaggtgtgtgacgtcggctgatcctcgacgttttaccttcggtcga

SEQ ID NO: 207844 - DNA, 50 bp, Artificial
  Synthetic oligonucleotide
aaccacggtccctcgggtgtgcctggcgaggggttagctagctttccgcc

SEQ ID NO: 207845 - DNA, 50 bp, Artificial
  Synthetic oligonucleotide
aaccacgttcgtgtgcagcccaacccgcgagaaggccctgtagtagtcct

SEQ ID NO: 207846 - DNA, 50 bp, Artificial
  Synthetic oligonucleotide
aaccagcctgcggtattggcatatcgtccgtggcgggtcatcacggttgc

SEQ ID NO: 207847 - DNA, 60 bp, Artificial
  Synthetic oligonucleotide
aaatgtgcgggtgtcatcggcccatgcgacacgcagcgacgcccatgcgacaccttcggg

SEQ ID NO: 207848 - DNA, 50 bp, Artificial
  Synthetic oligonucleotide
aaccatgcaagcccctccacaagaaagggcccaccatggtgcacgtccaa

SEQ ID NO: 207849 - DNA, 50 bp, Artificial
  Synthetic oligonucleotide
tggcacacgtgggctcgcggctgagcgaatcactcgaaagacaatcccca

SEQ ID NO: 207850 - DNA, 50 bp, Artificial
  Synthetic oligonucleotide
aacccattggcagttaggggcgcggtgtctgcaaagcagatccgtttccc

SEQ ID NO: 207851 - DNA, 50 bp, Artificial
  Synthetic oligonucleotide
aacccattgtccgtagatgctccgacacccgcgctgttacaccaccgcag

SEQ ID NO: 207852 - DNA, 50 bp, Artificial
  Synthetic oligonucleotide
aaccccaatgctcgcgatcagaacgacggcaaacgattacgcccccacct

SEQ ID NO: 207853 - DNA, 50 bp, Artificial
  Synthetic oligonucleotide
tgcgtttgacgggctaggttgggtgtcgtgtcgcttcccggtatcggccc

SEQ ID NO: 207854 - DNA, 50 bp, Artificial
  Synthetic oligonucleotide
aaccccaccagactcatcgattgggactcaacgggtctgcggttggccac

SEQ ID NO: 207855 - DNA, 50 bp, Artificial
  Synthetic oligonucleotide
aaccccacccaacaactaccgggtctgcccgcgttggctcagttgagtcc

SEQ ID NO: 207856 - DNA, 50 bp, Artificial
  Synthetic oligonucleotide
aaccccacccaacgagcgcaaccttgtggcgacgtcttacgctagagggg

SEQ ID NO: 207857 - DNA, 50 bp, Artificial
  Synthetic oligonucleotide
aaccccagcaacacgagcccgagggaaaggtacgtcagtgcgccgaatgg

SEQ ID NO: 207858 - DNA, 52 bp, Artificial
  Synthetic oligonucleotide
ttgtcgggattccggcccccaaggggtcattagaggccgtgacaccaacccc

SEQ ID NO: 207859 - DNA, 50 bp, Artificial
  Synthetic oligonucleotide
aacccgaactgggtccaggccggttgtgggaggacctatgacggtgaggt

SEQ ID NO: 207860 - DNA, 50 bp, Artificial
  Synthetic oligonucleotide
aacccgacaaccaacgtagattcgcccgcagcactggatcgagggaaccg

SEQ ID NO: 207861 - DNA, 50 bp, Artificial
  Synthetic oligonucleotide
aacccgagggcgagctgtgagcaatgttgcggctacggcgatcacatcgg

SEQ ID NO: 207862 - DNA, 50 bp, Artificial
  Synthetic oligonucleotide
aacccgagtgcccactgtccatggtcgaaggtccaagcagccccggggtt

SEQ ID NO: 207863 - DNA, 50 bp, Artificial
  Synthetic oligonucleotide
aacccgccgacactcactcgggtagccagcagcgattagtgggtgacgct

SEQ ID NO: 207864 - DNA, 50 bp, Artificial
  Synthetic oligonucleotide
aacccgcgcctcgtagcgtccatgcagccagctgcctctgtgcctatcag

SEQ ID NO: 207865 - DNA, 50 bp, Artificial
  Synthetic oligonucleotide
aacccggtgttagtcaacacgcttgattcggtgcgcggcatctgtgggta

SEQ ID NO: 207866 - DNA, 50 bp, Artificial
  Synthetic oligonucleotide
aggccgctttgcgggcggggttgcttgtatcgccgttcatgaacccactc

SEQ ID NO: 207867 - DNA, 50 bp, Artificial
  Synthetic oligonucleotide
aggcgcgttgtatggacagcaccccagacgaactcatcacggcactgcgc

SEQ ID NO: 207868 - DNA, 50 bp, Artificial
  Synthetic oligonucleotide
agggacgtactttgctgtcccgtgtcagccaaaaagccacccggcggcgt

SEQ ID NO: 207869 - DNA, 54 bp, Artificial
  Synthetic oligonucleotide
cggtccaaatttttaaggttcagcatcgagtcttcggaatttgggctctcaatt

SEQ ID NO: 207870 - DNA, 50 bp, Artificial
  Synthetic oligonucleotide
agggcttaccgtcaatggttgctgggccggtgattggactcgggacgaca

SEQ ID NO: 207871 - DNA, 50 bp, Artificial
  Synthetic oligonucleotide
aggggtgggaccgatgagcgtcatcgcaggtgtgtttggtgcgttgcccc

SEQ ID NO: 207872 - DNA, 50 bp, Artificial
  Synthetic oligonucleotide
agggtcagatgcaacgatgcggtgtagctgttgccccgagttggctcact

SEQ ID NO: 207873 - DNA, 50 bp, Artificial
  Synthetic oligonucleotide
aggtgacgttgagcgcttggctgtgtgccaccagggagaccggataggac

SEQ ID NO: 207874 - DNA, 50 bp, Artificial
  Synthetic oligonucleotide
aggtgaggggccatgggttcactggacggcagagtcgctttcatcacggg

SEQ ID NO: 207875 - DNA, 50 bp, Artificial
  Synthetic oligonucleotide
aggtgccgttgtcagaccatgggccgcctgctccatagtggtgaggccga

SEQ ID NO: 207876 - DNA, 50 bp, Artificial
  Synthetic oligonucleotide
aggtgcctcgtaggcagaatcggggcttcccttgtgcgacgaacatccga

SEQ ID NO: 207877 - DNA, 50 bp, Artificial
  Synthetic oligonucleotide
aggttccgagaaagccccgcatgatttcgggcgcagatgggtagagcgta

SEQ ID NO: 207878 - DNA, 50 bp, Artificial
  Synthetic oligonucleotide
gcgggttctaccagcccagcgtcgtcccaaacggctacgcttctactcat

SEQ ID NO: 207879 - DNA, 50 bp, Artificial
  Synthetic oligonucleotide
agtcggcccggtccgtcaactgctcggctcggaggtgtatgtgcatcaga

SEQ ID NO: 207880 - DNA, 59 bp, Artificial
  Synthetic oligonucleotide
tgtgtgaagttcgtgaggtccgcgtacccgagttctgccgcgatctcgcttacagacac

SEQ ID NO: 207881 - DNA, 50 bp, Artificial
  Synthetic oligonucleotide
agtcggctaacactgctgacagaaagcgttagggcggctgcgctaccctg

SEQ ID NO: 207882 - DNA, 50 bp, Artificial
  Synthetic oligonucleotide
agtcggtagtcgcgccagcatgtttcccagtcatatccggtgacgccgta

SEQ ID NO: 207883 - DNA, 50 bp, Artificial
  Synthetic oligonucleotide
agtctgcccctatcccggtggtagctcaatgtggccgggacctcaccgct

SEQ ID NO: 207884 - DNA, 50 bp, Artificial
  Synthetic oligonucleotide
agttcgcgccacatggcactaccctgacatccgcggcacccaacgactcc

SEQ ID NO: 207885 - DNA, 50 bp, Artificial
  Synthetic oligonucleotide
atacttcgtttgtccggtacccagtaccgcggcgatgttcggccctgcac

SEQ ID NO: 207886 - DNA, 50 bp, Artificial
  Synthetic oligonucleotide
atagcgctggtgcgcctttcgtcgttatcgacttaggtggtggatctacc

SEQ ID NO: 207887 - DNA, 50 bp, Artificial
  Synthetic oligonucleotide
atagcggatgacggtagtcgctggaccgaccagggtcaaatggccggtcc

SEQ ID NO: 207888 - DNA, 50 bp, Artificial
  Synthetic oligonucleotide
atcattttgtggtagttgcgctaccggcaggagtcggtccggggaccgcc

SEQ ID NO: 207889 - DNA, 50 bp, Artificial
  Synthetic oligonucleotide
atcccaggcccactgccaaacgcgttccatagcgggacagtagacgcaac

SEQ ID NO: 207890 - DNA, 50 bp, Artificial
  Synthetic oligonucleotide
atcctcatcgcataggccgctttgcgggcggggttgcttgtatcgccgtt

SEQ ID NO: 207891 - DNA, 59 bp, Artificial
  Synthetic oligonucleotide
attgatcacatatgtggcggggtcgacatggtaggccacgacatggatccgttctcccc

SEQ ID NO: 207892 - DNA, 50 bp, Artificial
  Synthetic oligonucleotide
agaccatgggccgcctgctccatagtggtgaggccgaacagaccgaatcc

SEQ ID NO: 207893 - DNA, 50 bp, Artificial
  Synthetic oligonucleotide
agaccgcgagaagttaccgcctagtaacatgccgtgcggttgcgaaccgc

SEQ ID NO: 207894 - DNA, 50 bp, Artificial
  Synthetic oligonucleotide
agagacctggtgctaccgtttcggagcgggcttgcgagagtgcttggcct

SEQ ID NO: 207895 - DNA, 50 bp, Artificial
  Synthetic oligonucleotide
agagctcgataacggggtgacgagaggacgctatggacgcggcgaccaca

SEQ ID NO: 207896 - DNA, 50 bp, Artificial
  Synthetic oligonucleotide
agatccgacccggctatcgcaaactatcggccggatcccacacgctgttc

SEQ ID NO: 207897 - DNA, 50 bp, Artificial
  Synthetic oligonucleotide
agatcggtcagtctcgcgttccttccccaggtccgaacgtgagccggtgc

SEQ ID NO: 207898 - DNA, 50 bp, Artificial
  Synthetic oligonucleotide
agatgggactccggaagcgcgttgttcagccgagcagtcaccgcgaatcg

SEQ ID NO: 207899 - DNA, 50 bp, Artificial
  Synthetic oligonucleotide
agcagactgtcgttgggttcgggacccatggtcggatagacggcgtgacg

SEQ ID NO: 207900 - DNA, 50 bp, Artificial
  Synthetic oligonucleotide
agcagagcaggcaaggttggccaacgcggacgtctatctggtggtccgcc

SEQ ID NO: 207901 - DNA, 50 bp, Artificial
  Synthetic oligonucleotide
agcagcgaggttatggcccgaagcacaccgcgtcccgcgtagacggccgc

SEQ ID NO: 207902 - DNA, 59 bp, Artificial
  Synthetic oligonucleotide
gatggggagtcggtgctcacgaggcatggggaaacccgctacaccactctgagtgtcct

SEQ ID NO: 207903 - DNA, 50 bp, Artificial
  Synthetic oligonucleotide
agcaggtggaagagataatcctggtcgaactccggtgccgctcgcagccg

SEQ ID NO: 207904 - DNA, 50 bp, Artificial
  Synthetic oligonucleotide
agccacacacccacccgcgtgaccagggcggatcccctacagcgcgtgaa

SEQ ID NO: 207905 - DNA, 50 bp, Artificial
  Synthetic oligonucleotide
agccgactagcgagggcttaccgtcaatggttgctgggccggtgattgga

SEQ ID NO: 207906 - DNA, 50 bp, Artificial
  Synthetic oligonucleotide
agccgttgtgcgcaaaagttccgacctcccccgggacaactgcgtgccgc

SEQ ID NO: 207907 - DNA, 50 bp, Artificial
  Synthetic oligonucleotide
agccttccgtacggctcgggtagcggtttcgtgaatcccgttgtgcaggg

SEQ ID NO: 207908 - DNA, 50 bp, Artificial
  Synthetic oligonucleotide
agcgatctggggctacaaccattccgaccactacgtgcgggcagtcaacg

SEQ ID NO: 207909 - DNA, 50 bp, Artificial
  Synthetic oligonucleotide
agcgctgattccgagggcgcggcatcagagggcgcggtaccagagggctt

SEQ ID NO: 207910 - DNA, 50 bp, Artificial
  Synthetic oligonucleotide
agcgcttggctgtgtgccaccagggagaccggataggacgcctccatccg

SEQ ID NO: 207911 - DNA, 50 bp, Artificial
  Synthetic oligonucleotide
agcggcagacgggaccgccacccgaccccagatcgacgcagcgttggcgt

SEQ ID NO: 207912 - DNA, 50 bp, Artificial
  Synthetic oligonucleotide
agcgggtactgactgctgtcgggatacggcgggctggggacgagtccttc

SEQ ID NO: 207913 - DNA, 58 bp, Artificial
  Synthetic oligonucleotide
aggctccggatcaggagactcgcagccaccttagtggtgtgcgcgttaacggttccca

SEQ ID NO: 207914 - DNA, 54 bp, Artificial
  Synthetic oligonucleotide
aactgccgccacgccacacgacggaaaccagctctagggccggtacttcccgtg

SEQ ID NO: 207915 - DNA, 50 bp, Artificial
  Synthetic oligonucleotide
agctgccattcggtattcccggtctcccgcgctccgcgatccatacggac

SEQ ID NO: 207916 - DNA, 50 bp, Artificial
  Synthetic oligonucleotide
agctgtactgctttatgcctgtgtgcctatactgccgtcatgatttacag

SEQ ID NO: 207917 - DNA, 50 bp, Artificial
  Synthetic oligonucleotide
aggccaatgggcccgagtgtaagcgttccggtctcgaggtaggccccctc

SEQ ID NO: 207918 - DNA, 50 bp, Artificial
  Synthetic oligonucleotide
gcacccggggatagccaccgcattaggtatccatcccggtgagcaacgaa

SEQ ID NO: 207919 - DNA, 50 bp, Artificial
  Synthetic oligonucleotide
cgacgggcggagtcttcggaagcttcggcttcctaagtcggggcgacatg

SEQ ID NO: 207920 - DNA, 50 bp, Artificial
  Synthetic oligonucleotide
cgcaccacccctcgtgttcctcaggggatcgaacgcgcacgtcactgaac

SEQ ID NO: 207921 - DNA, 50 bp, Artificial
  Synthetic oligonucleotide
gcaacgcacacccaggagagatagcggccacaaaccagggaaatctagaa

SEQ ID NO: 207922 - DNA, 50 bp, Artificial
  Synthetic oligonucleotide
cgcgtcgaccgagccctggagtgagcctgaatgcaaccgaagggaaagaa

SEQ ID NO: 207923 - DNA, 50 bp, Artificial
  Synthetic oligonucleotide
cggaggaaccacgagatcgagcgttctcgcacgctacctctgtgggctcg

SEQ ID NO: 207924 - DNA, 50 bp, Artificial
  Synthetic oligonucleotide
cggcgtaactgtgcacaccacgaccggtaacaccgcctctttagcgtcga

SEQ ID NO: 207925 - DNA, 57 bp, Artificial
  Synthetic oligonucleotide
agtccgcaccgttcacagcggtgggagtgttaccagagtgggcttcgagcctcttat

SEQ ID NO: 207926 - DNA, 50 bp, Artificial
  Synthetic oligonucleotide
cgggggagcttgacgaccgcagatccctgagtcggactgtgaacatgcgt

SEQ ID NO: 207927 - DNA, 50 bp, Artificial
  Synthetic oligonucleotide
cgttgggaggtgaccatcgattcgtggccgagaagtttcatgagtgcgta

SEQ ID NO: 207928 - DNA, 50 bp, Artificial
  Synthetic oligonucleotide
ctcaacttcacaacctaagatgctaccagggtcgtacctaggtagtaata

SEQ ID NO: 207929 - DNA, 50 bp, Artificial
  Synthetic oligonucleotide
ctcatcgcaggtccagcccccttacggcctccagtgtggccccgttacgc

SEQ ID NO: 207930 - DNA, 50 bp, Artificial
  Synthetic oligonucleotide
ctcgtgaacgtcccgcttctgttggttgatacctacccacatcgaatcac

SEQ ID NO: 207931 - DNA, 50 bp, Artificial
  Synthetic oligonucleotide
ctgggaggcgttttgtcgattgccccgtcagccgaaaggcgccgaacatg

SEQ ID NO: 207932 - DNA, 50 bp, Artificial
  Synthetic oligonucleotide
cttggccgtgaggaggtgagggcgagatgagtcccggcgatagtccctat

SEQ ID NO: 207933 - DNA, 50 bp, Artificial
  Synthetic oligonucleotide
gaaggctggcgcacgcaaccgtctaccgcaccccgccctcaactggcttc

SEQ ID NO: 207934 - DNA, 50 bp, Artificial
  Synthetic oligonucleotide
gacacgactgcgtctcgtgcccagccctgtacgtcgagcctgccatgacg

SEQ ID NO: 207935 - DNA, 50 bp, Artificial
  Synthetic oligonucleotide
gaggcatggactcgtatcccgacaagaccggaactcagccgaggccgtgt

SEQ ID NO: 207936 - DNA, 55 bp, Artificial
  Synthetic oligonucleotide
cgcccgccgttagcggtttgtctaagtccggccattcactgagagtggtttggac

SEQ ID NO: 207937 - DNA, 50 bp, Artificial
  Synthetic oligonucleotide
gacatctcccgcagaggtgcctacggaccgggggaagcgagaacctcacg

SEQ ID NO: 207938 - DNA, 50 bp, Artificial
  Synthetic oligonucleotide
gagcatgctcgcacggctgttaatggccgaacccgctgtcagtcgatggt

SEQ ID NO: 207939 - DNA, 50 bp, Artificial
  Synthetic oligonucleotide
gagcccctcgttttgcggcgccaactcacgcgacagaacggaggtctggc

SEQ ID NO: 207940 - DNA, 50 bp, Artificial
  Synthetic oligonucleotide
atcgacccccgacccctacagtggcgcagcaatccgcctggcacacaaga

SEQ ID NO: 207941 - DNA, 50 bp, Artificial
  Synthetic oligonucleotide
atcgggctccttccggtccgcgcacgaggtatgccatcgacgcagttgcc

SEQ ID NO: 207942 - DNA, 50 bp, Artificial
  Synthetic oligonucleotide
attctctgtcaccgccgagcacccccttctcgctattccccgcgacgagg

SEQ ID NO: 207943 - DNA, 50 bp, Artificial
  Synthetic oligonucleotide
gcgagccctaacgagaccgggggtagcgatattcaccccgaggggacatg

SEQ ID NO: 207944 - DNA, 50 bp, Artificial
  Synthetic oligonucleotide
attgtgccccgcgatgctgcgagagtgtctggaatcgacatcccgagcag

SEQ ID NO: 207945 - DNA, 50 bp, Artificial
  Synthetic oligonucleotide
atttgcctggcgtagcgcatccttccaccgtgtacctgcccgtaggcctg

SEQ ID NO: 207946 - DNA, 50 bp, Artificial
  Synthetic oligonucleotide
cacaataggggccatgacaagcgcgtatgacctccgcaccgcagcgggac

SEQ ID NO: 207947 - DNA, 59 bp, Artificial
  Synthetic oligonucleotide
cgcccaagactggcagatctaacgaaggcactcccagtaggtggtgcgacagtcagcaa

SEQ ID NO: 207948 - DNA, 50 bp, Artificial
  Synthetic oligonucleotide
caccaaccggtgcgcctctcgattcttgcgatactcgcaggcggaactga

SEQ ID NO: 207949 - DNA, 50 bp, Artificial
  Synthetic oligonucleotide
cacgcgtggagttcaccatccgcatgtccacccggggctcacgaacctcc

SEQ ID NO: 207950 - DNA, 50 bp, Artificial
  Synthetic oligonucleotide
cacgctcgccaacactagcctgatacgggaagacagaacgggcgccgacc

SEQ ID NO: 207951 - DNA, 50 bp, Artificial
  Synthetic oligonucleotide
cagcctcgctcgctaatctggccgtgctcccgacatctgcggggcagatc

SEQ ID NO: 207952 - DNA, 50 bp, Artificial
  Synthetic oligonucleotide
cagcgggtgacgctactcgctaaggtgaggccccatgagcaagtggttgg

SEQ ID NO: 207953 - DNA, 50 bp, Artificial
  Synthetic oligonucleotide
cagtccggccttcatagcccgcacataggttcgacacacaggggtgccca

SEQ ID NO: 207954 - DNA, 50 bp, Artificial
  Synthetic oligonucleotide
catacccgcgaaccccagtacccggacagcaactaccgggctgacttccg

SEQ ID NO: 207955 - DNA, 50 bp, Artificial
  Synthetic oligonucleotide
ccaatgataccagcggagtatatctccaacataatatatgaaggtccggg

SEQ ID NO: 207956 - DNA, 50 bp, Artificial
  Synthetic oligonucleotide
ccagagccggtatgtggtttgcggtgggttcccgcgacccgatcgtgata

SEQ ID NO: 207957 - DNA, 50 bp, Artificial
  Synthetic oligonucleotide
gccaccggcccaggcattcgcgcagtcgccctcgagtacgaacgcctatt

SEQ ID NO: 207958 - DNA, 55 bp, Artificial
  Synthetic oligonucleotide
gcggcgtgtcagaacgggtcctcgcttggcttgtggacggcgatttacccccggc

SEQ ID NO: 207959 - DNA, 50 bp, Artificial
  Synthetic oligonucleotide
cccatcggcggtccgtagttgagggacggctgcccgataagttgggaccg

SEQ ID NO: 207960 - DNA, 50 bp, Artificial
  Synthetic oligonucleotide
cccctcgagcgggcgcactgcgacgacctctactggatgtattccgttgc

SEQ ID NO: 207961 - DNA, 50 bp, Artificial
  Synthetic oligonucleotide
ccctgacccgtgacccgaagtcccaggtagggcaccctaacttctagcct

SEQ ID NO: 207962 - DNA, 50 bp, Artificial
  Synthetic oligonucleotide
ccgcagcaatacgtctgccgatatgccaaacaggaggcgcagtggccagt

SEQ ID NO: 207963 - DNA, 50 bp, Artificial
  Synthetic oligonucleotide
acacgttctgtacgcaggcgtctcgatctcacccggcccgttcctctcgg

SEQ ID NO: 207964 - DNA, 50 bp, Artificial
  Synthetic oligonucleotide
acagagatgacagttagctgcgagcggcggggtatggccattcggacccc

SEQ ID NO: 207965 - DNA, 50 bp, Artificial
  Synthetic oligonucleotide
acagccgcccttgggacacacgatcggccggtgaacgacggaattcgaac

SEQ ID NO: 207966 - DNA, 50 bp, Artificial
  Synthetic oligonucleotide
acagccggtaggacgcgcagaccagacgcagatgacggaactgccaagcg

SEQ ID NO: 207967 - DNA, 50 bp, Artificial
  Synthetic oligonucleotide
acagccgtgttggcagggccgcgtaggggcggagtcaaaaacgttaccgg

SEQ ID NO: 207968 - DNA, 50 bp, Artificial
  Synthetic oligonucleotide
acagcgtgcatgttcgagtgacgtacgggaacattgggacccctgcgtgc

SEQ ID NO: 207969 - DNA, 54 bp, Artificial
  Synthetic oligonucleotide
ccgggtcagtggacggcagtacacgttttcgcccgaatggacgaatccgcgaac

SEQ ID NO: 207970 - DNA, 50 bp, Artificial
  Synthetic oligonucleotide
acagtcaggtgcggccctcacgccaaggaggcgacacaaccaggcgggtt

SEQ ID NO: 207971 - DNA, 50 bp, Artificial
  Synthetic oligonucleotide
acatccggctgtcgccccagcacagccccacgtgttcgggctcgtagaga

SEQ ID NO: 207972 - DNA, 50 bp, Artificial
  Synthetic oligonucleotide
acatcggtcgtcccagtgcctactcgggcgctgtgtcgagagtctgcaac

SEQ ID NO: 207973 - DNA, 50 bp, Artificial
  Synthetic oligonucleotide
ggttgggtgtcgtgtcgcttcccggtatcggcccgttgcccctctacggg

SEQ ID NO: 207974 - DNA, 50 bp, Artificial
  Synthetic oligonucleotide
acatgagtgggcctccgggagtgtcttgccgatgagatcggatcgacccc

SEQ ID NO: 207975 - DNA, 50 bp, Artificial
  Synthetic oligonucleotide
acatggggccgctgaggcgacgtctttggcgtaggtctgttacacgggtt

SEQ ID NO: 207976 - DNA, 50 bp, Artificial
  Synthetic oligonucleotide
acattccgtcgcgaacagggcaagccacgcggtgaagtcttgatcgtcga

SEQ ID NO: 207977 - DNA, 50 bp, Artificial
  Synthetic oligonucleotide
accacaccgtgcgattgtgggatgccgacacgggacaacctgtcggtgct

SEQ ID NO: 207978 - DNA, 50 bp, Artificial
  Synthetic oligonucleotide
accaccgagtgcagcaactactttcgtgcgcccaacgggcgtgtggtcac

SEQ ID NO: 207979 - DNA, 50 bp, Artificial
  Synthetic oligonucleotide
accagaccgttctcgcaacgcagatagcccacgcggcaagggatctgggc

SEQ ID NO: 207980 - DNA, 59 bp, Artificial
  Synthetic oligonucleotide
gcgattacggcatcgcggtctgtggtgtcgcggccattgagccggtcgacgtatctacc

SEQ ID NO: 207981 - DNA, 50 bp, Artificial
  Synthetic oligonucleotide
accagctcgcacagagcgcccacaccgacctccgtagtcgccttctcaag

SEQ ID NO: 207982 - DNA, 50 bp, Artificial
  Synthetic oligonucleotide
accagggcgagtatggagtttggcgtttcccctccgctaccacggggcgg

SEQ ID NO: 207983 - DNA, 50 bp, Artificial
  Synthetic oligonucleotide
accagggtcaagcgctaatcggcccgttccgttggcgttcgccattgtgt

SEQ ID NO: 207984 - DNA, 50 bp, Artificial
  Synthetic oligonucleotide
accagggttcgccaccacggaccaatctcgttgcgtcgtatgcgcacagc

SEQ ID NO: 207985 - DNA, 50 bp, Artificial
  Synthetic oligonucleotide
accagtccgcgtaggttatcggcgctcgcgctccaagtagtggctgacca

SEQ ID NO: 207986 - DNA, 50 bp, Artificial
  Synthetic oligonucleotide
accagtggcacgtgcacaccgaccagtcccaagccggacagcgtttggac

SEQ ID NO: 207987 - DNA, 50 bp, Artificial
  Synthetic oligonucleotide
accagtgtgccattgtggccggagatcactgagagcccccgtcgctgcga

SEQ ID NO: 207988 - DNA, 50 bp, Artificial
  Synthetic oligonucleotide
aatgcggtcggggctagtgtttccgccatgcaacggctgtctggggtaga

SEQ ID NO: 207989 - DNA, 50 bp, Artificial
  Synthetic oligonucleotide
aatggccccacacgatcgatggcgacggatacgtgagcgtcttccaaccg

SEQ ID NO: 207990 - DNA, 50 bp, Artificial
  Synthetic oligonucleotide
aatgtccctgcggcattcgagtctggtcttccccgtctgactcacgcaga

SEQ ID NO: 207991 - DNA, 58 bp, Artificial
  Synthetic oligonucleotide
tgagcacacatccgaaaccgcccatcccgcaagcgaaagtggacagaaatgacccgac

SEQ ID NO: 207992 - DNA, 50 bp, Artificial
  Synthetic oligonucleotide
aatgtggagaacggtccgagccgagtggccccgaccttgcagccgattcg

SEQ ID NO: 207993 - DNA, 50 bp, Artificial
  Synthetic oligonucleotide
aattacgccgtgccgcgggttcgctgaccgggattggcagagttgcctcg

SEQ ID NO: 207994 - DNA, 50 bp, Artificial
  Synthetic oligonucleotide
aattagggtatccggtcgggcgggggttagccgtgtcaagcgtgcatgga

SEQ ID NO: 207995 - DNA, 50 bp, Artificial
  Synthetic oligonucleotide
aattcacatcgggatcccagccagcgatcgtaccgcttactagggcgccg

SEQ ID NO: 207996 - DNA, 50 bp, Artificial
  Synthetic oligonucleotide
aattcgctgagaacgccaacgaacccagtaccgagctggtccaacgcccg

SEQ ID NO: 207997 - DNA, 50 bp, Artificial
  Synthetic oligonucleotide
acaacaagccttctgtcactcgtcccgccacgtgcaaggggctgtcgcga

SEQ ID NO: 207998 - DNA, 50 bp, Artificial
  Synthetic oligonucleotide
gtcgaattgtgggtcttcagaaagtcattcgcggattcggagcccttgcc

SEQ ID NO: 207999 - DNA, 50 bp, Artificial
  Synthetic oligonucleotide
acaagaccgcgccctagtggtgctgcgtaaaagcgggtagccgccctatg

SEQ ID NO: 208000 - DNA, 50 bp, Artificial
  Synthetic oligonucleotide
acaagttggttaatggccgcactgtgttcggtgtgcgtggacgccgcgaa

SEQ ID NO: 208001 - DNA, 50 bp, Artificial
  Synthetic oligonucleotide
acaataccactgccccgcccagcacgtaaagagagcgcgtacccgcacgc

SEQ ID NO: 208002 - DNA, 58 bp, Artificial
  Synthetic oligonucleotide
gctgtcgtggattccggccggtgtttacctgccgtacggggtgactgttgcacatctg

SEQ ID NO: 208003 - DNA, 50 bp, Artificial
  Synthetic oligonucleotide
acacaacgtggccgtcgggaagtggggcgagggagggataggcacgtgtg

SEQ ID NO: 208004 - DNA, 50 bp, Artificial
  Synthetic oligonucleotide
acacacatgggcagagcaccatacgtagcaataggcacagcccgctggga

SEQ ID NO: 208005 - DNA, 50 bp, Artificial
  Synthetic oligonucleotide
acacacctgcctcaagcggcccgtcgtacagagcgggaagcatatcggac

SEQ ID NO: 208006 - DNA, 50 bp, Artificial
  Synthetic oligonucleotide
acaccacggcgggtccggtagattccaccgacacggcaacggttatggtc

SEQ ID NO: 208007 - DNA, 50 bp, Artificial
  Synthetic oligonucleotide
acaccctcggttgtggtggtgtaggtctccacccgatagtggccccgttc

SEQ ID NO: 208008 - DNA, 50 bp, Artificial
  Synthetic oligonucleotide
acaccggactcttgacgcagagacgcgccgtctagcctcccgtccacggc

SEQ ID NO: 208009 - DNA, 50 bp, Artificial
  Synthetic oligonucleotide
acacctcgcgaaacgccgaagccaggtagtacgacagcgtccccgggtag

SEQ ID NO: 208010 - DNA, 50 bp, Artificial
  Synthetic oligonucleotide
acacctgagccacctcccgccacccggttcggattccgagtcgcttcgcc

SEQ ID NO: 208011 - DNA, 50 bp, Artificial
  Synthetic oligonucleotide
gtcaggggttggtgtcacggcctctaatgaccccttgggggccggaatcc

SEQ ID NO: 208012 - DNA, 50 bp, Artificial
  Synthetic oligonucleotide
acacgcagtcccccttgtcgtaccaccggagtttccgtagccgaaccgcg

SEQ ID NO: 208013 - DNA, 53 bp, Artificial
  Synthetic oligonucleotide
ttatccgggtcgggggccttacggtagcgagccatcgtttgggagtggttgac

SEQ ID NO: 208014 - DNA, 50 bp, Artificial
  Synthetic oligonucleotide
acacggtagcggtggacttcggattgagaaccggcccggaaacgcagcat

SEQ ID NO: 208015 - DNA, 50 bp, Artificial
  Synthetic oligonucleotide
acgagcggtggagcctcagaccagatgccctgggaggggtttcggtagct

SEQ ID NO: 208016 - DNA, 50 bp, Artificial
  Synthetic oligonucleotide
acgcatcaatgaggagcgtctggcccaagaacaccagaaacgtgcggccg

SEQ ID NO: 208017 - DNA, 50 bp, Artificial
  Synthetic oligonucleotide
acgcatggctcgcgtcctctctgctcctcgggtgcgttccatctaacccg

SEQ ID NO: 208018 - DNA, 50 bp, Artificial
  Synthetic oligonucleotide
acgcatggggagagcccggaccccacactgatgagctagccgatctcgac

SEQ ID NO: 208019 - DNA, 50 bp, Artificial
  Synthetic oligonucleotide
acgccatgcactgtagcggcagccgtgggcaccaaccaccgacaggccga

SEQ ID NO: 208020 - DNA, 50 bp, Artificial
  Synthetic oligonucleotide
acgccgcataacttacccgcgcccctatggatccaacgccgaacagtgga

SEQ ID NO: 208021 - DNA, 50 bp, Artificial
  Synthetic oligonucleotide
acgccgtatgctgcccgtccccgctagagtcaccgtgtgcctcaaatgga

SEQ ID NO: 208022 - DNA, 50 bp, Artificial
  Synthetic oligonucleotide
acgctcaggcctagagagaacgcggccccgcttagcgagcagatggctac

SEQ ID NO: 208023 - DNA, 50 bp, Artificial
  Synthetic oligonucleotide
acggagatgcatccgtgttgcgtcaacgggtacagccccagcgacgtgtg

SEQ ID NO: 208024 - DNA, 60 bp, Artificial
  Synthetic oligonucleotide
gctagctgggctttcggctgttctgcgtgtcttagcgatcgtcaaggcgtgatcgcgata

SEQ ID NO: 208025 - DNA, 58 bp, Artificial
  Synthetic oligonucleotide
ggcaatatgcacagcggagcgacctcggcacataagcgcgtacgtactggtgcgcaag

SEQ ID NO: 208026 - DNA, 50 bp, Artificial
  Synthetic oligonucleotide
acggcgatggtacggacgtgcgcgattcccgggcggatggggaagctcca

SEQ ID NO: 208027 - DNA, 50 bp, Artificial
  Synthetic oligonucleotide
acggctgttcgttgcgcattggaccagtaccggacgcctcaacgcacaca

SEQ ID NO: 208028 - DNA, 50 bp, Artificial
  Synthetic oligonucleotide
acgggaggaatgtgtcacgcagtgtgacggtactcgctacgctgtgcccc

SEQ ID NO: 208029 - DNA, 50 bp, Artificial
  Synthetic oligonucleotide
acgggatcgaacatacccgcgaaccccagtacccggacagcaactaccgg

SEQ ID NO: 208030 - DNA, 50 bp, Artificial
  Synthetic oligonucleotide
acgggccaccgcggggtttctcgcatggctgattaaaaccggtgccactc

SEQ ID NO: 208031 - DNA, 50 bp, Artificial
  Synthetic oligonucleotide
acggtgcacatgacggaaacctggggtacccagtgagccctgcggtgacc

SEQ ID NO: 208032 - DNA, 50 bp, Artificial
  Synthetic oligonucleotide
acggtggttcgtgctaggcccgaggcggtagccgtttccaggacatgtag

SEQ ID NO: 208033 - DNA, 50 bp, Artificial
  Synthetic oligonucleotide
acgtcgaagggccaatgaaggacaacccgtaaactgatcgttacaaggtt

SEQ ID NO: 208034 - DNA, 50 bp, Artificial
  Synthetic oligonucleotide
actctgcaaggtgacgttgagcgcttggctgtgtgccaccagggagaccg

SEQ ID NO: 208035 - DNA, 50 bp, Artificial
  Synthetic oligonucleotide
actgacgtttgtcgggccgaggtttcacacgacgaaggtgcgacgcacgc

SEQ ID NO: 208036 - DNA, 58 bp, Artificial
  Synthetic oligonucleotide
cgggcatgcgcctcagatgatgtcgccgagtgcttcatcgctggccgcggagaagttc

SEQ ID NO: 208037 - DNA, 50 bp, Artificial
  Synthetic oligonucleotide
actggcggccagctgacttttacggcacgttgccagcacaattgccatcg

SEQ ID NO: 208038 - DNA, 50 bp, Artificial
  Synthetic oligonucleotide
actgggcgtgtggcggagttctgcacacctggagacctagcgtgtgacgc

SEQ ID NO: 208039 - DNA, 50 bp, Artificial
  Synthetic oligonucleotide
actgtagtacacgtcggcggcccgacagtcagcagccccgcgcaagcgtg

SEQ ID NO: 208040 - DNA, 50 bp, Artificial
  Synthetic oligonucleotide
agaaacgcggctatgacgtactgccccaaacgcggtggatcccgttggtg

SEQ ID NO: 208041 - DNA, 50 bp, Artificial
  Synthetic oligonucleotide
ggtgatccgtcaagggtactacagtggcgcttggcaagacgggtggggcc

SEQ ID NO: 208042 - DNA, 50 bp, Artificial
  Synthetic oligonucleotide
accatcgcaaacccttcccagcggagccgtcggcagggcaggctatctct

SEQ ID NO: 208043 - DNA, 50 bp, Artificial
  Synthetic oligonucleotide
acccacccgggtcacgcagtgcgcctcaccaccatgcgaagtcagcgttc

SEQ ID NO: 208044 - DNA, 50 bp, Artificial
  Synthetic oligonucleotide
acccatgctaggtgtgcccaccgacaagtccccgggcgagattggccaca

SEQ ID NO: 208045 - DNA, 50 bp, Artificial
  Synthetic oligonucleotide
accccactcggcccgccactccactcttcggttggggtcaaactcgtccg

SEQ ID NO: 208046 - DNA, 50 bp, Artificial
  Synthetic oligonucleotide
accccgtgggcacgctcgtagcgaaaactgctcccgccgaacccctcgaa

SEQ ID NO: 208047 - DNA, 58 bp, Artificial
  Synthetic oligonucleotide
actcattgttgttgtctcgtttctaaagatctgagaccgatcagatcctgtctcgaac

SEQ ID NO: 208048 - DNA, 50 bp, Artificial
  Synthetic oligonucleotide
acccgcgagaaggccctgtagtagtccttggtgcagggcgcagcccactt

SEQ ID NO: 208049 - DNA, 50 bp, Artificial
  Synthetic oligonucleotide
acccgcttcggggcaaccctgccagcttaatacgattctggcggcttggt

SEQ ID NO: 208050 - DNA, 50 bp, Artificial
  Synthetic oligonucleotide
acccggcgctgaacaacacagcgacgcaaagcacaagtgtcagaacgcga

SEQ ID NO: 208051 - DNA, 50 bp, Artificial
  Synthetic oligonucleotide
acccggtcggctctacacttaccgcagccacggaatccacgtatgcgcca

SEQ ID NO: 208052 - DNA, 50 bp, Artificial
  Synthetic oligonucleotide
acccggttcggggctggtatcgagttggctcgggcctcaactgcaaattg

SEQ ID NO: 208053 - DNA, 50 bp, Artificial
  Synthetic oligonucleotide
acccgtccacctttttgacgtgccgttacaggtttcgggccactcctggc

SEQ ID NO: 208054 - DNA, 50 bp, Artificial
  Synthetic oligonucleotide
acccgttccgagcaggaaggaactccgatggcgaccaccactgactacga

SEQ ID NO: 208055 - DNA, 50 bp, Artificial
  Synthetic oligonucleotide
acccgtttcacccgtattcgccaacctgggatggctgtccgccgaattga

SEQ ID NO: 208056 - DNA, 50 bp, Artificial
  Synthetic oligonucleotide
accctctcgaagttccgccgcagtagattgctggccgtgggtggtatccg

SEQ ID NO: 208057 - DNA, 50 bp, Artificial
  Synthetic oligonucleotide
accgaacttcgtcagggcgcgaggttctgtgactcgtgcggtacggcaat

SEQ ID NO: 208058 - DNA, 58 bp, Artificial
  Synthetic oligonucleotide
tgccgatcacgccaccgggcggaactgccggccttctaacgagcgcctagctgccgac

SEQ ID NO: 208059 - DNA, 50 bp, Artificial
  Synthetic oligonucleotide
accgaagcttgacaataccactgccccgcccagcacgtaaagagagcgcg

SEQ ID NO: 208060 - DNA, 50 bp, Artificial
  Synthetic oligonucleotide
accgagcacgtgcaattcgtgcccgatcgcctcataccactggtccagca

SEQ ID NO: 208061 - DNA, 50 bp, Artificial
  Synthetic oligonucleotide
accgcagatcggaattgggcacgtccagtggggcgtaggcctccaactct

SEQ ID NO: 208062 - DNA, 50 bp, Artificial
  Synthetic oligonucleotide
accgctaggtacggctcgcggcagaaccatcagtgcggcaacgagaaagc

SEQ ID NO: 208063 - DNA, 50 bp, Artificial
  Synthetic oligonucleotide
accgctgaggcagcgtttatcctggtcgcacacggtcgtcaagccgggtg

SEQ ID NO: 208064 - DNA, 50 bp, Artificial
  Synthetic oligonucleotide
accggacccaagacgggattgcgccgcttatcgacctgtttcggccccat

SEQ ID NO: 208065 - DNA, 50 bp, Artificial
  Synthetic oligonucleotide
acctcccgtcggtagttggcccgatggatcggagttcatggtgcatcgcc

SEQ ID NO: 208066 - DNA, 50 bp, Artificial
  Synthetic oligonucleotide
acctgcattggggcccgatgaaatccatggtctagcccaacgcacggctg

SEQ ID NO: 208067 - DNA, 50 bp, Artificial
  Synthetic oligonucleotide
acgagccagaccgacacgaatcagggtgcggcagtgggccataccgacgg

SEQ ID NO: 208068 - DNA, 58 bp, Artificial
  Synthetic oligonucleotide
cgcgtcgagtgggctaaacatcgttgcgagttcgggtcagagtgtctttcgagtggct

SEQ ID NO: 208069 - DNA, 58 bp, Artificial
  Synthetic oligonucleotide
gcactcatccgaagcggaaggtgtcccacacgacgcaactggtacacacacccgaatg

SEQ ID NO: 208070 - DNA, 56 bp, Artificial
  Synthetic oligonucleotide
tcgccacaaccggcccgtatgcctgggtacgtcacccgcaatacgacggcttccta

SEQ ID NO: 208071 - DNA, 55 bp, Artificial
  Synthetic oligonucleotide
gtatcagccgacaccgacaactttcggcacgcgtttttgggacacgaaacgtcca

SEQ ID NO: 208072 - DNA, 57 bp, Artificial
  Synthetic oligonucleotide
cacggttggctatgaggctgcggtgagtccccgcaaaggtatgtgcagtcatcgctg

SEQ ID NO: 208073 - DNA, 57 bp, Artificial
  Synthetic oligonucleotide
gtaccgacacgcgcacatcccgtccctcctttcacacggctaccgttcgagtggtga

SEQ ID NO: 208074 - DNA, 58 bp, Artificial
  Synthetic oligonucleotide
agtaccccaatatgcgaggttgggtttcggggtcatccatgtcttgagcacagtgtgg

SEQ ID NO: 208075 - DNA, 57 bp, Artificial
  Synthetic oligonucleotide
gcatgcgaaaccgcaagttcgtgcgccctgtagcccctatccgccaatcgattagcg

SEQ ID NO: 208076 - DNA, 53 bp, Artificial
  Synthetic oligonucleotide
cacccgcgaagcggtcccgttagggatcaaccctccggtgagaaagtgattac

SEQ ID NO: 208077 - DNA, 57 bp, Artificial
  Synthetic oligonucleotide
gctaacccgtgtgcgcggcatgccacaagtgtggcacgcaaggcggacagctaggta

SEQ ID NO: 208078 - DNA, 56 bp, Artificial
  Synthetic oligonucleotide
agccgccgatacggctctaccccggtgcgcttacaccagagcacgacgggttgaac

SEQ ID NO: 208079 - DNA, 57 bp, Artificial
  Synthetic oligonucleotide
gactgcgccgaaggttattgcgccgtctgtgcttcggaggagcccttggcgtgtggt

SEQ ID NO: 208080 - DNA, 57 bp, Artificial
  Synthetic oligonucleotide
tcaccgcaccccacacccgctatgggttacttctgcgggcgtgtctgctcactcggc

SEQ ID NO: 208081 - DNA, 57 bp, Artificial
  Synthetic oligonucleotide
gcaggaacgactcctcgcgagatgtcagcagttgacgcgatgcgatttcatggacga

SEQ ID NO: 208082 - DNA, 56 bp, Artificial
  Synthetic oligonucleotide
gatactcggacttccttgctgggggtgcgtgtctcggaatcgtaagggtccgaatc

SEQ ID NO: 208083 - DNA, 57 bp, Artificial
  Synthetic oligonucleotide
aactagacaccacgcgccaaaggacagatacggacgacacgggaagatgtgcgctga

SEQ ID NO: 208084 - DNA, 54 bp, Artificial
  Synthetic oligonucleotide
atgtgacaccaggatcgtccgcggaaaaccggccgaaaacgacatattggggaa

SEQ ID NO: 208085 - DNA, 60 bp, Artificial
  Synthetic oligonucleotide
agtacgcgaggcaacttcaccgaatccctcctcaacttgcctgtcctgctgacaccatac

SEQ ID NO: 208086 - DNA, 57 bp, Artificial
  Synthetic oligonucleotide
ccacgttgcacgggcatgcgcctcagatgatgtcgccgagtgcttcatcgcttgccg

SEQ ID NO: 208087 - DNA, 57 bp, Artificial
  Synthetic oligonucleotide
tggagtgtgctctccactcttcggcggttgccaggttcacaggtgcggccctctctt

SEQ ID NO: 208088 - DNA, 57 bp, Artificial
  Synthetic oligonucleotide
agtagcgaagcattcgggagcgatagcgcatcccgccatggagtgggaagctatctc

SEQ ID NO: 208089 - DNA, 57 bp, Artificial
  Synthetic oligonucleotide
tcctcgcgagatgtcagcagttgacgcgatgcgatttcatggacgaccgttcggttc

SEQ ID NO: 208090 - DNA, 56 bp, Artificial
  Synthetic oligonucleotide
tagtggacccccaggtgcgaccgcactacacgctcgatgagctattggggcagtgc

SEQ ID NO: 208091 - DNA, 56 bp, Artificial
  Synthetic oligonucleotide
gtgaagatcagctgtgaaccggtacacgaaataccgcttgactcgtagatcgcgta

SEQ ID NO: 208092 - DNA, 56 bp, Artificial
  Synthetic oligonucleotide
gcggtgttgacgattgcgaagttgtcgcggtggtcgatcaactattacaacgacac

SEQ ID NO: 208093 - DNA, 55 bp, Artificial
  Synthetic oligonucleotide
taagccagaatttttgctcgccccaactcccatcgccccccaagaaccgtagaga

SEQ ID NO: 208094 - DNA, 56 bp, Artificial
  Synthetic oligonucleotide
aacccactgcgggatcagaacccactgcgggatcagaacccactgcgggatcagaa

SEQ ID NO: 208095 - DNA, 55 bp, Artificial
  Synthetic oligonucleotide
ccccgaccttcgtgccaatagcgacacgtaaaccgtcgagggtggacctgaatca

SEQ ID NO: 208096 - DNA, 57 bp, Artificial
  Synthetic oligonucleotide
gcgggcattcaaccggcgaatccgcgacaacgggtcggttggcatcttccacgagac

SEQ ID NO: 208097 - DNA, 55 bp, Artificial
  Synthetic oligonucleotide
ccccggagtgggcatagccacatgcatgatcgacggtttgtcacagctggacggc

SEQ ID NO: 208098 - DNA, 55 bp, Artificial
  Synthetic oligonucleotide
ccccgacaccgggtagtacacgtagtccagactctggggatcaaaggacactgcg

SEQ ID NO: 208099 - DNA, 55 bp, Artificial
  Synthetic oligonucleotide
ccccaatgagtcaaagcggaggaatggtgacgggtgcgttccctgcattgacccc

SEQ ID NO: 208100 - DNA, 55 bp, Artificial
  Synthetic oligonucleotide
ccccgtaagcggaggtgagacacatcgcggaataatcgagccgctgtaaaagcgc

SEQ ID NO: 208101 - DNA, 55 bp, Artificial
  Synthetic oligonucleotide
ccactatttcaaagcgcccgcgcatgtaacactcattggacccagccgtcgcgtg

SEQ ID NO: 208102 - DNA, 54 bp, Artificial
  Synthetic oligonucleotide
ccccgtagcggccgtagtagaggggttgggacatccattcgaccaacgcgtcga

SEQ ID NO: 208103 - DNA, 55 bp, Artificial
  Synthetic oligonucleotide
cccagggaccgactgtcgcaggccttcgtacacgagcacaacaaaggaaggacgg

SEQ ID NO: 208104 - DNA, 55 bp, Artificial
  Synthetic oligonucleotide
cccagcgcgttcaggctcaacggaataccaggaatagtaatatccggtcaccaca

SEQ ID NO: 208105 - DNA, 51 bp, Artificial
  Synthetic oligonucleotide
ccccgtggttgagaccaggaagttttaaagtcctacagcccgcggtattcc

SEQ ID NO: 208106 - DNA, 55 bp, Artificial
  Synthetic oligonucleotide
gcggcaacctggctactccgcattccgccattccgaaccctgtactcgactgtcg

SEQ ID NO: 208107 - DNA, 60 bp, Artificial
  Synthetic oligonucleotide
agtgaatcggagttccgtgatcgactggcagtattgcgtgatcacgcacgaccgtagcaa

SEQ ID NO: 208108 - DNA, 55 bp, Artificial
  Synthetic oligonucleotide
ccagctcagcacagccgtacacagcaccagcagtaaggggtcgaacatcgctggc

SEQ ID NO: 208109 - DNA, 55 bp, Artificial
  Synthetic oligonucleotide
ccagcgcggacttgggaggggttttgcgtaggtgacgtcgcgcatccgatgcaat

SEQ ID NO: 208110 - DNA, 55 bp, Artificial
  Synthetic oligonucleotide
tgtgcggtaagaccgggtcgcggggcattggagtgccaccgagccgcgaggttag

SEQ ID NO: 208111 - DNA, 55 bp, Artificial
  Synthetic oligonucleotide
ccatgccaacgctccgagttgcatgcggatcgactacgaattgatcacccagaac

SEQ ID NO: 208112 - DNA, 55 bp, Artificial
  Synthetic oligonucleotide
ccatgtctggtcttgacgcgccgacactccaactccggcaacacggtcccgtcac

SEQ ID NO: 208113 - DNA, 55 bp, Artificial
  Synthetic oligonucleotide
ccagccgagcggattttcaagcacatatccccgcgtatcgcggtgcagtactgag

SEQ ID NO: 208114 - DNA, 55 bp, Artificial
  Synthetic oligonucleotide
gccacagactgagacgagcccgtagactgggtgtgtgtccagcgtggagcaacct

SEQ ID NO: 208115 - DNA, 55 bp, Artificial
  Synthetic oligonucleotide
gcgctgtcggagtcatttgtcggtagcaggctctaggatcgaggagggattttgg

SEQ ID NO: 208116 - DNA, 55 bp, Artificial
  Synthetic oligonucleotide
gccactgatctcctaggtatacattggaaacgctcggtaagtcacatcgctcacg

SEQ ID NO: 208117 - DNA, 55 bp, Artificial
  Synthetic oligonucleotide
cccaccacctggacatacaacgagctgttgggacgagtcacccaggcggccaaca

SEQ ID NO: 208118 - DNA, 60 bp, Artificial
  Synthetic oligonucleotide
ataacctcaaattttctggctggtgcgagttcgattcgcattcgatcttcatttccgtca

SEQ ID NO: 208119 - DNA, 55 bp, Artificial
  Synthetic oligonucleotide
ataggtcggcgatggcatgtcgtcctccggatctaccagacgcgccgacttggga

SEQ ID NO: 208120 - DNA, 55 bp, Artificial
  Synthetic oligonucleotide
cccaccgcggcgtatctcccaccttttccgtgcaatcggcgtatctaggagtaat

SEQ ID NO: 208121 - DNA, 55 bp, Artificial
  Synthetic oligonucleotide
gcattcatgggcatacgttaggcccgcccaatttcccagacgctgcccctaattc

SEQ ID NO: 208122 - DNA, 55 bp, Artificial
  Synthetic oligonucleotide
ccactcgagtcccaacgttgttctcatatcccagtcttagatcaccttggccgta

SEQ ID NO: 208123 - DNA, 55 bp, Artificial
  Synthetic oligonucleotide
tgtgccatcgaggccgccgctaatcctggtgcgttctgcagcccagcattgatcg

SEQ ID NO: 208124 - DNA, 55 bp, Artificial
  Synthetic oligonucleotide
cccagatgacgtatgggtgatcaccgctccgaaattgttcaaccggtgcacggtc

SEQ ID NO: 208125 - DNA, 55 bp, Artificial
  Synthetic oligonucleotide
ccgcccggaacctagccgcggaccacgacccaaaactcatgctgagcaacagttc

SEQ ID NO: 208126 - DNA, 53 bp, Artificial
  Synthetic oligonucleotide
ccgccgcgaacctattactaccggtctctaccctatcctgccctaaggacagg

SEQ ID NO: 208127 - DNA, 55 bp, Artificial
  Synthetic oligonucleotide
ccgccgcgctatctggtgtaccccgtttgactcgtcgaccgaaggagtggattag

SEQ ID NO: 208128 - DNA, 55 bp, Artificial
  Synthetic oligonucleotide
ccgcggaaccacctgtcgcgagtggaaaccagaccgaatttcctaggccataagc

SEQ ID NO: 208129 - DNA, 60 bp, Artificial
  Synthetic oligonucleotide
ataccccagtcgtccaatagccctcagttaggtcgcacacatgacagatgtcgcttcacg

SEQ ID NO: 208130 - DNA, 55 bp, Artificial
  Synthetic oligonucleotide
gcagcatcctaaatgagggccagctacacagagtggttaatgatgctccgcaaac

SEQ ID NO: 208131 - DNA, 51 bp, Artificial
  Synthetic oligonucleotide
ccgctaccacgttgaacgaacccaaagttccgctaccgaggttgtactacc

SEQ ID NO: 208132 - DNA, 55 bp, Artificial
  Synthetic oligonucleotide
ccgctggttcgccctgttcatgaaacacgccggttcacaagccgatcgggcattg

SEQ ID NO: 208133 - DNA, 55 bp, Artificial
  Synthetic oligonucleotide
ccgcttatggctggtcacgcctcggcatcggtcattattccaatgattcgttgca

SEQ ID NO: 208134 - DNA, 51 bp, Artificial
  Synthetic oligonucleotide
ccggacggttctgttcgacggggagcgtccgcacgggattgtttacccgtc

SEQ ID NO: 208135 - DNA, 55 bp, Artificial
  Synthetic oligonucleotide
ccggctgagggaggcgcgcggaccgaggtgtatgtacgacagctgggattacggg

SEQ ID NO: 208136 - DNA, 55 bp, Artificial
  Synthetic oligonucleotide
ccggctgagtccggatcaccgagtctgtagataccgtggtccgcatttcgcagtt

SEQ ID NO: 208137 - DNA, 51 bp, Artificial
  Synthetic oligonucleotide
ccgggaacaccgtaaacgggcctaaccctccgcacacatcaatacccaacg

SEQ ID NO: 208138 - DNA, 55 bp, Artificial
  Synthetic oligonucleotide
agttcaggcaaactcactaattcacgaaccgcggctaccgcgcaaacacgagcaa

SEQ ID NO: 208139 - DNA, 55 bp, Artificial
  Synthetic oligonucleotide
ccgtcacacctattgtggcactgcgtatccccgcgcttatcgcttacgacacatc

SEQ ID NO: 208140 - DNA, 60 bp, Artificial
  Synthetic oligonucleotide
atacctcctgcactgcttgagatgttggacctaaacgctggggcgccggtcggcttatca

SEQ ID NO: 208141 - DNA, 52 bp, Artificial
  Synthetic oligonucleotide
ccgtggggaccaacgaataatgccccgatccaacggaattaacacctttagc

SEQ ID NO: 208142 - DNA, 55 bp, Artificial
  Synthetic oligonucleotide
ccgtgtttgatcggcccggttcgtggaatcacacacctgacacgcacgaacgttt

SEQ ID NO: 208143 - DNA, 55 bp, Artificial
  Synthetic oligonucleotide
ccgttaagtcctgggtctgtcgctgtccctcagcctaggtgggacggcttgcctc

SEQ ID NO: 208144 - DNA, 55 bp, Artificial
  Synthetic oligonucleotide
gcggctaacccgaaacagacgacaccgacgcagcaggtttacacggcctaggctc

SEQ ID NO: 208145 - DNA, 55 bp, Artificial
  Synthetic oligonucleotide
tgtctcgctttagctgggacgaaatcagatgggttgggcacttcgagttccggtg

SEQ ID NO: 208146 - DNA, 55 bp, Artificial
  Synthetic oligonucleotide
tgtctcgcagcatgtttgccacatcggcctgagaccacttccgacgctcacgctc

SEQ ID NO: 208147 - DNA, 55 bp, Artificial
  Synthetic oligonucleotide
cccctggacacaaacgacaacgtgcgccccgcgtggcatctcgatcgaaactgcc

SEQ ID NO: 208148 - DNA, 55 bp, Artificial
  Synthetic oligonucleotide
cccgacgtcgtgttgttggacgacatctggtggttccatttcgccctcagtggtg

SEQ ID NO: 208149 - DNA, 55 bp, Artificial
  Synthetic oligonucleotide
aacacgcgcagattaggggttgacatggggatcaagtcgtgcagtgcagcacatt

SEQ ID NO: 208150 - DNA, 55 bp, Artificial
  Synthetic oligonucleotide
cccgcaaggtgttgtacaaggcgccccaacgtgcgaacgtaggacactcgaccag

SEQ ID NO: 208151 - DNA, 60 bp, Artificial
  Synthetic oligonucleotide
acgcgcatacgcacccaaaaaattgctgcccgacacatagatcccaacgacggtgcggca

SEQ ID NO: 208152 - DNA, 60 bp, Artificial
  Synthetic oligonucleotide
atacgttgatactactctgagggaatacgccttgcaacgcatattgtgggtgtggagcgg

SEQ ID NO: 208153 - DNA, 55 bp, Artificial
  Synthetic oligonucleotide
gcatacggcctttgctacccggtcaccgctggctagcatgagtgcgactgagtgg

SEQ ID NO: 208154 - DNA, 55 bp, Artificial
  Synthetic oligonucleotide
cccggtgaacatactcatgacgcctgcctcggtctgttgcatcgtttcagccgag

SEQ ID NO: 208155 - DNA, 50 bp, Artificial
  Synthetic oligonucleotide
cccgtcgggaagacatctactcggggttcgttatttgcggaccggaaccg

SEQ ID NO: 208156 - DNA, 55 bp, Artificial
  Synthetic oligonucleotide
cccgtgagctaggagtacggctgttcactatgtgaaccctaccacagacctgcag

SEQ ID NO: 208157 - DNA, 55 bp, Artificial
  Synthetic oligonucleotide
ccctcagttaggtcgcacacatgacagatgtcgcttcacgcgaactaggcctggg

SEQ ID NO: 208158 - DNA, 55 bp, Artificial
  Synthetic oligonucleotide
ccctccgcacacatcaatacccaacgggatagccggaagtgagtagccatccggg

SEQ ID NO: 208159 - DNA, 55 bp, Artificial
  Synthetic oligonucleotide
ccctcggtatcgtgtaggccatggttgttatgtcagcgcccactaagccgggcac

SEQ ID NO: 208160 - DNA, 54 bp, Artificial
  Synthetic oligonucleotide
ccgaaccaacttaagtaccgcaatcgcggactcggaaccgattagcaggacgta

SEQ ID NO: 208161 - DNA, 55 bp, Artificial
  Synthetic oligonucleotide
gcagggcgctatcgacaggggcggacaactgctgcccttccgttggttctcgcgt

SEQ ID NO: 208162 - DNA, 55 bp, Artificial
  Synthetic oligonucleotide
ccgagccctggagtgagcctgaatgcaaccgaagggaaagaacctagctggaccc

SEQ ID NO: 208163 - DNA, 60 bp, Artificial
  Synthetic oligonucleotide
atagagcagcgagtccatatgtgacacgcggtttcgtagttttcgcagatcgcgaacttt

SEQ ID NO: 208164 - DNA, 55 bp, Artificial
  Synthetic oligonucleotide
ccgatctgaattttaggatttacgacgaaggtagggtttctcatcaggtctcgat

SEQ ID NO: 208165 - DNA, 55 bp, Artificial
  Synthetic oligonucleotide
ccgcacaagacgaggttctggaacgtggagagtttgtgcacatatgcgtgtcccc

SEQ ID NO: 208166 - DNA, 54 bp, Artificial
  Synthetic oligonucleotide
caaccgcgaattctaatagcggaaccagaacaaatacgcctaacgcaaaaccta

SEQ ID NO: 208167 - DNA, 55 bp, Artificial
  Synthetic oligonucleotide
gcgcccctcaccacagctcggtgtagcactttgctataagctgtaacagatcgct

SEQ ID NO: 208168 - DNA, 55 bp, Artificial
  Synthetic oligonucleotide
caagagaccgcacgcaacatgcccaggctcaaccaaatgtggcccgcccacgaca

SEQ ID NO: 208169 - DNA, 55 bp, Artificial
  Synthetic oligonucleotide
gcctagggcataagtccgccgcaagccgggtacttcttgtatctgatcgtgctcg

SEQ ID NO: 208170 - DNA, 55 bp, Artificial
  Synthetic oligonucleotide
caatgggatgagctttgccgtctcgagtatggacggatgcatggtcgatatgggt

SEQ ID NO: 208171 - DNA, 55 bp, Artificial
  Synthetic oligonucleotide
gccgtgactgagttcgttgcagcggtggaggagcgcaatcgtgtgagcgagatac

SEQ ID NO: 208172 - DNA, 55 bp, Artificial
  Synthetic oligonucleotide
cacagcgcattacggctcgtgacagatgagggagtcagagcgggtcggcaaggga

SEQ ID NO: 208173 - DNA, 55 bp, Artificial
  Synthetic oligonucleotide
gccgtctcgagacatcagcacgcgccgggctagataaacacgtacggacgcccat

SEQ ID NO: 208174 - DNA, 56 bp, Artificial
  Synthetic oligonucleotide
atcagtccccgggtataggacggtcgacgccgctacggtgctgacgtccactcacc

SEQ ID NO: 208175 - DNA, 55 bp, Artificial
  Synthetic oligonucleotide
gcgcctaactgcgtggaagtgatggctcgtggttaacgatgccttctgcttcggg

SEQ ID NO: 208176 - DNA, 55 bp, Artificial
  Synthetic oligonucleotide
cacccatacgcgcgcatttctgacgagtcaacgcggtcggtggaccgtgctatgg

SEQ ID NO: 208177 - DNA, 55 bp, Artificial
  Synthetic oligonucleotide
cacccgaaggatcacgcgaggaaccttcactcgtacaccacgtccctggccttgg

SEQ ID NO: 208178 - DNA, 55 bp, Artificial
  Synthetic oligonucleotide
cacctgtgctcctatgcgcacgccacgttcggctgctaaccggcataccctaagc

SEQ ID NO: 208179 - DNA, 55 bp, Artificial
  Synthetic oligonucleotide
cacgacaccactactttgactttggcggggcacgatgtggctcacccggtcggca

SEQ ID NO: 208180 - DNA, 55 bp, Artificial
  Synthetic oligonucleotide
cacgattgtgatggacctgtgacgaaagttgacagtgttgctggcgtggctagtg

SEQ ID NO: 208181 - DNA, 55 bp, Artificial
  Synthetic oligonucleotide
cacgcccgtcaaacgaggggttgcgtgagcgtctcgaaaccgttcccagctatgg

SEQ ID NO: 208182 - DNA, 55 bp, Artificial
  Synthetic oligonucleotide
cacgcgacggcaagtttgcgaaccaggcgacgttacgagaaaggtgtggattgcc

SEQ ID NO: 208183 - DNA, 55 bp, Artificial
  Synthetic oligonucleotide
atggccactgtattgacgcatgccctggcctgacatgtagtgaaagtatacgacc

SEQ ID NO: 208184 - DNA, 55 bp, Artificial
  Synthetic oligonucleotide
gcgatggtgtttgtcgaattgggttgcggggaaaatcatctggcgatcgagagga

SEQ ID NO: 208185 - DNA, 55 bp, Artificial
  Synthetic oligonucleotide
tcttgagaacgcatccgaaacccgcttagcgtccgaaacccgcttagcgtcgaaa

SEQ ID NO: 208186 - DNA, 55 bp, Artificial
  Synthetic oligonucleotide
ttagccaacgcccgaaccccaatggcctgcggtccactcctggaggcctcgatca

SEQ ID NO: 208187 - DNA, 55 bp, Artificial
  Synthetic oligonucleotide
gcgcagtcgacgatcaagacttcaccgcgtggcttgccctgttcgcgtcggaatg

SEQ ID NO: 208188 - DNA, 55 bp, Artificial
  Synthetic oligonucleotide
atgacggacgtgacgcagtcggccgttggtaagctcgatcggtctcgcaaagcta

SEQ ID NO: 208189 - DNA, 55 bp, Artificial
  Synthetic oligonucleotide
attcacgaattttgaactgattatccctcaccagtaccagtaacccactagtccc

SEQ ID NO: 208190 - DNA, 55 bp, Artificial
  Synthetic oligonucleotide
attccccttccccgcggagacgctcagcaaatggatacgtggcgactacgcgaac

SEQ ID NO: 208191 - DNA, 55 bp, Artificial
  Synthetic oligonucleotide
gcgagtctagcgctctatccgccattctacgctcggtttccaacaggagggtgcc

SEQ ID NO: 208192 - DNA, 55 bp, Artificial
  Synthetic oligonucleotide
attgaatgatacgaggtcaatctgccccataccactggttccgcgccgattctat

SEQ ID NO: 208193 - DNA, 55 bp, Artificial
  Synthetic oligonucleotide
atctgaacctcaccggtgtgcagagcgatacgaaaccgaactggtacgatcgggg

SEQ ID NO: 208194 - DNA, 55 bp, Artificial
  Synthetic oligonucleotide
gcgagcatggcgtccgcacggaagtcacagtggaaaacgttgcagcttcgcggag

SEQ ID NO: 208195 - DNA, 55 bp, Artificial
  Synthetic oligonucleotide
caaaaccacccaacgccagggttattggtggcagcactgaccggagcggcattgt

SEQ ID NO: 208196 - DNA, 59 bp, Artificial
  Synthetic oligonucleotide
tcgtggtccgcagacactggatcgcgcgttttatacgggcccattcgtgacaggtggac

SEQ ID NO: 208197 - DNA, 53 bp, Artificial
  Synthetic oligonucleotide
caaaaggccacccgcccgaccaaacccgaacaactggcgtgggcacaactggc

SEQ ID NO: 208198 - DNA, 55 bp, Artificial
  Synthetic oligonucleotide
ttaggaggttggatcgcggcgtggactgcgttggaacatcccgaccgtgtcgacc

SEQ ID NO: 208199 - DNA, 55 bp, Artificial
  Synthetic oligonucleotide
caaacgctcagcgtgtcgaaccaagatcagatccaccgataatcagacagtcccg

SEQ ID NO: 208200 - DNA, 53 bp, Artificial
  Synthetic oligonucleotide
atcgtcgcgaccccgataactatccggtacccaccctagtctccggtcacacc

SEQ ID NO: 208201 - DNA, 55 bp, Artificial
  Synthetic oligonucleotide
gcctgcgagccatcgcttgtcgtaacatcgagtgcgggtagtcaggccctgagtg

SEQ ID NO: 208202 - DNA, 55 bp, Artificial
  Synthetic oligonucleotide
gcctctctctgaacgggtttcgcgacattctgccataagcgtgacacttagccga

SEQ ID NO: 208203 - DNA, 55 bp, Artificial
  Synthetic oligonucleotide
ttattgtggggccgacacacgaaatccgtaggcaggggactgactccgcggcgtg

SEQ ID NO: 208204 - DNA, 55 bp, Artificial
  Synthetic oligonucleotide
gccctctgcagcgcgacaagtcactgttgcgtgccagttgcctgaactccgatgg

SEQ ID NO: 208205 - DNA, 55 bp, Artificial
  Synthetic oligonucleotide
gcccgtctagtcaccgaatcgtcacccctcgatgcttattgcaacgattcgtcgc

SEQ ID NO: 208206 - DNA, 55 bp, Artificial
  Synthetic oligonucleotide
catagatcgtgtcgacggttgctgacccgaacgttcacacatgtgaaatttctat

SEQ ID NO: 208207 - DNA, 59 bp, Artificial
  Synthetic oligonucleotide
tcggatatctccttgacactcccgaacctccgtcatgcgacgggttaggcacaaagtga

SEQ ID NO: 208208 - DNA, 55 bp, Artificial
  Synthetic oligonucleotide
gcccatgatctaggtttacagttatgacttcatatgacacgttccatgacgtcgg

SEQ ID NO: 208209 - DNA, 55 bp, Artificial
  Synthetic oligonucleotide
catctggtgcgctgacttacatataccacgaagagagatggactatgagggaacg

SEQ ID NO: 208210 - DNA, 55 bp, Artificial
  Synthetic oligonucleotide
gccattggtttccgtcgactttggcataccgcgagtctacgcagccacacctcgc

SEQ ID NO: 208211 - DNA, 55 bp, Artificial
  Synthetic oligonucleotide
gccagtttgcgaccctcgtcgaagtgcagaaccgcagttcctgacgcacgtcaac

SEQ ID NO: 208212 - DNA, 55 bp, Artificial
  Synthetic oligonucleotide
cattcgaccggcaacgaccctgccctgttcgttctgcatacgcacatcggtcagg

SEQ ID NO: 208213 - DNA, 55 bp, Artificial
  Synthetic oligonucleotide
cattggcggccgaactgagcggtactgacgtcaaggtcacagtgctttgccccac

SEQ ID NO: 208214 - DNA, 55 bp, Artificial
  Synthetic oligonucleotide
ttcacggtatgtttcggcagatagaaagcgtgcgtagggtgtggattatgcagct

SEQ ID NO: 208215 - DNA, 55 bp, Artificial
  Synthetic oligonucleotide
gcgctccacgtacgcataacgagccctcaagcgattacccgcatatgctccgggc

SEQ ID NO: 208216 - DNA, 55 bp, Artificial
  Synthetic oligonucleotide
gccagcgactacgttaagatcggcaaagtccggtccaccccgatagatacccatc

SEQ ID NO: 208217 - DNA, 55 bp, Artificial
  Synthetic oligonucleotide
gccagaacagtgcgtgcgtcgacaatatgggacgacgtccgggaatgcgtcgggg

SEQ ID NO: 208218 - DNA, 59 bp, Artificial
  Synthetic oligonucleotide
tccctttcttcctggtggggtgctgcgaatcattgtgggcgcgaccgctgacaacccag

SEQ ID NO: 208219 - DNA, 55 bp, Artificial
  Synthetic oligonucleotide
gcgctgatcgtgtgattcaatggggctagagagtgtcgtagctcactcggccctc

SEQ ID NO: 208220 - DNA, 55 bp, Artificial
  Synthetic oligonucleotide
ccacacagggccagccgcattctccgggtagaccacaactgtcgcatgcgagcct

SEQ ID NO: 208221 - DNA, 55 bp, Artificial
  Synthetic oligonucleotide
tgtggccagtcgccaacccgttgtgtagacgtatcccgagctgggtcgctcgaca

SEQ ID NO: 208222 - DNA, 55 bp, Artificial
  Synthetic oligonucleotide
atatgggcatccaacaaactcatcacaattccttccaattcggaccaccaattac

SEQ ID NO: 208223 - DNA, 55 bp, Artificial
  Synthetic oligonucleotide
gccggcatacatcctcgcggagttgatctccggtggtaacgccccgaaatccacc

SEQ ID NO: 208224 - DNA, 55 bp, Artificial
  Synthetic oligonucleotide
gccgcttactgccttctagtccgtgcggctctcgcaacagctcacgggacctttt

SEQ ID NO: 208225 - DNA, 55 bp, Artificial
  Synthetic oligonucleotide
cacgtagatcaatcggtcgacacggtcgggatgttccaacgcagtccacgccgcg

SEQ ID NO: 208226 - DNA, 55 bp, Artificial
  Synthetic oligonucleotide
cagaacgcaacgacgggtgcctgaccgtccgctttaaccggcccgatcgccacaa

SEQ ID NO: 208227 - DNA, 55 bp, Artificial
  Synthetic oligonucleotide
cagacttactcagcggacttacaccagagactagaacacgttccgatttgtgtcg

SEQ ID NO: 208228 - DNA, 55 bp, Artificial
  Synthetic oligonucleotide
atcgaatagatgcgccctgctgcgagtctcgggaagtatgcggtgggctcgccac

SEQ ID NO: 208229 - DNA, 59 bp, Artificial
  Synthetic oligonucleotide
tcagttgacaccacggccgccttctagagtaggtgaaatttcgctggttggagtgcgaa

SEQ ID NO: 208230 - DNA, 55 bp, Artificial
  Synthetic oligonucleotide
gcgcggacactatcggatagtcgattccgaacatctggctaaaggccgtcgatag

SEQ ID NO: 208231 - DNA, 55 bp, Artificial
  Synthetic oligonucleotide
cagccgtgaatattgttgtgccacaacgcatttcgccgataatagcgattatgtc

SEQ ID NO: 208232 - DNA, 55 bp, Artificial
  Synthetic oligonucleotide
gccgacaatgaagcgaggatggcggatcagatcaactagctgcccagacaaccgc

SEQ ID NO: 208233 - DNA, 54 bp, Artificial
  Synthetic oligonucleotide
gccgaatagggcggagtagaagctggcgtagagtttcgggtcgttttgccccgc

SEQ ID NO: 208234 - DNA, 55 bp, Artificial
  Synthetic oligonucleotide
cagctcgcggcataattcccgcgaaatccgcagtcctaaaagcgcggagcaggcc

SEQ ID NO: 208235 - DNA, 55 bp, Artificial
  Synthetic oligonucleotide
caggcattcggtctcagacgctccgcaaatccaaacgcagtgacaacggcgtccg

SEQ ID NO: 208236 - DNA, 55 bp, Artificial
  Synthetic oligonucleotide
gcgcggcagtgatcgttgtcgtacttgtcgcactcggccgcgcacgcatcacaaa

SEQ ID NO: 208237 - DNA, 55 bp, Artificial
  Synthetic oligonucleotide
caggcgagtaccagggtttgccaacctacttcaccgaacgtccgcaccataccga

SEQ ID NO: 208238 - DNA, 55 bp, Artificial
  Synthetic oligonucleotide
caggctgcgaatcgtacttgcccgcaaggtgttgtacaaggcgccccaacgtgcg

SEQ ID NO: 208239 - DNA, 55 bp, Artificial
  Synthetic oligonucleotide
cagggccgaagcggagtcacagcgtctggccgcacacgtggcgtcgtgtttgcta

SEQ ID NO: 208240 - DNA, 55 bp, Artificial
  Synthetic oligonucleotide
taccccgtcagggtataagctagcagcccctcgtaagtcgagtaaacagttggct

SEQ ID NO: 208241 - DNA, 55 bp, Artificial
  Synthetic oligonucleotide
caggtatagaacgcgacttacccagctcacaacggtagaggatgcgggtcgttcg

SEQ ID NO: 208242 - DNA, 54 bp, Artificial
  Synthetic oligonucleotide
gatccccataacggcgtagagtccgttgacgaattggtacccgtaccggatagc

SEQ ID NO: 208243 - DNA, 55 bp, Artificial
  Synthetic oligonucleotide
cgttttgcgcgcccaaaagtgtgtcgctgatccgtgcgttgcgcggtgatgacgt

SEQ ID NO: 208244 - DNA, 55 bp, Artificial
  Synthetic oligonucleotide
ttgtcgatgtgcgctagcgcggcagagatgcgcgcccgtccggggatgtgcgctt

SEQ ID NO: 208245 - DNA, 55 bp, Artificial
  Synthetic oligonucleotide
ctaccagcccagcgtcgtcccaaacggctacgcttctactcatgcgggcgcctta

SEQ ID NO: 208246 - DNA, 55 bp, Artificial
  Synthetic oligonucleotide
ctactcgtgtccggttcggaccatcgcgtgccacttgggtgactatgacctaccg

SEQ ID NO: 208247 - DNA, 55 bp, Artificial
  Synthetic oligonucleotide
ctagcgaacactcgattgaaggacgtggctatgcggacctctctgcgctacctca

SEQ ID NO: 208248 - DNA, 55 bp, Artificial
  Synthetic oligonucleotide
gatcccaccgcgccacgacaggttggcccgccacgatcgcattgagatgccacag

SEQ ID NO: 208249 - DNA, 55 bp, Artificial
  Synthetic oligonucleotide
ctatccgatctcagcctgggtggacgcccgagcggtagggccaacggtgaacgca

SEQ ID NO: 208250 - DNA, 55 bp, Artificial
  Synthetic oligonucleotide
ctatgtcttcataagtcggatgttcccgcctagcccacacgtgtcagtgcgcgac

SEQ ID NO: 208251 - DNA, 57 bp, Artificial
  Synthetic oligonucleotide
aagtcccggaccgcactcacgtcgtcttggaccgtgccgagggtatccatgccacca

SEQ ID NO: 208252 - DNA, 55 bp, Artificial
  Synthetic oligonucleotide
ctcaaatccccaattcagggccaaatgcccttaccctgacacgagtgaccagttc

SEQ ID NO: 208253 - DNA, 55 bp, Artificial
  Synthetic oligonucleotide
ctcgaagcgagctataagctgtcgatggtcgtgggtcgcgctagacacgctactg

SEQ ID NO: 208254 - DNA, 55 bp, Artificial
  Synthetic oligonucleotide
ctcgattgtgaccgtatgcgcgatcccacaccagtaaatccgacccaactcagga

SEQ ID NO: 208255 - DNA, 55 bp, Artificial
  Synthetic oligonucleotide
ttgtgtctcgtgtcctatagttcgtggcagttgtaggagtgtcggaggggctcgg

SEQ ID NO: 208256 - DNA, 55 bp, Artificial
  Synthetic oligonucleotide
ctcgcacccccttgatttcaggccactttggccgactgagaacgccggagcaatt

SEQ ID NO: 208257 - DNA, 55 bp, Artificial
  Synthetic oligonucleotide
ctcggggccgcggtagagacctagcctctttgcgccgggtgagtcgtcgtgccct

SEQ ID NO: 208258 - DNA, 55 bp, Artificial
  Synthetic oligonucleotide
ctcggggcggtccaaggtgcagatcgcaaacgcaccttcacgttcgaacctcagg

SEQ ID NO: 208259 - DNA, 55 bp, Artificial
  Synthetic oligonucleotide
gatacccgaatacgggtctggccctacaacatgcgcgcgtcaccatcctccacgc

SEQ ID NO: 208260 - DNA, 55 bp, Artificial
  Synthetic oligonucleotide
ctctatcttgccacgaaccaatgatctacttacagatcgactttccagacgcccc

SEQ ID NO: 208261 - DNA, 55 bp, Artificial
  Synthetic oligonucleotide
ctctcggtacacgcctacgaggtgggcttacggtggcgtccactcatacgttagg

SEQ ID NO: 208262 - DNA, 60 bp, Artificial
  Synthetic oligonucleotide
acggccacggaaacccgaaggtgtcgcatgggcgtcgctgcgtgtcgcatgggccgatga

SEQ ID NO: 208263 - DNA, 59 bp, Artificial
  Synthetic oligonucleotide
gtgcttcagcctgcgtttttcttgttgtgatctgaccgtaaccacacgagttgtcggga

SEQ ID NO: 208264 - DNA, 55 bp, Artificial
  Synthetic oligonucleotide
cggttgtctctggatacggtcgcacgggaagtatgcgcgctgactgtctgccgtg

SEQ ID NO: 208265 - DNA, 53 bp, Artificial
  Synthetic oligonucleotide
cggtttgctggattacagggaggtcgaaccgggtgtgttgcccctcgggctta

SEQ ID NO: 208266 - DNA, 55 bp, Artificial
  Synthetic oligonucleotide
cgtaacgtgttctaatcttcttctaggcccaaactccacgagaggcaaatccagt

SEQ ID NO: 208267 - DNA, 55 bp, Artificial
  Synthetic oligonucleotide
ttgcagaacaacggtgactggagtgtgccctggacgcaatggcaggccggaagcg

SEQ ID NO: 208268 - DNA, 55 bp, Artificial
  Synthetic oligonucleotide
cgtaggcggaggcattccgactaaatttgacaagagtaccctcgacacacattct

SEQ ID NO: 208269 - DNA, 55 bp, Artificial
  Synthetic oligonucleotide
cgtccgcagcaaggggacgtagccgagatacgtcggcgacgagaaatcgatcctg

SEQ ID NO: 208270 - DNA, 55 bp, Artificial
  Synthetic oligonucleotide
cgtcgagcgatagtgacagctacgcatttgagacgacgacaatcgcactggcccg

SEQ ID NO: 208271 - DNA, 55 bp, Artificial
  Synthetic oligonucleotide
cgtcgcgaatcggtagccaccggcgaggattgcgaagttgttggtccagcgtgtg

SEQ ID NO: 208272 - DNA, 55 bp, Artificial
  Synthetic oligonucleotide
cgtctgtaggccttcagtgcatcgcacggacgcgtagtaaccctgggagagccag

SEQ ID NO: 208273 - DNA, 55 bp, Artificial
  Synthetic oligonucleotide
cgtgaacctcgacagtcaccgtgacatcgacatctgagatgcgcgagtcgttcgc

SEQ ID NO: 208274 - DNA, 57 bp, Artificial
  Synthetic oligonucleotide
gtgaacaaattcactgacgcgtcttctgcaaagcgcaacgtaagtaccccggcggtg

SEQ ID NO: 208275 - DNA, 54 bp, Artificial
  Synthetic oligonucleotide
cgtgaccgggccaatccgaacctcctgggactccacaccgtaacgcttcaactc

SEQ ID NO: 208276 - DNA, 55 bp, Artificial
  Synthetic oligonucleotide
ttggccgatcaggattgggtgcagcagtacatagccgaggcctatgacagggtta

SEQ ID NO: 208277 - DNA, 55 bp, Artificial
  Synthetic oligonucleotide
gatgcggccagcgttcaaccgctcgtcgtagggcaaggaactcggcagaatctcg

SEQ ID NO: 208278 - DNA, 55 bp, Artificial
  Synthetic oligonucleotide
cgtgggagatctgctggtcgtgcagggtccgtagcgcctcccagacatgggcagt

SEQ ID NO: 208279 - DNA, 55 bp, Artificial
  Synthetic oligonucleotide
cgtggggaaattcgtgttcataggtcaagcaccagcttctcggtcctggatcggg

SEQ ID NO: 208280 - DNA, 55 bp, Artificial
  Synthetic oligonucleotide
cgtgtacgtctgggttgcgccagggctgccgatagcgacattggcgctgttactg

SEQ ID NO: 208281 - DNA, 55 bp, Artificial
  Synthetic oligonucleotide
cgttcaacacgacacggatcgaccacctctacgttgacccgcaccaacagggcgc

SEQ ID NO: 208282 - DNA, 55 bp, Artificial
  Synthetic oligonucleotide
ttgtagatccgtcagtcggactcgggaacttccgtagtcgcctctttccggactg

SEQ ID NO: 208283 - DNA, 55 bp, Artificial
  Synthetic oligonucleotide
ttgtccttagaagaacgggtctggggacacccggcacacagggtctctcgcgagg

SEQ ID NO: 208284 - DNA, 55 bp, Artificial
  Synthetic oligonucleotide
gaagagtcgcaacatagtttgccgtgccggactagcgcatggcgagataccccga

SEQ ID NO: 208285 - DNA, 56 bp, Artificial
  Synthetic oligonucleotide
aatgacgcccaccgaatcgtctccctctctgatcgtttagaccgaagttagcgggc

SEQ ID NO: 208286 - DNA, 55 bp, Artificial
  Synthetic oligonucleotide
tttcaagtgccacttacccggagctttctgcggtacccaacgccggcttgaagac

SEQ ID NO: 208287 - DNA, 55 bp, Artificial
  Synthetic oligonucleotide
gaaggacagcacgaacccaccgttaggcatgagcgcccaacagctccccaagacg

SEQ ID NO: 208288 - DNA, 55 bp, Artificial
  Synthetic oligonucleotide
gagtgggcatcagtaaatcctcggcatccctcgtatgacgtcgtctagtggcggt

SEQ ID NO: 208289 - DNA, 55 bp, Artificial
  Synthetic oligonucleotide
gaaggtgaccgcgactgttgggaccctgaccgatgtgcgtatgcagaacgaacag

SEQ ID NO: 208290 - DNA, 55 bp, Artificial
  Synthetic oligonucleotide
gacaaccaacgctagacacgccgatggtctgtcaaagtagccccgcacaattcgt

SEQ ID NO: 208291 - DNA, 55 bp, Artificial
  Synthetic oligonucleotide
gacacggctcgtaccaagaaatttgtatgtgcccgctcacgtcgactatcgtcgt

SEQ ID NO: 208292 - DNA, 55 bp, Artificial
  Synthetic oligonucleotide
gacatttcggctgtggcgtccgctgtcacacgacacgatggaagtctggtcgtgg

SEQ ID NO: 208293 - DNA, 51 bp, Artificial
  Synthetic oligonucleotide
gacccagaacgttcggaatacgggtagggtaagcgtcaattttatccccgc

SEQ ID NO: 208294 - DNA, 55 bp, Artificial
  Synthetic oligonucleotide
gacgacgagggacgcatggtgggctctgacacaggatccacaggtatggtcggtg

SEQ ID NO: 208295 - DNA, 55 bp, Artificial
  Synthetic oligonucleotide
gacggctcaccgtagggtcggacatcaccgatgagttgtcaatcaggttgtgtcg

SEQ ID NO: 208296 - DNA, 60 bp, Artificial
  Synthetic oligonucleotide
aatggctgttactcccggccacagactgagacgagcccgtagactgggtgtgtgtccagc

SEQ ID NO: 208297 - DNA, 55 bp, Artificial
  Synthetic oligonucleotide
gacggtccaacaggcttcgctcccgcaaatccgcttggccatgcaggaacaccca

SEQ ID NO: 208298 - DNA, 55 bp, Artificial
  Synthetic oligonucleotide
gactcgcagccaccttagtggtgtgcgcgttaacggttcccagcgttggtgtcgc

SEQ ID NO: 208299 - DNA, 55 bp, Artificial
  Synthetic oligonucleotide
gactgcgggacagcagtttacggctcttgtcgccacgctacaagcggattcgcat

SEQ ID NO: 208300 - DNA, 55 bp, Artificial
  Synthetic oligonucleotide
gacttgtcgccattgtagtacaccttgaccacagaaccgggtaatgcgacgccgg

SEQ ID NO: 208301 - DNA, 55 bp, Artificial
  Synthetic oligonucleotide
gagcacactggaaacatgcctaccaccaccggttcgggtttgcctcccgattccc

SEQ ID NO: 208302 - DNA, 55 bp, Artificial
  Synthetic oligonucleotide
gagcacgagatcccacctacatcgtcgatcgcatcagaaaggtcgcaccggggac

SEQ ID NO: 208303 - DNA, 55 bp, Artificial
  Synthetic oligonucleotide
ttttgctcagtggccatggtaaatccgttccatggccgtccgataggccagtatt

SEQ ID NO: 208304 - DNA, 55 bp, Artificial
  Synthetic oligonucleotide
gagctaccaggtcggaactagccagttacgttgtactcgtgcggttctcgtagtc

SEQ ID NO: 208305 - DNA, 55 bp, Artificial
  Synthetic oligonucleotide
ttttgttgcgccccaatgccttcggatgatccttcgtccagagacggtgcgcccc

SEQ ID NO: 208306 - DNA, 55 bp, Artificial
  Synthetic oligonucleotide
ctgacttgggtccagtacgctccgatatttggccggcagggtttcttggcgcgcc

SEQ ID NO: 208307 - DNA, 60 bp, Artificial
  Synthetic oligonucleotide
gtcgcgagaggtctgtgtctgccgacgttgagttggacagtgttcaagaccgatgagtct

SEQ ID NO: 208308 - DNA, 54 bp, Artificial
  Synthetic oligonucleotide
ctgagtcgttgagagccgtcataaagggttaccttacagtaatcttaagaaccg

SEQ ID NO: 208309 - DNA, 55 bp, Artificial
  Synthetic oligonucleotide
ctgcagtgtgttgagttggtcttttcccttaccgatttctcgtgcaccaccggga

SEQ ID NO: 208310 - DNA, 55 bp, Artificial
  Synthetic oligonucleotide
ctgggaatttcccctacgtttcatcaacgctcaggtgtcgatcctaaagcgcggg

SEQ ID NO: 208311 - DNA, 55 bp, Artificial
  Synthetic oligonucleotide
gataccagcggagtatatctccaacataatatatgaaggcccgggcgctgactca

SEQ ID NO: 208312 - DNA, 55 bp, Artificial
  Synthetic oligonucleotide
ctgtacccggcgtgtgttacacgacttggaagcgcgctagacgtctctagcagtc

SEQ ID NO: 208313 - DNA, 55 bp, Artificial
  Synthetic oligonucleotide
ctgtatctcactgatctgtataagtcaggtggtcgtgtgcccaattgcgcaacag

SEQ ID NO: 208314 - DNA, 55 bp, Artificial
  Synthetic oligonucleotide
cttatcacttttggctgcgaccgcgtgggaactgaagtgttcgaaccgctaggcc

SEQ ID NO: 208315 - DNA, 48 bp, Artificial
  Synthetic oligonucleotide
cttattacaaataacgggtccgttacccaagtcggaaaacggtgtcgg

SEQ ID NO: 208316 - DNA, 55 bp, Artificial
  Synthetic oligonucleotide
cttccccatccgcccgggaatcgcgcacgtccgtaccatcgccgtgcacccacta

SEQ ID NO: 208317 - DNA, 55 bp, Artificial
  Synthetic oligonucleotide
cttccgctaggacaccacttccgccgggtgaccacttctgccgaaattgcattcc

SEQ ID NO: 208318 - DNA, 60 bp, Artificial
  Synthetic oligonucleotide
gtccctgatcagtgttcgatcgaggctgagcgtgacaagtcactcgccggtctgtcgacg

SEQ ID NO: 208319 - DNA, 54 bp, Artificial
  Synthetic oligonucleotide
cttcgagcccgggccatccgataaccccgttagccgtcgcgagcttacagaagg

SEQ ID NO: 208320 - DNA, 55 bp, Artificial
  Synthetic oligonucleotide
cttcgcagtcaggacgtcaacctgccgttgttggtccctgccagcttccgatcgg

SEQ ID NO: 208321 - DNA, 55 bp, Artificial
  Synthetic oligonucleotide
cttgggtgattccgctcatggtgattgttcctttcggatggttgccggtggtcgt

SEQ ID NO: 208322 - DNA, 55 bp, Artificial
  Synthetic oligonucleotide
ctttatcgtgcggacaacccgtacgtgtcgtggccgtgaggaggtgagggacgca

SEQ ID NO: 208323 - DNA, 51 bp, Artificial
  Synthetic oligonucleotide
ctttcggttaaccatgcccaatacccaccgaaggtgagcccaaacgaaggg

SEQ ID NO: 208324 - DNA, 52 bp, Artificial
  Synthetic oligonucleotide
gaaactgttcccgccgacaactaactcccttgttcgcgtggaggggttctcg

SEQ ID NO: 208325 - DNA, 55 bp, Artificial
  Synthetic oligonucleotide
gaacaaggcgttatgtaacggaaagtatggcgattcacgtgagacaagctccccg

SEQ ID NO: 208326 - DNA, 55 bp, Artificial
  Synthetic oligonucleotide
gaacatcccgaccgtgtcgaccgattgatctacgtgtgcggcgcgcggttgacgc

SEQ ID NO: 208327 - DNA, 55 bp, Artificial
  Synthetic oligonucleotide
gaaccactatattcttatagcgccacatcaccgcgactccatggtccccgtactg

SEQ ID NO: 208328 - DNA, 53 bp, Artificial
  Synthetic oligonucleotide
gaacgtccccaccggttcgtgaaatcggctcgcgaatcagaacccgggtagtc

SEQ ID NO: 208329 - DNA, 59 bp, Artificial
  Synthetic oligonucleotide
gtcatacttagtattagtatgggtcgcttcggcatctaggccgatattacgcactaagt

SEQ ID NO: 208330 - DNA, 55 bp, Artificial
  Synthetic oligonucleotide
cgagatggatggcagcgtagctactgctggtagcagtacgtgacaggacactagt

SEQ ID NO: 208331 - DNA, 55 bp, Artificial
  Synthetic oligonucleotide
cgagcacgtgaagccggaacgtcaacttcccagttcatcgccgactcaatggcct

SEQ ID NO: 208332 - DNA, 55 bp, Artificial
  Synthetic oligonucleotide
cgaggatggttgaattttgtgacggatattttgtgttagcgtgatagtgcgagcg

SEQ ID NO: 208333 - DNA, 55 bp, Artificial
  Synthetic oligonucleotide
cgagtgttaatcacaggtatagccggcttcgtaggcagcacacttggcgagcgcc

SEQ ID NO: 208334 - DNA, 54 bp, Artificial
  Synthetic oligonucleotide
cgagttgttcgcaacccagtacaggagaatagccacgggaaggaaaggaccacc

SEQ ID NO: 208335 - DNA, 55 bp, Artificial
  Synthetic oligonucleotide
cgatccccagcgctgtctttccaagaacaaacgacgaagaaatgtcggtaacagt

SEQ ID NO: 208336 - DNA, 55 bp, Artificial
  Synthetic oligonucleotide
cgatccctcagcagtcgggacggtctcattaggtcgctttccttcgtggtaccgg

SEQ ID NO: 208337 - DNA, 55 bp, Artificial
  Synthetic oligonucleotide
cgatggaacaatacatacgacaaacgtgtaatggttgctgaaactgccgcgggag

SEQ ID NO: 208338 - DNA, 55 bp, Artificial
  Synthetic oligonucleotide
cgcacacggctgagcagacgccatgcggatcctatgtgcgcgctatgaaacccga

SEQ ID NO: 208339 - DNA, 55 bp, Artificial
  Synthetic oligonucleotide
cgcacgcaaccgtctaccgcaccccgccctcaactggcttcgtagcttctctgaa

SEQ ID NO: 208340 - DNA, 60 bp, Artificial
  Synthetic oligonucleotide
gtaggcagcaattatttggccgatcaggattgggtgcagcagtacatagccgaggcctat

SEQ ID NO: 208341 - DNA, 55 bp, Artificial
  Synthetic oligonucleotide
cgcaggactggtcacatgccatcccggtgtgaacgtcgggcttaacacattcgga

SEQ ID NO: 208342 - DNA, 55 bp, Artificial
  Synthetic oligonucleotide
cgcatacgtggtgtgcaccgtgagtatcccgaatactgcgttgctatcggacagg

SEQ ID NO: 208343 - DNA, 55 bp, Artificial
  Synthetic oligonucleotide
gcacacggcgcaactagataggtggaaacgcggctacagaatcggtgctgtcgct

SEQ ID NO: 208344 - DNA, 55 bp, Artificial
  Synthetic oligonucleotide
cgccgcaagcaagctgcgttctcgcagaatacaataccgcccaaagctggatacc

SEQ ID NO: 208345 - DNA, 55 bp, Artificial
  Synthetic oligonucleotide
cgccgcccataggtagtatctccgggtagccttcctaggagccgcttctctggga

SEQ ID NO: 208346 - DNA, 53 bp, Artificial
  Synthetic oligonucleotide
cgccgtttgcgggtgcagtggaattgtgtccggcgggcggagttgtttgggtt

SEQ ID NO: 208347 - DNA, 55 bp, Artificial
  Synthetic oligonucleotide
cgcctcgtggttgattgataggaacacggttgcgttcgctgcgacgtaatccgcg

SEQ ID NO: 208348 - DNA, 55 bp, Artificial
  Synthetic oligonucleotide
cgcctgcgaaagttcgatgaccgtcttacggatgtctgggccttggcctcgcaag

SEQ ID NO: 208349 - DNA, 55 bp, Artificial
  Synthetic oligonucleotide
cgcgatgaggctatataggctgacccaatgatcggtatcacccaggcagaagccg

SEQ ID NO: 208350 - DNA, 55 bp, Artificial
  Synthetic oligonucleotide
cctagcaattcccagctagatgtgccgcagtggtggtagtcccaaccgctcggcg

SEQ ID NO: 208351 - DNA, 57 bp, Artificial
  Synthetic oligonucleotide
acagaggacggccacgcaattccgaactcgtagtggttgttgcccctgtaatcgtgc

SEQ ID NO: 208352 - DNA, 55 bp, Artificial
  Synthetic oligonucleotide
gcacggtgctaagtcacagtcgggtgtattgggcgcaggaggcttggtcgttcca

SEQ ID NO: 208353 - DNA, 55 bp, Artificial
  Synthetic oligonucleotide
cctcaggagtcaatgcgtgtggctgaggactttcggcggcctagtccgggtcgtt

SEQ ID NO: 208354 - DNA, 55 bp, Artificial
  Synthetic oligonucleotide
cctgacgagcgccggaccgcatatgaccgtgatgtcacctatgcttcggtcaacg

SEQ ID NO: 208355 - DNA, 55 bp, Artificial
  Synthetic oligonucleotide
cctgcacacaagcgaatctctgtttccccaggtcggattgtgagtacgctctcac

SEQ ID NO: 208356 - DNA, 55 bp, Artificial
  Synthetic oligonucleotide
gcacggtgaatcccggcggtgggacgatgaactgcgttaactgcgcaatcactac

SEQ ID NO: 208357 - DNA, 55 bp, Artificial
  Synthetic oligonucleotide
cctgtcaaggcatctgagcatcgaagcagtatcgcacaccgaagcacttcatggc

SEQ ID NO: 208358 - DNA, 55 bp, Artificial
  Synthetic oligonucleotide
cctgtttcaagcaggcacgccgtcaacaacctgtcaggtcacgacacctagcccg

SEQ ID NO: 208359 - DNA, 53 bp, Artificial
  Synthetic oligonucleotide
ccttctcttccggatcgacctaggcctcaccgggcttccgtggttcctttgta

SEQ ID NO: 208360 - DNA, 55 bp, Artificial
  Synthetic oligonucleotide
cgaacgccacgtttgtcagggacggtccgggctggtacgccttgctggccggatc

SEQ ID NO: 208361 - DNA, 55 bp, Artificial
  Synthetic oligonucleotide
cgaagccacagtcagcgttcattcgcacgatcgcatatttcgatgtgtcaccggt

SEQ ID NO: 208362 - DNA, 58 bp, Artificial
  Synthetic oligonucleotide
accaactcgggatgcagctcccaaaaggggctcaccagctcgcggcagtaacgtccgc

SEQ ID NO: 208363 - DNA, 55 bp, Artificial
  Synthetic oligonucleotide
cgaagtttgcatctcagcggcattggtggccaagcgacactcagcgtagcatcgc

SEQ ID NO: 208364 - DNA, 55 bp, Artificial
  Synthetic oligonucleotide
cgaatctcttcggaccgaaatacggatcatattgtcacggcaggataacaccggt

SEQ ID NO: 208365 - DNA, 55 bp, Artificial
  Synthetic oligonucleotide
aaaggagcgcttgttcagtcgggcgtggttgttcgtggcgcacgaatcggagatt

SEQ ID NO: 208366 - DNA, 55 bp, Artificial
  Synthetic oligonucleotide
cgaccccgtaaccctgagctcgcgatgagctccaccccttcgagaacaggactag

SEQ ID NO: 208367 - DNA, 55 bp, Artificial
  Synthetic oligonucleotide
cgaccgaagtgacgaatgtgttacgcaagttcggcggtattgccacctgcgtggt

SEQ ID NO: 208368 - DNA, 55 bp, Artificial
  Synthetic oligonucleotide
cgacctgcggttttgaggttatctacaggggttgtccacaatggggatgaatcac

SEQ ID NO: 208369 - DNA, 55 bp, Artificial
  Synthetic oligonucleotide
cgacctgtgaggaaccaacaacagtttcagccacgagtgaacactatcggacccc

SEQ ID NO: 208370 - DNA, 55 bp, Artificial
  Synthetic oligonucleotide
cgacgacaatagccccacctttaactccatgcaggtctgtcagaaggcccagtgc

SEQ ID NO: 208371 - DNA, 54 bp, Artificial
  Synthetic oligonucleotide
cgacgagggttcgagggtagtggtcaccgcgactcctgttgagtacctgggaac

SEQ ID NO: 208372 - DNA, 55 bp, Artificial
  Synthetic oligonucleotide
cgagagcccgaatctgtggtggcccgaagatagacgctggtgtgtcgcctccgat

SEQ ID NO: 208373 - DNA, 59 bp, Artificial
  Synthetic oligonucleotide
ggcgcactcggcggacctcttacaacctgccttgatcagggggttgagttatggcagcg

SEQ ID NO: 208374 - DNA, 60 bp, Artificial
  Synthetic oligonucleotide
ggtagtgagtgagtccatgagatcggtggctaccacagcgatcggtgccactcccctatc

SEQ ID NO: 208375 - DNA, 55 bp, Artificial
  Synthetic oligonucleotide
cggctccgactggttacaaacgagtgcgctagtggtagtggcggacacagcacct

SEQ ID NO: 208376 - DNA, 55 bp, Artificial
  Synthetic oligonucleotide
cgggaatcttgaaatcaccaaagagacgacgggcggagtcttcggaagcttcggc

SEQ ID NO: 208377 - DNA, 55 bp, Artificial
  Synthetic oligonucleotide
cgggcactgacaagaagtcgcgccgacagctgctagaactggtgttagctaagtg

SEQ ID NO: 208378 - DNA, 51 bp, Artificial
  Synthetic oligonucleotide
cgggtaatataatatcgggcttcggaaacaaggggaccggctcgttcaacc

SEQ ID NO: 208379 - DNA, 55 bp, Artificial
  Synthetic oligonucleotide
cgggtatggccgcagcatccctcacagtggcgaagactcaatcccgccaaacctt

SEQ ID NO: 208380 - DNA, 51 bp, Artificial
  Synthetic oligonucleotide
cgggtcgtcgacaaaacaaagtcccaatccgtatcgggtttagtcattttc

SEQ ID NO: 208381 - DNA, 55 bp, Artificial
  Synthetic oligonucleotide
cgggtgaatgacgccgacacactgggctcgctcgagaatcaagaccacccgtcag

SEQ ID NO: 208382 - DNA, 55 bp, Artificial
  Synthetic oligonucleotide
cggtcaacgagacgggtgttagtgacactgttcaaccctatgccgttggcgacac

SEQ ID NO: 208383 - DNA, 55 bp, Artificial
  Synthetic oligonucleotide
cggtcaggtcacagtgcctgtaaggggtctagtgaatatccggtacctgcggtac

SEQ ID NO: 208384 - DNA, 55 bp, Artificial
  Synthetic oligonucleotide
cggtcctcgcctaggccgcgcgcctcttgatatcggccgagaataaagatcgcat

SEQ ID NO: 208385 - DNA, 60 bp, Artificial
  Synthetic oligonucleotide
ggtacgcgcctagtttgtcgtcttagcgtgagtcggtggtcagactctgacgtacagctc

SEQ ID NO: 208386 - DNA, 55 bp, Artificial
  Synthetic oligonucleotide
cggtcgatacccagcctaaatggggacgctagcatgcgccgtacaaccagcacgc

SEQ ID NO: 208387 - DNA, 55 bp, Artificial
  Synthetic oligonucleotide
cggtcgcgaaggccatgttcaccagggtagaactgcgcaccgacaagttccgatg

SEQ ID NO: 208388 - DNA, 55 bp, Artificial
  Synthetic oligonucleotide
gatgcgtcctccgctgtagagaatgtaagctacgtctcaccgggccgtcaagaca

SEQ ID NO: 208389 - DNA, 55 bp, Artificial
  Synthetic oligonucleotide
cggtctcgctcgcttttctgagtgatagcgaacccattaattgtgacgtcacctg

SEQ ID NO: 208390 - DNA, 54 bp, Artificial
  Synthetic oligonucleotide
cggtgacctaagctgacgtggctcccaacgaaaccacgttgcgagtaccccgga

SEQ ID NO: 208391 - DNA, 55 bp, Artificial
  Synthetic oligonucleotide
ttgatggcacgtcgctgtatcacgaagccaaagccgccggggtgatttatcaggc

SEQ ID NO: 208392 - DNA, 55 bp, Artificial
  Synthetic oligonucleotide
cggtggaacacaaggcatcgcagttgctgcaaatctcatgacagctgacgcgtcc

SEQ ID NO: 208393 - DNA, 55 bp, Artificial
  Synthetic oligonucleotide
cggtgtgcccaacggtagactgcggaaacctgcgcttatctctagcggtccgaga

SEQ ID NO: 208394 - DNA, 55 bp, Artificial
  Synthetic oligonucleotide
cgcgattatagtcggctgtcgtgagtgcgggtgtggcaacgttgggcgtggatca

SEQ ID NO: 208395 - DNA, 55 bp, Artificial
  Synthetic oligonucleotide
cgcgctactcgatgactgcaacgcattagcgatggccgactcgcatgcgtggtct

SEQ ID NO: 208396 - DNA, 52 bp, Artificial
  Synthetic oligonucleotide
accgcgagaaacgggttgtcaggggttggtgtcacggcctctaatgacccct

SEQ ID NO: 208397 - DNA, 51 bp, Artificial
  Synthetic oligonucleotide
gcaacccggcttttcccggcgttttcgtcctaagtccacccgcgccggaga

SEQ ID NO: 208398 - DNA, 55 bp, Artificial
  Synthetic oligonucleotide
gcaaattgtgcgtgtatttgcttgcgttgcggggaaagctgggtcggacgggtcg

SEQ ID NO: 208399 - DNA, 52 bp, Artificial
  Synthetic oligonucleotide
cgcgggaagagatcacgaatccggcgtcgaagggtttccgtccctctcgggg

SEQ ID NO: 208400 - DNA, 55 bp, Artificial
  Synthetic oligonucleotide
cgcgtcccagccccaattggtcgaacaattccttgagcgccctagccgcataatg

SEQ ID NO: 208401 - DNA, 55 bp, Artificial
  Synthetic oligonucleotide
gattacgcgaccgaatcgtggtccaggtagacggtcaactcaagacgggtcgtga

SEQ ID NO: 208402 - DNA, 55 bp, Artificial
  Synthetic oligonucleotide
cgcgtgaagtacggtccagtgacccagcgggtccacacatagatctgcaatgcca

SEQ ID NO: 208403 - DNA, 55 bp, Artificial
  Synthetic oligonucleotide
ttcgtgaggtgactgagacgacacctccgtgtgtcctggccgtgaggaggtgagg

SEQ ID NO: 208404 - DNA, 55 bp, Artificial
  Synthetic oligonucleotide
cgctcacggacgttccagcgagttccggcactgggagcacacttggatcaccaga

SEQ ID NO: 208405 - DNA, 55 bp, Artificial
  Synthetic oligonucleotide
cgctgtcgcggatttggggtcccggattgttgtagaactgttggcactcggagag

SEQ ID NO: 208406 - DNA, 55 bp, Artificial
  Synthetic oligonucleotide
cggaaatagcaacgcattacgtcacctgattgatctcctaatgccttccggaacg

SEQ ID NO: 208407 - DNA, 60 bp, Artificial
  Synthetic oligonucleotide
accgttcatctgcggaaatagtcatagcagaagcctaccgcccagcaacaatcatgtcta

SEQ ID NO: 208408 - DNA, 53 bp, Artificial
  Synthetic oligonucleotide
cggaatacaggggtccttgttgggccttcccttgcaagagccctatttggtgg

SEQ ID NO: 208409 - DNA, 55 bp, Artificial
  Synthetic oligonucleotide
cggacctatgcgtgaccttaagtatccagtactatccgttccacaaactcgctcg

SEQ ID NO: 208410 - DNA, 55 bp, Artificial
  Synthetic oligonucleotide
gattaccgtcgaagtcagccaggagcacataccggatttccacgtccgggttgag

SEQ ID NO: 208411 - DNA, 55 bp, Artificial
  Synthetic oligonucleotide
cggatctcgctaggccgtattatcggcgaacaagctcacgatgccccacggggtg

SEQ ID NO: 208412 - DNA, 55 bp, Artificial
  Synthetic oligonucleotide
cggcagttactacacggctagcgtattcccggtcgacctagacttgcccgatcgg

SEQ ID NO: 208413 - DNA, 55 bp, Artificial
  Synthetic oligonucleotide
cggcccaggcattcgcgcagtcgccctcgagtacgaacgcctattgcggggcaat

SEQ ID NO: 208414 - DNA, 55 bp, Artificial
  Synthetic oligonucleotide
cggccgcatagttaacactcacacccgtgcgcaaaagttagctggatactcgcgt

SEQ ID NO: 208415 - DNA, 55 bp, Artificial
  Synthetic oligonucleotide
cggccgctgatgtggtctgcatccctagagtatacttcggatagtcgctggtgca

SEQ ID NO: 208416 - DNA, 55 bp, Artificial
  Synthetic oligonucleotide
cggcgcatgtgctggtccgagtcagagaagtagtgtgcgtcgctacagtcaagga

SEQ ID NO: 208417 - DNA, 55 bp, Artificial
  Synthetic oligonucleotide
gtaggtctgctctttctcagtccaggtgactagtgtgccggtttctactgctact

SEQ ID NO: 208418 - DNA, 60 bp, Artificial
  Synthetic oligonucleotide
gggcatgttcgcccaactctgtgaagacctgccctggacgcagaaactgtctgaagtgtg

SEQ ID NO: 208419 - DNA, 55 bp, Artificial
  Synthetic oligonucleotide
gtagcgataaagcggagccagactgaaagctgccaggtgagtaatcatcctagta

SEQ ID NO: 208420 - DNA, 55 bp, Artificial
  Synthetic oligonucleotide
gtagagggatagctcgattttcacgcgaaggacgattgacgggcgacacgcgggg

SEQ ID NO: 208421 - DNA, 55 bp, Artificial
  Synthetic oligonucleotide
gtacgtcaaaccgatttgcccacaacatattacgaagggaagctaactgtggccg

SEQ ID NO: 208422 - DNA, 55 bp, Artificial
  Synthetic oligonucleotide
gtacctcctcgcacagctaaccagcgatggctacgtactgttagcggaccccgga

SEQ ID NO: 208423 - DNA, 55 bp, Artificial
  Synthetic oligonucleotide
acagtggacctgaaggcgtactcgtatgccccgcaccggactgaagacacggacg

SEQ ID NO: 208424 - DNA, 55 bp, Artificial
  Synthetic oligonucleotide
ggtttgccacgcccagtgcatcactgtagaccatcccaaaggtccagttcaagcc

SEQ ID NO: 208425 - DNA, 55 bp, Artificial
  Synthetic oligonucleotide
ggttcgaagtccgatcctggtgtgactggccgtgagtcgtttcgagagtcgctcg

SEQ ID NO: 208426 - DNA, 55 bp, Artificial
  Synthetic oligonucleotide
ggttcaacgctatccttttaggatggttcaacgaacgccagcgatgacaagcgtc

SEQ ID NO: 208427 - DNA, 55 bp, Artificial
  Synthetic oligonucleotide
acattcgcggccggtgcatattagggccgcgatgttaaacgcaggtttcggccgc

SEQ ID NO: 208428 - DNA, 55 bp, Artificial
  Synthetic oligonucleotide
accaaagccccgacaaggagccgcaatgagccatcccggagccactccatccgat

SEQ ID NO: 208429 - DNA, 59 bp, Artificial
  Synthetic oligonucleotide
cggtgctggttcgcctcgtggttgattgataggaacacggttgcgttcgctgcgacgta

SEQ ID NO: 208430 - DNA, 55 bp, Artificial
  Synthetic oligonucleotide
ggttaccgcgtcattccaatacgttacggctgcgctaacttcccgtctcagggtg

SEQ ID NO: 208431 - DNA, 55 bp, Artificial
  Synthetic oligonucleotide
ggtgtgtaggaccgggttaccgagcagtcgcgcccatgcctcgagagggtgttct

SEQ ID NO: 208432 - DNA, 55 bp, Artificial
  Synthetic oligonucleotide
ggtgtctgtaagcgagatcgcggcagaactcgggtacgcggacctcacgaacttc

SEQ ID NO: 208433 - DNA, 55 bp, Artificial
  Synthetic oligonucleotide
ggtggttctgcgatacgtcgagtccggtgttagcttgcctgcagtagccagttcg

SEQ ID NO: 208434 - DNA, 55 bp, Artificial
  Synthetic oligonucleotide
ggtggctactcggtttatgaccgatccgcatgcaatgcgggatatggccggtcgg

SEQ ID NO: 208435 - DNA, 55 bp, Artificial
  Synthetic oligonucleotide
gtcgggtgctgaatccactagctggcgacccagcttcacccagggcatgttgtcg

SEQ ID NO: 208436 - DNA, 55 bp, Artificial
  Synthetic oligonucleotide
gtcggaaacggccttaatatcgaaccagtgtgctcccgcgacgagtttagcgacg

SEQ ID NO: 208437 - DNA, 52 bp, Artificial
  Synthetic oligonucleotide
gtcctgctaacccggagccccaaacctcggggcgactctaatcccctacgta

SEQ ID NO: 208438 - DNA, 55 bp, Artificial
  Synthetic oligonucleotide
gtccgcgaatcatttctaggcgcaccaccgttcctcccaagatgagcggtccaac

SEQ ID NO: 208439 - DNA, 55 bp, Artificial
  Synthetic oligonucleotide
tgcggcaagaggagctcgtaagtaacgccgagcacccgatacgtgggctccgcac

SEQ ID NO: 208440 - DNA, 60 bp, Artificial
  Synthetic oligonucleotide
cgtacagctcctcaacatatccggtgcgcatccagtgtgggcttcgggatacgcacacca

SEQ ID NO: 208441 - DNA, 55 bp, Artificial
  Synthetic oligonucleotide
gtccctctcggggttttgggtctgacgacatgcgaatccgctgtcagcacatggg

SEQ ID NO: 208442 - DNA, 55 bp, Artificial
  Synthetic oligonucleotide
gtcccgggctcgcgattctgatattcctcgatagatcctaccgctagtctgtgtg

SEQ ID NO: 208443 - DNA, 55 bp, Artificial
  Synthetic oligonucleotide
gtcccagcccggtgacctaccctaccccagcaggttgcgaggagctgtcatgtat

SEQ ID NO: 208444 - DNA, 55 bp, Artificial
  Synthetic oligonucleotide
gtccaccagcccgtcgtcagacgcatcgacgttgtctaattccccaggtggcagc

SEQ ID NO: 208445 - DNA, 55 bp, Artificial
  Synthetic oligonucleotide
acacccgccctggggcaaagcgtggggccattagactcagcgacctgggtacata

SEQ ID NO: 208446 - DNA, 55 bp, Artificial
  Synthetic oligonucleotide
gtccaactattgcttgagtaaatcggacgcacaagctgatatttcagatctgggg

SEQ ID NO: 208447 - DNA, 55 bp, Artificial
  Synthetic oligonucleotide
gtccaacggcaaggacacacggcttcaccgcctcaggaacttgcccataccgaca

SEQ ID NO: 208448 - DNA, 55 bp, Artificial
  Synthetic oligonucleotide
tgcgtatttcgttacatcgcctaccacggacgaagtcgtgagaatggctaccggc

SEQ ID NO: 208449 - DNA, 55 bp, Artificial
  Synthetic oligonucleotide
gtcagtcgtccggtccagagctgagcatatcaggtaggtcggcccaccggaggaa

SEQ ID NO: 208450 - DNA, 55 bp, Artificial
  Synthetic oligonucleotide
gtcaggcggccttgttcagtaccgagggcgaagcagattcgggctgccaccgata

SEQ ID NO: 208451 - DNA, 60 bp, Artificial
  Synthetic oligonucleotide
cgtcaatccaacccgctgtatcgggtcctgggtgctcgcaagacatggattgtgttgcgt

SEQ ID NO: 208452 - DNA, 55 bp, Artificial
  Synthetic oligonucleotide
acacgaagcggggcggcgactatgtctcggtgggtccggcggagaagatctatga

SEQ ID NO: 208453 - DNA, 55 bp, Artificial
  Synthetic oligonucleotide
acacgacacggatcgaccacctctacgttgacccgcaccaacagggcgcccggct

SEQ ID NO: 208454 - DNA, 55 bp, Artificial
  Synthetic oligonucleotide
gtatgggtcgcttcggcatctaggccgatattacgcactaagttcctggcgggag

SEQ ID NO: 208455 - DNA, 55 bp, Artificial
  Synthetic oligonucleotide
accgacacaggtgcacgcgatgaccttggcgcactacctagcgaacgtgtcctgg

SEQ ID NO: 208456 - DNA, 55 bp, Artificial
  Synthetic oligonucleotide
ggggtgattgcctcgccacgagcggtaacctggactttccagctgcgtgtatcgg

SEQ ID NO: 208457 - DNA, 55 bp, Artificial
  Synthetic oligonucleotide
ggggtcgagtgcattcggcttatccaaacttcggcgcattcggctacgagatgtt

SEQ ID NO: 208458 - DNA, 54 bp, Artificial
  Synthetic oligonucleotide
ggggtccaccatcgatagggtctacgccacccggggtaaatacgatcaagagcc

SEQ ID NO: 208459 - DNA, 55 bp, Artificial
  Synthetic oligonucleotide
ggggtacacccgatgctaaacgcggattcgcaaccctgcgggaggtcgcgagaaa

SEQ ID NO: 208460 - DNA, 55 bp, Artificial
  Synthetic oligonucleotide
accgtcgtagcgggtcctccagcgcactactcgaacaaccccggttgactcgctc

SEQ ID NO: 208461 - DNA, 55 bp, Artificial
  Synthetic oligonucleotide
tggcattgtcagatgcaccgcagtcatcacaacgtccaattcggccagcactaca

SEQ ID NO: 208462 - DNA, 60 bp, Artificial
  Synthetic oligonucleotide
cgtcacagacgcgaaacgcatcaccacgcggcagtcaactgaaacacgacatgtctggtc

SEQ ID NO: 208463 - DNA, 55 bp, Artificial
  Synthetic oligonucleotide
accgttgacgccgttccgagaccaggtacagcctcggaccatgagtgtggtgagc

SEQ ID NO: 208464 - DNA, 54 bp, Artificial
  Synthetic oligonucleotide
ggggtaacggtagtggctcccggcttgatgactttgtgccggaagacttttcca

SEQ ID NO: 208465 - DNA, 55 bp, Artificial
  Synthetic oligonucleotide
ggggcgcactgcaactgcggataaagcggagtttggctcgcttactccggaaaga

SEQ ID NO: 208466 - DNA, 55 bp, Artificial
  Synthetic oligonucleotide
acgagaccatcgcgtggcgtcacgagttggcacgcctccaaacccatcgttcgtc

SEQ ID NO: 208467 - DNA, 55 bp, Artificial
  Synthetic oligonucleotide
gggctgaacttgacgggtgtcaagaacactgtatgtgatcgggcttacatatgcg

SEQ ID NO: 208468 - DNA, 55 bp, Artificial
  Synthetic oligonucleotide
gggcgaatcagacagggactttcgtcgtacctatcacctacgtagttccatgggc

SEQ ID NO: 208469 - DNA, 55 bp, Artificial
  Synthetic oligonucleotide
aaccagcggaccaccaagccgtccacggctttacgcgtcgtggaatcaggagtgc

SEQ ID NO: 208470 - DNA, 55 bp, Artificial
  Synthetic oligonucleotide
gggcagcacaccaccgaaacacggccgtacgcagacaaaatcctcgccgcggaac

SEQ ID NO: 208471 - DNA, 55 bp, Artificial
  Synthetic oligonucleotide
gggcaccgtgaaccttcggcgccaattcgtcactaaaggattcgtcctcgagttc

SEQ ID NO: 208472 - DNA, 52 bp, Artificial
  Synthetic oligonucleotide
gggattgccggaagtgagtagccgatccgggaacgaccgtaaacgggcctaa

SEQ ID NO: 208473 - DNA, 51 bp, Artificial
  Synthetic oligonucleotide
cgtgcgggtagtaaccggatctctaaaacagggggaggtggtggttactgg

SEQ ID NO: 208474 - DNA, 55 bp, Artificial
  Synthetic oligonucleotide
ggtggcagtctagggcggatagtacacactgcaactgtttcctaccagggacgcg

SEQ ID NO: 208475 - DNA, 55 bp, Artificial
  Synthetic oligonucleotide
ggtggacaccgtcattcgtcttcggactcggctcattcctgttggcgcacctgtg

SEQ ID NO: 208476 - DNA, 55 bp, Artificial
  Synthetic oligonucleotide
ggtgccccgacggtagggccgatgtgcctcaatatgcccgccaaaagtgcggaaa

SEQ ID NO: 208477 - DNA, 55 bp, Artificial
  Synthetic oligonucleotide
ggtgcagctgtggcagtcatcgtggtaactgactcgtcatccaccctgcctggtg

SEQ ID NO: 208478 - DNA, 55 bp, Artificial
  Synthetic oligonucleotide
ggtgcactgggcgatcactagacgcacccgactcaccttagagcgtggccgacaa

SEQ ID NO: 208479 - DNA, 55 bp, Artificial
  Synthetic oligonucleotide
ggtcttggacacccaaccgagcgtaccgggtgttgtgaagacgccattcgcagag

SEQ ID NO: 208480 - DNA, 55 bp, Artificial
  Synthetic oligonucleotide
ggtctagggtcatccaaaccgcctagcgcttgggccgggtgctcagacgcgacat

SEQ ID NO: 208481 - DNA, 55 bp, Artificial
  Synthetic oligonucleotide
ggtccgtgtctcgcagtggatcgaacaacgcgatgtgacgagttccctcactgga

SEQ ID NO: 208482 - DNA, 55 bp, Artificial
  Synthetic oligonucleotide
acccggcacccgcgagttaccgtggcgctatgacccctgccacacatcccgtacg

SEQ ID NO: 208483 - DNA, 55 bp, Artificial
  Synthetic oligonucleotide
ggtagcgtctacgctagctaacgcaacgagacatccgattactacgcacgttagg

SEQ ID NO: 208484 - DNA, 54 bp, Artificial
  Synthetic oligonucleotide
acggtcggtgccatgacgtgttgacgggaacgcctaaggccggtctttcgacac

SEQ ID NO: 208485 - DNA, 49 bp, Artificial
  Synthetic oligonucleotide
cgttggaaccccctgacgggcgtcctaggggccggcccaataacccttc

SEQ ID NO: 208486 - DNA, 55 bp, Artificial
  Synthetic oligonucleotide
ggtagaattgtggtgcggccgtccgatagtgtgccgctgaactacgttgccgagg

SEQ ID NO: 208487 - DNA, 48 bp, Artificial
  Synthetic oligonucleotide
aacccatcagacccggcgttaaccccgaattccccgagccccaaaagt

SEQ ID NO: 208488 - DNA, 55 bp, Artificial
  Synthetic oligonucleotide
gggttaggaaaatacctaactgctatagcgcggatgtaccaagcggtaattgcgc

SEQ ID NO: 208489 - DNA, 54 bp, Artificial
  Synthetic oligonucleotide
gggtggttccgaacgccaaccagctgtaaccttccaagcgccgacgtgtaccgc

SEQ ID NO: 208490 - DNA, 55 bp, Artificial
  Synthetic oligonucleotide
gggtgagcaccagacatacaaggtgaccactactgaggggtacacggtcacgggc

SEQ ID NO: 208491 - DNA, 55 bp, Artificial
  Synthetic oligonucleotide
accctgaacacgcctcgccaattccgggtctcgttgtatgctgccttctggcccc

SEQ ID NO: 208492 - DNA, 55 bp, Artificial
  Synthetic oligonucleotide
gggtcgttgcgttatctcaccccgagaggtgtgtaacgactgtgactgctcacag

SEQ ID NO: 208493 - DNA, 55 bp, Artificial
  Synthetic oligonucleotide
ggggtgtgcatcgaagggacgctatgaacgtgccgacaacggctggtctgacgga

SEQ ID NO: 208494 - DNA, 55 bp, Artificial
  Synthetic oligonucleotide
tcctcagcgagccccagtcagacgtcgccgaaacatcctctgccccttgcgcact

SEQ ID NO: 208495 - DNA, 55 bp, Artificial
  Synthetic oligonucleotide
tcctaaactaagttcagcgcggtacgtggaaggcgaccagctctgcactctctag

SEQ ID NO: 208496 - DNA, 60 bp, Artificial
  Synthetic oligonucleotide
ctaacgccgctgtcaagaggactctggcaaagctcggccgagccgcgtgcatacccacat

SEQ ID NO: 208497 - DNA, 55 bp, Artificial
  Synthetic oligonucleotide
aactctcaggcccaattccgtgaatgggatagctggatttggctccgtaaacccc

SEQ ID NO: 208498 - DNA, 55 bp, Artificial
  Synthetic oligonucleotide
tcccttttcgatgaaagaaggcaccgtccatggtgatcgttggtaccgatgtcca

SEQ ID NO: 208499 - DNA, 54 bp, Artificial
  Synthetic oligonucleotide
tgaccgggtccggaaaccacaaataggcggtcagtgcgtcaacctggaccgttc

SEQ ID NO: 208500 - DNA, 51 bp, Artificial
  Synthetic oligonucleotide
aagaaccccacattaccggtccccgaattaaacaacccacattcccgctgc

SEQ ID NO: 208501 - DNA, 55 bp, Artificial
  Synthetic oligonucleotide
tccccgatggatcggtccggattaagtacgacgccggcaatcctttcgcgccagg

SEQ ID NO: 208502 - DNA, 55 bp, Artificial
  Synthetic oligonucleotide
tccatattagttgagtctaacctaagttcgttagcgcagtctaaccttacccgcc

SEQ ID NO: 208503 - DNA, 55 bp, Artificial
  Synthetic oligonucleotide
tcatactcagacgcgttctcagatagggcaattcggcgatgtcagtccacaccat

SEQ ID NO: 208504 - DNA, 55 bp, Artificial
  Synthetic oligonucleotide
tcataatgctcgcaatgtgataaccagtaaacactgctcggctaggctcttcctg

SEQ ID NO: 208505 - DNA, 55 bp, Artificial
  Synthetic oligonucleotide
tcagcggcttcccttttgatctccacggcgatctgatgggcgtgctccactgctt

SEQ ID NO: 208506 - DNA, 54 bp, Artificial
  Synthetic oligonucleotide
aagcagggttgagcggggctcggctctactcgggtcttacctcgacaaatcccg

SEQ ID NO: 208507 - DNA, 60 bp, Artificial
  Synthetic oligonucleotide
gatcacgaaaacatcacagcagcgcggcgtgtcggagctgagtatctgataccggcggcg

SEQ ID NO: 208508 - DNA, 55 bp, Artificial
  Synthetic oligonucleotide
tcacgatagaaaggcgaagcgtaaccaccatggccgctacaacgaagatgaaggt

SEQ ID NO: 208509 - DNA, 55 bp, Artificial
  Synthetic oligonucleotide
tcaaactctactcgctatccatatgtcagctgatcgtacgtcacataaggcaatc

SEQ ID NO: 208510 - DNA, 55 bp, Artificial
  Synthetic oligonucleotide
tatgacgccacccgagtgcggtgtgtccattactgcctgggatcgacgtgcgcga

SEQ ID NO: 208511 - DNA, 55 bp, Artificial
  Synthetic oligonucleotide
tatctcgacaagatcagacttagtggcgtgcaactcatttgcggcccacttggcc

SEQ ID NO: 208512 - DNA, 55 bp, Artificial
  Synthetic oligonucleotide
aagcggaaacgaggccgaggtctggcgacggaagttgcgctggcacggaaagacg

SEQ ID NO: 208513 - DNA, 55 bp, Artificial
  Synthetic oligonucleotide
tgaaggttcggctcgagcagtcgaagtgcgtgggccatgcccagtgttacgccgt

SEQ ID NO: 208514 - DNA, 55 bp, Artificial
  Synthetic oligonucleotide
tgaacgcgtctcggctgggcagactccacttcgatccggaccgttatcgcaaggg

SEQ ID NO: 208515 - DNA, 55 bp, Artificial
  Synthetic oligonucleotide
tgaaaccgcaggaccaggggctccacttcccctatcgctacgaccttcgactggc

SEQ ID NO: 208516 - DNA, 55 bp, Artificial
  Synthetic oligonucleotide
tgaatccgctgaggccaatgggcccgagtgtaagcgttccggtctcgaggtaggc

SEQ ID NO: 208517 - DNA, 55 bp, Artificial
  Synthetic oligonucleotide
tctgggatatcgggtggcaagcccgcgactgcgtccactggctgcacgtcatctc

SEQ ID NO: 208518 - DNA, 60 bp, Artificial
  Synthetic oligonucleotide
ctcgcacagctataacaatcttccgaagcccccaccaggtcacacatttcgctctgaaac

SEQ ID NO: 208519 - DNA, 55 bp, Artificial
  Synthetic oligonucleotide
tctgcggccttgttcgacaccggatacctcactgacgaccaggcgtccacaccga

SEQ ID NO: 208520 - DNA, 55 bp, Artificial
  Synthetic oligonucleotide
tctgatgtgccatcgagggactggacccggcagacaacacgaagagcgttggcgc

SEQ ID NO: 208521 - DNA, 55 bp, Artificial
  Synthetic oligonucleotide
tctcaaaggatgggaccggacgcgcccgtttggacgctggtcgtatgcccgacca

SEQ ID NO: 208522 - DNA, 55 bp, Artificial
  Synthetic oligonucleotide
aacgcacccgtcaccattcctccgctttgactcattggggcttgccgtacaccgc

SEQ ID NO: 208523 - DNA, 55 bp, Artificial
  Synthetic oligonucleotide
tcggagtgtcgtcatactgtgggtcccgtgaatgctggcgagcactggcgcgcat

SEQ ID NO: 208524 - DNA, 55 bp, Artificial
  Synthetic oligonucleotide
tcgctggcagtgtcttttcttgtagtgcagcatgtttcgatgttcaagtcgccca

SEQ ID NO: 208525 - DNA, 55 bp, Artificial
  Synthetic oligonucleotide
tcgctccaaggcaacggcgcacgcctcctccgaatggaatccacgtgtacgttcc

SEQ ID NO: 208526 - DNA, 55 bp, Artificial
  Synthetic oligonucleotide
tcgcggggcattggagtgccaccgagccgcgaggttagggccgtaatatcggtac

SEQ ID NO: 208527 - DNA, 55 bp, Artificial
  Synthetic oligonucleotide
tcgcacatggcttcacgcctgtctggggccctcggatgccgtaacgggctgtcaa

SEQ ID NO: 208528 - DNA, 51 bp, Artificial
  Synthetic oligonucleotide
tcgacccggaaccaagacccggaactaacgagaaccagggagatacgtcgt

SEQ ID NO: 208529 - DNA, 60 bp, Artificial
  Synthetic oligonucleotide
ctgcgactgcatcacccaacacccgacctcccctgcagttttggtgagcatctccgaaga

SEQ ID NO: 208530 - DNA, 52 bp, Artificial
  Synthetic oligonucleotide
tcgaagtccggaaaccgtagtatttcctccgaacgagaatacgagggaccaa

SEQ ID NO: 208531 - DNA, 55 bp, Artificial
  Synthetic oligonucleotide
tcctttctgttgcgtccgttggggtttcggtaattcacggtcatttgactgagtg

SEQ ID NO: 208532 - DNA, 55 bp, Artificial
  Synthetic oligonucleotide
tccttaagtctcctagccggccgcccagggcagtggcagtcgcgttatgtgtggt

SEQ ID NO: 208533 - DNA, 55 bp, Artificial
  Synthetic oligonucleotide
gttccaagaagcgattcgataggaaccgcactgcgttcagtcgataccctagata

SEQ ID NO: 208534 - DNA, 55 bp, Artificial
  Synthetic oligonucleotide
gttcatgtcgcaacgtactgcatcggaccaacgcatactcgccatccacctgccc

SEQ ID NO: 208535 - DNA, 55 bp, Artificial
  Synthetic oligonucleotide
gttagtactaagctacgcagtacgataacctacgtatctagtcagtagatagtgg

SEQ ID NO: 208536 - DNA, 55 bp, Artificial
  Synthetic oligonucleotide
aatcacctgccagtccggagccgggtgcaccaaccgggcgagttacgtggtgcat

SEQ ID NO: 208537 - DNA, 55 bp, Artificial
  Synthetic oligonucleotide
gttacccctactatctgatcaacgggcgtattccgaaggccgccagcagttttcg

SEQ ID NO: 208538 - DNA, 55 bp, Artificial
  Synthetic oligonucleotide
aatccatccgggagctgcagtattaccggcgtaccgcattcgtgccccagcccgg

SEQ ID NO: 208539 - DNA, 55 bp, Artificial
  Synthetic oligonucleotide
gtgtgtaggcgggcatcctctggcagtaccccacccgggcaacttgaatccggtc

SEQ ID NO: 208540 - DNA, 60 bp, Artificial
  Synthetic oligonucleotide
ctgtgcgccaaccgcttacgcggttgtcttcgattgcgttgctgcggttcgcatttcgtg

SEQ ID NO: 208541 - DNA, 53 bp, Artificial
  Synthetic oligonucleotide
aatcccgtgcggacgctccccgtcgaacagaaccgtccggtctcgaatccacg

SEQ ID NO: 208542 - DNA, 55 bp, Artificial
  Synthetic oligonucleotide
gtggcagctaccgtcaacgcttatgcagaccccgggagtgctcgtagtaattggt

SEQ ID NO: 208543 - DNA, 55 bp, Artificial
  Synthetic oligonucleotide
gtggacggtgacggcatatccaaggtggacatgctggcgtaggtagtcgccctcg

SEQ ID NO: 208544 - DNA, 55 bp, Artificial
  Synthetic oligonucleotide
gtgcggacccaggtcactcgcgcgtcgaccagactgccggaactattgaacatac

SEQ ID NO: 208545 - DNA, 55 bp, Artificial
  Synthetic oligonucleotide
gtgagcatcgacttgaacacggtgcgcgctacattcgagccgatacagcggtgca

SEQ ID NO: 208546 - DNA, 55 bp, Artificial
  Synthetic oligonucleotide
tgccgccagcggggatggtgtgcattctgtccatgggaaaccgggttgatggtgg

SEQ ID NO: 208547 - DNA, 55 bp, Artificial
  Synthetic oligonucleotide
gtctttcgttggttatcccagactgtcgagcgacgttgttttgcactgaacgtcg

SEQ ID NO: 208548 - DNA, 55 bp, Artificial
  Synthetic oligonucleotide
gtctcccgtgcgacaagaaaagcgcaggcaatagcgcaagggcgtagccaaccac

SEQ ID NO: 208549 - DNA, 55 bp, Artificial
  Synthetic oligonucleotide
gtctagacgccccgggtcatccactacagaaagacacgcataccctgcggcgacc

SEQ ID NO: 208550 - DNA, 55 bp, Artificial
  Synthetic oligonucleotide
tgccgtacagtcggccatcgatggaaagttgtgaatcacagctaatgacaacgca

SEQ ID NO: 208551 - DNA, 55 bp, Artificial
  Synthetic oligonucleotide
cttgggggccggaatcccgacaactcgtgtggttacggtcagatcacaacaagaa

SEQ ID NO: 208552 - DNA, 55 bp, Artificial
  Synthetic oligonucleotide
gtcgtactattagttaagcaacgaacgagtcctcctgaatgttagcttgtcctcg

SEQ ID NO: 208553 - DNA, 55 bp, Artificial
  Synthetic oligonucleotide
tatatagcgcgttgcgttcgaaccgagtggccacggaccgcgctgcagcgcacac

SEQ ID NO: 208554 - DNA, 55 bp, Artificial
  Synthetic oligonucleotide
tagtgttacgtgagcgcgtgggctatctcactttggtgatctcttaccaaagccc

SEQ ID NO: 208555 - DNA, 55 bp, Artificial
  Synthetic oligonucleotide
tagtcgtagcactccggacacagcggctgaccaaccagcggggcactgtagtcgt

SEQ ID NO: 208556 - DNA, 55 bp, Artificial
  Synthetic oligonucleotide
tagtacgtggcaagcggaacggttgatcggctagcggtcattgcggtcaccgggc

SEQ ID NO: 208557 - DNA, 55 bp, Artificial
  Synthetic oligonucleotide
tagggactatcgccgggactcatctcgccctcacctcctcacggccaagacacac

SEQ ID NO: 208558 - DNA, 55 bp, Artificial
  Synthetic oligonucleotide
aagctggtcgtagcggacccattcacccggcgtgatggcatcgcctgaacgtgac

SEQ ID NO: 208559 - DNA, 55 bp, Artificial
  Synthetic oligonucleotide
tactgactagatacgtaggttatcgtactgcgtagcttagtactaacttgcgtag

SEQ ID NO: 208560 - DNA, 55 bp, Artificial
  Synthetic oligonucleotide
tacgctccaacgcgttccgctggttacggagcacccgaagtgcggactggtagtc

SEQ ID NO: 208561 - DNA, 55 bp, Artificial
  Synthetic oligonucleotide
taccgagagccgcatgtgggaaagcctatctaccggagccgacagtgtctgatgg

SEQ ID NO: 208562 - DNA, 54 bp, Artificial
  Synthetic oligonucleotide
gaaaccttacgtcatgacgtaacaacttaactacgctagagcgtaacaacgtaa

SEQ ID NO: 208563 - DNA, 55 bp, Artificial
  Synthetic oligonucleotide
tgagggtgacacaactccgccctgctgggagggtccgcctgccacctgtgatcta

SEQ ID NO: 208564 - DNA, 55 bp, Artificial
  Synthetic oligonucleotide
aaggtaggcgtcccgcagattggattcgcgatacggcccggtcagaatgttggta

SEQ ID NO: 208565 - DNA, 55 bp, Artificial
  Synthetic oligonucleotide
aaggtcgtagcgataggggaagtggagcccctggtcctgcggtttcactgcggtg

SEQ ID NO: 208566 - DNA, 55 bp, Artificial
  Synthetic oligonucleotide
aaggtggagcttccccatccgcccgggaatcgcgcacgtccgtaccatcgccgtg

SEQ ID NO: 208567 - DNA, 55 bp, Artificial
  Synthetic oligonucleotide
taaaccccggcacgttactttggcccgaatctgtcccggctgagcgcagtacgtc

SEQ ID NO: 208568 - DNA, 55 bp, Artificial
  Synthetic oligonucleotide
gttgtcgataccgtgtgccagcatgaatttcacatcgtggcatggctaggtggcc

SEQ ID NO: 208569 - DNA, 55 bp, Artificial
  Synthetic oligonucleotide
gttcgaaatgctcttgtgaccgacggcgctcatcgtacccaatctcatccgtagc

SEQ ID NO: 208570 - DNA, 53 bp, Artificial
  Synthetic oligonucleotide
aagttactggacgccgtagccggattcggggtaacgcttggttcgatgttcaa

SEQ ID NO: 208571 - DNA, 55 bp, Artificial
  Synthetic oligonucleotide
gttccaccgaagagttcctggaagtatctctgtgtcacggtcggttgctgttgcg

SEQ ID NO: 208572 - DNA, 55 bp, Artificial
  Synthetic oligonucleotide
agccctcggtcacgcgatatgcgaaacggcacggcagtatccgtcgatgccactc

SEQ ID NO: 208573 - DNA, 60 bp, Artificial
  Synthetic oligonucleotide
gaagcactcggggtggcctccgatactgctgcggctattgccgagcaggctgcacacatc

SEQ ID NO: 208574 - DNA, 55 bp, Artificial
  Synthetic oligonucleotide
gcgggtaagcatgctaggaggcggtgccatcgaattccctatcgccgtagcttgc

SEQ ID NO: 208575 - DNA, 55 bp, Artificial
  Synthetic oligonucleotide
ggcacggcaagagaggtgtgatcgagtatcgtattacagaatgcgaccaggtcac

SEQ ID NO: 208576 - DNA, 55 bp, Artificial
  Synthetic oligonucleotide
ggcacggttcgcggcaacatcaaggtaccggcgaaatcagttgtcgggtcgaagt

SEQ ID NO: 208577 - DNA, 55 bp, Artificial
  Synthetic oligonucleotide
actggctagttgcggagctgactgcgcctcaggtgtgcacgagtacggtgaacgg

SEQ ID NO: 208578 - DNA, 55 bp, Artificial
  Synthetic oligonucleotide
ggcattggatcgtcgaataagaagctgtcggatctgttgatgcgtcaagacgaga

SEQ ID NO: 208579 - DNA, 55 bp, Artificial
  Synthetic oligonucleotide
actgcgcacgtcacattcacccaggccggtgaactcctgacactgccgattcccc

SEQ ID NO: 208580 - DNA, 55 bp, Artificial
  Synthetic oligonucleotide
ggccacgatctgatactcgtttccctggtcgtccacattgggtacgacgtagccg

SEQ ID NO: 208581 - DNA, 55 bp, Artificial
  Synthetic oligonucleotide
actctggcaaagctcggccgagccgcgtgcatacccacatgccatgtctgccatc

SEQ ID NO: 208582 - DNA, 55 bp, Artificial
  Synthetic oligonucleotide
ggccaggctcggttctgcagggtctccgacctttagacgcccgacgtttctcaag

SEQ ID NO: 208583 - DNA, 55 bp, Artificial
  Synthetic oligonucleotide
gcggggagcgcgtttcgctcaccccggttaacacgactgattgattcaggtccac

SEQ ID NO: 208584 - DNA, 60 bp, Artificial
  Synthetic oligonucleotide
gaatcagtggagattgacgaattgtgcggggctactttgacagaccatcggcgtgtctag

SEQ ID NO: 208585 - DNA, 55 bp, Artificial
  Synthetic oligonucleotide
ggccccggagcatatgcagcccactcgtgcccgttctactcacaccttgtactgt

SEQ ID NO: 208586 - DNA, 54 bp, Artificial
  Synthetic oligonucleotide
actccgcaacaacccctaaacccaccacgctgcgggacgcttcactcctatcgg

SEQ ID NO: 208587 - DNA, 55 bp, Artificial
  Synthetic oligonucleotide
gcgtctacgctgcgaacgcaaacgagacatcggattaggcgcgcacgttggagat

SEQ ID NO: 208588 - DNA, 55 bp, Artificial
  Synthetic oligonucleotide
ggacgcaaaacagattgtcgttcagtggacacgactgaaccgcttcaccgagggc

SEQ ID NO: 208589 - DNA, 54 bp, Artificial
  Synthetic oligonucleotide
actacgccaagaatgggtaaccggtttccgccggataatgtcgttgccaataga

SEQ ID NO: 208590 - DNA, 55 bp, Artificial
  Synthetic oligonucleotide
ggaagtaagccttccggcatacttcggttggtagccatcggagggtgcgcacgcg

SEQ ID NO: 208591 - DNA, 55 bp, Artificial
  Synthetic oligonucleotide
acgtcggataccgcgacggtcctatcccgactggatggccactgacgcgtcgagc

SEQ ID NO: 208592 - DNA, 55 bp, Artificial
  Synthetic oligonucleotide
ggccctgttcggccctatgggttccctgttgatctgccctgttcgtagtctcgac

SEQ ID NO: 208593 - DNA, 55 bp, Artificial
  Synthetic oligonucleotide
agcgatgaagcactcggcgacatcatctgaggcgcatgcccgtgcaacgtggcct

SEQ ID NO: 208594 - DNA, 55 bp, Artificial
  Synthetic oligonucleotide
ggaacagctctccgctcaacgtaggacacgagtgggtaaccaccatcctgtccat

SEQ ID NO: 208595 - DNA, 60 bp, Artificial
  Synthetic oligonucleotide
ggcaccagagatcaccgccgtgcagtagaccacccgctcaatcgtggcccctgtccagac

SEQ ID NO: 208596 - DNA, 60 bp, Artificial
  Synthetic oligonucleotide
gaatgcgacgcgcatacgcacccaaaaaattgctgcccgacacatagatcccaacgacgg

SEQ ID NO: 208597 - DNA, 55 bp, Artificial
  Synthetic oligonucleotide
ggcctcatcgacttggttcgggcatcccagtggacgtgtatggacactcgtcgcc

SEQ ID NO: 208598 - DNA, 54 bp, Artificial
  Synthetic oligonucleotide
tggggtgttttcgtcacgcggatagttgacgacctcttagtcggtagcggaacg

SEQ ID NO: 208599 - DNA, 55 bp, Artificial
  Synthetic oligonucleotide
ggattgactcgccctgtctcagcggccttctgaatttcgcgagcggctatcgagc

SEQ ID NO: 208600 - DNA, 55 bp, Artificial
  Synthetic oligonucleotide
agatcaccgacacaaggatgggcaccagtgagccaatcggcgggttacggtatcc

SEQ ID NO: 208601 - DNA, 55 bp, Artificial
  Synthetic oligonucleotide
agtccatgagatcggtggctaccacagcgatcggtgccactcccctatcgagcgg

SEQ ID NO: 208602 - DNA, 55 bp, Artificial
  Synthetic oligonucleotide
ggcaaggtaggaacccgccagcgccataccttgtcgggccactcaggtcggagtg

SEQ ID NO: 208603 - DNA, 55 bp, Artificial
  Synthetic oligonucleotide
ggcaataccacgactgcatgtcctcgactctaaacggcccggtgactctagcctt

SEQ ID NO: 208604 - DNA, 55 bp, Artificial
  Synthetic oligonucleotide
tgggtttcggggtcatccatgtcttgagcacagtgtggtcgtactccatgagggg

SEQ ID NO: 208605 - DNA, 55 bp, Artificial
  Synthetic oligonucleotide
ggatccacgggaaccagttgagaccgaactggagttcatcgctggcgtcatagtc

SEQ ID NO: 208606 - DNA, 55 bp, Artificial
  Synthetic oligonucleotide
agtcccggtgaggtatcgatccgaatcgaggtgcctgccgcgtcaccaagcgtgt

SEQ ID NO: 208607 - DNA, 60 bp, Artificial
  Synthetic oligonucleotide
gaggcagaccgacgcacacctccgtagctgtcgggccgaaatcagcaactctgagggctt

SEQ ID NO: 208608 - DNA, 55 bp, Artificial
  Synthetic oligonucleotide
ggcaattcgtcaagggccagttcgcttctgacgctccggtagtagttctcggtac

SEQ ID NO: 208609 - DNA, 55 bp, Artificial
  Synthetic oligonucleotide
agacaaacggacgcgtagtcagtgacgggtctgtcgagtagatattcgcaacatc

SEQ ID NO: 208610 - DNA, 55 bp, Artificial
  Synthetic oligonucleotide
ggaggggctctcaggcgagactaggtcgggatccggtgtgggaggtaataccgat

SEQ ID NO: 208611 - DNA, 55 bp, Artificial
  Synthetic oligonucleotide
ggactgcgttggaacatcccgaccgtgtcgaccgattgatctacgtgtgcggcgc

SEQ ID NO: 208612 - DNA, 55 bp, Artificial
  Synthetic oligonucleotide
ggacgggtgaggctaatgacggcgacgaatgcagatgtgctatacaactataaga

SEQ ID NO: 208613 - DNA, 55 bp, Artificial
  Synthetic oligonucleotide
tgtatgagagcgctcgggcgttgggccgccgctgattgtccggccctacgcagcg

SEQ ID NO: 208614 - DNA, 55 bp, Artificial
  Synthetic oligonucleotide
acttcgcgttgatcgtgctcactggcctcactccaggaagcgcgctcccgtactc

SEQ ID NO: 208615 - DNA, 55 bp, Artificial
  Synthetic oligonucleotide
gcgtaaccgctccacacgccagtgccttactaccgataaacggagctctcaaatc

SEQ ID NO: 208616 - DNA, 54 bp, Artificial
  Synthetic oligonucleotide
acttcctcgaagtgcacgggaccaccggtgtaccggctgcgttccaacggcgga

SEQ ID NO: 208617 - DNA, 55 bp, Artificial
  Synthetic oligonucleotide
agccagcgtcgcagctccgcacgaagagaatgtccgacaatgcctagggccacac

SEQ ID NO: 208618 - DNA, 60 bp, Artificial
  Synthetic oligonucleotide
gacgctggtgtgtcgcctccgatatagacctaatggcgacctacgttggaggctcactcg

SEQ ID NO: 208619 - DNA, 55 bp, Artificial
  Synthetic oligonucleotide
gcgtccgagccactcgaaagacactctgacccgaactcgcaacgatgtttagccc

SEQ ID NO: 208620 - DNA, 55 bp, Artificial
  Synthetic oligonucleotide
acttatgctgcgtccactgggaatcagcagtgtggccggcgtgtgacacgagttt

SEQ ID NO: 208621 - DNA, 55 bp, Artificial
  Synthetic oligonucleotide
acggcgacgtcactggccggttttaggcttggagaatgcacccgagctcaggacc

SEQ ID NO: 208622 - DNA, 55 bp, Artificial
  Synthetic oligonucleotide
gcgggcatcaattggagcagcggagggtttacacggtggagaacgatccacgtgc

SEQ ID NO: 208623 - DNA, 55 bp, Artificial
  Synthetic oligonucleotide
gctgaagtcgatacaccataagcagcctacgggccgggtggtctagtacatggcc

SEQ ID NO: 208624 - DNA, 55 bp, Artificial
  Synthetic oligonucleotide
aggaagtggggtgcaatcccaatgagcacacagtccgccttcgcgcggttactga

SEQ ID NO: 208625 - DNA, 55 bp, Artificial
  Synthetic oligonucleotide
ggctctgagatcgaaagcgtttcacaagaccaccttccaggaccggccagatggc

SEQ ID NO: 208626 - DNA, 55 bp, Artificial
  Synthetic oligonucleotide
gctccacagctttccccgacgggataaagcaacggactctagtttgtcgttggcg

SEQ ID NO: 208627 - DNA, 55 bp, Artificial
  Synthetic oligonucleotide
aggcatcgcataatcggtcgaaactgggcagccgaacgcccactcaactgcagtg

SEQ ID NO: 208628 - DNA, 55 bp, Artificial
  Synthetic oligonucleotide
gctcagcatcgatgtggcggcccgtgaagtgggcctcgacggtgaatcgatcttg

SEQ ID NO: 208629 - DNA, 57 bp, Artificial
  Synthetic oligonucleotide
gagattgtggatcattctggcgtacgcggggtttcgtcggagtgggacggtagaata

SEQ ID NO: 208630 - DNA, 54 bp, Artificial
  Synthetic oligonucleotide
tgtccccactgtgtacagtatggccggttccgcgagaccggaaaggggtcggta

SEQ ID NO: 208631 - DNA, 55 bp, Artificial
  Synthetic oligonucleotide
gctatgtcgacgatcgacattagtgccggaaccatccattacgaagcaaccggac

SEQ ID NO: 208632 - DNA, 55 bp, Artificial
  Synthetic oligonucleotide
gcggctgccgaaatcagggcccttgtaggttgccattctccgtgtcgaattgcca

SEQ ID NO: 208633 - DNA, 55 bp, Artificial
  Synthetic oligonucleotide
gctacaccacatgccggacaagggaattcgctacggcttacagacgatgtgcgag

SEQ ID NO: 208634 - DNA, 55 bp, Artificial
  Synthetic oligonucleotide
acgcgcagatccgtaccgggtgtaggacttcgtgtcgtcgtcatcgaatcccgct

SEQ ID NO: 208635 - DNA, 55 bp, Artificial
  Synthetic oligonucleotide
aacagagcggcggcgcttcagtagtctggcgctcatgccttgcaacacgggacag

SEQ ID NO: 208636 - DNA, 55 bp, Artificial
  Synthetic oligonucleotide
gggaagtcgaaagacggcatggcctgttgggatctcgcccgatgtagtcgacccg

SEQ ID NO: 208637 - DNA, 55 bp, Artificial
  Synthetic oligonucleotide
aggctcggcacggaggcaaaccgtgggttagtctgcccgacatgcgtcgatacga

SEQ ID NO: 208638 - DNA, 55 bp, Artificial
  Synthetic oligonucleotide
gggacaagaccgctttgtcgtgttcccattcggcctggattgcagcgagttggtg

SEQ ID NO: 208639 - DNA, 55 bp, Artificial
  Synthetic oligonucleotide
gctactgccaaacgcctgcctgtgggaatcagtccacctcgcagtgtatcccgcg

SEQ ID NO: 208640 - DNA, 60 bp, Artificial
  Synthetic oligonucleotide
gagcccaattccctcgacagggagtgtctggcgtgctggcatcttgagcgctggcaccac

SEQ ID NO: 208641 - DNA, 55 bp, Artificial
  Synthetic oligonucleotide
gggactccgccgtcagaatcgcatccatgccgtgggtacgaccacccatgtaggt

SEQ ID NO: 208642 - DNA, 52 bp, Artificial
  Synthetic oligonucleotide
gggagtaaacggtccgtaacacgcttttaaccaacgctcaggagactaacga

SEQ ID NO: 208643 - DNA, 55 bp, Artificial
  Synthetic oligonucleotide
agggaatacgccttgcaacgcatattgtgggtgtggagcggttcgcattgtcggg

SEQ ID NO: 208644 - DNA, 55 bp, Artificial
  Synthetic oligonucleotide
agtgctccggtcatcttgacgcggccgtaaggggtttgccagaatcgcacgtccg

SEQ ID NO: 208645 - DNA, 55 bp, Artificial
  Synthetic oligonucleotide
ggcgtcaaaagttgtacgacaacacggggtctgcgttcatagtcgaggctgatcc

SEQ ID NO: 208646 - DNA, 55 bp, Artificial
  Synthetic oligonucleotide
ggcgtatttgttctggttccgctattagaattcgcggttgtcttggaactggcga

SEQ ID NO: 208647 - DNA, 55 bp, Artificial
  Synthetic oligonucleotide
aaccaaccgccggcacgttactttggcccgaatctgtcccggctgagcgcagtac

SEQ ID NO: 208648 - DNA, 54 bp, Artificial
  Synthetic oligonucleotide
ggcggttcacagtgttccgtcccctctcgtggttttgggtctgacgactgggag

SEQ ID NO: 208649 - DNA, 55 bp, Artificial
  Synthetic oligonucleotide
gctgacaggtctcacggtagcgcacacccgtctgcagttctagatgacgcgcacc

SEQ ID NO: 208650 - DNA, 55 bp, Artificial
  Synthetic oligonucleotide
agcgtgtcgcgcgagccccaaacgacgtgtcgctgcacagccatcaaacggtcag

SEQ ID NO: 208651 - DNA, 60 bp, Artificial
  Synthetic oligonucleotide
gagccgaatgctcagtcatcggcatagagacctcactaaaagccaagagggcgaatcctt

SEQ ID NO: 208652 - DNA, 55 bp, Artificial
  Synthetic oligonucleotide
gcttcgcgcgtggttaggcggacgtgttaggatgaagtaacgaaaggggctcgaa

SEQ ID NO: 208653 - DNA, 54 bp, Artificial
  Synthetic oligonucleotide
ggcggaaccgttttaagactgcgcgagtagggattcattgttcggttacgtcga

SEQ ID NO: 208654 - DNA, 55 bp, Artificial
  Synthetic oligonucleotide
acgggatgtgaaagctacatcacaggtgcattgcgttgactttggcggcgcatgc

SEQ ID NO: 208655 - DNA, 55 bp, Artificial
  Synthetic oligonucleotide
agggtggcgacgagaacgcgacttgttcgcatatcaccggcctacagtcgctgtt

SEQ ID NO: 208656 - DNA, 55 bp, Artificial
  Synthetic oligonucleotide
gctggccctaacgcggaatcgcaaccaaactgtgactggcgcgacatgtgtggcg

SEQ ID NO: 208657 - DNA, 55 bp, Artificial
  Synthetic oligonucleotide
gctgtctcgttgtagaaacgccgctgctcaaaacgtttgcagcgcttggctcgcc

SEQ ID NO: 208658 - DNA, 55 bp, Artificial
  Synthetic oligonucleotide
ggccttcgtcgtattagcggtgggtccgcaaacctatggatttgtcacgtcttgc

SEQ ID NO: 208659 - DNA, 54 bp, Artificial
  Synthetic oligonucleotide
cggtatccagacagctacttaaatatataccctatacgggtatctggtaacccc

SEQ ID NO: 208660 - DNA, 54 bp, Artificial
  Synthetic oligonucleotide
tcaccttgtagtcacttgagcaccggtgagtagatggaatcgactggaatgcgc

SEQ ID NO: 208661 - DNA, 54 bp, Artificial
  Synthetic oligonucleotide
caacatgtgccgtaatcggctcgaacgcttccattcccaggcgctcggtagttc

SEQ ID NO: 208662 - DNA, 55 bp, Artificial
  Synthetic oligonucleotide
atcgaggttctagggctcgggtgtagcgagtattcgttcccattgggtgcgtccc

SEQ ID NO: 208663 - DNA, 54 bp, Artificial
  Synthetic oligonucleotide
gcaaggccagaagctgtgaagtccggcgtaacgactggcccggaatccaaactg

SEQ ID NO: 208664 - DNA, 54 bp, Artificial
  Synthetic oligonucleotide
ggatcgcggcgtggactgcgttggaacatcccgaccgtgtcgaccgattgatct

SEQ ID NO: 208665 - DNA, 54 bp, Artificial
  Synthetic oligonucleotide
tcacggatacggtgcttcctgtggttggtggcccaccgtactctggtgacaaac

SEQ ID NO: 208666 - DNA, 54 bp, Artificial
  Synthetic oligonucleotide
tcatcccgatagcgactaccttcagctataagcacttatcagctataagcactt

SEQ ID NO: 208667 - DNA, 54 bp, Artificial
  Synthetic oligonucleotide
tatgggacgacgtccgggaatgcgtcgggggatacacctgtcatctcggattcg

SEQ ID NO: 208668 - DNA, 54 bp, Artificial
  Synthetic oligonucleotide
cttaagaggaagcgacaaccgtagggatcggttgtctctttctcgcctcctgga

SEQ ID NO: 208669 - DNA, 54 bp, Artificial
  Synthetic oligonucleotide
agctagctcgcagacaatggagtgcgctaccagaacaatggacgtatttgcgta

SEQ ID NO: 208670 - DNA, 54 bp, Artificial
  Synthetic oligonucleotide
cttccctatcacatatgccatgccgtagagtttacacaagtgcggttgtataaa

SEQ ID NO: 208671 - DNA, 54 bp, Artificial
  Synthetic oligonucleotide
gtgcagctttgcgacctacccgttcttcatcaacctaagacgacggctcgggcg

SEQ ID NO: 208672 - DNA, 54 bp, Artificial
  Synthetic oligonucleotide
atccgagtctgttcgtcacgacctgtggtgggactaccggagctgcatgaaaga

SEQ ID NO: 208673 - DNA, 60 bp, Artificial
  Synthetic oligonucleotide
atggtccgcacagtgcgtgcgtcgacaatatgggacgacgtccggaaatgcgtaggcgga

SEQ ID NO: 208674 - DNA, 54 bp, Artificial
  Synthetic oligonucleotide
gtttctaggatggccaccagctgaaaattagctaatgctggcccgtacgttgga

SEQ ID NO: 208675 - DNA, 54 bp, Artificial
  Synthetic oligonucleotide
aagaacgatatgacaccagatatgtgtgaaccgatatcttttagggaagcgccc

SEQ ID NO: 208676 - DNA, 54 bp, Artificial
  Synthetic oligonucleotide
gcgagttccattgcggtgccatggtttctggagtggtcgcgcagatcaattggc

SEQ ID NO: 208677 - DNA, 54 bp, Artificial
  Synthetic oligonucleotide
ttgctgcacggtcgggtaacgcaccttttcgacgggaattccggtggacagatc

SEQ ID NO: 208678 - DNA, 53 bp, Artificial
  Synthetic oligonucleotide
ggtcaactaacctaccgagccgaagcaagccccagtcaccctaaacgaccgga

SEQ ID NO: 208679 - DNA, 54 bp, Artificial
  Synthetic oligonucleotide
actcacctgcgtcaactctccgaaactgccgaattgttgtacggtaccgccctt

SEQ ID NO: 208680 - DNA, 54 bp, Artificial
  Synthetic oligonucleotide
gcggccgccagggtgggtcggactggaatcttagtgccctcttaagcaacaatg

SEQ ID NO: 208681 - DNA, 54 bp, Artificial
  Synthetic oligonucleotide
gacacgggcccacccgtgcggggtgtgtctgcgcgcccagtgtggtgttgaggg

SEQ ID NO: 208682 - DNA, 54 bp, Artificial
  Synthetic oligonucleotide
gaggaggcactcagataagagaacctcccgacacaccggggcggatcattaccc

SEQ ID NO: 208683 - DNA, 54 bp, Artificial
  Synthetic oligonucleotide
tcgctgttctcagattcgggtttggacaacgcttttcggcgtcgctggttcggt

SEQ ID NO: 208684 - DNA, 59 bp, Artificial
  Synthetic oligonucleotide
gcgagactttgtggtccggcgcttggcggataagccgctcagaaacctcgcggtgagga

SEQ ID NO: 208685 - DNA, 54 bp, Artificial
  Synthetic oligonucleotide
gcacaccattgtgacttgcccacgcacatgacaccatcgcagttatgtctcaag

SEQ ID NO: 208686 - DNA, 54 bp, Artificial
  Synthetic oligonucleotide
tgcgtggctataaggccttcaagcatctttcgccccaggtgtacgcccccggca

SEQ ID NO: 208687 - DNA, 54 bp, Artificial
  Synthetic oligonucleotide
agacggcactgaaataggtttacgtcagagcggtaaaggttggggcgacactat

SEQ ID NO: 208688 - DNA, 54 bp, Artificial
  Synthetic oligonucleotide
acctccgagcccgctgacgattcacgagagaggcagtgcacgtgcgtgacacga

SEQ ID NO: 208689 - DNA, 54 bp, Artificial
  Synthetic oligonucleotide
ttcctaggcctccgtcgtctggtgtggtgcggtatcggcgcatgtgtgtgcggt

SEQ ID NO: 208690 - DNA, 53 bp, Artificial
  Synthetic oligonucleotide
taccttcgaaagccttgacaaagcggggcgagcgtttcgttatagtcggctta

SEQ ID NO: 208691 - DNA, 53 bp, Artificial
  Synthetic oligonucleotide
actacacccaggtacgtagatatggcagcgaataagtgccgcagcacatgctt

SEQ ID NO: 208692 - DNA, 53 bp, Artificial
  Synthetic oligonucleotide
tttacggttcaatgcgactaaataacccaacaacgcgaaaggacgataggaac

SEQ ID NO: 208693 - DNA, 53 bp, Artificial
  Synthetic oligonucleotide
ggaagaggcacggccagtgctcggagtacaggtagacatcggtgcagttgtcg

SEQ ID NO: 208694 - DNA, 53 bp, Artificial
  Synthetic oligonucleotide
caaggggtcattagaggccgtgacaccaacccctgacaacccgtttctcgcgg

SEQ ID NO: 208695 - DNA, 53 bp, Artificial
  Synthetic oligonucleotide
caaacgacgtaacaacgtaaagacgtaattacgtctttacgttgtctgccagc

SEQ ID NO: 208696 - DNA, 53 bp, Artificial
  Synthetic oligonucleotide
atcgtacaccacaatgccgaattatgctgcatctcagcgtctttcaaagcgta

SEQ ID NO: 208697 - DNA, 53 bp, Artificial
  Synthetic oligonucleotide
acgtaattacgtctttacgttgtctgccagccaccgatcggctaaatcggtga

SEQ ID NO: 208698 - DNA, 53 bp, Artificial
  Synthetic oligonucleotide
tatcctagccacggtcgcgaggcgtccatagcgtggttgtcatgacatcggtg

SEQ ID NO: 208699 - DNA, 53 bp, Artificial
  Synthetic oligonucleotide
ccagcaataggcgcgtcatccaatcctcagaggcgtaggtcatggccacctca

SEQ ID NO: 208700 - DNA, 53 bp, Artificial
  Synthetic oligonucleotide
ctgtactggggcacgtcctgcccggaatacgtcgcgttcggatcacccttcca

SEQ ID NO: 208701 - DNA, 53 bp, Artificial
  Synthetic oligonucleotide
attgcacccgcccgaatcgatagatcacgccccgttggtattgcttgatgacg

SEQ ID NO: 208702 - DNA, 53 bp, Artificial
  Synthetic oligonucleotide
aaagtcgagtcactcgagatctctcggaccggtgtcacggccatactgcgaat

SEQ ID NO: 208703 - DNA, 53 bp, Artificial
  Synthetic oligonucleotide
gcagaggacatcgcgcaatccgtcgatgtgccgtgggagatccaggaacgcga

SEQ ID NO: 208704 - DNA, 51 bp, Artificial
  Synthetic oligonucleotide
aaggggttattctgttttcgttgtttggtgtggcggtgataacgtcgcgtt

SEQ ID NO: 208705 - DNA, 53 bp, Artificial
  Synthetic oligonucleotide
gtttagacagccattggagataccgctcaaccgcgtcggccaacaagtgccag

SEQ ID NO: 208706 - DNA, 60 bp, Artificial
  Synthetic oligonucleotide
ggatgacggtatgcggttgtctctggatacggtcgcacgggaagtatgcgcgctgactgt

SEQ ID NO: 208707 - DNA, 60 bp, Artificial
  Synthetic oligonucleotide
gccgtcacatgtcggagtgtcgtcatactgtgggtcccgtgaatgctggcgagcactggc

SEQ ID NO: 208708 - DNA, 53 bp, Artificial
  Synthetic oligonucleotide
gacgggtccacaatctactatgccactcagtaggacgttgagaaatctgcgag

SEQ ID NO: 208709 - DNA, 53 bp, Artificial
  Synthetic oligonucleotide
tgtcatctgcgttcctccggtcaactagctctcgctcgtgtgttcgactctaa

SEQ ID NO: 208710 - DNA, 53 bp, Artificial
  Synthetic oligonucleotide
cgtaatccgctgcagcacaacgccgtatgcggtagcagcggccctagcataac

SEQ ID NO: 208711 - DNA, 53 bp, Artificial
  Synthetic oligonucleotide
agctcagggtttcccttcctgccgcctagccatcacatcgtgaagaccagtag

SEQ ID NO: 208712 - DNA, 53 bp, Artificial
  Synthetic oligonucleotide
agctgacgcagtaggctcacttagccgagcggcttcttcgaacaaccggtcag

SEQ ID NO: 208713 - DNA, 53 bp, Artificial
  Synthetic oligonucleotide
taattcggcattcatccagggagagattggtgaggacatgattaccttccgac

SEQ ID NO: 208714 - DNA, 53 bp, Artificial
  Synthetic oligonucleotide
cgtattgtctggtccgctattaaatcgcggttgtcttgtgaactggcgatact

SEQ ID NO: 208715 - DNA, 53 bp, Artificial
  Synthetic oligonucleotide
acgaccagccccgtcgactcatcgtccctccacgccctcattcggggcatatg

SEQ ID NO: 208716 - DNA, 53 bp, Artificial
  Synthetic oligonucleotide
acggcagtcattatctaatccactccttcggtcgacgagtcaaacggggtaca

SEQ ID NO: 208717 - DNA, 53 bp, Artificial
  Synthetic oligonucleotide
ctgcagttgcaccaaccggtgcttgggaatcggtagtcgccgaatccctggct

SEQ ID NO: 208718 - DNA, 58 bp, Artificial
  Synthetic oligonucleotide
gccgggggtcgatagatcgtctgtaccggacagctccgtcccattctggacatacttc

SEQ ID NO: 208719 - DNA, 53 bp, Artificial
  Synthetic oligonucleotide
cacggcctctaatgaccccttgggggccggaatcccgacaactcgtgtggtta

SEQ ID NO: 208720 - DNA, 53 bp, Artificial
  Synthetic oligonucleotide
ggatactcagtcgccagtcggtagtcaatcgacaagacgtggatgtcaactcg

SEQ ID NO: 208721 - DNA, 53 bp, Artificial
  Synthetic oligonucleotide
gtcccgcgggccacaaaaggcagtgccgcggaacttcttggcccaaacgggca

SEQ ID NO: 208722 - DNA, 53 bp, Artificial
  Synthetic oligonucleotide
gtaagacgtggattgtgttgcgtaccaacggactcgatgtctcacggtgtgtt

SEQ ID NO: 208723 - DNA, 53 bp, Artificial
  Synthetic oligonucleotide
aacacgtcgaacacatgtttgattcttggtgcgaatgcgactacattcattgc

SEQ ID NO: 208724 - DNA, 53 bp, Artificial
  Synthetic oligonucleotide
tgggagtacaacatgactcactgtcagtcgcaccagaacatctgcgacctcct

SEQ ID NO: 208725 - DNA, 53 bp, Artificial
  Synthetic oligonucleotide
gggatatgtcacacgaaatgcgggtgggacatgaccggggcacgtcggcgaaa

SEQ ID NO: 208726 - DNA, 53 bp, Artificial
  Synthetic oligonucleotide
gcatcatgcggcgatggggtctgcgggaaaggtgatcccagcacttcagacac

SEQ ID NO: 208727 - DNA, 53 bp, Artificial
  Synthetic oligonucleotide
tcacaaccgagcagctagctcgcgttcccagcggctcaattccggtgcagtca

SEQ ID NO: 208728 - DNA, 53 bp, Artificial
  Synthetic oligonucleotide
tgaacccagtgcagatctgactattgagggtgctccgtcatcgatcgtgcaat

SEQ ID NO: 208729 - DNA, 60 bp, Artificial
  Synthetic oligonucleotide
cagtagcggggccgctgcgtcgagacagtgaacctggcgaccacacggttggctccgcga

SEQ ID NO: 208730 - DNA, 53 bp, Artificial
  Synthetic oligonucleotide
aaatgagcagagcggaagtaaggggaacccagctactacgccgagcacagaag

SEQ ID NO: 208731 - DNA, 53 bp, Artificial
  Synthetic oligonucleotide
ttcacccgccacgatacctacctgaccccaccccacggaattggatttcggct

SEQ ID NO: 208732 - DNA, 53 bp, Artificial
  Synthetic oligonucleotide
ttcgtgtcgagctgaatgcgtcgggattggaagtcacggtgattgctccgggg

SEQ ID NO: 208733 - DNA, 53 bp, Artificial
  Synthetic oligonucleotide
agcgaccatggtccgtgccacggccgcaggaatgggaccgtagccgcacagct

SEQ ID NO: 208734 - DNA, 53 bp, Artificial
  Synthetic oligonucleotide
tccgctcattgcctgtccggctcagatcggtgagtcgcttgctatttctgatc

SEQ ID NO: 208735 - DNA, 53 bp, Artificial
  Synthetic oligonucleotide
tttcggtgggttcacgcttgagcggaggcactcggatcgaacggagccgtagt

SEQ ID NO: 208736 - DNA, 53 bp, Artificial
  Synthetic oligonucleotide
tggcggagtctgcttggggtctagaaacagagtcatatcgggcggagtcgcgc

SEQ ID NO: 208737 - DNA, 53 bp, Artificial
  Synthetic oligonucleotide
aatgaccccttgggggccggaatcccgacaactcgtgtggttacggtcagatc

SEQ ID NO: 208738 - DNA, 53 bp, Artificial
  Synthetic oligonucleotide
gacagttcgagcacttcgcgtgagcacagcccggcagacgggggttcttgcgt

SEQ ID NO: 208739 - DNA, 53 bp, Artificial
  Synthetic oligonucleotide
agccgaatcgatctcggtccagtagtcgggatggcgcggtcgggtaagcgcgg

SEQ ID NO: 208740 - DNA, 58 bp, Artificial
  Synthetic oligonucleotide
cagtgtggtcgtactccatgagggggtggcccttatggcaagtcacctgcggccgttg

SEQ ID NO: 208741 - DNA, 53 bp, Artificial
  Synthetic oligonucleotide
gtctccgggaagtgttttggtatccgggcggttgctgtctgacatcgttcggg

SEQ ID NO: 208742 - DNA, 53 bp, Artificial
  Synthetic oligonucleotide
agccgaaatccaattccgtggggtggggtcaggtaggtatcgtggcgggtgaa

SEQ ID NO: 208743 - DNA, 53 bp, Artificial
  Synthetic oligonucleotide
aactcagatttcgatcgtcgccgaaattccgagaacagcgtcgggcaagcctg

SEQ ID NO: 208744 - DNA, 53 bp, Artificial
  Synthetic oligonucleotide
gggccgcaattagacctatccgatgcacgaagacattgcacggagtgcgaaaa

SEQ ID NO: 208745 - DNA, 52 bp, Artificial
  Synthetic oligonucleotide
atcgttacggtggtagagcagtactgagggtcaggggtgggttgtgagagcg

SEQ ID NO: 208746 - DNA, 52 bp, Artificial
  Synthetic oligonucleotide
aaaagccggcatcagaggtaagaccgggcgttctcgggacgtcaatgaacgt

SEQ ID NO: 208747 - DNA, 52 bp, Artificial
  Synthetic oligonucleotide
tcagctgtgcggtaggcgtcgggaaacactggttcttcggcactcgtggcca

SEQ ID NO: 208748 - DNA, 52 bp, Artificial
  Synthetic oligonucleotide
agtggtggcatggataccctcggcacggtccaagacgacgtgagtgcggtcc

SEQ ID NO: 208749 - DNA, 52 bp, Artificial
  Synthetic oligonucleotide
tcgactcccaatagtagcgttctcggcgtgtcgagaaatactggtcgaatag

SEQ ID NO: 208750 - DNA, 52 bp, Artificial
  Synthetic oligonucleotide
gaacatgtgtcagataacccaaacgaatgacgcgcaaacccgattacaaccc

SEQ ID NO: 208751 - DNA, 60 bp, Artificial
  Synthetic oligonucleotide
gcccgctagctcgactctctcaacgcaccgctgctttgcccaacggtgggaacgtctcat

SEQ ID NO: 208752 - DNA, 52 bp, Artificial
  Synthetic oligonucleotide
atagggattgtccggggtcgccccgtagaacggtaggccgagggtggtgaca

SEQ ID NO: 208753 - DNA, 52 bp, Artificial
  Synthetic oligonucleotide
gaaagctcgcacatgagtggtcgggttccgccctaacaacgcgccataaacg

SEQ ID NO: 208754 - DNA, 52 bp, Artificial
  Synthetic oligonucleotide
ctttgtcgccgccagtggaggtgtcgagacaacccgaaccggaagtcgacac

SEQ ID NO: 208755 - DNA, 52 bp, Artificial
  Synthetic oligonucleotide
ctttgtatcacagggaattcggcggtctttgttgccttttccgctgacgtgt

SEQ ID NO: 208756 - DNA, 52 bp, Artificial
  Synthetic oligonucleotide
tcggagcgttggtcggccaactccgatttgtcggccgccatcgagcacattt

SEQ ID NO: 208757 - DNA, 52 bp, Artificial
  Synthetic oligonucleotide
gatacaccaaacaggccgtctctcaagggtttcacggtcatgcgcacgggta

SEQ ID NO: 208758 - DNA, 52 bp, Artificial
  Synthetic oligonucleotide
tccgtaccctgatctacctcaaactgtcggtctcgggccacctcacggtttt

SEQ ID NO: 208759 - DNA, 52 bp, Artificial
  Synthetic oligonucleotide
cttccgaagcccccaccaggtcacacatttcgctctgaaaccgaacccgtcc

SEQ ID NO: 208760 - DNA, 52 bp, Artificial
  Synthetic oligonucleotide
tcggttgcggagaacacctcagacgctgcggtcggtccggttgtgtacgctt

SEQ ID NO: 208761 - DNA, 52 bp, Artificial
  Synthetic oligonucleotide
tttgggtctgacgactggcgatttacgacgctgacgggaactcgtgcgaatg

SEQ ID NO: 208762 - DNA, 60 bp, Artificial
  Synthetic oligonucleotide
ccaagctgcgccgattttgtcggacccgtctgtttcagtggtgatcgtggagcaccgtga

SEQ ID NO: 208763 - DNA, 52 bp, Artificial
  Synthetic oligonucleotide
gacgggtcaagctggtagctcgctatcagcagttccgagccgttagcaaagc

SEQ ID NO: 208764 - DNA, 52 bp, Artificial
  Synthetic oligonucleotide
aacttacctcccaatgccttcttaatcatacccaacacggtctcggcggaca

SEQ ID NO: 208765 - DNA, 52 bp, Artificial
  Synthetic oligonucleotide
ctgccgctttggacattgcggccgcaccggggagcaccaacccgggacgtcc

SEQ ID NO: 208766 - DNA, 52 bp, Artificial
  Synthetic oligonucleotide
tctggtagcagcagccctatgtcttgtccgcgtgacaattagccttcccgcc

SEQ ID NO: 208767 - DNA, 52 bp, Artificial
  Synthetic oligonucleotide
agccctgcgagaagattgacgtgaggtgcgtttggaaggtgagcggtcagga

SEQ ID NO: 208768 - DNA, 52 bp, Artificial
  Synthetic oligonucleotide
cggatgcggcatcacgacagacgcagaccatcgtaggggacgcatcgaaaac

SEQ ID NO: 208769 - DNA, 52 bp, Artificial
  Synthetic oligonucleotide
gtcggaagtgagttcgaacgcaatccccatccacaaccgccacccgatgtgc

SEQ ID NO: 208770 - DNA, 52 bp, Artificial
  Synthetic oligonucleotide
cacctcagtagcacgtcatacgccgaccaatcatcaggtcgtcagacccaaa

SEQ ID NO: 208771 - DNA, 52 bp, Artificial
  Synthetic oligonucleotide
agcatttcgtgattccggctgaacatgtcgagctctctggtccgcattatct

SEQ ID NO: 208772 - DNA, 52 bp, Artificial
  Synthetic oligonucleotide
cgcccgagaaaagtggactcggatactgataccttggcggcatgagagcagc

SEQ ID NO: 208773 - DNA, 60 bp, Artificial
  Synthetic oligonucleotide
ccacagcgaaaggcatagcaacagctcggatagccgccgaaatcatggctgacgtcacca

SEQ ID NO: 208774 - DNA, 52 bp, Artificial
  Synthetic oligonucleotide
gtaaccacacgagttgtcgggattccggcccccaaggggtcattagaggccg

SEQ ID NO: 208775 - DNA, 52 bp, Artificial
  Synthetic oligonucleotide
gccgaacccagatccgatgatcgcaactcgatgcctacgaggtggttgcgct

SEQ ID NO: 208776 - DNA, 52 bp, Artificial
  Synthetic oligonucleotide
cgaggtcccgcaatttactgcagtgacgcgcttctgcaacggcccgcataat

SEQ ID NO: 208777 - DNA, 52 bp, Artificial
  Synthetic oligonucleotide
cgaggagagcgaagcgtgcctgagtcggtccctgcaagcagcgctcaccagc

SEQ ID NO: 208778 - DNA, 52 bp, Artificial
  Synthetic oligonucleotide
tgctgtttctcatgaatatcgcggctgaatctagcgccaaaccggtatgggg

SEQ ID NO: 208779 - DNA, 52 bp, Artificial
  Synthetic oligonucleotide
cgacaatgtcggcctgtagcacccacatgtcaccctcgacttcgtaagtctg

SEQ ID NO: 208780 - DNA, 52 bp, Artificial
  Synthetic oligonucleotide
cgaatagggaagaaattccgctgcataacatgtgaacctgccgccaacaaca

SEQ ID NO: 208781 - DNA, 50 bp, Artificial
  Synthetic oligonucleotide
ggtgcacaaccccgtcacgggcgaaaaagacctggttcggttgcccggtt

SEQ ID NO: 208782 - DNA, 52 bp, Artificial
  Synthetic oligonucleotide
cgaacgaagtcgagtgacgggaacgagacgaacaatccggccctgtgagtcg

SEQ ID NO: 208783 - DNA, 52 bp, Artificial
  Synthetic oligonucleotide
ggtcccttgcgacgagctagcacgatgactatcgtggcttaacggccagggg

SEQ ID NO: 208784 - DNA, 54 bp, Artificial
  Synthetic oligonucleotide
ccagacgggaaggtgctcagtgaacgagtcggtggggaggtacttcccgttgga

SEQ ID NO: 208785 - DNA, 52 bp, Artificial
  Synthetic oligonucleotide
ggtaattatcgagctgtgaccatacttttcgcggaggaacgcatattgcaac

SEQ ID NO: 208786 - DNA, 52 bp, Artificial
  Synthetic oligonucleotide
ccgtggcacggcaacccaacacggtcactccaagacgaccccgaaaagtcac

SEQ ID NO: 208787 - DNA, 52 bp, Artificial
  Synthetic oligonucleotide
ccgtgaaacgcggggtcgtaggcataaccgcgctcgtccaactgcgcatagc

SEQ ID NO: 208788 - DNA, 51 bp, Artificial
  Synthetic oligonucleotide
ccggtcccgatccgagttctaagttctccccggcgtcaggcttaaagccgg

SEQ ID NO: 208789 - DNA, 52 bp, Artificial
  Synthetic oligonucleotide
ccagctgtcagtgacgatagcatcgactcgttaagtgccgaagagttgattg

SEQ ID NO: 208790 - DNA, 52 bp, Artificial
  Synthetic oligonucleotide
tggctgccagacaccgacgaagcaccccacaccgaagggtgccccgcgatag

SEQ ID NO: 208791 - DNA, 52 bp, Artificial
  Synthetic oligonucleotide
ggggcttcgcgtcgactagcgtcacagcgagcaactcgaaaattagccatac

SEQ ID NO: 208792 - DNA, 52 bp, Artificial
  Synthetic oligonucleotide
tggctacaggtcggggtgaaccggcacgacgggtaacgaagcggagagatca

SEQ ID NO: 208793 - DNA, 52 bp, Artificial
  Synthetic oligonucleotide
cccgggttctgattcgcgagccgatttcacgaaccggtggggacgttcatgg

SEQ ID NO: 208794 - DNA, 52 bp, Artificial
  Synthetic oligonucleotide
acgcccgcgcagtcgacgatcaagacttcaccgcgtggcttgccctgttcgc

SEQ ID NO: 208795 - DNA, 53 bp, Artificial
  Synthetic oligonucleotide
ccatccggtgcccccgaccttcgtgccaatagcgacacgtaaaccgtcgaggg

SEQ ID NO: 208796 - DNA, 52 bp, Artificial
  Synthetic oligonucleotide
tgtactttctgcggcgtggtgacgcaaggcagccgatccagtatgacgtgac

SEQ ID NO: 208797 - DNA, 52 bp, Artificial
  Synthetic oligonucleotide
atgaatctgatgcgcgagttgttcagaggtcgtcgtgtaaccgacccgaagt

SEQ ID NO: 208798 - DNA, 52 bp, Artificial
  Synthetic oligonucleotide
ctagtcacggttcacacagtgtccgaggcaccggggttcctataggaatacc

SEQ ID NO: 208799 - DNA, 52 bp, Artificial
  Synthetic oligonucleotide
aggctcaccctccatgggggtaccaggtaccactatgctggtaccatgtacc

SEQ ID NO: 208800 - DNA, 52 bp, Artificial
  Synthetic oligonucleotide
atggctgcctctaacacactccatattccacgcacatccaaagaccgctaac

SEQ ID NO: 208801 - DNA, 52 bp, Artificial
  Synthetic oligonucleotide
taggaaagccaaccgccaaactacttcaaacgcgggccactagcccctcagt

SEQ ID NO: 208802 - DNA, 52 bp, Artificial
  Synthetic oligonucleotide
attggactaagtgctctgctctcggcttttctgatagcataccataggaggg

SEQ ID NO: 208803 - DNA, 52 bp, Artificial
  Synthetic oligonucleotide
cgtcaattgctagttgacccagcggagcgccgaagttaaggttcacaacaac

SEQ ID NO: 208804 - DNA, 52 bp, Artificial
  Synthetic oligonucleotide
cgtagaacggtaggccgagggtggtgacattcagaccgggtatgcgcgcaag

SEQ ID NO: 208805 - DNA, 52 bp, Artificial
  Synthetic oligonucleotide
gttttgcataccggatctcgcggcgcgtgtcacgaaagtggcgcaggacttt

SEQ ID NO: 208806 - DNA, 55 bp, Artificial
  Synthetic oligonucleotide
cccgcatgacggggctttggggagttacagttggctttcggcagccggtctagcc

SEQ ID NO: 208807 - DNA, 52 bp, Artificial
  Synthetic oligonucleotide
aatactcgacatcagcgtcctgtccatacctggaccaatccacgcccgtcca

SEQ ID NO: 208808 - DNA, 52 bp, Artificial
  Synthetic oligonucleotide
caaggcggtaacaccggacgcacgtgtgagatccaaatctccgaccccgggt

SEQ ID NO: 208809 - DNA, 52 bp, Artificial
  Synthetic oligonucleotide
gtgatctgaccgtaaccacacgagttgtcgggattccggcccccaaggggtc

SEQ ID NO: 208810 - DNA, 52 bp, Artificial
  Synthetic oligonucleotide
cggggcgatccaaccgagcacatgtttagtgcaccagaacgacgggccgtgt

SEQ ID NO: 208811 - DNA, 51 bp, Artificial
  Synthetic oligonucleotide
cggggtcgccccgtagaacggtaggccgagggtggtgacattcagaccggg

SEQ ID NO: 208812 - DNA, 51 bp, Artificial
  Synthetic oligonucleotide
ttccatggccaatcgtgattgtgctgccggatttgcgccctacacaggcca

SEQ ID NO: 208813 - DNA, 51 bp, Artificial
  Synthetic oligonucleotide
ggacacagcggctgaccaaccagcggggcactgtagtcgtgggtagtgttg

SEQ ID NO: 208814 - DNA, 51 bp, Artificial
  Synthetic oligonucleotide
gcatacaccttgcgtcaggctccactacacggtatcccttgacacccgatt

SEQ ID NO: 208815 - DNA, 51 bp, Artificial
  Synthetic oligonucleotide
tcacgacgcttgcgatgtgttgagacgcatcagtccgttggtacttctcac

SEQ ID NO: 208816 - DNA, 51 bp, Artificial
  Synthetic oligonucleotide
ttccgcgcacacaaacgcctttcggccctcggtattggtgactcgtccgcg

SEQ ID NO: 208817 - DNA, 58 bp, Artificial
  Synthetic oligonucleotide
agatgtgttgatctgtgtccagggtaagcgctaccctgagaactaccttccacggtgt

SEQ ID NO: 208818 - DNA, 60 bp, Artificial
  Synthetic oligonucleotide
gcagtcgctatcgcgtggggattctcagcgcgtgcactcgcacacctgtcggcagcgtgt

SEQ ID NO: 208819 - DNA, 51 bp, Artificial
  Synthetic oligonucleotide
tcaaggaacgttgccccgccaaatcgggcaaccaaagtcatattgggatga

SEQ ID NO: 208820 - DNA, 51 bp, Artificial
  Synthetic oligonucleotide
gtgcgtgaaagcgataggtgccgtcgatctgcggtcccatcatgagcgccg

SEQ ID NO: 208821 - DNA, 51 bp, Artificial
  Synthetic oligonucleotide
tatgcgatgtttcggaccctgtatcacgctgggctgcggtcggaagagtca

SEQ ID NO: 208822 - DNA, 51 bp, Artificial
  Synthetic oligonucleotide
ggggtccagtcgtcacacgtgaattattgctgagggcgctactccttgagt

SEQ ID NO: 208823 - DNA, 51 bp, Artificial
  Synthetic oligonucleotide
gtcggtcattgcctccgcgtagctgaaccgcacgtgattgccttcctcgaa

SEQ ID NO: 208824 - DNA, 51 bp, Artificial
  Synthetic oligonucleotide
ggcgccttcaccgaaacactctgagcggcagtgatactgatctcgcggccc

SEQ ID NO: 208825 - DNA, 51 bp, Artificial
  Synthetic oligonucleotide
gtgattgcggagaggagcctgatgcccggagtgcaagatcgcgtcatcgtc

SEQ ID NO: 208826 - DNA, 51 bp, Artificial
  Synthetic oligonucleotide
tccggtagcctagggcttcgtgcaggcattccctggttgtaccagccagcc

SEQ ID NO: 208827 - DNA, 51 bp, Artificial
  Synthetic oligonucleotide
tctgaaaaggaggttctgccgctagcgatctgagatacagcgctagaccgc

SEQ ID NO: 208828 - DNA, 51 bp, Artificial
  Synthetic oligonucleotide
tttagggtaggcgcttactcttggcaggccgacgcaagacctgctacccca

SEQ ID NO: 208829 - DNA, 49 bp, Artificial
  Synthetic oligonucleotide
ccgaagggtcgcacggtaaggcttacggtagggatttcgacccaccccc

SEQ ID NO: 208830 - DNA, 51 bp, Artificial
  Synthetic oligonucleotide
tgcggactttacgaccaaaatgccctacaagcggaccagctacgacccgta

SEQ ID NO: 208831 - DNA, 51 bp, Artificial
  Synthetic oligonucleotide
ggaatcgaatcgtcgggcggggtcataggagaaggtccgcatgaggtgatc

SEQ ID NO: 208832 - DNA, 51 bp, Artificial
  Synthetic oligonucleotide
tggtagacgcgtaggagaggccaagatgtcacgggttcatcgaatcttgga

SEQ ID NO: 208833 - DNA, 51 bp, Artificial
  Synthetic oligonucleotide
ggtcgacccaccgaacgcatccaaggagacggccgtgaccaagactcgatc

SEQ ID NO: 208834 - DNA, 51 bp, Artificial
  Synthetic oligonucleotide
tttaagcgactgaatgacacagcgatctctcacccatgccaggtcctcata

SEQ ID NO: 208835 - DNA, 51 bp, Artificial
  Synthetic oligonucleotide
tccctacttgctgggattcggctcgttgtcggctgggttgattttcggtgg

SEQ ID NO: 208836 - DNA, 51 bp, Artificial
  Synthetic oligonucleotide
gtcccggcgttgtacagccgccacgacttggtgaactccagattgggcgga

SEQ ID NO: 208837 - DNA, 51 bp, Artificial
  Synthetic oligonucleotide
gagtctgggttgcggcccgccgtttgcgggtgcagtggaattgtgtccggc

SEQ ID NO: 208838 - DNA, 51 bp, Artificial
  Synthetic oligonucleotide
gccgcgtcactgtaggtgagtatgggacgtgagcgacatgtgcgacgtggt

SEQ ID NO: 208839 - DNA, 51 bp, Artificial
  Synthetic oligonucleotide
tcgagacacgctgtgtgagacaagatatgagacaccgcgacctggcattac

SEQ ID NO: 208840 - DNA, 60 bp, Artificial
  Synthetic oligonucleotide
ccgaagtgcgtcgatctgcccggtgaggctctgatcgctcgtcgatactcgcgcatatcc

SEQ ID NO: 208841 - DNA, 51 bp, Artificial
  Synthetic oligonucleotide
tcgagggtcaatccggatcggaccccaacgtcgacttgtgggcgccaattc

SEQ ID NO: 208842 - DNA, 51 bp, Artificial
  Synthetic oligonucleotide
gtgtccggcgggcggagttgtttgggtttcggaagccgcagctgacgcgtt

SEQ ID NO: 208843 - DNA, 51 bp, Artificial
  Synthetic oligonucleotide
caacacatgcccggcatagtcgtagcactccggacacagcggctgaccaac

SEQ ID NO: 208844 - DNA, 51 bp, Artificial
  Synthetic oligonucleotide
caacacattggttgcggagcaacaactctcgggtaggtcactccgtctaca

SEQ ID NO: 208845 - DNA, 51 bp, Artificial
  Synthetic oligonucleotide
cacagtgacaccgcggttagccgccagaggcagtagcgatgcctatccata

SEQ ID NO: 208846 - DNA, 51 bp, Artificial
  Synthetic oligonucleotide
aaggaggcggacattggcttaccgtaccatcgcccgaagttgttggggcag

SEQ ID NO: 208847 - DNA, 51 bp, Artificial
  Synthetic oligonucleotide
cacccccttctcgctattccccgcgacgaggtgcgtgttatgcggaaggaa

SEQ ID NO: 208848 - DNA, 51 bp, Artificial
  Synthetic oligonucleotide
acagtcgaatacaagggtcacagccaccgacgtacccggtctggcggattc

SEQ ID NO: 208849 - DNA, 51 bp, Artificial
  Synthetic oligonucleotide
cagtggaattgtgtccggcgggcggagttgtttgggtttcggaagccgcag

SEQ ID NO: 208850 - DNA, 51 bp, Artificial
  Synthetic oligonucleotide
cagtttgggagagcttcccgggccgatgtaggtcatcgagaccggctgcga

SEQ ID NO: 208851 - DNA, 60 bp, Artificial
  Synthetic oligonucleotide
ccgcccgatttgcttcgtccatcgccgcataccccagcgctgcttgggtgatcgcttggg

SEQ ID NO: 208852 - DNA, 51 bp, Artificial
  Synthetic oligonucleotide
catgacccgcgagccccacctgtcacagagccacatgttgcgcgtaatcac

SEQ ID NO: 208853 - DNA, 51 bp, Artificial
  Synthetic oligonucleotide
catgcgacacgcagcgacgcccatgcgacaccttcgggtttccgtggccgt

SEQ ID NO: 208854 - DNA, 51 bp, Artificial
  Synthetic oligonucleotide
ccattgggccgcaccacccctcgtgttcctcaggggatcgaacgcgcacgt

SEQ ID NO: 208855 - DNA, 51 bp, Artificial
  Synthetic oligonucleotide
cccacgagttgcattggcacacactggcttccgaatcccaacgtcaatgcc

SEQ ID NO: 208856 - DNA, 51 bp, Artificial
  Synthetic oligonucleotide
cccgaattgtgattgcggagaggagcctgatgcccggagtgcaagatcgcg

SEQ ID NO: 208857 - DNA, 51 bp, Artificial
  Synthetic oligonucleotide
ccctgctgagcgtggaccgttttgtgcgccgggacagtccgctaccggtgg

SEQ ID NO: 208858 - DNA, 51 bp, Artificial
  Synthetic oligonucleotide
ccgaattatccacgccaacgtactacgcccgaagttctacgactacctgag

SEQ ID NO: 208859 - DNA, 51 bp, Artificial
  Synthetic oligonucleotide
actcgaacggtagccgtgtgaaaggagggacgggatgtgcgcgtgtcggta

SEQ ID NO: 208860 - DNA, 51 bp, Artificial
  Synthetic oligonucleotide
acgggaagtaccggccctagagctggtttccgtcgtgtggcgtggcggcag

SEQ ID NO: 208861 - DNA, 51 bp, Artificial
  Synthetic oligonucleotide
agcacaccctctccgcgacatgtccgcctaacggcaatgctcccgcggttc

SEQ ID NO: 208862 - DNA, 60 bp, Artificial
  Synthetic oligonucleotide
gcaccgcgaaacattgagtccgttggtacgcaacacaatccatgtcttgcgagcacccag

SEQ ID NO: 208863 - DNA, 51 bp, Artificial
  Synthetic oligonucleotide
acgcagtgacctacttgtcggcggcgggtaagttgtccgaccccaggccat

SEQ ID NO: 208864 - DNA, 51 bp, Artificial
  Synthetic oligonucleotide
acgataaatcgaaggcaccgaacgcacccacgcggtaattcgccgacacat

SEQ ID NO: 208865 - DNA, 51 bp, Artificial
  Synthetic oligonucleotide
acctcaggtatctgaagtacgggattagcaggtgcagtctacggttttggg

SEQ ID NO: 208866 - DNA, 51 bp, Artificial
  Synthetic oligonucleotide
aggaccgcgggtagtccccgtgggcatacactccgtcacgccagatcccgc

SEQ ID NO: 208867 - DNA, 51 bp, Artificial
  Synthetic oligonucleotide
agggaatctaggtgcgccatctccgcctcacctgcgcgtttacatccctcg

SEQ ID NO: 208868 - DNA, 51 bp, Artificial
  Synthetic oligonucleotide
aggtcgtgatgacaccttgcccatgttgaccggtattcgtgtcgagatctc

SEQ ID NO: 208869 - DNA, 51 bp, Artificial
  Synthetic oligonucleotide
agtccgttggtacgcaacacaatccatgtcttgcgagcacccaggacccga

SEQ ID NO: 208870 - DNA, 51 bp, Artificial
  Synthetic oligonucleotide
atgccaacggacaccgtagacctcttggttcccccgcgccaaccgactcaa

SEQ ID NO: 208871 - DNA, 51 bp, Artificial
  Synthetic oligonucleotide
atgcgttagctcgctgtgaagcccccaatcgagagcacccgtcaccagggg

SEQ ID NO: 208872 - DNA, 51 bp, Artificial
  Synthetic oligonucleotide
attccgataacgacccagaatgcccggaacagatagtctgcgtcgagccaa

SEQ ID NO: 208873 - DNA, 53 bp, Artificial
  Synthetic oligonucleotide
cgcgtaccaggcgacggcccacccacggaaccgtcccggcgttgtacagccgc

SEQ ID NO: 208874 - DNA, 51 bp, Artificial
  Synthetic oligonucleotide
accactcgcaacggagctcggctgttgattcaggcgccaaaatcggcgcag

SEQ ID NO: 208875 - DNA, 51 bp, Artificial
  Synthetic oligonucleotide
cgcctgatgccaggttggtcgacgatgtgggactggattcggtggccttcg

SEQ ID NO: 208876 - DNA, 51 bp, Artificial
  Synthetic oligonucleotide
ccgcgtagctgaaccgcacgtgattgccttcctcgaagtggccgtccccaa

SEQ ID NO: 208877 - DNA, 51 bp, Artificial
  Synthetic oligonucleotide
gagccttcgtctcatccctgttacacccacgccaaacgtgaatgataacat

SEQ ID NO: 208878 - DNA, 51 bp, Artificial
  Synthetic oligonucleotide
acaagttaccgatgatgactactgggatgacgttagattgcagcgacgtca

SEQ ID NO: 208879 - DNA, 51 bp, Artificial
  Synthetic oligonucleotide
acaagaccatgtacacgaagcggggcggcgactatgtctcggtgggtccgg

SEQ ID NO: 208880 - DNA, 51 bp, Artificial
  Synthetic oligonucleotide
cgcgctcatgtgagtcttagtaagcacccctaccagattggagttttcggg

SEQ ID NO: 208881 - DNA, 51 bp, Artificial
  Synthetic oligonucleotide
cctattgactggatttctaccgcgcacctacgttgtttacaccgcttgtca

SEQ ID NO: 208882 - DNA, 51 bp, Artificial
  Synthetic oligonucleotide
cctgtacaactactattgagcgacagtgacgccaagccattccgctgcaga

SEQ ID NO: 208883 - DNA, 50 bp, Artificial
  Synthetic oligonucleotide
ctagtttccgtccctctcggggttttgggtctgacgacccggatcggtta

SEQ ID NO: 208884 - DNA, 57 bp, Artificial
  Synthetic oligonucleotide
cgctaccccgtatatgacttagcttagggacgagaacgtgaggattacttaatgcgc

SEQ ID NO: 208885 - DNA, 51 bp, Artificial
  Synthetic oligonucleotide
cgacaggcacttcggcgggtgaagccccgttcgaggtccaaccacactgca

SEQ ID NO: 208886 - DNA, 51 bp, Artificial
  Synthetic oligonucleotide
cgtgctactcccacgctgcacgtttgtccccaaaaccagggggtcgggtta

SEQ ID NO: 208887 - DNA, 51 bp, Artificial
  Synthetic oligonucleotide
cgttgcgcgctctaaggtgagtcgggtgcgtctagtcatcgcccagtgcac

SEQ ID NO: 208888 - DNA, 50 bp, Artificial
  Synthetic oligonucleotide
aatctcctcgacgtggaacctgtcgtcgggcaacaagatggcgcccagcc

SEQ ID NO: 208889 - DNA, 50 bp, Artificial
  Synthetic oligonucleotide
tccagtagggccacgagtgtgttccgttgggcgggaagttaaacaccccg

SEQ ID NO: 208890 - DNA, 50 bp, Artificial
  Synthetic oligonucleotide
aagacccagccgcttacacgtgggggcgtaactcggtgtcagtgccttac

SEQ ID NO: 208891 - DNA, 50 bp, Artificial
  Synthetic oligonucleotide
aagaatccctgagaccgcggtgtgttggccaagtagcgtgcccacctggg

SEQ ID NO: 208892 - DNA, 50 bp, Artificial
  Synthetic oligonucleotide
aatctgccacgcacaccaagtgttccacccatgtaggccgtgcgagaggg

SEQ ID NO: 208893 - DNA, 50 bp, Artificial
  Synthetic oligonucleotide
aatctgcgacgggtcgcatggcaatccgcgggaggaccgtaggtaggtgg

SEQ ID NO: 208894 - DNA, 50 bp, Artificial
  Synthetic oligonucleotide
aacttgacgctggtggcggtccggtcaggttggatggagatgagcgccaa

SEQ ID NO: 208895 - DNA, 60 bp, Artificial
  Synthetic oligonucleotide
cggatggctcgcagaagaatgccgcgatcgctgaggtcggcaatggttcgagtcacctcg

SEQ ID NO: 208896 - DNA, 50 bp, Artificial
  Synthetic oligonucleotide
aagaccggcgcacgcttgctacccatgttggagccgcaaggttgtccaca

SEQ ID NO: 208897 - DNA, 50 bp, Artificial
  Synthetic oligonucleotide
aagaggccgagcggttcggacgcgcatgaacgagatgagggatcaagcga

SEQ ID NO: 208898 - DNA, 50 bp, Artificial
  Synthetic oligonucleotide
aagagtcgcggcacccccgtcgctgcatccctcagtggggctaactgtac

SEQ ID NO: 208899 - DNA, 50 bp, Artificial
  Synthetic oligonucleotide
aagatgtggcgaccgcactcctgagcctcggaattgggctcggcttacag

SEQ ID NO: 208900 - DNA, 50 bp, Artificial
  Synthetic oligonucleotide
aatctcctatggctcaacacggacggacggcgccaaccacgactttcgcg

SEQ ID NO: 208901 - DNA, 50 bp, Artificial
  Synthetic oligonucleotide
aagattccaccgcagccgcgtaccccaacccagaacacaccccgcgttgc

SEQ ID NO: 208902 - DNA, 50 bp, Artificial
  Synthetic oligonucleotide
aagcaccactcgacggccggtgtcttgaccgtcagcaacagctcgggagc

SEQ ID NO: 208903 - DNA, 50 bp, Artificial
  Synthetic oligonucleotide
aagcactcgctgacggtggcacttccgtgtccgcagatatcgtgctccca

SEQ ID NO: 208904 - DNA, 50 bp, Artificial
  Synthetic oligonucleotide
aagcagcgctagatccaccaatgacaccccgccaacctacttggcgcagc

SEQ ID NO: 208905 - DNA, 50 bp, Artificial
  Synthetic oligonucleotide
aagcatcgtgcaagaggtgccgagctcccgtgtgtgctgggtcctagcgg

SEQ ID NO: 208906 - DNA, 60 bp, Artificial
  Synthetic oligonucleotide
tgatgttcccatcatcaacccgcgaagcggtgcccaacctgggtcacggtgacgtatctg

SEQ ID NO: 208907 - DNA, 50 bp, Artificial
  Synthetic oligonucleotide
aatctcccccgaacgccaacacgccccgaaccgctagctgcgccacgatg

SEQ ID NO: 208908 - DNA, 50 bp, Artificial
  Synthetic oligonucleotide
aagccatcttccttggagccacgccgctgaattcgtagagcgagctggga

SEQ ID NO: 208909 - DNA, 50 bp, Artificial
  Synthetic oligonucleotide
aagcccgctcggttcggggagttcgctgcatcgcgtttccgtagagtcga

SEQ ID NO: 208910 - DNA, 50 bp, Artificial
  Synthetic oligonucleotide
aacggattccaaaccgctcgcacaggtcggtacgcatgactcaggctccc

SEQ ID NO: 208911 - DNA, 50 bp, Artificial
  Synthetic oligonucleotide
aacggcgtgaggcccaaacaccgacacaacgtgcggtatccgtgcttttc

SEQ ID NO: 208912 - DNA, 50 bp, Artificial
  Synthetic oligonucleotide
aacggctcggtctccccgggcattggagttttatcggcgtgatgcgccca

SEQ ID NO: 208913 - DNA, 50 bp, Artificial
  Synthetic oligonucleotide
aacgggacggagtgacgacccgcgtctgtcagcactcgtaatcgcacgtc

SEQ ID NO: 208914 - DNA, 50 bp, Artificial
  Synthetic oligonucleotide
tcgagtcacgcctgatgccaggttggtcgacgatgtgggactggattcgg

SEQ ID NO: 208915 - DNA, 50 bp, Artificial
  Synthetic oligonucleotide
aacgggcgccgaccgttgttctgaggcgtcgtctgtcccgctcgtgctca

SEQ ID NO: 208916 - DNA, 50 bp, Artificial
  Synthetic oligonucleotide
aacgggtacagccccagcgacgtgtggataatcccgcgcattcgtgtgcg

SEQ ID NO: 208917 - DNA, 57 bp, Artificial
  Synthetic oligonucleotide
aaacagacagccgacacgaacgcactgctcccgccgaaacccaaccagcggacgcaa

SEQ ID NO: 208918 - DNA, 50 bp, Artificial
  Synthetic oligonucleotide
gtctaggctctctaccggtaatacaggcttgcggagttaggggcagtttt

SEQ ID NO: 208919 - DNA, 50 bp, Artificial
  Synthetic oligonucleotide
aacgggttggtctagccactcgaccgagtccgcatcggttgcccaggccc

SEQ ID NO: 208920 - DNA, 50 bp, Artificial
  Synthetic oligonucleotide
aacgtcagagtcggagtgaagcgcacaccagtacccgccccgaccttgct

SEQ ID NO: 208921 - DNA, 50 bp, Artificial
  Synthetic oligonucleotide
aatgcggattcgggcgcgtgagaggtgaggggccatgggttcactggacg

SEQ ID NO: 208922 - DNA, 50 bp, Artificial
  Synthetic oligonucleotide
aacgtctgtaccgggagagtcatcggagggtctccaaaggggccacagcc

SEQ ID NO: 208923 - DNA, 50 bp, Artificial
  Synthetic oligonucleotide
aacgtgagtacatccgaggcactcaccctgccggccagtcctgtgcggga

SEQ ID NO: 208924 - DNA, 50 bp, Artificial
  Synthetic oligonucleotide
aacgtggatctggcgactgccactcgggtcatcgagtcgttgtacgccta

SEQ ID NO: 208925 - DNA, 50 bp, Artificial
  Synthetic oligonucleotide
aactaccgcatgaatttgaccacacgcaccccgacgtgtccgggggatgg

SEQ ID NO: 208926 - DNA, 50 bp, Artificial
  Synthetic oligonucleotide
aactagtggcgcgcatttcaccacgatgggcaaccggacgggtgagttgc

SEQ ID NO: 208927 - DNA, 50 bp, Artificial
  Synthetic oligonucleotide
aactatgcggtcctcgcacgcggatcggtaagcaatgtcatcggcgcaca

SEQ ID NO: 208928 - DNA, 60 bp, Artificial
  Synthetic oligonucleotide
agccacacactctgtcgttccgttggcctcgctgcgaaacactccgactgcccattcaat

SEQ ID NO: 208929 - DNA, 52 bp, Artificial
  Synthetic oligonucleotide
tttccaccacccgacgacgagtcaggaccttcctccggaccaccgactaccg

SEQ ID NO: 208930 - DNA, 50 bp, Artificial
  Synthetic oligonucleotide
aactccggtcagccatacgatcgcggccactgcaccgtcaatccttcgcc

SEQ ID NO: 208931 - DNA, 50 bp, Artificial
  Synthetic oligonucleotide
aactccggtgccgctcgcagccgtagtactcgttgcagcaacaatgaggg

SEQ ID NO: 208932 - DNA, 50 bp, Artificial
  Synthetic oligonucleotide
aactccgtttgcaggctgtcgtccgtcgtgcctgtgtagccatgccacaa

SEQ ID NO: 208933 - DNA, 50 bp, Artificial
  Synthetic oligonucleotide
aactcgagcgatagagggccgctccgccctgtcacgtcgtccggtagcgt

SEQ ID NO: 208934 - DNA, 50 bp, Artificial
  Synthetic oligonucleotide
aatgcctttcccgagggggtgacgttgtcgcgttctctatgctgctcggg

SEQ ID NO: 208935 - DNA, 50 bp, Artificial
  Synthetic oligonucleotide
aatgcacgcgggacgtgattgcggttcccgaactcccaacagcgctcgtc

SEQ ID NO: 208936 - DNA, 50 bp, Artificial
  Synthetic oligonucleotide
aactgatgagcactcgcgcgacgaagagacggcgctaatgcctccgcgta

SEQ ID NO: 208937 - DNA, 50 bp, Artificial
  Synthetic oligonucleotide
aactggcgtgacgctctggtggtaggagtggcccaaacgcttgcgttgat

SEQ ID NO: 208938 - DNA, 50 bp, Artificial
  Synthetic oligonucleotide
aactggctgggaggttgccatgacgcctacagcttgtggctgtcctgccc

SEQ ID NO: 208939 - DNA, 50 bp, Artificial
  Synthetic oligonucleotide
aaggattcgtccggtaatcgcagtgtcctggcggtgccgcgatccgtagg

SEQ ID NO: 208940 - DNA, 60 bp, Artificial
  Synthetic oligonucleotide
tttccgcttccccgaagggaactgctttgctaggcagctctcacggtagcgcatacctga

SEQ ID NO: 208941 - DNA, 50 bp, Artificial
  Synthetic oligonucleotide
aatccgctgcgggtgcttgatgacaaacgaccccaggtgcaagcgatgac

SEQ ID NO: 208942 - DNA, 50 bp, Artificial
  Synthetic oligonucleotide
aagggactgacagcgtggcactctgcggggaggcacaccgataagaacgg

SEQ ID NO: 208943 - DNA, 50 bp, Artificial
  Synthetic oligonucleotide
aagggccagtcaagcagtcgacgtgcggtacaagctctaagcgggcctga

SEQ ID NO: 208944 - DNA, 50 bp, Artificial
  Synthetic oligonucleotide
aagggcccgcgggtgtgacacttcctcgccagagaaaaggtgaaccatgc

SEQ ID NO: 208945 - DNA, 50 bp, Artificial
  Synthetic oligonucleotide
aagggccgcttgttgtcttttgccacgggttccccgagctgggattctca

SEQ ID NO: 208946 - DNA, 50 bp, Artificial
  Synthetic oligonucleotide
gtgtgaacggatttgtgaacgaaacagtgcgtaaagcgtgagatgaggcc

SEQ ID NO: 208947 - DNA, 50 bp, Artificial
  Synthetic oligonucleotide
aatccccagtcagaacccgtcgtaacttccggctaaacgccggccacgga

SEQ ID NO: 208948 - DNA, 50 bp, Artificial
  Synthetic oligonucleotide
aaggtgcgagtgcacccctgctggaatgtcgtttcgcccatggggaagcc

SEQ ID NO: 208949 - DNA, 50 bp, Artificial
  Synthetic oligonucleotide
aatcaggattcggcttaccgggcccctgagtgtagggagtcgcggtttgg

SEQ ID NO: 208950 - DNA, 50 bp, Artificial
  Synthetic oligonucleotide
gttaccgaacaatcacctacccgagactctaaagacctcaaagcgtggaa

SEQ ID NO: 208951 - DNA, 58 bp, Artificial
  Synthetic oligonucleotide
ttagcgtgatcgaggttctagggctcgggtgtagcgagtattcgttcccattgggtgc

SEQ ID NO: 208952 - DNA, 50 bp, Artificial
  Synthetic oligonucleotide
aatagtccatgtcgtgccggaatccgggtcaactggcttatccccggcgc

SEQ ID NO: 208953 - DNA, 50 bp, Artificial
  Synthetic oligonucleotide
aaggttcaacccgaggcaacatgcacagcgaagctcatggccccttaggc

SEQ ID NO: 208954 - DNA, 50 bp, Artificial
  Synthetic oligonucleotide
aaggttgcctcgggcgtcgggtgaggagaagggccccaagatgagcgaga

SEQ ID NO: 208955 - DNA, 50 bp, Artificial
  Synthetic oligonucleotide
aagtaccccgggtgtcgacatatgcacccaggccgagtggctagagggcg

SEQ ID NO: 208956 - DNA, 50 bp, Artificial
  Synthetic oligonucleotide
aagtcgggcatccccggtatggcggtcgcagtcgtacaccgagggaaaac

SEQ ID NO: 208957 - DNA, 50 bp, Artificial
  Synthetic oligonucleotide
aagtgcaccgtatgcgcaaggaataccccgacgcggttgtcttgccagca

SEQ ID NO: 208958 - DNA, 50 bp, Artificial
  Synthetic oligonucleotide
aatagcccgtgagatcccacccacggggatccatcgaaacccacagggga

SEQ ID NO: 208959 - DNA, 50 bp, Artificial
  Synthetic oligonucleotide
aagtggggcgagggagggataggcacgtgtgttgtccgggatccgcagtg

SEQ ID NO: 208960 - DNA, 50 bp, Artificial
  Synthetic oligonucleotide
aagtgtctttaccacgcagcaaggattgcagagcggcggtgtcgtggggc

SEQ ID NO: 208961 - DNA, 50 bp, Artificial
  Synthetic oligonucleotide
aataccgccgcgtcggctcgatgtagcaccgccagtagttcggtgtggcc

SEQ ID NO: 208962 - DNA, 59 bp, Artificial
  Synthetic oligonucleotide
ttcacgtcctagcggtaagtcactgtggtaaggaatagtggtagtgtactaatagctga

SEQ ID NO: 208963 - DNA, 50 bp, Artificial
  Synthetic oligonucleotide
aagttcgatcggccgcaattccgtagtcacccggtaggtcaacgcggtga

SEQ ID NO: 208964 - DNA, 50 bp, Artificial
  Synthetic oligonucleotide
tcaccgccgagcacccccttctcgctattccccgcgacgaggtgcgtgtt

SEQ ID NO: 208965 - DNA, 50 bp, Artificial
  Synthetic oligonucleotide
aagccgctgcatgcgccaccggttggctaccacagttcttccggaccaca

SEQ ID NO: 208966 - DNA, 50 bp, Artificial
  Synthetic oligonucleotide
aagccggacccggacatggatcagtctcactccgcaaggagaaaccgcgt

SEQ ID NO: 208967 - DNA, 50 bp, Artificial
  Synthetic oligonucleotide
aatctaccctcccgtaacgaactcgacccgtctcaggcccgcggcgacac

SEQ ID NO: 208968 - DNA, 50 bp, Artificial
  Synthetic oligonucleotide
aagccggatcgacctcggtaggcgattgggcccgttgcattaggtatcgc

SEQ ID NO: 208969 - DNA, 50 bp, Artificial
  Synthetic oligonucleotide
aagccggcccaaccaagtgcgggtccggtcttaggcgagttcagcctagc

SEQ ID NO: 208970 - DNA, 50 bp, Artificial
  Synthetic oligonucleotide
aagccgggcgccttagactagtgccgccctacacttcgggcaagtggttg

SEQ ID NO: 208971 - DNA, 50 bp, Artificial
  Synthetic oligonucleotide
aagccgttcggtcgttccctattcccatcggtggattcggcgacgtcacg

SEQ ID NO: 208972 - DNA, 50 bp, Artificial
  Synthetic oligonucleotide
aagcgcacgccacgaccaggagccatctcgcgtccagatcgaccctttgc

SEQ ID NO: 208973 - DNA, 57 bp, Artificial
  Synthetic oligonucleotide
aaatagtgcacgagcgaccctttggggcgttttagggtcagagtatggctgatccca

SEQ ID NO: 208974 - DNA, 50 bp, Artificial
  Synthetic oligonucleotide
aagcgcatattgccagtatgcctaagcggacttcggtccggcagggagga

SEQ ID NO: 208975 - DNA, 50 bp, Artificial
  Synthetic oligonucleotide
aagcgcgccggggattgacgaacgcgaattccgagtgccgctgaacagcc

SEQ ID NO: 208976 - DNA, 50 bp, Artificial
  Synthetic oligonucleotide
aagcggcgtgacagcggcccggaacggttaggcgtattcgactgccacac

SEQ ID NO: 208977 - DNA, 50 bp, Artificial
  Synthetic oligonucleotide
aagcgggcagcacaccaccgtttgtgctcgcgaacttagtcgtggaccgt

SEQ ID NO: 208978 - DNA, 50 bp, Artificial
  Synthetic oligonucleotide
aagcggtggctcggttatccgtttggtgcccccacccttgcgttacctga

SEQ ID NO: 208979 - DNA, 50 bp, Artificial
  Synthetic oligonucleotide
aagcggttgttgtgtccgcaggttatcgtgtcggccacgttgcgtcacta

SEQ ID NO: 208980 - DNA, 50 bp, Artificial
  Synthetic oligonucleotide
aatcgtgggcgcaacgctgaacccactcgtacccgctgcacaacggtcag

SEQ ID NO: 208981 - DNA, 50 bp, Artificial
  Synthetic oligonucleotide
aagcgtgggttccgctgcgcgtacgatcaagtcctcgaagagcatcgctc

SEQ ID NO: 208982 - DNA, 50 bp, Artificial
  Synthetic oligonucleotide
aagctacggagcgccaacggccacgtcatggttgtgtgcactagccgcct

SEQ ID NO: 208983 - DNA, 50 bp, Artificial
  Synthetic oligonucleotide
aatcggggcgtcatgcagcgtgtctttgaaccagcccggcacaaaacgga

SEQ ID NO: 208984 - DNA, 56 bp, Artificial
  Synthetic oligonucleotide
tgacactactggctgtttgataccgtacccagggcggggtacagatacccgcaggg

SEQ ID NO: 208985 - DNA, 50 bp, Artificial
  Synthetic oligonucleotide
aagctcacgatgccccacggggtgagttcctgttgttcgacggacgtgtg

SEQ ID NO: 208986 - DNA, 50 bp, Artificial
  Synthetic oligonucleotide
aatcgcgggaaactcgggctacctcaactacgggtcactgcagtcgggcg

SEQ ID NO: 208987 - DNA, 50 bp, Artificial
  Synthetic oligonucleotide
aatcgaatcgacgatggcagcttccaacggccggcgttcacccagtctga

SEQ ID NO: 208988 - DNA, 50 bp, Artificial
  Synthetic oligonucleotide
aatcctggtcgaactccggtgccgctcgcagccgtagtactcgttgcagc

SEQ ID NO: 208989 - DNA, 50 bp, Artificial
  Synthetic oligonucleotide
aagctcgtcgtgacagggatatccgcgttctccgacttagtcgcccggga

SEQ ID NO: 208990 - DNA, 50 bp, Artificial
  Synthetic oligonucleotide
aaagggtgtagtgctcagcgcgcagtccgaaagctcacggaaggtagccg

SEQ ID NO: 208991 - DNA, 50 bp, Artificial
  Synthetic oligonucleotide
aaagtccgcaggttgtatagcctctgcgcatcccgaacctcctccggcat

SEQ ID NO: 208992 - DNA, 50 bp, Artificial
  Synthetic oligonucleotide
aaagtcgcggctaatgtcccgcgagccatgtcacattgtcgggcgcatga

SEQ ID NO: 208993 - DNA, 50 bp, Artificial
  Synthetic oligonucleotide
aaagtggctcacgctgatcacccctaactggctgcggggcggtttgtctc

SEQ ID NO: 208994 - DNA, 50 bp, Artificial
  Synthetic oligonucleotide
aaatcgcgagccccgaattaccacactgataccgccgtcgaccacgctgg

SEQ ID NO: 208995 - DNA, 60 bp, Artificial
  Synthetic oligonucleotide
tgatctcgctcgccatgtgcgtttcgacgcccagttcctaggccgtctcgacaacgacgg

SEQ ID NO: 208996 - DNA, 50 bp, Artificial
  Synthetic oligonucleotide
aaatcggcggtatgagcctgttctctggggcgatcaccgatgttccggga

SEQ ID NO: 208997 - DNA, 50 bp, Artificial
  Synthetic oligonucleotide
aaatctggcactcacttcacccccgggaccgcacgtcgaggtagcgtggc

SEQ ID NO: 208998 - DNA, 50 bp, Artificial
  Synthetic oligonucleotide
aaatgggctcttcggtccgagtctgcggtcgcgtgcggtagttgctctcg

SEQ ID NO: 208999 - DNA, 50 bp, Artificial
  Synthetic oligonucleotide
aaatgttaggttgtgggccagtcccgaggaaggatgcgcatggcgccagc

SEQ ID NO: 209000 - DNA, 50 bp, Artificial
  Synthetic oligonucleotide
aacaacgtcccctttaacgggattctgcaccccctcgagcgcatcacggc

SEQ ID NO: 209001 - DNA, 50 bp, Artificial
  Synthetic oligonucleotide
aacaagatggcgcccagccgttttggggacagaccgggcactacagcatt

SEQ ID NO: 209002 - DNA, 50 bp, Artificial
  Synthetic oligonucleotide
aacaagattcaaggtgccaaacggatcgtcggagggccccgcgagtacct

SEQ ID NO: 209003 - DNA, 50 bp, Artificial
  Synthetic oligonucleotide
aacaatgaggacacgactgcgtctcgtgcccagccctgtacgtcgagcct

SEQ ID NO: 209004 - DNA, 50 bp, Artificial
  Synthetic oligonucleotide
aacacaatcggctacagcccgccaactgctgcgacccactgaccaccgga

SEQ ID NO: 209005 - DNA, 50 bp, Artificial
  Synthetic oligonucleotide
aacacccccatcgtgccggtattcacccgccacgacttcgctgccccggt

SEQ ID NO: 209006 - DNA, 57 bp, Artificial
  Synthetic oligonucleotide
ttgacaatactccgttctggagtaacttaagctccacagtggagtatgggagtacgg

SEQ ID NO: 209007 - DNA, 50 bp, Artificial
  Synthetic oligonucleotide
aacaccgcccaccttcgatcgtgatcaatcccctgccccgtcacggtcgc

SEQ ID NO: 209008 - DNA, 50 bp, Artificial
  Synthetic oligonucleotide
tgtctgcaaagacattgcagcgggtatacgaccggataggtttcctaccg

SEQ ID NO: 209009 - DNA, 50 bp, Artificial
  Synthetic oligonucleotide
aacaccgttcaggcatccctggtcaatgtgggggtgctgccgcatcccgc

SEQ ID NO: 209010 - DNA, 50 bp, Artificial
  Synthetic oligonucleotide
aacacgccgctcagtccgtctgtcgtgcggggcgcaatccctgagagcgc

SEQ ID NO: 209011 - DNA, 50 bp, Artificial
  Synthetic oligonucleotide
aacacggcggacgttcttgtgtggcagtcgagtagtgcgtagtggctggc

SEQ ID NO: 209012 - DNA, 50 bp, Artificial
  Synthetic oligonucleotide
aacacggttcgtgcctgggccatccaaccgaatttgcgttggccatttga

SEQ ID NO: 209013 - DNA, 50 bp, Artificial
  Synthetic oligonucleotide
aacactatgcgcaccgcgccagtctaggaaggatgcaccgcccacatcga

SEQ ID NO: 209014 - DNA, 50 bp, Artificial
  Synthetic oligonucleotide
aacactcccgaacgtgaccgattgacgacggcactgggcgaactgaccgc

SEQ ID NO: 209015 - DNA, 50 bp, Artificial
  Synthetic oligonucleotide
aacagctgacaactccgtggtctcggttggccgttgtggattgggtccct

SEQ ID NO: 209016 - DNA, 50 bp, Artificial
  Synthetic oligonucleotide
aaaactccaaccgaacggtcttccagacgggttcaccgggcgatcctcgc

SEQ ID NO: 209017 - DNA, 60 bp, Artificial
  Synthetic oligonucleotide
tggcttggtagatgatcccggcggctttggcttcgtggtacagcgacttggagtcgatcg

SEQ ID NO: 209018 - DNA, 50 bp, Artificial
  Synthetic oligonucleotide
aaaactggcccgttcccgacaaccaccgccgtcctacggtcggactcatg

SEQ ID NO: 209019 - DNA, 50 bp, Artificial
  Synthetic oligonucleotide
aaaagccgggatctccgggccaggtttgtacggcatcgtcgcgtctggac

SEQ ID NO: 209020 - DNA, 50 bp, Artificial
  Synthetic oligonucleotide
aaaagcgatcgggcgggaactctgcacccgtgtcggacgttgacacgtgt

SEQ ID NO: 209021 - DNA, 50 bp, Artificial
  Synthetic oligonucleotide
aaaaggaggagccagttgaacgcctacgacgtcttgaaggaacaccacat

SEQ ID NO: 209022 - DNA, 50 bp, Artificial
  Synthetic oligonucleotide
aaaaggggcagcggtctcctacgagtggcggcggccggttagaacacgtt

SEQ ID NO: 209023 - DNA, 50 bp, Artificial
  Synthetic oligonucleotide
aaaattcgctccacgcagtccagcaaccgatccgggccgggaagccacac

SEQ ID NO: 209024 - DNA, 50 bp, Artificial
  Synthetic oligonucleotide
aaacaatgttcggggccccctcgggtgacttctgccacgggttgttgcat

SEQ ID NO: 209025 - DNA, 50 bp, Artificial
  Synthetic oligonucleotide
aaaccactctgcgtgacgtgcttacccaggctcagcccaaataccccgcc

SEQ ID NO: 209026 - DNA, 50 bp, Artificial
  Synthetic oligonucleotide
aaaccgaggcatcgggggtcctctcacccgccaacgaacacatgtgccga

SEQ ID NO: 209027 - DNA, 50 bp, Artificial
  Synthetic oligonucleotide
aaaccgagggatggatctgcaggtcggcaaatgtcggggaggcagcctca

SEQ ID NO: 209028 - DNA, 60 bp, Artificial
  Synthetic oligonucleotide
ttcagcggtaatcatgggcggtcatcagaagcagccgttcggaaggagtgatgacagtga

SEQ ID NO: 209029 - DNA, 50 bp, Artificial
  Synthetic oligonucleotide
aaacgagtcccagacgtatcgattctcaaacgcaattgtcctactggccc

SEQ ID NO: 209030 - DNA, 50 bp, Artificial
  Synthetic oligonucleotide
aaacgggagccaaccggaggcaacggaacgccactttcacgctcaggact

SEQ ID NO: 209031 - DNA, 50 bp, Artificial
  Synthetic oligonucleotide
aaacggtgcgttcgcgtcatcgaggacttgctcaggttcccgagtccacg

SEQ ID NO: 209032 - DNA, 50 bp, Artificial
  Synthetic oligonucleotide
aaacggttagggtgagtgctgtgtcacagtcgaccggccaattccgcgct

SEQ ID NO: 209033 - DNA, 50 bp, Artificial
  Synthetic oligonucleotide
aaacgtacgggacaacgaagcacacggcagcgagggcacaccgggacctt

SEQ ID NO: 209034 - DNA, 50 bp, Artificial
  Synthetic oligonucleotide
aaacgtcctgggccacgtacgtcgtgagtgttccggctgctaggagagca

SEQ ID NO: 209035 - DNA, 50 bp, Artificial
  Synthetic oligonucleotide
aaacgttccggtagccccctgcgtcagagcccgcacggtactgagcatct

SEQ ID NO: 209036 - DNA, 50 bp, Artificial
  Synthetic oligonucleotide
aaactgtcagttcactgcttaggtcgcggcccggaccagtgtggcgagag

SEQ ID NO: 209037 - DNA, 50 bp, Artificial
  Synthetic oligonucleotide
aaagcagtggagttcgcatgttggtctcccggcgggtattgtgccggagg

SEQ ID NO: 209038 - DNA, 50 bp, Artificial
  Synthetic oligonucleotide
aaagcccgttgatagcctcaggacggtctttgctccgtcgcatggggccc

SEQ ID NO: 209039 - DNA, 59 bp, Artificial
  Synthetic oligonucleotide
ctattagtacaaaacacaggactatatggtttagggctagatgctcttagccaaagcat

SEQ ID NO: 209040 - DNA, 55 bp, Artificial
  Synthetic oligonucleotide
cttcctggttgtgtagttgaaccacttcctggttgtgtagttgaaccacttcctg

SEQ ID NO: 209041 - DNA, 57 bp, Artificial
  Synthetic oligonucleotide
tctcttttagtagttctgatcttggtaactctaaagaaactgtttcatgcaaaggaa

SEQ ID NO: 209042 - DNA, 59 bp, Artificial
  Synthetic oligonucleotide
gtaccagcaaacacagatcccccaagaacggcctttgacaatcagggagccggcatagc

SEQ ID NO: 209043 - DNA, 58 bp, Artificial
  Synthetic oligonucleotide
gtaaatacacgtgaaggtctatttcgtggtattgttggtcacacagtaatggcgcttc

SEQ ID NO: 209044 - DNA, 60 bp, Artificial
  Synthetic oligonucleotide
gtaaaatgaatgttgcttgcaaccctgatgataccaattcgtcatatcaatcttggttca

SEQ ID NO: 209045 - DNA, 53 bp, Artificial
  Synthetic oligonucleotide
ggttacaatcggtaacggtggaacaaacgaaggtgaattccatgaaggattaa

SEQ ID NO: 209046 - DNA, 60 bp, Artificial
  Synthetic oligonucleotide
ggtgtctctacaagattactaggcgcaattataatgacccatggtgataataggggaata

SEQ ID NO: 209047 - DNA, 57 bp, Artificial
  Synthetic oligonucleotide
ggtggttagtttctatgatgcaccctacagtgaaaaccatactgcctttggacttgt

SEQ ID NO: 209048 - DNA, 59 bp, Artificial
  Synthetic oligonucleotide
ggtggtggtacaactccggatcctacatccacagtcaaaaaagctactactcttgctga

SEQ ID NO: 209049 - DNA, 50 bp, Artificial
  Synthetic oligonucleotide
gggggttaaaaatggttgttgtcacacatcccctttactttattcggtag

SEQ ID NO: 209050 - DNA, 57 bp, Artificial
  Synthetic oligonucleotide
gggggggggaattataacttccctagcgctaccaattgtggcagcttcatgtgacaa

SEQ ID NO: 209051 - DNA, 57 bp, Artificial
  Synthetic oligonucleotide
cttcgccaataggctaacatctccgcttaaccttcgggcactgggcaggcttcaccc

SEQ ID NO: 209052 - DNA, 58 bp, Artificial
  Synthetic oligonucleotide
gggctctacttcaaactgattaagatgacaaacaacgggtgaatttgacactctagaa

SEQ ID NO: 209053 - DNA, 49 bp, Artificial
  Synthetic oligonucleotide
gggctaaccccttaaccccataaggaaagtcttttccttaacctagaca

SEQ ID NO: 209054 - DNA, 55 bp, Artificial
  Synthetic oligonucleotide
gggaaggttttcatcacaaactattacatcgcctttagtaggtctgtctaaacca

SEQ ID NO: 209055 - DNA, 59 bp, Artificial
  Synthetic oligonucleotide
ggcttactggtggaaaagtctttgcgacagatcacactaatgcacaaagaacgcttttg

SEQ ID NO: 209056 - DNA, 56 bp, Artificial
  Synthetic oligonucleotide
ggctcaccgaaagtgctaaagatattacttggaacgttatcgtagacatttccagt

SEQ ID NO: 209057 - DNA, 60 bp, Artificial
  Synthetic oligonucleotide
ggatcgtaaccaccaacataatctggattagaagcgatgtatccaagagcaccgattaac

SEQ ID NO: 209058 - DNA, 60 bp, Artificial
  Synthetic oligonucleotide
ggagtatcaccaggtgactgacttaaatcagctcgttgagatggtaagatgagtgatcaa

SEQ ID NO: 209059 - DNA, 60 bp, Artificial
  Synthetic oligonucleotide
gctctaatcctagttgtggggcttggtgccggactaggagctggagaaatcggctctatg

SEQ ID NO: 209060 - DNA, 60 bp, Artificial
  Synthetic oligonucleotide
taaatctactgtgaaaggatttgttgtccattcggatgttattcttatattgacatgcaa

SEQ ID NO: 209061 - DNA, 60 bp, Artificial
  Synthetic oligonucleotide
gttgtgtaacaagctatgaaacatagcgcgctatattaatatgttagacgacgataatgt

SEQ ID NO: 209062 - DNA, 54 bp, Artificial
  Synthetic oligonucleotide
cttctttgactaggagtgctactggtcatcgttcgttttttacccctgttcact

SEQ ID NO: 209063 - DNA, 60 bp, Artificial
  Synthetic oligonucleotide
gttcacatagaaattatgaatcatcctgtttggaacaatgcaattcactctgtggaatta

SEQ ID NO: 209064 - DNA, 58 bp, Artificial
  Synthetic oligonucleotide
gttatagactgcggatttgcctacagtcaccagttaacgcttaccccacaatccagta

SEQ ID NO: 209065 - DNA, 60 bp, Artificial
  Synthetic oligonucleotide
gttacacgacacatcaatttatgattaactcaaatttgcgaacctaatccagaagctaga

SEQ ID NO: 209066 - DNA, 60 bp, Artificial
  Synthetic oligonucleotide
gtgtgcacattccacaagcatttagtggtggtgctctcgacttaattctatacggaattg

SEQ ID NO: 209067 - DNA, 55 bp, Artificial
  Synthetic oligonucleotide
gtgtagttgaaccacttcctggttgtgtagttgaaccacttcctggttgtgtagt

SEQ ID NO: 209068 - DNA, 59 bp, Artificial
  Synthetic oligonucleotide
gtgcctcttagattggaataacggctagaaatggccgctaatgccggatacttattagc

SEQ ID NO: 209069 - DNA, 51 bp, Artificial
  Synthetic oligonucleotide
gtgataacgacctaaacttttaggttgtttgtcaactttaagtgtgttaac

SEQ ID NO: 209070 - DNA, 60 bp, Artificial
  Synthetic oligonucleotide
gtgaatcattcgaatgaatgaggttcatgaaatgttcgtgaattcaagagtgctattagt

SEQ ID NO: 209071 - DNA, 56 bp, Artificial
  Synthetic oligonucleotide
gtcgtttattagatcctagtgttgttggtatcaaccattataaagtcgctttagga

SEQ ID NO: 209072 - DNA, 55 bp, Artificial
  Synthetic oligonucleotide
gtcccaataagtttagtgtacgcgactacaccaggtgtttaaggtgtgggcgtgc

SEQ ID NO: 209073 - DNA, 54 bp, Artificial
  Synthetic oligonucleotide
cttgtctttggtcggttacttcaaaacctataagcgcaggagcgattaatttat

SEQ ID NO: 209074 - DNA, 53 bp, Artificial
  Synthetic oligonucleotide
gtattaagcctagttgcctttaggtttgcaagaccactaattgttataaaacc

SEQ ID NO: 209075 - DNA, 60 bp, Artificial
  Synthetic oligonucleotide
gtatggttattcgagcacttctagttgttagattcgtctccaacaatctagttgtggcaa

SEQ ID NO: 209076 - DNA, 60 bp, Artificial
  Synthetic oligonucleotide
gtatatgcaaatgggtagaaaaccgtctgagtcacaaattagagctgttatgcgttcagt

SEQ ID NO: 209077 - DNA, 50 bp, Artificial
  Synthetic oligonucleotide
gtatacggtccttttttaccaggtcaagacaaacgggaactaaatccgat

SEQ ID NO: 209078 - DNA, 60 bp, Artificial
  Synthetic oligonucleotide
gtataagcgagagttctctgagttgtctcaggtcgccagcacccgacaggtgacagggcg

SEQ ID NO: 209079 - DNA, 60 bp, Artificial
  Synthetic oligonucleotide
atcaagtctagcttctggattaggttcgcaaatttgagttaatcataaattgatgtgtcg

SEQ ID NO: 209080 - DNA, 48 bp, Artificial
  Synthetic oligonucleotide
aatttctcttttagggcgcttccccctgaccccctttttaggggggca

SEQ ID NO: 209081 - DNA, 50 bp, Artificial
  Synthetic oligonucleotide
aattcctatcaaacgggggaaggggggtgtccccctaaatcactagatta

SEQ ID NO: 209082 - DNA, 57 bp, Artificial
  Synthetic oligonucleotide
agatctacaagaggtactaaggggcaaaatgctagaaagtctggtacagtaagacta

SEQ ID NO: 209083 - DNA, 60 bp, Artificial
  Synthetic oligonucleotide
aatgctatgcgtccatcgcactcacctagtgaaaacgacatcctaataggcatagaacgt

SEQ ID NO: 209084 - DNA, 55 bp, Artificial
  Synthetic oligonucleotide
gaaccacttcctggttgtgtagttgaaccacttcctggttgtgtagttgaaccac

SEQ ID NO: 209085 - DNA, 60 bp, Artificial
  Synthetic oligonucleotide
aatcattagccccatacataggcattagcacatcatatagtgttctatacgcccacacgt

SEQ ID NO: 209086 - DNA, 59 bp, Artificial
  Synthetic oligonucleotide
actaataactttcgtgataagatgatcgctaacttagtggaacacaaacgctattgtga

SEQ ID NO: 209087 - DNA, 51 bp, Artificial
  Synthetic oligonucleotide
atcaggttacaataaacccatttcgtggacctaataaatttcgtacccagg

SEQ ID NO: 209088 - DNA, 59 bp, Artificial
  Synthetic oligonucleotide
actaattgctcttggtggcgttgttatgcttaaagaacctcgtgatgatgctaagactt

SEQ ID NO: 209089 - DNA, 53 bp, Artificial
  Synthetic oligonucleotide
aagttaagcgtaactatcggaagcgtccagtagtttttaataacatgaattac

SEQ ID NO: 209090 - DNA, 59 bp, Artificial
  Synthetic oligonucleotide
aagggagtaacaacaagaatactcagacatatgtctgagtgtggaatagacttctttac

SEQ ID NO: 209091 - DNA, 60 bp, Artificial
  Synthetic oligonucleotide
aagcgataaaacaacatatgcaccaagccaaatagaaatcaaggtagatggttatatcta

SEQ ID NO: 209092 - DNA, 56 bp, Artificial
  Synthetic oligonucleotide
agatgactccgtggttggtgagtttacagttcgcttaaacattagttcaataacac

SEQ ID NO: 209093 - DNA, 60 bp, Artificial
  Synthetic oligonucleotide
agttaagctgcacattttaagcgctagtgagcaatgagcaaatcaagttgacaaggtggc

SEQ ID NO: 209094 - DNA, 60 bp, Artificial
  Synthetic oligonucleotide
agcagctgagtcgccattagcatagctttcacgcattcttgctactgctgtttttcaacc

SEQ ID NO: 209095 - DNA, 60 bp, Artificial
  Synthetic oligonucleotide
gaagtgtattagattctatggtatttgctcaaacagatcattcatatgggcgtttaaacg

SEQ ID NO: 209096 - DNA, 59 bp, Artificial
  Synthetic oligonucleotide
actagttaaatcgattagatcaacaagtaattatggaaagagaatagcacaccttgcca

SEQ ID NO: 209097 - DNA, 54 bp, Artificial
  Synthetic oligonucleotide
actattgtttaagtaacttaccaatctaaataccgaatctagatcgctatttaa

SEQ ID NO: 209098 - DNA, 51 bp, Artificial
  Synthetic oligonucleotide
acctatttttgctagcgaagcttttaaaaccgggggataatttgatctaac

SEQ ID NO: 209099 - DNA, 53 bp, Artificial
  Synthetic oligonucleotide
accgatgatccagtccgggataccgaaagtccgatattaatagccgggatttt

SEQ ID NO: 209100 - DNA, 52 bp, Artificial
  Synthetic oligonucleotide
acgaaagccgggggaacaacccgaaatagccgtgactcagccggtagaagac

SEQ ID NO: 209101 - DNA, 58 bp, Artificial
  Synthetic oligonucleotide
accccggttccgactgcatagcaattcataacggtattcagagtttgattatagtcag

SEQ ID NO: 209102 - DNA, 59 bp, Artificial
  Synthetic oligonucleotide
acgattacagacaagtttcagggattcaagatgcaacagttgatttggatcttaacttc

SEQ ID NO: 209103 - DNA, 56 bp, Artificial
  Synthetic oligonucleotide
atagcaaggttagtaagttggcaaatccgcttactattaagactaagttatgagta

SEQ ID NO: 209104 - DNA, 56 bp, Artificial
  Synthetic oligonucleotide
atatatgtcttcgctactacccgaaggggtcgctcgtactcataacttagtcttaa

SEQ ID NO: 209105 - DNA, 58 bp, Artificial
  Synthetic oligonucleotide
acgcatagtcttggtttaactgctgtaccactaatgtgttgacgttcacgtctgtgtt

SEQ ID NO: 209106 - DNA, 60 bp, Artificial
  Synthetic oligonucleotide
gacaaacaactctagcagtgggacttgatagtttcataagtactgatccaaaacacatca

SEQ ID NO: 209107 - DNA, 56 bp, Artificial
  Synthetic oligonucleotide
acgcatttctgcccgtagcttcggtattgtgttttagtcccgttgaattatcggca

SEQ ID NO: 209108 - DNA, 55 bp, Artificial
  Synthetic oligonucleotide
acggtgttggtggaatgtggcgttatatgacacataaagacaacccggaaaaata

SEQ ID NO: 209109 - DNA, 53 bp, Artificial
  Synthetic oligonucleotide
acacgaaagtgtaaacacaattgaaaacggtagtccaattactcctgttacta

SEQ ID NO: 209110 - DNA, 60 bp, Artificial
  Synthetic oligonucleotide
agttgtacctagtgatcacatcggagatgtaattggtgatttatcacgtcgtagaggatt

SEQ ID NO: 209111 - DNA, 55 bp, Artificial
  Synthetic oligonucleotide
acaattgttgaatgagtcactctgatagtgttatctttttacctaaagggtttaa

SEQ ID NO: 209112 - DNA, 59 bp, Artificial
  Synthetic oligonucleotide
atcaagtccggtaggatatgaattgccaccttcattatgatcaggttttagtcctggac

SEQ ID NO: 209113 - DNA, 53 bp, Artificial
  Synthetic oligonucleotide
acaaatgagggtaattacctgggtttggggaggtgaatgggttgtataatgcc

SEQ ID NO: 209114 - DNA, 57 bp, Artificial
  Synthetic oligonucleotide
agttgcatcaggacgtaatgacaacttaggtgttataggttgaaccaaggcatttag

SEQ ID NO: 209115 - DNA, 59 bp, Artificial
  Synthetic oligonucleotide
agatatgtatttggtcaatttggatgaggcccaagtagcacttacccagtaggtggcta

SEQ ID NO: 209116 - DNA, 57 bp, Artificial
  Synthetic oligonucleotide
aggtgctattaatgtaggcggccaagtcggtacaatcttcttctcaggttgattact

SEQ ID NO: 209117 - DNA, 54 bp, Artificial
  Synthetic oligonucleotide
gctagcggagtgggaaccgctgttgggggtgggtttctagccaagtcccttatg

SEQ ID NO: 209118 - DNA, 55 bp, Artificial
  Synthetic oligonucleotide
aaaaaagcgcattatcatatcgtgttagtttatagtggacccactacgtttaata

SEQ ID NO: 209119 - DNA, 56 bp, Artificial
  Synthetic oligonucleotide
aactagtgatcttatttcttcatcacggtttataacaggttctagtttgttctgcg

SEQ ID NO: 209120 - DNA, 60 bp, Artificial
  Synthetic oligonucleotide
agccctctgaacgaaatgcggctgcaagtccagttgaagcactttgaattccggtgtgga

SEQ ID NO: 209121 - DNA, 60 bp, Artificial
  Synthetic oligonucleotide
aacttggctcaaatcctcgtgaggttatatcttcatagacccctgaggcaagagctctag

SEQ ID NO: 209122 - DNA, 60 bp, Artificial
  Synthetic oligonucleotide
atgattagaataccataaggtaaacacattgcactatgcgcaattactgctctaaaaaac

SEQ ID NO: 209123 - DNA, 59 bp, Artificial
  Synthetic oligonucleotide
tgtctaaaagtcctgcttatatgttttcagggcaaaagaaatctattatgctaattcaa

SEQ ID NO: 209124 - DNA, 59 bp, Artificial
  Synthetic oligonucleotide
agacttagtgcgacttacaaaaaattcgatacacgagaagaatgagtttcagctattgc

SEQ ID NO: 209125 - DNA, 59 bp, Artificial
  Synthetic oligonucleotide
cgtcgcaccctcatccaaaagcgtcgccacaaagagcgactttctacatcttctcatgc

SEQ ID NO: 209126 - DNA, 59 bp, Artificial
  Synthetic oligonucleotide
taagttgagtttaccattgccaaaagtagagacttgctcgagaattgaaagtgcatcac

SEQ ID NO: 209127 - DNA, 57 bp, Artificial
  Synthetic oligonucleotide
gctggccaaaatgttaaattggctgcaggtttaacagaaactagacttgatatttta

SEQ ID NO: 209128 - DNA, 57 bp, Artificial
  Synthetic oligonucleotide
gctaacatctccgcttaaccttcgggcactgggcaggcttcaccctctatacttcgg

SEQ ID NO: 209129 - DNA, 57 bp, Artificial
  Synthetic oligonucleotide
gtgttgctcccccaacgccagaagcgagcaaagctaggggaattgctacccttagtc

SEQ ID NO: 209130 - DNA, 59 bp, Artificial
  Synthetic oligonucleotide
caaacacgtggacctgtgccattgcctacaaagcatgaagtgtttacaattctacgttc

SEQ ID NO: 209131 - DNA, 56 bp, Artificial
  Synthetic oligonucleotide
tcaacgtgaactaatcctattagataaaaatccgccaggtagttgagttgccaggg

SEQ ID NO: 209132 - DNA, 59 bp, Artificial
  Synthetic oligonucleotide
gggggagtgcaaccgatgtatgaatatctgaattggtagctgccagggtaattaaaatc

SEQ ID NO: 209133 - DNA, 59 bp, Artificial
  Synthetic oligonucleotide
ggcactacagatagtgaagacgtaaactctacagaaggcactacagatagtgaagacgc

SEQ ID NO: 209134 - DNA, 53 bp, Artificial
  Synthetic oligonucleotide
aggagttacgattcaaccgtgactttgaattctacttggttgacgtaagttaa

SEQ ID NO: 209135 - DNA, 57 bp, Artificial
  Synthetic oligonucleotide
gttttagaagttgacggatgtactcactactactttcaaaacgatacaattgcaaca

SEQ ID NO: 209136 - DNA, 59 bp, Artificial
  Synthetic oligonucleotide
gaacaaatactccatattatagttcaactcctcttaatcttagtgcatcatcgatccac

SEQ ID NO: 209137 - DNA, 57 bp, Artificial
  Synthetic oligonucleotide
ccgagaacgaacacacgtagtcaaggagaggatcctaaggttagcgagtgaactata

SEQ ID NO: 209138 - DNA, 59 bp, Artificial
  Synthetic oligonucleotide
gtgcatctccacacgagaactaccatattctaatgtatattcagcactataaacatcat

SEQ ID NO: 209139 - DNA, 52 bp, Artificial
  Synthetic oligonucleotide
gcggtttacaagcgcaacttaatgttagtttttcgcgataaaccccaccaac

SEQ ID NO: 209140 - DNA, 50 bp, Artificial
  Synthetic oligonucleotide
aattttgcgccccggtaagggggtggagcaaaaccttatcttgcctttaa

SEQ ID NO: 209141 - DNA, 54 bp, Artificial
  Synthetic oligonucleotide
gcgttaactataacgttacttactcctggaactcttcagtaggtttcgattaca

SEQ ID NO: 209142 - DNA, 59 bp, Artificial
  Synthetic oligonucleotide
gcacgactatgcttttgcgacacaagccattgatttgaccattggttcaatttcgagca

SEQ ID NO: 209143 - DNA, 59 bp, Artificial
  Synthetic oligonucleotide
gtcagctttgcaatagctagtgacaccggcgattctattagaagacctgcaagttttat

SEQ ID NO: 209144 - DNA, 59 bp, Artificial
  Synthetic oligonucleotide
cctataccagctccactaggagctagtaagagagaggcagctaatttagctccccttca

SEQ ID NO: 209145 - DNA, 55 bp, Artificial
  Synthetic oligonucleotide
gcattatcatatcgtgttagtttatagtggacccactacgtttaataacgttaaa

SEQ ID NO: 209146 - DNA, 51 bp, Artificial
  Synthetic oligonucleotide
gtacaaatgtacccgtagcttcggtatcgtgttttagtcccgttaaattat

SEQ ID NO: 209147 - DNA, 59 bp, Artificial
  Synthetic oligonucleotide
ggctagtttgctatttaaagaatttggcatgaccatgtcttctgctattaacctatttg

SEQ ID NO: 209148 - DNA, 55 bp, Artificial
  Synthetic oligonucleotide
gattatccaacgtataccaagtttgaatggggtcaaggaatattactaaatctag

SEQ ID NO: 209149 - DNA, 58 bp, Artificial
  Synthetic oligonucleotide
taatctaaagtcaaatttggctgttcttacttgatttgcaagagcactaatatcagaa

SEQ ID NO: 209150 - DNA, 60 bp, Artificial
  Synthetic oligonucleotide
ctcaaacattgtcaggtgaacggccataaggagaatcatagccgaacactcttctttcac

SEQ ID NO: 209151 - DNA, 57 bp, Artificial
  Synthetic oligonucleotide
gcgatattctctcccttatatgcaaatcacgaaccttttcgtacaagaattccaagt

SEQ ID NO: 209152 - DNA, 58 bp, Artificial
  Synthetic oligonucleotide
caaccatatattcacacaacaggtggatatatcgttgatctacaaacgactcctaatt

SEQ ID NO: 209153 - DNA, 58 bp, Artificial
  Synthetic oligonucleotide
taccaaagactgaaaccgcttgcgaagcttcacccccgctcatgacaccaccaactct

SEQ ID NO: 209154 - DNA, 58 bp, Artificial
  Synthetic oligonucleotide
gactgcagtgaacgtaggaaatctagatagtgatgttattcacacttacgctgatgca

SEQ ID NO: 209155 - DNA, 58 bp, Artificial
  Synthetic oligonucleotide
agcccccagcgatataactagaatagaacacttcaggagtagctcctggttggaaata

SEQ ID NO: 209156 - DNA, 54 bp, Artificial
  Synthetic oligonucleotide
taaacctcctacaccggatcctgcgacccccaacccgcctaaggatagagctaa

SEQ ID NO: 209157 - DNA, 58 bp, Artificial
  Synthetic oligonucleotide
gagttatgctaatgacctaattatgtataacgtttatggttatactggacaattaatg

SEQ ID NO: 209158 - DNA, 51 bp, Artificial
  Synthetic oligonucleotide
gaaaactctaaatttaacctttcagttaaccttttaattcacctagctcca

SEQ ID NO: 209159 - DNA, 58 bp, Artificial
  Synthetic oligonucleotide
gctgctaacatttcaaatcctggtgttataacaacacctagtactaattgatcttcag

SEQ ID NO: 209160 - DNA, 58 bp, Artificial
  Synthetic oligonucleotide
ccctagttcgatcactttcattgttatgctagtactaggcttaattttcgatactggc

SEQ ID NO: 209161 - DNA, 58 bp, Artificial
  Synthetic oligonucleotide
ccgatccacaaacagttctagcaatgcattgtacaagtcctagtgtatttaacattac

SEQ ID NO: 209162 - DNA, 51 bp, Artificial
  Synthetic oligonucleotide
gcctattaaaattagcggactaattttcgggcctttagtcggtggaacagt

SEQ ID NO: 209163 - DNA, 58 bp, Artificial
  Synthetic oligonucleotide
gccgtatcgttttaaataatcagtgtcgatatgatgtgaccagccatagtcaggagac

SEQ ID NO: 209164 - DNA, 53 bp, Artificial
  Synthetic oligonucleotide
cgcaaaccctttaaaggtcatacccactcggtcttggggattagaagcttgtg

SEQ ID NO: 209165 - DNA, 57 bp, Artificial
  Synthetic oligonucleotide
acccaacctgcagaaactagtccagctagccaagctacttctaccgatcctaaatta

SEQ ID NO: 209166 - DNA, 52 bp, Artificial
  Synthetic oligonucleotide
atttcggtagattggtttcctcaaattaagccgagaaattaaactaactaga

SEQ ID NO: 209167 - DNA, 57 bp, Artificial
  Synthetic oligonucleotide
acccttcaggtctaaccgcagcattaatacgaacgattcatagtgatctaaagttac

SEQ ID NO: 209168 - DNA, 58 bp, Artificial
  Synthetic oligonucleotide
gtagccaagaaggagtaatgtcaattagatatgatgctattggtggaattataatggg

SEQ ID NO: 209169 - DNA, 58 bp, Artificial
  Synthetic oligonucleotide
tgtgaatgtcctccacgaccaaatgtgcaatctacatagataccatcaggttttacgt

SEQ ID NO: 209170 - DNA, 56 bp, Artificial
  Synthetic oligonucleotide
gcatcataacaccgaatttaccgtctaggtattgtccgattttaatgttaagcgcg

SEQ ID NO: 209171 - DNA, 56 bp, Artificial
  Synthetic oligonucleotide
ttaagtaaggcctgtttacaccgtggcttataatatcatctccgaacttgctttta

SEQ ID NO: 209172 - DNA, 58 bp, Artificial
  Synthetic oligonucleotide
gcatcatcttgaggagtagtatgatctaaattagctaaatcatcagcagttggattag

SEQ ID NO: 209173 - DNA, 60 bp, Artificial
  Synthetic oligonucleotide
gccgcgacatagcagtagctggataattgctttgcccggagtttgtaattagccctacta

SEQ ID NO: 209174 - DNA, 58 bp, Artificial
  Synthetic oligonucleotide
catagcacgctatattaatatgttagacgacgataatgtttccgaacctagtgcggcc

SEQ ID NO: 209175 - DNA, 58 bp, Artificial
  Synthetic oligonucleotide
tagttgctgatcctccagagcctgttaaagttccatagtctgcatgacctgtaaccaa

SEQ ID NO: 209176 - DNA, 58 bp, Artificial
  Synthetic oligonucleotide
ggctacaacagcgccagaagttacattaactcctgttctgcccatgtcgaataagcca

SEQ ID NO: 209177 - DNA, 58 bp, Artificial
  Synthetic oligonucleotide
ctaaaacaacatcataaccagctggattagtcattgttaaagttctaactacagcacc

SEQ ID NO: 209178 - DNA, 55 bp, Artificial
  Synthetic oligonucleotide
tcccggtagtaaaaacagctccaatagtcacactaccagctgttaatacgaaaaa

SEQ ID NO: 209179 - DNA, 57 bp, Artificial
  Synthetic oligonucleotide
caatcaattagtgttgatcgtgattatgttttagttacaccaacttatagtggtggg

SEQ ID NO: 209180 - DNA, 57 bp, Artificial
  Synthetic oligonucleotide
gaaattgcaacccggattatatctgcttgttcgaggttaaaaccagctacaacctga

SEQ ID NO: 209181 - DNA, 58 bp, Artificial
  Synthetic oligonucleotide
tgtctttatcttcgcttgatttttctgggcgatcttgctcctggactcttagcgcggc

SEQ ID NO: 209182 - DNA, 58 bp, Artificial
  Synthetic oligonucleotide
tggtccactcgtgtatgtggattcgtacaatgactccttggccccgtgtggtgtaatt

SEQ ID NO: 209183 - DNA, 55 bp, Artificial
  Synthetic oligonucleotide
cgtccttttttaagaactagtgagtttttatgacaagaaggtcacactattcata

SEQ ID NO: 209184 - DNA, 55 bp, Artificial
  Synthetic oligonucleotide
gcccggaacaattggtttttgctttcacacagaggatggcggaatcgtttttatg

SEQ ID NO: 209185 - DNA, 58 bp, Artificial
  Synthetic oligonucleotide
gcatcagcagaacgtgctttacttccatttggaattcatcacgtattaaatttctttg

SEQ ID NO: 209186 - DNA, 56 bp, Artificial
  Synthetic oligonucleotide
tcagatccaaaagttcctctacctaaatctagttctggtggtttagtttatgcaac

SEQ ID NO: 209187 - DNA, 57 bp, Artificial
  Synthetic oligonucleotide
cagatcctatttggttataacctgattttggtatcacacctgatgggttaacgtcaa

SEQ ID NO: 209188 - DNA, 54 bp, Artificial
  Synthetic oligonucleotide
cgtgcgcgcgcatcctttaaaggcaagataaggcgttgtaacaccccctaaccg

SEQ ID NO: 209189 - DNA, 57 bp, Artificial
  Synthetic oligonucleotide
gagtatagctatgtcaaaacaacccactagtaacattgtgatgaatactcatagctg

SEQ ID NO: 209190 - DNA, 57 bp, Artificial
  Synthetic oligonucleotide
caggattattagaatgatagtttgacaaagcaactactcctggaattgtgatcactg

SEQ ID NO: 209191 - DNA, 57 bp, Artificial
  Synthetic oligonucleotide
agcgactgtcgagcactctagtctacgagtgaagttagacagcctcgatcctggaag

SEQ ID NO: 209192 - DNA, 57 bp, Artificial
  Synthetic oligonucleotide
cttgacattactgaaggaagatcaagagagcattcttatgatccttgtgaatgacaa

SEQ ID NO: 209193 - DNA, 57 bp, Artificial
  Synthetic oligonucleotide
ttttcatcgaaattagcagaaactagctcccgccgaactgcaatggaacaagcaagc

SEQ ID NO: 209194 - DNA, 57 bp, Artificial
  Synthetic oligonucleotide
cttcattaccatgaaatccggatgggttagatgcgatgcgaaaatgattagatcgcg

SEQ ID NO: 209195 - DNA, 58 bp, Artificial
  Synthetic oligonucleotide
gccaaaatcaagcccgccggtgcgggtatataaataatttgagcgtcttgcaaggtca

SEQ ID NO: 209196 - DNA, 57 bp, Artificial
  Synthetic oligonucleotide
cctatgttctgtacttggttctttagtaattctaaaagtgattgtgtcaccatctgc

SEQ ID NO: 209197 - DNA, 57 bp, Artificial
  Synthetic oligonucleotide
gctcgtggagttagtcctgaagaatgtgtgcacattggcgatactcttaatgatgcg

SEQ ID NO: 209198 - DNA, 57 bp, Artificial
  Synthetic oligonucleotide
cctgcaggtccgatatatgtgcaagatgctcctaagtcagctgctgccacttcaaag

SEQ ID NO: 209199 - DNA, 57 bp, Artificial
  Synthetic oligonucleotide
atggatattagactataaattaactagtgacaattcttatccattgacttgatactt

SEQ ID NO: 209200 - DNA, 57 bp, Artificial
  Synthetic oligonucleotide
gattagatcaacaagtaattatggaaagagaatagcacaccttgccactacttatcg

SEQ ID NO: 209201 - DNA, 57 bp, Artificial
  Synthetic oligonucleotide
acctcgatctgtagagttgatccgccaagtggtgaatatccaagtccagttaccgtt

SEQ ID NO: 209202 - DNA, 57 bp, Artificial
  Synthetic oligonucleotide
tgctttcatgttaccaatttccgttatgtctatagctggtctatttctaggggttgg

SEQ ID NO: 209203 - DNA, 55 bp, Artificial
  Synthetic oligonucleotide
ccatcaatgtaaagtcttactcttgtagttaatcctttagcttcacttaacttaa

SEQ ID NO: 209204 - DNA, 57 bp, Artificial
  Synthetic oligonucleotide
tagtcgaaaatgactatttagtctcagcttttatagcccctaacaatccggatctta

SEQ ID NO: 209205 - DNA, 57 bp, Artificial
  Synthetic oligonucleotide
actttcagtagcctttctaggacctctagaattgactcaatactgagacgatagaca

SEQ ID NO: 209206 - DNA, 60 bp, Artificial
  Synthetic oligonucleotide
gcatgctctttgatactgaatcggcataaaatataactctaccattgctatttctagctg

SEQ ID NO: 209207 - DNA, 57 bp, Artificial
  Synthetic oligonucleotide
gactgttccttctgttagaccttcacctatgtcagcaaatttaactttgaacatatc

SEQ ID NO: 209208 - DNA, 54 bp, Artificial
  Synthetic oligonucleotide
acaagtgttggagcaatatcggctaaggtagtaagggataaaaacgtccttggc

SEQ ID NO: 209209 - DNA, 57 bp, Artificial
  Synthetic oligonucleotide
gaaattatgaatcatcctgtttggaacaatgcaattcactctgtggaattaggactg

SEQ ID NO: 209210 - DNA, 57 bp, Artificial
  Synthetic oligonucleotide
gtttgggaacattataggtggttcagctattttgttagtgatgtatcatggactatc

SEQ ID NO: 209211 - DNA, 57 bp, Artificial
  Synthetic oligonucleotide
gttccgcctaaagctaattcgtcactgtgaactttcgcaatcggaaaagcaccagtg

SEQ ID NO: 209212 - DNA, 57 bp, Artificial
  Synthetic oligonucleotide
caacgattccaatgactattgcgccccccccaggaatgcacaagtggtgtaaagctt

SEQ ID NO: 209213 - DNA, 57 bp, Artificial
  Synthetic oligonucleotide
atattagtaactgatccagacagcgatagagtcggtttagttgttagacataataac

SEQ ID NO: 209214 - DNA, 54 bp, Artificial
  Synthetic oligonucleotide
aaacaacaccattttctacgtttgtgtgtttagtaatgtgacgtgctagtaatt

SEQ ID NO: 209215 - DNA, 57 bp, Artificial
  Synthetic oligonucleotide
gttaggggcaaaagtcaacattctaccttgtcgctgtagttgtgtcatatacgtatc

SEQ ID NO: 209216 - DNA, 57 bp, Artificial
  Synthetic oligonucleotide
tagaagacaaaacggagtgttagtttcaatggctaatggaaaaagtctagcgtatgc

SEQ ID NO: 209217 - DNA, 60 bp, Artificial
  Synthetic oligonucleotide
gcagcttacatcgtattccctctttacgttgttggtatgatctttgctgctcaattcttt

SEQ ID NO: 209218 - DNA, 55 bp, Artificial
  Synthetic oligonucleotide
ctgttgcaaaccttttgtctaatgttacaccaggaacagttatataaacaccaag

SEQ ID NO: 209219 - DNA, 57 bp, Artificial
  Synthetic oligonucleotide
tagaactgggcaccgtgagtatctagaaatcattcgtggtgttaatcttagcattcg

SEQ ID NO: 209220 - DNA, 56 bp, Artificial
  Synthetic oligonucleotide
ggcgctaaacaaactagatagcttcacaatcaagcatttagatgtcaacattaacc

SEQ ID NO: 209221 - DNA, 56 bp, Artificial
  Synthetic oligonucleotide
ggtactccatataatgaccctactgaagcataattcgtaactgtaaaatcacttcc

SEQ ID NO: 209222 - DNA, 56 bp, Artificial
  Synthetic oligonucleotide
ggtaagtactcttgagatgatatcaaagagggaatggtatgtattgtctcagtaag

SEQ ID NO: 209223 - DNA, 55 bp, Artificial
  Synthetic oligonucleotide
ctgtaacaaatccaccacttaaagctgaaactgaaatacgttttggatcagttac

SEQ ID NO: 209224 - DNA, 56 bp, Artificial
  Synthetic oligonucleotide
ctaagaatgtcaggcgatgagtagaataatccgtcaggttggctaaattcaccacc

SEQ ID NO: 209225 - DNA, 56 bp, Artificial
  Synthetic oligonucleotide
ctccaaatttccgttattgttgaaaattctagctcctgaagatgatctaagtgtgc

SEQ ID NO: 209226 - DNA, 56 bp, Artificial
  Synthetic oligonucleotide
actagaatgagatactagtaatgttacatcaatggactctatgtttgaaggcgcca

SEQ ID NO: 209227 - DNA, 56 bp, Artificial
  Synthetic oligonucleotide
ctggacggaagtaatcgcctgcatatgaattaatttcactactatgtcctagcgga

SEQ ID NO: 209228 - DNA, 58 bp, Artificial
  Synthetic oligonucleotide
gcagcgtgtaagtctgtgtggcatacccctgaagtttccattctaataagaacttgtt

SEQ ID NO: 209229 - DNA, 56 bp, Artificial
  Synthetic oligonucleotide
ctcattgttagcttaaagcccttatttaagcacctaatctaataggttgctaccac

SEQ ID NO: 209230 - DNA, 52 bp, Artificial
  Synthetic oligonucleotide
cgttcttgattgaaccttctgtattactttgacttggttttacgtgtttagt

SEQ ID NO: 209231 - DNA, 51 bp, Artificial
  Synthetic oligonucleotide
actgagtgttttcgcgactaagtgggaaacgtaggaaatggtaaaatttag

SEQ ID NO: 209232 - DNA, 56 bp, Artificial
  Synthetic oligonucleotide
ggttgctaccacctttttagcgccacgagaagtcgcctccagcccaatcgctccag

SEQ ID NO: 209233 - DNA, 55 bp, Artificial
  Synthetic oligonucleotide
cgttattaggaactattccggtcttgatcaataagagtggaacgggagatcaatt

SEQ ID NO: 209234 - DNA, 56 bp, Artificial
  Synthetic oligonucleotide
ctgttaatgatcgacgacgttcagattatttcaaatcgacctaaaactaacgagac

SEQ ID NO: 209235 - DNA, 56 bp, Artificial
  Synthetic oligonucleotide
ggtccatctccaataattaccattgattttggaacgctttctaagtgtaaagcttg

SEQ ID NO: 209236 - DNA, 56 bp, Artificial
  Synthetic oligonucleotide
acgcctcagaagccacgagcccctaatgatgagttaccttttgacttatccgagtt

SEQ ID NO: 209237 - DNA, 56 bp, Artificial
  Synthetic oligonucleotide
cttaaatgttttatagtccttgaatagctaatctccgttgtcgccttcaattccag

SEQ ID NO: 209238 - DNA, 56 bp, Artificial
  Synthetic oligonucleotide
tgccgctaagcactaataaattaatactccgctcgacatgcatgtattaggcacac

SEQ ID NO: 209239 - DNA, 60 bp, Artificial
  Synthetic oligonucleotide
gcacataatcaagctaaattaggcgaaattgcaaaagtagtgttaatgccaggggatcca

SEQ ID NO: 209240 - DNA, 56 bp, Artificial
  Synthetic oligonucleotide
ctttcttgagcaaagtataacttttcttctgggtctaagataacctgaagatcagc

SEQ ID NO: 209241 - DNA, 56 bp, Artificial
  Synthetic oligonucleotide
ccagtagaaactccaccaattggaactgttgaactatataaaactagtggtcattg

SEQ ID NO: 209242 - DNA, 56 bp, Artificial
  Synthetic oligonucleotide
atctaccgcacaagctaacgcacttgttgagctagccaacgcatataactcagatc

SEQ ID NO: 209243 - DNA, 56 bp, Artificial
  Synthetic oligonucleotide
ccagctgttattgagattcaacctgcattttgtcctttagttccttttagtacaac

SEQ ID NO: 209244 - DNA, 56 bp, Artificial
  Synthetic oligonucleotide
gaaggctaatagcatgtagctatgaagatgtagggttagctgatcctaacttgcaa

SEQ ID NO: 209245 - DNA, 56 bp, Artificial
  Synthetic oligonucleotide
agcttccgtgggtaaattgctatacaccttagatcgagattctaatccggaaacga

SEQ ID NO: 209246 - DNA, 56 bp, Artificial
  Synthetic oligonucleotide
tactaaggcctagttctaaagttgtcccacgatgcagcaatgagcgtactccaata

SEQ ID NO: 209247 - DNA, 56 bp, Artificial
  Synthetic oligonucleotide
tagtattccctaattgtcgaacattggtattgcgagatctggaagattgtgattcc

SEQ ID NO: 209248 - DNA, 56 bp, Artificial
  Synthetic oligonucleotide
agcccaagtcgaattaggctctgttaactatagtccatatgctctaaaagttgcta

SEQ ID NO: 209249 - DNA, 56 bp, Artificial
  Synthetic oligonucleotide
gaacatgatatttaggcatccgcaatattagtggaaaataaatcgcagcacttagt

SEQ ID NO: 209250 - DNA, 60 bp, Artificial
  Synthetic oligonucleotide
gcaattgatccaacgaatcgtccttgttcatcatataaactagttccagatgaaccaccc

SEQ ID NO: 209251 - DNA, 54 bp, Artificial
  Synthetic oligonucleotide
catacccctcctctaataatactttcaaaaggtgtaagtcctgatgttatacct

SEQ ID NO: 209252 - DNA, 56 bp, Artificial
  Synthetic oligonucleotide
cagatgatagaattgttcttcttagcgaatttcctaatgtgttagcaaaaccacgc

SEQ ID NO: 209253 - DNA, 56 bp, Artificial
  Synthetic oligonucleotide
tccatatagtggagcactataatagtttagttgattcatagcagttacattagaac

SEQ ID NO: 209254 - DNA, 56 bp, Artificial
  Synthetic oligonucleotide
attgcttgtgcatgagtagaaaagattaatgtgatctaatggtatgttgaagggta

SEQ ID NO: 209255 - DNA, 55 bp, Artificial
  Synthetic oligonucleotide
gcacttatagttcatggtaaaagagggtcacttgtatttggggtggcattaatgt

SEQ ID NO: 209256 - DNA, 55 bp, Artificial
  Synthetic oligonucleotide
gcaggaacacaattagcttatccaagtgcaacacatactcgctttagtcattcta

SEQ ID NO: 209257 - DNA, 55 bp, Artificial
  Synthetic oligonucleotide
gctcatactcctggaccacgtgatgaatttaacaatttagtttgaagagcggttt

SEQ ID NO: 209258 - DNA, 55 bp, Artificial
  Synthetic oligonucleotide
gcagggtttgagagttatgaagctaagatcttagatgagattgcgcgttgtgatg

SEQ ID NO: 209259 - DNA, 55 bp, Artificial
  Synthetic oligonucleotide
gcaccaatggttattagaacaccaatgggtggaggtattcgtgctttagaacacc

SEQ ID NO: 209260 - DNA, 55 bp, Artificial
  Synthetic oligonucleotide
gctcataatctagcagacttttcttcaggtccgaactcttcattagttgacttgg

SEQ ID NO: 209261 - DNA, 60 bp, Artificial
  Synthetic oligonucleotide
ctcctagttcagttgcaaagtacacatcagtgacttcggcacgtgttggtgatgggttgt

SEQ ID NO: 209262 - DNA, 58 bp, Artificial
  Synthetic oligonucleotide
gatcgaattcgtttaattccgcaacggcattactttgtgcaaatgtcgttactctatc

SEQ ID NO: 209263 - DNA, 55 bp, Artificial
  Synthetic oligonucleotide
gcaagttaacatacgcttggcttagcagcttaattgtcgcttcattaaaactact

SEQ ID NO: 209264 - DNA, 55 bp, Artificial
  Synthetic oligonucleotide
gctctaacccgtgctggtcacaagttacccgtgacctgaaagattctcaaacgcg

SEQ ID NO: 209265 - DNA, 55 bp, Artificial
  Synthetic oligonucleotide
gctctaagattaggcgcaattaacaagctaagttcattatacgtttattcgcacg

SEQ ID NO: 209266 - DNA, 55 bp, Artificial
  Synthetic oligonucleotide
gcaagcttgaacggcattaggcgccattcgcaatgagttgaagtaccacctcaac

SEQ ID NO: 209267 - DNA, 55 bp, Artificial
  Synthetic oligonucleotide
gcaaccctgatgataccaattcgtcatatcaatcttggttcatactttcaggtca

SEQ ID NO: 209268 - DNA, 55 bp, Artificial
  Synthetic oligonucleotide
gatggtcccaatacttggtggttatattgcctatgcaattgtaggaccacaagga

SEQ ID NO: 209269 - DNA, 55 bp, Artificial
  Synthetic oligonucleotide
gatctaggggcttcaaaatacaactcagctcaaggtattttccctgacgctcggc

SEQ ID NO: 209270 - DNA, 55 bp, Artificial
  Synthetic oligonucleotide
gctgcaaaggcgccctttcccatgttaattcgaagtgcaataactcttgatctct

SEQ ID NO: 209271 - DNA, 55 bp, Artificial
  Synthetic oligonucleotide
gatagatctattaatgtactagagcccacaactacaagacagttagctctgtgct

SEQ ID NO: 209272 - DNA, 54 bp, Artificial
  Synthetic oligonucleotide
gagttaaagacaacaaaagttgctggtctagtgtttggggtggtaactcttgaa

SEQ ID NO: 209273 - DNA, 54 bp, Artificial
  Synthetic oligonucleotide
gataacgaacttataactgagtattcggtttttataaggagagtaagagaatta

SEQ ID NO: 209274 - DNA, 55 bp, Artificial
  Synthetic oligonucleotide
gctggaatgttaattggtcctgttatgcaattactaagagctgttgtaggaatgg

SEQ ID NO: 209275 - DNA, 55 bp, Artificial
  Synthetic oligonucleotide
gaggtttaatcatagccccacaattagtacatgacactaaactagcagctgaaag

SEQ ID NO: 209276 - DNA, 55 bp, Artificial
  Synthetic oligonucleotide
gcttctagagttgctctaacaatatgttcacgtctagttccacgatctagtccaa

SEQ ID NO: 209277 - DNA, 49 bp, Artificial
  Synthetic oligonucleotide
ggaaaggaataggacgatttaccaggggttaaacctaatcggaaccgac

SEQ ID NO: 209278 - DNA, 55 bp, Artificial
  Synthetic oligonucleotide
gaggattgggtgtacatgttggttatccaactgaaattagaccatattatcaagc

SEQ ID NO: 209279 - DNA, 55 bp, Artificial
  Synthetic oligonucleotide
gcggctagttgtcgggttgaggtgactagcgtttccccagcgtagttgaacagat

SEQ ID NO: 209280 - DNA, 55 bp, Artificial
  Synthetic oligonucleotide
gcgtcataaaagggcttcttggcattagctacacaaacatccataaatcccgcag

SEQ ID NO: 209281 - DNA, 55 bp, Artificial
  Synthetic oligonucleotide
gcggaactgttaaaccagctgaaggtggaagcggaactgttaaaccagctgaagg

SEQ ID NO: 209282 - DNA, 55 bp, Artificial
  Synthetic oligonucleotide
gcgctagtgagcaatgagcaaatcaagttgacaaggtggcccttgcttatgggag

SEQ ID NO: 209283 - DNA, 55 bp, Artificial
  Synthetic oligonucleotide
gcgatcctaacattagaattaaagcgctaaatgaatgagctagatgggaatctgt

SEQ ID NO: 209284 - DNA, 58 bp, Artificial
  Synthetic oligonucleotide
gacgtgtccgcgaattacatttgccccatcagaacgagtttcctgttcacgaactaga

SEQ ID NO: 209285 - DNA, 55 bp, Artificial
  Synthetic oligonucleotide
gcgacgatagatacctcttaagtacttttcgctattcatcgtacggtattccctt

SEQ ID NO: 209286 - DNA, 55 bp, Artificial
  Synthetic oligonucleotide
gcgtcttgcaaggtcagtaattggtcagattcgcttgattttaagtcggggatcg

SEQ ID NO: 209287 - DNA, 55 bp, Artificial
  Synthetic oligonucleotide
gcgaagcgactgtcgagcactctagtctacgagtgaatttgggcaacctcgatcc

SEQ ID NO: 209288 - DNA, 55 bp, Artificial
  Synthetic oligonucleotide
gcgttcgtaactccatccattgttgacattttggttcttgcaaatagttcaactc

SEQ ID NO: 209289 - DNA, 55 bp, Artificial
  Synthetic oligonucleotide
gcctttaggtttgcaagaccactaattgttataaaacccaatgcatgtcgaagcc

SEQ ID NO: 209290 - DNA, 55 bp, Artificial
  Synthetic oligonucleotide
gccgctagttcttgtaaatcatactgaaacttttgtgcatttgctccggtaaatc

SEQ ID NO: 209291 - DNA, 55 bp, Artificial
  Synthetic oligonucleotide
gcgtttccttcggctggttgtgggaatgcatcaattaatacgtagtgttcagcaa

SEQ ID NO: 209292 - DNA, 54 bp, Artificial
  Synthetic oligonucleotide
gccgcaattaagggcgcacggttatagttcaaacccagataaccattagtggtt

SEQ ID NO: 209293 - DNA, 55 bp, Artificial
  Synthetic oligonucleotide
gcccgccggtgcgggtatataaataatttgagcgtcttgcaaggtcagtaattgg

SEQ ID NO: 209294 - DNA, 55 bp, Artificial
  Synthetic oligonucleotide
gccccaagagtatgaatttatccaaccgaaaaggacaagttaaatgatcattctg

SEQ ID NO: 209295 - DNA, 60 bp, Artificial
  Synthetic oligonucleotide
gacgataaagttcgttgacatcactagttgaatgacgaccgccatctaattgtactaatg

SEQ ID NO: 209296 - DNA, 55 bp, Artificial
  Synthetic oligonucleotide
gcgtttctatcacatatacgagctgtagatgtgatagttctagtagttaggactt

SEQ ID NO: 209297 - DNA, 55 bp, Artificial
  Synthetic oligonucleotide
gcccattgatcggaattaacatccaatagagttcttcccgagttggtgataagag

SEQ ID NO: 209298 - DNA, 55 bp, Artificial
  Synthetic oligonucleotide
gcccacttataagcttgtcgataatcaactggaaatggataattagcacttcctg

SEQ ID NO: 209299 - DNA, 55 bp, Artificial
  Synthetic oligonucleotide
gccagatttaaacaaaggaagtagactctcaacaattcgtggagttgtgccttca

SEQ ID NO: 209300 - DNA, 55 bp, Artificial
  Synthetic oligonucleotide
gccaccctcagatttaagacctctaaactgggtgccacttataaatggatttcag

SEQ ID NO: 209301 - DNA, 55 bp, Artificial
  Synthetic oligonucleotide
gcatttcaatcgggttttaatgcgaacatgggtgcaatttcttcgattatgggaa

SEQ ID NO: 209302 - DNA, 55 bp, Artificial
  Synthetic oligonucleotide
gctaaactggagctagtcaatagagtctttcccttcctagaaagctgactggcta

SEQ ID NO: 209303 - DNA, 55 bp, Artificial
  Synthetic oligonucleotide
gcatgaccacctaaaagtgtcatagcagcttcaaatgaaacacgagttctagttg

SEQ ID NO: 209304 - DNA, 55 bp, Artificial
  Synthetic oligonucleotide
gctaatgcatcaacttcaactgctggaaaattaggaacacttggtagatttgact

SEQ ID NO: 209305 - DNA, 55 bp, Artificial
  Synthetic oligonucleotide
actgtaattgtggaggtattcataatgcttcctacctgtgagtgggagaatgaac

SEQ ID NO: 209306 - DNA, 50 bp, Artificial
  Synthetic oligonucleotide
ccccggttagggggtgttacaacgccttatcttgcctttaaaggacgcgc

SEQ ID NO: 209307 - DNA, 55 bp, Artificial
  Synthetic oligonucleotide
gcataggggtgcccgtactttacactcttagtagtgtatacgattaagatcttct

SEQ ID NO: 209308 - DNA, 55 bp, Artificial
  Synthetic oligonucleotide
gcagtgggagcacaatggattgatgatgaaccattcgcagtaattttaggggatg

SEQ ID NO: 209309 - DNA, 55 bp, Artificial
  Synthetic oligonucleotide
gctatccctagtttgagaccacccaccaatcaagaccgcataaggtcaacctgta

SEQ ID NO: 209310 - DNA, 55 bp, Artificial
  Synthetic oligonucleotide
tcttttaagtactacaacctaggagtgggtagtagatcaattagtcattctggtc

SEQ ID NO: 209311 - DNA, 55 bp, Artificial
  Synthetic oligonucleotide
tcttagacataggctctataggatgagcggaactagcggagatagttcatcatcg

SEQ ID NO: 209312 - DNA, 54 bp, Artificial
  Synthetic oligonucleotide
tccggttccaaatgttcctaacatagctaaaccaataccaatggctactaaacc

SEQ ID NO: 209313 - DNA, 55 bp, Artificial
  Synthetic oligonucleotide
aagttcgctgttctgttgaacttgacggttaatctctccttccaagcgtacctta

SEQ ID NO: 209314 - DNA, 55 bp, Artificial
  Synthetic oligonucleotide
tccagtcaccgatcctaccctagacgcatacctccaaaaggttagctttgcggtt

SEQ ID NO: 209315 - DNA, 55 bp, Artificial
  Synthetic oligonucleotide
tcagttccacctgttgagcctccaaattttcaacccaatccgattccatatccag

SEQ ID NO: 209316 - DNA, 55 bp, Artificial
  Synthetic oligonucleotide
tcaaactataacaacaagaatggtagttcaactaaatagtgcggcgtcaaatgcg

SEQ ID NO: 209317 - DNA, 59 bp, Artificial
  Synthetic oligonucleotide
cccatctcagtatagtgtacgaccagcgtcagctttatagtaagcagttttggttgtag

SEQ ID NO: 209318 - DNA, 55 bp, Artificial
  Synthetic oligonucleotide
tatgtgtataagggttacatgcaccaaccttacatgcttcaattgcacaattccc

SEQ ID NO: 209319 - DNA, 55 bp, Artificial
  Synthetic oligonucleotide
tataggactaagcttacctaacgtggctactcttggtaatatgatcaatgaggga

SEQ ID NO: 209320 - DNA, 55 bp, Artificial
  Synthetic oligonucleotide
tatacaactcacgtcttcttcaagtaggtgattgttcaggatggagttcttcttg

SEQ ID NO: 209321 - DNA, 55 bp, Artificial
  Synthetic oligonucleotide
aatgcaccattttgtgtttgttcagcaatagcttgacacactgattttgtaccgt

SEQ ID NO: 209322 - DNA, 55 bp, Artificial
  Synthetic oligonucleotide
tagggcagcaattgatggttcaagaaatattgggatggcttcaagaacaccaggt

SEQ ID NO: 209323 - DNA, 55 bp, Artificial
  Synthetic oligonucleotide
taggcggccaagtcggtacaatcttcttctcaggttgattacttggtacttactg

SEQ ID NO: 209324 - DNA, 55 bp, Artificial
  Synthetic oligonucleotide
taggactaaagtaagcattaactactgccggcgacatgcttcatagttttcgatc

SEQ ID NO: 209325 - DNA, 55 bp, Artificial
  Synthetic oligonucleotide
tagaccataagttgaatggaggtaacgctggggaacagaaatacttactgttggc

SEQ ID NO: 209326 - DNA, 49 bp, Artificial
  Synthetic oligonucleotide
tacagttccgccctcgccgtttttaacccggagggaagtatctttttgg

SEQ ID NO: 209327 - DNA, 55 bp, Artificial
  Synthetic oligonucleotide
taatggagatgtatcacgatggatccaaactcttgctaagcagctaaatgtaaac

SEQ ID NO: 209328 - DNA, 59 bp, Artificial
  Synthetic oligonucleotide
ccatctcttgactgtctcggctatagactcggtgaaatccaggtacgggtgaagacacc

SEQ ID NO: 209329 - DNA, 55 bp, Artificial
  Synthetic oligonucleotide
gttggtggaacttatgctagtatgactcaaactacatatacggctaataactcta

SEQ ID NO: 209330 - DNA, 55 bp, Artificial
  Synthetic oligonucleotide
gttgctagagcgacatgtgaataatcatttgtcacacaattctttaacgcacatg

SEQ ID NO: 209331 - DNA, 55 bp, Artificial
  Synthetic oligonucleotide
gttcatcacaagggttttgaggagatgaaagtgcttttagttacggaacaaagtc

SEQ ID NO: 209332 - DNA, 51 bp, Artificial
  Synthetic oligonucleotide
gttcagttggtaaagcttagtaagactctttaacccgttagggttttctga

SEQ ID NO: 209333 - DNA, 55 bp, Artificial
  Synthetic oligonucleotide
gttcagcgattgtttcatggcgcggttctaaatcttatggttcactaattcaagc

SEQ ID NO: 209334 - DNA, 55 bp, Artificial
  Synthetic oligonucleotide
gttacggaaatgaagtaaagactctcttctatgccccagaatctaacgccttagc

SEQ ID NO: 209335 - DNA, 55 bp, Artificial
  Synthetic oligonucleotide
ttttcagttacactagcaggtagtggtgtaagtaatggaacagttcatccgggat

SEQ ID NO: 209336 - DNA, 55 bp, Artificial
  Synthetic oligonucleotide
ttttaccctgatctgacagagataaaaccccagttaatgcatggaggttgttact

SEQ ID NO: 209337 - DNA, 55 bp, Artificial
  Synthetic oligonucleotide
tttggtatacggtttaactgaggcatctacgatctcccgaatattatcggacgaa

SEQ ID NO: 209338 - DNA, 55 bp, Artificial
  Synthetic oligonucleotide
tttagggaatccggctttgatttagagccaaagatatgtcctaattgcgcaattg

SEQ ID NO: 209339 - DNA, 59 bp, Artificial
  Synthetic oligonucleotide
ccagagtttattgactatcgcgctgctaatgatattgaaagcgccgttattttagttac

SEQ ID NO: 209340 - DNA, 47 bp, Artificial
  Synthetic oligonucleotide
ttgttccgggtttttcaccttctagtttaacttcggggttctttggt

SEQ ID NO: 209341 - DNA, 55 bp, Artificial
  Synthetic oligonucleotide
ttgtcactaatccgtttttgccagcaaatctgacagattcgtctaatcctggggc

SEQ ID NO: 209342 - DNA, 55 bp, Artificial
  Synthetic oligonucleotide
ttggggagatttgctcacattattgcatctcaacccgcattaaatccagctagtt

SEQ ID NO: 209343 - DNA, 55 bp, Artificial
  Synthetic oligonucleotide
ttccgtggaaacttgcttatacagcacaagttataccggcaattggagtagcctt

SEQ ID NO: 209344 - DNA, 55 bp, Artificial
  Synthetic oligonucleotide
ttagattagttctagcgctaacaatcgcattaacttctgcatgagcaacataagc

SEQ ID NO: 209345 - DNA, 55 bp, Artificial
  Synthetic oligonucleotide
aaatacctgaagtctagatctgtaagtcctaaagctatagttggtcatgacaacc

SEQ ID NO: 209346 - DNA, 55 bp, Artificial
  Synthetic oligonucleotide
aacagtcccctgggtagaacttccctctcaacacacttccttcacatttgcagca

SEQ ID NO: 209347 - DNA, 55 bp, Artificial
  Synthetic oligonucleotide
aacgcatttcctggctgatttgtcatttattcctacgtttcccacttagtcgcga

SEQ ID NO: 209348 - DNA, 55 bp, Artificial
  Synthetic oligonucleotide
tgtatctaacagtagcagctgaccatagatgaatcgatggagctgacgttggaag

SEQ ID NO: 209349 - DNA, 55 bp, Artificial
  Synthetic oligonucleotide
tgtacgaccagcgtcagctttatagtaagcagttttggttgtagggttatcaccg

SEQ ID NO: 209350 - DNA, 51 bp, Artificial
  Synthetic oligonucleotide
ccaataatttaacgggactaaaacacgataccgaagccacgggtacatttg

SEQ ID NO: 209351 - DNA, 54 bp, Artificial
  Synthetic oligonucleotide
tggtatagaaaacggaagcacaactaacccaggtgaaactcaaccaagtcaacc

SEQ ID NO: 209352 - DNA, 55 bp, Artificial
  Synthetic oligonucleotide
tggctattgcgcctaccggttcaataagttacttgtcaggatgtacaccaagttt

SEQ ID NO: 209353 - DNA, 55 bp, Artificial
  Synthetic oligonucleotide
aagaacttatgcaatgagagttgccatttcaggttatgtcggaagactagctgat

SEQ ID NO: 209354 - DNA, 53 bp, Artificial
  Synthetic oligonucleotide
aagaagttagaccttcaaggaaggaagacttaactggtacctcaacgatggaa

SEQ ID NO: 209355 - DNA, 55 bp, Artificial
  Synthetic oligonucleotide
aagcacaacacccacatgtggagcaaaattcaaagtacgcagaatggagaaattg

SEQ ID NO: 209356 - DNA, 55 bp, Artificial
  Synthetic oligonucleotide
tgcctgtagctccaggaccaataaatgcaattcggagtggtttaggtaatttcag

SEQ ID NO: 209357 - DNA, 55 bp, Artificial
  Synthetic oligonucleotide
tgatatatggtggttttgcatttgctacttgtgcattattctgagcaccactatg

SEQ ID NO: 209358 - DNA, 55 bp, Artificial
  Synthetic oligonucleotide
tgaatccactatgggctcactagctctgacataatagacagtgctacctctctcg

SEQ ID NO: 209359 - DNA, 55 bp, Artificial
  Synthetic oligonucleotide
tgaaagtaatgaatcggttccttgtttactttcgtttgctactgatccactgttc

SEQ ID NO: 209360 - DNA, 55 bp, Artificial
  Synthetic oligonucleotide
tgaaaataggtgctttatgagtagctccagttgagtgaattgctaaaactctagg

SEQ ID NO: 209361 - DNA, 57 bp, Artificial
  Synthetic oligonucleotide
catcggaggcatttcttctataggactattgccccccccgctttcattagagcttcc

SEQ ID NO: 209362 - DNA, 55 bp, Artificial
  Synthetic oligonucleotide
ggtgcgcaaaacgggtgctaaacgcattgctagatactggttaaaactctcgcgg

SEQ ID NO: 209363 - DNA, 55 bp, Artificial
  Synthetic oligonucleotide
ggtcaggtaaaatgcgaaatgcaagagagtcttctgacataactccgccatatac

SEQ ID NO: 209364 - DNA, 55 bp, Artificial
  Synthetic oligonucleotide
ggtatatggaggcactagaaggaggtatgcaggtgtaggagatgtagttttagtc

SEQ ID NO: 209365 - DNA, 55 bp, Artificial
  Synthetic oligonucleotide
ggtagacaattaatgcttgcaggtagcgaactgttacaatcaaaaccatgtgatc

SEQ ID NO: 209366 - DNA, 55 bp, Artificial
  Synthetic oligonucleotide
ggtaccttcgtaggatacatagcttccctattactacagccgttcgtattctccc

SEQ ID NO: 209367 - DNA, 55 bp, Artificial
  Synthetic oligonucleotide
gggtgctgtaaaaggttgagaaatactctataagttgatctagataatgctagcg

SEQ ID NO: 209368 - DNA, 54 bp, Artificial
  Synthetic oligonucleotide
ggggttagagataaaggggtttcagatgtatttacagttcctctagatcgtttc

SEQ ID NO: 209369 - DNA, 55 bp, Artificial
  Synthetic oligonucleotide
ggggctgaagggcaaactaattcctataagcaacagttagataggtactacccta

SEQ ID NO: 209370 - DNA, 55 bp, Artificial
  Synthetic oligonucleotide
ggggaattagccgtcaaagatactgaggcgcacctattccaatgattcactgctc

SEQ ID NO: 209371 - DNA, 55 bp, Artificial
  Synthetic oligonucleotide
gggcttagagtttatgctttaacaatgacacttggaatgctagttgctattggtt

SEQ ID NO: 209372 - DNA, 60 bp, Artificial
  Synthetic oligonucleotide
ctcgcctaggggtactgactataatcaaactctgaataccgttatgaattgctatgcagt

SEQ ID NO: 209373 - DNA, 60 bp, Artificial
  Synthetic oligonucleotide
catataactcattatacgatgatggcgctcgtatgttaggtttaatatcgtttagtcatt

SEQ ID NO: 209374 - DNA, 55 bp, Artificial
  Synthetic oligonucleotide
gggctctggaaagtacttatagtcaattgtgccagtcttagtacgcattacaatt

SEQ ID NO: 209375 - DNA, 55 bp, Artificial
  Synthetic oligonucleotide
gggcgatcttcactaaacatgacatatctgataatagcaagatcactatcagggc

SEQ ID NO: 209376 - DNA, 55 bp, Artificial
  Synthetic oligonucleotide
gggataagacgatcggtaaatgtaatattttccccgacgagtatcgtgctccaaa

SEQ ID NO: 209377 - DNA, 54 bp, Artificial
  Synthetic oligonucleotide
gggaggttaaactgtgtcatgccgtgggtgctaaactaatcgttctccaccccg

SEQ ID NO: 209378 - DNA, 55 bp, Artificial
  Synthetic oligonucleotide
ggctttcacgaactccaagatgtaattcacctggttttaaatattgagcatgacc

SEQ ID NO: 209379 - DNA, 52 bp, Artificial
  Synthetic oligonucleotide
ggcgtaattggtataaagtctgggaaggtggacttagtattcaaggtggggt

SEQ ID NO: 209380 - DNA, 51 bp, Artificial
  Synthetic oligonucleotide
ggccaaaccactctacggggtggggttgtaggacttttgttagagttacaa

SEQ ID NO: 209381 - DNA, 54 bp, Artificial
  Synthetic oligonucleotide
ggcaaatccgcttactattaagactaagttatgagtacgagcgaccccttcggg

SEQ ID NO: 209382 - DNA, 55 bp, Artificial
  Synthetic oligonucleotide
actgagaacatcttaaggagaatgtatggctagaaagctacagagatttacgtta

SEQ ID NO: 209383 - DNA, 55 bp, Artificial
  Synthetic oligonucleotide
ggagccacctgctacctctacaccgttgagcactaaatcatatgcttgtgctctt

SEQ ID NO: 209384 - DNA, 49 bp, Artificial
  Synthetic oligonucleotide
catacctttgaaaacacggttaccgctaatgtcccctaaagaaccggtt

SEQ ID NO: 209385 - DNA, 54 bp, Artificial
  Synthetic oligonucleotide
ggagcaggttttacttacacaccagaagcaaaacaaggactaaaagtaagacta

SEQ ID NO: 209386 - DNA, 55 bp, Artificial
  Synthetic oligonucleotide
ggaattactccatcaagtacataaaatccaccaatagttccaattgctgagtgtc

SEQ ID NO: 209387 - DNA, 55 bp, Artificial
  Synthetic oligonucleotide
ggaatagcgtgaggcatactaccattaactccacttgcaataattgtgtcgaaac

SEQ ID NO: 209388 - DNA, 55 bp, Artificial
  Synthetic oligonucleotide
ggaactccaagtccaggtagtttgatttcactaattgctttatctaatggaacac

SEQ ID NO: 209389 - DNA, 55 bp, Artificial
  Synthetic oligonucleotide
gttaacgtttacctaaactatacaggaccagcgattgttttagacgctgatctac

SEQ ID NO: 209390 - DNA, 55 bp, Artificial
  Synthetic oligonucleotide
gtgtttcgaatgcctttgttgcttatcaaaatgccacaatcacagcagacaatgc

SEQ ID NO: 209391 - DNA, 52 bp, Artificial
  Synthetic oligonucleotide
acattaacaattacgtttccctcttcgtcaaaactacgtgttttatcaacac

SEQ ID NO: 209392 - DNA, 55 bp, Artificial
  Synthetic oligonucleotide
acatttgccccatcagaacgagtttcctgttcacgaactagaccacgacgacgtg

SEQ ID NO: 209393 - DNA, 55 bp, Artificial
  Synthetic oligonucleotide
gtgggtcttgggatttaatgctaacggattgtactcagttaagtttggcgtgtaa

SEQ ID NO: 209394 - DNA, 54 bp, Artificial
  Synthetic oligonucleotide
gtgctaacccacaagctttaaatgcaaaaggtgaaccttacccaggtcaaccag

SEQ ID NO: 209395 - DNA, 57 bp, Artificial
  Synthetic oligonucleotide
cacttcaataggtggaacaacattgcaaatcgaagtttcaagcttcaagagtaaaaa

SEQ ID NO: 209396 - DNA, 55 bp, Artificial
  Synthetic oligonucleotide
gtgcccgtactttacactcttagtagtgcatacgattaagatcttcttcaatccc

SEQ ID NO: 209397 - DNA, 55 bp, Artificial
  Synthetic oligonucleotide
gtgcacttaatccacggccgttttgatctagtctgtccgttaagtcaagccttgg

SEQ ID NO: 209398 - DNA, 55 bp, Artificial
  Synthetic oligonucleotide
gtctgtatactatagcagtgccgatgatagaagatgctagggagataatggggag

SEQ ID NO: 209399 - DNA, 55 bp, Artificial
  Synthetic oligonucleotide
gtctatccatacctaaaccgattccgcagtgtggtggaactccgtaattgaaagc

SEQ ID NO: 209400 - DNA, 55 bp, Artificial
  Synthetic oligonucleotide
gtcgttaattacttacgctaacggtgccaagagttacatcattagccctgatggc

SEQ ID NO: 209401 - DNA, 55 bp, Artificial
  Synthetic oligonucleotide
gtcggccttgttactgaaggtttaacactaatgtttgtgccatcttatattcatg

SEQ ID NO: 209402 - DNA, 55 bp, Artificial
  Synthetic oligonucleotide
gtccatctaatgagccaactattgcataaactggtgcaaatcatacacttaaacc

SEQ ID NO: 209403 - DNA, 55 bp, Artificial
  Synthetic oligonucleotide
gtccagtatatccaatagcaccaattaaagccagtaagggaattacagtgacagg

SEQ ID NO: 209404 - DNA, 54 bp, Artificial
  Synthetic oligonucleotide
gtattaactaacaggtttaaagggtatttctcaaccgcatcagcagtacccctg

SEQ ID NO: 209405 - DNA, 55 bp, Artificial
  Synthetic oligonucleotide
gtagtttcaggagttacaccagatcttccagcagttaatagaactcctaatttac

SEQ ID NO: 209406 - DNA, 60 bp, Artificial
  Synthetic oligonucleotide
cacgtcccatacgtcttgtaatagcaatacgagcactttcgatttgacgtgcatctactc

SEQ ID NO: 209407 - DNA, 55 bp, Artificial
  Synthetic oligonucleotide
gtaccagtagaaggggctttaggagctggttttgagctagtagcaggcttagcgc

SEQ ID NO: 209408 - DNA, 55 bp, Artificial
  Synthetic oligonucleotide
gtaattcacctggttttaaatattgagcatgacctcctaaaagtgtcatagctgc

SEQ ID NO: 209409 - DNA, 55 bp, Artificial
  Synthetic oligonucleotide
ggtttctcgtactactagcgttgatagaccagtatcactgaacgcagaagttgct

SEQ ID NO: 209410 - DNA, 55 bp, Artificial
  Synthetic oligonucleotide
ggttgtaaccaatgaggggatagttatcgcgcgccacttttatatgttgaggtcg

SEQ ID NO: 209411 - DNA, 55 bp, Artificial
  Synthetic oligonucleotide
ggttggaccaggagcaggtgatggctctggacctggtttatcatctggatctggg

SEQ ID NO: 209412 - DNA, 53 bp, Artificial
  Synthetic oligonucleotide
ggttagcaattgcaatgggtcccgttagtaacaccaagtaaaaggtatcactt

SEQ ID NO: 209413 - DNA, 55 bp, Artificial
  Synthetic oligonucleotide
ggtggagcctgtcatatctatgttctggaagaccacgaagatcataccgattctc

SEQ ID NO: 209414 - DNA, 55 bp, Artificial
  Synthetic oligonucleotide
ggtgctcaagtgggttcatgaggttcaacaaaccacacagaagttatgtacatgt

SEQ ID NO: 209415 - DNA, 55 bp, Artificial
  Synthetic oligonucleotide
cgcttcgatcgttcctgctgtgcagtgtgttcgtaataactgcttctcacttaca

SEQ ID NO: 209416 - DNA, 55 bp, Artificial
  Synthetic oligonucleotide
cgctctaatcttaggatcttgagcgatctcactagcaccttttgagattgtggga

SEQ ID NO: 209417 - DNA, 56 bp, Artificial
  Synthetic oligonucleotide
cacgcataaaaaatagtccattgaggacaagtgccttttatgggtctattcttagt

SEQ ID NO: 209418 - DNA, 55 bp, Artificial
  Synthetic oligonucleotide
cgctcatgttgattgagtttcactatctaaacactgttgagttcatttcccctga

SEQ ID NO: 209419 - DNA, 54 bp, Artificial
  Synthetic oligonucleotide
cgctactacccgaaggggtcgctcgtactcataacttagtcttaatagtaagcg

SEQ ID NO: 209420 - DNA, 55 bp, Artificial
  Synthetic oligonucleotide
cgcccaatcctaaaagaactaaacccgctataacacctataacaacatacatcac

SEQ ID NO: 209421 - DNA, 55 bp, Artificial
  Synthetic oligonucleotide
cgccaatattccgataacgcttcaacctatgtataccgcggctgctgcacatagt

SEQ ID NO: 209422 - DNA, 55 bp, Artificial
  Synthetic oligonucleotide
cgattagttgcttataatcagcccctacaagaccagcaactaataatccacttgg

SEQ ID NO: 209423 - DNA, 55 bp, Artificial
  Synthetic oligonucleotide
cgattacgttctattgtcctacagcactaaggatccatcgcacttcaagtaagaa

SEQ ID NO: 209424 - DNA, 55 bp, Artificial
  Synthetic oligonucleotide
atacgccaaaataagttgttgaggacgtataaggtttttatggtgagctgagttc

SEQ ID NO: 209425 - DNA, 55 bp, Artificial
  Synthetic oligonucleotide
cgacacagccttgaatcccttactagtgcgtaccgcttagagactccaaagtgac

SEQ ID NO: 209426 - DNA, 55 bp, Artificial
  Synthetic oligonucleotide
cgaacgaattaccattggcgtcaaacaacacgctaatgtcgtattccgtgtcacc

SEQ ID NO: 209427 - DNA, 55 bp, Artificial
  Synthetic oligonucleotide
cgaaattttaggtcaagcaactagctgagatgcactctgataccttcccagttct

SEQ ID NO: 209428 - DNA, 59 bp, Artificial
  Synthetic oligonucleotide
caatgctttaatccccccacccattggcatcctcactactagtggagcggtatatacac

SEQ ID NO: 209429 - DNA, 55 bp, Artificial
  Synthetic oligonucleotide
cctgacgtaatttgttgtcatggtccttcaattaaagcgattggaccaactgctg

SEQ ID NO: 209430 - DNA, 55 bp, Artificial
  Synthetic oligonucleotide
cctagtgcgtcatataagcgtttatcgttaacatcaatcaaggattgttggctaa

SEQ ID NO: 209431 - DNA, 55 bp, Artificial
  Synthetic oligonucleotide
cctaccaacaaagggtttgcgcataatcaacctgggattgatgcgatgctatacc

SEQ ID NO: 209432 - DNA, 55 bp, Artificial
  Synthetic oligonucleotide
cctaaacccctaactataccttggtatgcatagaaactgtcgatatatctatcgc

SEQ ID NO: 209433 - DNA, 55 bp, Artificial
  Synthetic oligonucleotide
ccgttaacagagttcttccggataagtatgccttcactgtagagaagttcttagg

SEQ ID NO: 209434 - DNA, 53 bp, Artificial
  Synthetic oligonucleotide
ccgggttatttccaggtggtttagcaacttttgcaaggtttgctggaattgta

SEQ ID NO: 209435 - DNA, 55 bp, Artificial
  Synthetic oligonucleotide
cccgatgttctctttacgttctctactggtagagcttgaaatgactctaaaccga

SEQ ID NO: 209436 - DNA, 55 bp, Artificial
  Synthetic oligonucleotide
cccgaggattggttgtctcgggctaagcacaaagacggtaacattggcaaatccg

SEQ ID NO: 209437 - DNA, 55 bp, Artificial
  Synthetic oligonucleotide
cccgaatcccctttagctaaggcatacttcttctgaccgtaatcactcccgcata

SEQ ID NO: 209438 - DNA, 53 bp, Artificial
  Synthetic oligonucleotide
ccccgtttgataggaattccgctcatacttcgctcggtattcttttagttagt

SEQ ID NO: 209439 - DNA, 58 bp, Artificial
  Synthetic oligonucleotide
caagattactaggcgcaattataatgacccatggtgataataggggaataattattcc

SEQ ID NO: 209440 - DNA, 55 bp, Artificial
  Synthetic oligonucleotide
ccccacataagaaataccgctagctgttggaacactaacagcagtaagtagtagt

SEQ ID NO: 209441 - DNA, 55 bp, Artificial
  Synthetic oligonucleotide
ctgaagtacatggtgctacggccagtggtcgaattatcgcatcattgggtccaca

SEQ ID NO: 209442 - DNA, 55 bp, Artificial
  Synthetic oligonucleotide
ctctgtgattgagttatagaggagcctctaacaatagtatatagcggagcaggcg

SEQ ID NO: 209443 - DNA, 55 bp, Artificial
  Synthetic oligonucleotide
aggttcatgaaatgttcgtgaattcaagagtgctattagtatcctagctagcgtc

SEQ ID NO: 209444 - DNA, 55 bp, Artificial
  Synthetic oligonucleotide
ctccatgagctgcaataccattgttgattgtacccattccaaattctctgacacc

SEQ ID NO: 209445 - DNA, 55 bp, Artificial
  Synthetic oligonucleotide
ctcaacccgttgatgagaacgatcaaaatgcgaaatgaaccggatattttgcgac

SEQ ID NO: 209446 - DNA, 55 bp, Artificial
  Synthetic oligonucleotide
agtagcgaattaaattctgcctcagactgaacagctaactcactctctcagcata

SEQ ID NO: 209447 - DNA, 55 bp, Artificial
  Synthetic oligonucleotide
ctatgcttgtgagaatgtgatcattatgcaccgcggtaagatcctagaacgtgga

SEQ ID NO: 209448 - DNA, 55 bp, Artificial
  Synthetic oligonucleotide
ctatcagctacttcatcgtttatctttggatactcacgtgctttagtagcgctag

SEQ ID NO: 209449 - DNA, 55 bp, Artificial
  Synthetic oligonucleotide
ctagtcctgaagttactcctctgtgaagcaatggtctaaatccaattcaaccgtg

SEQ ID NO: 209450 - DNA, 60 bp, Artificial
  Synthetic oligonucleotide
caagaatacagttccatttgatgaactaagtcctgctgttacctcaggaatcagaatagg

SEQ ID NO: 209451 - DNA, 55 bp, Artificial
  Synthetic oligonucleotide
ctagcacagtaagctaagaagtccttgtatccctgagaatcctttccggatacct

SEQ ID NO: 209452 - DNA, 55 bp, Artificial
  Synthetic oligonucleotide
ctactattaatatctaggatcccctcctcgctgacatactgcttcgcaataggca

SEQ ID NO: 209453 - DNA, 55 bp, Artificial
  Synthetic oligonucleotide
agtctgcgttatctccgctaagccaactagatccaactttgtagagtttattacc

SEQ ID NO: 209454 - DNA, 51 bp, Artificial
  Synthetic oligonucleotide
agtggtagttttatagttgaaacctactgaaatgttcccggaatttctaaa

SEQ ID NO: 209455 - DNA, 55 bp, Artificial
  Synthetic oligonucleotide
ctaatccccaagcaattcctgcatgataaggtgcaccatatttataagcgttcat

SEQ ID NO: 209456 - DNA, 55 bp, Artificial
  Synthetic oligonucleotide
ctaaggatcttggacgacaaggttgatggtcaactaccctttatcagtgatgctc

SEQ ID NO: 209457 - DNA, 55 bp, Artificial
  Synthetic oligonucleotide
ctaaacgcagtagattcttccccttcgaacaaccctttatttgtgctctcgcatc

SEQ ID NO: 209458 - DNA, 49 bp, Artificial
  Synthetic oligonucleotide
cgttagtgttaacgtaaggtagtttagccgataacccatttaaccaagg

SEQ ID NO: 209459 - DNA, 55 bp, Artificial
  Synthetic oligonucleotide
cggtttgtttgctaattgacccaggttactatcatcttgcttacgttcagtaacc

SEQ ID NO: 209460 - DNA, 55 bp, Artificial
  Synthetic oligonucleotide
cggtttctcaaccttgatttagtatagcaattgcagttttaggtccgataccttg

SEQ ID NO: 209461 - DNA, 58 bp, Artificial
  Synthetic oligonucleotide
caacactacagactcttacgccaatattccgataacgcttcaacctatgtataccgcg

SEQ ID NO: 209462 - DNA, 55 bp, Artificial
  Synthetic oligonucleotide
agttcgttatctcttttaccacaagcaacagtcacaacagtagcactagcagcta

SEQ ID NO: 209463 - DNA, 54 bp, Artificial
  Synthetic oligonucleotide
cggggtaatgatgcaactatgttaagtggggaaactgctagtgggctttaccct

SEQ ID NO: 209464 - DNA, 55 bp, Artificial
  Synthetic oligonucleotide
cgggcttcacttcaacgcttcgcttaaagctaacgcatccgcttaaccttcgggc

SEQ ID NO: 209465 - DNA, 55 bp, Artificial
  Synthetic oligonucleotide
cgggcattgatgttgaaagtccgtttacatatgtgattgatccatcagcagtttc

SEQ ID NO: 209466 - DNA, 53 bp, Artificial
  Synthetic oligonucleotide
cgggactaaaacacgataccgaagccacgggtacatttgtacgttagaggagc

SEQ ID NO: 209467 - DNA, 55 bp, Artificial
  Synthetic oligonucleotide
cagataactacagagggtctaagttattgtgatcccaagaatcataactctgcga

SEQ ID NO: 209468 - DNA, 55 bp, Artificial
  Synthetic oligonucleotide
cacttgttagtccaacaatttgaacagtgggtattcttacagcttttgcagcttg

SEQ ID NO: 209469 - DNA, 55 bp, Artificial
  Synthetic oligonucleotide
cacttcaatgttaatacaatgcggatttgccaacattgccatctttgtgcttagc

SEQ ID NO: 209470 - DNA, 55 bp, Artificial
  Synthetic oligonucleotide
cacttatgtcagggaattccagctaaatcgtcgttatttctgtgatccatagaag

SEQ ID NO: 209471 - DNA, 55 bp, Artificial
  Synthetic oligonucleotide
cacttactgggtttaatcctaaatcagctttatgaatagctccaactgcttcagt

SEQ ID NO: 209472 - DNA, 57 bp, Artificial
  Synthetic oligonucleotide
atttgataccgctatttttactcttgaagcttgaaacttcgatttgcaatgttgttc

SEQ ID NO: 209473 - DNA, 55 bp, Artificial
  Synthetic oligonucleotide
cactatctcgccccttagcaatcaatctactgctaaacttatctgcgacagtttg

SEQ ID NO: 209474 - DNA, 55 bp, Artificial
  Synthetic oligonucleotide
atctaagatcattagttctctggctactgccagagtgataagcggcttctagacc

SEQ ID NO: 209475 - DNA, 55 bp, Artificial
  Synthetic oligonucleotide
cacgtagtaggaatgcgtaatgtaccagatccaacaatcagtgttgaagttcaaa

SEQ ID NO: 209476 - DNA, 55 bp, Artificial
  Synthetic oligonucleotide
cacgagactcataatctcccatatacatagctccagccatcaaactacccatatc

SEQ ID NO: 209477 - DNA, 55 bp, Artificial
  Synthetic oligonucleotide
cacaaggattaatgcctggtgttgtagctggattactagcagataacacaggtgg

SEQ ID NO: 209478 - DNA, 55 bp, Artificial
  Synthetic oligonucleotide
caattttgtcttcctcgactaaagacttcccaatcccgattccttgtgccgctaa

SEQ ID NO: 209479 - DNA, 53 bp, Artificial
  Synthetic oligonucleotide
caattagtaaacgcaagttaatttgtggcttttccctagtagcccttacaatc

SEQ ID NO: 209480 - DNA, 55 bp, Artificial
  Synthetic oligonucleotide
caataccctcactgttaagctgtgtagcagcatcaagtcaggtaccaaccccatc

SEQ ID NO: 209481 - DNA, 55 bp, Artificial
  Synthetic oligonucleotide
caagtccagctttagttgattgcaatttaaatgttacgtttgcgccacctaatct

SEQ ID NO: 209482 - DNA, 55 bp, Artificial
  Synthetic oligonucleotide
caagcactaagaacaaattcaatttatgtatccgaaagatgacttggtggaaccc

SEQ ID NO: 209483 - DNA, 59 bp, Artificial
  Synthetic oligonucleotide
ctctcacttaatggctattgcgcctaccggttcaataagttacttgtcaggatgtacac

SEQ ID NO: 209484 - DNA, 60 bp, Artificial
  Synthetic oligonucleotide
atggggtcacgaccagggggctactacgatagcccccaatgagtgatttgtgacatgtga

SEQ ID NO: 209485 - DNA, 55 bp, Artificial
  Synthetic oligonucleotide
atgagactcttctactagaaggaaggctagttagtcctggactagtgtccgggac

SEQ ID NO: 209486 - DNA, 55 bp, Artificial
  Synthetic oligonucleotide
caagagtgaggtttaattccatcaaatagttgtcttagtctctcaaacccttgag

SEQ ID NO: 209487 - DNA, 55 bp, Artificial
  Synthetic oligonucleotide
atgccgatcccaatgcttatcaggacccaaacgcttacaccgatcctaacgccta

SEQ ID NO: 209488 - DNA, 55 bp, Artificial
  Synthetic oligonucleotide
caacacgtgacatataagtacctatcaaatgtaagcgataacttcaccacctaca

SEQ ID NO: 209489 - DNA, 55 bp, Artificial
  Synthetic oligonucleotide
caaatcctcaaccagctgttattgagattcaacctgcattttgtcctttagttcc

SEQ ID NO: 209490 - DNA, 55 bp, Artificial
  Synthetic oligonucleotide
caaacttgacttagaaagtccaacgactgagggtggtccttatgtgacttataac

SEQ ID NO: 209491 - DNA, 55 bp, Artificial
  Synthetic oligonucleotide
caaacagttggagttcaattatttgcaggtcaattccagccatgagctctagcat

SEQ ID NO: 209492 - DNA, 55 bp, Artificial
  Synthetic oligonucleotide
attgctggacgcaccgaaagagagtcgatctaccttgagtccaaacattgtttga

SEQ ID NO: 209493 - DNA, 55 bp, Artificial
  Synthetic oligonucleotide
atgggcttctcatgagacggactcttagttttggtagagagatcgttacctctgg

SEQ ID NO: 209494 - DNA, 55 bp, Artificial
  Synthetic oligonucleotide
cccatgatcttcccaacccaatacttatacgcgtagttccttcctagaaggctct

SEQ ID NO: 209495 - DNA, 60 bp, Artificial
  Synthetic oligonucleotide
ctatatagatgctgcgggtggttcatctggaactagtttatatgatgaacaaggacgatt

SEQ ID NO: 209496 - DNA, 55 bp, Artificial
  Synthetic oligonucleotide
atcaaagctgctgagctaagtcaagttcctgcgggtggtagtttagctgttgatc

SEQ ID NO: 209497 - DNA, 55 bp, Artificial
  Synthetic oligonucleotide
cccaatcaggtcaaacgattaacctaaatgcgcagaacgtattacaaggtctggt

SEQ ID NO: 209498 - DNA, 55 bp, Artificial
  Synthetic oligonucleotide
ccatcgctaggtttagcatcttttcttgctactgtttctgaaccttcagggaaag

SEQ ID NO: 209499 - DNA, 55 bp, Artificial
  Synthetic oligonucleotide
ccagtttcgtttagaattggtccattagcactagaaactaaagctccaccagcag

SEQ ID NO: 209500 - DNA, 55 bp, Artificial
  Synthetic oligonucleotide
ccagctctaataaggattcagaggggtgaagggatctctcttatgcatattctag

SEQ ID NO: 209501 - DNA, 55 bp, Artificial
  Synthetic oligonucleotide
ccagatgtgtgagaagacaatgatatcccgaagacactagaggagccgagtaaag

SEQ ID NO: 209502 - DNA, 55 bp, Artificial
  Synthetic oligonucleotide
ccacgctgacatgagctatacaagagaagtgggtattcaaggaactccaacaata

SEQ ID NO: 209503 - DNA, 55 bp, Artificial
  Synthetic oligonucleotide
ccaccatagcatctcttagaagaatgttgtaagataaatagcttgaaccgaatat

SEQ ID NO: 209504 - DNA, 55 bp, Artificial
  Synthetic oligonucleotide
ccaccaccaggtggaccataacgatcaacatattcataactaccaggatcaaggt

SEQ ID NO: 209505 - DNA, 55 bp, Artificial
  Synthetic oligonucleotide
atcacccactacttctttgattaattcgatgtcttctgcagtagctcctcgatac

SEQ ID NO: 209506 - DNA, 59 bp, Artificial
  Synthetic oligonucleotide
ctatactgtaggtccgagtgctaattttttacacacacctgttgcccacactgtctata

SEQ ID NO: 209507 - DNA, 54 bp, Artificial
  Synthetic oligonucleotide
ccaaactacttagtaccacaacctccaagacaacctgactattacagtaatcgt

SEQ ID NO: 209508 - DNA, 55 bp, Artificial
  Synthetic oligonucleotide
catttctaacggctagtttaatcgctcttgtttcagcactagctgtatttgttgg

SEQ ID NO: 209509 - DNA, 55 bp, Artificial
  Synthetic oligonucleotide
cattcgcatcatggaattctcctccaactcataatgctgttccacatcccaaata

SEQ ID NO: 209510 - DNA, 55 bp, Artificial
  Synthetic oligonucleotide
cattactgcgatccgatctgagatgtattccaccattcttaagtcgtgcgcaata

SEQ ID NO: 209511 - DNA, 55 bp, Artificial
  Synthetic oligonucleotide
catccttcctatttgttctaaacttgcacgttgagtggtgctaccaattctaaca

SEQ ID NO: 209512 - DNA, 55 bp, Artificial
  Synthetic oligonucleotide
catcccagcagtataacttaaagctccaactaaagccccacccataggaccaaac

SEQ ID NO: 209513 - DNA, 55 bp, Artificial
  Synthetic oligonucleotide
cagttaagtcacaacaacgtggtcgaacagttagtgcgtcccacctacctcttgg

SEQ ID NO: 209514 - DNA, 55 bp, Artificial
  Synthetic oligonucleotide
cagtgggacttgatagtttcataagtactgatccaaaacacatcaatgcaggagc

SEQ ID NO: 209515 - DNA, 55 bp, Artificial
  Synthetic oligonucleotide
cagtgattgaattaatcccgaaacgtcatcaacacctaagatatgtaatctagag

SEQ ID NO: 209516 - DNA, 55 bp, Artificial
  Synthetic oligonucleotide
cagcgcagagtactccacattcctctcgaagctgatctactgttaaccttacatc

SEQ ID NO: 209517 - DNA, 59 bp, Artificial
  Synthetic oligonucleotide
ctacgagcctcatgcgtgaatagaacaagttggaccagttaatgtatttggacgattta

SEQ ID NO: 209518 - DNA, 55 bp, Artificial
  Synthetic oligonucleotide
cagccgccagctcaacaagtgtgcctacaacactagttccggttcctttgcaaga

SEQ ID NO: 209519 - DNA, 55 bp, Artificial
  Synthetic oligonucleotide
cagccataggttgaagcattgttccaccatacaaagcattctgtacagaagtatt

SEQ ID NO: 209520 - DNA, 55 bp, Artificial
  Synthetic oligonucleotide
cagcaaccagttgctgggcaggcacaaaatcctaataatgtaaccgttattagac

SEQ ID NO: 209521 - DNA, 55 bp, Artificial
  Synthetic oligonucleotide
cagcaaattagaaaagataactaccgacgttatccagaaggtagaatgatttacc

SEQ ID NO: 209522 - DNA, 55 bp, Artificial
  Synthetic oligonucleotide
ctgctattttcctcagataagtaagttaagtatgcgttactcgcccgtttgccac

SEQ ID NO: 209523 - DNA, 55 bp, Artificial
  Synthetic oligonucleotide
gaataacggctagaaatggccgctaatgccggatacttattagcttcgcatgaag

SEQ ID NO: 209524 - DNA, 55 bp, Artificial
  Synthetic oligonucleotide
cttccatcgctacttgtgctccaattcctgatcctggaacatttgtttctaaagc

SEQ ID NO: 209525 - DNA, 55 bp, Artificial
  Synthetic oligonucleotide
cttggcgaatataaaccggcagattctgtaacttgcactgggtttgcattctgtg

SEQ ID NO: 209526 - DNA, 55 bp, Artificial
  Synthetic oligonucleotide
gaaggtggaactaaagaatcagaactacaacaactaggtcacactgatttaagag

SEQ ID NO: 209527 - DNA, 55 bp, Artificial
  Synthetic oligonucleotide
ctgcttgcaactgtcattccactagctgcaccacctataatgacaattctcatac

SEQ ID NO: 209528 - DNA, 60 bp, Artificial
  Synthetic oligonucleotide
ctacagctttgatcactcatcttaccatctcaacgagctgatttaagtcagtcacctggt

SEQ ID NO: 209529 - DNA, 55 bp, Artificial
  Synthetic oligonucleotide
gaactttgtctcaccatggttatgatctactctatcgcttgtagcatcaacatgg

SEQ ID NO: 209530 - DNA, 55 bp, Artificial
  Synthetic oligonucleotide
ctttagattctccaattgaaccttcaatagtaactgttagtgttccgacctcatc

SEQ ID NO: 209531 - DNA, 55 bp, Artificial
  Synthetic oligonucleotide
ctttcagttcatggttactgtaggacaagaagttaggatgggttaactcttgctc

SEQ ID NO: 209532 - DNA, 55 bp, Artificial
  Synthetic oligonucleotide
cttttgcggcttgtacgcaacgatatgcattagttgcaagtgaagtagaacgtgc

SEQ ID NO: 209533 - DNA, 55 bp, Artificial
  Synthetic oligonucleotide
gaacgtaagcaagatgatagtaacctgggtcaattagcaaacaaaccgatcgatc

SEQ ID NO: 209534 - DNA, 55 bp, Artificial
  Synthetic oligonucleotide
gaacggtggtggtctcagatctgatcttgaagccaaaactatcacacggggtgac

SEQ ID NO: 209535 - DNA, 55 bp, Artificial
  Synthetic oligonucleotide
gaaacaactgcttcatcgatgagtagtggggctacatctcctcgcaaggccctta

SEQ ID NO: 209536 - DNA, 52 bp, Artificial
  Synthetic oligonucleotide
ctgttgccaaaattagtaaacatctaagctccttaaagggttcttccaaggt

SEQ ID NO: 209537 - DNA, 55 bp, Artificial
  Synthetic oligonucleotide
cttactagaaaagacgtaatagtagtagctagcgttagcgcgatttatggtgcgc

SEQ ID NO: 209538 - DNA, 55 bp, Artificial
  Synthetic oligonucleotide
gaacctgaagctccacctaaaggttgtcatgaactaagtgaatatcctaaaccgt

SEQ ID NO: 209539 - DNA, 54 bp, Artificial
  Synthetic oligonucleotide
ctaagatctgtctttaaacatacccctcctctaataatactttcaaaaggtgta

SEQ ID NO: 209540 - DNA, 55 bp, Artificial
  Synthetic oligonucleotide
gaaccatggagagataaaacttaatgaagtggtagcaacctattagattaggtgc

SEQ ID NO: 209541 - DNA, 55 bp, Artificial
  Synthetic oligonucleotide
gaaactccaccaattggaactgttgaactatataaaactagcggccattgagatc

SEQ ID NO: 209542 - DNA, 55 bp, Artificial
  Synthetic oligonucleotide
gaacatcctcagggtgatcaaccacataatgcccaaccatctgatttacctagaa

SEQ ID NO: 209543 - DNA, 55 bp, Artificial
  Synthetic oligonucleotide
gaaagttgtctctggtgttttcaggaagactttgtccgtaatccatcatttgcac

SEQ ID NO: 209544 - DNA, 55 bp, Artificial
  Synthetic oligonucleotide
cttcattagctatcacctctcattacattttcgccacttgagcttgatccaccgg

SEQ ID NO: 209545 - DNA, 55 bp, Artificial
  Synthetic oligonucleotide
cttcagctgaaacaaaacctctacctggacgaagatacatttctaagtgtaaggc

SEQ ID NO: 209546 - DNA, 55 bp, Artificial
  Synthetic oligonucleotide
ctgaagtaggaatcacgattcgaacagcagctaactcgcaactgatcattgatcc

SEQ ID NO: 209547 - DNA, 55 bp, Artificial
  Synthetic oligonucleotide
gagctagtggtgcttgatccactacctttaatacactgcacattctggcatacgc

SEQ ID NO: 209548 - DNA, 55 bp, Artificial
  Synthetic oligonucleotide
gagcgctttgtgttaacgaccgaagagttagttacctttgtggtagcgagtgtcg

SEQ ID NO: 209549 - DNA, 55 bp, Artificial
  Synthetic oligonucleotide
gagatcttagttttgttacgatcgatccagctagcgcacttgatttagatgattc

SEQ ID NO: 209550 - DNA, 55 bp, Artificial
  Synthetic oligonucleotide
cggtatcggttagcccttttctagccccgtgggttgatgaatagaattcataagc

SEQ ID NO: 209551 - DNA, 52 bp, Artificial
  Synthetic oligonucleotide
cttctaataattcaaggttcgaataatttagccaccattttccgcggtaaac

SEQ ID NO: 209552 - DNA, 55 bp, Artificial
  Synthetic oligonucleotide
ctgagactacaagtctttcccgcccaaagtcagatgattcaactaataatagcac

SEQ ID NO: 209553 - DNA, 55 bp, Artificial
  Synthetic oligonucleotide
ctgatactgtgtatctagggcccaagaagttaactgctgagtaaaccaatttagg

SEQ ID NO: 209554 - DNA, 55 bp, Artificial
  Synthetic oligonucleotide
agcttgccagctaagctccgtagtttctttgatagcagcatagttattaaccgcg

SEQ ID NO: 209555 - DNA, 55 bp, Artificial
  Synthetic oligonucleotide
ctgcaccaggttttgcttgcatagccataaattctaatttagccacacgtgtgat

SEQ ID NO: 209556 - DNA, 55 bp, Artificial
  Synthetic oligonucleotide
cttgacggtattttcatgtcagatttccttcgtggtaaccttactggcaacgctc

SEQ ID NO: 209557 - DNA, 55 bp, Artificial
  Synthetic oligonucleotide
gactaaaactaacttaggcttatcataaacccgcggtatcataaattgcactctc

SEQ ID NO: 209558 - DNA, 55 bp, Artificial
  Synthetic oligonucleotide
gaccaacaactgttccatcgttcttaactccaaagtaaacagatccacggccact

SEQ ID NO: 209559 - DNA, 55 bp, Artificial
  Synthetic oligonucleotide
ctgctagtagtccagctacaacaccaggcattaatccttgtggtcctacaattgc

SEQ ID NO: 209560 - DNA, 55 bp, Artificial
  Synthetic oligonucleotide
gaattgatctcatgtcaaaacttcattgaagcactaagcgcgatcagtggttaca

SEQ ID NO: 209561 - DNA, 59 bp, Artificial
  Synthetic oligonucleotide
cggagtagttaatggaatggcatatacagaatatggaggcaacttacttccagtagaag

SEQ ID NO: 209562 - DNA, 55 bp, Artificial
  Synthetic oligonucleotide
gaatgatacgcgttgaacataagagcgactcacaatggctgcaatttgcgttccg

SEQ ID NO: 209563 - DNA, 55 bp, Artificial
  Synthetic oligonucleotide
cttggcaagagcgtaaattccaaacgccgctccaatagcatctagatcagcgttc

SEQ ID NO: 209564 - DNA, 55 bp, Artificial
  Synthetic oligonucleotide
gaatgagtaggaagcgctactagaagtgacttttcaggacgatgtccgcttagat

SEQ ID NO: 209565 - DNA, 54 bp, Artificial
  Synthetic oligonucleotide
cttggccttttcccctagctgtttacgcaaccattccgacataaagatgccctt

SEQ ID NO: 209566 - DNA, 54 bp, Artificial
  Synthetic oligonucleotide
gttctcttgctagggatatgggcgcaattattactggggcagctaatgttagcg

SEQ ID NO: 209567 - DNA, 54 bp, Artificial
  Synthetic oligonucleotide
ggttgcgaagaacttgtctgtggagctaccttaaagtcgctaagttgaagtttg

SEQ ID NO: 209568 - DNA, 54 bp, Artificial
  Synthetic oligonucleotide
ggttgatcagattgtggttttcactaggatccggtttagtttctgggttattag

SEQ ID NO: 209569 - DNA, 54 bp, Artificial
  Synthetic oligonucleotide
acctgggtttggggaggtgaatgggttgtataatgccgcattactccataccta

SEQ ID NO: 209570 - DNA, 54 bp, Artificial
  Synthetic oligonucleotide
cttgtggttcctcagaaacttcttgaagtaagtacttgggctcccgctcaataa

SEQ ID NO: 209571 - DNA, 54 bp, Artificial
  Synthetic oligonucleotide
agaattatcgattcagtataccaagcggtaaaaaatgttgactatactaagagt

SEQ ID NO: 209572 - DNA, 58 bp, Artificial
  Synthetic oligonucleotide
cgctagctactaccgaaactacataaattgcaattaaggctggcacttcagttccagt

SEQ ID NO: 209573 - DNA, 53 bp, Artificial
  Synthetic oligonucleotide
aaaagtaccgcttaaaggaaggtagtcagctccatgtcaaaattcacaacggt

SEQ ID NO: 209574 - DNA, 54 bp, Artificial
  Synthetic oligonucleotide
ttgcaattagcctgtcaactactcctgattttgttgctccaccaacatcaaacc

SEQ ID NO: 209575 - DNA, 54 bp, Artificial
  Synthetic oligonucleotide
ttagttgtgtcgctaacacggttgcagttttggctgctgtccccatattctcag

SEQ ID NO: 209576 - DNA, 54 bp, Artificial
  Synthetic oligonucleotide
caactattagtaggtaatgagtgatataacaactattgaaaaggatatactata

SEQ ID NO: 209577 - DNA, 54 bp, Artificial
  Synthetic oligonucleotide
gatagcaagcacaaccttgttgtgaatgtcaccgatttttgatcataatgttgg

SEQ ID NO: 209578 - DNA, 54 bp, Artificial
  Synthetic oligonucleotide
tgtaataacccattgattgtggcacgaataacattcattggcgcattagcacca

SEQ ID NO: 209579 - DNA, 54 bp, Artificial
  Synthetic oligonucleotide
tgctttctatgctccattgtgatatacacaagctggtggagatttatatacagc

SEQ ID NO: 209580 - DNA, 54 bp, Artificial
  Synthetic oligonucleotide
atcctaatttatttcccgccttatatgcatcatagcttcatgtataacagcccg

SEQ ID NO: 209581 - DNA, 54 bp, Artificial
  Synthetic oligonucleotide
cacttgtaattgggctagtctataaattcgttgtaggccaaagatattatgatc

SEQ ID NO: 209582 - DNA, 54 bp, Artificial
  Synthetic oligonucleotide
cagaattagcttgccagctaagctccgtagtttctttgatagcagcatagttat

SEQ ID NO: 209583 - DNA, 60 bp, Artificial
  Synthetic oligonucleotide
cgctactcgcgctggagcacattgtgctagaagactagttgatgtgattgatactaaact

SEQ ID NO: 209584 - DNA, 54 bp, Artificial
  Synthetic oligonucleotide
tcctaatggcagtctgtacggggatcgaacccgtgcgtgcatggatgaaaacca

SEQ ID NO: 209585 - DNA, 54 bp, Artificial
  Synthetic oligonucleotide
gaagcataaggttgcgatacactaaagagagttgttagttagttatcggttttt

SEQ ID NO: 209586 - DNA, 54 bp, Artificial
  Synthetic oligonucleotide
atcacctgctaatggcacataattgagcccactgacaactacaggagttcccgg

SEQ ID NO: 209587 - DNA, 54 bp, Artificial
  Synthetic oligonucleotide
tataaataacggatccgctcaagcaacaatcatattaaatggtcaggtcgccag

SEQ ID NO: 209588 - DNA, 54 bp, Artificial
  Synthetic oligonucleotide
catcttgctaataatgttggcaacttaataagcagaactcacaatatgattact

SEQ ID NO: 209589 - DNA, 54 bp, Artificial
  Synthetic oligonucleotide
tagtcggatgaattgaatgtataccagaatccgaaggatgtgagtccaaaagtg

SEQ ID NO: 209590 - DNA, 54 bp, Artificial
  Synthetic oligonucleotide
ccaagctgatattagtagtaaagtaagcctcgccgatgaaggttatggttcctg

SEQ ID NO: 209591 - DNA, 54 bp, Artificial
  Synthetic oligonucleotide
tactagcgcactagtaactcatgtcgagtctagtgttagctcagcaactagtgc

SEQ ID NO: 209592 - DNA, 54 bp, Artificial
  Synthetic oligonucleotide
ccatcatttgaacttcataagctagcataccatgttcacgataaatgatttctc

SEQ ID NO: 209593 - DNA, 54 bp, Artificial
  Synthetic oligonucleotide
taactaattatccgtggttgatcgctacaactttaagcttggtgtatggttgtc

SEQ ID NO: 209594 - DNA, 59 bp, Artificial
  Synthetic oligonucleotide
ctctttcagtaaatctaggatcactagctttagcacttagtggtgaaacttcaatagga

SEQ ID NO: 209595 - DNA, 56 bp, Artificial
  Synthetic oligonucleotide
cgcagtagagatggtaagttaggcgaatttcaaaccggcgcttttaagttggcaca

SEQ ID NO: 209596 - DNA, 54 bp, Artificial
  Synthetic oligonucleotide
agtcctattacttggaatgtttgtcagattccggtaaatagtcaatacacttgc

SEQ ID NO: 209597 - DNA, 54 bp, Artificial
  Synthetic oligonucleotide
aggtatcgttcgtggtgccaaagctgtctcactcgaaggtgaagctaaatttgt

SEQ ID NO: 209598 - DNA, 54 bp, Artificial
  Synthetic oligonucleotide
gcgggcaataattccccggctaaccatttgggtctcaccactaactaattgcgg

SEQ ID NO: 209599 - DNA, 54 bp, Artificial
  Synthetic oligonucleotide
cgctagcacatgggcatttagtattcaagcacgtgttacacgctctagcacgct

SEQ ID NO: 209600 - DNA, 54 bp, Artificial
  Synthetic oligonucleotide
agtaaacgtaagccaatacataatctctagcatagcgtcatcatcttaaaccgt

SEQ ID NO: 209601 - DNA, 54 bp, Artificial
  Synthetic oligonucleotide
gctaggttaaggatctagtggagcgatccgtgcaagttcaaatcatgtcttggc

SEQ ID NO: 209602 - DNA, 53 bp, Artificial
  Synthetic oligonucleotide
cccgttgaacgggtgagtgggtggcttgtggggcagttaccaagcacgagtga

SEQ ID NO: 209603 - DNA, 53 bp, Artificial
  Synthetic oligonucleotide
ggctatgacggcgtagttattctacctggctttggactaagaggatttgaggc

SEQ ID NO: 209604 - DNA, 53 bp, Artificial
  Synthetic oligonucleotide
catgctttctaacctttacatctttactacctaatgggaatcttctattagca

SEQ ID NO: 209605 - DNA, 53 bp, Artificial
  Synthetic oligonucleotide
aatgataattcgttgctatgaataaattcgggagttgcaacgcttaaagacta

SEQ ID NO: 209606 - DNA, 58 bp, Artificial
  Synthetic oligonucleotide
cgcagcacaatcgcacaaattcggggcgggattaattcggactacattgtcggatctt

SEQ ID NO: 209607 - DNA, 53 bp, Artificial
  Synthetic oligonucleotide
aatcgttgtgatagaaattaagttttagatgatcggcatttagactattttgg

SEQ ID NO: 209608 - DNA, 53 bp, Artificial
  Synthetic oligonucleotide
ccctttaacttataagagcaggcagataatcgttgcttctctgtaaatcctcc

SEQ ID NO: 209609 - DNA, 53 bp, Artificial
  Synthetic oligonucleotide
aggtagcggttaactatgctagtgctacgattagcaagctcggtgtggtcaac

SEQ ID NO: 209610 - DNA, 53 bp, Artificial
  Synthetic oligonucleotide
catatgaacctagagagatacacgtaagtaatcgaacagtagcaagcttagcg

SEQ ID NO: 209611 - DNA, 53 bp, Artificial
  Synthetic oligonucleotide
atcagattgcttgttacgaacaccacaaccaaagtaggcactaggtgaacgaa

SEQ ID NO: 209612 - DNA, 53 bp, Artificial
  Synthetic oligonucleotide
agatgcagtcttgcttaattgtttaccgttttgttctccatttgaaccaccag

SEQ ID NO: 209613 - DNA, 53 bp, Artificial
  Synthetic oligonucleotide
aagttgagaacctaaataacctgcaccagagagtcctacagccccagcaaaac

SEQ ID NO: 209614 - DNA, 53 bp, Artificial
  Synthetic oligonucleotide
gtgaagacaaatcaaaatctccacgatttgccactcccaaaagttctcctcaa

SEQ ID NO: 209615 - DNA, 53 bp, Artificial
  Synthetic oligonucleotide
ccgggtaccgagtttgtggtattgggtcgtggatgagcgaaccacgtccggga

SEQ ID NO: 209616 - DNA, 53 bp, Artificial
  Synthetic oligonucleotide
tccatgattaaactaactgtgtcgcaccacaaactcgccgcttccgggcacgc

SEQ ID NO: 209617 - DNA, 59 bp, Artificial
  Synthetic oligonucleotide
cgacttttgccacaactagattgttggagacgaatctaacaactagaagtgctcgaata

SEQ ID NO: 209618 - DNA, 53 bp, Artificial
  Synthetic oligonucleotide
gtttctagcgatatgcgctgccatatttaaagctagcgcggttttaccgattc

SEQ ID NO: 209619 - DNA, 53 bp, Artificial
  Synthetic oligonucleotide
gcgtatgttaacaccactagtaagtattaaattagttagtgatcatattactc

SEQ ID NO: 209620 - DNA, 53 bp, Artificial
  Synthetic oligonucleotide
cccaaaaccgagtggattgctaacttcattggtcaagctaatatctttaaggg

SEQ ID NO: 209621 - DNA, 53 bp, Artificial
  Synthetic oligonucleotide
actttgtacaataccaactaatcgttcagttctataagcacgttctgtcatag

SEQ ID NO: 209622 - DNA, 53 bp, Artificial
  Synthetic oligonucleotide
taaattgatctttagtgatccatctttgtcgtcaatttctggtgattcaacca

SEQ ID NO: 209623 - DNA, 53 bp, Artificial
  Synthetic oligonucleotide
cgtggatgagcgaaccacgtccgggagggcgacttgatgagcccacaccgagc

SEQ ID NO: 209624 - DNA, 52 bp, Artificial
  Synthetic oligonucleotide
gttcactagttaccaaaccttatctaaccattaccgactcggagggtagacc

SEQ ID NO: 209625 - DNA, 53 bp, Artificial
  Synthetic oligonucleotide
gccattaggaattacgccagcgggatcttttaatttagtaccgtggcttaatg

SEQ ID NO: 209626 - DNA, 53 bp, Artificial
  Synthetic oligonucleotide
cgtggttagcgaatgaagtaactgatcattttggcaatgagtagtatgggtca

SEQ ID NO: 209627 - DNA, 53 bp, Artificial
  Synthetic oligonucleotide
tacgcagctagtggttctgaagtagtaggtttatgcgaatacatagtattacc

SEQ ID NO: 209628 - DNA, 54 bp, Artificial
  Synthetic oligonucleotide
cgaattacactaaccccagatagtactaatttttttaggacctcataatcctgc

SEQ ID NO: 209629 - DNA, 53 bp, Artificial
  Synthetic oligonucleotide
gttagaaaatattcgaactttgtctcaccatggttatgatctactctatcgct

SEQ ID NO: 209630 - DNA, 53 bp, Artificial
  Synthetic oligonucleotide
cgtttacgtcttgatccagcttgggtattcaaatcagggatctcaactccccc

SEQ ID NO: 209631 - DNA, 53 bp, Artificial
  Synthetic oligonucleotide
tactatcagcttgtctgctagaggatcatagagtttcccgaaattggaagtgc

SEQ ID NO: 209632 - DNA, 53 bp, Artificial
  Synthetic oligonucleotide
gcataacaagtagtacggaagcttttatggtactgtgaccattacactgactt

SEQ ID NO: 209633 - DNA, 53 bp, Artificial
  Synthetic oligonucleotide
tagggaatttcttacatagaaagctccacgtgaaacaatgcgaggcttaccaa

SEQ ID NO: 209634 - DNA, 53 bp, Artificial
  Synthetic oligonucleotide
ctgggggggggcagtcaactcccctaccgatctctctagaacttaaagatcgc

SEQ ID NO: 209635 - DNA, 53 bp, Artificial
  Synthetic oligonucleotide
caatagcggagtggggaaatttattagtagcaccaagcgcgtcgtaatgttgc

SEQ ID NO: 209636 - DNA, 53 bp, Artificial
  Synthetic oligonucleotide
aaagtaaacaagttatgatgcctctattatgagacgttatttgattcgaccat

SEQ ID NO: 209637 - DNA, 53 bp, Artificial
  Synthetic oligonucleotide
gatctctacccatcttagcacttcctcccgctgaattaccctcaacaatgtaa

SEQ ID NO: 209638 - DNA, 53 bp, Artificial
  Synthetic oligonucleotide
cacccattccactacattgagtacaggttattatatcgctttgagactttgct

SEQ ID NO: 209639 - DNA, 54 bp, Artificial
  Synthetic oligonucleotide
ccgtgttttaaagttactcgggcaactgatgatttcctacgtccagttccataa

SEQ ID NO: 209640 - DNA, 53 bp, Artificial
  Synthetic oligonucleotide
tgctcactaacttgtgatcagtttgcagtgttttggaatcatgcaactaaatc

SEQ ID NO: 209641 - DNA, 53 bp, Artificial
  Synthetic oligonucleotide
ggttagcgatagggggctactacgatagccccctaagagtgacttgtgacatg

SEQ ID NO: 209642 - DNA, 53 bp, Artificial
  Synthetic oligonucleotide
tgcgtttagaggggatcgaacccacacatccttctaagatactagctcctaag

SEQ ID NO: 209643 - DNA, 53 bp, Artificial
  Synthetic oligonucleotide
accgttctttccatgtcatccctgagagtgctacaattactgaggtgcaacaa

SEQ ID NO: 209644 - DNA, 53 bp, Artificial
  Synthetic oligonucleotide
aagcagtgtctaatgctaaacgcatgttacgcaattgagcttcgtttaatgca

SEQ ID NO: 209645 - DNA, 53 bp, Artificial
  Synthetic oligonucleotide
ggagttaattgggggctcacaacgcgaagttcgctatgaaaaattattaacgc

SEQ ID NO: 209646 - DNA, 53 bp, Artificial
  Synthetic oligonucleotide
gtattgggtcgtggatgagcgaaccacgtccgggagggcgacttgatgagcca

SEQ ID NO: 209647 - DNA, 53 bp, Artificial
  Synthetic oligonucleotide
ttgtatagaggtatgggtagttggcaacgaataaaggatgttactaacacgga

SEQ ID NO: 209648 - DNA, 53 bp, Artificial
  Synthetic oligonucleotide
gagccagatatgcaaagcgtttgcgtgaaagatgaatgaatcgctctgcatgg

SEQ ID NO: 209649 - DNA, 53 bp, Artificial
  Synthetic oligonucleotide
tttgggacttcgggggtacgctgtatctatcaagaaggagctcgttatttaaa

SEQ ID NO: 209650 - DNA, 59 bp, Artificial
  Synthetic oligonucleotide
ccggtcttgatcaataagagtggaacgggagatgagtttaaccatacgagtgagcagaa

SEQ ID NO: 209651 - DNA, 53 bp, Artificial
  Synthetic oligonucleotide
agtataacttcgcttgtttcgtgcaacaacacaagtgatattaaacatgtcga

SEQ ID NO: 209652 - DNA, 53 bp, Artificial
  Synthetic oligonucleotide
gcgggcacaacaggtaatttaaaagtgtgctttcctaaagttgcagtagtttc

SEQ ID NO: 209653 - DNA, 53 bp, Artificial
  Synthetic oligonucleotide
gtcgtctgtaggaaactctatccgaggagattggattctcaactgtatgagta

SEQ ID NO: 209654 - DNA, 52 bp, Artificial
  Synthetic oligonucleotide
cgtaggtcttgtatagtacatatcagtgtgtgatatagacactaattcgtac

SEQ ID NO: 209655 - DNA, 51 bp, Artificial
  Synthetic oligonucleotide
atgccttaggccaaattcattaattcccccgttagtttcaacaaacttacg

SEQ ID NO: 209656 - DNA, 52 bp, Artificial
  Synthetic oligonucleotide
gttttgaaactgccatcataagttttccaccagtcattgcactagcggtagg

SEQ ID NO: 209657 - DNA, 52 bp, Artificial
  Synthetic oligonucleotide
aggtatagttaattgtcaatgttccagcctggttatcaggatgtaaatccac

SEQ ID NO: 209658 - DNA, 52 bp, Artificial
  Synthetic oligonucleotide
cggttcatttcctctgtcccttgttgcgtcgttaaatgctcttgtaaagtct

SEQ ID NO: 209659 - DNA, 52 bp, Artificial
  Synthetic oligonucleotide
ttccgcaccctcatcttttagtggcgccttacagcgcctttcacaacggaac

SEQ ID NO: 209660 - DNA, 51 bp, Artificial
  Synthetic oligonucleotide
taatcccacttctcccccacgctttcccgtttctccaccgggttcaacctc

SEQ ID NO: 209661 - DNA, 49 bp, Artificial
  Synthetic oligonucleotide
ccgaggggggaatatttacctgggtacgaaatttattaggtccacgaaa

SEQ ID NO: 209662 - DNA, 52 bp, Artificial
  Synthetic oligonucleotide
ttcatgatccttgttaacatggggtgaaaggctatattttcgcgtatctcag

SEQ ID NO: 209663 - DNA, 52 bp, Artificial
  Synthetic oligonucleotide
gaggagatgttaaaaacgtagcatcaactctatctagtgctactccaaattg

SEQ ID NO: 209664 - DNA, 52 bp, Artificial
  Synthetic oligonucleotide
gataagatccccacctgtgaaacctagttgattaagaatcgtaaaacttgca

SEQ ID NO: 209665 - DNA, 52 bp, Artificial
  Synthetic oligonucleotide
aacttccaacaagggtcgatagttaatctcttccccaacattttcgaagtgt

SEQ ID NO: 209666 - DNA, 52 bp, Artificial
  Synthetic oligonucleotide
gaccttactatgatgaacctatttacgctgggtttagaagaaggggttaccg

SEQ ID NO: 209667 - DNA, 52 bp, Artificial
  Synthetic oligonucleotide
ctacattgaatttgattgaactaggtaatttgtccatgcctccaagctgcct

SEQ ID NO: 209668 - DNA, 52 bp, Artificial
  Synthetic oligonucleotide
ccaaagacttcatcgcctaaacttaccatagcggatcttttgaaagcgggcg

SEQ ID NO: 209669 - DNA, 52 bp, Artificial
  Synthetic oligonucleotide
tgctgatcggattttagttccctcacttaaggtagaatcctacgcagatgca

SEQ ID NO: 209670 - DNA, 52 bp, Artificial
  Synthetic oligonucleotide
agctatcgctcccactcagagcattagttacctgcaaggagccaccgcttct

SEQ ID NO: 209671 - DNA, 52 bp, Artificial
  Synthetic oligonucleotide
gattcgcttgggtgtgcctggagaaagggtgctaggcgttagaagtaatggg

SEQ ID NO: 209672 - DNA, 53 bp, Artificial
  Synthetic oligonucleotide
ccctttccccccgtttgataggaattccgctcatacttcgctcggcttgcttt

SEQ ID NO: 209673 - DNA, 52 bp, Artificial
  Synthetic oligonucleotide
tattatgttaacggactaccagtgggacccgacttaagatcaagaattaacc

SEQ ID NO: 209674 - DNA, 52 bp, Artificial
  Synthetic oligonucleotide
ggatcctaggacatggctatatccactgctaagctgctaaaggtaggaggac

SEQ ID NO: 209675 - DNA, 52 bp, Artificial
  Synthetic oligonucleotide
aaggatagtgtatcccgaggattggttgtctcgggctaagcacaaagacggt

SEQ ID NO: 209676 - DNA, 52 bp, Artificial
  Synthetic oligonucleotide
tccacaggatcgtggattactttaacacgtggaggtggtgttgcaccgggcg

SEQ ID NO: 209677 - DNA, 52 bp, Artificial
  Synthetic oligonucleotide
tcggctgttcaaccccgtaaatttgaccttcggcatcataggttgttgatca

SEQ ID NO: 209678 - DNA, 52 bp, Artificial
  Synthetic oligonucleotide
gaagaatctggacctcaagcattcgaaagtggcgctgatattttagtctcag

SEQ ID NO: 209679 - DNA, 52 bp, Artificial
  Synthetic oligonucleotide
gctagagcacacttgcaatactttactggaagtgacacgatcttaggtgggg

SEQ ID NO: 209680 - DNA, 52 bp, Artificial
  Synthetic oligonucleotide
gcctcactttcgccatcgaagtcgtttatttcgtgttattatgaaactaaga

SEQ ID NO: 209681 - DNA, 52 bp, Artificial
  Synthetic oligonucleotide
accactagagcttttgttggtcatctagttgctatgaaaaacggcactagca

SEQ ID NO: 209682 - DNA, 52 bp, Artificial
  Synthetic oligonucleotide
cttgttaccaagataccatagaaggacggcaaaagtaattacaacgccctat

SEQ ID NO: 209683 - DNA, 57 bp, Artificial
  Synthetic oligonucleotide
tctatgccgcacaaacttaatccagtagagttggaaaacattactggattaactaag

SEQ ID NO: 209684 - DNA, 52 bp, Artificial
  Synthetic oligonucleotide
ataacctaatagtccagctaacataccaccaaatgcgctatattgaaatgac

SEQ ID NO: 209685 - DNA, 52 bp, Artificial
  Synthetic oligonucleotide
cggggatgggccagcagggacaatcaggtacctccgcggggaatccagactc

SEQ ID NO: 209686 - DNA, 52 bp, Artificial
  Synthetic oligonucleotide
ggttaagatcaaattttggatcaagtctagcgcggaattcgcctaattttcg

SEQ ID NO: 209687 - DNA, 52 bp, Artificial
  Synthetic oligonucleotide
accacgtggtttagttgtgcctgttattaaaggtgctgacaaattaagcatc

SEQ ID NO: 209688 - DNA, 52 bp, Artificial
  Synthetic oligonucleotide
gtgttatcactgtctcaagaactggcattgaactaaaccaagaccaagctac

SEQ ID NO: 209689 - DNA, 52 bp, Artificial
  Synthetic oligonucleotide
ccctactgaatactccagagtttcagagattatcttctatagcccaattggg

SEQ ID NO: 209690 - DNA, 52 bp, Artificial
  Synthetic oligonucleotide
cttgctaccatagttggatttggtctaactgattgagcactaggtctacctg

SEQ ID NO: 209691 - DNA, 52 bp, Artificial
  Synthetic oligonucleotide
ccgatgtcatacactagcttaggattaaatgattgaactaaattagcaattg

SEQ ID NO: 209692 - DNA, 52 bp, Artificial
  Synthetic oligonucleotide
acagactgaagtggtgagatgaatttaacatttgttgtcaacggtgacctat

SEQ ID NO: 209693 - DNA, 52 bp, Artificial
  Synthetic oligonucleotide
aggaggttgagataacgtagctaactataagaactgtgcttctagactacgt

SEQ ID NO: 209694 - DNA, 60 bp, Artificial
  Synthetic oligonucleotide
tctacaagtggaggtcaatctggaacaaccactggaactggctcaacaacaggcggtcaa

SEQ ID NO: 209695 - DNA, 52 bp, Artificial
  Synthetic oligonucleotide
agctttcggatatggtagctgttatgcgtgggggcagaatagaacaatatga

SEQ ID NO: 209696 - DNA, 52 bp, Artificial
  Synthetic oligonucleotide
cgataatttaccttatgctggttcttatggagaagttttatacactggaata

SEQ ID NO: 209697 - DNA, 52 bp, Artificial
  Synthetic oligonucleotide
ccccacccattggcatcctcactactagtggagcggtatatacaccacgaga

SEQ ID NO: 209698 - DNA, 52 bp, Artificial
  Synthetic oligonucleotide
cctcaggcaaggtagcgtctaaaacaatcgctggtcctgtatagtttaggta

SEQ ID NO: 209699 - DNA, 52 bp, Artificial
  Synthetic oligonucleotide
cgatatattcactagttgcgacattagggggtgtcatttgcaaactgcgggc

SEQ ID NO: 209700 - DNA, 52 bp, Artificial
  Synthetic oligonucleotide
gttcagaaactcttagtttacgaacgaatttgtgacgacctgctgaagatag

SEQ ID NO: 209701 - DNA, 52 bp, Artificial
  Synthetic oligonucleotide
cgattaacacgtgagtcagctgctactattctataaaatggcgcttgctttt

SEQ ID NO: 209702 - DNA, 51 bp, Artificial
  Synthetic oligonucleotide
tcagtcttcatgcctactttatcacatattgccttagtaactctagcatta

SEQ ID NO: 209703 - DNA, 51 bp, Artificial
  Synthetic oligonucleotide
tcactccagcactagtagttctcgcctgacttatactctgcctctctatgt

SEQ ID NO: 209704 - DNA, 51 bp, Artificial
  Synthetic oligonucleotide
gcagccggaactgtctcgggagtactttatgctcatcaaagtgctactaag

SEQ ID NO: 209705 - DNA, 60 bp, Artificial
  Synthetic oligonucleotide
ctgactatgaaggtagagtgctccaactagatgatgacgggacactaactggtcttaaat

SEQ ID NO: 209706 - DNA, 53 bp, Artificial
  Synthetic oligonucleotide
tcggacgtaactgctaccttcctttgttaggagggctacgggtcatctttcgt

SEQ ID NO: 209707 - DNA, 51 bp, Artificial
  Synthetic oligonucleotide
ccgaggtggtaaataaattagttggcggtgtcaaggcaattgtaagatcgg

SEQ ID NO: 209708 - DNA, 51 bp, Artificial
  Synthetic oligonucleotide
atataggtgctcctggagaagttgaaattacaagtgttcttaaaccagcag

SEQ ID NO: 209709 - DNA, 51 bp, Artificial
  Synthetic oligonucleotide
gccttcaaaacaaccagtagttgtacttttcaatcctaacattgagagccc

SEQ ID NO: 209710 - DNA, 51 bp, Artificial
  Synthetic oligonucleotide
gtatatgtttgtaactatgtgttatcaaactatgggaatggtgcaataatg

SEQ ID NO: 209711 - DNA, 51 bp, Artificial
  Synthetic oligonucleotide
cacgtccattgtgggtcgaaccaccagctttcgtatgtgccatttagatta

SEQ ID NO: 209712 - DNA, 51 bp, Artificial
  Synthetic oligonucleotide
ggtcataatgctcaactacacttactaggtagagttaatcctgcttatggt

SEQ ID NO: 209713 - DNA, 51 bp, Artificial
  Synthetic oligonucleotide
tgattctctagcatgagtatcaccgtgatgcttgtatctttgaactgcttg

SEQ ID NO: 209714 - DNA, 51 bp, Artificial
  Synthetic oligonucleotide
tgcaaagggtaatactatatgtgtgcttgattgagagacagacaagtcgac

SEQ ID NO: 209715 - DNA, 51 bp, Artificial
  Synthetic oligonucleotide
gatttccctggatactgccttcaagtgcgattagagttccaactgtgatta

SEQ ID NO: 209716 - DNA, 51 bp, Artificial
  Synthetic oligonucleotide
actgagacgagttatatttctagcgttataagtgatcatgctccaatttat

SEQ ID NO: 209717 - DNA, 60 bp, Artificial
  Synthetic oligonucleotide
tcgcttgttacccttgctgcaatgatgccctcgtgtctatttagggcataacttattcct

SEQ ID NO: 209718 - DNA, 51 bp, Artificial
  Synthetic oligonucleotide
caatagggcgtcaaggttcaggggtaaaaggataaagctatgttgtgactt

SEQ ID NO: 209719 - DNA, 51 bp, Artificial
  Synthetic oligonucleotide
gatcctaatccagttccggattgacctccgcttgtagatgaaccagatcct

SEQ ID NO: 209720 - DNA, 51 bp, Artificial
  Synthetic oligonucleotide
gtcagttagaactccagtgatttgatctctagttgtttgaggagtatcggt

SEQ ID NO: 209721 - DNA, 51 bp, Artificial
  Synthetic oligonucleotide
atctttatatcttgaagcgtcaatattgccacgcatttcatttgctgcgtc

SEQ ID NO: 209722 - DNA, 51 bp, Artificial
  Synthetic oligonucleotide
cctacgataagctgatctaacatcatcactagaatcgtgtatacttaaccc

SEQ ID NO: 209723 - DNA, 51 bp, Artificial
  Synthetic oligonucleotide
tgccattacatccgcactcggtttgggagccgcaagtgctgggggatttgg

SEQ ID NO: 209724 - DNA, 51 bp, Artificial
  Synthetic oligonucleotide
caagctgccattcgttatggtacgaaagataataaagtaccacagttgacc

SEQ ID NO: 209725 - DNA, 51 bp, Artificial
  Synthetic oligonucleotide
agagctaaagcttatagatcacaccgtgcaacaggtaaaactactaagcaa

SEQ ID NO: 209726 - DNA, 51 bp, Artificial
  Synthetic oligonucleotide
ggaatcatggtgtttgacccccttcgaatcctaatctatgtcctttacgtt

SEQ ID NO: 209727 - DNA, 51 bp, Artificial
  Synthetic oligonucleotide
gactttctgcttacagctccctaaatcttattggacctctcttaggctctc

SEQ ID NO: 209728 - DNA, 52 bp, Artificial
  Synthetic oligonucleotide
tcccctggtgcaacaactaaaggtttaggtaagtttaaatggttagactcta

SEQ ID NO: 209729 - DNA, 51 bp, Artificial
  Synthetic oligonucleotide
ggccttctcctgaaagtcatagttactactctgtggaccagttagcgcccc

SEQ ID NO: 209730 - DNA, 51 bp, Artificial
  Synthetic oligonucleotide
gtctcactcaagttcctatgaattcagaacaaggcaactaggcattaccct

SEQ ID NO: 209731 - DNA, 51 bp, Artificial
  Synthetic oligonucleotide
gcagatcatggtaattcatgcgtggctagaatatcaaaatggttgtctctt

SEQ ID NO: 209732 - DNA, 51 bp, Artificial
  Synthetic oligonucleotide
cccgaacaggtgagtcaatataagaatcaactgcgtccatcaattcaagta

SEQ ID NO: 209733 - DNA, 51 bp, Artificial
  Synthetic oligonucleotide
ccaccatgaactaatcctgagttatgactacttgtttctaaggcaagtctt

SEQ ID NO: 209734 - DNA, 51 bp, Artificial
  Synthetic oligonucleotide
agtttgtggtattgggtcgtggatgagcgaaccacgtccgggagggcgact

SEQ ID NO: 209735 - DNA, 51 bp, Artificial
  Synthetic oligonucleotide
cccctttgctttagggttatgcgacaatgaaaaggataaatcgttgtatct

SEQ ID NO: 209736 - DNA, 51 bp, Artificial
  Synthetic oligonucleotide
gaaattgcatctttgtagtattgagtttggctatttgtagtgacacttgct

SEQ ID NO: 209737 - DNA, 51 bp, Artificial
  Synthetic oligonucleotide
gcctctaacaggtagacctttacggtgtctaattccacggtagcacttaac

SEQ ID NO: 209738 - DNA, 51 bp, Artificial
  Synthetic oligonucleotide
tacagtagttttcgggcataacttgtaagtttctgcacttgttacgattat

SEQ ID NO: 209739 - DNA, 59 bp, Artificial
  Synthetic oligonucleotide
tccaccttgaattgaaagtcccccgtctcaggccgcatatcaggcactaccggcaaatg

SEQ ID NO: 209740 - DNA, 51 bp, Artificial
  Synthetic oligonucleotide
gagctaagatcagatccaaatactgaacttcgtcaggcgataattaagcgg

SEQ ID NO: 209741 - DNA, 51 bp, Artificial
  Synthetic oligonucleotide
ctgaactatcttcaacaaagctatgtgaataacctgcagttgaaccagtga

SEQ ID NO: 209742 - DNA, 51 bp, Artificial
  Synthetic oligonucleotide
ggactatcaactggactaattcgcgacttgtcaactgtttctcaggtcgga

SEQ ID NO: 209743 - DNA, 51 bp, Artificial
  Synthetic oligonucleotide
gttatagtgatgactcttgctgagcaagaggacaagcgtgaggtatatatg

SEQ ID NO: 209744 - DNA, 51 bp, Artificial
  Synthetic oligonucleotide
gaaagtgattaccgtttggctaatccaaatttagttcccgcagaagtttct

SEQ ID NO: 209745 - DNA, 51 bp, Artificial
  Synthetic oligonucleotide
cgataatgtcgtaagtattaactcaacgatcgaaatcgatctaactggagc

SEQ ID NO: 209746 - DNA, 51 bp, Artificial
  Synthetic oligonucleotide
caaaaccgcttctttcatcatttcgacagtaaattgtggaatgttccctgc

SEQ ID NO: 209747 - DNA, 51 bp, Artificial
  Synthetic oligonucleotide
gttctcacactacttccacttgaccctccaaatggcgcataaaatcttggc

SEQ ID NO: 209748 - DNA, 51 bp, Artificial
  Synthetic oligonucleotide
atttgttccaccagatgagttggtagttccacttccagatccattatttga

SEQ ID NO: 209749 - DNA, 51 bp, Artificial
  Synthetic oligonucleotide
cacaccaactgatcgtttagtacgatctcagaacgaatctcactaaactta

SEQ ID NO: 209750 - DNA, 58 bp, Artificial
  Synthetic oligonucleotide
tcaaagcggtaagaatattaaggccaaaagcgttgttaatgacgacacttgtgctaca

SEQ ID NO: 209751 - DNA, 51 bp, Artificial
  Synthetic oligonucleotide
cgatttaggtgaagcttaccgttgagtagattcgtcttttatagcttgcgc

SEQ ID NO: 209752 - DNA, 51 bp, Artificial
  Synthetic oligonucleotide
gagaggcagtttaacttgttgtactctgttgatactataactggagattcc

SEQ ID NO: 209753 - DNA, 51 bp, Artificial
  Synthetic oligonucleotide
ttctgctaggttcagctgccattaaccctgttcgtggtttagctcaacaag

SEQ ID NO: 209754 - DNA, 51 bp, Artificial
  Synthetic oligonucleotide
ataagcgcaaagagattacagttactagaagggtgtatcgtggtagcgggg

SEQ ID NO: 209755 - DNA, 51 bp, Artificial
  Synthetic oligonucleotide
ccctatgagatccaccaagacagtaacatctctacgatcgatacagttttc

SEQ ID NO: 209756 - DNA, 51 bp, Artificial
  Synthetic oligonucleotide
tagttagtttgccctcgtttaggaactggtgttaaatatggggcgtctgtt

SEQ ID NO: 209757 - DNA, 51 bp, Artificial
  Synthetic oligonucleotide
gtggtaaaagctagtgcagctggataaccaggtcaattagaactagctctt

SEQ ID NO: 209758 - DNA, 51 bp, Artificial
  Synthetic oligonucleotide
catcttttgacacggataataacacatagttatctgggtttgcgaattgct

SEQ ID NO: 209759 - DNA, 51 bp, Artificial
  Synthetic oligonucleotide
ttgctaaacttcaatttaacgctggtcaagccaaaccaggtcctgctttag

SEQ ID NO: 209760 - DNA, 51 bp, Artificial
  Synthetic oligonucleotide
gcagtcgatcggttgttagtggcaaggttacgataattaatcccagcatct

SEQ ID NO: 209761 - DNA, 59 bp, Artificial
  Synthetic oligonucleotide
tatcgcaatgacagggtgcgtccaaagttgtgttgttaagtcatctaactacaccggaa

SEQ ID NO: 209762 - DNA, 51 bp, Artificial
  Synthetic oligonucleotide
actattccagcgcctaggccagttcctagggtgatagatacgaagctatcg

SEQ ID NO: 209763 - DNA, 51 bp, Artificial
  Synthetic oligonucleotide
atacggaagcatcgatccagttcaatctaaactagtaggtagttgagccga

SEQ ID NO: 209764 - DNA, 51 bp, Artificial
  Synthetic oligonucleotide
ggtaaacttcgatatgaacgaagttcattagagtaaactaatgtatgatga

SEQ ID NO: 209765 - DNA, 51 bp, Artificial
  Synthetic oligonucleotide
tagcaataactagcccagaaatatgagcgatgtcagcaaataaataggctc

SEQ ID NO: 209766 - DNA, 51 bp, Artificial
  Synthetic oligonucleotide
tagataaactttctgtattaccagattgccctggttgaggtgtcgattctt

SEQ ID NO: 209767 - DNA, 51 bp, Artificial
  Synthetic oligonucleotide
cttactttatagtttcacaggatgaatctgaacacaaattcctggcctact

SEQ ID NO: 209768 - DNA, 51 bp, Artificial
  Synthetic oligonucleotide
caacaataagtcgtgaattaaaacgtaataccgcttttagcggcttatacc

SEQ ID NO: 209769 - DNA, 50 bp, Artificial
  Synthetic oligonucleotide
cgatgtaacttcgtgagtgatcaaattatcgctaacggtgagtaaacacg

SEQ ID NO: 209770 - DNA, 50 bp, Artificial
  Synthetic oligonucleotide
gatcagcagactataacggtgctgcttcaacatacgacggactttcatga

SEQ ID NO: 209771 - DNA, 50 bp, Artificial
  Synthetic oligonucleotide
caaggaatgtgaagttactattgtaaactcagtaccaagactaaacgctg

SEQ ID NO: 209772 - DNA, 59 bp, Artificial
  Synthetic oligonucleotide
tataaataatttgagcgtcttgcaaggtcagtaattggtcagattcgcttgattttaag

SEQ ID NO: 209773 - DNA, 50 bp, Artificial
  Synthetic oligonucleotide
caacttttagcaggagtaggattacttgcctctgtagaatctatataagg

SEQ ID NO: 209774 - DNA, 50 bp, Artificial
  Synthetic oligonucleotide
ggaatcagtgaggctagtgcagttgagatcccataagttgaagggtcttt

SEQ ID NO: 209775 - DNA, 50 bp, Artificial
  Synthetic oligonucleotide
aggtatctctaaaaacaggtgacacccaatctattcaacagcatctcagc

SEQ ID NO: 209776 - DNA, 50 bp, Artificial
  Synthetic oligonucleotide
ttgggcactcttgaaacgcttttatccaggattcattagtccgttaccac

SEQ ID NO: 209777 - DNA, 50 bp, Artificial
  Synthetic oligonucleotide
ggtgaattccatgaaggattaaacatggcttcagttcgtaaatgaccact

SEQ ID NO: 209778 - DNA, 49 bp, Artificial
  Synthetic oligonucleotide
aaacttagttaaacctaagcggagggccgaaccgtagtacgctgaaaag

SEQ ID NO: 209779 - DNA, 50 bp, Artificial
  Synthetic oligonucleotide
caaacaacgtaaacacaagagaagaacccacgatgcactaacaacaccta

SEQ ID NO: 209780 - DNA, 50 bp, Artificial
  Synthetic oligonucleotide
cgccattaattgagaaggaattaatcgagaaaacctcgcgtggtcggcgg

SEQ ID NO: 209781 - DNA, 50 bp, Artificial
  Synthetic oligonucleotide
aaaagctggtgaatctcccgtgaaaggtccttgatcaaattcagaaacgt

SEQ ID NO: 209782 - DNA, 50 bp, Artificial
  Synthetic oligonucleotide
gctctccttaggatccttagcgagctgctgaaaacctaaataaccagcac

SEQ ID NO: 209783 - DNA, 59 bp, Artificial
  Synthetic oligonucleotide
tagttgaagagttcatctaacagtaagaacaggtcctcgctatggacaaattagacgta

SEQ ID NO: 209784 - DNA, 50 bp, Artificial
  Synthetic oligonucleotide
ggtggggcgggtgctttgaaaggacttgtcgtattccattgggttaggat

SEQ ID NO: 209785 - DNA, 50 bp, Artificial
  Synthetic oligonucleotide
aatcctgagtaggtagagtgaactgttccgggtcctatgcctgtagcaat

SEQ ID NO: 209786 - DNA, 50 bp, Artificial
  Synthetic oligonucleotide
ctactcaagcaatcattcctgctattcttagctcccgcatcaaatctagt

SEQ ID NO: 209787 - DNA, 50 bp, Artificial
  Synthetic oligonucleotide
gtgcgaaacaagaagtaccaagcccacaatgagggtgaagtactcgctaa

SEQ ID NO: 209788 - DNA, 50 bp, Artificial
  Synthetic oligonucleotide
gtggtgtgtgattaatacgagatctttaaggcaagaagcggaggctagtg

SEQ ID NO: 209789 - DNA, 50 bp, Artificial
  Synthetic oligonucleotide
ctttaatcttttggtagtccattctggttggtcctactatagcaagttgg

SEQ ID NO: 209790 - DNA, 50 bp, Artificial
  Synthetic oligonucleotide
acatccccatactttgagacttagcggcagatctagccattaacaggaag

SEQ ID NO: 209791 - DNA, 50 bp, Artificial
  Synthetic oligonucleotide
cttcaccagatacataacccccgcccatactaatagtttgaaaacaggga

SEQ ID NO: 209792 - DNA, 50 bp, Artificial
  Synthetic oligonucleotide
agctgataaatcagaatttcgagaaacgtgatcgagagctaaaatggagt

SEQ ID NO: 209793 - DNA, 50 bp, Artificial
  Synthetic oligonucleotide
gttactcaatttcctcttgacgaattaagaagggggagtgaagagcaact

SEQ ID NO: 209794 - DNA, 58 bp, Artificial
  Synthetic oligonucleotide
tagtgttagcttgattccctacttttggtagatcagcgtttaacataattgctggccc

SEQ ID NO: 209795 - DNA, 50 bp, Artificial
  Synthetic oligonucleotide
gcgtgaaaaagctacgaggccacgtacagtagtaaataatggtcgcaaaa

SEQ ID NO: 209796 - DNA, 50 bp, Artificial
  Synthetic oligonucleotide
gaaatactttgacgttcacgcaagtgtttaacttgacgtgcttgattacg

SEQ ID NO: 209797 - DNA, 50 bp, Artificial
  Synthetic oligonucleotide
ccagcttgggatgtctaaattaggtcaagtgcaatatgtaccaagtcaag

SEQ ID NO: 209798 - DNA, 50 bp, Artificial
  Synthetic oligonucleotide
taattcagcctgataggccaaataacagaataattagtccaccataaatt

SEQ ID NO: 209799 - DNA, 50 bp, Artificial
  Synthetic oligonucleotide
ccagctttagatctagattcatctgattggtcttttggtgtaacagttgg

SEQ ID NO: 209800 - DNA, 50 bp, Artificial
  Synthetic oligonucleotide
ccccagttgtagtaccagattctgatcctgtttgaccgcctgttgttgag

SEQ ID NO: 209801 - DNA, 50 bp, Artificial
  Synthetic oligonucleotide
ccattgtagttacaaccgagacaatcgagtttaaagtatcgagaatattt

SEQ ID NO: 209802 - DNA, 50 bp, Artificial
  Synthetic oligonucleotide
ccccaaggtttagactttagtcgtgtccctcaaattcgttcattacgggg

SEQ ID NO: 209803 - DNA, 50 bp, Artificial
  Synthetic oligonucleotide
gccagacattgggctcaaggtactagttggttcgaaagaaagaaacatgg

SEQ ID NO: 209804 - DNA, 50 bp, Artificial
  Synthetic oligonucleotide
cccacagctatagaaccaatagctctaccaattgtaattccaaagtttgt

SEQ ID NO: 209805 - DNA, 57 bp, Artificial
  Synthetic oligonucleotide
tagtggttaacatgtgggcttcgtccataatatagactttataaggcgaattttgcg

SEQ ID NO: 209806 - DNA, 50 bp, Artificial
  Synthetic oligonucleotide
gttgtaaaagtgtaggaactccagttaatcctgaaggtatagtatcagct

SEQ ID NO: 209807 - DNA, 50 bp, Artificial
  Synthetic oligonucleotide
acgttatcgttcaattccaagacggtatcgcaggattcgtaggatacagc

SEQ ID NO: 209808 - DNA, 50 bp, Artificial
  Synthetic oligonucleotide
tgggaactcaggacactaatggtggctgaatggcacatgctcatgttaac

SEQ ID NO: 209809 - DNA, 50 bp, Artificial
  Synthetic oligonucleotide
ggagactgttccacctgtggaggcacttctgtagagctaggttgaacctt

SEQ ID NO: 209810 - DNA, 50 bp, Artificial
  Synthetic oligonucleotide
ggagagctgttaggtagggtattctctatgcggaggtttgaatcctctct

SEQ ID NO: 209811 - DNA, 50 bp, Artificial
  Synthetic oligonucleotide
agacactgagctcaaggtactagttggttcgaaagaaagaaacatggtat

SEQ ID NO: 209812 - DNA, 50 bp, Artificial
  Synthetic oligonucleotide
tgcaattctcggaattgcttcgatttatcgaacttttacccccggttcag

SEQ ID NO: 209813 - DNA, 50 bp, Artificial
  Synthetic oligonucleotide
ggtatttatcagcactaataagccgcgttctgttctacaaaagtagcgtc

SEQ ID NO: 209814 - DNA, 50 bp, Artificial
  Synthetic oligonucleotide
cttccgggattattttatacgggctgaattatcaaagtgtggtcgaactt

SEQ ID NO: 209815 - DNA, 50 bp, Artificial
  Synthetic oligonucleotide
ggatcgacaagtaatggtcgtgatagtaaaggtagaagactaggtcaaaa

SEQ ID NO: 209816 - DNA, 60 bp, Artificial
  Synthetic oligonucleotide
ctgggaaagctatgtatctaacagtagcagctgaccatagatgaatcgatggagctgacg

SEQ ID NO: 209817 - DNA, 59 bp, Artificial
  Synthetic oligonucleotide
tagtgcactaggcggtttacctgtgggtataagcggctctactcttcatttaatgtctg

SEQ ID NO: 209818 - DNA, 50 bp, Artificial
  Synthetic oligonucleotide
ggattacctagacgttgagtaatgttctttattccgttatgtcccgcatc

SEQ ID NO: 209819 - DNA, 50 bp, Artificial
  Synthetic oligonucleotide
cctagtgcactagcagtgcaatcagggatccaatctaccacccaaaccct

SEQ ID NO: 209820 - DNA, 50 bp, Artificial
  Synthetic oligonucleotide
aaggtaattgaggtagtcttaagtgctccatctgaaactttggtaggatc

SEQ ID NO: 209821 - DNA, 50 bp, Artificial
  Synthetic oligonucleotide
agctgaaggatccagtttcaaagtaacagctggacctatagttgcaacta

SEQ ID NO: 209822 - DNA, 50 bp, Artificial
  Synthetic oligonucleotide
agattggggactagtagaactaggggtagcagcagtttgcggagtagtac

SEQ ID NO: 209823 - DNA, 50 bp, Artificial
  Synthetic oligonucleotide
atactatttactcgtataaacttaatgcctataaatccaccgcttgaaac

SEQ ID NO: 209824 - DNA, 50 bp, Artificial
  Synthetic oligonucleotide
tccaccttcaatattacctttgtctagtctatcaaatcagtgtggtgtag

SEQ ID NO: 209825 - DNA, 50 bp, Artificial
  Synthetic oligonucleotide
gcagcgcataacctgaagttatgatgcatagtgaaagggcgaccaagtag

SEQ ID NO: 209826 - DNA, 50 bp, Artificial
  Synthetic oligonucleotide
aatcacgtgctagagcttatagccgttctcgttttagtttcaatgtgcct

SEQ ID NO: 209827 - DNA, 50 bp, Artificial
  Synthetic oligonucleotide
accaagagctaatgttgcacaaagtattgcgcaggcacaaagagcaggcg

SEQ ID NO: 209828 - DNA, 58 bp, Artificial
  Synthetic oligonucleotide
tagctaaaatcattgttagtctatccatacctaaaccgattccgcagtgtggtggaac

SEQ ID NO: 209829 - DNA, 50 bp, Artificial
  Synthetic oligonucleotide
ctacttgttgtgctcccattttgcgcacttccggaagacgagctgctaga

SEQ ID NO: 209830 - DNA, 50 bp, Artificial
  Synthetic oligonucleotide
gaactttggacccttttgcaacaggactattacttgtggcaaccgatgaa

SEQ ID NO: 209831 - DNA, 50 bp, Artificial
  Synthetic oligonucleotide
ggctaataaatcccacctgttagaacttagtgctactccgctataaaccc

SEQ ID NO: 209832 - DNA, 59 bp, Artificial
  Synthetic oligonucleotide
tactactagcgcatttcctagcgaatcaaagataactccgacatgtaaaaatgaaccta

SEQ ID NO: 209833 - DNA, 60 bp, Artificial
  Synthetic oligonucleotide
taagacaaaacattggagtttatagagacaatgttcatcgttatgaaagactgcttaata

SEQ ID NO: 209834 - DNA, 60 bp, Artificial
  Synthetic oligonucleotide
ttttgtcatgggaaagtcttagcatcatcacgaggttctttaagcataacaacgccacca

SEQ ID NO: 209835 - DNA, 54 bp, Artificial
  Synthetic oligonucleotide
ttttacgagccataacgttaatagcttctttgttagttctttcgctaacgccta

SEQ ID NO: 209836 - DNA, 60 bp, Artificial
  Synthetic oligonucleotide
tttgcactctctatgaaatatgctaactcaaaaagtggatcgcccatagttgcatactct

SEQ ID NO: 209837 - DNA, 59 bp, Artificial
  Synthetic oligonucleotide
tttgaggtccgaaggctctaccacctccaactcaaattggtgaacgtcttgagctatga

SEQ ID NO: 209838 - DNA, 58 bp, Artificial
  Synthetic oligonucleotide
tttccgaagaagttaagatccaaatcaactgttgcatcttgaatccctgaaacttgtc

SEQ ID NO: 209839 - DNA, 56 bp, Artificial
  Synthetic oligonucleotide
ttctggcatagccaccacttggttggaataagcctaaaactacgcctggttcaaat

SEQ ID NO: 209840 - DNA, 60 bp, Artificial
  Synthetic oligonucleotide
ctgtgaaaggatttgttgtccattcggatgttattcttatattgacatgcaataagtcac

SEQ ID NO: 209841 - DNA, 60 bp, Artificial
  Synthetic oligonucleotide
ttagaccatttgtagaaaccatcgcaatagatctgactgtatcatctcccatgtgttgtg

SEQ ID NO: 209842 - DNA, 59 bp, Artificial
  Synthetic oligonucleotide
ttaatcctaatagttcagcgattgtttcatggcgcggttctaaatcttatggttcacta

SEQ ID NO: 209843 - DNA, 57 bp, Artificial
  Synthetic oligonucleotide
tgtcacttaagaccaaaaacccgaggcacgttcctaagcgtatgtggatgaccacga

SEQ ID NO: 209844 - DNA, 58 bp, Artificial
  Synthetic oligonucleotide
tgtatctattaaactacctgtaaagaagtttgaatctcctgggtctgttatcatgacc

SEQ ID NO: 209845 - DNA, 56 bp, Artificial
  Synthetic oligonucleotide
tgtacactcaaccggacacggtttaggaattgacgttcatgaacttcctaatgtaa

SEQ ID NO: 209846 - DNA, 58 bp, Artificial
  Synthetic oligonucleotide
tgtaatagatatatcatggaccatattgtttaggaattgtgttattaaacttaatggt

SEQ ID NO: 209847 - DNA, 58 bp, Artificial
  Synthetic oligonucleotide
tggcattgtcatacctttgaaaacacggttacctgagatgtccccaagtgatcctgtt

SEQ ID NO: 209848 - DNA, 60 bp, Artificial
  Synthetic oligonucleotide
tgctgccactagttcctacaaagacggccacaatccaattgaagatatgatcgcaattcc

SEQ ID NO: 209849 - DNA, 56 bp, Artificial
  Synthetic oligonucleotide
tgctcaattggggaattagtatcatagccagtaaaacgcggggtttcaggaactaa

SEQ ID NO: 209850 - DNA, 60 bp, Artificial
  Synthetic oligonucleotide
tgcgtctcggatatcccaattgatccatttgctaaaggatcctgaattagtgcgccaatt

SEQ ID NO: 209851 - DNA, 57 bp, Artificial
  Synthetic oligonucleotide
gttggagaggtctacggctgggtactcgagtccgccgccccatgtttcgtggcatcc

SEQ ID NO: 209852 - DNA, 57 bp, Artificial
  Synthetic oligonucleotide
agacaggacaacgcatgccgaacctcaacaccacggtcgcattcaggaagggtctcc

SEQ ID NO: 209853 - DNA, 51 bp, Artificial
  Synthetic oligonucleotide
agcttactcgaaagtacgtacttcccacaagttagtacgggccctacggta

SEQ ID NO: 209854 - DNA, 55 bp, Artificial
  Synthetic oligonucleotide
agcattggagggacagcaagaccgccgcgtttgcacctaggacgtgggtggcgaa

SEQ ID NO: 209855 - DNA, 55 bp, Artificial
  Synthetic oligonucleotide
agcaagaacgcatagtgaatgccgcgagacgcttgcgcgactttcctcggacctg

SEQ ID NO: 209856 - DNA, 55 bp, Artificial
  Synthetic oligonucleotide
agcaaatgttctgagagggccgttttgtccggctccggccctcgttgggcacgtc

SEQ ID NO: 209857 - DNA, 55 bp, Artificial
  Synthetic oligonucleotide
acgcgggccccggctatacgacgcacattccacgtgtcttcggtctcacgtcaga

SEQ ID NO: 209858 - DNA, 55 bp, Artificial
  Synthetic oligonucleotide
acgcgggatggcccgtccgcggagggatcgtgataagcgtgggtactcatagatg

SEQ ID NO: 209859 - DNA, 55 bp, Artificial
  Synthetic oligonucleotide
accttgcgggacacgcaaaataagcgcgggcgcgctacgctagcacgacgaatcg

SEQ ID NO: 209860 - DNA, 54 bp, Artificial
  Synthetic oligonucleotide
acacttccgcacgagtgttcccgcctgggtcgcttcttagtttcgagcctcccc

SEQ ID NO: 209861 - DNA, 55 bp, Artificial
  Synthetic oligonucleotide
aaggaggtcaaggcgatgtccgtgcgcgtgggaaacgtgctcgtgacggatgtcc

SEQ ID NO: 209862 - DNA, 55 bp, Artificial
  Synthetic oligonucleotide
aagccacgtgatccttagggacgcagatctgcccctttcacgtacagtatacccc

SEQ ID NO: 209863 - DNA, 55 bp, Artificial
  Synthetic oligonucleotide
ctcgggcctcccgtgcgcagatagcagtgcttggcaccgaaggtccccaaaggac

SEQ ID NO: 209864 - DNA, 55 bp, Artificial
  Synthetic oligonucleotide
aacaggagtgcgcggaatggcaccatagctgcgaccccttggggcacgtcaagga

SEQ ID NO: 209865 - DNA, 55 bp, Artificial
  Synthetic oligonucleotide
aaaatggcatttctggactccgcgacgcaacattgacctgtccggtcgggtacaa

SEQ ID NO: 209866 - DNA, 55 bp, Artificial
  Synthetic oligonucleotide
ccctccagccagaggaaggtcgcgcgtgtctcgtccccgactcatcaaagaatcc

SEQ ID NO: 209867 - DNA, 55 bp, Artificial
  Synthetic oligonucleotide
ccctaggttccgtgccacgctcgctcaaggacccgcgaacctcgcatgatgtgaa

SEQ ID NO: 209868 - DNA, 55 bp, Artificial
  Synthetic oligonucleotide
ccacccgtgtcttcttcgatacctagcgtccggcatttcagcgagaagcgagctg

SEQ ID NO: 209869 - DNA, 55 bp, Artificial
  Synthetic oligonucleotide
cataatcgactcactacccctgttcggcgtgtccggaaaaccacactggggcgcc

SEQ ID NO: 209870 - DNA, 55 bp, Artificial
  Synthetic oligonucleotide
cccgctcgagggaaggcaaagacatccaggggtctaaaagtccagaagtccagac

SEQ ID NO: 209871 - DNA, 55 bp, Artificial
  Synthetic oligonucleotide
cccgacgatgcattgagatgtctgtcgttgggtatgggacgtgcagtgcggccgg

SEQ ID NO: 209872 - DNA, 53 bp, Artificial
  Synthetic oligonucleotide
cacgaaaagtgggttcctttacgctaacttagcgcgggtgtcaaggcgcaggg

SEQ ID NO: 209873 - DNA, 54 bp, Artificial
  Synthetic oligonucleotide
ggctaacgggcgggctgtgccctaccgaaagctcacggccaggtgacaagacag

SEQ ID NO: 209874 - DNA, 55 bp, Artificial
  Synthetic oligonucleotide
ctggagcccgtcctcagacaccagaaatgcttcgaccgtccaatcgcgaccgttc

SEQ ID NO: 209875 - DNA, 54 bp, Artificial
  Synthetic oligonucleotide
ggctctaagggcgccgctccagcggtgctcagggctgctctgtacctcgtagta

SEQ ID NO: 209876 - DNA, 54 bp, Artificial
  Synthetic oligonucleotide
agggcagccttgttgacctgacgcgccctgtggagcggacgcttttcgcgggga

SEQ ID NO: 209877 - DNA, 54 bp, Artificial
  Synthetic oligonucleotide
gcgtttacacatgtcagacgggtccgtagaatccggaacccttatggcgcgccc

SEQ ID NO: 209878 - DNA, 54 bp, Artificial
  Synthetic oligonucleotide
ccccacgcatgctttccgtggagatcgttcccgtataccgcgctctctcatgcc

SEQ ID NO: 209879 - DNA, 52 bp, Artificial
  Synthetic oligonucleotide
cggaccatcgccgtccttttagcccgaggttgaagggttccgcttatagcgt

SEQ ID NO: 209880 - DNA, 54 bp, Artificial
  Synthetic oligonucleotide
tatcgacatgtgcggacccggtaggttaacgacccatggaaaagactctcgcat

SEQ ID NO: 209881 - DNA, 54 bp, Artificial
  Synthetic oligonucleotide
tcgcatcaggtaacgtacgactgtgaacgacaggaagacacggcgggtgattcc

SEQ ID NO: 209882 - DNA, 54 bp, Artificial
  Synthetic oligonucleotide
gactcttttgcggtagtcgcaccgggctccatgtcgccttgtagtcctcggatg

SEQ ID NO: 209883 - DNA, 54 bp, Artificial
  Synthetic oligonucleotide
cgggaagtgcccgtaaggattaggagtctacgcaatgtccaagaagcgggtcca

SEQ ID NO: 209884 - DNA, 54 bp, Artificial
  Synthetic oligonucleotide
ttataggggcgtcccctccagccagaggaaggtcgcgcgtgtctcgtccccgac

SEQ ID NO: 209885 - DNA, 55 bp, Artificial
  Synthetic oligonucleotide
cttttcggcgcggttttgagaccttgcatctcgttgatgacggcggtgcggacgt

SEQ ID NO: 209886 - DNA, 54 bp, Artificial
  Synthetic oligonucleotide
cgtatcaaatcggctgccgcaagtacgcgaattaacaggacctcgcgacaagtt

SEQ ID NO: 209887 - DNA, 54 bp, Artificial
  Synthetic oligonucleotide
gaaggcttatgcggttcgagcgtcattctcgtgccgtaccatgatcacgggacg

SEQ ID NO: 209888 - DNA, 53 bp, Artificial
  Synthetic oligonucleotide
aaacgacggcgttgtacgctgggatcgctccgtcggtcaagctttcatccacc

SEQ ID NO: 209889 - DNA, 53 bp, Artificial
  Synthetic oligonucleotide
cttgacaggttcgctcgcggatcgctaggctcccgcttccgatgttcttcgta

SEQ ID NO: 209890 - DNA, 53 bp, Artificial
  Synthetic oligonucleotide
ggggatacatggcttgtacagggaaaggccgttctgctatgactgtacgcgga

SEQ ID NO: 209891 - DNA, 53 bp, Artificial
  Synthetic oligonucleotide
cccgtggagcaacaggggccctcgcggtgtttccaggttccatacgaaggact

SEQ ID NO: 209892 - DNA, 53 bp, Artificial
  Synthetic oligonucleotide
gtacgcggctcatgactagatacccctcacccgaggcgtgccgaactcacggt

SEQ ID NO: 209893 - DNA, 53 bp, Artificial
  Synthetic oligonucleotide
gtccctgcccgcttcacgcgtaatccctcccaaggtgtctcgtgcctctcttc

SEQ ID NO: 209894 - DNA, 53 bp, Artificial
  Synthetic oligonucleotide
atagactcatttgagtggctgggcaacgtacttgcgaacactggctcgtatcc

SEQ ID NO: 209895 - DNA, 53 bp, Artificial
  Synthetic oligonucleotide
cgaggaaggtcgcgcaaccgtctagcagcattcactaatagtccctgctatct

SEQ ID NO: 209896 - DNA, 55 bp, Artificial
  Synthetic oligonucleotide
gaaggcgtaccaggactcacggctcccggagagctcggacttgccacgcaggaat

SEQ ID NO: 209897 - DNA, 53 bp, Artificial
  Synthetic oligonucleotide
cctcggtccgacgtaaggccgcgtatctactggacggccgagagggtgtcaag

SEQ ID NO: 209898 - DNA, 53 bp, Artificial
  Synthetic oligonucleotide
tcgacagcggccgtaacacgctcccctcagggcttcaatccgcggtgggactc

SEQ ID NO: 209899 - DNA, 53 bp, Artificial
  Synthetic oligonucleotide
tcgagttcgagtgaggaacggacatgtacgttgcgattgttggagtgagcgcg

SEQ ID NO: 209900 - DNA, 52 bp, Artificial
  Synthetic oligonucleotide
gtctaaaggggaacccatcctcacttcgggcgcggctctgtcgcttgctcca

SEQ ID NO: 209901 - DNA, 52 bp, Artificial
  Synthetic oligonucleotide
cgccccaatgtctcaactgggtgacgaaaggttttggccttgaagacctact

SEQ ID NO: 209902 - DNA, 52 bp, Artificial
  Synthetic oligonucleotide
ccccggtctcgaggtaccccagcggcagggatcccgccgtgcagagcgtgag

SEQ ID NO: 209903 - DNA, 52 bp, Artificial
  Synthetic oligonucleotide
gggtactcgagtccgccgccccatgtttcgtggcatcccgggcagtcctcga

SEQ ID NO: 209904 - DNA, 52 bp, Artificial
  Synthetic oligonucleotide
gggcggatgcctctatcttcgcccacagacgggtgtcaatgagccagtccga

SEQ ID NO: 209905 - DNA, 52 bp, Artificial
  Synthetic oligonucleotide
tcctgagtgttcgcagcgctctgggacgtgttatagctgtggacgcgttcca

SEQ ID NO: 209906 - DNA, 52 bp, Artificial
  Synthetic oligonucleotide
ttcgcaatgcggattcttcctcggtctatgtcgctacggctgacaccaacgt

SEQ ID NO: 209907 - DNA, 55 bp, Artificial
  Synthetic oligonucleotide
gaccaggcacaacgaatcttcggttcatactcgctccgtcccttggttcccggga

SEQ ID NO: 209908 - DNA, 51 bp, Artificial
  Synthetic oligonucleotide
cgttttgtgggagacgtcatccccgttccgtaggatgtacggcggaacccc

SEQ ID NO: 209909 - DNA, 52 bp, Artificial
  Synthetic oligonucleotide
atttgacgatccgtggaattcggtccgtgcgacgggtgaaacgtggggacgc

SEQ ID NO: 209910 - DNA, 52 bp, Artificial
  Synthetic oligonucleotide
aggtgacgacatgactcccgagacgagccaggccctcgtgttgtgcgcgtca

SEQ ID NO: 209911 - DNA, 52 bp, Artificial
  Synthetic oligonucleotide
cagtgtagcttcgagggtttatgttgacaacgtagccattggggcaatacgt

SEQ ID NO: 209912 - DNA, 52 bp, Artificial
  Synthetic oligonucleotide
cagggtgacgcgccgttattggcgagcagagaaagacgctatgagccagcga

SEQ ID NO: 209913 - DNA, 51 bp, Artificial
  Synthetic oligonucleotide
ttcatcgtatgaggcccgcctacgggcttgaaccgtcacgaccgtcagacg

SEQ ID NO: 209914 - DNA, 51 bp, Artificial
  Synthetic oligonucleotide
gaccgcggcttgagcgcaatcactgaaccgtgcgtcagtgcaagtgagaga

SEQ ID NO: 209915 - DNA, 51 bp, Artificial
  Synthetic oligonucleotide
gagcatgctgcgcgaactcccctagcagcgcgctgaagaccacacgagcgc

SEQ ID NO: 209916 - DNA, 51 bp, Artificial
  Synthetic oligonucleotide
tccgtcacatcggctcgcgtaccattgctggagccactccaactcgtcagt

SEQ ID NO: 209917 - DNA, 51 bp, Artificial
  Synthetic oligonucleotide
cggcgtacgtgagcaatcaactcccggtgtggcttcggcgacacgggagct

SEQ ID NO: 209918 - DNA, 55 bp, Artificial
  Synthetic oligonucleotide
gacgaggtcaagactcggcgtcacagtaccgacggtgtacccaaggggagtcgtg

SEQ ID NO: 209919 - DNA, 49 bp, Artificial
  Synthetic oligonucleotide
gcccgaaacccctaggtgttccacggggcctggaggggccaagttacgg

SEQ ID NO: 209920 - DNA, 51 bp, Artificial
  Synthetic oligonucleotide
taagtcccgaattcactagcctatttgccccagcgtgtcaaaccttcgcta

SEQ ID NO: 209921 - DNA, 51 bp, Artificial
  Synthetic oligonucleotide
cgcgtaatccctcccaaggtgtctcgtgcctctcttcgtgtttggcgggct

SEQ ID NO: 209922 - DNA, 50 bp, Artificial
  Synthetic oligonucleotide
atgcggcatacgcccccaatgcgtaggattcgcccagcggtcgcccgttt

SEQ ID NO: 209923 - DNA, 50 bp, Artificial
  Synthetic oligonucleotide
atgcggttcgctcgaacatgcttcgccaggacccactcgcatcggacagc

SEQ ID NO: 209924 - DNA, 50 bp, Artificial
  Synthetic oligonucleotide
acgccgggtcgtctccaccccttgatcgatcgggtccagtgtgctctctt

SEQ ID NO: 209925 - DNA, 50 bp, Artificial
  Synthetic oligonucleotide
acgagcaagctcccctgtcgttcacgctcccacctcggtcgtccataccc

SEQ ID NO: 209926 - DNA, 50 bp, Artificial
  Synthetic oligonucleotide
acccaacgtgcactacgctcccgcgaacttcgatctccgggtggacctca

SEQ ID NO: 209927 - DNA, 50 bp, Artificial
  Synthetic oligonucleotide
cacctgccccgtgtcaaatcgacccggaccggaggtgtgatcgccgttcg

SEQ ID NO: 209928 - DNA, 50 bp, Artificial
  Synthetic oligonucleotide
atgtcgaagcgtctcctacgcgtgcgagtgcgtgccgcgcatctatcacg

SEQ ID NO: 209929 - DNA, 55 bp, Artificial
  Synthetic oligonucleotide
gacgcgcgagaatatatagacacactaccagtgaatactttcaggagcgtgtccc

SEQ ID NO: 209930 - DNA, 50 bp, Artificial
  Synthetic oligonucleotide
atgtgtggtccgtcacgctttcacgtcacgtcccggaacgaatcaggggc

SEQ ID NO: 209931 - DNA, 50 bp, Artificial
  Synthetic oligonucleotide
aggtgcgccggctgcgtcgacccaactcgtgtcgttcacgctcactccag

SEQ ID NO: 209932 - DNA, 50 bp, Artificial
  Synthetic oligonucleotide
attccgggcccgagatccaccgtatctctcgccccaagttcccggaccga

SEQ ID NO: 209933 - DNA, 50 bp, Artificial
  Synthetic oligonucleotide
aacgacgaaacctgaccagtcgtgacctaccgggaccaacccctcgggag

SEQ ID NO: 209934 - DNA, 50 bp, Artificial
  Synthetic oligonucleotide
caccggggagcgttccgagatcgatgaacccgctctctctcgtccaggag

SEQ ID NO: 209935 - DNA, 50 bp, Artificial
  Synthetic oligonucleotide
aaagcctgccaggcagacgagcaagctcccctgtcgttcacgctcccacc

SEQ ID NO: 209936 - DNA, 50 bp, Artificial
  Synthetic oligonucleotide
agggcgaacaccggatgactcgctgcacaaaccgcccgtcggtcgcaacc

SEQ ID NO: 209937 - DNA, 50 bp, Artificial
  Synthetic oligonucleotide
agggggtcgggcgatctgctacagtcccccgttccagcgcaggtcccgga

SEQ ID NO: 209938 - DNA, 50 bp, Artificial
  Synthetic oligonucleotide
atcagaacgtgaaggtcggtcttctcgtccggtctcggaactccgatgaa

SEQ ID NO: 209939 - DNA, 50 bp, Artificial
  Synthetic oligonucleotide
caggaggcccggggtgagtcgtcactacactacgcgccagattcgtcgca

SEQ ID NO: 209940 - DNA, 55 bp, Artificial
  Synthetic oligonucleotide
gacgggttgggatcgggatttcaagcgaggacgggctcttgccgagtcctggtca

SEQ ID NO: 209941 - DNA, 49 bp, Artificial
  Synthetic oligonucleotide
agtcgtgacctaccgggaccaacccctcgggagcccgaaccttccgtct

SEQ ID NO: 209942 - DNA, 50 bp, Artificial
  Synthetic oligonucleotide
cacggtgtgggtgcgacggtcaagcacgtttccccggagagtacttggag

SEQ ID NO: 209943 - DNA, 50 bp, Artificial
  Synthetic oligonucleotide
agacccacacttaccgcgaactgtgcggccccctcggcgagtgagatctt

SEQ ID NO: 209944 - DNA, 50 bp, Artificial
  Synthetic oligonucleotide
agaccaccgtgtggagctacggctccgtcaatcatcctggcacgctcaac

SEQ ID NO: 209945 - DNA, 50 bp, Artificial
  Synthetic oligonucleotide
agaagggtcggggtgggcacgaggcttgacaagctagcgaggggagggtg

SEQ ID NO: 209946 - DNA, 50 bp, Artificial
  Synthetic oligonucleotide
cacgggatgccttgctagcatgtaggagggggtcgttcaaggcggaaccg

SEQ ID NO: 209947 - DNA, 50 bp, Artificial
  Synthetic oligonucleotide
gcggaagactgcttagaacacctagactcatggaacactcacctccccga

SEQ ID NO: 209948 - DNA, 50 bp, Artificial
  Synthetic oligonucleotide
aggaacgaggtaccggtacgcgccgagcctcaggtctccgagcccgctca

SEQ ID NO: 209949 - DNA, 50 bp, Artificial
  Synthetic oligonucleotide
gattcggaagttaggtcgtgttgcacgatcgcaggtgacagcgatcaagc

SEQ ID NO: 209950 - DNA, 50 bp, Artificial
  Synthetic oligonucleotide
actcgctgcacaaaccgcccgtcggtcgcaacccggtattgcgcgctctc

SEQ ID NO: 209951 - DNA, 55 bp, Artificial
  Synthetic oligonucleotide
gactttgcccgaagtacaagaccgcccacatggaaacggtcccgttcatgcgata

SEQ ID NO: 209952 - DNA, 50 bp, Artificial
  Synthetic oligonucleotide
cacgatccactgccccctggtcatctggccgactacccctcatcccaacc

SEQ ID NO: 209953 - DNA, 50 bp, Artificial
  Synthetic oligonucleotide
gagctttccgggtcgcataaattacgcctatcactcagcgtaatccgttc

SEQ ID NO: 209954 - DNA, 50 bp, Artificial
  Synthetic oligonucleotide
aggattcggccctcggttcacgcgctccgtagttgcaggtcaaacctcta

SEQ ID NO: 209955 - DNA, 60 bp, Artificial
  Synthetic oligonucleotide
cctcgttgggcacgtcctgagtgttcgcagcgctctgggacgtgttatagctgtggacgc

SEQ ID NO: 209956 - DNA, 55 bp, Artificial
  Synthetic oligonucleotide
gaggcagcagcgaagaaacggtagcaagaagtcgcgggcacacaaagcgactcgg

SEQ ID NO: 209957 - DNA, 55 bp, Artificial
  Synthetic oligonucleotide
gcacgagacctgttcgggtggctgccggcgacatcacttcccatcccgggcttgg

SEQ ID NO: 209958 - DNA, 55 bp, Artificial
  Synthetic oligonucleotide
gcagtccactttccggccaaagatccgtgacttccatcattgatctcgcgtgagg

SEQ ID NO: 209959 - DNA, 55 bp, Artificial
  Synthetic oligonucleotide
gcatttctggactccgcgacgcaacattgaccagtccggtcggatacaaaatttg

SEQ ID NO: 209960 - DNA, 55 bp, Artificial
  Synthetic oligonucleotide
gcccatcgttgcccatctagatcgagggtacgcacgttatcccgagcctctagcc

SEQ ID NO: 209961 - DNA, 55 bp, Artificial
  Synthetic oligonucleotide
gcgagcacgcagccagggatcagaagtgcaagcacccatgcacgtgaacggtacg

SEQ ID NO: 209962 - DNA, 55 bp, Artificial
  Synthetic oligonucleotide
ccgatatcgtttctcttcgctactgggctgccttgtgcgttcgtgtacatcgcga

SEQ ID NO: 209963 - DNA, 53 bp, Artificial
  Synthetic oligonucleotide
ccgcgacttataacccggtacgtcctcaggcgaaataccgatatggagggtag

SEQ ID NO: 209964 - DNA, 53 bp, Artificial
  Synthetic oligonucleotide
ccgcgggtcggttcacctggaagacttgaattgcggttttccactacgtcgcc

SEQ ID NO: 209965 - DNA, 55 bp, Artificial
  Synthetic oligonucleotide
ccttgtcgagtcgcgaggtgcgtgctaacgattcccacaatcatgcgtccccagg

SEQ ID NO: 209966 - DNA, 58 bp, Artificial
  Synthetic oligonucleotide
ccttaccctgcgaagcaggtagaagtctgttcaaggcgtggtgacgactcccagccca

SEQ ID NO: 209967 - DNA, 55 bp, Artificial
  Synthetic oligonucleotide
cgatccacgcgcacggagcgtgcgggaccgcgcggggagcccgcaaggcgtgaat

SEQ ID NO: 209968 - DNA, 55 bp, Artificial
  Synthetic oligonucleotide
cgcacattcagacggcgctgttcgataggcaatccagcgtccagtacattgtcgg

SEQ ID NO: 209969 - DNA, 55 bp, Artificial
  Synthetic oligonucleotide
cgcctgcagttcgcgttctacatcagcggcacctgtggttgctcggcccaaaacg

SEQ ID NO: 209970 - DNA, 55 bp, Artificial
  Synthetic oligonucleotide
cgctcgggcgaggtcccctgacgagaggtcggcactcatggcgcgagtcacctaa

SEQ ID NO: 209971 - DNA, 55 bp, Artificial
  Synthetic oligonucleotide
cgctctcgacacgggcgtcacctcttgaacgactcgtggcacttcgtgcacaggt

SEQ ID NO: 209972 - DNA, 55 bp, Artificial
  Synthetic oligonucleotide
cgctgaggtgaggagttcgtcagggatcgtgcgcgagcgacggaagtgagtgtct

SEQ ID NO: 209973 - DNA, 54 bp, Artificial
  Synthetic oligonucleotide
cggaaggccctgtagggcgctgggctcaagggcctcgggcctcaggaaaagacc

SEQ ID NO: 209974 - DNA, 54 bp, Artificial
  Synthetic oligonucleotide
cggcgggtcacggccgaaaacctaattcgctgaacacaacgtgcaacgaatacg

SEQ ID NO: 209975 - DNA, 55 bp, Artificial
  Synthetic oligonucleotide
cggctcataagacggagcacgcagaacataggtattcctagacgcggttgcactc

SEQ ID NO: 209976 - DNA, 54 bp, Artificial
  Synthetic oligonucleotide
cggcttatttccgatgtcaacgtccaaggttctgcccggggaaggcgaatgggc

SEQ ID NO: 209977 - DNA, 57 bp, Artificial
  Synthetic oligonucleotide
tacggcgccctcagaccgggggaacgcgaaatctcgattcacggaggtcacttcaca

SEQ ID NO: 209978 - DNA, 54 bp, Artificial
  Synthetic oligonucleotide
cgggcacaagtccacgttcaacccgaagaccaggaagtacttcgcgttcgcgga

SEQ ID NO: 209979 - DNA, 55 bp, Artificial
  Synthetic oligonucleotide
cgtggcggatggccctccgaacgcgtggggccgcgcgccgctttgctactgtgat

SEQ ID NO: 209980 - DNA, 55 bp, Artificial
  Synthetic oligonucleotide
ctcatcgcgggtacgcgtttgaagctcggatttgggctgggagtgcggtacgaag

SEQ ID NO: 209981 - DNA, 55 bp, Artificial
  Synthetic oligonucleotide
ctcgattgagcggacggttgtctatcctctcggagcccgggtgtcatggggaagg

SEQ ID NO: 209982 - DNA, 55 bp, Artificial
  Synthetic oligonucleotide
ctcggctgctagaacccttgtctttccgaggcgaaagagccgtggactccaaata

SEQ ID NO: 209983 - DNA, 55 bp, Artificial
  Synthetic oligonucleotide
tacggacgtcggttcgcagacggcgtccctcccctcaatccgagcccgcacatca

SEQ ID NO: 209984 - DNA, 55 bp, Artificial
  Synthetic oligonucleotide
tagtaagcacgccttgccagggccgtaccctgtctctcccgggcatcaggagtcc

SEQ ID NO: 209985 - DNA, 55 bp, Artificial
  Synthetic oligonucleotide
tatccgtccccttgcgagtaggaggtatccggagaggagggtcggcgccagaagt

SEQ ID NO: 209986 - DNA, 55 bp, Artificial
  Synthetic oligonucleotide
tcgaagtcctcccttacgtgcgccatcgcgtgggagctgcatgcgcgcggctctt

SEQ ID NO: 209987 - DNA, 55 bp, Artificial
  Synthetic oligonucleotide
tgaagcgtaggcgtcggtgcgtgcagcgggtagccactgctaccgtgacacacga

SEQ ID NO: 209988 - DNA, 54 bp, Artificial
  Synthetic oligonucleotide
cgccggtgggcctctcgtttttggtggtccgtggacgactttcgcagagtcgtg

SEQ ID NO: 209989 - DNA, 55 bp, Artificial
  Synthetic oligonucleotide
tgagcgagtcgcaagcgttggttgagctgttggcgaggattgaggaagaggtcag

SEQ ID NO: 209990 - DNA, 55 bp, Artificial
  Synthetic oligonucleotide
tgcatgttacggctcgggtcggccttaccagacttgtgcctcggagtggactctc

SEQ ID NO: 209991 - DNA, 55 bp, Artificial
  Synthetic oligonucleotide
tggagttcactggtgactccactcttacgcacaggttcacggcggctagcgatga

SEQ ID NO: 209992 - DNA, 55 bp, Artificial
  Synthetic oligonucleotide
tggcgtagactgaggggctcggaggttcaagcggaatgtcgcgcggtcactccca

SEQ ID NO: 209993 - DNA, 55 bp, Artificial
  Synthetic oligonucleotide
tggtctacaaccagggcattgcgctctggaacgcgggccagatttccgccgctca

SEQ ID NO: 209994 - DNA, 55 bp, Artificial
  Synthetic oligonucleotide
tgtacccggttccgactttcccggtcctcgtgcgcatgcacgtggacgccaacgg

SEQ ID NO: 209995 - DNA, 55 bp, Artificial
  Synthetic oligonucleotide
tgtcaattcgaccgtcctcccgcggccgtgttcgttgccacgttcctggagtcac

SEQ ID NO: 209996 - DNA, 55 bp, Artificial
  Synthetic oligonucleotide
tgtcctatgttgcctctcgccagcaaggattcgtcgagacgtagaatcgcgtcgc

SEQ ID NO: 209997 - DNA, 55 bp, Artificial
  Synthetic oligonucleotide
ttcgaggtacgccgtacccttggggatccgagctgcgagcatccattggcgtcag

SEQ ID NO: 209998 - DNA, 55 bp, Artificial
  Synthetic oligonucleotide
ttcgtgctcgacgttggagacgagtacagccgcaagggcaatgaccggggcggaa

SEQ ID NO: 209999 - DNA, 60 bp, Artificial
  Synthetic oligonucleotide
acatccgaagctatgcgcgggtgactgcgcacctcgggcaaatcctgcacgagtgcaacc

SEQ ID NO: 210000 - DNA, 55 bp, Artificial
  Synthetic oligonucleotide
ttgcgatctacgaggatgctcaaggcgtgtgcctcccgccgctcgtgcgacgaat

SEQ ID NO: 210001 - DNA, 55 bp, Artificial
  Synthetic oligonucleotide
ttgcgtctccttgtggcgatcgattgctcgggtttgcgccgagctcaatctgggg

SEQ ID NO: 210002 - DNA, 55 bp, Artificial
  Synthetic oligonucleotide
tttccggcctcgaacgaaggaagcaggttctctgcgagtctccgttcggctccgc

SEQ ID NO: 210003 - DNA, 55 bp, Artificial
  Synthetic oligonucleotide
tttgataggcatccaggtgctggtacccgacttcggcccagaattgggcttcggt

SEQ ID NO: 210004 - DNA, 55 bp, Artificial
  Synthetic oligonucleotide
gcgagggccgcatgaaccacggccctcctctcaaaatggcgaaagtcgagtctgg

SEQ ID NO: 210005 - DNA, 55 bp, Artificial
  Synthetic oligonucleotide
gcgagtcctcgttaaccttgttcgacgtgccttgaagtggtacgcacggacctgt

SEQ ID NO: 210006 - DNA, 55 bp, Artificial
  Synthetic oligonucleotide
gcgcggtatttgcgcgcagaccgttgtaaacggcgaatccggtgtgctacctcgt

SEQ ID NO: 210007 - DNA, 55 bp, Artificial
  Synthetic oligonucleotide
gcgtaccacttcaaggcacgtcgaacaaggttaacgaggactcgcaaggctgcgt

SEQ ID NO: 210008 - DNA, 55 bp, Artificial
  Synthetic oligonucleotide
gctcaggtccgcgccatgacgggaaagaggttcgcctcacgtggggacggcactc

SEQ ID NO: 210009 - DNA, 55 bp, Artificial
  Synthetic oligonucleotide
gctgtggatcgtctgtggatccgccaccgatcctcgtggggacgaggtgtgggcg

SEQ ID NO: 210010 - DNA, 54 bp, Artificial
  Synthetic oligonucleotide
accgtctgttgccctacgtggggatgacggtcttcctcaacacggaggaaggct

SEQ ID NO: 210011 - DNA, 55 bp, Artificial
  Synthetic oligonucleotide
ggaccaacgaattaccagtcactagcgatgcacgactggctaactgacgggtccg

SEQ ID NO: 210012 - DNA, 55 bp, Artificial
  Synthetic oligonucleotide
ggagattgttcgcaagcaggttgggacctgcgtcgcgagcgaaatcggtaaggcg

SEQ ID NO: 210013 - DNA, 55 bp, Artificial
  Synthetic oligonucleotide
ggagctctttccgagcagcccgagctctcagaagaaggcatgccctaaaggcgcg

SEQ ID NO: 210014 - DNA, 55 bp, Artificial
  Synthetic oligonucleotide
ggcggaggcagaacatctctactcaataacccagacagtgcgtgattcgcactcg

SEQ ID NO: 210015 - DNA, 55 bp, Artificial
  Synthetic oligonucleotide
gggattcggaagcgaatgacgcccgattttccacgactgaccgacgggtcgagct

SEQ ID NO: 210016 - DNA, 55 bp, Artificial
  Synthetic oligonucleotide
gggcctgcgctgtgagggcacgaccgaggccatgacgtgtcaggcgctgcacgtg

SEQ ID NO: 210017 - DNA, 55 bp, Artificial
  Synthetic oligonucleotide
ggggaagagctgatcccctttacccctacgcacctgaacatgaccttgcgggctc

SEQ ID NO: 210018 - DNA, 55 bp, Artificial
  Synthetic oligonucleotide
gtcacattaatcacgcaagacatggcaattattacctgccgaatttcagactgaa

SEQ ID NO: 210019 - DNA, 54 bp, Artificial
  Synthetic oligonucleotide
gtccccaaagcacaactttactaccagtcacggtaccccgcttcgcgtggctcc

SEQ ID NO: 210020 - DNA, 55 bp, Artificial
  Synthetic oligonucleotide
gtgactgcgcacctcgggcaaatcctgcacgagtgcaaccagttccgaagcctcg

SEQ ID NO: 210021 - DNA, 55 bp, Artificial
  Synthetic oligonucleotide
ggcatcccgggcagtcctcgaggcccgggagggaccaacgtcgctcggctctaag

SEQ ID NO: 210022 - DNA, 55 bp, Artificial
  Synthetic oligonucleotide
tacagtgatggctgcggtgtttgcactcggctccacgttcacaagcagtcggacg

SEQ ID NO: 210023 - DNA, 55 bp, Artificial
  Synthetic oligonucleotide
taccgagcctcgtccccgtgaacggacgatacccaggaggctgatcgaatgtcgg

SEQ ID NO: 210024 - DNA, 55 bp, Artificial
  Synthetic oligonucleotide
taccttccgcatcacacggctccttccttgggttcaggcctcgggcacccacaac

SEQ ID NO: 210025 - DNA, 55 bp, Artificial
  Synthetic oligonucleotide
attgcccgacgttgagcctctcgggacctgtccccgtccactgctgtacagcgtt

SEQ ID NO: 210026 - DNA, 55 bp, Artificial
  Synthetic oligonucleotide
atgtgtctcgattctcgtaccaatcgatggatgcacttccaccgagaagtgaggc

SEQ ID NO: 210027 - DNA, 55 bp, Artificial
  Synthetic oligonucleotide
atgtggagccgagtgccgctagcgcgtcgtcactccccgctgaccaggtggctca

SEQ ID NO: 210028 - DNA, 55 bp, Artificial
  Synthetic oligonucleotide
atggggtgtgctccccatcgcccgcgatggatagaagcgcgccctcatgaaggca

SEQ ID NO: 210029 - DNA, 55 bp, Artificial
  Synthetic oligonucleotide
atgacgcgtcgctcgtggctccagattgtcctgcgactccgcagaccgaatggga

SEQ ID NO: 210030 - DNA, 55 bp, Artificial
  Synthetic oligonucleotide
atgaaagccacgatcctctcgcgctccgcttccatcccgtccactcggcgacttg

SEQ ID NO: 210031 - DNA, 55 bp, Artificial
  Synthetic oligonucleotide
atcggcgcccgactctattcgctcccgcccgggttgcgaagcgatcagtggtggt

SEQ ID NO: 210032 - DNA, 58 bp, Artificial
  Synthetic oligonucleotide
gggcccattgggtacgaagtgccgtgggagctgtggggcctgccgtagcgtcgtcgca

SEQ ID NO: 210033 - DNA, 55 bp, Artificial
  Synthetic oligonucleotide
atcgcgggttggaggcggaccttcccgcatggtgcgaggctacggggaatccact

SEQ ID NO: 210034 - DNA, 55 bp, Artificial
  Synthetic oligonucleotide
atccactcgttccattcagtgttccacggaccgcgccccgcttctcggtggagtc

SEQ ID NO: 210035 - DNA, 55 bp, Artificial
  Synthetic oligonucleotide
atccacgcgcgacgcgagccacacgtacagcgagataagggccaggttcgcagtt

SEQ ID NO: 210036 - DNA, 55 bp, Artificial
  Synthetic oligonucleotide
atcatcgtggcccttccgaggttggtgggagtgggtcgacgaacatgccccaacg

SEQ ID NO: 210037 - DNA, 55 bp, Artificial
  Synthetic oligonucleotide
ataccggcagagtagcagacccgcactcgttgttcagaggggtgcgatccctccc

SEQ ID NO: 210038 - DNA, 55 bp, Artificial
  Synthetic oligonucleotide
agtcctcgaggcccgggagggaccaacgtcgctcggctctaagggcgccgctcca

SEQ ID NO: 210039 - DNA, 55 bp, Artificial
  Synthetic oligonucleotide
agtatgggcgtggagtccgcaggtcactcggttcgcgattcgtccaaccggagga

SEQ ID NO: 210040 - DNA, 55 bp, Artificial
  Synthetic oligonucleotide
agtagtacacccagggcgaacaccggatgactcgctgcacaaaccgcccgtcggt

SEQ ID NO: 210041 - DNA, 55 bp, Artificial
  Synthetic oligonucleotide
aggttgtgttcgtcccacatgcggcctagagtcgcctccgaatggacgccaccca

SEQ ID NO: 210042 - DNA, 55 bp, Artificial
  Synthetic oligonucleotide
aggccatcgcggatcgtcgtatatcatggcccgtgtcgctcccctcggaccgcaa

SEQ ID NO: 210043 - DNA, 55 bp, Artificial
  Synthetic oligonucleotide
atcggcatcgctgtcgggtaccgctgaaagggaggtcggatggacccactttccg

SEQ ID NO: 210044 - DNA, 55 bp, Artificial
  Synthetic oligonucleotide
ccggtcgcgaaccggacgcactgcggcaacgactcatgaacgaagtgcacggggt

SEQ ID NO: 210045 - DNA, 55 bp, Artificial
  Synthetic oligonucleotide
cgaagcgtgttgtcaagctggttcacgggacgttgatcgccgatttgaccggccg

SEQ ID NO: 210046 - DNA, 54 bp, Artificial
  Synthetic oligonucleotide
cgagggcaacaggcggttcacccaggagaaacattcccgtattcgtccgaaagc

SEQ ID NO: 210047 - DNA, 55 bp, Artificial
  Synthetic oligonucleotide
cgcgaaggtccgacagtgatgctgttatggcgtcctctggggttgtgactctggg

SEQ ID NO: 210048 - DNA, 55 bp, Artificial
  Synthetic oligonucleotide
ttcgctcgtcgcaccgtctcgacccgtacggctttccgcatttgccttgcccact

SEQ ID NO: 210049 - DNA, 55 bp, Artificial
  Synthetic oligonucleotide
aaatgcgtcattaagtcagacacacgtcaccgggaatgctcggtgaacaatggcg

SEQ ID NO: 210050 - DNA, 55 bp, Artificial
  Synthetic oligonucleotide
tgaggacgcacgggcaccccatctggttggtcccaccaccgagggtggatgagca

SEQ ID NO: 210051 - DNA, 53 bp, Artificial
  Synthetic oligonucleotide
tgaatggcgcaacggtcgattcggggttccccgaacggggacccactcaccca

SEQ ID NO: 210052 - DNA, 55 bp, Artificial
  Synthetic oligonucleotide
tctgtggcgtcaccggaagggacagggtgactgatcaaagccgcgtctgggtggt

SEQ ID NO: 210053 - DNA, 55 bp, Artificial
  Synthetic oligonucleotide
ggaacccggttgtcggctggagtcgtcagcgtggggagccaccacggactggatt

SEQ ID NO: 210054 - DNA, 55 bp, Artificial
  Synthetic oligonucleotide
atctcccgatcagcctagattatggtgcgtttcccgacagaccgtacgactcccc

SEQ ID NO: 210055 - DNA, 55 bp, Artificial
  Synthetic oligonucleotide
gcgaccgggtacgacatgtccattccctacgttccaccggactacctgccctgga

SEQ ID NO: 210056 - DNA, 55 bp, Artificial
  Synthetic oligonucleotide
gatgtgcgccctgagactagtcctaatgagcaactccggcacgagtggagtaatg

SEQ ID NO: 210057 - DNA, 55 bp, Artificial
  Synthetic oligonucleotide
gactccggatcgggctccgcgcacggacagggtcaaccgacgggcggacagtggc

SEQ ID NO: 210058 - DNA, 55 bp, Artificial
  Synthetic oligonucleotide
cttcgcgtaccgaccgaccgcgtaaccgacatattctgacgatcatgcgcgaggg

SEQ ID NO: 210059 - DNA, 55 bp, Artificial
  Synthetic oligonucleotide
ctgacgtagtcgattcgacgtagccgcgacgctgtcgctaagggaactgtagccg

SEQ ID NO: 210060 - DNA, 55 bp, Artificial
  Synthetic oligonucleotide
cgctgtgatgtggccggcaatcctgtcattgtggctccgatccgcttactgttcg

SEQ ID NO: 210061 - DNA, 52 bp, Artificial
  Synthetic oligonucleotide
acgaaacacacaagtgagaaccagggaagtgagtatccatcgtgtccagtga

SEQ ID NO: 210062 - DNA, 52 bp, Artificial
  Synthetic oligonucleotide
ttcgcacccctgcgacccgaacctggagaaccccgcatgtccgcccgttgtc

SEQ ID NO: 210063 - DNA, 51 bp, Artificial
  Synthetic oligonucleotide
accgcaagcattaacatcggttaaaggtctggatcctgggaacaagttagt

SEQ ID NO: 210064 - DNA, 50 bp, Artificial
  Synthetic oligonucleotide
tcaaggttctgtacacgtgttcgttttcacggtaggatcagctatgtttg

SEQ ID NO: 210065 - DNA, 55 bp, Artificial
  Synthetic oligonucleotide
caccggtagttgagtccaccagagtggtgtacgaccactgatcgaccttgacccc

SEQ ID NO: 210066 - DNA, 50 bp, Artificial
  Synthetic oligonucleotide
cactctcccgtaggcgatatgtccggtcaatcccattcttctgattcgct

SEQ ID NO: 210067 - DNA, 50 bp, Artificial
  Synthetic oligonucleotide
aggcttagcgcgactacacccctcctgcggcctcccgattgccccctaca

SEQ ID NO: 210068 - DNA, 50 bp, Artificial
  Synthetic oligonucleotide
aggcgccccaagtgcgcatccccctcggcagtgcccggtaaagctacctc

SEQ ID NO: 210069 - DNA, 50 bp, Artificial
  Synthetic oligonucleotide
aggcgcagccatagacggaacgacggtaggttgctgaaacttggtgccgc

SEQ ID NO: 210070 - DNA, 50 bp, Artificial
  Synthetic oligonucleotide
aggccgttcagggtccatgtggaggactgccgcacatcgcagtgccattc

SEQ ID NO: 210071 - DNA, 50 bp, Artificial
  Synthetic oligonucleotide
aggaatccggacgaacgggatgtcactggcatgctggacgtgagtgcgac

SEQ ID NO: 210072 - DNA, 50 bp, Artificial
  Synthetic oligonucleotide
aaaagaacttaccgggccccaggcggacacggcattctggttggtcgtcg

SEQ ID NO: 210073 - DNA, 50 bp, Artificial
  Synthetic oligonucleotide
aacactgagccacccgttctccaaggctcgcctggtctgctccacgatct

SEQ ID NO: 210074 - DNA, 50 bp, Artificial
  Synthetic oligonucleotide
aaccccgctgcctgcgaattcagcatgacgtcgggtccattcggtgagca

SEQ ID NO: 210075 - DNA, 50 bp, Artificial
  Synthetic oligonucleotide
aaccttagctgtcccacgggggtcgtgcaggggcgaaaggccctactccg

SEQ ID NO: 210076 - DNA, 55 bp, Artificial
  Synthetic oligonucleotide
cactcggatatcaggccatgagtcctgactatcatagagtgagacaggttggcgt

SEQ ID NO: 210077 - DNA, 50 bp, Artificial
  Synthetic oligonucleotide
aacgcgttcatttgctcacagcgcggtttcaacgggccctggtggggata

SEQ ID NO: 210078 - DNA, 50 bp, Artificial
  Synthetic oligonucleotide
aacgggccccacgtccttcgtggaggtccctgacgacgtacctcccgcgg

SEQ ID NO: 210079 - DNA, 50 bp, Artificial
  Synthetic oligonucleotide
aacggtagagacccccggtgcgcaactgtgctcgatcgttcggtaggggc

SEQ ID NO: 210080 - DNA, 50 bp, Artificial
  Synthetic oligonucleotide
aagtgagatccctttgcgtacacttcaacacggggcccggccgaaaccct

SEQ ID NO: 210081 - DNA, 50 bp, Artificial
  Synthetic oligonucleotide
aagttgatcgccaacactgagccacccgttctccaaggctcgcctggtct

SEQ ID NO: 210082 - DNA, 50 bp, Artificial
  Synthetic oligonucleotide
acagcgtggtagcaactgcgagcgccacgacttcggtacattccgggact

SEQ ID NO: 210083 - DNA, 50 bp, Artificial
  Synthetic oligonucleotide
accacttcgctcgtcgcaccgtctcgacccgtacggctttccgcatttgc

SEQ ID NO: 210084 - DNA, 50 bp, Artificial
  Synthetic oligonucleotide
accaggccgaagcgtgttgtcaagctggttcacgggacgttgatcgccga

SEQ ID NO: 210085 - DNA, 50 bp, Artificial
  Synthetic oligonucleotide
acccgtacggctttccgcatttgccttgcccactcggtccttgtacggcc

SEQ ID NO: 210086 - DNA, 50 bp, Artificial
  Synthetic oligonucleotide
accgtggagctcctggcgtcggtaggcctcactacgtacagttgccgcgc

SEQ ID NO: 210087 - DNA, 55 bp, Artificial
  Synthetic oligonucleotide
caggaagtgcctctctcgtgcggatgtcggaaccttcagcaagtcccattatccg

SEQ ID NO: 210088 - DNA, 50 bp, Artificial
  Synthetic oligonucleotide
acgacgtcgatcgatacgcacgcttccccctcgcggtcatccatcacgtt

SEQ ID NO: 210089 - DNA, 50 bp, Artificial
  Synthetic oligonucleotide
acggcgctcgggcctacgaacagagcttcctttccgcgattctcggttcc

SEQ ID NO: 210090 - DNA, 50 bp, Artificial
  Synthetic oligonucleotide
acggtaggttgctgaaacttggtgccgccactcccgcaattcggagcgta

SEQ ID NO: 210091 - DNA, 50 bp, Artificial
  Synthetic oligonucleotide
acgtcgggtcgcatggaagctcctagtccgggcagtccatccgggtaatc

SEQ ID NO: 210092 - DNA, 50 bp, Artificial
  Synthetic oligonucleotide
agacacgaccacgcgtccggtaggcgttgttcggctgaaaacctgacgga

SEQ ID NO: 210093 - DNA, 50 bp, Artificial
  Synthetic oligonucleotide
agacccccggtgcgcaactgtgctcgatcgttcggtaggggcaacgcggt

SEQ ID NO: 210094 - DNA, 50 bp, Artificial
  Synthetic oligonucleotide
agacctatccccgcgacggtcggtcgtgtgggccgtttaccgttctcccg

SEQ ID NO: 210095 - DNA, 50 bp, Artificial
  Synthetic oligonucleotide
agacgcgccggttaggccgttcagggtccatgtggaggactgccgcacat

SEQ ID NO: 210096 - DNA, 50 bp, Artificial
  Synthetic oligonucleotide
agacggaacgacggtaggttgctgaaacttggtgccgccactcccgcaat

SEQ ID NO: 210097 - DNA, 50 bp, Artificial
  Synthetic oligonucleotide
agacggtcggcgagatgccaacggtcgaggagagtccggccgctcttgtc

SEQ ID NO: 210098 - DNA, 55 bp, Artificial
  Synthetic oligonucleotide
catcccggcgtccaaggccggatcggtcgcacacttctcggtcgaaatcttctgc

SEQ ID NO: 210099 - DNA, 50 bp, Artificial
  Synthetic oligonucleotide
agagcttttggcggggcgtaaggcgcagccatagacggaacgacggtagg

SEQ ID NO: 210100 - DNA, 50 bp, Artificial
  Synthetic oligonucleotide
agagtccggccgctcttgtcgtgagtgcgccaccagagactcgaacctcc

SEQ ID NO: 210101 - DNA, 50 bp, Artificial
  Synthetic oligonucleotide
agcaaccgcccttatccgcgccgatagggaccgtttctgcacacccgacc

SEQ ID NO: 210102 - DNA, 50 bp, Artificial
  Synthetic oligonucleotide
agcagggaccaccgatgacagacacgcacctcctgcttcgacgaagtccc

SEQ ID NO: 210103 - DNA, 50 bp, Artificial
  Synthetic oligonucleotide
agccaatgccggttactcggcccgtgtcgttgacaccaaggaggacgaca

SEQ ID NO: 210104 - DNA, 50 bp, Artificial
  Synthetic oligonucleotide
agcgaactggacaacctccccgatgcactatcgctgacctccccgttggg

SEQ ID NO: 210105 - DNA, 55 bp, Artificial
  Synthetic oligonucleotide
acgtggaggttgagactttgcccgggatcagcgttcgcgtggtaccgcttgaccc

SEQ ID NO: 210106 - DNA, 55 bp, Artificial
  Synthetic oligonucleotide
catgagctcagtatctccccacctggacaatgtgcacgggctcgttctccggccc

SEQ ID NO: 210107 - DNA, 55 bp, Artificial
  Synthetic oligonucleotide
ccgccaacagatgggaccagaccgtcacaactggcttcgcctggatcccgaaggt

SEQ ID NO: 210108 - DNA, 55 bp, Artificial
  Synthetic oligonucleotide
ccttggtatgactgacagagaacccttttacattgatctctccaaccaggcgctg

SEQ ID NO: 210109 - DNA, 55 bp, Artificial
  Synthetic oligonucleotide
gctcggctttgatgctgcgagaatggactattctaggacttccatgttgcatgga

SEQ ID NO: 210110 - DNA, 55 bp, Artificial
  Synthetic oligonucleotide
ccaagcgagtcacaacggctaaaccctagcacgactccgcgaagccattcgccat

SEQ ID NO: 210111 - DNA, 55 bp, Artificial
  Synthetic oligonucleotide
attttggtagcgtctcgccaatgtcgaccgacgcgcgcccgaacattcgtgcccc

SEQ ID NO: 210112 - DNA, 55 bp, Artificial
  Synthetic oligonucleotide
agccctacggctccgctaccttgaaggtctgagttcaccccaagtggcggctcag

SEQ ID NO: 210113 - DNA, 55 bp, Artificial
  Synthetic oligonucleotide
tacagcaacggggctccatcacgtacgagcgctttccctcgacgaatccgtctac

SEQ ID NO: 210114 - DNA, 55 bp, Artificial
  Synthetic oligonucleotide
tacagccttggaagagcaacgggatgtggctcggctcgagcgcaggagtggggag

SEQ ID NO: 210115 - DNA, 55 bp, Artificial
  Synthetic oligonucleotide
tactactggctcagcgcggcagcccaactcggcgcgtgacacctcgagtctctgt

SEQ ID NO: 210116 - DNA, 55 bp, Artificial
  Synthetic oligonucleotide
tcgaacgtgaggatcaaacgttggcgaaccccgtctagctgcgcgtgcctgacac

SEQ ID NO: 210117 - DNA, 55 bp, Artificial
  Synthetic oligonucleotide
tcgcatgccctcacgtaggcacgaagcccattgctcaccagccccagcggaggag

SEQ ID NO: 210118 - DNA, 55 bp, Artificial
  Synthetic oligonucleotide
tcggatcctagcgagcgcgacagaccctgacttttgactcagagggtcggccaaa

SEQ ID NO: 210119 - DNA, 55 bp, Artificial
  Synthetic oligonucleotide
cggaaccgaggagatgatagcagtccatgactcgcggtgtcccaaccatgtgacg

SEQ ID NO: 210120 - DNA, 55 bp, Artificial
  Synthetic oligonucleotide
tctaggtgtccacatggggccggtctaacacgcaggggcgagaccgagcaatctg

SEQ ID NO: 210121 - DNA, 55 bp, Artificial
  Synthetic oligonucleotide
tgacagccttcgtagttctcggacatgggacctgagctcgctccgtgggcaagct

SEQ ID NO: 210122 - DNA, 55 bp, Artificial
  Synthetic oligonucleotide
tttcgacatcccctagacgtgtgggtaattttgggtcaccactattgccagattc

SEQ ID NO: 210123 - DNA, 54 bp, Artificial
  Synthetic oligonucleotide
tcattgcgagtgatggtctgagagcggggcgtcgtatcggtgttcgaaaggtcg

SEQ ID NO: 210124 - DNA, 52 bp, Artificial
  Synthetic oligonucleotide
gagtcaatgcgaacacttgttcgactgttcaattgatggcgtctaggcccgc

SEQ ID NO: 210125 - DNA, 52 bp, Artificial
  Synthetic oligonucleotide
gggtattgcatgagtggatgcccgctctgtctcgctactgttgtgtgatcta

SEQ ID NO: 210126 - DNA, 52 bp, Artificial
  Synthetic oligonucleotide
acaccgagagactgacagccctcgcgcaggcgacagcgggaaatacgaccct

SEQ ID NO: 210127 - DNA, 51 bp, Artificial
  Synthetic oligonucleotide
gcatgaaccaccttcggcttgcataaaggtgaccaggcgttgctcacaaaa

SEQ ID NO: 210128 - DNA, 51 bp, Artificial
  Synthetic oligonucleotide
ccccgatgctgcgctactcctgagcccgtagaggttggtccccatggaacg

SEQ ID NO: 210129 - DNA, 51 bp, Artificial
  Synthetic oligonucleotide
gtgcgttcgagcggcgttgaattgcgaccgtgagctgctctaccccgatta

SEQ ID NO: 210130 - DNA, 55 bp, Artificial
  Synthetic oligonucleotide
cttcgaaacgccgtctttggcggacgagagggagtatgggagcggctgtgatgcg

SEQ ID NO: 210131 - DNA, 51 bp, Artificial
  Synthetic oligonucleotide
acgactcgcgagagccatgccggccaatcgagcctcattgcggagggttct

SEQ ID NO: 210132 - DNA, 50 bp, Artificial
  Synthetic oligonucleotide
acgcgagggcggtatgcgggctagcgtcgattccgctggagtcccatgtc

SEQ ID NO: 210133 - DNA, 50 bp, Artificial
  Synthetic oligonucleotide
acgccccctggaatctgctaactaggctgcgtgactcgtgcgcgcccttt

SEQ ID NO: 210134 - DNA, 50 bp, Artificial
  Synthetic oligonucleotide
acgcccagctttcccgctcatgttgttggtgctccgcgatgtcaatcccc

SEQ ID NO: 210135 - DNA, 50 bp, Artificial
  Synthetic oligonucleotide
acgagacatggacgaacgagcgtggcgcactccgtctgaaccgccgaaag

SEQ ID NO: 210136 - DNA, 50 bp, Artificial
  Synthetic oligonucleotide
aaaggcttcggttgtgagtgtcaggcgaccagcgagtgcgactccggact

SEQ ID NO: 210137 - DNA, 50 bp, Artificial
  Synthetic oligonucleotide
aaattggattgcgcgcatgaggctcctcgcagttgtgaagcatgccccgg

SEQ ID NO: 210138 - DNA, 50 bp, Artificial
  Synthetic oligonucleotide
aacacgagaacacccagggtttttgggggcgttcgcagggcgttagcgaa

SEQ ID NO: 210139 - DNA, 50 bp, Artificial
  Synthetic oligonucleotide
aagagcccgcgttgttactggagagcaccgagggcaaccctgagcggtgt

SEQ ID NO: 210140 - DNA, 50 bp, Artificial
  Synthetic oligonucleotide
aagcgcaagggcccgagggcgactgagggtctgaaagaagcgtgaaacga

SEQ ID NO: 210141 - DNA, 55 bp, Artificial
  Synthetic oligonucleotide
cttcggctacgtgttcgggaccaacctgtttcggatgatgacctggaccgtgcac

SEQ ID NO: 210142 - DNA, 50 bp, Artificial
  Synthetic oligonucleotide
aagcgccccactacactgcgtagatggagccacgtcgacggtcggataga

SEQ ID NO: 210143 - DNA, 50 bp, Artificial
  Synthetic oligonucleotide
aaggcgcgagtaccctcaccgcccgacttgaggatcaggccgctaacaag

SEQ ID NO: 210144 - DNA, 50 bp, Artificial
  Synthetic oligonucleotide
aagtccgcgccatcattacgcttcgtcgcaccccgtcggagaccctagca

SEQ ID NO: 210145 - DNA, 50 bp, Artificial
  Synthetic oligonucleotide
aatcgccccgcgagactggagggtcgttcagggggccctatgagcactct

SEQ ID NO: 210146 - DNA, 50 bp, Artificial
  Synthetic oligonucleotide
aatcgcgaccccaaagcccgctatgatgtccgccgatggaggtgggcggg

SEQ ID NO: 210147 - DNA, 50 bp, Artificial
  Synthetic oligonucleotide
acacggcccaacgccgggtcgggatacgcaaatccatggcgcgattctat

SEQ ID NO: 210148 - DNA, 50 bp, Artificial
  Synthetic oligonucleotide
acacgtcctccaatccacggagcgctcatgttcgccccagactccgaggt

SEQ ID NO: 210149 - DNA, 50 bp, Artificial
  Synthetic oligonucleotide
accagcccttcgtcaggttttcgcagacgccacgcgaccgtgcgtgagtc

SEQ ID NO: 210150 - DNA, 50 bp, Artificial
  Synthetic oligonucleotide
accaggaggcagcgaatccgggccatttggacacgggagcggagtctgcg

SEQ ID NO: 210151 - DNA, 50 bp, Artificial
  Synthetic oligonucleotide
acgacggtcgagggtaccgtcctctgcgacgtgtaggggctctgtgcacg

SEQ ID NO: 210152 - DNA, 55 bp, Artificial
  Synthetic oligonucleotide
gactcaggacaaatcgaagccacatcgctgaagcaaactcgcagctctcgggctc

SEQ ID NO: 210153 - DNA, 50 bp, Artificial
  Synthetic oligonucleotide
acgaccactggtgagcggtgcttcccagaccaccacgagcgggcttaggt

SEQ ID NO: 210154 - DNA, 50 bp, Artificial
  Synthetic oligonucleotide
acctgaagccacctcttgcgacaaggcgcgagctagggtcctgcgggata

SEQ ID NO: 210155 - DNA, 50 bp, Artificial
  Synthetic oligonucleotide
acctctcccgacccacttgtcaacgcgggcgagctaccatgagccgtgtt

SEQ ID NO: 210156 - DNA, 50 bp, Artificial
  Synthetic oligonucleotide
acctcgtatgggcgcggagccactcatgttccgctactcattcgcgcgag

SEQ ID NO: 210157 - DNA, 50 bp, Artificial
  Synthetic oligonucleotide
acctcgccttcttcacagacgcgaagtccctgcccccgtagtagctcccg

SEQ ID NO: 210158 - DNA, 50 bp, Artificial
  Synthetic oligonucleotide
accgtgtgcacgggttggaggtcgcgatagctgaggaggcgtctcgctgt

SEQ ID NO: 210159 - DNA, 50 bp, Artificial
  Synthetic oligonucleotide
accgggccaccacacctggcggtcctgcttgggatagcatcgacccgtgc

SEQ ID NO: 210160 - DNA, 50 bp, Artificial
  Synthetic oligonucleotide
accgatgcaaatggcgtttggcgcgtacgcacactccgacgtgaccaggc

SEQ ID NO: 210161 - DNA, 50 bp, Artificial
  Synthetic oligonucleotide
accgagcggtcagtttcgcatcagagggtcggccagaacgagtcctgtcc

SEQ ID NO: 210162 - DNA, 50 bp, Artificial
  Synthetic oligonucleotide
accctagcacggacgttaacaaagcgagcgagggacctgggtgggtcccc

SEQ ID NO: 210163 - DNA, 55 bp, Artificial
  Synthetic oligonucleotide
cctgcccaggatgaaacggataccgattctgctcctcacgcttctaccccttgcc

SEQ ID NO: 210164 - DNA, 50 bp, Artificial
  Synthetic oligonucleotide
acccgtgaaggacaaaaccgggtacgctcaggcctcgtcacagagggtgc

SEQ ID NO: 210165 - DNA, 50 bp, Artificial
  Synthetic oligonucleotide
acccgctcacaggtgacgcagcgcttggactgggtacagctcgtgcactc

SEQ ID NO: 210166 - DNA, 50 bp, Artificial
  Synthetic oligonucleotide
acccccttgcccctgttgtgcccgtcgtcgtgcggagattgttggctccg

SEQ ID NO: 210167 - DNA, 50 bp, Artificial
  Synthetic oligonucleotide
accatgagcccctcccttgtatcacccctcgacgctctctagctccgcga

SEQ ID NO: 210168 - DNA, 50 bp, Artificial
  Synthetic oligonucleotide
accatcggcgcaaacggtgacgtagccgccagcttccatgcaggtccatg

SEQ ID NO: 210169 - DNA, 55 bp, Artificial
  Synthetic oligonucleotide
cccgtcttgggtagcagtcggattcgaggttccgagcgacacacgccttacacgg

SEQ ID NO: 210170 - DNA, 55 bp, Artificial
  Synthetic oligonucleotide
gccttccatcaattcgcggagatcgccgtgagtcggcgcttgtaccgcgacggga

SEQ ID NO: 210171 - DNA, 55 bp, Artificial
  Synthetic oligonucleotide
gcgcctatgaccacagaccgacctggagtccgtctttcgtgagaatcaggtgccc

SEQ ID NO: 210172 - DNA, 58 bp, Artificial
  Synthetic oligonucleotide
atataggtatcttggggtactcctccagctccaagcactacggctggtgattaaacag

SEQ ID NO: 210173 - DNA, 54 bp, Artificial
  Synthetic oligonucleotide
ccgctgttgtaatagaggataaccctaaatcatctaaaacggttatggtggtac

SEQ ID NO: 210174 - DNA, 50 bp, Artificial
  Synthetic oligonucleotide
ataattcacgaattttagtgatcattggtaaggcatactcagctatcata

SEQ ID NO: 210175 - DNA, 59 bp, Artificial
  Synthetic oligonucleotide
cctaggaaattgcaactaactactagtatagtaccacctatcaaattcgcacagacagc

SEQ ID NO: 210176 - DNA, 60 bp, Artificial
  Synthetic oligonucleotide
cctgctaccctttggatattacggctatggtttactacatcactccacaactctctgtga

SEQ ID NO: 210177 - DNA, 57 bp, Artificial
  Synthetic oligonucleotide
ggccaaagcaaaaagagatgatcggtcttggtagcaatcaaaacttcgtcaccgccg

SEQ ID NO: 210178 - DNA, 56 bp, Artificial
  Synthetic oligonucleotide
cgatatctataatgacctttttccgatattcccattctagccgacggtttttgatc

SEQ ID NO: 210179 - DNA, 58 bp, Artificial
  Synthetic oligonucleotide
gctagctgaactcttcaattgaacgtattttgtgtacaagggttgatattacgtctta

SEQ ID NO: 210180 - DNA, 60 bp, Artificial
  Synthetic oligonucleotide
ctttgcctaatctacgtgttttctctggtcgaggtgtgcagctaatctacttgatacatg

SEQ ID NO: 210181 - DNA, 60 bp, Artificial
  Synthetic oligonucleotide
gacgtaagagtggctatttcgatttgcgactgttggatggtacaaaaattcatgcttcag

SEQ ID NO: 210182 - DNA, 56 bp, Artificial
  Synthetic oligonucleotide
aaacagaaaagtcttttgtgcccccaggtgcttgaatagtaataactagattatca

SEQ ID NO: 210183 - DNA, 56 bp, Artificial
  Synthetic oligonucleotide
aaatacgagagataatatctacaaatcccgccctgacgaaataggtaacaagtcaa

SEQ ID NO: 210184 - DNA, 53 bp, Artificial
  Synthetic oligonucleotide
gtctggttagctaccgctaaccgaagggttggacagtaccctaaggatcttcc

SEQ ID NO: 210185 - DNA, 60 bp, Artificial
  Synthetic oligonucleotide
ttgcaactaactactagtatagtaccacctatcaaattcgcacagacagctagtataggg

SEQ ID NO: 210186 - DNA, 60 bp, Artificial
  Synthetic oligonucleotide
tgcctgaacgtatggtgattagagatacacgaagtgctgaaaggtatacggataagtata

SEQ ID NO: 210187 - DNA, 57 bp, Artificial
  Synthetic oligonucleotide
acccttagttgactagcctaagcactgtgagtgctacgttacccgtgaatatatagg

SEQ ID NO: 210188 - DNA, 54 bp, Artificial
  Synthetic oligonucleotide
agctgctaaggcggtaggaataaaggaaagggtcgggactcatactttgaggaa

SEQ ID NO: 210189 - DNA, 57 bp, Artificial
  Synthetic oligonucleotide
tatacgaaagcgataattacactcaaccagtaaatttaggagtagacgctggtacta

SEQ ID NO: 210190 - DNA, 54 bp, Artificial
  Synthetic oligonucleotide
taccacccctgttagtcttaaggcagacaatagcgggtggatcaggaaaaaggt

SEQ ID NO: 210191 - DNA, 59 bp, Artificial
  Synthetic oligonucleotide
acacaagtcaatatttataagctttcgccagcaagataagtgcgtagtacatcggtacg

SEQ ID NO: 210192 - DNA, 55 bp, Artificial
  Synthetic oligonucleotide
ggtactaagcacgttgggttatctgcaacaacaggaaacgaagtattgtttgaag

SEQ ID NO: 210193 - DNA, 55 bp, Artificial
  Synthetic oligonucleotide
ataacggtctattacccattcaattggagatttacctcctacttggtactcataa

SEQ ID NO: 210194 - DNA, 58 bp, Artificial
  Synthetic oligonucleotide
attgcatttataatattggagacattaaattaaggaggtatatttatgttgttagctc

SEQ ID NO: 210195 - DNA, 60 bp, Artificial
  Synthetic oligonucleotide
caaaaaggtggaccgattagtcgcgaacatgcttatagagtaatcaatgaagctgctaag

SEQ ID NO: 210196 - DNA, 57 bp, Artificial
  Synthetic oligonucleotide
attagttgatatggtatgcagtatcctgccagtttccaatattaaggtagaagttgc

SEQ ID NO: 210197 - DNA, 56 bp, Artificial
  Synthetic oligonucleotide
cgggaagagagtccagtagatttccccaaatctacatcaagggactctctttctcg

SEQ ID NO: 210198 - DNA, 56 bp, Artificial
  Synthetic oligonucleotide
ctcttactaatccagtcatggttctcatttggtattatttgctcccatttaactcc

SEQ ID NO: 210199 - DNA, 54 bp, Artificial
  Synthetic oligonucleotide
ccgtaaagctaataaagcaccgtatttggtcaagggcttccgactattcgataa

SEQ ID NO: 210200 - DNA, 51 bp, Artificial
  Synthetic oligonucleotide
ccctttggggcagaccccaaaaccttaggaagtcaatcaattcttcgttta

SEQ ID NO: 210201 - DNA, 50 bp, Artificial
  Synthetic oligonucleotide
tatctaattgaataattgtaaacccgggggatttcgattttgtccccccc

SEQ ID NO: 210202 - DNA, 55 bp, Artificial
  Synthetic oligonucleotide
gcgaatgggtaggcagagttttgactcgagtagctgtcatggaacttttagcact

SEQ ID NO: 210203 - DNA, 55 bp, Artificial
  Synthetic oligonucleotide
gccggtagttgaatttcccatctatgggcagcagacatactccatactgacggac

SEQ ID NO: 210204 - DNA, 55 bp, Artificial
  Synthetic oligonucleotide
gcacatcctgaatacgacggccctcgttctacttggtccgataatattgtgggag

SEQ ID NO: 210205 - DNA, 55 bp, Artificial
  Synthetic oligonucleotide
gtgaatcgcctatggcaagatctgttaggttaacgtttggagtaggaccatacgg

SEQ ID NO: 210206 - DNA, 60 bp, Artificial
  Synthetic oligonucleotide
caagtgcaactcagctaaccttcttccagcgtcactaaatgatctaaagtcttcggttga

SEQ ID NO: 210207 - DNA, 55 bp, Artificial
  Synthetic oligonucleotide
gcgagtcccttgccaccgacaaacaactctttaatgtcctcggaaatttcttcag

SEQ ID NO: 210208 - DNA, 55 bp, Artificial
  Synthetic oligonucleotide
gtgtgaatgtgaatattgcctttatagacatacatcctgtgtcaccgccaaaccg

SEQ ID NO: 210209 - DNA, 55 bp, Artificial
  Synthetic oligonucleotide
gcttacttttcttgaaactgccgttcctagtgcttccgcacctccagtacgctga

SEQ ID NO: 210210 - DNA, 55 bp, Artificial
  Synthetic oligonucleotide
ggaactagtatttcattctaaacgagaaacagccgtagtcagaggccacttaggg

SEQ ID NO: 210211 - DNA, 55 bp, Artificial
  Synthetic oligonucleotide
ggaattacgcaggagcagttggctagagaagtcgatgtctccctgaacaccatta

SEQ ID NO: 210212 - DNA, 55 bp, Artificial
  Synthetic oligonucleotide
gatgatcggtcttggtagcaatcaaaacttcgtcaccgccgttgttttgactttg

SEQ ID NO: 210213 - DNA, 55 bp, Artificial
  Synthetic oligonucleotide
ggatacatagctggaaagtccgacttagtagagcgtgtttcctatgaactgactg

SEQ ID NO: 210214 - DNA, 55 bp, Artificial
  Synthetic oligonucleotide
ggcacaacacgttctcttccaccttttgttcctctatcgaccggcattactcctg

SEQ ID NO: 210215 - DNA, 55 bp, Artificial
  Synthetic oligonucleotide
ggcatcactaatacgaatgtcaactttacaataaccctggtctttcggaccaggg

SEQ ID NO: 210216 - DNA, 55 bp, Artificial
  Synthetic oligonucleotide
ttacgacaaattgttccgagttggccctgatatggaattgaggccctggatggct

SEQ ID NO: 210217 - DNA, 59 bp, Artificial
  Synthetic oligonucleotide
ggttagaacaaatgaaagcatgggatccaaaaacaggatattcagaatcccgtcatgaa

SEQ ID NO: 210218 - DNA, 55 bp, Artificial
  Synthetic oligonucleotide
gttcacgttctatggcccattgttcaccgggaatagtttcgcagatcactctgat

SEQ ID NO: 210219 - DNA, 55 bp, Artificial
  Synthetic oligonucleotide
ggctgtaggctaatatgctgattcgtggttgcattataagagtgtccccgtgctc

SEQ ID NO: 210220 - DNA, 55 bp, Artificial
  Synthetic oligonucleotide
tgaaagttaagttaatatcatgttgtggtacaggtgacggatcccaaaacctgtc

SEQ ID NO: 210221 - DNA, 55 bp, Artificial
  Synthetic oligonucleotide
gggacaggttaacagataggctttctctggcagcattgtaaagcatgtccacctt

SEQ ID NO: 210222 - DNA, 55 bp, Artificial
  Synthetic oligonucleotide
gtcactgaaggagatactccgtcccatcaagataagccggaagttgttctagtca

SEQ ID NO: 210223 - DNA, 55 bp, Artificial
  Synthetic oligonucleotide
tcagcagcgtagatttcctctgttggatactgatggttagctacatatgcttcgc

SEQ ID NO: 210224 - DNA, 55 bp, Artificial
  Synthetic oligonucleotide
ggtgttagtgccaggaccggtcatgtatcaggactcaacaataattatgatcccg

SEQ ID NO: 210225 - DNA, 55 bp, Artificial
  Synthetic oligonucleotide
gtttacagcactcatgatgttgacctaacttatgcatgggctgacgaagtggtta

SEQ ID NO: 210226 - DNA, 55 bp, Artificial
  Synthetic oligonucleotide
tactccaccctgtactactgtaaagttctgttcgcgaatactgtccactatcagc

SEQ ID NO: 210227 - DNA, 55 bp, Artificial
  Synthetic oligonucleotide
ccctacattactactaccgggaatagaagtcccgccagtatgcatcatcaccttc

SEQ ID NO: 210228 - DNA, 51 bp, Artificial
  Synthetic oligonucleotide
cacagtagaactaggttttaacgtgggaagggaactaggtggaagacaccc

SEQ ID NO: 210229 - DNA, 55 bp, Artificial
  Synthetic oligonucleotide
agcactgtgagtgctacgttacccgtgaatatataggtatcttggggtactcctc

SEQ ID NO: 210230 - DNA, 55 bp, Artificial
  Synthetic oligonucleotide
cccttgacagcggcagtatatatcgatgtatcaaaggatgaattgatagatagac

SEQ ID NO: 210231 - DNA, 53 bp, Artificial
  Synthetic oligonucleotide
ccgctaaccgaagggttggacagtaccctaaggatcttcctcgccaatacgag

SEQ ID NO: 210232 - DNA, 55 bp, Artificial
  Synthetic oligonucleotide
cctgtgcttgtgacacaacatcaatcgagtgatatgtagaaacaacaaccgccat

SEQ ID NO: 210233 - DNA, 55 bp, Artificial
  Synthetic oligonucleotide
actcaaccagtaaatttaggagtagacgctggtactaagcacgttgggttatctg

SEQ ID NO: 210234 - DNA, 55 bp, Artificial
  Synthetic oligonucleotide
cgagataacgatctaacgcatctagtgcaaagggttctgactgcaataggacaac

SEQ ID NO: 210235 - DNA, 53 bp, Artificial
  Synthetic oligonucleotide
acgtgggaagggaactaggtggaagacaccccgctgttgtaatagaggataac

SEQ ID NO: 210236 - DNA, 55 bp, Artificial
  Synthetic oligonucleotide
cggcttaggtgcagatttgaaacctgggctccatcatcccgatatgagttttgac

SEQ ID NO: 210237 - DNA, 55 bp, Artificial
  Synthetic oligonucleotide
caatagttttgacagctgaatccgcatggctgttaattctctacgccattatgca

SEQ ID NO: 210238 - DNA, 55 bp, Artificial
  Synthetic oligonucleotide
cgtcagtttgcaaccctatcactggaaccccttgagtctctaagtattctagggt

SEQ ID NO: 210239 - DNA, 55 bp, Artificial
  Synthetic oligonucleotide
catggactcctcttggagatacaactattatactaggtggcaaaggtaagttttt

SEQ ID NO: 210240 - DNA, 55 bp, Artificial
  Synthetic oligonucleotide
ctattggatgactctccacactcccctgacagttaccgaaaggtaccgacacagt

SEQ ID NO: 210241 - DNA, 55 bp, Artificial
  Synthetic oligonucleotide
ctcctaaactttcgctatctggaccttctatatcaccttcaccatgaatcgatgc

SEQ ID NO: 210242 - DNA, 55 bp, Artificial
  Synthetic oligonucleotide
ctctaagagaggttacttcaccagagcccggtattgtcagctataatatagacgg

SEQ ID NO: 210243 - DNA, 55 bp, Artificial
  Synthetic oligonucleotide
ctctttgattaacttcaggcgttactattatccacgggtatccgtctaactggta

SEQ ID NO: 210244 - DNA, 55 bp, Artificial
  Synthetic oligonucleotide
aattgttgcgtcagaattgcctttgtcttgctggtatttaacaaagctggcaacg

SEQ ID NO: 210245 - DNA, 55 bp, Artificial
  Synthetic oligonucleotide
ctgctgctacgtccttagcccaagtttccaaataaccacgatcacctacacgctc

SEQ ID NO: 210246 - DNA, 55 bp, Artificial
  Synthetic oligonucleotide
aaggtacgtgctccgggcctgagtacatccgctcaagttcagatcggaatcctcc

SEQ ID NO: 210247 - DNA, 55 bp, Artificial
  Synthetic oligonucleotide
caagacggcctgtaggataaaggtagcattcatgcttatccagacaccagttgac

SEQ ID NO: 210248 - DNA, 54 bp, Artificial
  Synthetic oligonucleotide
agttgggtgtaagtagagaacaggtacatagactcttaaaagacttggaggatg

SEQ ID NO: 210249 - DNA, 54 bp, Artificial
  Synthetic oligonucleotide
tcatgataccggctggggtacatggagtaaacctcttttgtccaatggtaaggt

SEQ ID NO: 210250 - DNA, 55 bp, Artificial
  Synthetic oligonucleotide
cccacgctggtattgaatgaaacggggccggcaccaagtggtgttcagactttta

SEQ ID NO: 210251 - DNA, 54 bp, Artificial
  Synthetic oligonucleotide
acactggctcctcccccggcatctaggaagttggcagctttcccaccgtactgt

SEQ ID NO: 210252 - DNA, 54 bp, Artificial
  Synthetic oligonucleotide
aagactatgggagtttttgcccccacaacaaggcctgccatggtagcgccccct

SEQ ID NO: 210253 - DNA, 54 bp, Artificial
  Synthetic oligonucleotide
atctctgccttgcatctgagtactgtgctcccggggtgctagcttgttgggcga

SEQ ID NO: 210254 - DNA, 54 bp, Artificial
  Synthetic oligonucleotide
gaacgtattttgtgtacaagggttgatattacgtcttaacgagcaaacagtcga

SEQ ID NO: 210255 - DNA, 53 bp, Artificial
  Synthetic oligonucleotide
ttgggccgataaccccgccgtaagtggcccttctacagctcacaaacgggatt

SEQ ID NO: 210256 - DNA, 53 bp, Artificial
  Synthetic oligonucleotide
ttccaccgtgttcacctggtgtaccgcagggaatagcctgatccccctctgga

SEQ ID NO: 210257 - DNA, 53 bp, Artificial
  Synthetic oligonucleotide
gaaactgcacgtttaagtggagcattaatattctcatcctttatacggccact

SEQ ID NO: 210258 - DNA, 53 bp, Artificial
  Synthetic oligonucleotide
ctgccatacacaaacgagaacgctgggctagagctccaccaaccagtcccgct

SEQ ID NO: 210259 - DNA, 53 bp, Artificial
  Synthetic oligonucleotide
ggagtgcacgcatggccgaggtaccaatagtggttccagcactaccaccgaga

SEQ ID NO: 210260 - DNA, 53 bp, Artificial
  Synthetic oligonucleotide
tccctgcgctcctgggaattcataccgtggacaattaaacctacttctagtcc

SEQ ID NO: 210261 - DNA, 55 bp, Artificial
  Synthetic oligonucleotide
ggtcggtagaccctaatgggatatcggatgagagtccgccgttaggcggactacc

SEQ ID NO: 210262 - DNA, 53 bp, Artificial
  Synthetic oligonucleotide
tcccggaccctactagcggcaaaactaaagtcgcccaagctttgtcccatggc

SEQ ID NO: 210263 - DNA, 53 bp, Artificial
  Synthetic oligonucleotide
ggatttcctcaaggcatcttgtacggcgtccatccatcgctccgcgctaccgg

SEQ ID NO: 210264 - DNA, 53 bp, Artificial
  Synthetic oligonucleotide
cgatattggacacgcggattcaataatctctgtttcgataaaaaggctcttcg

SEQ ID NO: 210265 - DNA, 53 bp, Artificial
  Synthetic oligonucleotide
agaggaaaatcgaaagattctattttgaacgttcatcatatccgaagcagaca

SEQ ID NO: 210266 - DNA, 53 bp, Artificial
  Synthetic oligonucleotide
aggccggtaaaccttctacaaccatccctgacctggcccatcctggtaggcca

SEQ ID NO: 210267 - DNA, 52 bp, Artificial
  Synthetic oligonucleotide
tcataatctgttgattgaatccctcgattttcatcgtcttgccaagcaaacc

SEQ ID NO: 210268 - DNA, 52 bp, Artificial
  Synthetic oligonucleotide
ttaccttggggttactgtccctaggagtagttagagagctattcggtaaagg

SEQ ID NO: 210269 - DNA, 51 bp, Artificial
  Synthetic oligonucleotide
ggccggcgctgcagatgtgagtctactgggggttacaatggaagaagggct

SEQ ID NO: 210270 - DNA, 51 bp, Artificial
  Synthetic oligonucleotide
acttcaaaaacgtctgctacgctttcaaaactaagggaaacaggattctgt

SEQ ID NO: 210271 - DNA, 51 bp, Artificial
  Synthetic oligonucleotide
ccaagggagctcgtcctcgtactgtaactgttagaaaagattatgagagtt

SEQ ID NO: 210272 - DNA, 59 bp, Artificial
  Synthetic oligonucleotide
tagtcaagacttagcaggtaatgaaatgattcagccaatttacggagtaaatggaactc

SEQ ID NO: 210273 - DNA, 53 bp, Artificial
  Synthetic oligonucleotide
cgttacgacggggaaaagctacgtatatgaaaactactccacaaaagacgatc

SEQ ID NO: 210274 - DNA, 55 bp, Artificial
  Synthetic oligonucleotide
gtgttggagctaagcggacttaccgaaggcagggagtttgaaagggaagtgagtc

SEQ ID NO: 210275 - DNA, 53 bp, Artificial
  Synthetic oligonucleotide
ctaaaacacaaagtgtggcttactgaaagaggtacgacgttcggatacggaaa

SEQ ID NO: 210276 - DNA, 55 bp, Artificial
  Synthetic oligonucleotide
ctgctcttgaaagaggtgttattgacgcaactgaatgggtaggacctgctcttga

SEQ ID NO: 210277 - DNA, 55 bp, Artificial
  Synthetic oligonucleotide
gaccttccgttgtacccaaatcaagtgtcgtaccacttcctatatgcgcgtcaag

SEQ ID NO: 210278 - DNA, 55 bp, Artificial
  Synthetic oligonucleotide
gagcgtcgtgtgctctgttgctgtcaagccagaatacaattggaagaccactgtc

SEQ ID NO: 210279 - DNA, 55 bp, Artificial
  Synthetic oligonucleotide
gctaagcggggaacacggtataggtatcagtaaggctccgtttatgaaacttgcc

SEQ ID NO: 210280 - DNA, 55 bp, Artificial
  Synthetic oligonucleotide
ggtcctccatcatatgcacacgcaccgattgcaacaacgtatctcggttctggca

SEQ ID NO: 210281 - DNA, 55 bp, Artificial
  Synthetic oligonucleotide
ggttatgcctcttgccgcgcctatcggaagcggacttggcgttcaaaacagatac

SEQ ID NO: 210282 - DNA, 55 bp, Artificial
  Synthetic oligonucleotide
aagttgctcacggataatgcaatagcggtagtggggcatatcgggcttatgccgc

SEQ ID NO: 210283 - DNA, 56 bp, Artificial
  Synthetic oligonucleotide
ggtcccgcagtcggaagtagggcactaagccttacgggcgctattataatcgccgc

SEQ ID NO: 210284 - DNA, 55 bp, Artificial
  Synthetic oligonucleotide
ttactactacctgagtgttttgtaaggcttgaagcaataagtccaccagtgcaac

SEQ ID NO: 210285 - DNA, 53 bp, Artificial
  Synthetic oligonucleotide
accttgacaaccctgtaatcgaaggcggaacggtagccgatagaattaaagac

SEQ ID NO: 210286 - DNA, 55 bp, Artificial
  Synthetic oligonucleotide
caggtaatgaaatgattcagccaatttacggagtaaatggaactccaagtgcatg

SEQ ID NO: 210287 - DNA, 55 bp, Artificial
  Synthetic oligonucleotide
ccattccgtatacatgttttacaccggtcatggctttaagcgttctttcaagcgg

SEQ ID NO: 210288 - DNA, 55 bp, Artificial
  Synthetic oligonucleotide
cccattgccggatctgtaagagtagcgagttcgcttacgactccacccgcaatca

SEQ ID NO: 210289 - DNA, 54 bp, Artificial
  Synthetic oligonucleotide
cccggaatttagttcaagcgaggttacttacgtacctttatacggagcgcagca

SEQ ID NO: 210290 - DNA, 55 bp, Artificial
  Synthetic oligonucleotide
ccgccccgatgatgctaagagatccgatatttgaagcgaatgtttccactattga

SEQ ID NO: 210291 - DNA, 52 bp, Artificial
  Synthetic oligonucleotide
cctacgcacccgccctgtaattgaacgaaaacgatcggttttcttacgtcta

SEQ ID NO: 210292 - DNA, 54 bp, Artificial
  Synthetic oligonucleotide
cccgccgttgtaaaactaacgaccagattgtccccgtatctgtcaactataaga

SEQ ID NO: 210293 - DNA, 54 bp, Artificial
  Synthetic oligonucleotide
tcttcctgctatatcgtgaattgctctatttaatgggtcaatgatagcatacaa

SEQ ID NO: 210294 - DNA, 55 bp, Artificial
  Synthetic oligonucleotide
gaagtagattaccctaagcgtctacacgcttagttcgttggttatactgttagga

SEQ ID NO: 210295 - DNA, 54 bp, Artificial
  Synthetic oligonucleotide
gacccgcttccgcctatcgctccactgtccgcccatacggctctgaagtcaagt

SEQ ID NO: 210296 - DNA, 54 bp, Artificial
  Synthetic oligonucleotide
ccggccgtccaagccataagtgtcgtaatatccccgaacggtgaccaagcaccc

SEQ ID NO: 210297 - DNA, 54 bp, Artificial
  Synthetic oligonucleotide
aggggaggagtgccgttaagaaaacgaccactgcttatcgtttttaggctcaca

SEQ ID NO: 210298 - DNA, 54 bp, Artificial
  Synthetic oligonucleotide
cgatatcaagaagtgagtttcctccaagtctgttcgcaccatgtacgcttacac

SEQ ID NO: 210299 - DNA, 53 bp, Artificial
  Synthetic oligonucleotide
tccttggacgggttgcaagcatttgcttgttaatggggagggaggctaaaccc

SEQ ID NO: 210300 - DNA, 53 bp, Artificial
  Synthetic oligonucleotide
ccgactttaaacattcctccgcttggcgcttctttgaggttgactcgctcgcc

SEQ ID NO: 210301 - DNA, 53 bp, Artificial
  Synthetic oligonucleotide
tgtaattaatccctatctctccaattccatcgcatgtagaccctactccaaat

SEQ ID NO: 210302 - DNA, 53 bp, Artificial
  Synthetic oligonucleotide
agtataggcggtaactttgaaaactccctaaacgacgtgtacgtatcacagac

SEQ ID NO: 210303 - DNA, 53 bp, Artificial
  Synthetic oligonucleotide
cggcaacttcactcgctacttcgtcactcaccagatcagcttttatagcggtt

SEQ ID NO: 210304 - DNA, 53 bp, Artificial
  Synthetic oligonucleotide
tagaagaatcgaagccgttgcgggattcggtgcgtacagatacgccaaagggt

SEQ ID NO: 210305 - DNA, 56 bp, Artificial
  Synthetic oligonucleotide
gagaaatacaaagaggacaagtcattaattacctctactccctggcttaataggac

SEQ ID NO: 210306 - DNA, 52 bp, Artificial
  Synthetic oligonucleotide
tacggcggggcatttggaagtagctcctatgactacgattgccgcaagggga

SEQ ID NO: 210307 - DNA, 52 bp, Artificial
  Synthetic oligonucleotide
cgttactatcgaggccactaaacattatatgagcgtgccaatttacgtgttt

SEQ ID NO: 210308 - DNA, 52 bp, Artificial
  Synthetic oligonucleotide
atgccactgaaaatccgtcaatgacgggtactactgcatattcgtttaacgg

SEQ ID NO: 210309 - DNA, 51 bp, Artificial
  Synthetic oligonucleotide
tagtgaagccctattatttgaatcactgcttgcatctgaatagaataacca

SEQ ID NO: 210310 - DNA, 51 bp, Artificial
  Synthetic oligonucleotide
ttacagcggcatcgtgaggtgttataacttcacaactctcagctacaatac

SEQ ID NO: 210311 - DNA, 51 bp, Artificial
  Synthetic oligonucleotide
ttccatccctcacccggaggcacgacatctatgtgcccgccgaaacacaag

SEQ ID NO: 210312 - DNA, 51 bp, Artificial
  Synthetic oligonucleotide
taaaactattgcggctgcgtaattaagaccgcctcctataaggattacgtc

SEQ ID NO: 210313 - DNA, 51 bp, Artificial
  Synthetic oligonucleotide
acagtagatttcataactcctgtaattgatgacccatatatttacggacaa

SEQ ID NO: 210314 - DNA, 50 bp, Artificial
  Synthetic oligonucleotide
ggatcggtattccatccctcacccggaggcacgacatctatgtgcccgcc

SEQ ID NO: 210315 - DNA, 50 bp, Artificial
  Synthetic oligonucleotide
cttccaagttccacggctttaagaccgtaagtaccgaatgccagagtact

SEQ ID NO: 210316 - DNA, 58 bp, Artificial
  Synthetic oligonucleotide
tcccgcagcttccgccgcacttttcggttcgaccttattgataagcacaccatggtct

SEQ ID NO: 210317 - DNA, 50 bp, Artificial
  Synthetic oligonucleotide
ctgaagctgcagcgtttctttaacggcacatgtgtagttgtaaaacttta

SEQ ID NO: 210318 - DNA, 50 bp, Artificial
  Synthetic oligonucleotide
attcttggggtttaccctcagcatgattacaaagaggtgtatggttgtgt

SEQ ID NO: 210319 - DNA, 50 bp, Artificial
  Synthetic oligonucleotide
acccttgccgaggctcttagaatctatccgaaactgacggttcttacccc

SEQ ID NO: 210320 - DNA, 50 bp, Artificial
  Synthetic oligonucleotide
aaacactcatgtccagtgcgagtattaattgaagtaaatccagctggaca

SEQ ID NO: 210321 - DNA, 57 bp, Artificial
  Synthetic oligonucleotide
gccgctaagtatccagcaggaagtaatactaattcactcggtactggaataaaagta

SEQ ID NO: 210322 - DNA, 56 bp, Artificial
  Synthetic oligonucleotide
ctcacggtgcaaggcctcacgagggtgttgacgcgatacttacggcttcaatggcc

SEQ ID NO: 210323 - DNA, 56 bp, Artificial
  Synthetic oligonucleotide
gacccaagcacaactattagcacggattgtgggtcaatatatggtccaacacctac

SEQ ID NO: 210324 - DNA, 55 bp, Artificial
  Synthetic oligonucleotide
cggcacagattatgcacggtgcggaatatgacgtatttatgtccgctaatatgaa

SEQ ID NO: 210325 - DNA, 56 bp, Artificial
  Synthetic oligonucleotide
ctaagataaatctaacgtcaatacttacagctactagcaatttacccctttgccaa

SEQ ID NO: 210326 - DNA, 60 bp, Artificial
  Synthetic oligonucleotide
cgtctcttgatgcaaacgcctgtcgcactcgattttgtgttgtctgcgttcttcactcct

SEQ ID NO: 210327 - DNA, 60 bp, Artificial
  Synthetic oligonucleotide
tgctgcactgacagattccacgccctcgacgggactctttgaccgagccggcatgcgcta

SEQ ID NO: 210328 - DNA, 51 bp, Artificial
  Synthetic oligonucleotide
tgtagccaacgtcagcaccgcaggcggagtgactaccgtgaagttcgatac

SEQ ID NO: 210329 - DNA, 51 bp, Artificial
  Synthetic oligonucleotide
ttgggagttggggcgattacagacagcgcggtaaacccggtaacctatgcg

SEQ ID NO: 210330 - DNA, 51 bp, Artificial
  Synthetic oligonucleotide
tgctgcgaggtccccatggtttctcaagacgtttccctgcttgccagtgtc

SEQ ID NO: 210331 - DNA, 51 bp, Artificial
  Synthetic oligonucleotide
aagcgtcgattcacgaactcacaccagccgccgtaacaggcacgttgacga

SEQ ID NO: 210332 - DNA, 51 bp, Artificial
  Synthetic oligonucleotide
ttgtcgcccctccgtttgaaaaccacagcccgctgacttggtatcaggcgg

SEQ ID NO: 210333 - DNA, 51 bp, Artificial
  Synthetic oligonucleotide
ggcgtagttggctacaccggataccggcatagaggtggcgcgtttgtcgcc

SEQ ID NO: 210334 - DNA, 51 bp, Artificial
  Synthetic oligonucleotide
aatcccaaacgctgcgaacgcaatgccacttgttgcgcggattcttcgccc

SEQ ID NO: 210335 - DNA, 51 bp, Artificial
  Synthetic oligonucleotide
tgccctccatttctgcgggcgttttaaacaattcacagcgttgggtcatct

SEQ ID NO: 210336 - DNA, 51 bp, Artificial
  Synthetic oligonucleotide
ggggcaggctgcacgtcgtggcatagattcctgtccacccgcccatttcag

SEQ ID NO: 210337 - DNA, 51 bp, Artificial
  Synthetic oligonucleotide
tttactgaactgggggtagtgcgctttatatgtctccgggtgcactcggtt

SEQ ID NO: 210338 - DNA, 58 bp, Artificial
  Synthetic oligonucleotide
tgcgtaaaatttgatatattacgtaaatacgcaccaatggagatacgtaaatggctaa

SEQ ID NO: 210339 - DNA, 51 bp, Artificial
  Synthetic oligonucleotide
ggcgttcgattttggggcgaatgttatggttgtcgtacaaaccttttgcat

SEQ ID NO: 210340 - DNA, 51 bp, Artificial
  Synthetic oligonucleotide
agcgcactcgtctatgttccgtctgataacctaatatcttgtccgatgtct

SEQ ID NO: 210341 - DNA, 51 bp, Artificial
  Synthetic oligonucleotide
gattgtcggtgtaggcataaaagacgcataccgcgccattcaaaccgatag

SEQ ID NO: 210342 - DNA, 51 bp, Artificial
  Synthetic oligonucleotide
cccgattcaccttaaccgctctggctttgacttctgctctcgcattcagca

SEQ ID NO: 210343 - DNA, 51 bp, Artificial
  Synthetic oligonucleotide
cagattggtagttatgcggaggtctccctctcagaagctcggcgtaccgca

SEQ ID NO: 210344 - DNA, 51 bp, Artificial
  Synthetic oligonucleotide
gaccggtcctgctgttataatcgatcgcttgagattcgaaccagggacccc

SEQ ID NO: 210345 - DNA, 51 bp, Artificial
  Synthetic oligonucleotide
acatcggcatctcgagcggcaacatgaccgtcctggcaggcgcatcctatt

SEQ ID NO: 210346 - DNA, 51 bp, Artificial
  Synthetic oligonucleotide
gaacagggtgaaatccggctgagtgccgacaatgccgcttgcccgacctat

SEQ ID NO: 210347 - DNA, 51 bp, Artificial
  Synthetic oligonucleotide
ctttggtattcggaggtttcggaatgccgtctgaagggtcagtccttaggt

SEQ ID NO: 210348 - DNA, 51 bp, Artificial
  Synthetic oligonucleotide
cacgccttcggtaaccaattcgctgacaaccgggccgatcatgtgtacgcc

SEQ ID NO: 210349 - DNA, 60 bp, Artificial
  Synthetic oligonucleotide
tgcgaataatccaaggtcagagttcgccaatgcacgccccgaagtctataagttggataa

SEQ ID NO: 210350 - DNA, 51 bp, Artificial
  Synthetic oligonucleotide
acttggcccagttggcacaatcgcggataaactctaaagccatatctttgt

SEQ ID NO: 210351 - DNA, 51 bp, Artificial
  Synthetic oligonucleotide
agtaccttgtggcagcgtgtctgcgagctggggcgggtaaccctgccgggc

SEQ ID NO: 210352 - DNA, 51 bp, Artificial
  Synthetic oligonucleotide
agtaggtgctaggcttgcaagtgttctgttcattacgttaaaataacgtaa

SEQ ID NO: 210353 - DNA, 51 bp, Artificial
  Synthetic oligonucleotide
ctgagggtaaggacggggaacctgcgacgctccgtacaccagcgcgtgaat

SEQ ID NO: 210354 - DNA, 51 bp, Artificial
  Synthetic oligonucleotide
ctcgttctaagcgaacgcccgcgtctctccccgccgcctgcgacctccggt

SEQ ID NO: 210355 - DNA, 51 bp, Artificial
  Synthetic oligonucleotide
ctccgctcttggacgctgaccgatgctgaatcggtgtacgaacaagcccgc

SEQ ID NO: 210356 - DNA, 51 bp, Artificial
  Synthetic oligonucleotide
acttaccatgtgttgtcgcaaacttatgccctgtgcgattcgaccgatgtg

SEQ ID NO: 210357 - DNA, 51 bp, Artificial
  Synthetic oligonucleotide
ccgcgtgatggctgtacgcgcaaacggtataaatattggcttcgtgaatgg

SEQ ID NO: 210358 - DNA, 51 bp, Artificial
  Synthetic oligonucleotide
agtttgacggtcagacccggacgcatggctaaagcctctccggcagattgc

SEQ ID NO: 210359 - DNA, 51 bp, Artificial
  Synthetic oligonucleotide
cacaaggtgctaatccggtgcaactgctttgggcctcaacaggtgtcaaaa

SEQ ID NO: 210360 - DNA, 55 bp, Artificial
  Synthetic oligonucleotide
tgcctttacgaaattttttggataccccttgacgctagccaatccaaatacgcta

SEQ ID NO: 210361 - DNA, 51 bp, Artificial
  Synthetic oligonucleotide
cctacgtcccttgcactgggtgggcctgtcatcggagcgttttgccttacg

SEQ ID NO: 210362 - DNA, 51 bp, Artificial
  Synthetic oligonucleotide
cctttgacggcgtagttggctacaccggataccggcatagaggtggcgcgt

SEQ ID NO: 210363 - DNA, 51 bp, Artificial
  Synthetic oligonucleotide
cgtcatcccaataccgcccccgcagtgcgctgataatgtcgggtgtgcaat

SEQ ID NO: 210364 - DNA, 51 bp, Artificial
  Synthetic oligonucleotide
atgacaagggccagtagaaaggctggcccttgtcattggagggtgttcagg

SEQ ID NO: 210365 - DNA, 51 bp, Artificial
  Synthetic oligonucleotide
atgccgtctgcgacgctttccgcgacatttacgacgcacgtccgagcgtgg

SEQ ID NO: 210366 - DNA, 51 bp, Artificial
  Synthetic oligonucleotide
cggaatctttcggcgaacacgcacccaaagcaagggcgcagcatacggcta

SEQ ID NO: 210367 - DNA, 51 bp, Artificial
  Synthetic oligonucleotide
gcactggccaaattgcgtcatcgagagagctgacgccacgagagccgtcaa

SEQ ID NO: 210368 - DNA, 51 bp, Artificial
  Synthetic oligonucleotide
gcagtgctgtttaccgtaaacttcgtctgcctctccttcgtggtattccgc

SEQ ID NO: 210369 - DNA, 51 bp, Artificial
  Synthetic oligonucleotide
agactttgtgcaaaaggtactcggctacgccgtgtccgttggcgtgaagtt

SEQ ID NO: 210370 - DNA, 51 bp, Artificial
  Synthetic oligonucleotide
ggagagcccgtgacacacgaagaatgcatggtgcggggtgggacttgctgc

SEQ ID NO: 210371 - DNA, 58 bp, Artificial
  Synthetic oligonucleotide
tgccgataatcctaggatgggcagtatcggcattattccgaaaacccgcgaactgtac

SEQ ID NO: 210372 - DNA, 51 bp, Artificial
  Synthetic oligonucleotide
gctatttccgcccccaagacagcagttcgccccgttgttcgcagtgttcca

SEQ ID NO: 210373 - DNA, 51 bp, Artificial
  Synthetic oligonucleotide
gcgtcggcttggtgatgggtctcaacgccggtatgaacatcggcctcaacg

SEQ ID NO: 210374 - DNA, 51 bp, Artificial
  Synthetic oligonucleotide
gcggcaagcgtgtggtgtctgtttcccagccgggtaaggcggtgttggaaa

SEQ ID NO: 210375 - DNA, 51 bp, Artificial
  Synthetic oligonucleotide
catccgcgtcgtaatgcacatacgcgccaaagtccgccgtcttgcccgcaa

SEQ ID NO: 210376 - DNA, 51 bp, Artificial
  Synthetic oligonucleotide
ccaagcgcaatgtctgtttgccccatttagcacgtctgctgcgttgacttt

SEQ ID NO: 210377 - DNA, 51 bp, Artificial
  Synthetic oligonucleotide
gcgaacacgcacccaaagcaagggcgcagcatacggctaaagcagtcagac

SEQ ID NO: 210378 - DNA, 51 bp, Artificial
  Synthetic oligonucleotide
gcggagttgcgaagctaaaaccatgcggtgcattcgcctttatcagccaaa

SEQ ID NO: 210379 - DNA, 50 bp, Artificial
  Synthetic oligonucleotide
caatgtcggcttggttgtgtgcctgcggccaaagcggagagcctgcggca

SEQ ID NO: 210380 - DNA, 50 bp, Artificial
  Synthetic oligonucleotide
caagtgccggaagccatacgcacccactgggtaaagctgctgggcgacta

SEQ ID NO: 210381 - DNA, 50 bp, Artificial
  Synthetic oligonucleotide
aaccggctttgtacgtaagctagaccacctgcgcccatgcactccacccg

SEQ ID NO: 210382 - DNA, 60 bp, Artificial
  Synthetic oligonucleotide
tgccaagagattttgaattgcatagtacaactcctgtttaagtgttgaacaccgagcagg

SEQ ID NO: 210383 - DNA, 50 bp, Artificial
  Synthetic oligonucleotide
caaggcaggaacaacttgtgccagcccgtattgcgccggtttgtgccggc

SEQ ID NO: 210384 - DNA, 50 bp, Artificial
  Synthetic oligonucleotide
catcctccgcagcgctccccctgtgtctcatttagtcggcactgcacgga

SEQ ID NO: 210385 - DNA, 50 bp, Artificial
  Synthetic oligonucleotide
cacacccacgctacttggtcgctgggtttggtgttgcacggccgcacggt

SEQ ID NO: 210386 - DNA, 50 bp, Artificial
  Synthetic oligonucleotide
catcgccccaaaaaccgcgcccgaattgagctacgcgctgcccgaatttg

SEQ ID NO: 210387 - DNA, 50 bp, Artificial
  Synthetic oligonucleotide
caagccggtttctgcgttgaaatgcggttcgatggcttggatacgcaggt

SEQ ID NO: 210388 - DNA, 50 bp, Artificial
  Synthetic oligonucleotide
caagaagttctgacggttcggcccctcgtcatctttcaaccaacgggaat

SEQ ID NO: 210389 - DNA, 50 bp, Artificial
  Synthetic oligonucleotide
caacttgctccgtttggcgcaagcagcctgcacattgttccgtctgccga

SEQ ID NO: 210390 - DNA, 50 bp, Artificial
  Synthetic oligonucleotide
caaccgcttggaacgcgacaaccactttatccgaaaaggcaaccgacggc

SEQ ID NO: 210391 - DNA, 50 bp, Artificial
  Synthetic oligonucleotide
catggcgcataccaagccccagactggacagccgatttcttgcaccgcga

SEQ ID NO: 210392 - DNA, 50 bp, Artificial
  Synthetic oligonucleotide
attgcaatacgcccaccgcacccaaaatcaaatccgcgcccgaatgcggt

SEQ ID NO: 210393 - DNA, 60 bp, Artificial
  Synthetic oligonucleotide
tgcatgtccttacggttaaatcatccaagcggctgcatacggctcaaacccctgtacatc

SEQ ID NO: 210394 - DNA, 50 bp, Artificial
  Synthetic oligonucleotide
attgcagcgacagccgctgtggcaggtgacttgagccgacagcttcaaca

SEQ ID NO: 210395 - DNA, 50 bp, Artificial
  Synthetic oligonucleotide
actcaggcctgcgccgaccagttgcatgtcgaccagttggttgtagccgg

SEQ ID NO: 210396 - DNA, 50 bp, Artificial
  Synthetic oligonucleotide
acgtttcctcctgcgcgccttgcacttcatggcccacggcatgaagggag

SEQ ID NO: 210397 - DNA, 50 bp, Artificial
  Synthetic oligonucleotide
acgttgcacctgagtcggatgggcagtcaacaccgctgccacatgcagtt

SEQ ID NO: 210398 - DNA, 50 bp, Artificial
  Synthetic oligonucleotide
atttcccctccttgcgcggcgtgtacgacttggtattccaagcgcccgat

SEQ ID NO: 210399 - DNA, 50 bp, Artificial
  Synthetic oligonucleotide
tgcgccgatttgtgcgtcgtcagttcggcttgcgtggcttgtaaagcccg

SEQ ID NO: 210400 - DNA, 50 bp, Artificial
  Synthetic oligonucleotide
atttgtttggtagcagtagcgttggtagcggattggcaagaccagtcgag

SEQ ID NO: 210401 - DNA, 50 bp, Artificial
  Synthetic oligonucleotide
attttgccctcacaccgggtccgttcttcggcccgacgcttgaccagtct

SEQ ID NO: 210402 - DNA, 50 bp, Artificial
  Synthetic oligonucleotide
attttggcggcactcaggaagggaacacgttgtccggtacggttgagata

SEQ ID NO: 210403 - DNA, 50 bp, Artificial
  Synthetic oligonucleotide
caaaaatacgcgcctgccgcagtcagcgaacaagcccgcagcatgctgga

SEQ ID NO: 210404 - DNA, 60 bp, Artificial
  Synthetic oligonucleotide
tgcatgagctgcgtcaagcagctcccaaaaaatgccgtaggctcattattgggttttagc

SEQ ID NO: 210405 - DNA, 50 bp, Artificial
  Synthetic oligonucleotide
aacccagcgtgactcgggtggcaaggcccggctattcagcaaggatcggc

SEQ ID NO: 210406 - DNA, 50 bp, Artificial
  Synthetic oligonucleotide
catgcgccacaccggtcatgccctctactctgcgacaggcagccaacgtg

SEQ ID NO: 210407 - DNA, 50 bp, Artificial
  Synthetic oligonucleotide
caaaccaaagcccacttggctgcctatttcccgccgcccgactctgtcta

SEQ ID NO: 210408 - DNA, 50 bp, Artificial
  Synthetic oligonucleotide
acgtgcgcccaacgtggtaagcgcgagtcatcgccagttgtgccaacatt

SEQ ID NO: 210409 - DNA, 50 bp, Artificial
  Synthetic oligonucleotide
caacaaacacgccgattgcgtggcatgggcaaacgaacgcggctggtcag

SEQ ID NO: 210410 - DNA, 50 bp, Artificial
  Synthetic oligonucleotide
catgccagttggggcgcagtggtggcgtgcagcaagtatcaatcgctggg

SEQ ID NO: 210411 - DNA, 50 bp, Artificial
  Synthetic oligonucleotide
acgggtggaacgccgcagttgcataaagaggctttcgtttctttggttta

SEQ ID NO: 210412 - DNA, 50 bp, Artificial
  Synthetic oligonucleotide
acggttacgccacgtccgcaagcaggcaaccccaaactgcgcctgtttcg

SEQ ID NO: 210413 - DNA, 50 bp, Artificial
  Synthetic oligonucleotide
cagaagcccctcccgcccaagccgaaccaaggctacctgaaagcgggcat

SEQ ID NO: 210414 - DNA, 50 bp, Artificial
  Synthetic oligonucleotide
cagacggcgggaggaaggcggatacggtacgtagtcggattgaaatatac

SEQ ID NO: 210415 - DNA, 56 bp, Artificial
  Synthetic oligonucleotide
tgcagtttttcaatagggggaaaggcggcgggagtggtccgatagactatcttcta

SEQ ID NO: 210416 - DNA, 50 bp, Artificial
  Synthetic oligonucleotide
aacgcccacgctggcataaatgtgttcgtgcgcttgggctagggcaaaca

SEQ ID NO: 210417 - DNA, 50 bp, Artificial
  Synthetic oligonucleotide
caggcgaatgggtggcggctattggcgcaccgtttggctttgaaaacagc

SEQ ID NO: 210418 - DNA, 50 bp, Artificial
  Synthetic oligonucleotide
cagcttgggcggcagggtaaaacacggcgcaaagctaggccgtaccatcg

SEQ ID NO: 210419 - DNA, 50 bp, Artificial
  Synthetic oligonucleotide
cagctgtacgccgccatccaatcggatgattgtttgccgacttgtgaaac

SEQ ID NO: 210420 - DNA, 50 bp, Artificial
  Synthetic oligonucleotide
cagcagacgcggctgtttaaacggtcagccacacggactggccaagccaa

SEQ ID NO: 210421 - DNA, 50 bp, Artificial
  Synthetic oligonucleotide
cagccggcttgtccaaccagcaggttaacagcctgtcggttgccgcaacc

SEQ ID NO: 210422 - DNA, 50 bp, Artificial
  Synthetic oligonucleotide
cagctattgccccagcgggcaaatcgggctgtttgcaacggactacgccc

SEQ ID NO: 210423 - DNA, 50 bp, Artificial
  Synthetic oligonucleotide
cagcgacacgccaccaaatggcggcccgggtgactcccatgctgtcagcg

SEQ ID NO: 210424 - DNA, 50 bp, Artificial
  Synthetic oligonucleotide
cagcgatcactgcggggcgagagcacgcaaacccattccaatgcggccaa

SEQ ID NO: 210425 - DNA, 50 bp, Artificial
  Synthetic oligonucleotide
aacggcaccccaaagacggcgcagcccgtgttttagcggaattcagcagc

SEQ ID NO: 210426 - DNA, 59 bp, Artificial
  Synthetic oligonucleotide
tgcacggtgtcaaattccgacaggcgataatctaaaacggctgtagtcatcttactttc

SEQ ID NO: 210427 - DNA, 50 bp, Artificial
  Synthetic oligonucleotide
aacgcctgaaccagagtcagcgtggcagattctttgccgggacgcgccaa

SEQ ID NO: 210428 - DNA, 50 bp, Artificial
  Synthetic oligonucleotide
aacgctggtttatacgttttgacagtagccttgctcctgatttgaccata

SEQ ID NO: 210429 - DNA, 50 bp, Artificial
  Synthetic oligonucleotide
cagcgcagcgagtgtgcacccaagaatccggcgagcggacagtacctcta

SEQ ID NO: 210430 - DNA, 50 bp, Artificial
  Synthetic oligonucleotide
cagcggcttggacgtgcagccaaccgaaatggtgttggacatgggcacag

SEQ ID NO: 210431 - DNA, 50 bp, Artificial
  Synthetic oligonucleotide
caccaagcccgtctgttgccgaacaaaggcggcgagatgaatctgcgcgg

SEQ ID NO: 210432 - DNA, 50 bp, Artificial
  Synthetic oligonucleotide
caccacgccccagtgtggcgcaagtcataaccacaagcccgccaggacga

SEQ ID NO: 210433 - DNA, 50 bp, Artificial
  Synthetic oligonucleotide
catcaggtggggtatctggggtgttgtttgccacggttgcgcttgcgcct

SEQ ID NO: 210434 - DNA, 50 bp, Artificial
  Synthetic oligonucleotide
acggcgcaaagctaggccgtaccatcggttgtccgacggcgaatgtgcag

SEQ ID NO: 210435 - DNA, 50 bp, Artificial
  Synthetic oligonucleotide
tccagtcgtgtggtggtgcgtcattcgggcgcgacttgtgtattggcggt

SEQ ID NO: 210436 - DNA, 50 bp, Artificial
  Synthetic oligonucleotide
tgatccatttcaacggtgtacgcttccttggcccgtacaaggaggaaggt

SEQ ID NO: 210437 - DNA, 56 bp, Artificial
  Synthetic oligonucleotide
cgtccctacgtcaagccatcatggcgtcttgacgtcaagtttaccagaagggggaa

SEQ ID NO: 210438 - DNA, 58 bp, Artificial
  Synthetic oligonucleotide
tgaatcggaagattatgaagaactctactccgatgttccattttaaggctgtgcggtt

SEQ ID NO: 210439 - DNA, 50 bp, Artificial
  Synthetic oligonucleotide
cagttttaccggtgtaagcaccgttacggccgcccccaacagtcctgcgg

SEQ ID NO: 210440 - DNA, 50 bp, Artificial
  Synthetic oligonucleotide
cagtccgccacgctgcacacttctattgagccgaacacgccgaaaaccgc

SEQ ID NO: 210441 - DNA, 50 bp, Artificial
  Synthetic oligonucleotide
acgtacctgaacagcaggtcggggcgtggcactggcatgacacggacggt

SEQ ID NO: 210442 - DNA, 50 bp, Artificial
  Synthetic oligonucleotide
cagtcactagcggcggaagctgcgacatgggcgtttacacggctaccgtt

SEQ ID NO: 210443 - DNA, 50 bp, Artificial
  Synthetic oligonucleotide
tccgcttgcgttgcatggtttatcgttgtcactgggtggatttgcgccgc

SEQ ID NO: 210444 - DNA, 50 bp, Artificial
  Synthetic oligonucleotide
tgagagagggagcaaattgtagggaatcacaacaatggtcggacttcagt

SEQ ID NO: 210445 - DNA, 50 bp, Artificial
  Synthetic oligonucleotide
caccggcgcaccattccgaccatgcagcttttcggaagcagcaatccgca

SEQ ID NO: 210446 - DNA, 50 bp, Artificial
  Synthetic oligonucleotide
cacgtctctccgcccccgcaatttatctttgccgcatgcgacggtgcaag

SEQ ID NO: 210447 - DNA, 50 bp, Artificial
  Synthetic oligonucleotide
cagggtgccgggccgactgggttctcccaggtagtgatgcggttcgacat

SEQ ID NO: 210448 - DNA, 50 bp, Artificial
  Synthetic oligonucleotide
tgaaacatgtcgggcatgaatacccgacctacccgcttttcagacggcct

SEQ ID NO: 210449 - DNA, 60 bp, Artificial
  Synthetic oligonucleotide
tctgttgaagcgatccacgcctcgaaatgcttgatgggctttccttcgtaggtgtgcgcg

SEQ ID NO: 210450 - DNA, 50 bp, Artificial
  Synthetic oligonucleotide
tgaaacaaggcaacgaagatttgattgccacgcaagacatcccgctgcaa

SEQ ID NO: 210451 - DNA, 50 bp, Artificial
  Synthetic oligonucleotide
cacgtggtgggttatggaggcgcccacgggacaacgcttttgtgtcgtga

SEQ ID NO: 210452 - DNA, 50 bp, Artificial
  Synthetic oligonucleotide
aaaccgtttccggcacatgcaaaacgctggcggaacaaggcttgctgaca

SEQ ID NO: 210453 - DNA, 50 bp, Artificial
  Synthetic oligonucleotide
agcgcagtccccggctaccccgccgcaacgtaagcctctacaatctgcgg

SEQ ID NO: 210454 - DNA, 50 bp, Artificial
  Synthetic oligonucleotide
agcgccacgatatccagccgggacgacacccatagcggagcgtccatgtc

SEQ ID NO: 210455 - DNA, 50 bp, Artificial
  Synthetic oligonucleotide
agcgcggtacggtcgtttacagcgcgcggcggtttggtgctgaatatcag

SEQ ID NO: 210456 - DNA, 50 bp, Artificial
  Synthetic oligonucleotide
agcggacgcaacggcgtgcctttgttggcggcaacttggtattggatgtg

SEQ ID NO: 210457 - DNA, 50 bp, Artificial
  Synthetic oligonucleotide
agcggtcggcaaaccgcccatacagacatccctgcaattagggtctgccc

SEQ ID NO: 210458 - DNA, 50 bp, Artificial
  Synthetic oligonucleotide
ttgggcgttgcgacaccgtacgcgtggcttgggcgcgttccaaaaagtcg

SEQ ID NO: 210459 - DNA, 50 bp, Artificial
  Synthetic oligonucleotide
agaagccgtcgcccccaaagattccaccagcctttttgcaggacaagccg

SEQ ID NO: 210460 - DNA, 58 bp, Artificial
  Synthetic oligonucleotide
tctctagcccataaaccgtactcgtgattgctcatcttagggttttgcttatcgagtt

SEQ ID NO: 210461 - DNA, 50 bp, Artificial
  Synthetic oligonucleotide
agctcgcgcaatgaatcaccccatccaatttaccctgcgtcgcgtctgcc

SEQ ID NO: 210462 - DNA, 50 bp, Artificial
  Synthetic oligonucleotide
agctctctccgcggctgcgtagcaagttacagggtgaagcgcatggacag

SEQ ID NO: 210463 - DNA, 50 bp, Artificial
  Synthetic oligonucleotide
aggcaacgatgccgcctccctggacagcaaacctcgcaaacgccctaatt

SEQ ID NO: 210464 - DNA, 50 bp, Artificial
  Synthetic oligonucleotide
aggccctctctccgtactatcggcagcatgggggacttcggccaaccctg

SEQ ID NO: 210465 - DNA, 50 bp, Artificial
  Synthetic oligonucleotide
aggccgcgtgttggcggtttcgctgcaccaagacaactggttcccgcaaa

SEQ ID NO: 210466 - DNA, 50 bp, Artificial
  Synthetic oligonucleotide
aggccgtctgaaatgtacggtaccccgcgaacgtttggaagtccgctcgg

SEQ ID NO: 210467 - DNA, 50 bp, Artificial
  Synthetic oligonucleotide
ttgctctgtgcaagcctccattagactaccgtcaccggttcacgaatttt

SEQ ID NO: 210468 - DNA, 50 bp, Artificial
  Synthetic oligonucleotide
ttgcgtggctggcaccacaaaacccgagacacccgcatcgtgtgcttgcg

SEQ ID NO: 210469 - DNA, 50 bp, Artificial
  Synthetic oligonucleotide
aggcgaggtttccgatttacggccaacctgcggacttggtcagtgtgccg

SEQ ID NO: 210470 - DNA, 50 bp, Artificial
  Synthetic oligonucleotide
aggcgcaggcaaacccctactcgtcggcgtacccgtattaagcagcaccc

SEQ ID NO: 210471 - DNA, 60 bp, Artificial
  Synthetic oligonucleotide
tctatttgagcatatgctccttatatgtctatgcggtctgaatatggttttgcttcgggg

SEQ ID NO: 210472 - DNA, 50 bp, Artificial
  Synthetic oligonucleotide
agaggcgggacttcgtgtcgtgccggtcttgtctcccggatggatgtgtc

SEQ ID NO: 210473 - DNA, 50 bp, Artificial
  Synthetic oligonucleotide
agagtcagcgtggcagattctttgccgggacgcgccaacagggtaacgta

SEQ ID NO: 210474 - DNA, 50 bp, Artificial
  Synthetic oligonucleotide
ttttggataccccttgacgctagccaatccaaatacgctagggctagggg

SEQ ID NO: 210475 - DNA, 50 bp, Artificial
  Synthetic oligonucleotide
agattacaggcggactgcacaacgagtccggtgcgacaatcacgctggct

SEQ ID NO: 210476 - DNA, 50 bp, Artificial
  Synthetic oligonucleotide
agcaccataccgcgacccgatttgcccgccaattctagcgttgccccgac

SEQ ID NO: 210477 - DNA, 50 bp, Artificial
  Synthetic oligonucleotide
agcacgggcggtatggaattgggttccgttttgggacacggcgcctacca

SEQ ID NO: 210478 - DNA, 50 bp, Artificial
  Synthetic oligonucleotide
agcagcgcagcgaacgtgaacgccaggaatccctgtgggacagacatatc

SEQ ID NO: 210479 - DNA, 50 bp, Artificial
  Synthetic oligonucleotide
agcatacagcgcggcgttgtaaaccaaaccacacggcagccaaccccaca

SEQ ID NO: 210480 - DNA, 50 bp, Artificial
  Synthetic oligonucleotide
agcatggcaacacgttaccgcgctagccgaaacgctcaccgcaaccgaat

SEQ ID NO: 210481 - DNA, 50 bp, Artificial
  Synthetic oligonucleotide
agagccttgtccgcttgatccggttcctgatggggccgacccccattcgg

SEQ ID NO: 210482 - DNA, 60 bp, Artificial
  Synthetic oligonucleotide
tcggtcgctacgcatacccgcgttgctttgctgttctcgactgggcaattttccagtgtc

SEQ ID NO: 210483 - DNA, 50 bp, Artificial
  Synthetic oligonucleotide
agccaaattgccgtcagcaatggcagccgtgtgggcgcacgccaaaacat

SEQ ID NO: 210484 - DNA, 50 bp, Artificial
  Synthetic oligonucleotide
agccaatggctttaacgtggccgtggcgcatacaggcacaggtacgtcta

SEQ ID NO: 210485 - DNA, 50 bp, Artificial
  Synthetic oligonucleotide
agccgactcgtccctacatcccgcctatcctagcgaggcgtccgtttgcg

SEQ ID NO: 210486 - DNA, 50 bp, Artificial
  Synthetic oligonucleotide
agccgggccgtgatccttgtcgcagtcaccccaccataccttgacctgac

SEQ ID NO: 210487 - DNA, 50 bp, Artificial
  Synthetic oligonucleotide
aaaccattgcaatctccgatatccgtccgggacgtttgcagccgcgcgta

SEQ ID NO: 210488 - DNA, 50 bp, Artificial
  Synthetic oligonucleotide
aaaccgcgtatgccgcacgaaatgggcgccaaacagccagacacccggcc

SEQ ID NO: 210489 - DNA, 50 bp, Artificial
  Synthetic oligonucleotide
agcctgcttgagattgctatacttgcgccgccttactgagggtcggccga

SEQ ID NO: 210490 - DNA, 50 bp, Artificial
  Synthetic oligonucleotide
agcctggtttcatcatgcccgtgcgtcagcccaacacggacctcaccgta

SEQ ID NO: 210491 - DNA, 50 bp, Artificial
  Synthetic oligonucleotide
agacacttccaagctgacggagtcgactgcccggaaagcacgcgcaccct

SEQ ID NO: 210492 - DNA, 50 bp, Artificial
  Synthetic oligonucleotide
actggtgtggggttccggagggtggtctagcctgactgggccggacgcgg

SEQ ID NO: 210493 - DNA, 55 bp, Artificial
  Synthetic oligonucleotide
tcggccacgtctttcatcttgctaccctttcattaccaagttaaacgaaaggcca

SEQ ID NO: 210494 - DNA, 50 bp, Artificial
  Synthetic oligonucleotide
atctgacaacgccgtgattcttttggcggcagtgaacgacggtaaagtat

SEQ ID NO: 210495 - DNA, 50 bp, Artificial
  Synthetic oligonucleotide
atgcccacagcaatgtggacggcctgtcgtcttcagccccgcaatcgtcc

SEQ ID NO: 210496 - DNA, 50 bp, Artificial
  Synthetic oligonucleotide
atgccctcgctattatccacgacttcccgcgcgatcaaacgcccgcgaaa

SEQ ID NO: 210497 - DNA, 50 bp, Artificial
  Synthetic oligonucleotide
atgccgcctccctggacagcaaacctcgcaaacgccctaattgtcgcccc

SEQ ID NO: 210498 - DNA, 50 bp, Artificial
  Synthetic oligonucleotide
atgcgccacttatttccgctaatttgcctgctcgccctcccgcttaccgc

SEQ ID NO: 210499 - DNA, 50 bp, Artificial
  Synthetic oligonucleotide
aaatcaaaagggagtgtatgggaggttgggctgccgagatgcgtactcat

SEQ ID NO: 210500 - DNA, 50 bp, Artificial
  Synthetic oligonucleotide
atgcggaatctagagaaaccgtttatccgataagtttccgttccgacagg

SEQ ID NO: 210501 - DNA, 50 bp, Artificial
  Synthetic oligonucleotide
atgcgttgtaaccgtcccacaatggtcgccaggccgccaagtcattctgc

SEQ ID NO: 210502 - DNA, 50 bp, Artificial
  Synthetic oligonucleotide
aaatcgggcaacagcataccgactgtgccgtctggtttcggggcttgggt

SEQ ID NO: 210503 - DNA, 50 bp, Artificial
  Synthetic oligonucleotide
atgcttggacgggcgcggaatgtcgcacagggtttggaaatgttcccaga

SEQ ID NO: 210504 - DNA, 57 bp, Artificial
  Synthetic oligonucleotide
tcgcctacggctaaaacccaataatgagcctacggcattttttgggagctgcttgac

SEQ ID NO: 210505 - DNA, 50 bp, Artificial
  Synthetic oligonucleotide
atgggtggccgccaaacgggcataagacagcccggcaaacaacatatgcg

SEQ ID NO: 210506 - DNA, 50 bp, Artificial
  Synthetic oligonucleotide
atgtacggtctggggtgcattggcaggagccccgtaaggagagttcgcca

SEQ ID NO: 210507 - DNA, 50 bp, Artificial
  Synthetic oligonucleotide
actctggcccattgtcgttctccccctgatgactccgcggggtgcattcc

SEQ ID NO: 210508 - DNA, 50 bp, Artificial
  Synthetic oligonucleotide
atgttgagcctccctactgagcgttaagcccggtcctcgtcgccaaacga

SEQ ID NO: 210509 - DNA, 50 bp, Artificial
  Synthetic oligonucleotide
atgttggccgactccgcgtctgcttcggcggttggggctgaattcgtgcg

SEQ ID NO: 210510 - DNA, 50 bp, Artificial
  Synthetic oligonucleotide
attaactcgctgcgccgccatgtctttccgaagatcggggccagacccgt

SEQ ID NO: 210511 - DNA, 50 bp, Artificial
  Synthetic oligonucleotide
attactttaacccttcgttatccccatagctttccatcattcccgcaact

SEQ ID NO: 210512 - DNA, 50 bp, Artificial
  Synthetic oligonucleotide
aacaaccgtgactacggcaacatgtgctaaggcggccggcatgcgacaca

SEQ ID NO: 210513 - DNA, 50 bp, Artificial
  Synthetic oligonucleotide
aggcggtgaaaacccccttgcgtgtactggcgagcttaactgccgcagcg

SEQ ID NO: 210514 - DNA, 50 bp, Artificial
  Synthetic oligonucleotide
agggccaaatcacggctaccgtcatggcggccacaatcagtaaaccgccg

SEQ ID NO: 210515 - DNA, 52 bp, Artificial
  Synthetic oligonucleotide
tcaaatagaaaaatacgttaaagcccaagaaaagcgggacggaatggaagta

SEQ ID NO: 210516 - DNA, 50 bp, Artificial
  Synthetic oligonucleotide
agggcgcggcttaggcgattgcgtatccaccgaaacctacgcatggaacg

SEQ ID NO: 210517 - DNA, 50 bp, Artificial
  Synthetic oligonucleotide
aaagcgtttgagacggtgatgactggttgtgccggggttccccgccctaa

SEQ ID NO: 210518 - DNA, 50 bp, Artificial
  Synthetic oligonucleotide
agtccgcagcgcttgggtgcgttgcaacattctgtcggctcacctggcca

SEQ ID NO: 210519 - DNA, 50 bp, Artificial
  Synthetic oligonucleotide
agtgcacgcgccctcacccggcctgtctttccgccccgacccctctctcg

SEQ ID NO: 210520 - DNA, 50 bp, Artificial
  Synthetic oligonucleotide
agttggggcaaacaggcacatgctcatcaacggggcagccagcgaagtca

SEQ ID NO: 210521 - DNA, 50 bp, Artificial
  Synthetic oligonucleotide
ataaagactccgaccacctgattattaaaggtacggccagcggtaaaact

SEQ ID NO: 210522 - DNA, 50 bp, Artificial
  Synthetic oligonucleotide
ataacggcgcgtatgcacgcgagccagttgaatgtccgacacttcggggg

SEQ ID NO: 210523 - DNA, 50 bp, Artificial
  Synthetic oligonucleotide
ataatacggcagttccaactcgaggccgtctgaacccgcgccgacagtcg

SEQ ID NO: 210524 - DNA, 50 bp, Artificial
  Synthetic oligonucleotide
ataccagtgtgctgatgcgcggccccaacgatttctgagcgcgaggaaca

SEQ ID NO: 210525 - DNA, 50 bp, Artificial
  Synthetic oligonucleotide
atatgtctgtcccacagggattcctggcgttcacgttcgctgcgctgcta

SEQ ID NO: 210526 - DNA, 56 bp, Artificial
  Synthetic oligonucleotide
tcaaacccctgtacatcgcttggagaaaaacgactagccgcccttgttctccaaca

SEQ ID NO: 210527 - DNA, 50 bp, Artificial
  Synthetic oligonucleotide
atcacaccaatgggcgcagacgcactggcaacaggcatactcgctgcgac

SEQ ID NO: 210528 - DNA, 50 bp, Artificial
  Synthetic oligonucleotide
atcacgtccgtgcaatgcgcgtaccctaaatcgccgcttgcattggcagc

SEQ ID NO: 210529 - DNA, 50 bp, Artificial
  Synthetic oligonucleotide
ttatcgaccgtaccttgagtggcacaggcactcagtgccaaacctaatga

SEQ ID NO: 210530 - DNA, 50 bp, Artificial
  Synthetic oligonucleotide
atcattctgcggcacactgacgactttgccggaactatcgcgcggaccgc

SEQ ID NO: 210531 - DNA, 50 bp, Artificial
  Synthetic oligonucleotide
atccccgcagccacggggattttgtgtggttcctgctcggttattaacct

SEQ ID NO: 210532 - DNA, 50 bp, Artificial
  Synthetic oligonucleotide
atccgagctgacgctcaggctttgtccggcgatatggccgcccgtattcg

SEQ ID NO: 210533 - DNA, 50 bp, Artificial
  Synthetic oligonucleotide
atcctggcatccaccgaggcccagcaatacaagcagcgtaatggcgaagc

SEQ ID NO: 210534 - DNA, 50 bp, Artificial
  Synthetic oligonucleotide
atcgacacccgctggataatgcacatcacgcacggatccatgccccgccc

SEQ ID NO: 210535 - DNA, 50 bp, Artificial
  Synthetic oligonucleotide
cgtgccagggtatcaagtacggcctcggcatagcgaggttgcagggccgc

SEQ ID NO: 210536 - DNA, 50 bp, Artificial
  Synthetic oligonucleotide
cgtgccgcgcacgccagtcgttatccgccaagtgcgggttctttcgcaat

SEQ ID NO: 210537 - DNA, 56 bp, Artificial
  Synthetic oligonucleotide
tattggaccactcccgccgcctttccccctattgaaaaactgcacaatcattggga

SEQ ID NO: 210538 - DNA, 50 bp, Artificial
  Synthetic oligonucleotide
cgtgccgtccgcagtaaagaaaacccgctgcctcgtatgcgcggtggcag

SEQ ID NO: 210539 - DNA, 50 bp, Artificial
  Synthetic oligonucleotide
cgttgaggcagtcgggtaggaagtcgcgcaaggtgtggtgccacaaggca

SEQ ID NO: 210540 - DNA, 50 bp, Artificial
  Synthetic oligonucleotide
cgtttccgcgtttaccgttgcgaaaacggcgggcatggacgtagcgaacg

SEQ ID NO: 210541 - DNA, 50 bp, Artificial
  Synthetic oligonucleotide
acccggtgcttgaatgggtgtggccgggctggcatgtggggcacattatc

SEQ ID NO: 210542 - DNA, 50 bp, Artificial
  Synthetic oligonucleotide
ctagtggcgctcaacgtgcctggggctacgttacccaaagtaaccgggct

SEQ ID NO: 210543 - DNA, 50 bp, Artificial
  Synthetic oligonucleotide
ctatgcagggttgagccaaattgccgtcagcaatggcagccgtgtgggcg

SEQ ID NO: 210544 - DNA, 50 bp, Artificial
  Synthetic oligonucleotide
ctcaaacgcaacccataaaccgacagccgccaaaagcagcctgcaccccg

SEQ ID NO: 210545 - DNA, 50 bp, Artificial
  Synthetic oligonucleotide
ctcccaaagccgccgtgaaatagcagcctcggctcaaatttgggcgcgat

SEQ ID NO: 210546 - DNA, 50 bp, Artificial
  Synthetic oligonucleotide
acccaagttaaacgtgttttcgcccgcgcccaaatcaacggtgcggccgt

SEQ ID NO: 210547 - DNA, 50 bp, Artificial
  Synthetic oligonucleotide
ctgcccccgcctacgcgagggtaaactacggcaggaatccaacgtggtat

SEQ ID NO: 210548 - DNA, 51 bp, Artificial
  Synthetic oligonucleotide
cgtattccggaatggtggacacttggacgggaagggttaccgtttcgcgcg

SEQ ID NO: 210549 - DNA, 55 bp, Artificial
  Synthetic oligonucleotide
tatgcgtatagggttttagcagatggaaggttgtttttagtagataggttaataa

SEQ ID NO: 210550 - DNA, 50 bp, Artificial
  Synthetic oligonucleotide
ctggcatgcctagctggctttgtgccacatcttcgttgggggcgcggtgt

SEQ ID NO: 210551 - DNA, 50 bp, Artificial
  Synthetic oligonucleotide
ctggctggccgctcaaacaccatgccgctatccacactgaaggtgggcaa

SEQ ID NO: 210552 - DNA, 50 bp, Artificial
  Synthetic oligonucleotide
acccaacgtctgaagatccgtccaaccgggaggtacagcctggcaacgcc

SEQ ID NO: 210553 - DNA, 50 bp, Artificial
  Synthetic oligonucleotide
acccaaaccgccatatcgccgatgtccaaacgccccacgcggtgcacgca

SEQ ID NO: 210554 - DNA, 50 bp, Artificial
  Synthetic oligonucleotide
accattttcggcccggaatgcggagtgagcgcttccagcttaggtcgcct

SEQ ID NO: 210555 - DNA, 50 bp, Artificial
  Synthetic oligonucleotide
cttcccggcggcttgggtattcgagttgacagccacatttatcaaggcta

SEQ ID NO: 210556 - DNA, 50 bp, Artificial
  Synthetic oligonucleotide
accagttggttgtagccggaagagccggattggagggtgggctgcacctg

SEQ ID NO: 210557 - DNA, 50 bp, Artificial
  Synthetic oligonucleotide
accagccgccgtaacaggcacgttgacgacacccgttgggcgtattcgca

SEQ ID NO: 210558 - DNA, 50 bp, Artificial
  Synthetic oligonucleotide
cgcgtggttgggctagatgctctgtggctgcctgaatttggctcggggtg

SEQ ID NO: 210559 - DNA, 50 bp, Artificial
  Synthetic oligonucleotide
cgctcttgtccgaatacgccaaactcggctcgcccgacgcattcgccttt

SEQ ID NO: 210560 - DNA, 50 bp, Artificial
  Synthetic oligonucleotide
ttttgggcttcgggttggagtatttcggcgatttggtaaaagggataacc

SEQ ID NO: 210561 - DNA, 50 bp, Artificial
  Synthetic oligonucleotide
cggaaccaccgtcccatggatattgccgcccgtaacattcacggagccgc

SEQ ID NO: 210562 - DNA, 50 bp, Artificial
  Synthetic oligonucleotide
aagtccatcgccagttttaccggtgtaagcaccgttacggccgcccccaa

SEQ ID NO: 210563 - DNA, 50 bp, Artificial
  Synthetic oligonucleotide
cggacatggcgtgattagcgtggcggccaatgtggcaccggcaatgtttg

SEQ ID NO: 210564 - DNA, 50 bp, Artificial
  Synthetic oligonucleotide
cggacggcgatgtgtcaatcggcacgtccaaaggattgtggcgttcgggt

SEQ ID NO: 210565 - DNA, 50 bp, Artificial
  Synthetic oligonucleotide
cggccgcgcgtccatggacatgctaaccgtcgatttgagccacgtccccg

SEQ ID NO: 210566 - DNA, 50 bp, Artificial
  Synthetic oligonucleotide
cggcgcgtgtggcttcgtagtgaatcatggtgagtaggcggcggcgatag

SEQ ID NO: 210567 - DNA, 50 bp, Artificial
  Synthetic oligonucleotide
cggctaggcaatcttccgcgtgctcccaatagcggccgtccacccacaat

SEQ ID NO: 210568 - DNA, 50 bp, Artificial
  Synthetic oligonucleotide
cgggctatattctgccgtgagccattgagccgcccgtggcggaatgaagc

SEQ ID NO: 210569 - DNA, 50 bp, Artificial
  Synthetic oligonucleotide
cggtttgggctacggcttgaacgctcgtgccgccttggtaacacgcggtt

SEQ ID NO: 210570 - DNA, 50 bp, Artificial
  Synthetic oligonucleotide
cgtatgcgatttgaacgcgcaacgtgcagcagaactcgccccacaagccg

SEQ ID NO: 210571 - DNA, 59 bp, Artificial
  Synthetic oligonucleotide
ttttcgcgttatagcgcgttttagcttcggggatacatctgcataggacgagcattaaa

SEQ ID NO: 210572 - DNA, 50 bp, Artificial
  Synthetic oligonucleotide
cgtatggtgcagcgcgattggcttgggactgaccgcgtgtagcgaatcta

SEQ ID NO: 210573 - DNA, 50 bp, Artificial
  Synthetic oligonucleotide
gtaaaccgccataaccgccatttgacggatgatgtaacgtgaaatcaggt

SEQ ID NO: 210574 - DNA, 50 bp, Artificial
  Synthetic oligonucleotide
accgtatttagtcatcaaccccgttaccgtcgtcccgcttgctatcaacg

SEQ ID NO: 210575 - DNA, 50 bp, Artificial
  Synthetic oligonucleotide
cgtcggtaatctgcccgagtgcggtgaaggcttgcagtttgtcgtggccg

SEQ ID NO: 210576 - DNA, 50 bp, Artificial
  Synthetic oligonucleotide
ggttgcagtctatttgcaaaaccgacagcaatgcccctagattgcgtcag

SEQ ID NO: 210577 - DNA, 50 bp, Artificial
  Synthetic oligonucleotide
accggacagcactcagtgcgtcagcgcggttaaggccttgccgaatctca

SEQ ID NO: 210578 - DNA, 50 bp, Artificial
  Synthetic oligonucleotide
accgcgaccctaaagccaaccgcagcgcataccaagcgtttgccgaattg

SEQ ID NO: 210579 - DNA, 50 bp, Artificial
  Synthetic oligonucleotide
accgccctgcttagcgccgatctcaaacgcaccttagcgcgcgaccaacg

SEQ ID NO: 210580 - DNA, 50 bp, Artificial
  Synthetic oligonucleotide
gcacattgattgcgtgcgcgcgtccgagcagttggcaacgtttgtagcgc

SEQ ID NO: 210581 - DNA, 50 bp, Artificial
  Synthetic oligonucleotide
gcacgtcctgtaatcgcgcctgcgatgccttcgtgttgcaccgcgcagag

SEQ ID NO: 210582 - DNA, 59 bp, Artificial
  Synthetic oligonucleotide
ttttataacgcgcccagcgcgttatgattgctgccttcagcagcaaagggagtttttta

SEQ ID NO: 210583 - DNA, 50 bp, Artificial
  Synthetic oligonucleotide
acacagtggcgatcggcaacttagctgcggccagacggaaagcttcgcga

SEQ ID NO: 210584 - DNA, 50 bp, Artificial
  Synthetic oligonucleotide
gcagcgggtaggcagcctgaaaaccatacggtgaacgtgcgcacatctcg

SEQ ID NO: 210585 - DNA, 50 bp, Artificial
  Synthetic oligonucleotide
gcagggaatacacgggcggctgctctttgaaatacggcgagccgcggaaa

SEQ ID NO: 210586 - DNA, 50 bp, Artificial
  Synthetic oligonucleotide
gcataagtttctaccaatcggggtaaggctattttcacacacgcgccgcc

SEQ ID NO: 210587 - DNA, 50 bp, Artificial
  Synthetic oligonucleotide
gccgcaaaccggcgttttagcttcgctacgcaggctgccttatcgcgcat

SEQ ID NO: 210588 - DNA, 50 bp, Artificial
  Synthetic oligonucleotide
gcctctgttcgcaagtcgtgtgaggggaagatagacggaaagtgtacatt

SEQ ID NO: 210589 - DNA, 50 bp, Artificial
  Synthetic oligonucleotide
gcctgctgcggtttcgtcgctgggattgctcagccctgtctcggcattta

SEQ ID NO: 210590 - DNA, 50 bp, Artificial
  Synthetic oligonucleotide
aattcgggcggttctaggcgaatggtcatgccccacgaaaagcgcgacac

SEQ ID NO: 210591 - DNA, 50 bp, Artificial
  Synthetic oligonucleotide
aatggtggggaatccagtcgtgtggtggtgcgtcattcgggcgcgacttg

SEQ ID NO: 210592 - DNA, 50 bp, Artificial
  Synthetic oligonucleotide
aatccagcgattcactccgccccctttcgccaaccacagcccgaaaacat

SEQ ID NO: 210593 - DNA, 59 bp, Artificial
  Synthetic oligonucleotide
tttgtgtagttcctgctcggtgttcaacacttaaacaggagttgtactatgcaattcaa

SEQ ID NO: 210594 - DNA, 50 bp, Artificial
  Synthetic oligonucleotide
aatgcgcggttcgtccctgacaatcaccacgggcaatccgttttctggcc

SEQ ID NO: 210595 - DNA, 50 bp, Artificial
  Synthetic oligonucleotide
gctggaatacgcggattgtccaacggataacgaaggcgaaagcggcaact

SEQ ID NO: 210596 - DNA, 50 bp, Artificial
  Synthetic oligonucleotide
ggacacggtatgtctcctgaaaatcgtgttgggaaaagggcagcctaaaa

SEQ ID NO: 210597 - DNA, 50 bp, Artificial
  Synthetic oligonucleotide
ggacgaaatcaaccagcggattaaaagacctaaatctgacaaatatcccc

SEQ ID NO: 210598 - DNA, 50 bp, Artificial
  Synthetic oligonucleotide
aatcccgaagcatggcaacacgttaccgcgctagccgaaacgctcaccgc

SEQ ID NO: 210599 - DNA, 50 bp, Artificial
  Synthetic oligonucleotide
accacggtgtgtacagcgacgatcctaagttccaaaccactcgcgaacac

SEQ ID NO: 210600 - DNA, 50 bp, Artificial
  Synthetic oligonucleotide
gaaatcaaaggcaaatatgttaaggaagttaaagtcgcaaacggcgtcgt

SEQ ID NO: 210601 - DNA, 50 bp, Artificial
  Synthetic oligonucleotide
gaaggtaagacttcggcatagagatttctccgcgtcatctggaataggtc

SEQ ID NO: 210602 - DNA, 50 bp, Artificial
  Synthetic oligonucleotide
gggcgttgcgattcgtcagccatgcgtggtcactccgggtggcttacttg

SEQ ID NO: 210603 - DNA, 50 bp, Artificial
  Synthetic oligonucleotide
gaatgcgtttgtgaacacggcacatggcagtcgcggtttgaccactgcgc

SEQ ID NO: 210604 - DNA, 50 bp, Artificial
  Synthetic oligonucleotide
tttgtataggtttttaacggcggatacgacttataacgcaaaaataaccc

SEQ ID NO: 210605 - DNA, 50 bp, Artificial
  Synthetic oligonucleotide
acagttgcgacgggagaatatgcaaggtgtcgagcgattgagctgtagtg

SEQ ID NO: 210606 - DNA, 50 bp, Artificial
  Synthetic oligonucleotide
gaggacggcattgcccatgttttggcgcagtatcccgatttggcggctga

SEQ ID NO: 210607 - DNA, 50 bp, Artificial
  Synthetic oligonucleotide
acaggcgcatggtatcgtctgcggcttggcgcgtatggataatgagcggc

SEQ ID NO: 210608 - DNA, 50 bp, Artificial
  Synthetic oligonucleotide
acaggcaagctgacccaaaccgcgcccaacgaagaagccttgtcgggcag

SEQ ID NO: 210609 - DNA, 50 bp, Artificial
  Synthetic oligonucleotide
gatgcaggtcggcgcagtaatcgcacatggttcgggcctttcgttgggaa

SEQ ID NO: 210610 - DNA, 50 bp, Artificial
  Synthetic oligonucleotide
acagattaccagctggcacgcggcacagccatcccctgcgtactgacgac

SEQ ID NO: 210611 - DNA, 50 bp, Artificial
  Synthetic oligonucleotide
gattcgcccggtgcttcagcaccttagggaatcgttctcttttgagctaa

SEQ ID NO: 210612 - DNA, 50 bp, Artificial
  Synthetic oligonucleotide
acactgcccggcgcacacatttgctgcatcgcaaacccggcacatgcctc

SEQ ID NO: 210613 - DNA, 50 bp, Artificial
  Synthetic oligonucleotide
aatcacggcatcggtgtaaaccgctggtcacccgttagccccggtacgtc

SEQ ID NO: 210614 - DNA, 50 bp, Artificial
  Synthetic oligonucleotide
gggaaccgtgttgatcggcagtgttgcgggcaacatccaacgttatactt

SEQ ID NO: 210615 - DNA, 57 bp, Artificial
  Synthetic oligonucleotide
tttgtacggtcaggtttatatcggcggacaacaggaaaccatacttgtagagatgac

SEQ ID NO: 210616 - DNA, 50 bp, Artificial
  Synthetic oligonucleotide
gcaaggcgccacttccggcaatatccgcccgaagagcatagtggttgcgc

SEQ ID NO: 210617 - DNA, 50 bp, Artificial
  Synthetic oligonucleotide
acacgacacgtttcggtaagggccaaatcacggctaccgtcatggcggcc

SEQ ID NO: 210618 - DNA, 50 bp, Artificial
  Synthetic oligonucleotide
acaccatgtggccaaactctaccgtgccacgctcaagcacccggccgacg

SEQ ID NO: 210619 - DNA, 50 bp, Artificial
  Synthetic oligonucleotide
gcacacttctattgagccgaacacgccgaaaaccgcggattggacgccgc

SEQ ID NO: 210620 - DNA, 50 bp, Artificial
  Synthetic oligonucleotide
ccccaaaggcggcagatttaaggcggaaaccgcagcaaggttggacacct

SEQ ID NO: 210621 - DNA, 50 bp, Artificial
  Synthetic oligonucleotide
acgcgggttcgcttgcccaattgcaggtcagggtgacggacttggcgaca

SEQ ID NO: 210622 - DNA, 50 bp, Artificial
  Synthetic oligonucleotide
tagagaacgtattcccgttagcgccaccgctacctaagccactaccaatt

SEQ ID NO: 210623 - DNA, 50 bp, Artificial
  Synthetic oligonucleotide
acgcgcgggagcagttctaaccgagaagcccgatttttgccgcaacgtcc

SEQ ID NO: 210624 - DNA, 50 bp, Artificial
  Synthetic oligonucleotide
ccccggctaccccgccgcaacgtaagcctctacaatctgcgggctagata

SEQ ID NO: 210625 - DNA, 50 bp, Artificial
  Synthetic oligonucleotide
cccctaagctgtttgaccctgcacaccagcttggcgcaaaccgtgcaaca

SEQ ID NO: 210626 - DNA, 59 bp, Artificial
  Synthetic oligonucleotide
tttggtagaaccctttatctaggctctactaagtctcctatccgcattaggctctatga

SEQ ID NO: 210627 - DNA, 50 bp, Artificial
  Synthetic oligonucleotide
cccgacgccccgttacagcgtccttctcgctgacaatgccatgcccggat

SEQ ID NO: 210628 - DNA, 50 bp, Artificial
  Synthetic oligonucleotide
cccgcaggtggcctacatgaacaaaggcatctgtagcgcccgcttggggc

SEQ ID NO: 210629 - DNA, 50 bp, Artificial
  Synthetic oligonucleotide
acgcgccggccggagacaagaccacccggcaacatgtcgtggcttaacgg

SEQ ID NO: 210630 - DNA, 50 bp, Artificial
  Synthetic oligonucleotide
cccgcccacacagcaaggataatcatgagtgcctctcccgccgccaaata

SEQ ID NO: 210631 - DNA, 50 bp, Artificial
  Synthetic oligonucleotide
acgcctgaccatgccccaatggtttgccaatccccgattcagccgttggt

SEQ ID NO: 210632 - DNA, 50 bp, Artificial
  Synthetic oligonucleotide
acgcccttagcgcgcaccaagccttcgcacagggtaggcaggtcgtcaaa

SEQ ID NO: 210633 - DNA, 50 bp, Artificial
  Synthetic oligonucleotide
acgcccgtgctggatgtgtcaggccgtctgaatcaggctgacgacacgtt

SEQ ID NO: 210634 - DNA, 50 bp, Artificial
  Synthetic oligonucleotide
cccgtcacgctactgggcagattgaccacgcggtccgctagccattctgc

SEQ ID NO: 210635 - DNA, 50 bp, Artificial
  Synthetic oligonucleotide
ccctccaaaccttgcctgcgtatgccgccaaaccggatactgcttcagcc

SEQ ID NO: 210636 - DNA, 50 bp, Artificial
  Synthetic oligonucleotide
cccttagtactggtgtggggttccggagggtggtctagcctgactgggcc

SEQ ID NO: 210637 - DNA, 57 bp, Artificial
  Synthetic oligonucleotide
tttgagccgtctgcgagatgtaggaacgagttgggattttcgtttgccggataggaa

SEQ ID NO: 210638 - DNA, 50 bp, Artificial
  Synthetic oligonucleotide
acgccactccgccgaagcgtcaggtggtaagtctatcgccttgtggtccg

SEQ ID NO: 210639 - DNA, 50 bp, Artificial
  Synthetic oligonucleotide
ccgcaacgacttgcgccttgaagacaacacggttctgcaatccgccctga

SEQ ID NO: 210640 - DNA, 50 bp, Artificial
  Synthetic oligonucleotide
ccgcaattggggcatcaggtggggtatctggggtgttgtttgccacggtt

SEQ ID NO: 210641 - DNA, 50 bp, Artificial
  Synthetic oligonucleotide
ccgcccatccggattcgcggtttgcccaaagagcctgctaggcagccggc

SEQ ID NO: 210642 - DNA, 50 bp, Artificial
  Synthetic oligonucleotide
aacggcggcgcaagactgccgatgcatgtcgatggtgtgtgacagcagat

SEQ ID NO: 210643 - DNA, 50 bp, Artificial
  Synthetic oligonucleotide
catggctgcatgctaacgcggcaccccgtcacccccaagcctcggctatg

SEQ ID NO: 210644 - DNA, 50 bp, Artificial
  Synthetic oligonucleotide
cattgccaagctgggtgagtaaaccggcacaccgcccaagcacaccggca

SEQ ID NO: 210645 - DNA, 50 bp, Artificial
  Synthetic oligonucleotide
acggcctccctagccgcccaaccgattaagcgcagtaccgcaacaattgc

SEQ ID NO: 210646 - DNA, 50 bp, Artificial
  Synthetic oligonucleotide
ccaaagggtgaacctgcgttttgcgccccaaacggcgaaaggcttgcgaa

SEQ ID NO: 210647 - DNA, 50 bp, Artificial
  Synthetic oligonucleotide
ccaaatagccaggggatttcaatcgcaggcttgaccctggtcgtgccggc

SEQ ID NO: 210648 - DNA, 56 bp, Artificial
  Synthetic oligonucleotide
tttctcccgtcctccagctggtatagcaccggctcggctatcgaaaattgcccggt

SEQ ID NO: 210649 - DNA, 50 bp, Artificial
  Synthetic oligonucleotide
ccaacggccaaagcgaccccctctcccgttcgtggaaccgcctctacctg

SEQ ID NO: 210650 - DNA, 50 bp, Artificial
  Synthetic oligonucleotide
ccaagtgcccaacacctgaaacacgcccttagcgcgcaccaagccttcgc

SEQ ID NO: 210651 - DNA, 50 bp, Artificial
  Synthetic oligonucleotide
ccacattcaagcaactggtgtttgacggcagtcgccccatgttgcgccca

SEQ ID NO: 210652 - DNA, 50 bp, Artificial
  Synthetic oligonucleotide
ccaccggcacagtgattggcgcaccagtattgttcacggctaagccgcgt

SEQ ID NO: 210653 - DNA, 50 bp, Artificial
  Synthetic oligonucleotide
ccacgcgttcaattcacccaaagggttgcctgaaaacagtccgctaaaca

SEQ ID NO: 210654 - DNA, 50 bp, Artificial
  Synthetic oligonucleotide
ccacgttttagccgcaaaccggcgttttagcttcgctacgcaggctgcct

SEQ ID NO: 210655 - DNA, 50 bp, Artificial
  Synthetic oligonucleotide
ccactcaaacgcccttcggctgcgcgtgtttgaagcaagccgtgcatacc

SEQ ID NO: 210656 - DNA, 50 bp, Artificial
  Synthetic oligonucleotide
ccactcgttggcaggcagctggtccgtacccaaagctttggccacttggt

SEQ ID NO: 210657 - DNA, 50 bp, Artificial
  Synthetic oligonucleotide
aactgagccggcacgttttcgcggtcgaaagccaagtcaccgccgtgttt

SEQ ID NO: 210658 - DNA, 50 bp, Artificial
  Synthetic oligonucleotide
aactgcacacttccactttttccgccaagcctttgtcggccacggcggta

SEQ ID NO: 210659 - DNA, 57 bp, Artificial
  Synthetic oligonucleotide
cgtaataatttggcttcttctcggtcgcgttctttgcctagaagatagtctattgga

SEQ ID NO: 210660 - DNA, 58 bp, Artificial
  Synthetic oligonucleotide
tttaagttgcgttaggtatggcataacttcatcagtcattgcaattctaaaacgcccc

SEQ ID NO: 210661 - DNA, 50 bp, Artificial
  Synthetic oligonucleotide
ccactggctgatgaatcggcagcacatacggcgtttcgtttggcggtggg

SEQ ID NO: 210662 - DNA, 50 bp, Artificial
  Synthetic oligonucleotide
ccagcggcggttaacgttttgcaccggaatcacaccggccaaatcatggc

SEQ ID NO: 210663 - DNA, 50 bp, Artificial
  Synthetic oligonucleotide
cccaaatagcgccgtgaggcggatgctcaaccggccttaacgcagcaaaa

SEQ ID NO: 210664 - DNA, 50 bp, Artificial
  Synthetic oligonucleotide
acctttggcgaatgtcgtgctggaccgggtttccctaagctttgcaatgt

SEQ ID NO: 210665 - DNA, 50 bp, Artificial
  Synthetic oligonucleotide
acctgcggacttggtcagtgtgccgcttaacggacagcgccaaggtgtgg

SEQ ID NO: 210666 - DNA, 50 bp, Artificial
  Synthetic oligonucleotide
cgcaaaccttccaagccctgagcgggcacactgtgtggacggacgatact

SEQ ID NO: 210667 - DNA, 50 bp, Artificial
  Synthetic oligonucleotide
cgcaacttgcgcgcatgccggtatcacacgtttcagcgcaccgggacgta

SEQ ID NO: 210668 - DNA, 50 bp, Artificial
  Synthetic oligonucleotide
cgcaggacgtttgcgccaagaattgcgacaacgcggcgtatcggcagaat

SEQ ID NO: 210669 - DNA, 50 bp, Artificial
  Synthetic oligonucleotide
acctgcgctgcgactaccccatgctcaacgaagccctacgcatcgccaaa

SEQ ID NO: 210670 - DNA, 50 bp, Artificial
  Synthetic oligonucleotide
acctcgaaacacccggccattgggtactgagcgcagtcaatcgttgcggc

SEQ ID NO: 210671 - DNA, 54 bp, Artificial
  Synthetic oligonucleotide
ttgggattttgagtatccaatttcacaaacttcccgtacttgtttttatgcgga

SEQ ID NO: 210672 - DNA, 50 bp, Artificial
  Synthetic oligonucleotide
cgcccaaatggtcgcaagccgtgtatgcgcgtatgcccgaagttagcgag

SEQ ID NO: 210673 - DNA, 50 bp, Artificial
  Synthetic oligonucleotide
gtgcaggctgctttgtatgtagactaatgatatactgcatcgatagatag

SEQ ID NO: 210674 - DNA, 50 bp, Artificial
  Synthetic oligonucleotide
aaggctgcgatatgacgacgtggtacgaatgggcaccaaccggcgcaata

SEQ ID NO: 210675 - DNA, 50 bp, Artificial
  Synthetic oligonucleotide
cgcccccgtcacgcttttcaggctgcctcatcaaccacacccaaggcagc

SEQ ID NO: 210676 - DNA, 50 bp, Artificial
  Synthetic oligonucleotide
aaggcttaaaaccagaggccggtggcgcttttcccgtacgctaccagcgc

SEQ ID NO: 210677 - DNA, 50 bp, Artificial
  Synthetic oligonucleotide
cgcccgtggcggaatgaagcgtaagcagacggtttgcatggcgtatcgcc

SEQ ID NO: 210678 - DNA, 50 bp, Artificial
  Synthetic oligonucleotide
cgccgaaccgattttgtcgggcgaattgagctgcgccgaagtgccgcaca

SEQ ID NO: 210679 - DNA, 50 bp, Artificial
  Synthetic oligonucleotide
acctatacgggtcattcaaattatccaaacgctcgttcgtaatggtatca

SEQ ID NO: 210680 - DNA, 50 bp, Artificial
  Synthetic oligonucleotide
cgccttgacgtgggtcgcgcaaatcagggggaatttctaggctgcggact

SEQ ID NO: 210681 - DNA, 50 bp, Artificial
  Synthetic oligonucleotide
cgcgacccgatttgcccgccaattctagcgttgccccgacaaggtcggaa

SEQ ID NO: 210682 - DNA, 56 bp, Artificial
  Synthetic oligonucleotide
ttggcgtgaacgcccctaacggctcattcctggtgaaaaactgcgaaccacgtcca

SEQ ID NO: 210683 - DNA, 50 bp, Artificial
  Synthetic oligonucleotide
cgcgcccaaaccaaagcacggtttggtgtcgattttggctggtgtgtggg

SEQ ID NO: 210684 - DNA, 50 bp, Artificial
  Synthetic oligonucleotide
cgcggtttgcccaaagagcctgctaggcagccggcataaattcgccaacg

SEQ ID NO: 210685 - DNA, 50 bp, Artificial
  Synthetic oligonucleotide
cgcgtagtgctgctgaaagccaacgcgcacgcttggcattattgggtgta

SEQ ID NO: 210686 - DNA, 50 bp, Artificial
  Synthetic oligonucleotide
ccgccgcgaaaaaccgggctatattctgccgtgagccattgagccgcccg

SEQ ID NO: 210687 - DNA, 50 bp, Artificial
  Synthetic oligonucleotide
taaaagtatgtgtgcaagctcgctgtccctaagcggttcgcggccaagct

SEQ ID NO: 210688 - DNA, 50 bp, Artificial
  Synthetic oligonucleotide
ccgcgctagccgaaacgctcaccgcaaccgaattgctgaatttggacgcg

SEQ ID NO: 210689 - DNA, 50 bp, Artificial
  Synthetic oligonucleotide
acgccacccgtgccgtccgcagtaaagaaaacccgctgcctcgtatgcgc

SEQ ID NO: 210690 - DNA, 50 bp, Artificial
  Synthetic oligonucleotide
ccgctaaattttgggcgttgcgacaccgtacgcgtggcttgggcgcgttc

SEQ ID NO: 210691 - DNA, 50 bp, Artificial
  Synthetic oligonucleotide
ccgctggataatgcacatcacgcacggatccatgccccgcccatactgca

SEQ ID NO: 210692 - DNA, 50 bp, Artificial
  Synthetic oligonucleotide
ccggaagagccggattggagggtgggctgcacctgagtgctgtagatgtt

SEQ ID NO: 210693 - DNA, 55 bp, Artificial
  Synthetic oligonucleotide
ttgccctaagtggcacaaatgccgtacgaaacgaattaaaccgacgtatccgaga

SEQ ID NO: 210694 - DNA, 50 bp, Artificial
  Synthetic oligonucleotide
aagctggccgcatactttgcggatgtatgcttggcggagtcgggtacgct

SEQ ID NO: 210695 - DNA, 50 bp, Artificial
  Synthetic oligonucleotide
gttgggtgtataattggctcatgttgtatctcgaaacccccgtgcagatt

SEQ ID NO: 210696 - DNA, 50 bp, Artificial
  Synthetic oligonucleotide
cctgcaaccatacccgacaacgcgccgtaggcagtgatgcgtttccacaa

SEQ ID NO: 210697 - DNA, 50 bp, Artificial
  Synthetic oligonucleotide
acgcaagccgatgccgaatgtgtatggcgcagtcccgaatccgcggagga

SEQ ID NO: 210698 - DNA, 50 bp, Artificial
  Synthetic oligonucleotide
cgaactcacaccagccgccgtaacaggcacgttgacgacacccgttgggc

SEQ ID NO: 210699 - DNA, 50 bp, Artificial
  Synthetic oligonucleotide
cgaagaaatcagacccgccagtatgccgcaacttgcgcgctatccgaaag

SEQ ID NO: 210700 - DNA, 50 bp, Artificial
  Synthetic oligonucleotide
aaggatacgcggccttggcttgcccggtttcactcccattcgaaacggct

SEQ ID NO: 210701 - DNA, 50 bp, Artificial
  Synthetic oligonucleotide
acgaggacggggatattcggcgcatacgtccaatacggcggggaggccgt

SEQ ID NO: 210702 - DNA, 50 bp, Artificial
  Synthetic oligonucleotide
gttaagccaagtgttaccacaaatgctcccgtgggaatgacggttcggtt

SEQ ID NO: 210703 - DNA, 50 bp, Artificial
  Synthetic oligonucleotide
cgaagtgctgaaacacgtttcgatgataggcaacgataccgcgttggaca

SEQ ID NO: 210704 - DNA, 60 bp, Artificial
  Synthetic oligonucleotide
ttgcatttcagacatgtatcgcattgtcccattacccaaaaacaacgcccctagtgcgct

SEQ ID NO: 210705 - DNA, 50 bp, Artificial
  Synthetic oligonucleotide
cgacagcggcttgatgcacttggcggctgcgttgggtcggaaagtagtgg

SEQ ID NO: 210706 - DNA, 50 bp, Artificial
  Synthetic oligonucleotide
cgacggtgtagcccgttaagccgcgggtgatggtgtcttcgctacggaaa

SEQ ID NO: 210707 - DNA, 50 bp, Artificial
  Synthetic oligonucleotide
cgactacacaggcgaaaacttcggcagcccccgctaaaagcagggcgcgg

SEQ ID NO: 210708 - DNA, 50 bp, Artificial
  Synthetic oligonucleotide
cgagcttacaggcggcaaagggcagacggccaaaatcggcacaggctgca

SEQ ID NO: 210709 - DNA, 60 bp, Artificial
  Synthetic oligonucleotide
ttgcaccgttaaaaaactccctttgctgctgaaggcagcaatcataacgcgctgggcgcg

SEQ ID NO: 210710 - DNA, 60 bp, Artificial
  Synthetic oligonucleotide
ttgcaataggcctgcaagctttctgcatcgctatacagctccatcttcgcggccttgcca

SEQ ID NO: 210711 - DNA, 58 bp, Artificial
  Synthetic oligonucleotide
ttctgcccagcggttgaaaatttacctattcaccattacaatgatcaagcaggaaatt

SEQ ID NO: 210712 - DNA, 57 bp, Artificial
  Synthetic oligonucleotide
ttccagtgtcaaacctttggtcttggtttccaacaggtctagggtgcgctctgcttc

SEQ ID NO: 210713 - DNA, 60 bp, Artificial
  Synthetic oligonucleotide
ttaattggggagagcggacagaagccgacaagcaccgcgagctagtggagcatatccgca

SEQ ID NO: 210714 - DNA, 58 bp, Artificial
  Synthetic oligonucleotide
cggtgttcaacattgtgagccgttgggcttatcggaatatccgtgaattcaggtttga

SEQ ID NO: 210715 - DNA, 58 bp, Artificial
  Synthetic oligonucleotide
tgtgccgcaggtattgcacgcggacacggatttggggtttgtggtattgaacgacttg

SEQ ID NO: 210716 - DNA, 60 bp, Artificial
  Synthetic oligonucleotide
tgtcggcggaacgtagtagatattcaacagcgcacgcatattctgaggcggtttgagtaa

SEQ ID NO: 210717 - DNA, 60 bp, Artificial
  Synthetic oligonucleotide
tgtcaaagtgcatgcacctggttggttttttgtcaccaatgaagcccacggcgacgcgtg

SEQ ID NO: 210718 - DNA, 58 bp, Artificial
  Synthetic oligonucleotide
tggtaactttcgtaatatcggtgtaatgatcttcgagtatttttaagcaatctctagc

SEQ ID NO: 210719 - DNA, 56 bp, Artificial
  Synthetic oligonucleotide
tggatggtgtccggtttactgcccgttacgttccaaacaaggatcaagatccgata

SEQ ID NO: 210720 - DNA, 58 bp, Artificial
  Synthetic oligonucleotide
gggaagacgatcccgataggagagagttttcaatagcttatcacagccagttcggtta

SEQ ID NO: 210721 - DNA, 60 bp, Artificial
  Synthetic oligonucleotide
ggctgcctgagctttgaagaaagcaacatccccgccgaacagaaacacgccctgatggac

SEQ ID NO: 210722 - DNA, 58 bp, Artificial
  Synthetic oligonucleotide
ggctatgacctgccatacctcgccgaattcgtggatttggcgaaatttaagccgtatg

SEQ ID NO: 210723 - DNA, 57 bp, Artificial
  Synthetic oligonucleotide
ggccggagtggtaaatagttgctcaccgatcggaaatgcgccggtcaggtattgccg

SEQ ID NO: 210724 - DNA, 60 bp, Artificial
  Synthetic oligonucleotide
ggcatccgccttattggaacatgattcgatacagtggcaaccaatggggtgatgcagcca

SEQ ID NO: 210725 - DNA, 60 bp, Artificial
  Synthetic oligonucleotide
cggcgcaagagtatgccgacacttatgaggtggatattcgaaccgcctataatgagctaa

SEQ ID NO: 210726 - DNA, 60 bp, Artificial
  Synthetic oligonucleotide
ggatgttcgcggatgccatttcaataacctccattgcggtcagatatgcggcgctttatc

SEQ ID NO: 210727 - DNA, 59 bp, Artificial
  Synthetic oligonucleotide
ggatggtgtagatccacgcgctaaccgagcctttgagtttggtgtgttcgctggcggat

SEQ ID NO: 210728 - DNA, 60 bp, Artificial
  Synthetic oligonucleotide
ggagtttcaggctaatcaagagtcagcaggattgaacggaaagagcggtttcatgctaag

SEQ ID NO: 210729 - DNA, 55 bp, Artificial
  Synthetic oligonucleotide
ggaagatttttattgaaggcattccagaacttacgatagaaacaacgcccattcc

SEQ ID NO: 210730 - DNA, 60 bp, Artificial
  Synthetic oligonucleotide
gcttgacgcagctcatgcagcccaaccattcgcgcaccaaatcacaacaaccgaacggca

SEQ ID NO: 210731 - DNA, 60 bp, Artificial
  Synthetic oligonucleotide
gctctgccaacctttcgcccaagtgcgttaaggctttcatcattcgcttctcggtcgcta

SEQ ID NO: 210732 - DNA, 60 bp, Artificial
  Synthetic oligonucleotide
gctctatgagaaatcaaagaagattgcgaatgagctgttttataaatttgactatgacca

SEQ ID NO: 210733 - DNA, 59 bp, Artificial
  Synthetic oligonucleotide
gcgcggcaagcgtcctttggtcggaaagctgggcgatgactggctgaatcctaccgaaa

SEQ ID NO: 210734 - DNA, 60 bp, Artificial
  Synthetic oligonucleotide
gcgatcgctggcacgctcaaacttcatgagctgctgaaagggggccgccatgcgtaaagc

SEQ ID NO: 210735 - DNA, 58 bp, Artificial
  Synthetic oligonucleotide
gcgagagagtggtttgagcttgtagctaacgccctacgcctacggcttcggttgttca

SEQ ID NO: 210736 - DNA, 56 bp, Artificial
  Synthetic oligonucleotide
cgcttatgaattaaagctacttctgttaattcgtgttcgttatcaaccagtgtaac

SEQ ID NO: 210737 - DNA, 56 bp, Artificial
  Synthetic oligonucleotide
gcgaaatcttgaatcaactagccaaacgataagccaacgacacaaacgaacccaaa

SEQ ID NO: 210738 - DNA, 60 bp, Artificial
  Synthetic oligonucleotide
gccttcgtcatgcaggtaataagttttgatggcttcgcaatcgtattcggatgggtctaa

SEQ ID NO: 210739 - DNA, 59 bp, Artificial
  Synthetic oligonucleotide
gccttacatcaaccgtcgcggcagggtggcaggtactcgggaaaagatagcacatagga

SEQ ID NO: 210740 - DNA, 60 bp, Artificial
  Synthetic oligonucleotide
gccgttaatttcacaaagccactagaatcaatcttcccgctcatctttgctattacggca

SEQ ID NO: 210741 - DNA, 60 bp, Artificial
  Synthetic oligonucleotide
gccgtatcaaatactatatggaaagctacctgcccgttcaaacaggcacgccttatctga

SEQ ID NO: 210742 - DNA, 55 bp, Artificial
  Synthetic oligonucleotide
gcccgaacacccgctgtattttcatgggcgacgtaaaccaattcagctcggtcgg

SEQ ID NO: 210743 - DNA, 60 bp, Artificial
  Synthetic oligonucleotide
gcattccgcctcgtctccggctttgttgctggtcgttaataaggtgtgatgatgggatac

SEQ ID NO: 210744 - DNA, 60 bp, Artificial
  Synthetic oligonucleotide
gcagcgatttcgcactatgcgccactggcgcgccggctgtatggcccggataaaaacgac

SEQ ID NO: 210745 - DNA, 60 bp, Artificial
  Synthetic oligonucleotide
gcactctctgctcccgtcctgactgctgactacggaggccgtcaggctgctttgcggtat

SEQ ID NO: 210746 - DNA, 54 bp, Artificial
  Synthetic oligonucleotide
gcacgtgtaaccggtatgaaacgaagcaaaggcattacggaaaagggtcaatct

SEQ ID NO: 210747 - DNA, 60 bp, Artificial
  Synthetic oligonucleotide
cgcctatgctggtgcgctcttacgctgccgccatcaaacgccgctacatccaagtcaatc

SEQ ID NO: 210748 - DNA, 56 bp, Artificial
  Synthetic oligonucleotide
tagtggtacaacgcttcaaaaaaggtcaaatcaacaaaatgtttgatttcgctgaa

SEQ ID NO: 210749 - DNA, 54 bp, Artificial
  Synthetic oligonucleotide
tagtgatggatgcggcaaaatagaaaaccgcccttaatcgggcggttttggcgg

SEQ ID NO: 210750 - DNA, 60 bp, Artificial
  Synthetic oligonucleotide
tacgttcttcgttcatgttctgaatgcggatttgctccactagctcgcggtgcttgtcgg

SEQ ID NO: 210751 - DNA, 60 bp, Artificial
  Synthetic oligonucleotide
taccatgcaattcactatctcttggcaaaggggtaagttgctgatggcacttgcgattga

SEQ ID NO: 210752 - DNA, 56 bp, Artificial
  Synthetic oligonucleotide
taccacacggattgttctaggaacatagacggtcgtcggggaaacatattgcttgg

SEQ ID NO: 210753 - DNA, 60 bp, Artificial
  Synthetic oligonucleotide
tacaaaattgttagctttatggactgttaaatcatttgtcatatcatcaaggtggacata

SEQ ID NO: 210754 - DNA, 53 bp, Artificial
  Synthetic oligonucleotide
taagccggttgcgccggtattgggacacttcggacggcgtaaccgcccatctt

SEQ ID NO: 210755 - DNA, 53 bp, Artificial
  Synthetic oligonucleotide
taaccgcccatctttttgaaagcgcgtaatcggaacgcacccgtaatcgccct

SEQ ID NO: 210756 - DNA, 55 bp, Artificial
  Synthetic oligonucleotide
taacccgttgcgacgttgcaaaagacttttacgaaaatgaaatctcgcctgatac

SEQ ID NO: 210757 - DNA, 57 bp, Artificial
  Synthetic oligonucleotide
gttttatgagtcgcgctggcagatggaaagagacggcgttttgtacggtcaggttta

SEQ ID NO: 210758 - DNA, 58 bp, Artificial
  Synthetic oligonucleotide
cgccaatttgcacaggggtttcgagatacaacatgagccaattatacacccaacccga

SEQ ID NO: 210759 - DNA, 60 bp, Artificial
  Synthetic oligonucleotide
gtttatccaatctgtccgaaaaacgtggagagagcaagctaatcaagccttagagcaata

SEQ ID NO: 210760 - DNA, 60 bp, Artificial
  Synthetic oligonucleotide
gtttaagtcgcgctgctgcgctccaagcgttaccgcttcgcctgctggcttcgctaaatt

SEQ ID NO: 210761 - DNA, 57 bp, Artificial
  Synthetic oligonucleotide
gttggtttggccttcgctggtcgggtgtcagctaccggcgaagcctctgccttcgac

SEQ ID NO: 210762 - DNA, 60 bp, Artificial
  Synthetic oligonucleotide
gttgctgctgctgccgaaacgaactttagccaggccaaggcccattgcattgccgctggc

SEQ ID NO: 210763 - DNA, 58 bp, Artificial
  Synthetic oligonucleotide
gttcaactagcagaccattatcaacaaaatactccaattggcgatggccctgtccttt

SEQ ID NO: 210764 - DNA, 60 bp, Artificial
  Synthetic oligonucleotide
gtgcgagaaatttgctacaagtgcgagaaatttgctactgactgcgagaaatttgctact

SEQ ID NO: 210765 - DNA, 60 bp, Artificial
  Synthetic oligonucleotide
gtgaaacagcatgacaagatacgcaataaaccgcgatgctctgtactcggcattcaaaga

SEQ ID NO: 210766 - DNA, 60 bp, Artificial
  Synthetic oligonucleotide
gtctctgacaaaccgttcagagtgcagagcactcttgcccggcattccctgaatttcgct

SEQ ID NO: 210767 - DNA, 57 bp, Artificial
  Synthetic oligonucleotide
gtctatatccatcacgtcggcaatatccaagacgacggcaaagggaaacctaagccg

SEQ ID NO: 210768 - DNA, 60 bp, Artificial
  Synthetic oligonucleotide
gtattagcccacacgatggaacgagtgatagagctggcgaagacagcgcagggacgggca

SEQ ID NO: 210769 - DNA, 60 bp, Artificial
  Synthetic oligonucleotide
cgccaaacgccttatcgggcggacgcttgccgatctgcatcaaaatacgcattacctgcc

SEQ ID NO: 210770 - DNA, 60 bp, Artificial
  Synthetic oligonucleotide
gtatgatttcattcattgaataaactaccttgtgggttgcgctggaatttgaaaagcagc

SEQ ID NO: 210771 - DNA, 59 bp, Artificial
  Synthetic oligonucleotide
gtagttatcgtgtaattcagaaatgtaaggaattagctcatcgtggaactcgatataaa

SEQ ID NO: 210772 - DNA, 56 bp, Artificial
  Synthetic oligonucleotide
gtaaccgctttccgctcaaaagctcgatgttcggtatcacgaagttgagttccaaa

SEQ ID NO: 210773 - DNA, 60 bp, Artificial
  Synthetic oligonucleotide
ggtgcgctcatacgcctacgccattaaacgccgatacatccaagtcaatccgccccatct

SEQ ID NO: 210774 - DNA, 59 bp, Artificial
  Synthetic oligonucleotide
ggtattttgaaggctatcggatagatttgtctttcccgcaatgctcccaagaatcacag

SEQ ID NO: 210775 - DNA, 56 bp, Artificial
  Synthetic oligonucleotide
aatctgcacgggggtttcgagatacaacatgagccaattatacacccaacccgacc

SEQ ID NO: 210776 - DNA, 60 bp, Artificial
  Synthetic oligonucleotide
aatgatgaagtgcggagatggcttcattaaacaaacgtgcgctagcccacctagaatgca

SEQ ID NO: 210777 - DNA, 50 bp, Artificial
  Synthetic oligonucleotide
agaacgtttgtataggtttttaacggcggatacgacttataacgcaaaaa

SEQ ID NO: 210778 - DNA, 56 bp, Artificial
  Synthetic oligonucleotide
agaaattcagatagataccgccgaacagcaatctttaaaaaaacaagtcttagtga

SEQ ID NO: 210779 - DNA, 49 bp, Artificial
  Synthetic oligonucleotide
aaagggaaacctaagccggttgcgccggtattgggaaatttcggacggc

SEQ ID NO: 210780 - DNA, 52 bp, Artificial
  Synthetic oligonucleotide
ctaacgttgtacccgtttttgagaaacctaaaaactcatgaaatatcacgta

SEQ ID NO: 210781 - DNA, 60 bp, Artificial
  Synthetic oligonucleotide
cgcattgagccatcaatgcgtcttactccttcgagcaccaagccatagcgcgtctcatgc

SEQ ID NO: 210782 - DNA, 57 bp, Artificial
  Synthetic oligonucleotide
aatggcaggtattgccaagctcgggggcgtaaatggcgagataaaattaacggcgca

SEQ ID NO: 210783 - DNA, 60 bp, Artificial
  Synthetic oligonucleotide
actgactgcgagaaatttgctactgactgcgagaaatttgctactgactgcgagaaattt

SEQ ID NO: 210784 - DNA, 57 bp, Artificial
  Synthetic oligonucleotide
aatttgccaaaattgttacgaatgctagcgggggtttcaaaagcatagtgcaaatca

SEQ ID NO: 210785 - DNA, 60 bp, Artificial
  Synthetic oligonucleotide
acaaggctgtcttgctccacggcattgctacgagttgccatcacaagccgattgccgtga

SEQ ID NO: 210786 - DNA, 56 bp, Artificial
  Synthetic oligonucleotide
actatgaccatccggtaggtttcccgattgatggcgttcggttggaattgcaagta

SEQ ID NO: 210787 - DNA, 58 bp, Artificial
  Synthetic oligonucleotide
aacacacgcaatacaaactgtcccacatcgttcaagacccaaaggctgcctaatgtac

SEQ ID NO: 210788 - DNA, 55 bp, Artificial
  Synthetic oligonucleotide
acaatggtatttacgattactgcgcaaaggagaattaatgtcccctctaaaccca

SEQ ID NO: 210789 - DNA, 60 bp, Artificial
  Synthetic oligonucleotide
aaccctattgcaaagatttcaaagaaagcgcctatgctggtgcgctcttacgctgccgcc

SEQ ID NO: 210790 - DNA, 55 bp, Artificial
  Synthetic oligonucleotide
acgtccgcgcggctttttaccttgcctgctagggctagggcttctaagccgtctg

SEQ ID NO: 210791 - DNA, 57 bp, Artificial
  Synthetic oligonucleotide
aacctactgaaaaaggctgcaagccttggtggctcgggcagtggcccaagcggtgga

SEQ ID NO: 210792 - DNA, 59 bp, Artificial
  Synthetic oligonucleotide
cgatcccgatagggaataccattcgagttatcgcgggtgaccatcaagaatttcactgc

SEQ ID NO: 210793 - DNA, 60 bp, Artificial
  Synthetic oligonucleotide
acgtaggacatgagatagccgactatgacaatcacaacggggatggtgtagatccacgcg

SEQ ID NO: 210794 - DNA, 60 bp, Artificial
  Synthetic oligonucleotide
aacctttcgcccaagtgcgttaaggctttcatcactcgctgctcgattgctgcgtgattg

SEQ ID NO: 210795 - DNA, 56 bp, Artificial
  Synthetic oligonucleotide
acccttcagccaacctatccatttcctctaattccgcaatacggctataaaactca

SEQ ID NO: 210796 - DNA, 56 bp, Artificial
  Synthetic oligonucleotide
aagattatgaagacctctactccgatgttccattttaaggctgtacggtttgcctc

SEQ ID NO: 210797 - DNA, 54 bp, Artificial
  Synthetic oligonucleotide
accgttgcgcttttcaaagcaggatttgcgttaatttccgaatacagaaaatct

SEQ ID NO: 210798 - DNA, 60 bp, Artificial
  Synthetic oligonucleotide
aagcgatggcggatctgtttcaggccgaaccaagatttgctgccacctatctgcgacagg

SEQ ID NO: 210799 - DNA, 57 bp, Artificial
  Synthetic oligonucleotide
accgtttcaggtagccttactgccccatagtccctttggattccgcatgtgccatgt

SEQ ID NO: 210800 - DNA, 58 bp, Artificial
  Synthetic oligonucleotide
acgacttttcccaaagcccaatgcatccataatggcgcttctaaacaaacgcagagcg

SEQ ID NO: 210801 - DNA, 57 bp, Artificial
  Synthetic oligonucleotide
aaaaacctttgccgttcggttgttgtgatttggtgcgcgaatggttgggctgcatga

SEQ ID NO: 210802 - DNA, 57 bp, Artificial
  Synthetic oligonucleotide
aaaagaccatccgaagccagtagaaaagcccgatgcgtccaatcccaagccgtctga

SEQ ID NO: 210803 - DNA, 60 bp, Artificial
  Synthetic oligonucleotide
cgagttgattacacccacgcgggagcttattgatgattgatgatttagagctgggctaca

SEQ ID NO: 210804 - DNA, 49 bp, Artificial
  Synthetic oligonucleotide
aaaacggtgggcggggacgcaaaaaatccccgcagccacggggattttg

SEQ ID NO: 210805 - DNA, 56 bp, Artificial
  Synthetic oligonucleotide
gcggacgcaacccaaaccgtcagcaaggcggaacagatttcttccgtacagattcc

SEQ ID NO: 210806 - DNA, 59 bp, Artificial
  Synthetic oligonucleotide
aaagggtggtggctaattcagaaggggcaacactgcaacgcaaatcaggcgacacatgg

SEQ ID NO: 210807 - DNA, 59 bp, Artificial
  Synthetic oligonucleotide
gatccacgcgctaaccgagcctttgagtttggtgtgttcgctggcggatttgtacatac

SEQ ID NO: 210808 - DNA, 57 bp, Artificial
  Synthetic oligonucleotide
gcgtaaaagcaaacgcccaatgactgttaaagagatggcagcgaaattcaaagtttc

SEQ ID NO: 210809 - DNA, 59 bp, Artificial
  Synthetic oligonucleotide
gaggctgtggacggtgaaaatggaagagccgaacgagcaacgcgtggcagtttcgcgca

SEQ ID NO: 210810 - DNA, 54 bp, Artificial
  Synthetic oligonucleotide
cgccgaagaaggcaattaacacgtcccatagggttggctgggtacgtgccaaaa

SEQ ID NO: 210811 - DNA, 59 bp, Artificial
  Synthetic oligonucleotide
gacacaaattcatgcattcaacctcaagagtacgagcgttatgaaaaggttgttatgga

SEQ ID NO: 210812 - DNA, 59 bp, Artificial
  Synthetic oligonucleotide
catagcgcgtattgcggcggtagtttgcgccgaggttgagcatatggtgtccgggcgtg

SEQ ID NO: 210813 - DNA, 56 bp, Artificial
  Synthetic oligonucleotide
attctgaacatcgtgcatagccgtaagaattaccccaactaaccgcccttctcttc

SEQ ID NO: 210814 - DNA, 55 bp, Artificial
  Synthetic oligonucleotide
cgacttttgggcaaacataggcaccggcacaacaggagagaaaggcggctttaat

SEQ ID NO: 210815 - DNA, 58 bp, Artificial
  Synthetic oligonucleotide
ctgccatacctcgccgaattcgtggatttggcgaaatttaagccgtatgtcggcagaa

SEQ ID NO: 210816 - DNA, 58 bp, Artificial
  Synthetic oligonucleotide
aacgcctaatttgggaaagccgtagcctagccgagcgacacagcaccattcacgcttg

SEQ ID NO: 210817 - DNA, 58 bp, Artificial
  Synthetic oligonucleotide
tccgattaacgttatgtgggacggacgaaatgcccctacactgctttgccgatacaca

SEQ ID NO: 210818 - DNA, 58 bp, Artificial
  Synthetic oligonucleotide
tcgcggactttaaagagctgcgccagcgaagattcgacaaacgccgaactcataccga

SEQ ID NO: 210819 - DNA, 58 bp, Artificial
  Synthetic oligonucleotide
tttgggaaagccgtagcctagccgagcgacacagcaccattcacgcttgcttatggtt

SEQ ID NO: 210820 - DNA, 58 bp, Artificial
  Synthetic oligonucleotide
gaaaacctgtaatttaatgatacagatttttgcaaaggctctctatttgagcatatgc

SEQ ID NO: 210821 - DNA, 58 bp, Artificial
  Synthetic oligonucleotide
gcaaaccgatgccgtctgaaaccgtacaacaggagacaaaataatgcttgctcaaatt

SEQ ID NO: 210822 - DNA, 57 bp, Artificial
  Synthetic oligonucleotide
caatagcttttggttatggcttaattcttcgtcagaatctatcaagttctgaatggc

SEQ ID NO: 210823 - DNA, 57 bp, Artificial
  Synthetic oligonucleotide
ggcaaaaccgtaccttacagcgcactggacaaacgcagctacctggccaaaatcgga

SEQ ID NO: 210824 - DNA, 57 bp, Artificial
  Synthetic oligonucleotide
agtatcgtattggcgcaaacgcccgcagaaaacgtgtggcggctgatagacgacagc

SEQ ID NO: 210825 - DNA, 57 bp, Artificial
  Synthetic oligonucleotide
cgaagccgtttattcttggctcgcaaagcaatatggagggtggtttaatcggcaggc

SEQ ID NO: 210826 - DNA, 57 bp, Artificial
  Synthetic oligonucleotide
cgcgctcttatctttcgccgtttgtcctggtagtcgaaagctcgaagctggctgatt

SEQ ID NO: 210827 - DNA, 52 bp, Artificial
  Synthetic oligonucleotide
caataacccgaccacaaacaaaaaacgaaagtttccgcctgccagcaatggg

SEQ ID NO: 210828 - DNA, 56 bp, Artificial
  Synthetic oligonucleotide
gtccaccctgttgtggggcaactgggcgaacccgtatatctggattctcttgggcg

SEQ ID NO: 210829 - DNA, 57 bp, Artificial
  Synthetic oligonucleotide
gcaagctagtcgggcatccctacccgacctacccataaggactccccatgcccctgc

SEQ ID NO: 210830 - DNA, 57 bp, Artificial
  Synthetic oligonucleotide
gcgctatatcaggctcggaaccgaatcgtcaggctggtacggaaacagggcctccgt

SEQ ID NO: 210831 - DNA, 55 bp, Artificial
  Synthetic oligonucleotide
atatccctgcggacgcaaccgcccgaaacgatatgccgcccttccttacaggacc

SEQ ID NO: 210832 - DNA, 55 bp, Artificial
  Synthetic oligonucleotide
aagtcccaacggcggcaaaaccgtaccttacagcgcactggacaaacgcagctac

SEQ ID NO: 210833 - DNA, 53 bp, Artificial
  Synthetic oligonucleotide
gaaccgccacagattttgggaagtccgattttttttcctgttgtcgccaagtg

SEQ ID NO: 210834 - DNA, 53 bp, Artificial
  Synthetic oligonucleotide
cccaaacataagccgccggagccaaggagttccgcaactgggtttcgtactgt

SEQ ID NO: 210835 - DNA, 57 bp, Artificial
  Synthetic oligonucleotide
tggcttcggccacatctgcccgggcttcgggattggcgcaacgctgccagtaagaga

SEQ ID NO: 210836 - DNA, 59 bp, Artificial
  Synthetic oligonucleotide
gcacactgttcggcaacggcgcagaagaattgttccggcaatatggcggacttgaaaaa

SEQ ID NO: 210837 - DNA, 57 bp, Artificial
  Synthetic oligonucleotide
ttggttctaatccctactaggccgagtccgcatgatttgcgagcggtcggttctacc

SEQ ID NO: 210838 - DNA, 54 bp, Artificial
  Synthetic oligonucleotide
gtaaaactggtgcatacgacttcactttttccgccccaaaaagtgtcagtctct

SEQ ID NO: 210839 - DNA, 57 bp, Artificial
  Synthetic oligonucleotide
catccgcattggctaacgctgcgcggcgttcctgacgtaatcaggggctacgatttg

SEQ ID NO: 210840 - DNA, 57 bp, Artificial
  Synthetic oligonucleotide
tgcggcggtagtttgcaccgaggttgagcatatggtgtccgggcgtacgcgtttcgt

SEQ ID NO: 210841 - DNA, 57 bp, Artificial
  Synthetic oligonucleotide
accgcagcaaacgcctaatttgggaaagccgtagcctagccgagcgacacagcacca

SEQ ID NO: 210842 - DNA, 56 bp, Artificial
  Synthetic oligonucleotide
cccgtgtacaacgcagccggggagttacgctccatgcaatacattcaggcggacgg

SEQ ID NO: 210843 - DNA, 56 bp, Artificial
  Synthetic oligonucleotide
accatatgctcaacctcggcgcaaactaccgccgcaatacgcgctatggcgagtgg

SEQ ID NO: 210844 - DNA, 56 bp, Artificial
  Synthetic oligonucleotide
ggcaggctgagttaatcggtcgggatatggtgtgcgaacgaatttggaagactata

SEQ ID NO: 210845 - DNA, 56 bp, Artificial
  Synthetic oligonucleotide
tcgagcgccgtttgtacgaactagccaggaagcactgtggcgaccaggcctttttt

SEQ ID NO: 210846 - DNA, 52 bp, Artificial
  Synthetic oligonucleotide
agctttgtaaagattgggcgcgctttttgcccaatctttacgaataccccct

SEQ ID NO: 210847 - DNA, 57 bp, Artificial
  Synthetic oligonucleotide
gcaattcaaaatctcttggcaaaggggtaaattgctagtagctgtaagtattgacgt

SEQ ID NO: 210848 - DNA, 56 bp, Artificial
  Synthetic oligonucleotide
gccccatccggatagggtggcagactatatcgggacagcattggcaacgcgtttgg

SEQ ID NO: 210849 - DNA, 56 bp, Artificial
  Synthetic oligonucleotide
atcagccgtgataaaccgtgggagaaactcggcatttcccgcgccacttggtatcg

SEQ ID NO: 210850 - DNA, 53 bp, Artificial
  Synthetic oligonucleotide
gataccgcttgggaaatgtacgaacagggcaagtttgataaacgcgggaaacg

SEQ ID NO: 210851 - DNA, 56 bp, Artificial
  Synthetic oligonucleotide
atgggcgaatttgcacacgaagtccgcagcggaagctggctgggctataccaacca

SEQ ID NO: 210852 - DNA, 55 bp, Artificial
  Synthetic oligonucleotide
aatcggtaattggcttcaataaggctattagcctttacaacaactaaatcatttg

SEQ ID NO: 210853 - DNA, 56 bp, Artificial
  Synthetic oligonucleotide
gcaggtcttggcgcgtcgtttgtctcatatgaggcgttaagcctttcaaccgatgc

SEQ ID NO: 210854 - DNA, 55 bp, Artificial
  Synthetic oligonucleotide
aagataccgtcaggactagcccccgacggcgcgaaatatataagataccgtaatc

SEQ ID NO: 210855 - DNA, 54 bp, Artificial
  Synthetic oligonucleotide
acgccaacacgtttttgtgcgcccaacggctcacaaggttaaacaccgtgcaat

SEQ ID NO: 210856 - DNA, 56 bp, Artificial
  Synthetic oligonucleotide
aaatgcttatgcgccgcgcgtttcgcgttgcgccgccttctcaaatttgaacagca

SEQ ID NO: 210857 - DNA, 56 bp, Artificial
  Synthetic oligonucleotide
gtttgcgccgaggttgagcatatggtgtccgggcgtacgcgtttcgtagcgggcga

SEQ ID NO: 210858 - DNA, 60 bp, Artificial
  Synthetic oligonucleotide
gcaatcacgcagcaatcgagcagcgaatgatgaaagccttaacgcacttgggcgaaaggt

SEQ ID NO: 210859 - DNA, 55 bp, Artificial
  Synthetic oligonucleotide
ctacgccttttgtttatggttacggcatcttgcaaaccgcgcctgatgccgtctg

SEQ ID NO: 210860 - DNA, 53 bp, Artificial
  Synthetic oligonucleotide
ggttaaacaaaattatccgacggaatttcgcaaagtggattccttgttgaatg

SEQ ID NO: 210861 - DNA, 55 bp, Artificial
  Synthetic oligonucleotide
cgtgactcttcaactggaagactagagctaaacgctagacatcccggcgcccgcc

SEQ ID NO: 210862 - DNA, 55 bp, Artificial
  Synthetic oligonucleotide
ctacgcccaatgcgtagttgattttcagaagcggaatccactcgtggaactcggt

SEQ ID NO: 210863 - DNA, 55 bp, Artificial
  Synthetic oligonucleotide
cgtctatggtcatggttttggcgtgtagcagtccgcctttgaacatggcgatttt

SEQ ID NO: 210864 - DNA, 55 bp, Artificial
  Synthetic oligonucleotide
acccagcgcacccaaggtgacatgggtggccttgtcatggagatcgacgaagtaa

SEQ ID NO: 210865 - DNA, 53 bp, Artificial
  Synthetic oligonucleotide
ggtcattattgctaaaccctgaaacccaagtcagtttgcgcacggaaaccctt

SEQ ID NO: 210866 - DNA, 55 bp, Artificial
  Synthetic oligonucleotide
cgtgtgactgtccgtgctgccgggtaatggaggtatctgggcagccaggatgggt

SEQ ID NO: 210867 - DNA, 55 bp, Artificial
  Synthetic oligonucleotide
ggcaacatcaatcgtttgtcggttgcggtacaccagcaccataatcgccaaaccg

SEQ ID NO: 210868 - DNA, 53 bp, Artificial
  Synthetic oligonucleotide
cgtgggataaggtttgcgcggcatcaatatataaaaccgtatgggtttaagtt

SEQ ID NO: 210869 - DNA, 59 bp, Artificial
  Synthetic oligonucleotide
gatttgtggatgcggaaaaacgtaggctggctaatgaatacatctccgaacttaactca

SEQ ID NO: 210870 - DNA, 55 bp, Artificial
  Synthetic oligonucleotide
cgtgggacagattcgcaaggcgtattgtagggcggggccgtagcaactgaaccgc

SEQ ID NO: 210871 - DNA, 55 bp, Artificial
  Synthetic oligonucleotide
cgtgggaatgacgtggtgcaggttcgtgggaatgacgtggtgcaggttcgtagga

SEQ ID NO: 210872 - DNA, 55 bp, Artificial
  Synthetic oligonucleotide
cgttaaagtcacatttgacgaagcttccgccgtattgggtcaagacctgtgggca

SEQ ID NO: 210873 - DNA, 55 bp, Artificial
  Synthetic oligonucleotide
accctatcacagatattccccaattaccgcctgacacgcagtcagctgcctgact

SEQ ID NO: 210874 - DNA, 55 bp, Artificial
  Synthetic oligonucleotide
ggtgaaagcatgatttaaacctcttcgactatacatttgagcggatgcccttcag

SEQ ID NO: 210875 - DNA, 55 bp, Artificial
  Synthetic oligonucleotide
ggtggcagcgttgttgcctttgttaccagcagccaaggtagcacgatcgttgccg

SEQ ID NO: 210876 - DNA, 51 bp, Artificial
  Synthetic oligonucleotide
cgtttaaaaccccgccgtttccattaaaatagcgcattctacttttcagac

SEQ ID NO: 210877 - DNA, 55 bp, Artificial
  Synthetic oligonucleotide
cgtttcagacggcctttgtttgaatattacaacacggtgtgcggcggctcataag

SEQ ID NO: 210878 - DNA, 55 bp, Artificial
  Synthetic oligonucleotide
ggtcttggtttccaacaggtctagggtgcgctctgcttcggctctctgctgtttc

SEQ ID NO: 210879 - DNA, 55 bp, Artificial
  Synthetic oligonucleotide
cgtttcttgttacaacacgccgccccataaaccgtgtgcgtctccgaggcggcac

SEQ ID NO: 210880 - DNA, 60 bp, Artificial
  Synthetic oligonucleotide
gatgttctgcatgtccttacggttaaatcatccaagcggctgcatacggctcaaacccct

SEQ ID NO: 210881 - DNA, 55 bp, Artificial
  Synthetic oligonucleotide
ctaaaacgatttcggagttcgtctcattaacgactcctgttttgtctcagattgc

SEQ ID NO: 210882 - DNA, 55 bp, Artificial
  Synthetic oligonucleotide
ggtctctccggtcgttccgatcagcattctttcggcaatgtcggcttggtagggt

SEQ ID NO: 210883 - DNA, 55 bp, Artificial
  Synthetic oligonucleotide
cgtctcgacattcctggccttgccgtccacatagacaatcttgacgctcttgccc

SEQ ID NO: 210884 - DNA, 55 bp, Artificial
  Synthetic oligonucleotide
ctgcctcgctttgccgtcgggcggttgctagaacacatcataagaggccgtctga

SEQ ID NO: 210885 - DNA, 55 bp, Artificial
  Synthetic oligonucleotide
ggtaatgcggaactgggaagatgtaatgccgtttggccggatggacttgttgcac

SEQ ID NO: 210886 - DNA, 55 bp, Artificial
  Synthetic oligonucleotide
gggtttagtggagcgatgacggtagcctatattgagctgatccgcaacgggaaag

SEQ ID NO: 210887 - DNA, 55 bp, Artificial
  Synthetic oligonucleotide
ctgtacggaagaaatctgttccgccttgctgacggtttgggttgcgtccgccaaa

SEQ ID NO: 210888 - DNA, 55 bp, Artificial
  Synthetic oligonucleotide
gggtgcgtttcatcaaggtatgaacagccccttttagctcattataggcggttcg

SEQ ID NO: 210889 - DNA, 55 bp, Artificial
  Synthetic oligonucleotide
ctgttaaaccacgccgtgcaatacggtgcctactgccaaaagctcgcagcccaag

SEQ ID NO: 210890 - DNA, 55 bp, Artificial
  Synthetic oligonucleotide
ctgttaggctgccaaatgtacgctggtcttacatcatcaaagagtaatcatgcag

SEQ ID NO: 210891 - DNA, 57 bp, Artificial
  Synthetic oligonucleotide
ctaaatcagatttctcgttaatctcagttattgcaggttccaaaacacgttgattta

SEQ ID NO: 210892 - DNA, 56 bp, Artificial
  Synthetic oligonucleotide
gatggttgttttccgcaaactattccgatgagcctgcaattccgaaaaccgtcgat

SEQ ID NO: 210893 - DNA, 54 bp, Artificial
  Synthetic oligonucleotide
cttaaaggataacccaatgcccctactagacagtttcaaagtcgatcacacccg

SEQ ID NO: 210894 - DNA, 53 bp, Artificial
  Synthetic oligonucleotide
gggtgcggacggtaaagcttcggaacgcgagattacggtcggtttgaaagaca

SEQ ID NO: 210895 - DNA, 55 bp, Artificial
  Synthetic oligonucleotide
cttatccattcacggacgctgatgccacccgcaggagtacgtatcagcgaggtgg

SEQ ID NO: 210896 - DNA, 55 bp, Artificial
  Synthetic oligonucleotide
gggtgaggcgtattctttgtagttcacgtctatcatcgtttgcggattgttcagc

SEQ ID NO: 210897 - DNA, 55 bp, Artificial
  Synthetic oligonucleotide
cttctcggtcgcgttctttgcctagaagatagtctattggaccactcccgccgcc

SEQ ID NO: 210898 - DNA, 55 bp, Artificial
  Synthetic oligonucleotide
cttgcttcggagcatcagaatttgggttttgaagggcagaagccagccagaattg

SEQ ID NO: 210899 - DNA, 55 bp, Artificial
  Synthetic oligonucleotide
gggtgaagatttgcaggtagggataggatgcgtcggggtaaatgctcagggtcag

SEQ ID NO: 210900 - DNA, 55 bp, Artificial
  Synthetic oligonucleotide
accagtgtgcagccgcccgaggatcttgcgccgtaccgaggccgtaatggtagat

SEQ ID NO: 210901 - DNA, 55 bp, Artificial
  Synthetic oligonucleotide
gaaaacgcattcaaccgcttttcaggctgcctatttatatgcccgcccacaaatc

SEQ ID NO: 210902 - DNA, 55 bp, Artificial
  Synthetic oligonucleotide
ggggtcgtaaacgacgggtagcatttcggctagatggtcaatcaggagtttgtag

SEQ ID NO: 210903 - DNA, 54 bp, Artificial
  Synthetic oligonucleotide
gatgctccgaagcaagggttatcccttttaccaaatcgccgaaatactccaacc

SEQ ID NO: 210904 - DNA, 55 bp, Artificial
  Synthetic oligonucleotide
gaaacgcagtcctatcatattttcactgcagtatccaaccttaagagaggtattc

SEQ ID NO: 210905 - DNA, 55 bp, Artificial
  Synthetic oligonucleotide
gaaacgcattgcgggacgggtttgaagcatacgcccgacatacctgattgggcgg

SEQ ID NO: 210906 - DNA, 55 bp, Artificial
  Synthetic oligonucleotide
gaaacgcgccgtatggaaacgcaatgcaaattgcccgctatgccgcgttatgcct

SEQ ID NO: 210907 - DNA, 55 bp, Artificial
  Synthetic oligonucleotide
ctagcaggagagagcagccctacggtttgcacgaatttgattttacctagaacca

SEQ ID NO: 210908 - DNA, 55 bp, Artificial
  Synthetic oligonucleotide
ggtcatacaacgcgcaatggctcggtttaacggtacatcaacacatcaccaacat

SEQ ID NO: 210909 - DNA, 55 bp, Artificial
  Synthetic oligonucleotide
ctagtttccgtaaccgcgcaaatatacccgattagcgtgtgaaaggcagtatccc

SEQ ID NO: 210910 - DNA, 55 bp, Artificial
  Synthetic oligonucleotide
aatcaacgccgtcaataaaccgccacgcccaaaaccgcataaaacatacggcgca

SEQ ID NO: 210911 - DNA, 55 bp, Artificial
  Synthetic oligonucleotide
ctatgggtactgctcgcttgcttagccttgtagatgatatgtctgtcccacaggg

SEQ ID NO: 210912 - DNA, 54 bp, Artificial
  Synthetic oligonucleotide
ggtatgccggccgtaagggctgaggtggtttagggtgcgtaccagttggaataa

SEQ ID NO: 210913 - DNA, 55 bp, Artificial
  Synthetic oligonucleotide
ggtatcacgggcatccaaaccttgtcccgtgatcgcaacatgacccgaacgaacc

SEQ ID NO: 210914 - DNA, 54 bp, Artificial
  Synthetic oligonucleotide
gagtacggaatggttttagacagtatggcggaatcgagtgattaagtttttttg

SEQ ID NO: 210915 - DNA, 55 bp, Artificial
  Synthetic oligonucleotide
ctccggaacaagctttggccgcgcaaaatccgataccgtttgtgatgcaggtgca

SEQ ID NO: 210916 - DNA, 55 bp, Artificial
  Synthetic oligonucleotide
ctcgcaaagcaatatggagggtggtttaatcggcaggctgagttaatcggtcggg

SEQ ID NO: 210917 - DNA, 55 bp, Artificial
  Synthetic oligonucleotide
ctcgccgtttgactcgaacaacaaacgccatacgtcgttctcatccgtgttcgtg

SEQ ID NO: 210918 - DNA, 54 bp, Artificial
  Synthetic oligonucleotide
ctcggtttgaggttttcagacgacctttgtgtttctatcaatccgtcaggcgtt

SEQ ID NO: 210919 - DNA, 55 bp, Artificial
  Synthetic oligonucleotide
ggtagcggactagcgcgtgtatggtctcactcaatcaaagcggttcacgcccgcg

SEQ ID NO: 210920 - DNA, 55 bp, Artificial
  Synthetic oligonucleotide
ctctctgatggcaatcgggcgcggagagtggttcggtatgggtttgggtgcgagt

SEQ ID NO: 210921 - DNA, 55 bp, Artificial
  Synthetic oligonucleotide
ggtacgatgctcggcggttacaatatccacaccttaatcgaactcttggacgacg

SEQ ID NO: 210922 - DNA, 55 bp, Artificial
  Synthetic oligonucleotide
ctgacggtgtcgtctgaagaaacgttcaaaatatgatagactccacgccgtttcc

SEQ ID NO: 210923 - DNA, 55 bp, Artificial
  Synthetic oligonucleotide
ggtacctgagaacacgtattttccactggcatccgtggagttggctactgcgacc

SEQ ID NO: 210924 - DNA, 55 bp, Artificial
  Synthetic oligonucleotide
ctgcagatgacgtctgttcgatgtatacagcttagcctccgcgccattatcaaac

SEQ ID NO: 210925 - DNA, 53 bp, Artificial
  Synthetic oligonucleotide
gagggctgaaagggcttccgacaatacttacaaacggtttaacgaatacggca

SEQ ID NO: 210926 - DNA, 55 bp, Artificial
  Synthetic oligonucleotide
ctgcattgtgcgtttatgccctatgggtactgctcgctcgcttgcctatctagag

SEQ ID NO: 210927 - DNA, 55 bp, Artificial
  Synthetic oligonucleotide
ctgccagccggagtataaggagcggtcagaaatgtattatcggcggggctacccg

SEQ ID NO: 210928 - DNA, 55 bp, Artificial
  Synthetic oligonucleotide
ggtaattgggtttggaacaggtttgatattactgccagcgataggcgttttgcag

SEQ ID NO: 210929 - DNA, 53 bp, Artificial
  Synthetic oligonucleotide
ctgcccgtaccggaaggttggttgccccagaggtgggcgttcgtattagtgcc

SEQ ID NO: 210930 - DNA, 55 bp, Artificial
  Synthetic oligonucleotide
gtgccgataatcggtactgcatcaggacgttacatgcaacgtgtgcgttttggtg

SEQ ID NO: 210931 - DNA, 55 bp, Artificial
  Synthetic oligonucleotide
cgcccaataaacgaggaactgcatcatccaggggcgttgcgtgttaacccgccag

SEQ ID NO: 210932 - DNA, 55 bp, Artificial
  Synthetic oligonucleotide
cgcccaatcgcattcagtatcgtaacgcaagcctccctcaatgacgctgcgccgc

SEQ ID NO: 210933 - DNA, 55 bp, Artificial
  Synthetic oligonucleotide
cgccccatgcttctgagctgcttgcgcgtccaatgttcgggcggagtgtagcctt

SEQ ID NO: 210934 - DNA, 54 bp, Artificial
  Synthetic oligonucleotide
aaggtacaaatcaagccgaaaacaatcaagccgccggttcttcagattccgccc

SEQ ID NO: 210935 - DNA, 55 bp, Artificial
  Synthetic oligonucleotide
gtcgttcaataccacaaaccccaaatccgtgtccgcgtgcaatatctgcggcaca

SEQ ID NO: 210936 - DNA, 60 bp, Artificial
  Synthetic oligonucleotide
gactcctgttttgtctcagattgcagacaacctagagcgattagcagaatccgatagact

SEQ ID NO: 210937 - DNA, 55 bp, Artificial
  Synthetic oligonucleotide
cgccgaagggtgcttgacaataggcgctgcctatcaagttctatgcgattgaatg

SEQ ID NO: 210938 - DNA, 55 bp, Artificial
  Synthetic oligonucleotide
cgccggagactgggtcttgtgaacgactagcaacccattcatgctcgaagatacg

SEQ ID NO: 210939 - DNA, 55 bp, Artificial
  Synthetic oligonucleotide
gtcggaaacagcctctatagaatccgcctctctcgaaagacgccagcgtctgaag

SEQ ID NO: 210940 - DNA, 55 bp, Artificial
  Synthetic oligonucleotide
cgcctcgaaatgcttgatgggctttccttcgtaggtgtgcgcgcgtccgttggcg

SEQ ID NO: 210941 - DNA, 55 bp, Artificial
  Synthetic oligonucleotide
gtcgagagaggctgaataggctgccaacatacgtgcctgaccctccagcgttggg

SEQ ID NO: 210942 - DNA, 55 bp, Artificial
  Synthetic oligonucleotide
gtcgaatgctcttgatagccctggtctccattaccgcaatatataaatcattcag

SEQ ID NO: 210943 - DNA, 55 bp, Artificial
  Synthetic oligonucleotide
cgcgacgcgtagctcctttgcctgaaaaccctgccaccgtacttaaggctgaaca

SEQ ID NO: 210944 - DNA, 55 bp, Artificial
  Synthetic oligonucleotide
cgcgccctgcatactcaatcgcccaaccaaaccatttcgtttaccaatggacacg

SEQ ID NO: 210945 - DNA, 55 bp, Artificial
  Synthetic oligonucleotide
cgcgctggcagatggaaagagacggcgttttgtacggtcaggtttacatcggtgg

SEQ ID NO: 210946 - DNA, 54 bp, Artificial
  Synthetic oligonucleotide
cgcgcttacgttggtggttggcacaagtttggtaggcgtgttggtagattttcc

SEQ ID NO: 210947 - DNA, 60 bp, Artificial
  Synthetic oligonucleotide
gactacgcctatgccttgaccgactacaaatcacaaggcatatctgtcgataacgtctta

SEQ ID NO: 210948 - DNA, 55 bp, Artificial
  Synthetic oligonucleotide
cgcggcgactgtctgtccgacctgtatgaggtgcggattatagcacagtcgccat

SEQ ID NO: 210949 - DNA, 54 bp, Artificial
  Synthetic oligonucleotide
gtccaagtatttcagagtgcggtacggagttggttttaccgttgttcgaatcaa

SEQ ID NO: 210950 - DNA, 55 bp, Artificial
  Synthetic oligonucleotide
cgcgtccgtagggcataatgcccattcgtcttcaactcaagaacggaacacattt

SEQ ID NO: 210951 - DNA, 55 bp, Artificial
  Synthetic oligonucleotide
cgcgtcgcgtttgtgccgtccattcgtttaggtcctcagaaccttgggaacacgc

SEQ ID NO: 210952 - DNA, 55 bp, Artificial
  Synthetic oligonucleotide
cgcgtcgttatcttcggtacgggcagcgatttgagtgaaagtgacgtattcaata

SEQ ID NO: 210953 - DNA, 54 bp, Artificial
  Synthetic oligonucleotide
gtattgtgcgaagaagccgccgtttcggtagttcaaaccaacgtggtaagattc

SEQ ID NO: 210954 - DNA, 55 bp, Artificial
  Synthetic oligonucleotide
cgagaaaggcgttgtgccacaaaccgtggtcgtagcattctatgtgggcgcggcg

SEQ ID NO: 210955 - DNA, 55 bp, Artificial
  Synthetic oligonucleotide
cgagaacaatatgcaagtcatcatgccgtctgaagcgtcgcaaatgttccacctc

SEQ ID NO: 210956 - DNA, 55 bp, Artificial
  Synthetic oligonucleotide
gtggctacggcttgcgtagtaatttgactcgccacagctttcaactgagcaacgt

SEQ ID NO: 210957 - DNA, 55 bp, Artificial
  Synthetic oligonucleotide
cgagtgcccttgtcgcaaatatgaccgaaggaatagccaatcatggggcttaggc

SEQ ID NO: 210958 - DNA, 58 bp, Artificial
  Synthetic oligonucleotide
gacaaggctaaatgtaggcgtgatgcggctttatggtttaagcaagttttgagccagt

SEQ ID NO: 210959 - DNA, 55 bp, Artificial
  Synthetic oligonucleotide
cgagttacccacgccataaaattcaatgcgccgtgcgtgtgccaacaaagaaatt

SEQ ID NO: 210960 - DNA, 55 bp, Artificial
  Synthetic oligonucleotide
gtggcgtgtacgccgactttaggccggatgtagccccattggttgtggaagtccc

SEQ ID NO: 210961 - DNA, 55 bp, Artificial
  Synthetic oligonucleotide
cgatatgtggatcataggtcgtctgaatcagaccatcgagcaagtaacgcaagcc

SEQ ID NO: 210962 - DNA, 55 bp, Artificial
  Synthetic oligonucleotide
gtgctgatgcgcggccccaacgatttctgagcgcgaggaacaagtcatgcgtgcc

SEQ ID NO: 210963 - DNA, 55 bp, Artificial
  Synthetic oligonucleotide
cgattaaagcattttcgtgcgctggcaacacggtacgataaattaaaacgtcatt

SEQ ID NO: 210964 - DNA, 55 bp, Artificial
  Synthetic oligonucleotide
cgattgtgctacacattatcgctccattgctgatgagtttacccgacaagggaaa

SEQ ID NO: 210965 - DNA, 55 bp, Artificial
  Synthetic oligonucleotide
cgcaaaaggttggcaatctgctccgcgtgactggcaatgcggcgtgatgcaatcc

SEQ ID NO: 210966 - DNA, 55 bp, Artificial
  Synthetic oligonucleotide
gtgcgctcttacgctgccgccatcaaacgccgctacatccaagtcaatccgccgc

SEQ ID NO: 210967 - DNA, 55 bp, Artificial
  Synthetic oligonucleotide
gtgcgcgacggcataaatactcatacggtactccaaccggaaaactcggatacgg

SEQ ID NO: 210968 - DNA, 55 bp, Artificial
  Synthetic oligonucleotide
cgcaagccgcttataaacacttctctgataaaatttcatccggagctggggcggc

SEQ ID NO: 210969 - DNA, 56 bp, Artificial
  Synthetic oligonucleotide
gaacggactgtatccagtttcccgtggcctcttctacctgcgctttgaataagacg

SEQ ID NO: 210970 - DNA, 55 bp, Artificial
  Synthetic oligonucleotide
cgcacctatcactttcaagccctgagccaaaccggacagtcatgcctgattcgac

SEQ ID NO: 210971 - DNA, 55 bp, Artificial
  Synthetic oligonucleotide
cgcacgcaccctacgtcggtattggaggtttcatgcgggctactgcttgctacgc

SEQ ID NO: 210972 - DNA, 55 bp, Artificial
  Synthetic oligonucleotide
cgcagatgaagcacaatatgtactggatttacataccgttcctgaactcggggat

SEQ ID NO: 210973 - DNA, 55 bp, Artificial
  Synthetic oligonucleotide
gtgcgatacgggtatcgtgttcgctgccgatacgttcggggtggatgttggtcag

SEQ ID NO: 210974 - DNA, 55 bp, Artificial
  Synthetic oligonucleotide
aaggatctcactatgggtcaagtaatcgagttcatgccgcaccgggaagggtggc

SEQ ID NO: 210975 - DNA, 55 bp, Artificial
  Synthetic oligonucleotide
acctgaaagcgatttcgactcgccgatacctgttttaaggttcgtcataagcacc

SEQ ID NO: 210976 - DNA, 55 bp, Artificial
  Synthetic oligonucleotide
gtgccgttccatggggttgttcaatcaggcaggcccggttggggtcgaacctgca

SEQ ID NO: 210977 - DNA, 55 bp, Artificial
  Synthetic oligonucleotide
cgccatacgttcgggatgcgccataagtttgagtatggtgtggagcggtattgtg

SEQ ID NO: 210978 - DNA, 55 bp, Artificial
  Synthetic oligonucleotide
gtaagaaatacgttgttcgctattttcactgatgagtagagaatccatgccatgc

SEQ ID NO: 210979 - DNA, 55 bp, Artificial
  Synthetic oligonucleotide
cggcttggcaaacacgaagcccctgccttccaagtcggttatccgtgccgcaagc

SEQ ID NO: 210980 - DNA, 55 bp, Artificial
  Synthetic oligonucleotide
gaacgcaaagtgtggagcaacccaaaattgttctagttggggcacaacccggagc

SEQ ID NO: 210981 - DNA, 49 bp, Artificial
  Synthetic oligonucleotide
cgggcggtggataaagtttcggggtaggtaaaggccgtctgaaaatacc

SEQ ID NO: 210982 - DNA, 55 bp, Artificial
  Synthetic oligonucleotide
cgggttgacaccttgaaccggaggaatatcggtaggagctggcagcaattctaca

SEQ ID NO: 210983 - DNA, 55 bp, Artificial
  Synthetic oligonucleotide
cgggtttcgctacaagttttcagacgacctccattcaaactgctacacccgccag

SEQ ID NO: 210984 - DNA, 55 bp, Artificial
  Synthetic oligonucleotide
cggtcgcgccctttgggtttgtatcggtctaatcgtgccaatccgactgttgccg

SEQ ID NO: 210985 - DNA, 55 bp, Artificial
  Synthetic oligonucleotide
cggtcgggctgactcggatgatgagttgctttgttcgcttttcggcggcactcga

SEQ ID NO: 210986 - DNA, 55 bp, Artificial
  Synthetic oligonucleotide
cggtggagccgctggtaaagtctgcaatgtaataatccgaagccgtagtggggat

SEQ ID NO: 210987 - DNA, 55 bp, Artificial
  Synthetic oligonucleotide
cggtggtgctttaaaccgccagtaaagctgggcaatgtcgttattgccttatcgc

SEQ ID NO: 210988 - DNA, 55 bp, Artificial
  Synthetic oligonucleotide
accgtgcaaatcgtttaaactaacgcaatcttggttcagagtgcgaagctgtccg

SEQ ID NO: 210989 - DNA, 53 bp, Artificial
  Synthetic oligonucleotide
cggtgttgtcggacgggtttcaagattgcggtgttatcgggaatgacggttcg

SEQ ID NO: 210990 - DNA, 55 bp, Artificial
  Synthetic oligonucleotide
cggttgcgagcggggctgtctgaatgctgcggtcggaagtggtagttccattgga

SEQ ID NO: 210991 - DNA, 53 bp, Artificial
  Synthetic oligonucleotide
gaacccacaatagacggtcatcccgaatcaaaaccgatttataacggggtcag

SEQ ID NO: 210992 - DNA, 55 bp, Artificial
  Synthetic oligonucleotide
gtaaatcttgagggttaggttgcggcaatgcctaaatatgcgatatttctaaagc

SEQ ID NO: 210993 - DNA, 55 bp, Artificial
  Synthetic oligonucleotide
cgtaacccgcagggcagcctgttttgacacggatgcagcacaaattctcacaaac

SEQ ID NO: 210994 - DNA, 55 bp, Artificial
  Synthetic oligonucleotide
accgtccgataccctgcccaactgaaattccaaatgccgtctgaaacgcacattg

SEQ ID NO: 210995 - DNA, 55 bp, Artificial
  Synthetic oligonucleotide
gtaaataagcaactgcgctttacagaaattggcgtggttcgggttgcctctgccg

SEQ ID NO: 210996 - DNA, 55 bp, Artificial
  Synthetic oligonucleotide
ggcaacggtaccaacattaccgtcagccctcactcctaacactgccaagcatcct

SEQ ID NO: 210997 - DNA, 55 bp, Artificial
  Synthetic oligonucleotide
gtaaataacggtcgttgcagacaggctgtacaggcacgggattatcattgggtcg

SEQ ID NO: 210998 - DNA, 55 bp, Artificial
  Synthetic oligonucleotide
cgtcaccgcttgagccaccgacactacgaatttctacggattgatcggcccggct

SEQ ID NO: 210999 - DNA, 55 bp, Artificial
  Synthetic oligonucleotide
ggttgtccaatccaaatcggtatgaacgggataaatttgctcgttgggtagcaac

SEQ ID NO: 211000 - DNA, 55 bp, Artificial
  Synthetic oligonucleotide
ggttggtatagcccagccagcttccgctgcggacttcgtgtgcaaattcgcccat

SEQ ID NO: 211001 - DNA, 55 bp, Artificial
  Synthetic oligonucleotide
cgtcggtacactggcctagatggcggacggaagggtaaaatctgccgatcgtcac

SEQ ID NO: 211002 - DNA, 59 bp, Artificial
  Synthetic oligonucleotide
cgttaccgcttcgcctgctggcttcgctaaattgcggattggaagatctgaaataagaa

SEQ ID NO: 211003 - DNA, 60 bp, Artificial
  Synthetic oligonucleotide
gaaagtactgaatcagtgtctggacgtaaacagtgattttccttgccccatgatgttgaa

SEQ ID NO: 211004 - DNA, 55 bp, Artificial
  Synthetic oligonucleotide
cgcgtgtgaataagtaaagccgcagggtctgttgacattcggtttgcggcgtgcc

SEQ ID NO: 211005 - DNA, 55 bp, Artificial
  Synthetic oligonucleotide
cgctgtcacgaaacaccgaacgtgtcgtcgaggtgaaattccgtctggtgcaagc

SEQ ID NO: 211006 - DNA, 55 bp, Artificial
  Synthetic oligonucleotide
ggcaggcagtgtactgcttcagtctgatgttatagacgcaatatacgtctccggc

SEQ ID NO: 211007 - DNA, 55 bp, Artificial
  Synthetic oligonucleotide
cgcttgggttatgccagcggcacaacggttacattcaatggcgaatcgtttaacg

SEQ ID NO: 211008 - DNA, 55 bp, Artificial
  Synthetic oligonucleotide
cgctttgcaagaactgaggctgttcgcatgaatactcccgttttgctatgtggtg

SEQ ID NO: 211009 - DNA, 55 bp, Artificial
  Synthetic oligonucleotide
cggaaaaggctgtgttatactcgcgttcgcgcttttcttgagtgcttagcgagat

SEQ ID NO: 211010 - DNA, 55 bp, Artificial
  Synthetic oligonucleotide
cggaaacttcagacgcaatactgtaataatagcgccaaccgataagcctgcatca

SEQ ID NO: 211011 - DNA, 55 bp, Artificial
  Synthetic oligonucleotide
gtatgtgccggttacgctggctgtggcgaggatgtgcccttgcatggcgtagtgc

SEQ ID NO: 211012 - DNA, 52 bp, Artificial
  Synthetic oligonucleotide
cggaatcgggttcggacggcaaccgtccggttacgcttcaggaaatcggaga

SEQ ID NO: 211013 - DNA, 55 bp, Artificial
  Synthetic oligonucleotide
gtaggcaatatgttctctgccgatttgttttacagccccgacacgcaaatgaccg

SEQ ID NO: 211014 - DNA, 58 bp, Artificial
  Synthetic oligonucleotide
gaaaagcagcgtagccactttacgcccacgctttcgggcttcccattcaatcagccaa

SEQ ID NO: 211015 - DNA, 55 bp, Artificial
  Synthetic oligonucleotide
cggagaaagatgcatacgccgcgataatcggataccgatcctttaaaatagcccg

SEQ ID NO: 211016 - DNA, 55 bp, Artificial
  Synthetic oligonucleotide
cggattcaagcatccgacctatacccgagtaatcttaaagcaaacatactctgca

SEQ ID NO: 211017 - DNA, 55 bp, Artificial
  Synthetic oligonucleotide
cggcaaagcgattttgcccgacacaagcggactcaatacaccgatggtcagaacg

SEQ ID NO: 211018 - DNA, 55 bp, Artificial
  Synthetic oligonucleotide
ggcagccgtaccaagtttgacgaaaacgtctatacctggctgacaatgggcggtt

SEQ ID NO: 211019 - DNA, 55 bp, Artificial
  Synthetic oligonucleotide
cggcaatacatcgccaaactacccgacggactcttccgcctgaaagccgaactcg

SEQ ID NO: 211020 - DNA, 55 bp, Artificial
  Synthetic oligonucleotide
cggcaatcgaatatcctaattgagcaggtcgtctgaaatttggctttcagacggc

SEQ ID NO: 211021 - DNA, 55 bp, Artificial
  Synthetic oligonucleotide
cggcacgaatcatccgaaagaggttgtaggcgttgtcaatcatgagctgcaagga

SEQ ID NO: 211022 - DNA, 55 bp, Artificial
  Synthetic oligonucleotide
cggcacgattaattcttggtttggcaacgatacccatgaggctttggagcgcagc

SEQ ID NO: 211023 - DNA, 55 bp, Artificial
  Synthetic oligonucleotide
cggcagaaattcggataggaactgtcgcccaaacccagtacagcaaattggagtt

SEQ ID NO: 211024 - DNA, 55 bp, Artificial
  Synthetic oligonucleotide
gtacgtccccgtatacagcctgttgtgcacacccaaaacgtaggccgccgccgtc

SEQ ID NO: 211025 - DNA, 57 bp, Artificial
  Synthetic oligonucleotide
cttttggaaagcgcgtaatcggaacgcacacgcaaccgccctttgacggcatccagc

SEQ ID NO: 211026 - DNA, 54 bp, Artificial
  Synthetic oligonucleotide
cggcctttatccgtatggctaaaccttaaaagcggcttagacgacgatattcac

SEQ ID NO: 211027 - DNA, 55 bp, Artificial
  Synthetic oligonucleotide
gtacggtaacgtgaggaatcacaacccagttgcgagacaggttttgaccggagat

SEQ ID NO: 211028 - DNA, 55 bp, Artificial
  Synthetic oligonucleotide
cggcggctgtacgaatgggtattggagccgatttatagtatgtcgggcaggttgt

SEQ ID NO: 211029 - DNA, 55 bp, Artificial
  Synthetic oligonucleotide
ggataatgtccctaacgaaactcacgggctttccctgctctcggtatttctcggc

SEQ ID NO: 211030 - DNA, 54 bp, Artificial
  Synthetic oligonucleotide
gcgccgttgagaaaatcgtctactttagcggtggtccggttgtacgccacgact

SEQ ID NO: 211031 - DNA, 55 bp, Artificial
  Synthetic oligonucleotide
gcgcctcgtcgggatacgtcgaattgttggtattggttcaccgatacgccgccgg

SEQ ID NO: 211032 - DNA, 55 bp, Artificial
  Synthetic oligonucleotide
gcgcgcaagagcataaagtcgaccaaattgtggcttcgctttcgtttgaggatat

SEQ ID NO: 211033 - DNA, 55 bp, Artificial
  Synthetic oligonucleotide
gcgcgctacttatccgggcgcttctgctcaggtaatggaagacagcgtactggcc

SEQ ID NO: 211034 - DNA, 55 bp, Artificial
  Synthetic oligonucleotide
gcgcgtttcgggtgaggcgtattctttgtagttcacgtctatcatcgtttgcgga

SEQ ID NO: 211035 - DNA, 55 bp, Artificial
  Synthetic oligonucleotide
gcgctcaaagatattcaaaccatgcaccccttccccgcagggatacgggaaagcg

SEQ ID NO: 211036 - DNA, 52 bp, Artificial
  Synthetic oligonucleotide
ctttaaagactgccctcaatacgaaaaaaaacggagaatatccgtaccaatc

SEQ ID NO: 211037 - DNA, 55 bp, Artificial
  Synthetic oligonucleotide
gcggacatcctaaccgcattagatacggtttcccagcaattacaacaagccccga

SEQ ID NO: 211038 - DNA, 55 bp, Artificial
  Synthetic oligonucleotide
gcggagatggcttcattaaacaaacgtgcgctagcccacctagaatgcacgcaga

SEQ ID NO: 211039 - DNA, 55 bp, Artificial
  Synthetic oligonucleotide
ggcctcgtgagattggcggatacagagccggttgaacatgacgcgttgggtttgg

SEQ ID NO: 211040 - DNA, 55 bp, Artificial
  Synthetic oligonucleotide
gcggatggcagcgggtatgaaaacgccgtaatcaatttgagcgactacgatgatg

SEQ ID NO: 211041 - DNA, 55 bp, Artificial
  Synthetic oligonucleotide
gcggcaaccctcgccgccactgcacaacatagcccacaaggcagcctgaaaacgt

SEQ ID NO: 211042 - DNA, 55 bp, Artificial
  Synthetic oligonucleotide
ggccgctaaaggaacgaatgcaagcagtgtctcgtaacagcatcctacccggtag

SEQ ID NO: 211043 - DNA, 55 bp, Artificial
  Synthetic oligonucleotide
gcggcacaccgtgccaagaaaacggaaactgtgctagaatcgcgcccttattttg

SEQ ID NO: 211044 - DNA, 52 bp, Artificial
  Synthetic oligonucleotide
gcggcacactttccccgtatgtcaaacatcggtaaaaccgtacgccgtccct

SEQ ID NO: 211045 - DNA, 55 bp, Artificial
  Synthetic oligonucleotide
gcggccatacttcgtggatgaaggtctcacccgaaggggtcaattttagcacaat

SEQ ID NO: 211046 - DNA, 55 bp, Artificial
  Synthetic oligonucleotide
gcggcttgtggaaacgtacaggtttgccgttaattcaagcgatgcacaggtacgg

SEQ ID NO: 211047 - DNA, 55 bp, Artificial
  Synthetic oligonucleotide
cttcctgcgggcgtgtacgatacgcaaaattttgacggattccctgccgacttcg

SEQ ID NO: 211048 - DNA, 55 bp, Artificial
  Synthetic oligonucleotide
gcgggtgtaacggacaaggctgtgttatactcgcgttcacgcttttcttgagagt

SEQ ID NO: 211049 - DNA, 55 bp, Artificial
  Synthetic oligonucleotide
gcggtaaaagacggcatcaattccgccagacaatgggctgatgcctatccgaata

SEQ ID NO: 211050 - DNA, 55 bp, Artificial
  Synthetic oligonucleotide
gcggtaatgcgcgttgcctccacacaataacgacgtcactctcgtgcggttgaga

SEQ ID NO: 211051 - DNA, 55 bp, Artificial
  Synthetic oligonucleotide
gcggtgcgtaaggcactgtatatggctaccgtggtagcgacacgttttgaaccgc

SEQ ID NO: 211052 - DNA, 55 bp, Artificial
  Synthetic oligonucleotide
gccgggttgtaccccgataatgttgcgctttggccgaccactatttcggccgcgc

SEQ ID NO: 211053 - DNA, 55 bp, Artificial
  Synthetic oligonucleotide
gccggtatcttctgaaatcacccgaatcggaaacccctcttatgacaaccctcta

SEQ ID NO: 211054 - DNA, 55 bp, Artificial
  Synthetic oligonucleotide
ggcggatatgtgcggttatcaattggcgcgtgaaataagaaagaccgataactgg

SEQ ID NO: 211055 - DNA, 54 bp, Artificial
  Synthetic oligonucleotide
gccgtaattgtgtccgcgatagccttttaagatggtaacgtgtcccgaaattaa

SEQ ID NO: 211056 - DNA, 55 bp, Artificial
  Synthetic oligonucleotide
ggatacaacttggcgcagctttcctatccggcaaacgaaaatcccaactcgttcc

SEQ ID NO: 211057 - DNA, 55 bp, Artificial
  Synthetic oligonucleotide
gccgtctgaagcgtcgcaaatgttccacctcttgcaacgtcaagtcttgggttca

SEQ ID NO: 211058 - DNA, 59 bp, Artificial
  Synthetic oligonucleotide
cttactttcttccttttcgtttgcggcgcaacgcagacgtgcgcgcaagcaaatgctta

SEQ ID NO: 211059 - DNA, 55 bp, Artificial
  Synthetic oligonucleotide
gccgtcttctcctatcagtccgtctggactggctccgctgtctgcaatcgcgggg

SEQ ID NO: 211060 - DNA, 55 bp, Artificial
  Synthetic oligonucleotide
aattctgccagtgctgcataatcatgagcggctgtcgcaccattagacaaaaccg

SEQ ID NO: 211061 - DNA, 55 bp, Artificial
  Synthetic oligonucleotide
ggcggagagcggagcggcagagagctggccggttagggcgttaatcatttgggtt

SEQ ID NO: 211062 - DNA, 55 bp, Artificial
  Synthetic oligonucleotide
ggcgcttgcagttggtagcagtccagcttgcgtagcggctcaaaacccagcgaag

SEQ ID NO: 211063 - DNA, 55 bp, Artificial
  Synthetic oligonucleotide
gcctgtggcgtgtacgcgtattgctaaaggtcgtggcgtgtgcggacaaagttgg

SEQ ID NO: 211064 - DNA, 55 bp, Artificial
  Synthetic oligonucleotide
ggcgaggaagggcagccattgggtgttttgcgttaaggcgcgcaagtggggatag

SEQ ID NO: 211065 - DNA, 55 bp, Artificial
  Synthetic oligonucleotide
ggcgacagcggtttgtccgtcttgcaggcccaagcgtgccaatgtgttcggattc

SEQ ID NO: 211066 - DNA, 55 bp, Artificial
  Synthetic oligonucleotide
ggcgacacaccctacattaggttcgggatgggcggaatggggaacaggccgtctg

SEQ ID NO: 211067 - DNA, 55 bp, Artificial
  Synthetic oligonucleotide
ggcctgttcggtgtagcaggtgcagcttgtatcggtttgcacacaggcaacaggg

SEQ ID NO: 211068 - DNA, 55 bp, Artificial
  Synthetic oligonucleotide
gcgaagtgtcatcgccacttgtggggagattttcatatgaaggctactcctgggt

SEQ ID NO: 211069 - DNA, 54 bp, Artificial
  Synthetic oligonucleotide
ctgtatgacagcaaaaacggtgggcggggacgcaaaaaatccccgcagccacgg

SEQ ID NO: 211070 - DNA, 55 bp, Artificial
  Synthetic oligonucleotide
gcgacacgctcgccaaagcaccgcgtgaattgcatacatggttaggtaacgcatt

SEQ ID NO: 211071 - DNA, 55 bp, Artificial
  Synthetic oligonucleotide
gcgagatgtaggaacgagttgggattttcgtttgccggataggaaagctgcgcca

SEQ ID NO: 211072 - DNA, 55 bp, Artificial
  Synthetic oligonucleotide
aatggcgcattttaacagattcataaggatccatcatgagcagtatcgaacagcg

SEQ ID NO: 211073 - DNA, 55 bp, Artificial
  Synthetic oligonucleotide
gcgcaaacgcccgcagaaaacgtgtggcggctgatagacgacagcttcgtgctga

SEQ ID NO: 211074 - DNA, 55 bp, Artificial
  Synthetic oligonucleotide
gcgcacaacacagaaatgcaccgcaacggggatggagcaaaggtctcgggctacc

SEQ ID NO: 211075 - DNA, 55 bp, Artificial
  Synthetic oligonucleotide
gcgcatacaatatataccgacaagtttcaggtttgtacgaggcatatttggcaga

SEQ ID NO: 211076 - DNA, 55 bp, Artificial
  Synthetic oligonucleotide
gctgcgttttacgggccgtagcgggccgtttacacggctgctgatggttagccac

SEQ ID NO: 211077 - DNA, 55 bp, Artificial
  Synthetic oligonucleotide
gctgcttgcccctgacaattatgcctttcccgatcctgcctatgctttggcacgg

SEQ ID NO: 211078 - DNA, 55 bp, Artificial
  Synthetic oligonucleotide
ggaggacggcttatgcgtgcggtcatacagaaaacggtaggtgcaaaggtggatg

SEQ ID NO: 211079 - DNA, 54 bp, Artificial
  Synthetic oligonucleotide
ggcattttatcggtatgccgtccgaacgtttcaacaacaaacaccgattatcgg

SEQ ID NO: 211080 - DNA, 59 bp, Artificial
  Synthetic oligonucleotide
ctgtaatttgccaagatagggtgcgtttcatcaaggtatgaacagccccttttagctca

SEQ ID NO: 211081 - DNA, 55 bp, Artificial
  Synthetic oligonucleotide
gctgtttgaaggcttgccgtgtttggcggtttggtgcaaaccggctgtctgccgc

SEQ ID NO: 211082 - DNA, 55 bp, Artificial
  Synthetic oligonucleotide
gcttccaattcgcacaactctcaaaccgaagttgccgctaccttggcataccgct

SEQ ID NO: 211083 - DNA, 55 bp, Artificial
  Synthetic oligonucleotide
ggagcgcgaccatggcacaacctgccctgaaggaccaaatcgtcggaacctggtc

SEQ ID NO: 211084 - DNA, 55 bp, Artificial
  Synthetic oligonucleotide
ggaaaggcggcgggagtggtccgatagactatcttctaggcaaagaccgcgaccg

SEQ ID NO: 211085 - DNA, 55 bp, Artificial
  Synthetic oligonucleotide
ggaacatagacggtcgtcggggaaacatattgcttgggcaatggttgcgaccgaa

SEQ ID NO: 211086 - DNA, 55 bp, Artificial
  Synthetic oligonucleotide
ggaacatgattcgatacagtggcaaccaatggggtgatgcagccaatccgtggga

SEQ ID NO: 211087 - DNA, 53 bp, Artificial
  Synthetic oligonucleotide
ggaacgaactggcgaatcggaacgaaccaaccggcaaatgtaatacccgtcca

SEQ ID NO: 211088 - DNA, 55 bp, Artificial
  Synthetic oligonucleotide
ggaactctgcacgtccaaattcagacggtgagcactatcctggaaaccctcgggt

SEQ ID NO: 211089 - DNA, 55 bp, Artificial
  Synthetic oligonucleotide
ggagagcgggcttatggcgatgacgaagctatgccctaaatacggcatcttttca

SEQ ID NO: 211090 - DNA, 55 bp, Artificial
  Synthetic oligonucleotide
ggaatacacgtggttgatgcttatggcttgaccgaagctagtccaggtgtgtgtg

SEQ ID NO: 211091 - DNA, 56 bp, Artificial
  Synthetic oligonucleotide
ctgaatggtgtaccaatgtctaaaacgatttcggagttcgtctcattaacgactcc

SEQ ID NO: 211092 - DNA, 55 bp, Artificial
  Synthetic oligonucleotide
ggaatctggcgcaagagtatgacgtggacctgcgtaccgcgtcttacatgatgag

SEQ ID NO: 211093 - DNA, 55 bp, Artificial
  Synthetic oligonucleotide
ggacagttgccggacaacacaaccgaatgtaaggcaggttgatgatgagtacccg

SEQ ID NO: 211094 - DNA, 55 bp, Artificial
  Synthetic oligonucleotide
ggcagtttgatggcttcaggctgcccgagataatacgcaggtggcaaagtttcta

SEQ ID NO: 211095 - DNA, 55 bp, Artificial
  Synthetic oligonucleotide
ggacgacgacaaactcgcgcctatcgctgctaaaggcttgaaacatacgcttctg

SEQ ID NO: 211096 - DNA, 55 bp, Artificial
  Synthetic oligonucleotide
ggacgtcgggtaaagggcgtacagagaggcggcaacgactctggatccgatgggg

SEQ ID NO: 211097 - DNA, 53 bp, Artificial
  Synthetic oligonucleotide
ggacttggccacgggcgacgttgccgtagttgtcagtcaggttaacggggttg

SEQ ID NO: 211098 - DNA, 55 bp, Artificial
  Synthetic oligonucleotide
ggcagtataggaccgaccgcagttgcatcaaatgtccggacggcgtaaacccgat

SEQ ID NO: 211099 - DNA, 53 bp, Artificial
  Synthetic oligonucleotide
gcggtgctttaacggttcattcttaccgccgattaggttttgaaatgcccgta

SEQ ID NO: 211100 - DNA, 55 bp, Artificial
  Synthetic oligonucleotide
gcgtagggtttagcataaaacgctcatcataagaggggctgtatggccgtttctc

SEQ ID NO: 211101 - DNA, 55 bp, Artificial
  Synthetic oligonucleotide
ggccccagtgccggagtctatgcggttgtctgctttcttgaccaaaacagcagtc

SEQ ID NO: 211102 - DNA, 60 bp, Artificial
  Synthetic oligonucleotide
ctagaatgcacgcagattgatttttaatgctcgtcctatgcagatgtatccccgaagcta

SEQ ID NO: 211103 - DNA, 55 bp, Artificial
  Synthetic oligonucleotide
gcgttaagggtattgcgcgtgaggtttctgcgttgactcaatgtgcgtttacgcc

SEQ ID NO: 211104 - DNA, 55 bp, Artificial
  Synthetic oligonucleotide
gcgttattcaatacctgttcgatttgctgtctcacctcgatgcaagaagttgcag

SEQ ID NO: 211105 - DNA, 55 bp, Artificial
  Synthetic oligonucleotide
ggagtagcgtccgccgcttatgttgcccgaaccttggtcgcccataacggagacg

SEQ ID NO: 211106 - DNA, 54 bp, Artificial
  Synthetic oligonucleotide
gcgttttgggcgcggacggtaaagcttcggaacgcgagattacggtcggtctga

SEQ ID NO: 211107 - DNA, 55 bp, Artificial
  Synthetic oligonucleotide
gctaactgggtttggtacaagtttgatattgcagccagcaatcgacggttttcgg

SEQ ID NO: 211108 - DNA, 55 bp, Artificial
  Synthetic oligonucleotide
gctatcaaaattacgccgaattgtcgctagtaaccaaaatggcggaaacgcccgc

SEQ ID NO: 211109 - DNA, 55 bp, Artificial
  Synthetic oligonucleotide
gctatttgaagagtaggcaacagattcagttcccttgcaagactgtctgaaaccc

SEQ ID NO: 211110 - DNA, 55 bp, Artificial
  Synthetic oligonucleotide
gctcaacctcggcgcaaactaccgccgcaatacgcgctatggcgagtggaattgg

SEQ ID NO: 211111 - DNA, 55 bp, Artificial
  Synthetic oligonucleotide
gctcgttatacggaatgttcggtattttactcaaacggatggtgtgcaggctgct

SEQ ID NO: 211112 - DNA, 55 bp, Artificial
  Synthetic oligonucleotide
gctctagctgcttgctttgacctaacgagctgtcacgctgcgcattgagccatca

SEQ ID NO: 211113 - DNA, 51 bp, Artificial
  Synthetic oligonucleotide
cgttaaacctataccgcccgtctttccggtacaggaattcgaaagtatcca

SEQ ID NO: 211114 - DNA, 56 bp, Artificial
  Synthetic oligonucleotide
attttttagtgttggcaataggtaggtatatggatgcttagaaatcgcaggaaaac

SEQ ID NO: 211115 - DNA, 55 bp, Artificial
  Synthetic oligonucleotide
aatgcgcttttggcttctcggcaaatttgtcgggctaataaatgatcgggaaccc

SEQ ID NO: 211116 - DNA, 55 bp, Artificial
  Synthetic oligonucleotide
ggccagacgttcaaaggtggatcagccgacttgaaaggagggcagtgatgaacgc

SEQ ID NO: 211117 - DNA, 55 bp, Artificial
  Synthetic oligonucleotide
gctgacagcttccgctgctctgccacagcgcttccagtgactccaaagtattgac

SEQ ID NO: 211118 - DNA, 55 bp, Artificial
  Synthetic oligonucleotide
gctgatggcgcaagctatgaggcaagtggatgcaaattaccgtgagttgtatgcc

SEQ ID NO: 211119 - DNA, 55 bp, Artificial
  Synthetic oligonucleotide
gctgcatacccgcagaagcctaaattgctttggacggccggaaaacagatgttgt

SEQ ID NO: 211120 - DNA, 55 bp, Artificial
  Synthetic oligonucleotide
gctgccagcgatagacggtttgcagacttgcaggcgcataggaatagtttacgga

SEQ ID NO: 211121 - DNA, 55 bp, Artificial
  Synthetic oligonucleotide
gctgcctcccactgttctcgggtaggccgctcaccctcctgccaagcaatgatgt

SEQ ID NO: 211122 - DNA, 55 bp, Artificial
  Synthetic oligonucleotide
gagaatgaagccgattatagcgatgattcggattttgcgtcagccccggaaaccg

SEQ ID NO: 211123 - DNA, 55 bp, Artificial
  Synthetic oligonucleotide
gagagaggggaattgtaggcagtcggcgcgtgggtgtcaaatattatcgcggacg

SEQ ID NO: 211124 - DNA, 55 bp, Artificial
  Synthetic oligonucleotide
gagccggccccgttccgattgactggaaaggacgatcacttgccgatttacgaca

SEQ ID NO: 211125 - DNA, 58 bp, Artificial
  Synthetic oligonucleotide
atttcaatcgggtctatatccatcacgtcggcaatatccaagacgacggcaaagggaa

SEQ ID NO: 211126 - DNA, 55 bp, Artificial
  Synthetic oligonucleotide
gagccgttgtctttgggccattcgccgtgattcaggtaatactcggtaacggctg

SEQ ID NO: 211127 - DNA, 55 bp, Artificial
  Synthetic oligonucleotide
gggcattgcccacgaggctaaggttgcctctttgggtggcgttgtgcgtaacctc

SEQ ID NO: 211128 - DNA, 55 bp, Artificial
  Synthetic oligonucleotide
gaggcagcgattttatccctcgcgtttctgtcggttatgataccggcgatatgcg

SEQ ID NO: 211129 - DNA, 55 bp, Artificial
  Synthetic oligonucleotide
gagggctacgagataccgctttcagacggcaatcgttccgtcagggcaaacgaat

SEQ ID NO: 211130 - DNA, 55 bp, Artificial
  Synthetic oligonucleotide
gggcaagatgatcatgccgcaagcttagttgttgtcattggcgcgttgaatgcct

SEQ ID NO: 211131 - DNA, 55 bp, Artificial
  Synthetic oligonucleotide
gataaacatacaacccgactccgtcgtgcacgcaaaacccgtgcacgtattgcgg

SEQ ID NO: 211132 - DNA, 52 bp, Artificial
  Synthetic oligonucleotide
gatataccaaccgttagtatcacctttgggacggtgccttaacccgttaatc

SEQ ID NO: 211133 - DNA, 55 bp, Artificial
  Synthetic oligonucleotide
gatatggcggcaaggacagaggcaaacgccaaatatcgaggcacttggtacgggt

SEQ ID NO: 211134 - DNA, 55 bp, Artificial
  Synthetic oligonucleotide
gatcgctgctggttcaggcaccgtgttgcgagggacttgtcatgagaacgagaac

SEQ ID NO: 211135 - DNA, 55 bp, Artificial
  Synthetic oligonucleotide
gggattggggaaaattgctttggcagaaattgacgttgcgattaaccaagatttg

SEQ ID NO: 211136 - DNA, 60 bp, Artificial
  Synthetic oligonucleotide
atttcaaagacgcgccacaattggtgcgctcatacgcctacgccattaaacgccgataca

SEQ ID NO: 211137 - DNA, 55 bp, Artificial
  Synthetic oligonucleotide
acagccattgggcgtagttttcgtcggtttcaggctgccccacggcggtgtcgtg

SEQ ID NO: 211138 - DNA, 55 bp, Artificial
  Synthetic oligonucleotide
gatgggcagtatcggcattattccgaaaacccgcgaactatacccgattaacggc

SEQ ID NO: 211139 - DNA, 55 bp, Artificial
  Synthetic oligonucleotide
gatgggcatggactacaagaatgctgcggccggctggtttggcccgctgttcggt

SEQ ID NO: 211140 - DNA, 55 bp, Artificial
  Synthetic oligonucleotide
gggactcacgcaagaacgctggccggatattgtgttccacgaaacgcgcgagcat

SEQ ID NO: 211141 - DNA, 55 bp, Artificial
  Synthetic oligonucleotide
acactgtctaccgacccagttttcgacagatcttcgggttgaactgtcctagccc

SEQ ID NO: 211142 - DNA, 55 bp, Artificial
  Synthetic oligonucleotide
gattacagccgcaccatgtttgtctgccgcatgaaacataccctgtccaaccagc

SEQ ID NO: 211143 - DNA, 50 bp, Artificial
  Synthetic oligonucleotide
gattatttacccatgacccggtactaaacattaaaacgttccgtttcacc

SEQ ID NO: 211144 - DNA, 55 bp, Artificial
  Synthetic oligonucleotide
gggaccgacttgggcgtgcatccatttgacgaggaagggtttggcagttgcccac

SEQ ID NO: 211145 - DNA, 55 bp, Artificial
  Synthetic oligonucleotide
ggggctgttcataccttgatgaaacgcaccctgtcttggcaaattacagacggca

SEQ ID NO: 211146 - DNA, 55 bp, Artificial
  Synthetic oligonucleotide
gaaattggacgcactcggacaaataaacctaacagagggcttggtttgccgcaga

SEQ ID NO: 211147 - DNA, 55 bp, Artificial
  Synthetic oligonucleotide
atttaaagagtgaatagtacgcccacgcttgatttgttcaacctcaacgactaaa

SEQ ID NO: 211148 - DNA, 55 bp, Artificial
  Synthetic oligonucleotide
gaacgtccccgcccaacccttcaagctgagcgtagccacccgcctttatccgcac

SEQ ID NO: 211149 - DNA, 55 bp, Artificial
  Synthetic oligonucleotide
gaactaaaccggcgatattgtgcggaagcataatcacgaccataaccggtgttcg

SEQ ID NO: 211150 - DNA, 55 bp, Artificial
  Synthetic oligonucleotide
gaagcgtcgcaaatgttccacctcttgcaacgtcaagtcttgggttcataccgca

SEQ ID NO: 211151 - DNA, 55 bp, Artificial
  Synthetic oligonucleotide
gaaggtagagccagcgacaacggttcggtagatacgacggcagccattaccgttg

SEQ ID NO: 211152 - DNA, 55 bp, Artificial
  Synthetic oligonucleotide
gaataatcatgcttggcccacggatacaccccgttgcggcccaaatcttggcgcc

SEQ ID NO: 211153 - DNA, 55 bp, Artificial
  Synthetic oligonucleotide
gggcggattgcgcgcctgtcagataaaccccgtgtttaaacgggcgacaatgagg

SEQ ID NO: 211154 - DNA, 55 bp, Artificial
  Synthetic oligonucleotide
gaatgtattgagtacctttatgtccaaagggctttacgactcgatgcaggatttg

SEQ ID NO: 211155 - DNA, 55 bp, Artificial
  Synthetic oligonucleotide
gaattaatcataaaggttatggtggcgataggcagtatcggcagaggttccgccc

SEQ ID NO: 211156 - DNA, 55 bp, Artificial
  Synthetic oligonucleotide
gacaaacgcagcctgaaagccgccccatggtttatgaaaccctagcgggctaatc

SEQ ID NO: 211157 - DNA, 55 bp, Artificial
  Synthetic oligonucleotide
acataggccgcttccacttgcgagagcggatgctcgcacacttgggcatgcagat

SEQ ID NO: 211158 - DNA, 56 bp, Artificial
  Synthetic oligonucleotide
attgctatcgttacccgctagaaatacccagtaattacgcaaatcttcattggtaa

SEQ ID NO: 211159 - DNA, 55 bp, Artificial
  Synthetic oligonucleotide
gacattccgccgcaattggcaggggaatacatgcgtgccatcttaacgggcaggc

SEQ ID NO: 211160 - DNA, 55 bp, Artificial
  Synthetic oligonucleotide
gacccttctcataaattacttacagatacccgtgaggggaatgcaacaatccctc

SEQ ID NO: 211161 - DNA, 52 bp, Artificial
  Synthetic oligonucleotide
gggcggaataacagataaccgattgaatccgtaaggaaaacggtttgtagga

SEQ ID NO: 211162 - DNA, 55 bp, Artificial
  Synthetic oligonucleotide
gggcgagaatgggaacgctacgcgtggtgcaaaggccgtgtggttacgccgtatc

SEQ ID NO: 211163 - DNA, 55 bp, Artificial
  Synthetic oligonucleotide
acagggttatcactcaaatcgcctggcgagacaacctcctgtcacaggcattcgc

SEQ ID NO: 211164 - DNA, 55 bp, Artificial
  Synthetic oligonucleotide
gactgcacatccgacgaaagcatcgcaatcatcaggaaattggaacgcgccttgg

SEQ ID NO: 211165 - DNA, 55 bp, Artificial
  Synthetic oligonucleotide
gactgctttggacgggcgcaatccctccgacttgtatcaactggatttaaatgcc

SEQ ID NO: 211166 - DNA, 55 bp, Artificial
  Synthetic oligonucleotide
gactgtctatgtctggtttcattgtcgacgatattggctgtccagggaaagtacg

SEQ ID NO: 211167 - DNA, 55 bp, Artificial
  Synthetic oligonucleotide
gagaagcgtattcctgccataccagacgtcacatctactgcgtatacacaagcac

SEQ ID NO: 211168 - DNA, 55 bp, Artificial
  Synthetic oligonucleotide
gcatacagtgcggtcagacggtaaagtgctccggagtcgagatagtcgtatccca

SEQ ID NO: 211169 - DNA, 55 bp, Artificial
  Synthetic oligonucleotide
attccgttcggacggccaagcggtcaatgttcggcaaactgccgacagtagcccg

SEQ ID NO: 211170 - DNA, 55 bp, Artificial
  Synthetic oligonucleotide
gcatcacgccctgcgatctgataggtcacgtcaccagtacgcttgttgacctgcc

SEQ ID NO: 211171 - DNA, 53 bp, Artificial
  Synthetic oligonucleotide
acaagtttaagccctatgtgggtcgttctaacttggaagctacgggattggga

SEQ ID NO: 211172 - DNA, 55 bp, Artificial
  Synthetic oligonucleotide
gcattcggattcaagtgggacggcgaagtcacctatcagagccgccgttacgccc

SEQ ID NO: 211173 - DNA, 55 bp, Artificial
  Synthetic oligonucleotide
gccaggggtttgctcttatgcataccgtgtgcggatgcgggaagggcggttacca

SEQ ID NO: 211174 - DNA, 55 bp, Artificial
  Synthetic oligonucleotide
ggatcaagtgttgtcaagttgctccgagttggctgccaaacaacgtatacagggc

SEQ ID NO: 211175 - DNA, 55 bp, Artificial
  Synthetic oligonucleotide
ggatacagcggcattgccaccccgcacggtttccgcagcttggcaacggacgtat

SEQ ID NO: 211176 - DNA, 55 bp, Artificial
  Synthetic oligonucleotide
gccagtcagaacgatgcccgatgtgaggacttcttcagggaagccggaacggcgc

SEQ ID NO: 211177 - DNA, 55 bp, Artificial
  Synthetic oligonucleotide
gccatcaagcctctcccgaactggcaaggcgttcatagcgccccacacgtcatag

SEQ ID NO: 211178 - DNA, 51 bp, Artificial
  Synthetic oligonucleotide
gccccgcgcgaaacggtaacccttcccgtccaagtgtccaccattccggaa

SEQ ID NO: 211179 - DNA, 55 bp, Artificial
  Synthetic oligonucleotide
ggatacagcctgttgaggcagtcggtatgccccagcggacattctcgtttgaaac

SEQ ID NO: 211180 - DNA, 58 bp, Artificial
  Synthetic oligonucleotide
attattctgtatcccaaatcgtgcccgttatatctcccgatgggaaactgtatgcgcc

SEQ ID NO: 211181 - DNA, 55 bp, Artificial
  Synthetic oligonucleotide
gcccgcagaaaacgtgtggcggctgatagacgacagcttcgtgctgacgcgctag

SEQ ID NO: 211182 - DNA, 55 bp, Artificial
  Synthetic oligonucleotide
gcccgcgcctgttgaaagtttggtcttgccgtatggtttcgtgccggacggcttg

SEQ ID NO: 211183 - DNA, 55 bp, Artificial
  Synthetic oligonucleotide
gcccttgccaccatctaacatggaacaaactccaacaattcgggaggggcggcga

SEQ ID NO: 211184 - DNA, 55 bp, Artificial
  Synthetic oligonucleotide
gccgacacttatggggtggatattcgaaccgcctataatgagctaaaaggggctg

SEQ ID NO: 211185 - DNA, 55 bp, Artificial
  Synthetic oligonucleotide
gccgatttcgtgttgatcgataatgtggccgtgtaaatgggtcagtgcgccttca

SEQ ID NO: 211186 - DNA, 55 bp, Artificial
  Synthetic oligonucleotide
ggcggcagggttgatagtcatagcagggctgttcatagcgatatggagcgtcaag

SEQ ID NO: 211187 - DNA, 55 bp, Artificial
  Synthetic oligonucleotide
gccgcaccatgtttgtctgccgcatgaagcataccctgtccaaccagcataccgc

SEQ ID NO: 211188 - DNA, 55 bp, Artificial
  Synthetic oligonucleotide
gccggatatattgtgtgaagtctctcgtcttttccagtatgcgcctaatatcggc

SEQ ID NO: 211189 - DNA, 55 bp, Artificial
  Synthetic oligonucleotide
gccgggcggtgtttcaatttcgttgcggttttgctttcaggtagcctgacaaagc

SEQ ID NO: 211190 - DNA, 55 bp, Artificial
  Synthetic oligonucleotide
gggaatgtatcagagagcacaatcggctgattgaagaagaaaatcggttcagaac

SEQ ID NO: 211191 - DNA, 60 bp, Artificial
  Synthetic oligonucleotide
atgtgcggcaaagccgcatattggattcagacggcttgccgtctgaactgcgggggctct

SEQ ID NO: 211192 - DNA, 55 bp, Artificial
  Synthetic oligonucleotide
ggattgcgatgtaaaacacgggtggcgattttaatcatgtagtccaagccgccgc

SEQ ID NO: 211193 - DNA, 55 bp, Artificial
  Synthetic oligonucleotide
gcaaacctatcccttcggttgtgcggcaaaccttattttcagacggcctctgtcc

SEQ ID NO: 211194 - DNA, 55 bp, Artificial
  Synthetic oligonucleotide
gcaaacggtccatgccgtcacatgccattacgctgattgggctacaatccgccgc

SEQ ID NO: 211195 - DNA, 55 bp, Artificial
  Synthetic oligonucleotide
gcaaatttcagccgcgtcatgaaactcagcaggcagttgcaaagattcccgaccg

SEQ ID NO: 211196 - DNA, 55 bp, Artificial
  Synthetic oligonucleotide
gcaaccaggttaactatgacagtaattccaactacatagcgggccatatcggtgc

SEQ ID NO: 211197 - DNA, 55 bp, Artificial
  Synthetic oligonucleotide
gcaagcctctacttgcggtgacggtagcacagtcactagcggcggaagctgcgac

SEQ ID NO: 211198 - DNA, 55 bp, Artificial
  Synthetic oligonucleotide
ggattcgctttgctgtgcgacggtgcggtagtcgtcatattcgctttccgcgccg

SEQ ID NO: 211199 - DNA, 55 bp, Artificial
  Synthetic oligonucleotide
acaccgccccagctttctagacaacgcggacaaggcacgcttatagacactatcc

SEQ ID NO: 211200 - DNA, 55 bp, Artificial
  Synthetic oligonucleotide
ggcttgttggtagggcataatcgcatttctttcaaacggtaagggcgcgtattgt

SEQ ID NO: 211201 - DNA, 55 bp, Artificial
  Synthetic oligonucleotide
ggcttggtaactgcacttggtgcgttctacttggcagcggcagaggtcatcaacg

SEQ ID NO: 211202 - DNA, 60 bp, Artificial
  Synthetic oligonucleotide
atggcaagccgtgttcatcaacacggaaaggaactactcgccatgaaagccttgcacacc

SEQ ID NO: 211203 - DNA, 55 bp, Artificial
  Synthetic oligonucleotide
gcaccggcacaacaggagagaaaggcggctttaattggggagagcggacagaagc

SEQ ID NO: 211204 - DNA, 55 bp, Artificial
  Synthetic oligonucleotide
ggctcgaaatatgttcgtttagccgttaaagatgcaagtagaaccaattctcccg

SEQ ID NO: 211205 - DNA, 55 bp, Artificial
  Synthetic oligonucleotide
ggatccgttggatgttctacgccatgtagtagcacagagtgacaattaagttccg

SEQ ID NO: 211206 - DNA, 55 bp, Artificial
  Synthetic oligonucleotide
ggctataattatgccccatcgtatttcgtcaaaccgataggcagccgtgaaccgg

SEQ ID NO: 211207 - DNA, 55 bp, Artificial
  Synthetic oligonucleotide
gcaggcgattttagggtggctgcgctgcctgaaataaaggccgtctgaaatcgtg

SEQ ID NO: 211208 - DNA, 55 bp, Artificial
  Synthetic oligonucleotide
gcaggctgctatttcgcgtggcatgagtgcgccgattgtgctgcttatgggcgcg

SEQ ID NO: 211209 - DNA, 55 bp, Artificial
  Synthetic oligonucleotide
ggcgtcaattcagcgtgttcgcgggtgagtttacggtaattgtccatgtcggacg

SEQ ID NO: 211210 - DNA, 55 bp, Artificial
  Synthetic oligonucleotide
gcaggggtaagcgatggagttcttgcaaggtattcttggcactgacgcggggctc

SEQ ID NO: 211211 - DNA, 55 bp, Artificial
  Synthetic oligonucleotide
gcagtcctaccgcatggatccagccgttcacttctggttcttgcgctttgctgtg

SEQ ID NO: 211212 - DNA, 55 bp, Artificial
  Synthetic oligonucleotide
ggcgtacacatcaggctattagggttttgcgcgcaaacgtcgggcttttcggcgg

SEQ ID NO: 211213 - DNA, 58 bp, Artificial
  Synthetic oligonucleotide
atcggattgcctcgtttaaaagtatgtgtgcaagctcgctgtccctaagcggttcgcg

SEQ ID NO: 211214 - DNA, 55 bp, Artificial
  Synthetic oligonucleotide
caccctgatcgcacgcaattggcattgtccgttcggagaaatcgacctgattgtc

SEQ ID NO: 211215 - DNA, 55 bp, Artificial
  Synthetic oligonucleotide
caccgatactcttaccaacagcttgatgcgtaatggattgtttacccataccgtg

SEQ ID NO: 211216 - DNA, 55 bp, Artificial
  Synthetic oligonucleotide
tgacgctgcgtggcgttcctgatgcgattcgcggctatgacctgccatacctcgc

SEQ ID NO: 211217 - DNA, 55 bp, Artificial
  Synthetic oligonucleotide
caccttagcttgttcgttctgtttgcgctagtttccgctgccacccatgcagaaa

SEQ ID NO: 211218 - DNA, 55 bp, Artificial
  Synthetic oligonucleotide
tgacacataccgtccacctgcatttagaagaaaccgacaacttggcgttgcagcg

SEQ ID NO: 211219 - DNA, 55 bp, Artificial
  Synthetic oligonucleotide
cacggctgctgatggttagccactaaaacgaacaaaatcgcgcccaatagccttt

SEQ ID NO: 211220 - DNA, 55 bp, Artificial
  Synthetic oligonucleotide
cacgggcaaactcatcgcgcgacaccgccgtatctccggcaaaatggtacacgcc

SEQ ID NO: 211221 - DNA, 55 bp, Artificial
  Synthetic oligonucleotide
cacggtcaaaggctgcgtgtgcaccggtttgtaagccagccggttgtcttcggta

SEQ ID NO: 211222 - DNA, 54 bp, Artificial
  Synthetic oligonucleotide
cacgtcggcaatatccaagacgacggcaaagggaaacctaagccggttgcgccg

SEQ ID NO: 211223 - DNA, 55 bp, Artificial
  Synthetic oligonucleotide
cactatctcttggcaaaggggtaagttgctgatggcacttgcgattgacgctcgg

SEQ ID NO: 211224 - DNA, 59 bp, Artificial
  Synthetic oligonucleotide
cgtgggttattgacttatcagtatgataacggctagaataagccgtatatcaatcgtta

SEQ ID NO: 211225 - DNA, 57 bp, Artificial
  Synthetic oligonucleotide
atcgacttaaaacatcaacagttggggattggttgtcggatgatgctaagtttggta

SEQ ID NO: 211226 - DNA, 55 bp, Artificial
  Synthetic oligonucleotide
cactcaagcgttggccaaacttaacccgtttggcacatgttccggaatctatgcg

SEQ ID NO: 211227 - DNA, 55 bp, Artificial
  Synthetic oligonucleotide
tctgcgctaagccggataatgttttcttgctcacgataaaggctgagacctttgc

SEQ ID NO: 211228 - DNA, 55 bp, Artificial
  Synthetic oligonucleotide
cagacgacctttccgtgttgcaagatgcttaaacgggcgagccggttacgcgccg

SEQ ID NO: 211229 - DNA, 55 bp, Artificial
  Synthetic oligonucleotide
tctctgattgtcttgagccatacggcttggaaggtgcgttattgaagcatcaggc

SEQ ID NO: 211230 - DNA, 55 bp, Artificial
  Synthetic oligonucleotide
cagagcaaaaggctctaaccgtcttattcaaagcgcaggtagaagaggccacggg

SEQ ID NO: 211231 - DNA, 55 bp, Artificial
  Synthetic oligonucleotide
cagcatcaattcgtagagtaggttttcagacgacgtttcagacagcacggaatcg

SEQ ID NO: 211232 - DNA, 55 bp, Artificial
  Synthetic oligonucleotide
acggttaaatcatccaagcggctgcatacggctcaaacccctgtacatcgcttgg

SEQ ID NO: 211233 - DNA, 55 bp, Artificial
  Synthetic oligonucleotide
cagccctaatatgactatcaaccctgccgccaatatacctaccaagctccactga

SEQ ID NO: 211234 - DNA, 55 bp, Artificial
  Synthetic oligonucleotide
caaagaaagcgcctatgctggtgcgctcttacgctgccgccatcaaacgccgcta

SEQ ID NO: 211235 - DNA, 55 bp, Artificial
  Synthetic oligonucleotide
caacaacgcgtgcatcatcaggtttaacgtagtcagtgtcagctgcgccaacgcc

SEQ ID NO: 211236 - DNA, 59 bp, Artificial
  Synthetic oligonucleotide
agtgcattgccaagtctatcggtaattgggtttggaacaggtttgatattactgccagc

SEQ ID NO: 211237 - DNA, 55 bp, Artificial
  Synthetic oligonucleotide
caacaggcgtaaacgcacattgagtcaacgcagaaacctcacgcgcaatgccctt

SEQ ID NO: 211238 - DNA, 55 bp, Artificial
  Synthetic oligonucleotide
tgccacgcctgcctcgttccaaacctgacgcgccgtatcggtaaaggttacattg

SEQ ID NO: 211239 - DNA, 55 bp, Artificial
  Synthetic oligonucleotide
caaccggaatccgacccaacaggctgtcccacgcggcaagaatctgccgacccaa

SEQ ID NO: 211240 - DNA, 55 bp, Artificial
  Synthetic oligonucleotide
aaccgactggcgcggcttctctggtcggtggccaaaccgacgattccgtgtgtga

SEQ ID NO: 211241 - DNA, 55 bp, Artificial
  Synthetic oligonucleotide
tgcatgtccaatccttaaactgtgttcgagtttaaacctgatgcagggaaaggcg

SEQ ID NO: 211242 - DNA, 55 bp, Artificial
  Synthetic oligonucleotide
caaggcgcgtccgccatacggtaacgcgttttgcaggtgtagtgcccttctttcg

SEQ ID NO: 211243 - DNA, 55 bp, Artificial
  Synthetic oligonucleotide
tgcagccgaatttcaaaaccccggcatgatattcgaggcatacgtcagcaatacg

SEQ ID NO: 211244 - DNA, 55 bp, Artificial
  Synthetic oligonucleotide
caatcgacaatatccatcaaacgcaaatgcgtacgaatctccaattgctcacgtg

SEQ ID NO: 211245 - DNA, 55 bp, Artificial
  Synthetic oligonucleotide
caatcgtttcaggggagcaattggaacaagtcaggggcacggctcataaggcatc

SEQ ID NO: 211246 - DNA, 55 bp, Artificial
  Synthetic oligonucleotide
caatttcctctcgaaaaggccgtcgggcggctctgttgtagcttcctctcttatc

SEQ ID NO: 211247 - DNA, 58 bp, Artificial
  Synthetic oligonucleotide
agtctcaaactcggtcgggctgactcggatgatgagttgctttgttcgcttttcggcg

SEQ ID NO: 211248 - DNA, 55 bp, Artificial
  Synthetic oligonucleotide
tgcaactgtcgagacgccattcattgctaattggaagtcttttaggccggaatat

SEQ ID NO: 211249 - DNA, 55 bp, Artificial
  Synthetic oligonucleotide
cacaatatccgcgcgtagggtttcccaatctaagtgcaacggttcatcgcagaat

SEQ ID NO: 211250 - DNA, 55 bp, Artificial
  Synthetic oligonucleotide
tgatgcggacttgaaccggacccgcgacccaaacatcacaatgccgtctgaacgc

SEQ ID NO: 211251 - DNA, 55 bp, Artificial
  Synthetic oligonucleotide
caccacgcaatattacagccttgaggcgacgcttaagggaaaccgcttcaacggc

SEQ ID NO: 211252 - DNA, 55 bp, Artificial
  Synthetic oligonucleotide
tgagccgtctgctaaccggtgtacatcggaagcgcaggcggtgtgccaataggtg

SEQ ID NO: 211253 - DNA, 55 bp, Artificial
  Synthetic oligonucleotide
cacccggccctacgcaaccgaaccgtcattccgagcatttgtggtaacacttggc

SEQ ID NO: 211254 - DNA, 54 bp, Artificial
  Synthetic oligonucleotide
tccaaaagtttaacgtcggttggttccaattccaactcgtaacgctgcatataa

SEQ ID NO: 211255 - DNA, 55 bp, Artificial
  Synthetic oligonucleotide
catctattagacgattgagggccgcaaggcccgttctccattatcaaggataggc

SEQ ID NO: 211256 - DNA, 55 bp, Artificial
  Synthetic oligonucleotide
tcaaccgccaagcatcgttcatgcgccattgcgtatccacaaagccgttccaagc

SEQ ID NO: 211257 - DNA, 55 bp, Artificial
  Synthetic oligonucleotide
catggcgcatcctccaaaagaactaaagatacgtcgattttagccgtttacggcg

SEQ ID NO: 211258 - DNA, 56 bp, Artificial
  Synthetic oligonucleotide
agtagcgcatgcctgttagctgcgttttacgggccgtagcgggccgtttacacggc

SEQ ID NO: 211259 - DNA, 51 bp, Artificial
  Synthetic oligonucleotide
aacgggttaaggcaccgtcccaaaggtgatactaacggttggtatatctgg

SEQ ID NO: 211260 - DNA, 55 bp, Artificial
  Synthetic oligonucleotide
cattcagacagccgacaaattaagcagggtgacattttcgttgcctgtcagggcg

SEQ ID NO: 211261 - DNA, 55 bp, Artificial
  Synthetic oligonucleotide
cattgtgcgtgaacaattattcggacaaggcatgcgcagtcgcgatgatcggacc

SEQ ID NO: 211262 - DNA, 55 bp, Artificial
  Synthetic oligonucleotide
ccaaaggcattgctctgacaaggtagttatgattgacatagggtcttccgttcca

SEQ ID NO: 211263 - DNA, 55 bp, Artificial
  Synthetic oligonucleotide
tattgactttgccgccgcatgataatagcgtgtcggcttatgcgcggattaagcc

SEQ ID NO: 211264 - DNA, 55 bp, Artificial
  Synthetic oligonucleotide
tattcatgccccggtaaccttgctccttcgctatccaatcccgcgcaaatgaagc

SEQ ID NO: 211265 - DNA, 52 bp, Artificial
  Synthetic oligonucleotide
ccaacgtttggtaaagtttccacaaatgtccggcaaaacggcctatgtccgc

SEQ ID NO: 211266 - DNA, 55 bp, Artificial
  Synthetic oligonucleotide
ccaatttccgataccccgccaatgaacgactcaaactaccccatctcccgaatca

SEQ ID NO: 211267 - DNA, 55 bp, Artificial
  Synthetic oligonucleotide
tatgccttcaaccatatcgctttcggtcaaatacagccgactgccgaacgtgttg

SEQ ID NO: 211268 - DNA, 51 bp, Artificial
  Synthetic oligonucleotide
tatgcccccccttatctaacagggggggtcgaaaatcgaagggcgacggga

SEQ ID NO: 211269 - DNA, 54 bp, Artificial
  Synthetic oligonucleotide
aggtttacatcggtggacaacaggaaaccatacttgtagagatgacgggtaaag

SEQ ID NO: 211270 - DNA, 55 bp, Artificial
  Synthetic oligonucleotide
ccacctccactttaagctcgtcatagcttttctgtaaccgctccaaagcatcctg

SEQ ID NO: 211271 - DNA, 55 bp, Artificial
  Synthetic oligonucleotide
tatcctccacatagtcgtattgttctttccaagaggcaatgctttcggcagagaa

SEQ ID NO: 211272 - DNA, 55 bp, Artificial
  Synthetic oligonucleotide
ccactcgccatagcgcgtattgcggcggtagtttgcaccgacgttgagcatatgg

SEQ ID NO: 211273 - DNA, 55 bp, Artificial
  Synthetic oligonucleotide
tagttctacgaaactcgtgacgactcacgataggagttcctactaatgaattcac

SEQ ID NO: 211274 - DNA, 55 bp, Artificial
  Synthetic oligonucleotide
cagcctgatgcacaacatcagtggcgaccccgatcccaaactgaccgttggcagc

SEQ ID NO: 211275 - DNA, 55 bp, Artificial
  Synthetic oligonucleotide
tctatcgccttgtggtccgcagtcctccagcttggtttcaagtgcgttggagtgg

SEQ ID NO: 211276 - DNA, 53 bp, Artificial
  Synthetic oligonucleotide
tctaagaggcgggattcctttgggattaaactgcgcttttccaataagtcggg

SEQ ID NO: 211277 - DNA, 55 bp, Artificial
  Synthetic oligonucleotide
tcgccttcgccttagccgggccgatacccggtaatgcctccagttccgcagaaga

SEQ ID NO: 211278 - DNA, 55 bp, Artificial
  Synthetic oligonucleotide
cagcggtttcaggtagcctgttgccgccccgctgccttgcacaaactttagcgat

SEQ ID NO: 211279 - DNA, 55 bp, Artificial
  Synthetic oligonucleotide
tcgcccttgtacacgcgagcaaccaagggcttaccttcaggcttaccgtagcggt

SEQ ID NO: 211280 - DNA, 56 bp, Artificial
  Synthetic oligonucleotide
aggccgggctggtttatgtgaccgcctttcctaaccgctctatcatgggccgctac

SEQ ID NO: 211281 - DNA, 55 bp, Artificial
  Synthetic oligonucleotide
tcgccaacccatgctgatccctccggttgtttatgcaagctctccgacttagtgc

SEQ ID NO: 211282 - DNA, 55 bp, Artificial
  Synthetic oligonucleotide
tcgcaacgtacacgccgacgacatgcaactcgccttcggagacgccaaccgttcg

SEQ ID NO: 211283 - DNA, 55 bp, Artificial
  Synthetic oligonucleotide
caggatttgcgttaatttccgaatacagaaaatctttgaatgccgagtacagagc

SEQ ID NO: 211284 - DNA, 55 bp, Artificial
  Synthetic oligonucleotide
tccttatatgtagaaccgtcagtagaaccgtcagtagaaccgtcagtagaaccgt

SEQ ID NO: 211285 - DNA, 55 bp, Artificial
  Synthetic oligonucleotide
caggtcgaggcggactgtaatgttccctgtatcttcaatcttccacgtagcccaa

SEQ ID NO: 211286 - DNA, 55 bp, Artificial
  Synthetic oligonucleotide
tcccgctacggtcgtagcagcccaaccgacgcaaattatcgaagtgaaggtcgca

SEQ ID NO: 211287 - DNA, 55 bp, Artificial
  Synthetic oligonucleotide
cagtgaacagttcgccaaacagcggtattaccggcgtacgtgtagaacaaggcgg

SEQ ID NO: 211288 - DNA, 55 bp, Artificial
  Synthetic oligonucleotide
cagtgttaggattaacaccttgaaccggaggaatatcggtaggagctggcagcaa

SEQ ID NO: 211289 - DNA, 55 bp, Artificial
  Synthetic oligonucleotide
cagttcctgcatggtattcgggagctcttttgggaggacaggaattatgaaccca

SEQ ID NO: 211290 - DNA, 55 bp, Artificial
  Synthetic oligonucleotide
cataacctgtacgcgcatatgtcccattcggatttgctcgatagcaatatattcc

SEQ ID NO: 211291 - DNA, 60 bp, Artificial
  Synthetic oligonucleotide
aggcagtggaattggtaatactgtaattggcttcgtgtttgaatcatttcatccagcgga

SEQ ID NO: 211292 - DNA, 55 bp, Artificial
  Synthetic oligonucleotide
catacgcttagtgctagggaaggacgtgaagcgcaacattgctcttgtaacgccg

SEQ ID NO: 211293 - DNA, 53 bp, Artificial
  Synthetic oligonucleotide
acggcctctgttttaccgacaacggaacagcgacgtataaggtagggtgtgtc

SEQ ID NO: 211294 - DNA, 55 bp, Artificial
  Synthetic oligonucleotide
tccacgccctcgacgggactctttgaccgagccggcatgcgctacgaagtagcat

SEQ ID NO: 211295 - DNA, 55 bp, Artificial
  Synthetic oligonucleotide
aggatagtttgtgcggagtgcaggctgactgcaacggttttaccgcatggtcgtc

SEQ ID NO: 211296 - DNA, 55 bp, Artificial
  Synthetic oligonucleotide
ttggcgcatctgactgaatagaaccgacatcatcaaatgttactggtacgcctga

SEQ ID NO: 211297 - DNA, 55 bp, Artificial
  Synthetic oligonucleotide
ttggattcatacgacccacccagggttgataggctacagctacaccagtgtcgta

SEQ ID NO: 211298 - DNA, 55 bp, Artificial
  Synthetic oligonucleotide
ttggacgtatcgaacaggcagaaatgcacgggcggaacgagactcaaagtacgcg

SEQ ID NO: 211299 - DNA, 55 bp, Artificial
  Synthetic oligonucleotide
ttgcgcgaccatgaagagttgcatttcgagcttctagttgacttgtgcggcgtcg

SEQ ID NO: 211300 - DNA, 52 bp, Artificial
  Synthetic oligonucleotide
aggcgttggtagaaatcccgaataagcggttcaaaacgtgtcgctaccacgg

SEQ ID NO: 211301 - DNA, 55 bp, Artificial
  Synthetic oligonucleotide
agggaacgatgcttcattccgaccagggtgtgctgtaccgtacggcggggtatag

SEQ ID NO: 211302 - DNA, 56 bp, Artificial
  Synthetic oligonucleotide
aggaatgcatttcaaacctagacccttctcataaattacttacagatacccgtgag

SEQ ID NO: 211303 - DNA, 55 bp, Artificial
  Synthetic oligonucleotide
ttgccgtgttcggaccgggtgttatcggtttggaactgggtcaggcattgcaccg

SEQ ID NO: 211304 - DNA, 54 bp, Artificial
  Synthetic oligonucleotide
aaagcgtcgccctatgtgccatcctgattcggaaggggttacgcccctcccaac

SEQ ID NO: 211305 - DNA, 55 bp, Artificial
  Synthetic oligonucleotide
agtagatgtttcagactatctaccacatacggcttaggttctgtttcgccagcta

SEQ ID NO: 211306 - DNA, 55 bp, Artificial
  Synthetic oligonucleotide
ttctcggtattggatcaaaccaaacacgcggttcagcgaaagtcggattcattta

SEQ ID NO: 211307 - DNA, 55 bp, Artificial
  Synthetic oligonucleotide
agttgtgctggattggcgttagttagggctagagggatgttgaaatccaagacta

SEQ ID NO: 211308 - DNA, 54 bp, Artificial
  Synthetic oligonucleotide
ataaagcgttgccctatgtgccgtcctgattcggaaagggttacgcccctccta

SEQ ID NO: 211309 - DNA, 55 bp, Artificial
  Synthetic oligonucleotide
ataacaaaacgaacatatagcaacaatacgctataaacctcatcggacgaccggg

SEQ ID NO: 211310 - DNA, 55 bp, Artificial
  Synthetic oligonucleotide
ataacaacccgaatgataacgtccgaccaattccgctttaatcttatatgcatgc

SEQ ID NO: 211311 - DNA, 55 bp, Artificial
  Synthetic oligonucleotide
ttcccgtacggtgtcaaagttgcctttcggacaggcattctgccataaggaagcc

SEQ ID NO: 211312 - DNA, 55 bp, Artificial
  Synthetic oligonucleotide
ataccgctatagtgcgtctcctttgatttacgccgatttgacacagcttgcgggc

SEQ ID NO: 211313 - DNA, 59 bp, Artificial
  Synthetic oligonucleotide
agctacaaggaacaaggcatagagcaagccccaagagcaagaattgacagggtaacgtg

SEQ ID NO: 211314 - DNA, 55 bp, Artificial
  Synthetic oligonucleotide
atagtacgcccacgcttgatttgttcaacctcaacgactaaatcagatttctcgt

SEQ ID NO: 211315 - DNA, 53 bp, Artificial
  Synthetic oligonucleotide
ttttgggcgtattcttcgtaaccctcttttcctttgcgaatcatggtggttaa

SEQ ID NO: 211316 - DNA, 55 bp, Artificial
  Synthetic oligonucleotide
agattgcgaatgagctgttttataaatttgactatgaccatccggtaggtttccc

SEQ ID NO: 211317 - DNA, 55 bp, Artificial
  Synthetic oligonucleotide
tttgtcggatgctttgccatcttccaaaactcgctcccgaatgtagcgggctaaa

SEQ ID NO: 211318 - DNA, 55 bp, Artificial
  Synthetic oligonucleotide
aaaatctgatagccgacaggtttaacggcaatcaagctgagttttctcgggcaat

SEQ ID NO: 211319 - DNA, 53 bp, Artificial
  Synthetic oligonucleotide
agcccgattcgtccaatcccaagccgtctgaaaacccgaacgttgggacactg

SEQ ID NO: 211320 - DNA, 55 bp, Artificial
  Synthetic oligonucleotide
tttggtcgagcctaaagaaggcctgccgaaagtggataaagagttctacatcgtc

SEQ ID NO: 211321 - DNA, 55 bp, Artificial
  Synthetic oligonucleotide
agagactatgctctaaaagggcgcattctatatgcacgcggggcggtgccgcaac

SEQ ID NO: 211322 - DNA, 55 bp, Artificial
  Synthetic oligonucleotide
aaacatgcagaccagtcttcctggatgctgcttttacgtcagcctcgtttaagtc

SEQ ID NO: 211323 - DNA, 54 bp, Artificial
  Synthetic oligonucleotide
agccgcggggaaccgttttgcgaaaagtcgaatcaggtgcttgacctgtaccga

SEQ ID NO: 211324 - DNA, 56 bp, Artificial
  Synthetic oligonucleotide
agcctttgcgaaaacctgtaatttaatgatacagatttttgcaaaggctctctatt

SEQ ID NO: 211325 - DNA, 54 bp, Artificial
  Synthetic oligonucleotide
tttgaaccgcttattcgggatttctaccaacgcctgctgtccgagggtaagccg

SEQ ID NO: 211326 - DNA, 55 bp, Artificial
  Synthetic oligonucleotide
tttatctaaacggctacaccaatctaaacaaccacgacagccattacagtcgcgg

SEQ ID NO: 211327 - DNA, 55 bp, Artificial
  Synthetic oligonucleotide
tttaggcccctgcggagacagtttcgtttgcgaccggcctttatccgtaatctga

SEQ ID NO: 211328 - DNA, 55 bp, Artificial
  Synthetic oligonucleotide
tttagagccacccctagaccgcctatatacataatctggacggcggagagcggag

SEQ ID NO: 211329 - DNA, 55 bp, Artificial
  Synthetic oligonucleotide
ttgtgtcgggactgaaaacgatattcccgcaactggcaggttgattcgatgtttc

SEQ ID NO: 211330 - DNA, 55 bp, Artificial
  Synthetic oligonucleotide
agcgcgtaatcggaacgcacccgtaatcgccctttgacggcatccagccattggg

SEQ ID NO: 211331 - DNA, 55 bp, Artificial
  Synthetic oligonucleotide
ttgtatgcttttgctgtacagcagcataccgggattgcctttgttcagatttgga

SEQ ID NO: 211332 - DNA, 55 bp, Artificial
  Synthetic oligonucleotide
ttggctcggtatttaggcaaaacccgtgccgaaatacgcgcattggcgtctgaag

SEQ ID NO: 211333 - DNA, 55 bp, Artificial
  Synthetic oligonucleotide
aaagccctggcttagccggagctgctctatcactgcccaagcacacgccgctcca

SEQ ID NO: 211334 - DNA, 55 bp, Artificial
  Synthetic oligonucleotide
tgggtgcaggttcgtattgtgtcgactcgtccccgtaatacaacacgccgagttt

SEQ ID NO: 211335 - DNA, 60 bp, Artificial
  Synthetic oligonucleotide
cgtgcgctaacacccctagaatgcgcacagattgatttttaatgctcatcctatgcaaat

SEQ ID NO: 211336 - DNA, 60 bp, Artificial
  Synthetic oligonucleotide
agcctaagcatcgagtgcccttgtcgcaaatatgaccgaaggaatagccaatcatggggc

SEQ ID NO: 211337 - DNA, 55 bp, Artificial
  Synthetic oligonucleotide
atgttatggttgtcgtacaaaccttttgcatgatcggaaatgccttgttccgggg

SEQ ID NO: 211338 - DNA, 55 bp, Artificial
  Synthetic oligonucleotide
tggcgatctgacgatatgccttggtggcgttactggcgttaagcgtcgagttgtt

SEQ ID NO: 211339 - DNA, 55 bp, Artificial
  Synthetic oligonucleotide
aaattacgcaagctctggcccttccgggcctttgcacgaaagtttctcgcgagaa

SEQ ID NO: 211340 - DNA, 55 bp, Artificial
  Synthetic oligonucleotide
attcaggccccgctcagggagccaagcgggaggtgcgatgcacctgcaagcttag

SEQ ID NO: 211341 - DNA, 55 bp, Artificial
  Synthetic oligonucleotide
attccagtgcaatgccgtctgaaacttcgctaatctcgggttgtcgcgcgctgtg

SEQ ID NO: 211342 - DNA, 52 bp, Artificial
  Synthetic oligonucleotide
actcattgagtaagacgttttccccgtaatgtgtttggccgtctgtcccctt

SEQ ID NO: 211343 - DNA, 55 bp, Artificial
  Synthetic oligonucleotide
attcgagcataatggaaggatcggcggtgtcttcgctcacgccccattggtaggc

SEQ ID NO: 211344 - DNA, 55 bp, Artificial
  Synthetic oligonucleotide
tgcttctcgacaatccccttattatcggctacacagggttttactcaatatcccg

SEQ ID NO: 211345 - DNA, 53 bp, Artificial
  Synthetic oligonucleotide
aacaacgcgacgattttctacacataaggtatccccatatgccggtttggttt

SEQ ID NO: 211346 - DNA, 55 bp, Artificial
  Synthetic oligonucleotide
tgcggattccattccgctttaacgctgtccagtctgccgtctattgccgctccga

SEQ ID NO: 211347 - DNA, 60 bp, Artificial
  Synthetic oligonucleotide
agccgactatgacaatcacaacggggatggtgtagatccacgcgctaaccgagcctttga

SEQ ID NO: 211348 - DNA, 55 bp, Artificial
  Synthetic oligonucleotide
atttcccggcaaactatatctatgctaaaaccggtcggaagatcatacctaccgc

SEQ ID NO: 211349 - DNA, 55 bp, Artificial
  Synthetic oligonucleotide
atttgcgcttcataaccccggacaatcaaatcgcggtaggcattattgaaccaac

SEQ ID NO: 211350 - DNA, 55 bp, Artificial
  Synthetic oligonucleotide
tgcgccccgctatcctctatcccgagctagccaacgcctccacgctcaagtctga

SEQ ID NO: 211351 - DNA, 53 bp, Artificial
  Synthetic oligonucleotide
aacatcctgcggctttaaatccgaacccgtcgggaaatagcgcaaatccaaac

SEQ ID NO: 211352 - DNA, 55 bp, Artificial
  Synthetic oligonucleotide
acgttgatcgatatttatgaacgtactgaagattgggataggttggggcagtttt

SEQ ID NO: 211353 - DNA, 55 bp, Artificial
  Synthetic oligonucleotide
caaaccttgagaactgcatacgtgcgttccgcacattctacgtattgagtttagg

SEQ ID NO: 211354 - DNA, 55 bp, Artificial
  Synthetic oligonucleotide
caaacgcgagccagtggtcgtattgttcaatccaatgttgtgccaagctgcctac

SEQ ID NO: 211355 - DNA, 55 bp, Artificial
  Synthetic oligonucleotide
atattgcgtctataacatcagactgaagcagtacactgcctgccaggttacccga

SEQ ID NO: 211356 - DNA, 55 bp, Artificial
  Synthetic oligonucleotide
atcacccatgttttctgtagcagagacacgttacatcacccatgcactacttcgt

SEQ ID NO: 211357 - DNA, 55 bp, Artificial
  Synthetic oligonucleotide
ttaggcggtctattcccaccggccatttccccatccaaagtatgcatggtgcgaa

SEQ ID NO: 211358 - DNA, 59 bp, Artificial
  Synthetic oligonucleotide
agcattaaaaatcaatctgcgtgcattctaggggggctagcgcacgtttgtttaatgaa

SEQ ID NO: 211359 - DNA, 55 bp, Artificial
  Synthetic oligonucleotide
atccattcggcgcgatgtagggtcttcaactcttgcgaaccataccaagacgcac

SEQ ID NO: 211360 - DNA, 55 bp, Artificial
  Synthetic oligonucleotide
aaagttccaggtcgcaagcccgagctacactctgaaaatgcctccggcgagtacc

SEQ ID NO: 211361 - DNA, 55 bp, Artificial
  Synthetic oligonucleotide
ttaagctgaagcgctcgggtaaaacgcgagggagcggtgacggacggttggcctc

SEQ ID NO: 211362 - DNA, 55 bp, Artificial
  Synthetic oligonucleotide
ttaagcattgcctatcccgctttgtggtatagtggattaaatttgaaccggtacg

SEQ ID NO: 211363 - DNA, 53 bp, Artificial
  Synthetic oligonucleotide
ttaacctgcctgccgtagttgcccaacgtttggtaaagtttccacaaatgtcc

SEQ ID NO: 211364 - DNA, 55 bp, Artificial
  Synthetic oligonucleotide
ttaaacctaacgcagtcgctgccaacaatagccatgtatttacttgaatagatcg

SEQ ID NO: 211365 - DNA, 55 bp, Artificial
  Synthetic oligonucleotide
atgaatgggttgctagtcgttcacaagacccagtctccggcgagattatcgatcg

SEQ ID NO: 211366 - DNA, 55 bp, Artificial
  Synthetic oligonucleotide
tgtttcgtagcacagcgaggtctgtgttaaattccgtcatatttctccgtgcatc

SEQ ID NO: 211367 - DNA, 55 bp, Artificial
  Synthetic oligonucleotide
atgcatccataatggcgcttctaaacaaacgcagagcggcatagaaagccagccc

SEQ ID NO: 211368 - DNA, 55 bp, Artificial
  Synthetic oligonucleotide
tgtgtctgtccggcagggctagcacgatagcttcgtacacatggttgactgaatc

SEQ ID NO: 211369 - DNA, 59 bp, Artificial
  Synthetic oligonucleotide
agaggttgggacggtttgccactctgcggatgggtatcgtgcggatggctctcatggtt

SEQ ID NO: 211370 - DNA, 55 bp, Artificial
  Synthetic oligonucleotide
tgtgcggagggtataaatcaaacgggcagattataggctacctgaagctttcagg

SEQ ID NO: 211371 - DNA, 55 bp, Artificial
  Synthetic oligonucleotide
aaatcacgacacactcggacacccaccccgcttattgcaactttgcgaacgcccc

SEQ ID NO: 211372 - DNA, 55 bp, Artificial
  Synthetic oligonucleotide
tgtccaaggcgacgccggtacgggcaagagctacgccgcgtctctcgtcaaaaca

SEQ ID NO: 211373 - DNA, 55 bp, Artificial
  Synthetic oligonucleotide
atgctgtggcggtatgctacaccacagcttacggcgtggcagcagacaacgagca

SEQ ID NO: 211374 - DNA, 55 bp, Artificial
  Synthetic oligonucleotide
atgggactccgtgaagatgggtaatcagaatgtgctgcctacggcatgaatgggg

SEQ ID NO: 211375 - DNA, 48 bp, Artificial
  Synthetic oligonucleotide
atgtaaacggtttcttggtacggattaccgtatcgggcggtaacgggt

SEQ ID NO: 211376 - DNA, 55 bp, Artificial
  Synthetic oligonucleotide
ccgcgccaagtagtggcagattccaatatgcccgctttcccatggttggcacgaa

SEQ ID NO: 211377 - DNA, 53 bp, Artificial
  Synthetic oligonucleotide
ccgcgcgcccgaaattcccgttatcgtttatccgacgcccgttcaaggcacag

SEQ ID NO: 211378 - DNA, 55 bp, Artificial
  Synthetic oligonucleotide
taaaactcgcgccgtagcagtgcagtccgtgccacgacgggctgatgtagctttc

SEQ ID NO: 211379 - DNA, 55 bp, Artificial
  Synthetic oligonucleotide
ccgcggggatgacttggatctggtactcgaggcgggttctgtaccttgagccgga

SEQ ID NO: 211380 - DNA, 60 bp, Artificial
  Synthetic oligonucleotide
cctgcctgattgttcataacgcgcataaaatcttcttgaccgctgaaatatgcgtctata

SEQ ID NO: 211381 - DNA, 54 bp, Artificial
  Synthetic oligonucleotide
ccgcgtattggccgataaattacgtaccgccgtggccgacaaaggcttggcgga

SEQ ID NO: 211382 - DNA, 55 bp, Artificial
  Synthetic oligonucleotide
ccgcgttcgggctatgatttgtgtttcagcagtgatatgttgctggccggtcgac

SEQ ID NO: 211383 - DNA, 55 bp, Artificial
  Synthetic oligonucleotide
gttgtgccgatgccgcataccatgtgaatccgatatccaaacgcggaatctgcgg

SEQ ID NO: 211384 - DNA, 55 bp, Artificial
  Synthetic oligonucleotide
ccggaggcagaaaaccgcggtaaggtgcaaacagataccgtacacgttgaggagc

SEQ ID NO: 211385 - DNA, 54 bp, Artificial
  Synthetic oligonucleotide
ccggtaaccgtgttggaaatgactccgaaccgcgtcactcaactcaaatccgaa

SEQ ID NO: 211386 - DNA, 53 bp, Artificial
  Synthetic oligonucleotide
ccggtacttgaccagaccctggccttggcaacgcctccgggcgaacaggttgg

SEQ ID NO: 211387 - DNA, 55 bp, Artificial
  Synthetic oligonucleotide
ccggtccaatccattggaatttgttttcgcgctccggcgtccgtgccatgtccag

SEQ ID NO: 211388 - DNA, 55 bp, Artificial
  Synthetic oligonucleotide
ccgtattcaagccgcaaacggctgccaaagttgccctgcctgtttacattgtcgg

SEQ ID NO: 211389 - DNA, 55 bp, Artificial
  Synthetic oligonucleotide
ccgtccaataatcttgtgcaacaaggataaatagtcaaatgccgtctgaagcagc

SEQ ID NO: 211390 - DNA, 55 bp, Artificial
  Synthetic oligonucleotide
ccgtccgacgtggtaacggcaggcctcgattgcgccttccgaattcttgagagca

SEQ ID NO: 211391 - DNA, 55 bp, Artificial
  Synthetic oligonucleotide
cctacgtcgtcattttggagcgggaccgtgtttaagctcggcgtttatgcctgtc

SEQ ID NO: 211392 - DNA, 55 bp, Artificial
  Synthetic oligonucleotide
ccgtccggatttaacgtttgcccttggcctgacagtcgctgcacacgccgtacat

SEQ ID NO: 211393 - DNA, 55 bp, Artificial
  Synthetic oligonucleotide
ccgtctttaataacgtgtatgtttgaacgccagcgtcgtaatattactgccgccg

SEQ ID NO: 211394 - DNA, 55 bp, Artificial
  Synthetic oligonucleotide
ccgtttctgacgaccgatttaggcacgttcgacagcattacgcccgcccaagcgg

SEQ ID NO: 211395 - DNA, 55 bp, Artificial
  Synthetic oligonucleotide
ccgtttgcacaagatttcatcgacacgctccctatcgccggtacagacggaactt

SEQ ID NO: 211396 - DNA, 55 bp, Artificial
  Synthetic oligonucleotide
cccgtggaaatcttaggtttgtcggacgtgcccaacgcaggcgaagacgcgctgg

SEQ ID NO: 211397 - DNA, 55 bp, Artificial
  Synthetic oligonucleotide
cccgtgtgttgaaacattgttgcgttcgggagtgtggtgaaacaggcggtcattg

SEQ ID NO: 211398 - DNA, 55 bp, Artificial
  Synthetic oligonucleotide
taaccgctctgcgccaagtgatgacccgcacgattaacagctatatcgagtccaa

SEQ ID NO: 211399 - DNA, 51 bp, Artificial
  Synthetic oligonucleotide
ccgaaaggtcgtctgaaacccgaatccgttttagtaaaactcgctttgctc

SEQ ID NO: 211400 - DNA, 55 bp, Artificial
  Synthetic oligonucleotide
ccgaactattcgaatgcgaagatttgccatttgagcttaatcattcgttcattct

SEQ ID NO: 211401 - DNA, 55 bp, Artificial
  Synthetic oligonucleotide
ccgaatttcaggtagcctgcctgcgatattccccaccggaaacaagcgcggcggg

SEQ ID NO: 211402 - DNA, 59 bp, Artificial
  Synthetic oligonucleotide
ccgctacgagagtctgaaaagcatgggagtgaagctggacaaaaagagccaggaaatct

SEQ ID NO: 211403 - DNA, 55 bp, Artificial
  Synthetic oligonucleotide
ccgacgttacagagctagcaggtttggttctgggcgtattggttgtagcgttcgg

SEQ ID NO: 211404 - DNA, 55 bp, Artificial
  Synthetic oligonucleotide
aagcccaagaaaagcgggacggaatggaagtagagatcacgcaatacgacaagga

SEQ ID NO: 211405 - DNA, 55 bp, Artificial
  Synthetic oligonucleotide
ccgatagcggcggtctgaaagcccgccctgcaacatatggcggatatagcggatt

SEQ ID NO: 211406 - DNA, 55 bp, Artificial
  Synthetic oligonucleotide
ccgatatttgaatgtagcctggcgagatgtccgaaacaggttagcgataatccgg

SEQ ID NO: 211407 - DNA, 55 bp, Artificial
  Synthetic oligonucleotide
taacagggttacccacaagccatttcgccgccatatgatgcgcatctttcgtcat

SEQ ID NO: 211408 - DNA, 55 bp, Artificial
  Synthetic oligonucleotide
ccgcagcggagcatatggacggcataatcgtttaaaacggtttggggaaagtgtg

SEQ ID NO: 211409 - DNA, 55 bp, Artificial
  Synthetic oligonucleotide
taaagtgcgttatcgcagcagaagtaaggaatagttgtattgctatctctacggg

SEQ ID NO: 211410 - DNA, 55 bp, Artificial
  Synthetic oligonucleotide
ccgcccgattccgaatatcggcataaggaatatagacggattgggtcgtctcgca

SEQ ID NO: 211411 - DNA, 55 bp, Artificial
  Synthetic oligonucleotide
ccgccgcccgatgatgtctagcatagcggtggaattgttgagcatgtccgaagac

SEQ ID NO: 211412 - DNA, 55 bp, Artificial
  Synthetic oligonucleotide
taaactaccttgtgggttgcgctggaatttgaaaagcagcgtagccactttacgc

SEQ ID NO: 211413 - DNA, 51 bp, Artificial
  Synthetic oligonucleotide
ccgcgttttaaggacgtttaggccttttggtagtagatgtatagacaaggg

SEQ ID NO: 211414 - DNA, 55 bp, Artificial
  Synthetic oligonucleotide
ccgccttacctgctcgatgacgtttgacatcggtcatatattgccagttaccgga

SEQ ID NO: 211415 - DNA, 55 bp, Artificial
  Synthetic oligonucleotide
ccgcgatgctctgtactcggcattcaaagattttctgtattcggaaattaacgca

SEQ ID NO: 211416 - DNA, 55 bp, Artificial
  Synthetic oligonucleotide
cgaaagccaaagtttgcgtattacccaatgtagtttgttcaactgaagacgcagc

SEQ ID NO: 211417 - DNA, 55 bp, Artificial
  Synthetic oligonucleotide
cgaaatcggggcatatgttttaggcagacctgagtttactatctccactaaggat

SEQ ID NO: 211418 - DNA, 55 bp, Artificial
  Synthetic oligonucleotide
cgaaccacaagcgccaagattgacaaaacctaaccgcacctatatcatcgcgtac

SEQ ID NO: 211419 - DNA, 55 bp, Artificial
  Synthetic oligonucleotide
cgaacgctagttgtagcttcctctcttatctcgtagtgttacaatcccgtgttcg

SEQ ID NO: 211420 - DNA, 55 bp, Artificial
  Synthetic oligonucleotide
gttcgcgcaaactttgcaatgcgctattgcgcgcctgctctgacaactcttgacg

SEQ ID NO: 211421 - DNA, 55 bp, Artificial
  Synthetic oligonucleotide
gttccacgagtggattccgcttctgaaaatcaactacgcattgggcgtggacggt

SEQ ID NO: 211422 - DNA, 55 bp, Artificial
  Synthetic oligonucleotide
gttataatgccgtttctctgaggcgggtctctccgcatggtcagtcggaacaacg

SEQ ID NO: 211423 - DNA, 55 bp, Artificial
  Synthetic oligonucleotide
cgacaaatttccaatatcgggcataattgttgtgtactgttagagccgcttaatc

SEQ ID NO: 211424 - DNA, 60 bp, Artificial
  Synthetic oligonucleotide
ccgatagactggtaaaagatggattgtcagcatctcttgagtctatgttgacaaggacgc

SEQ ID NO: 211425 - DNA, 55 bp, Artificial
  Synthetic oligonucleotide
cgacaacggacgacacagcgattgagggtacggacaacaatacggttgcgttcca

SEQ ID NO: 211426 - DNA, 55 bp, Artificial
  Synthetic oligonucleotide
gtgtccgtaagtcgggcgacaaggcagtcgtcactatccactcaagcaaagcgat

SEQ ID NO: 211427 - DNA, 55 bp, Artificial
  Synthetic oligonucleotide
cgacatttaaagactcggttgcatcgtgcatcggaatcctgacacacttgtccgc

SEQ ID NO: 211428 - DNA, 55 bp, Artificial
  Synthetic oligonucleotide
cgaccgaccgcatacattcttttatgccgacccaccgtactggcaagtcacaggt

SEQ ID NO: 211429 - DNA, 55 bp, Artificial
  Synthetic oligonucleotide
cgaccgtttgagcggcggctatcaatttaccgagttccacgagtggattccgctt

SEQ ID NO: 211430 - DNA, 55 bp, Artificial
  Synthetic oligonucleotide
cgacctattgtctgccgaacagctgaatgataggattgcgccggcaagtgtagtg

SEQ ID NO: 211431 - DNA, 55 bp, Artificial
  Synthetic oligonucleotide
cgacctgtcacctcttccgaagcattgtgtccgataccgtagtcgacaacgacac

SEQ ID NO: 211432 - DNA, 54 bp, Artificial
  Synthetic oligonucleotide
cgaccttcgatgcaatcggggtcgtctgaaaccggtagatttacgattccgcct

SEQ ID NO: 211433 - DNA, 55 bp, Artificial
  Synthetic oligonucleotide
gtgtaaatctatccacggtctgccgctatgggtatgcgcgtgtgcattatcgtcg

SEQ ID NO: 211434 - DNA, 55 bp, Artificial
  Synthetic oligonucleotide
gtgggacagacatatcatctagataggcaagcgagcgagcagtacccatagggca

SEQ ID NO: 211435 - DNA, 60 bp, Artificial
  Synthetic oligonucleotide
cccggtagtgcgtcacttgaacaggagatggctacgcctggggtgtctgatgccctaggc

SEQ ID NO: 211436 - DNA, 53 bp, Artificial
  Synthetic oligonucleotide
cgactttgacgtggtgcgttaccgtggaggggttttgtctgccgggtcggtgc

SEQ ID NO: 211437 - DNA, 50 bp, Artificial
  Synthetic oligonucleotide
ccgtttggtacggttggaggcggggtattgagtaaaaccctgcgtaagcc

SEQ ID NO: 211438 - DNA, 55 bp, Artificial
  Synthetic oligonucleotide
ccgtttgtccccgaatcgggcgagggagatgatgcctgtatttacggggtgcatc

SEQ ID NO: 211439 - DNA, 55 bp, Artificial
  Synthetic oligonucleotide
gttgtcttggtaccacgcaaaccctttgtcaatgtgccgtcacccaaagactcgg

SEQ ID NO: 211440 - DNA, 55 bp, Artificial
  Synthetic oligonucleotide
cctaccgttttctgtattaccgcacgcataagccgtcctccttacctgaacatgc

SEQ ID NO: 211441 - DNA, 55 bp, Artificial
  Synthetic oligonucleotide
gttggggattggttgtcggatgatgctaagtttggtagaaccctttatctaggct

SEQ ID NO: 211442 - DNA, 55 bp, Artificial
  Synthetic oligonucleotide
acgcacgcccggacaccatatgctcaacctcggcgcaaactaccgccgcaatacg

SEQ ID NO: 211443 - DNA, 55 bp, Artificial
  Synthetic oligonucleotide
cctatccgaaaccgtgcaaatcgtttaaactagcgcaatcttggttcagagtgcg

SEQ ID NO: 211444 - DNA, 55 bp, Artificial
  Synthetic oligonucleotide
cctcaaatccatgcagcgtaaactctcccaattcggtaggcagtctgcactcggc

SEQ ID NO: 211445 - DNA, 55 bp, Artificial
  Synthetic oligonucleotide
cctccagtacattccgacttctgcgctgcttttcaccccgctgagggctgctcgc

SEQ ID NO: 211446 - DNA, 59 bp, Artificial
  Synthetic oligonucleotide
cgtcttttgcggtcagctctcttacggcaggctcgattattttcgacctcaatttgcca

SEQ ID NO: 211447 - DNA, 53 bp, Artificial
  Synthetic oligonucleotide
cccgctgaaattcgctatggcggtatttgttaccggcgcgtcgtttttgggat

SEQ ID NO: 211448 - DNA, 55 bp, Artificial
  Synthetic oligonucleotide
cctcgcagctcgatttgtaaacacgcagtataaacaagcctttgaggccgtctga

SEQ ID NO: 211449 - DNA, 55 bp, Artificial
  Synthetic oligonucleotide
cctctcttgtccaaaagggagacttgctcacggcggtactgatggacggggactt

SEQ ID NO: 211450 - DNA, 55 bp, Artificial
  Synthetic oligonucleotide
cctgccaatcactacttgttaccgtacaggctaacagtggcaccaattcacgaat

SEQ ID NO: 211451 - DNA, 55 bp, Artificial
  Synthetic oligonucleotide
cctgccgttacccatgtaaaagtattagaacgctacttggcacacagctacatcg

SEQ ID NO: 211452 - DNA, 55 bp, Artificial
  Synthetic oligonucleotide
gttgagttataaccaatcattcaggctctgttaggcttggcaactcaacctgtgc

SEQ ID NO: 211453 - DNA, 55 bp, Artificial
  Synthetic oligonucleotide
cctgcgcaactgcttctttgttctggcgggatcgctcctgtttgtgttcatttcc

SEQ ID NO: 211454 - DNA, 55 bp, Artificial
  Synthetic oligonucleotide
gttgacgaggcggctgatgaaaatccccgcccgtttgaggtttccactatgcccg

SEQ ID NO: 211455 - DNA, 55 bp, Artificial
  Synthetic oligonucleotide
ccttagctgttatacgctgcttgcatagccgacgttgtgtggcgcccatctcccg

SEQ ID NO: 211456 - DNA, 55 bp, Artificial
  Synthetic oligonucleotide
ccttgacggcagctcccgcgatttgggtacggcttatgatttattggagggacgt

SEQ ID NO: 211457 - DNA, 55 bp, Artificial
  Synthetic oligonucleotide
gttgaatcgacagaaagcgtatatgagcccgaaccggagaatccgtatcaaccgg

SEQ ID NO: 211458 - DNA, 60 bp, Artificial
  Synthetic oligonucleotide
cccgcctttgctgctctctctgaaattcatctcgtgccactcgctgcaggtattccagtt

SEQ ID NO: 211459 - DNA, 50 bp, Artificial
  Synthetic oligonucleotide
aacttatcggataaaacggttgcccaaaccccgcgtcctagattcccact

SEQ ID NO: 211460 - DNA, 55 bp, Artificial
  Synthetic oligonucleotide
cccgaataagcggttcgaaacgtgtcgctaccacggtagccatatacagcgcctt

SEQ ID NO: 211461 - DNA, 55 bp, Artificial
  Synthetic oligonucleotide
cccgaactgcgtttcaggcgaacaatcgcacacagcaacgcggtgtattaccgct

SEQ ID NO: 211462 - DNA, 55 bp, Artificial
  Synthetic oligonucleotide
ccagacttcgccgtcgcaaactgcttcgcgcaaaccggcttcgtgtgctgctgtc

SEQ ID NO: 211463 - DNA, 55 bp, Artificial
  Synthetic oligonucleotide
cccctgaaatcttgtcatacaccacgcaactatcgttgcttcgccaaacgccttg

SEQ ID NO: 211464 - DNA, 55 bp, Artificial
  Synthetic oligonucleotide
tactgcgcaaaggagaattaatgtcccctctaaacccacactcgaaaggcgacag

SEQ ID NO: 211465 - DNA, 55 bp, Artificial
  Synthetic oligonucleotide
ccagcctatgccgacggtcggatcattccaaattagtgagtgttcggcttcaggc

SEQ ID NO: 211466 - DNA, 55 bp, Artificial
  Synthetic oligonucleotide
ccagcgcaacccacaaggtagtttattcaatgaatgaaatcatacggaaagggat

SEQ ID NO: 211467 - DNA, 52 bp, Artificial
  Synthetic oligonucleotide
taggacgcggggtttgggcaaccgttttatccgataagtttccgtgcggaca

SEQ ID NO: 211468 - DNA, 55 bp, Artificial
  Synthetic oligonucleotide
ccaggttgacctaaagccgggtcgttggctcgtgccgcttgggcatcttcgacag

SEQ ID NO: 211469 - DNA, 54 bp, Artificial
  Synthetic oligonucleotide
cccgccaatatatcgaatcgggcgaaattgtttctttgtccgtttgcgatgttt

SEQ ID NO: 211470 - DNA, 55 bp, Artificial
  Synthetic oligonucleotide
ccccgcttgcgtgaaatccatcctaaatggacgaaacccgaaagggtctgacatg

SEQ ID NO: 211471 - DNA, 54 bp, Artificial
  Synthetic oligonucleotide
tagaaatagccctgtgtctaggtatttgtctaggtttacccaaaattggcggcc

SEQ ID NO: 211472 - DNA, 55 bp, Artificial
  Synthetic oligonucleotide
tagcaatctgagtgtaaattgcgtgttcaggattgaggtttgtacagacagtcgg

SEQ ID NO: 211473 - DNA, 55 bp, Artificial
  Synthetic oligonucleotide
ccagtcgagaacagcaaagcaacgcgggtatgcgtagcgaccgagaagcgaatgc

SEQ ID NO: 211474 - DNA, 55 bp, Artificial
  Synthetic oligonucleotide
acgcttgagcggctggcgtgtatctttgtaggccttctccattgtgatggcctgc

SEQ ID NO: 211475 - DNA, 55 bp, Artificial
  Synthetic oligonucleotide
cccactgcgatgcctttctaccccaggtgtatagccccagacattaagggttcgc

SEQ ID NO: 211476 - DNA, 55 bp, Artificial
  Synthetic oligonucleotide
cccacccattcagcccgagacaaggccgtgaaatgcgttcggccggttgaacgga

SEQ ID NO: 211477 - DNA, 55 bp, Artificial
  Synthetic oligonucleotide
cccaaactttcagacccaatacaccatatgtggtgtgcgcttcgctggttgcata

SEQ ID NO: 211478 - DNA, 55 bp, Artificial
  Synthetic oligonucleotide
cccaagtgcgttaaggctttcatcattcgcttctcggtcgctacgcatacccgcg

SEQ ID NO: 211479 - DNA, 55 bp, Artificial
  Synthetic oligonucleotide
cccaacccggacttgcaacgctgcaaccagtacctttcaactcaactagaacagt

SEQ ID NO: 211480 - DNA, 56 bp, Artificial
  Synthetic oligonucleotide
ccccgaatcgggcgagggggatgatgcctgtatttacggggtgcatctcgaatccg

SEQ ID NO: 211481 - DNA, 54 bp, Artificial
  Synthetic oligonucleotide
aagaactctactccgatgttccattttaaggctgtgcggtttgcctccgaaaac

SEQ ID NO: 211482 - DNA, 54 bp, Artificial
  Synthetic oligonucleotide
gggcaaacggcaaatatgtcgggttgggactcaagctacttgctatggctgaaa

SEQ ID NO: 211483 - DNA, 54 bp, Artificial
  Synthetic oligonucleotide
aatcattgaaggagattaccgtccgtgctgccaaagtgggacggcgatcgaaag

SEQ ID NO: 211484 - DNA, 53 bp, Artificial
  Synthetic oligonucleotide
tgcccgttgatggttcgcgggccgatttccgggcttttggcgcgttttccggc

SEQ ID NO: 211485 - DNA, 54 bp, Artificial
  Synthetic oligonucleotide
ctttaatggccaaacctttattgcgtcagacgtccgcaccatacattaccgtaa

SEQ ID NO: 211486 - DNA, 54 bp, Artificial
  Synthetic oligonucleotide
cccttcgcggcggcccctacggtcgatgccggcaggacgaacagtgacaatatc

SEQ ID NO: 211487 - DNA, 54 bp, Artificial
  Synthetic oligonucleotide
gcgactgcccgccgcattcggtacaactgtaaacggtcttgattttggccatac

SEQ ID NO: 211488 - DNA, 54 bp, Artificial
  Synthetic oligonucleotide
ttgttaactcgtaaataatgggatattcggacggcatcgtatgaaacaatccgc

SEQ ID NO: 211489 - DNA, 54 bp, Artificial
  Synthetic oligonucleotide
ctagcatcaatcgtaacagtcaattgcaaattgcctacgagaatagagatttgc

SEQ ID NO: 211490 - DNA, 54 bp, Artificial
  Synthetic oligonucleotide
accgacgtttgaggaggtgttccgatatttcgcccatggcgggatggcggtagg

SEQ ID NO: 211491 - DNA, 53 bp, Artificial
  Synthetic oligonucleotide
ccccatcccctgctttgggttcgtttgtgtcgttggcttatcgtttggctagt

SEQ ID NO: 211492 - DNA, 54 bp, Artificial
  Synthetic oligonucleotide
ttgcggtttgctgtgcggaagcggcccctttacgggtgaaggctgcaagccctg

SEQ ID NO: 211493 - DNA, 54 bp, Artificial
  Synthetic oligonucleotide
cgcatggtgtgtcctaagcctagtgcgatgcggaaggactggcaatccacttgc

SEQ ID NO: 211494 - DNA, 54 bp, Artificial
  Synthetic oligonucleotide
aagcctaccgccatcccgccatgggcgaaatatcggaacacctcctcaaacgtc

SEQ ID NO: 211495 - DNA, 54 bp, Artificial
  Synthetic oligonucleotide
acggtgccgtttcaacataacgcgctacttgtagactaagtgattgtctgtcgt

SEQ ID NO: 211496 - DNA, 54 bp, Artificial
  Synthetic oligonucleotide
aggacagaaacctattccacgccctcctgaaaggcgaagtgcctatttttgacc

SEQ ID NO: 211497 - DNA, 54 bp, Artificial
  Synthetic oligonucleotide
gtagtcttctaagtcgcagctgatgcttattaccacatccattacacggtcata

SEQ ID NO: 211498 - DNA, 54 bp, Artificial
  Synthetic oligonucleotide
gcttccgtcagggaggcggaaacgcaaaccatcgtcagccaaatcacgcaaaac

SEQ ID NO: 211499 - DNA, 54 bp, Artificial
  Synthetic oligonucleotide
attcgccgcacgcgcaaagcaggagtgtgcaggctaggggtgtgcgtatgttca

SEQ ID NO: 211500 - DNA, 54 bp, Artificial
  Synthetic oligonucleotide
gccgtctgaaataccgtttgtccccgaatcgggcgagggggatgatgcctgtat

SEQ ID NO: 211501 - DNA, 54 bp, Artificial
  Synthetic oligonucleotide
attcccttctggctcgcatggtggctcagtgacggcttcgcgggcatgtccaag

SEQ ID NO: 211502 - DNA, 59 bp, Artificial
  Synthetic oligonucleotide
cccatgcgtaaacaactgattgcctctgtcgtttctctttccctggtcacatcctcggc

SEQ ID NO: 211503 - DNA, 54 bp, Artificial
  Synthetic oligonucleotide
gcttgaaccatgtcgcttattctacgctcaaaatcgccgattgccaaaccgtcc

SEQ ID NO: 211504 - DNA, 54 bp, Artificial
  Synthetic oligonucleotide
tccactacattcacgataacatattacaagcccctgaagcggtgtcggaagcca

SEQ ID NO: 211505 - DNA, 54 bp, Artificial
  Synthetic oligonucleotide
tatgcgcaaacagaacgctttgacaggaatcccgacttctgacggacagagggg

SEQ ID NO: 211506 - DNA, 54 bp, Artificial
  Synthetic oligonucleotide
tagattcagacatgtgtgttcctgcgtattcggaggttttaggctgcttgacct

SEQ ID NO: 211507 - DNA, 54 bp, Artificial
  Synthetic oligonucleotide
ttcggcttcaaagcaccccaatcacgtttcacataaggcagcagcgatttataa

SEQ ID NO: 211508 - DNA, 54 bp, Artificial
  Synthetic oligonucleotide
ttgaggacgtagtactagattacttcttgagcaattcagtatcaagctcatacg

SEQ ID NO: 211509 - DNA, 54 bp, Artificial
  Synthetic oligonucleotide
aacgtgtgctaaccgttgctgtcgtgcgcaacatgaattggggatatgtagccg

SEQ ID NO: 211510 - DNA, 54 bp, Artificial
  Synthetic oligonucleotide
tacgcagttccgttaccggcagaccattatcgagccggacggcgagtttggcga

SEQ ID NO: 211511 - DNA, 51 bp, Artificial
  Synthetic oligonucleotide
agtacgcgaaggggccttgtcccataaaacggtaatagggtcgaacagggc

SEQ ID NO: 211512 - DNA, 54 bp, Artificial
  Synthetic oligonucleotide
atatagcgaggttcgctaaatcgttttcagacaaccttaaatcaacggactgtt

SEQ ID NO: 211513 - DNA, 54 bp, Artificial
  Synthetic oligonucleotide
ccatccgaagcccgtagaaaagcccgattcgtccaatcccaagccgtctgaaaa

SEQ ID NO: 211514 - DNA, 54 bp, Artificial
  Synthetic oligonucleotide
tttgtctacgttggctgcagtggctgcttcagcaacccaagcgacattgccgcc

SEQ ID NO: 211515 - DNA, 54 bp, Artificial
  Synthetic oligonucleotide
aatagccgcctgcctgtcccaaacggtagcccagcctgtccataccgaccactg

SEQ ID NO: 211516 - DNA, 51 bp, Artificial
  Synthetic oligonucleotide
taaggggtaggtagcctagaaagtaaaaacacgctataaggcgcgtttttg

SEQ ID NO: 211517 - DNA, 54 bp, Artificial
  Synthetic oligonucleotide
aacttcagcgacgctacccgactggttgtcgacggcattatgattccgctcctg

SEQ ID NO: 211518 - DNA, 54 bp, Artificial
  Synthetic oligonucleotide
cggctgatggtttcacgcgtcgtgaaaatgctcgacatacggcagggcgaaagg

SEQ ID NO: 211519 - DNA, 54 bp, Artificial
  Synthetic oligonucleotide
ggcaataaccaacgcatgacgcactcgtctcggaaaatcaatcgcccattgtaa

SEQ ID NO: 211520 - DNA, 54 bp, Artificial
  Synthetic oligonucleotide
tcgaccagaggataacgacttcgtatacatccattctgtgcggcagggtgtatt

SEQ ID NO: 211521 - DNA, 54 bp, Artificial
  Synthetic oligonucleotide
ttaaaagacttggcatacaccggtgaaaccctcgaagaccaagactgggtacgc

SEQ ID NO: 211522 - DNA, 54 bp, Artificial
  Synthetic oligonucleotide
cgaaaaggatgaagctgcgatccgattcgatgttcagtttgatggcgagttcac

SEQ ID NO: 211523 - DNA, 54 bp, Artificial
  Synthetic oligonucleotide
cccgtatcgaacaaatcagtgcggtttgggatttgctctccactgtttccattg

SEQ ID NO: 211524 - DNA, 58 bp, Artificial
  Synthetic oligonucleotide
ccatccaaaccgcgacttctttttgtgtgatctgttcaactacgccctgaaggatgac

SEQ ID NO: 211525 - DNA, 54 bp, Artificial
  Synthetic oligonucleotide
agcaggcatgttttgacggcggcggcctacgttttgggtgtgcacaacaggctg

SEQ ID NO: 211526 - DNA, 54 bp, Artificial
  Synthetic oligonucleotide
aggttcaacatgactctgacgcgaccaggtaggcactacaggcctggcagaaca

SEQ ID NO: 211527 - DNA, 53 bp, Artificial
  Synthetic oligonucleotide
ccccactacccgtgccattctcgacaggctacctgaaagcctgaaacgcatcg

SEQ ID NO: 211528 - DNA, 53 bp, Artificial
  Synthetic oligonucleotide
cttggccgcctgtaggcttagaaaagccgtaagtttgaagattaaaggataat

SEQ ID NO: 211529 - DNA, 53 bp, Artificial
  Synthetic oligonucleotide
gggcgaattttcgcggcttaggtctgtgtacctatccagcttgcccgcatttt

SEQ ID NO: 211530 - DNA, 53 bp, Artificial
  Synthetic oligonucleotide
ttgcgcgtcgttgcaacaaaaaggcgtgacggagcataggtgcgtaagtgcta

SEQ ID NO: 211531 - DNA, 53 bp, Artificial
  Synthetic oligonucleotide
acgctaaggcaaacgtaagccattccgcattcaacggcaatgtctctctagcc

SEQ ID NO: 211532 - DNA, 53 bp, Artificial
  Synthetic oligonucleotide
aaggtaccggccaaatcatcgtaaacggccgtcccgttgacgaattcttcgca

SEQ ID NO: 211533 - DNA, 53 bp, Artificial
  Synthetic oligonucleotide
tagcttgcataagcagtcagattcggcgtgatgtcgtaagtcgtacccaagta

SEQ ID NO: 211534 - DNA, 53 bp, Artificial
  Synthetic oligonucleotide
actgaatcaggtgggtatggatatacaggccgtcaatatactgtcggcaatgt

SEQ ID NO: 211535 - DNA, 49 bp, Artificial
  Synthetic oligonucleotide
catttaaccaactttttgggacatttaaccaactttttgggacatttaa

SEQ ID NO: 211536 - DNA, 53 bp, Artificial
  Synthetic oligonucleotide
aaggacagcagggcatccgatagcaagtagtcgccccggaataaaagctcccc

SEQ ID NO: 211537 - DNA, 53 bp, Artificial
  Synthetic oligonucleotide
tcagaccgaccgtaatctcgcgttccgaagctttaccgtccgcgcccaaaacg

SEQ ID NO: 211538 - DNA, 53 bp, Artificial
  Synthetic oligonucleotide
ggtgaaacgtagaaaaccgccaatcggaaatttgtcctacatagccatgtttg

SEQ ID NO: 211539 - DNA, 53 bp, Artificial
  Synthetic oligonucleotide
tcacgccaacaccgataaatgggagagtggtgagcttggtgcaactcaagagt

SEQ ID NO: 211540 - DNA, 53 bp, Artificial
  Synthetic oligonucleotide
acggacgcccgtacgacaaacatgccagcgttccagtagtagccaccctggtc

SEQ ID NO: 211541 - DNA, 53 bp, Artificial
  Synthetic oligonucleotide
cttagatttcgttagacgtattgccaattcaccctgcggggacaacccgcagg

SEQ ID NO: 211542 - DNA, 53 bp, Artificial
  Synthetic oligonucleotide
tattgcacaattcttgcatgacgacgcacgcagaaacaaagacggctttgtcg

SEQ ID NO: 211543 - DNA, 53 bp, Artificial
  Synthetic oligonucleotide
tccaagtgattccggtgtgatgttgttcaggggcatccgcaacatagacgggc

SEQ ID NO: 211544 - DNA, 53 bp, Artificial
  Synthetic oligonucleotide
aactacccactattctgccctacaaacccgaaatagaatacggcgaggatccg

SEQ ID NO: 211545 - DNA, 53 bp, Artificial
  Synthetic oligonucleotide
cctcaaccagttacgaaacccggtttgccaaggcaggaacaacttgtgccagc

SEQ ID NO: 211546 - DNA, 60 bp, Artificial
  Synthetic oligonucleotide
catatcgctatgaacagccctaatatgactatcaaccctgccgccaatatacctaccaag

SEQ ID NO: 211547 - DNA, 53 bp, Artificial
  Synthetic oligonucleotide
cgaaccgcgtgcgtggcttgcgccacacaccctacccaatggcggaggccgtc

SEQ ID NO: 211548 - DNA, 53 bp, Artificial
  Synthetic oligonucleotide
atccgaacacattggcacgcttgggcctgcaagacggacaaaccgctgtcgcc

SEQ ID NO: 211549 - DNA, 53 bp, Artificial
  Synthetic oligonucleotide
cggcgcggaaagcgaatatgacgactaccgcaccgtcgcacaacaaagcgaat

SEQ ID NO: 211550 - DNA, 53 bp, Artificial
  Synthetic oligonucleotide
gggaaattaatcgtaaagggcaggcaacgggatttcatcatgaaggatcaatt

SEQ ID NO: 211551 - DNA, 52 bp, Artificial
  Synthetic oligonucleotide
ggctttcgaatttggcacgggtaattttcattgccaagtgtttcggaccggt

SEQ ID NO: 211552 - DNA, 53 bp, Artificial
  Synthetic oligonucleotide
ttttatgcttcttagccatttacgccaccatttcgaatccgggaacgacttgc

SEQ ID NO: 211553 - DNA, 50 bp, Artificial
  Synthetic oligonucleotide
cggcctttattgtactggaaaaccggtgtttaggccgtctgaaaagtagg

SEQ ID NO: 211554 - DNA, 53 bp, Artificial
  Synthetic oligonucleotide
taggctttgtcgggaaatcagtttcagacggcctctcatccgacaaacggccg

SEQ ID NO: 211555 - DNA, 53 bp, Artificial
  Synthetic oligonucleotide
gagtgggccggattttgcaagatctcagcttgtcgaaacagggactcaaccac

SEQ ID NO: 211556 - DNA, 53 bp, Artificial
  Synthetic oligonucleotide
tgcccaaccatcctcgcccaacaggcttttaccgatggagggctgactgacca

SEQ ID NO: 211557 - DNA, 54 bp, Artificial
  Synthetic oligonucleotide
cgtcttgacgtcaagtttaccagaagggggaaaggcgtcaagaattcacaacgc

SEQ ID NO: 211558 - DNA, 60 bp, Artificial
  Synthetic oligonucleotide
caggcttgagattgttatcaggcggctgttgtactgtggccgtctgttcgtcatagctgc

SEQ ID NO: 211559 - DNA, 53 bp, Artificial
  Synthetic oligonucleotide
caaatactttggccgcatccttatccggactgatcagcacttgcacctgcata

SEQ ID NO: 211560 - DNA, 53 bp, Artificial
  Synthetic oligonucleotide
acaatccgccccttttcgcagcatcgtttcagacggcctgatgcaccgcagag

SEQ ID NO: 211561 - DNA, 53 bp, Artificial
  Synthetic oligonucleotide
ctgaacggtgcggtacactgtttcagacggcatgattacggggttaaagattc

SEQ ID NO: 211562 - DNA, 53 bp, Artificial
  Synthetic oligonucleotide
ggacgagtgcagcaatatagatttgtcgttgcagcaggatggcgcaacgatta

SEQ ID NO: 211563 - DNA, 53 bp, Artificial
  Synthetic oligonucleotide
cgtgattgcccaaagtcgcgtaaacacccaacggcgctttcagacgacccaga

SEQ ID NO: 211564 - DNA, 53 bp, Artificial
  Synthetic oligonucleotide
aaccaattctgtgacaacccaagatttagtctttgacaccggacgagattctg

SEQ ID NO: 211565 - DNA, 53 bp, Artificial
  Synthetic oligonucleotide
caccgacaacggttgcatttccatagttggctctactgtgagcaccaacgact

SEQ ID NO: 211566 - DNA, 53 bp, Artificial
  Synthetic oligonucleotide
tgcttgagcgttaagggcattgcgcgtgaggtttctgcgttgactcaatgtgc

SEQ ID NO: 211567 - DNA, 53 bp, Artificial
  Synthetic oligonucleotide
tcccgcgcttcgatgttcacatagccccggaagataaacatatcgtaacgggc

SEQ ID NO: 211568 - DNA, 53 bp, Artificial
  Synthetic oligonucleotide
attcatgcggctttgaacgatgcgcgtttcggcgtagcgaaaactgcccaacc

SEQ ID NO: 211569 - DNA, 59 bp, Artificial
  Synthetic oligonucleotide
cagccagcaatcggcggttttcggaattgcaggcacatcggaatagtttgcggaaaaca

SEQ ID NO: 211570 - DNA, 53 bp, Artificial
  Synthetic oligonucleotide
ccggtcaaatatatccgtgcgaaatatcaggcaccgattaacggcaacgatcc

SEQ ID NO: 211571 - DNA, 53 bp, Artificial
  Synthetic oligonucleotide
ggaaattagctcgatagctttcagttgcctccattgcgtgccaaaattcttca

SEQ ID NO: 211572 - DNA, 53 bp, Artificial
  Synthetic oligonucleotide
gccctatgtgggtcgttctaacttggaagctacgggattgggacgaaattgta

SEQ ID NO: 211573 - DNA, 53 bp, Artificial
  Synthetic oligonucleotide
aaactttccgcgcgataatcaaggctgcctgaaagaatagaacctgctaacac

SEQ ID NO: 211574 - DNA, 52 bp, Artificial
  Synthetic oligonucleotide
ccgagttgggtggactcgtgacgaagctaagcggcccctacggtaacggacc

SEQ ID NO: 211575 - DNA, 53 bp, Artificial
  Synthetic oligonucleotide
attgaccccaatcgtgcccgtggcaccaaggacggtaatgcgttgcatgtttc

SEQ ID NO: 211576 - DNA, 53 bp, Artificial
  Synthetic oligonucleotide
aataaaggcgaattgattgtgattggccgctcgtgcgaaatcatgattttgga

SEQ ID NO: 211577 - DNA, 53 bp, Artificial
  Synthetic oligonucleotide
tgcgctcttcaggcaacatttgacctaaggttttcagaagtccggtcaactcg

SEQ ID NO: 211578 - DNA, 53 bp, Artificial
  Synthetic oligonucleotide
ggtaggcagggagttgggacggcgcggatacgacagggttatcgtgttgccgg

SEQ ID NO: 211579 - DNA, 53 bp, Artificial
  Synthetic oligonucleotide
accaatggagatacgtaaatggctaagactgcatctttgactgccggattagt

SEQ ID NO: 211580 - DNA, 60 bp, Artificial
  Synthetic oligonucleotide
cagcattcgattctcggtcgctttgcgattgcgctccaagttctccaatgcgtctaacaa

SEQ ID NO: 211581 - DNA, 53 bp, Artificial
  Synthetic oligonucleotide
tgatgcctgccctactcctttactctttacaccgcgcgtttgatcaaacggat

SEQ ID NO: 211582 - DNA, 52 bp, Artificial
  Synthetic oligonucleotide
cgagccaccgctgagttcccaagcgattttatagcctgcgtttgccgctacg

SEQ ID NO: 211583 - DNA, 52 bp, Artificial
  Synthetic oligonucleotide
agatgccgctttgagttacttcgttcaggaacatggtacgctcgttattcag

SEQ ID NO: 211584 - DNA, 52 bp, Artificial
  Synthetic oligonucleotide
agccaatccaaatacgctagggctagggggtggggcggtttttatgccccac

SEQ ID NO: 211585 - DNA, 52 bp, Artificial
  Synthetic oligonucleotide
aaaatcacgcctgattggtaaatagccattttggtgtgcctatgtgtttcgg

SEQ ID NO: 211586 - DNA, 52 bp, Artificial
  Synthetic oligonucleotide
ccaaagcagagaaattgccggtaaggcaccagttgatcaggcaatgctcatt

SEQ ID NO: 211587 - DNA, 52 bp, Artificial
  Synthetic oligonucleotide
acttcaccctaggcagcctgaaaacatggtttgcccaacacagcaagctccc

SEQ ID NO: 211588 - DNA, 52 bp, Artificial
  Synthetic oligonucleotide
actgtcgaagatgcccaagcggcacgagccaacgacccggctttaggtcaac

SEQ ID NO: 211589 - DNA, 52 bp, Artificial
  Synthetic oligonucleotide
ttcggtttgagagttgtgcgaattatcgtcggaccaagccaatttcgcgtct

SEQ ID NO: 211590 - DNA, 52 bp, Artificial
  Synthetic oligonucleotide
gctataccttcctgggtggtgtcagggtaggaagcaaggtatgacccgcgct

SEQ ID NO: 211591 - DNA, 56 bp, Artificial
  Synthetic oligonucleotide
cacgtttatctagaacgcaaagtgtggagcaacccaaaattgttctagttggggca

SEQ ID NO: 211592 - DNA, 52 bp, Artificial
  Synthetic oligonucleotide
aatcgattgaccgtttgttaagcggcgtgcgttcgctgttgcgcttgcagcc

SEQ ID NO: 211593 - DNA, 52 bp, Artificial
  Synthetic oligonucleotide
cgacgtagctcattgatggtcttttcatccgctcgagacatgacacggtggc

SEQ ID NO: 211594 - DNA, 52 bp, Artificial
  Synthetic oligonucleotide
tatagcgcacgccacgcacttgatagcttcggttggctgaacgatgcagtct

SEQ ID NO: 211595 - DNA, 52 bp, Artificial
  Synthetic oligonucleotide
cgactgcgacatcgtccgccaaggcgccacctacacccacgacactgtgcaa

SEQ ID NO: 211596 - DNA, 52 bp, Artificial
  Synthetic oligonucleotide
ttgtttgagatagtcgaagtattgcaggtacatcgggtcgttcaggtggtat

SEQ ID NO: 211597 - DNA, 52 bp, Artificial
  Synthetic oligonucleotide
agcaagtggcaacgccgcaaattcatcaagggagtcgagggtcgtctgaaag

SEQ ID NO: 211598 - DNA, 52 bp, Artificial
  Synthetic oligonucleotide
acttgggacattttgtaatcggacgcttcctgcacagagccgaagcattgac

SEQ ID NO: 211599 - DNA, 52 bp, Artificial
  Synthetic oligonucleotide
ggaatggaagtagagatcacgcaatacgacaaggatttacagcgtattcagg

SEQ ID NO: 211600 - DNA, 52 bp, Artificial
  Synthetic oligonucleotide
gtgttccggcaggatagggccgacggcgcgcaacatacggtacatttcgggc

SEQ ID NO: 211601 - DNA, 52 bp, Artificial
  Synthetic oligonucleotide
ctgagtaatgccatgcgttcttcagcctgacattgcgcccgatagctgaggt

SEQ ID NO: 211602 - DNA, 57 bp, Artificial
  Synthetic oligonucleotide
caccattacaatgatcaagcaggaaatttttttgattgccgtaaatgtccgtatttc

SEQ ID NO: 211603 - DNA, 52 bp, Artificial
  Synthetic oligonucleotide
aaacctctataccgcgaagtttcaaaaggcggactatcgtttcatcggtatg

SEQ ID NO: 211604 - DNA, 52 bp, Artificial
  Synthetic oligonucleotide
ccaaggcggtttggacgcgcaacgttttgtgaacagtctgatggagtacata

SEQ ID NO: 211605 - DNA, 52 bp, Artificial
  Synthetic oligonucleotide
tgttgtctttcggccatatgccgtgattcgggcaatacccggtaacggctga

SEQ ID NO: 211606 - DNA, 52 bp, Artificial
  Synthetic oligonucleotide
gatcaccggtatccagaatggaatgatcaccagctcgtttgtcaacgatgga

SEQ ID NO: 211607 - DNA, 52 bp, Artificial
  Synthetic oligonucleotide
ggtggccgccgttttgagcggctgtgacacatggtcattaccaaaagctggc

SEQ ID NO: 211608 - DNA, 52 bp, Artificial
  Synthetic oligonucleotide
tgttccgtaaatgtaaccgtcgcaatggaatctaccggcaaaggcttagtac

SEQ ID NO: 211609 - DNA, 52 bp, Artificial
  Synthetic oligonucleotide
gggtatcttgaaaccgcacgtcgagacgacaggacgaagcttgctagatttt

SEQ ID NO: 211610 - DNA, 52 bp, Artificial
  Synthetic oligonucleotide
ccgttggggcgccaaacttcaatgcgtgtgtcggtttgttcggcaggacttt

SEQ ID NO: 211611 - DNA, 52 bp, Artificial
  Synthetic oligonucleotide
gacaagccggttaatgtgcgttacctggatgaaacggaaacagacggatttt

SEQ ID NO: 211612 - DNA, 52 bp, Artificial
  Synthetic oligonucleotide
tggtgtggggcgtacagaacgatacacatgagattgtcggcacaacattcaa

SEQ ID NO: 211613 - DNA, 57 bp, Artificial
  Synthetic oligonucleotide
caccaagtgtgaagggtagagctacgcagtttgataaggatttacttatctacgtag

SEQ ID NO: 211614 - DNA, 52 bp, Artificial
  Synthetic oligonucleotide
ccgtacctgcaaggcttccgttgcctgcaacctgccaaggcgtgaaatagcg

SEQ ID NO: 211615 - DNA, 52 bp, Artificial
  Synthetic oligonucleotide
aaattcaatcgccacatcgcgtccgcttcgggtcgtgaacgtgtcgcgtgtg

SEQ ID NO: 211616 - DNA, 52 bp, Artificial
  Synthetic oligonucleotide
gaaacggaaggggtttgggttcataatgagtgtccgccatataagagaccaa

SEQ ID NO: 211617 - DNA, 52 bp, Artificial
  Synthetic oligonucleotide
gggggagaaatcgaatctgagcgcattctgcggccaataatcgttattcctg

SEQ ID NO: 211618 - DNA, 52 bp, Artificial
  Synthetic oligonucleotide
tgatcgaacgtcctgctaaatctgcacgtattaccattcactctgctcgtcc

SEQ ID NO: 211619 - DNA, 52 bp, Artificial
  Synthetic oligonucleotide
attcggtggattccgcttccgtcttatctttcgacttcccgattgcaccata

SEQ ID NO: 211620 - DNA, 52 bp, Artificial
  Synthetic oligonucleotide
taacagctccttactcaatccggacaatgcatcgtccccttcgtccgaaggt

SEQ ID NO: 211621 - DNA, 52 bp, Artificial
  Synthetic oligonucleotide
ggggcgtaaatggcgagataaaattaacggcgcaagagtatgccgacactta

SEQ ID NO: 211622 - DNA, 52 bp, Artificial
  Synthetic oligonucleotide
caggcttcaaggcggacgttccagaaatactgtttgtcgtaatacgggtttt

SEQ ID NO: 211623 - DNA, 52 bp, Artificial
  Synthetic oligonucleotide
tgccttacgcgatacgcggcgactgtctgtccgacctgtatgaggtgcggat

SEQ ID NO: 211624 - DNA, 60 bp, Artificial
  Synthetic oligonucleotide
caagatacgcaataaaccgcgatgctctgtactcggcattcaaagattttctgtattcgg

SEQ ID NO: 211625 - DNA, 52 bp, Artificial
  Synthetic oligonucleotide
acatgccgatgaccgtacgcgaatacattgcgttggcgtcattcgtacaaaa

SEQ ID NO: 211626 - DNA, 52 bp, Artificial
  Synthetic oligonucleotide
cggcattacggcatttgcgttcaaacgcttaagccaatttgccgtggcattg

SEQ ID NO: 211627 - DNA, 52 bp, Artificial
  Synthetic oligonucleotide
ttcgcgtaattcccaaatgctaataactgggtgcgaactatcccgataagga

SEQ ID NO: 211628 - DNA, 52 bp, Artificial
  Synthetic oligonucleotide
accggctggtagtgacttcgcatagcgcaattgtatacgatgtttggagttc

SEQ ID NO: 211629 - DNA, 52 bp, Artificial
  Synthetic oligonucleotide
taacgaagatttgccaagtgctccggaaactgccaacagcgatccttacggt

SEQ ID NO: 211630 - DNA, 52 bp, Artificial
  Synthetic oligonucleotide
accccggatcgatttcgttcgcccgctggattcactggccctgcatgtgccg

SEQ ID NO: 211631 - DNA, 52 bp, Artificial
  Synthetic oligonucleotide
ttccgacgtatgctggttcaaaacccgtatcgagttaccgacgtcttaatcc

SEQ ID NO: 211632 - DNA, 52 bp, Artificial
  Synthetic oligonucleotide
cagaacgctgtgcatggatagaattggctctaaccccttatattggcgcgga

SEQ ID NO: 211633 - DNA, 52 bp, Artificial
  Synthetic oligonucleotide
ttcagagctttaacaggctggtgccggttgaggataccaatcagtacgctca

SEQ ID NO: 211634 - DNA, 52 bp, Artificial
  Synthetic oligonucleotide
ttcactatacgacgggaattagcagttattggggcttgcgcgcacgaatttt

SEQ ID NO: 211635 - DNA, 60 bp, Artificial
  Synthetic oligonucleotide
caaagctgtccatcagggcgtgtttctgttcggcggggatgttgctttcttcaaagctca

SEQ ID NO: 211636 - DNA, 51 bp, Artificial
  Synthetic oligonucleotide
aacttgtccgcacggaaacttatcggataaacggtttcttagattccacgt

SEQ ID NO: 211637 - DNA, 52 bp, Artificial
  Synthetic oligonucleotide
atccgacatctgcaagcccaataaacgatacataccattcaaatcaggcttg

SEQ ID NO: 211638 - DNA, 52 bp, Artificial
  Synthetic oligonucleotide
gcgaaccccatgcggtaaggcagtccgaagcggtcgtacacagacttggtcg

SEQ ID NO: 211639 - DNA, 52 bp, Artificial
  Synthetic oligonucleotide
atcggtatcccacgcgagtcattatccggcgaaactcgcgtcgcctgtacgc

SEQ ID NO: 211640 - DNA, 52 bp, Artificial
  Synthetic oligonucleotide
aatgggcggggcaacccatttggcggggcagcgcgacaaatatgcggaatgg

SEQ ID NO: 211641 - DNA, 52 bp, Artificial
  Synthetic oligonucleotide
atgcatcccgacttgtgtgaccgaattttaacaccacggccacatcatacaa

SEQ ID NO: 211642 - DNA, 52 bp, Artificial
  Synthetic oligonucleotide
tgtttcgacatggaatgtctcctcgggtaagtaccatgctgccggagccgga

SEQ ID NO: 211643 - DNA, 51 bp, Artificial
  Synthetic oligonucleotide
taatccgcaagaattttggcgattgtcagatatttacgagcgagctaatgc

SEQ ID NO: 211644 - DNA, 51 bp, Artificial
  Synthetic oligonucleotide
tagaaaggcttcagataaatcgttcataccacccaatcgaacatcttcgta

SEQ ID NO: 211645 - DNA, 51 bp, Artificial
  Synthetic oligonucleotide
ggctgtaaggcgtgttttgcagttgggcatactgttcttcacggctttgcg

SEQ ID NO: 211646 - DNA, 60 bp, Artificial
  Synthetic oligonucleotide
tggagcttgctaggtatatcggcggcagggttgatagtcatagcagggctgttcatagcg

SEQ ID NO: 211647 - DNA, 51 bp, Artificial
  Synthetic oligonucleotide
ggggaccggagcgctttcagacccggcaaccactacaaaatcggagagcca

SEQ ID NO: 211648 - DNA, 51 bp, Artificial
  Synthetic oligonucleotide
tctcctgcacatgccccgattatggcttgaaaaggcggtttgggcaagccg

SEQ ID NO: 211649 - DNA, 51 bp, Artificial
  Synthetic oligonucleotide
tatacgcagcggcaagcgtgtggtgtctgtttcccagccgggtaaggcggt

SEQ ID NO: 211650 - DNA, 51 bp, Artificial
  Synthetic oligonucleotide
aaccgcagctacaaagtcgccggcaaacgctacacgccgatgaccaaagta

SEQ ID NO: 211651 - DNA, 51 bp, Artificial
  Synthetic oligonucleotide
gggaatccgttgcatcgactcgatcctagtgccgataaaggccgatttctt

SEQ ID NO: 211652 - DNA, 51 bp, Artificial
  Synthetic oligonucleotide
ggtgttggaactgctcggtcagatgggaacgccagcggaaaataaggcgtt

SEQ ID NO: 211653 - DNA, 51 bp, Artificial
  Synthetic oligonucleotide
aaaagacggagcttatacggtgcacatcacaccgggcccgcgcaccaaaat

SEQ ID NO: 211654 - DNA, 51 bp, Artificial
  Synthetic oligonucleotide
tctatgtggctgaaagtaccgcgttagaaaggtttgatttgaatgccgtct

SEQ ID NO: 211655 - DNA, 51 bp, Artificial
  Synthetic oligonucleotide
ttttagcacaaaagcccgtccgccattgaaggggaggcagtcaaagagttt

SEQ ID NO: 211656 - DNA, 51 bp, Artificial
  Synthetic oligonucleotide
gtctgaaatattcttcagacggcattggtttgagtagggcggttagcccaa

SEQ ID NO: 211657 - DNA, 60 bp, Artificial
  Synthetic oligonucleotide
tgcttttcaagttcaaacgtaacccgcagggcagcctgttttgacacggatgcagcacaa

SEQ ID NO: 211658 - DNA, 51 bp, Artificial
  Synthetic oligonucleotide
ttctagccgaaaaatggagaatttttctgtctgacggcatcaaacgcacaa

SEQ ID NO: 211659 - DNA, 51 bp, Artificial
  Synthetic oligonucleotide
gggtgtttcaggctgcctaacggcggttaagggcgctaaataccatcaaaa

SEQ ID NO: 211660 - DNA, 51 bp, Artificial
  Synthetic oligonucleotide
aacgtttgcgtggcgtgctaaccgccgtattagccgaacccgcccatgatt

SEQ ID NO: 211661 - DNA, 51 bp, Artificial
  Synthetic oligonucleotide
ttcccgtccatccatcggcactgcctgtcccaatgcggcttggacatcacg

SEQ ID NO: 211662 - DNA, 51 bp, Artificial
  Synthetic oligonucleotide
aaagcggtaagtatacgcctacgatcaaggctacgcccaacaccggctgcc

SEQ ID NO: 211663 - DNA, 51 bp, Artificial
  Synthetic oligonucleotide
gtccgaccgccccaattcagacggcctcagcctgaaaatccgctggataga

SEQ ID NO: 211664 - DNA, 51 bp, Artificial
  Synthetic oligonucleotide
aaagcggagcgggcaaaccattcaaattgttcggtgcttaattgattgcgg

SEQ ID NO: 211665 - DNA, 51 bp, Artificial
  Synthetic oligonucleotide
tcagacggcattttgcacggtgtcgggctgtcgcacctgactttggtgcgg

SEQ ID NO: 211666 - DNA, 51 bp, Artificial
  Synthetic oligonucleotide
tgttgcgttggcagagggtgcatctatttccgtagatgatttgttccgcta

SEQ ID NO: 211667 - DNA, 51 bp, Artificial
  Synthetic oligonucleotide
ttggcgcatactcggaataacggtattgacctttccgggcagggttgacca

SEQ ID NO: 211668 - DNA, 55 bp, Artificial
  Synthetic oligonucleotide
acggtttgaccgatagaagttgccccggtcaaattgtcaacgcgcacaacatagg

SEQ ID NO: 211669 - DNA, 59 bp, Artificial
  Synthetic oligonucleotide
caacacacgcgcctgaccaaactccacttcgctggaatacgtacccaccagccttgagc

SEQ ID NO: 211670 - DNA, 58 bp, Artificial
  Synthetic oligonucleotide
tgggcgagtaatacctgccaggagatgatttacccgtgctcggatggcagcgttagcg

SEQ ID NO: 211671 - DNA, 58 bp, Artificial
  Synthetic oligonucleotide
actatctgaaacacagcggcccggaacatgtgttgtgctatgccccgactcgctctgg

SEQ ID NO: 211672 - DNA, 58 bp, Artificial
  Synthetic oligonucleotide
cgaatggatttattggagcaggcgtcagtataacgagaggtcgcggaaagcatatgga

SEQ ID NO: 211673 - DNA, 58 bp, Artificial
  Synthetic oligonucleotide
ttggttctgtcgttcgctccttaaaatctgtgcgggttgtacactgaccatactgatt

SEQ ID NO: 211674 - DNA, 58 bp, Artificial
  Synthetic oligonucleotide
cgtcgatctggtgcgttctgaatggccagacaggcacttggttactcggcttgactct

SEQ ID NO: 211675 - DNA, 58 bp, Artificial
  Synthetic oligonucleotide
acagcggcccggaacatgtgttgtgctatgccccgactcgctctggcaaaggggtgag

SEQ ID NO: 211676 - DNA, 58 bp, Artificial
  Synthetic oligonucleotide
atcgggttacaggggatctccaatgtgacacacagggcaagtgagattcgcgccaaaa

SEQ ID NO: 211677 - DNA, 57 bp, Artificial
  Synthetic oligonucleotide
ccgtttgccgttaaaaattgcgcgatactctagggcacgctcgcttacttttgagca

SEQ ID NO: 211678 - DNA, 57 bp, Artificial
  Synthetic oligonucleotide
ttggatcgatgttatgcttatctgaatcggtgttacgtttattagcagccttttgtt

SEQ ID NO: 211679 - DNA, 57 bp, Artificial
  Synthetic oligonucleotide
cgtcaccgctataacatcactggacatgtctctctaaaccattcaggcatagtggcc

SEQ ID NO: 211680 - DNA, 57 bp, Artificial
  Synthetic oligonucleotide
ggtaatagccggcgtggggcgaagaatgctggatacacccgcgcgagaactcggaag

SEQ ID NO: 211681 - DNA, 57 bp, Artificial
  Synthetic oligonucleotide
gagatatcgccttataagcgattgttagaatcttagaacgcctatgttgtccagtct

SEQ ID NO: 211682 - DNA, 57 bp, Artificial
  Synthetic oligonucleotide
ttaccaccagtggccgtcggtcatcaatgatgcacggacatgtcacacgtaccctac

SEQ ID NO: 211683 - DNA, 57 bp, Artificial
  Synthetic oligonucleotide
aagcagctaataaacgggcaagcgatgcagagctgagtatgcctgtggataagtagc

SEQ ID NO: 211684 - DNA, 57 bp, Artificial
  Synthetic oligonucleotide
gagtttgtttgcaacagcgtcacttgcagaacacctgaagcaggtatcgtctgcttg

SEQ ID NO: 211685 - DNA, 56 bp, Artificial
  Synthetic oligonucleotide
atgtccgaaggcaagccgcatactcacaagctgcgaaggattacaatgccgccaac

SEQ ID NO: 211686 - DNA, 56 bp, Artificial
  Synthetic oligonucleotide
gcaaaggatgaccgggcaggtttggcaaaggtgcttgaatttgtccaccctggtga

SEQ ID NO: 211687 - DNA, 56 bp, Artificial
  Synthetic oligonucleotide
agcagattcgtagttttcaggatgacaggaaaacgaaagttcttgctgccatggat

SEQ ID NO: 211688 - DNA, 56 bp, Artificial
  Synthetic oligonucleotide
gccaggcgcggggttgaagtgcttaaccccgagcagcgtacctatgatcttgccct

SEQ ID NO: 211689 - DNA, 56 bp, Artificial
  Synthetic oligonucleotide
accaggtcaaattgggtatgccgacttagcggtcaagcacacctgtatcagtagtt

SEQ ID NO: 211690 - DNA, 55 bp, Artificial
  Synthetic oligonucleotide
cgtgtggtgtaccaaatcgttcagcaagggttgcgtaatagctgcatccgtagcg

SEQ ID NO: 211691 - DNA, 58 bp, Artificial
  Synthetic oligonucleotide
ggtaatttggctcgccatttacctggtagcgataaatagcctgtgtacgcagtttgtg

SEQ ID NO: 211692 - DNA, 55 bp, Artificial
  Synthetic oligonucleotide
cgggcatgggtttacgatcgtcaacattaccggcagtgagccgcagacggatcag

SEQ ID NO: 211693 - DNA, 55 bp, Artificial
  Synthetic oligonucleotide
cggccgaatggcgagagattaccggtgattctcacgtggttgacgtcaggccttt

SEQ ID NO: 211694 - DNA, 55 bp, Artificial
  Synthetic oligonucleotide
cggtacgcgaaatccagagtcacctgatcgagatgtatggtgcggaggtttcgcc

SEQ ID NO: 211695 - DNA, 55 bp, Artificial
  Synthetic oligonucleotide
cggccatgcaaaataaccgtagccccatgattcgcataagataatgccgcagcac

SEQ ID NO: 211696 - DNA, 55 bp, Artificial
  Synthetic oligonucleotide
cggctgtaataattgcttgtttgcgcacctcaggacttatctgagtttgtggcgg

SEQ ID NO: 211697 - DNA, 55 bp, Artificial
  Synthetic oligonucleotide
cgttacgattacaccaaagcttgccaataacgactgcagcatcatacccgcagaa

SEQ ID NO: 211698 - DNA, 55 bp, Artificial
  Synthetic oligonucleotide
caggctatccgggtcagaagtggaggtaaagggtccgctgggtatgctgcgtcac

SEQ ID NO: 211699 - DNA, 55 bp, Artificial
  Synthetic oligonucleotide
caggtttcctggaactgtataaacggaatgtgcacccttcacctgcggtatcaac

SEQ ID NO: 211700 - DNA, 55 bp, Artificial
  Synthetic oligonucleotide
catcgagttgtgcctcctggtacacctgccggcatatagagggattactcatcag

SEQ ID NO: 211701 - DNA, 55 bp, Artificial
  Synthetic oligonucleotide
catgcccatcgtaaaatcgtagaactacgtgcttctgatcccggaataaaccggg

SEQ ID NO: 211702 - DNA, 57 bp, Artificial
  Synthetic oligonucleotide
gaacagaaccgtccaatttgctacccgtgttaccccagactgggatgcgcgtatcag

SEQ ID NO: 211703 - DNA, 54 bp, Artificial
  Synthetic oligonucleotide
ccacgaaggtcaacctgtaggttcccgcgctctttcaaagttctccggattaga

SEQ ID NO: 211704 - DNA, 55 bp, Artificial
  Synthetic oligonucleotide
cccagattatagcgtgattccgtaggtgagcagtcggttgcatgattattaccca

SEQ ID NO: 211705 - DNA, 55 bp, Artificial
  Synthetic oligonucleotide
ccccatgactttgtaccgagagagcagcattggtggccggtgagcgatatcccga

SEQ ID NO: 211706 - DNA, 55 bp, Artificial
  Synthetic oligonucleotide
ccccttcaaagcggacaaggatcccgctggcaataccccatccatgctccatacg

SEQ ID NO: 211707 - DNA, 55 bp, Artificial
  Synthetic oligonucleotide
ccccttgaccgggctatcactgggcaacccatactgctggccaacaaaatagtcg

SEQ ID NO: 211708 - DNA, 54 bp, Artificial
  Synthetic oligonucleotide
cccctttatagccaattatactcgcttctaacaaccggggcagatttcctgtcc

SEQ ID NO: 211709 - DNA, 55 bp, Artificial
  Synthetic oligonucleotide
cccgtgtcatggtgaagcacaccgaacttaacctcatgcaaccaagcggacaccc

SEQ ID NO: 211710 - DNA, 55 bp, Artificial
  Synthetic oligonucleotide
cccgttgtgccagattgtaacggagcagattcttagcgcgagcaaagctaagcat

SEQ ID NO: 211711 - DNA, 55 bp, Artificial
  Synthetic oligonucleotide
ccctggcatccgcttcactgtcaggaaaagatttcggattgacgagatagagccg

SEQ ID NO: 211712 - DNA, 55 bp, Artificial
  Synthetic oligonucleotide
cccttacctattttgaattatgcacggcataaaacattcccaacgacaccttctc

SEQ ID NO: 211713 - DNA, 60 bp, Artificial
  Synthetic oligonucleotide
agtgcattctccgtacgaatgcttggcgggcctttgataagactgattcgtgcaagctgg

SEQ ID NO: 211714 - DNA, 55 bp, Artificial
  Synthetic oligonucleotide
ccgatgaagtataacggtagcaccacaatagccattcccggcagcgactgacgca

SEQ ID NO: 211715 - DNA, 55 bp, Artificial
  Synthetic oligonucleotide
ccgccaaatcatgatgcaagcgctttgcactgtaggtctctcgtgtacgttggtg

SEQ ID NO: 211716 - DNA, 55 bp, Artificial
  Synthetic oligonucleotide
ccgctgatttacagaatcgtgagccgcaattctggggagtgactatgcagcgtaa

SEQ ID NO: 211717 - DNA, 54 bp, Artificial
  Synthetic oligonucleotide
cctcattgtccaatcctgacggcgtagttagagacgtggttttcccggtggtag

SEQ ID NO: 211718 - DNA, 55 bp, Artificial
  Synthetic oligonucleotide
cctgggccttatctgactcctccgcacaggtcagcaattgagagtgtcctgtctg

SEQ ID NO: 211719 - DNA, 55 bp, Artificial
  Synthetic oligonucleotide
cgaaaactgtaataatctctggatccctacctgatttattagctgggcagcgtag

SEQ ID NO: 211720 - DNA, 55 bp, Artificial
  Synthetic oligonucleotide
cgaatgcttggcgggcctttgataagactgattcgtgcaagctggccaagcggaa

SEQ ID NO: 211721 - DNA, 55 bp, Artificial
  Synthetic oligonucleotide
cgacgacctaaccgcgtaacttccactccctgcaactcatcgtacggcacatccg

SEQ ID NO: 211722 - DNA, 55 bp, Artificial
  Synthetic oligonucleotide
cgatgacagtcatacaattaaagaacactacgtacccgtggtggatgacgtcctc

SEQ ID NO: 211723 - DNA, 55 bp, Artificial
  Synthetic oligonucleotide
cgcatgagcgtgtaggggacttcactgccgttcaggtttatatggcgcagttcgt

SEQ ID NO: 211724 - DNA, 60 bp, Artificial
  Synthetic oligonucleotide
ggttgtaactcgtgcccatattatcgcctggcgcgatgatttgatgaatcgatcattaag

SEQ ID NO: 211725 - DNA, 55 bp, Artificial
  Synthetic oligonucleotide
cgcgagtgcccagcccagaagtacgcctagtgtcgcccataaacgcagtcgtacc

SEQ ID NO: 211726 - DNA, 55 bp, Artificial
  Synthetic oligonucleotide
cgcgggtgttgtcatccactttaaccgagatgtaaggcgtataaccgcaatccga

SEQ ID NO: 211727 - DNA, 55 bp, Artificial
  Synthetic oligonucleotide
cgctgacgctattgttcgtgcgaagtgcattatcgcagatggatgtgcccacacg

SEQ ID NO: 211728 - DNA, 55 bp, Artificial
  Synthetic oligonucleotide
gtacgcgctacagtgggtagccgttcgggtccaatcacgatcaatgcaaccatag

SEQ ID NO: 211729 - DNA, 55 bp, Artificial
  Synthetic oligonucleotide
gtaccagatcggcagaggtaggttcacgcactgtacgatgatagatggcaaacgt

SEQ ID NO: 211730 - DNA, 55 bp, Artificial
  Synthetic oligonucleotide
gtaagtttagtaaggatgagatggcgttccgctggatgtgtaagcagtatggcgc

SEQ ID NO: 211731 - DNA, 55 bp, Artificial
  Synthetic oligonucleotide
ggtttcgacctcacaaaactatgggctgtggacttatctatatgccacgatatgc

SEQ ID NO: 211732 - DNA, 55 bp, Artificial
  Synthetic oligonucleotide
ggttctcgcctggtcgatagtcacggattgatgagaggtgttcggttaccggatg

SEQ ID NO: 211733 - DNA, 55 bp, Artificial
  Synthetic oligonucleotide
ggttagtcggtatcggacgaaatttccaggcggatatgtgtgtgtcatcgataag

SEQ ID NO: 211734 - DNA, 54 bp, Artificial
  Synthetic oligonucleotide
ggtatttatgcaacccctttaggtaaaatgcacgcgcgttttcccgcacgtcca

SEQ ID NO: 211735 - DNA, 57 bp, Artificial
  Synthetic oligonucleotide
cccgattgcaggacgaacccagtatatcggtggcaagaccagtgattatcggggtcg

SEQ ID NO: 211736 - DNA, 55 bp, Artificial
  Synthetic oligonucleotide
ggtattcgcgaaatgagatggtagcctttttctggatgtgtccgcatttcgatcc

SEQ ID NO: 211737 - DNA, 51 bp, Artificial
  Synthetic oligonucleotide
ggggtcacacccaacggggacaatacgccgaaaacaagacgggataaggct

SEQ ID NO: 211738 - DNA, 52 bp, Artificial
  Synthetic oligonucleotide
gggcgggtctggtttatgccggttttccatgagttttcgtcgcgggttactc

SEQ ID NO: 211739 - DNA, 55 bp, Artificial
  Synthetic oligonucleotide
ggcgggataccggtttatgtataactggaccggtgggaatatgatgcatggtacc

SEQ ID NO: 211740 - DNA, 55 bp, Artificial
  Synthetic oligonucleotide
ggccacacaaaccgcccttgatgtaaccggcgatgacataaccagacgccagtgc

SEQ ID NO: 211741 - DNA, 55 bp, Artificial
  Synthetic oligonucleotide
ggcaggggatgtagatcgtttgctcatccttttggagctgaaagatcggtacggt

SEQ ID NO: 211742 - DNA, 55 bp, Artificial
  Synthetic oligonucleotide
ggcagcgtaaccagcaagtaaagttctaacacaatcggaggcggtttaaacagag

SEQ ID NO: 211743 - DNA, 55 bp, Artificial
  Synthetic oligonucleotide
ggcaatattcggtattgcgcaagatgtcggattccagcggacaacctatgagcgg

SEQ ID NO: 211744 - DNA, 55 bp, Artificial
  Synthetic oligonucleotide
ggcaagaccagtgattatcggggtcggctctatgagaagggctgggaagttgtcc

SEQ ID NO: 211745 - DNA, 55 bp, Artificial
  Synthetic oligonucleotide
ttttccgtgcttgcccactttgtcatagcggtagccgataggggcgttaaacacg

SEQ ID NO: 211746 - DNA, 60 bp, Artificial
  Synthetic oligonucleotide
gtacaagattttgtctggttctcgcctggtcgatagtcacggattgatgagaggtgttcg

SEQ ID NO: 211747 - DNA, 55 bp, Artificial
  Synthetic oligonucleotide
ttgcaagttatctggggtggcatagaatgattgaccgtctcggtcagaacgttac

SEQ ID NO: 211748 - DNA, 55 bp, Artificial
  Synthetic oligonucleotide
ttctcacgattggacgactggtggtttcatacgcccagctcaatgcatgctgcgg

SEQ ID NO: 211749 - DNA, 55 bp, Artificial
  Synthetic oligonucleotide
tgtcagttcggcacggcgtccgaatggatcggttattccggttacgagcagggga

SEQ ID NO: 211750 - DNA, 55 bp, Artificial
  Synthetic oligonucleotide
tgtaaccggaattgtagaacgccgacaaacattacccatcctatcaaatgttctg

SEQ ID NO: 211751 - DNA, 55 bp, Artificial
  Synthetic oligonucleotide
tggaggcagccagggatataggcgcaatcatggacgctatgttcagcacagacga

SEQ ID NO: 211752 - DNA, 55 bp, Artificial
  Synthetic oligonucleotide
tgatgtatcgaaactcaagacgctaaaaggacgtcgctcaaacttaggcgacccc

SEQ ID NO: 211753 - DNA, 55 bp, Artificial
  Synthetic oligonucleotide
tgatcttgagcctggccatcttttcgaagcgtacaagattttgtctggttctcgc

SEQ ID NO: 211754 - DNA, 55 bp, Artificial
  Synthetic oligonucleotide
tctcgtgcacagattcccgatagaacgtagtctgcgctatcgtgttgctgtagcg

SEQ ID NO: 211755 - DNA, 55 bp, Artificial
  Synthetic oligonucleotide
tcgccgagcattggcctcggcccaatttattccccaggaatatctagaccgacag

SEQ ID NO: 211756 - DNA, 55 bp, Artificial
  Synthetic oligonucleotide
tcacttggccatttatggtcctatgtcggatatcgcctacccgttgatccccgct

SEQ ID NO: 211757 - DNA, 57 bp, Artificial
  Synthetic oligonucleotide
cccgacacaataggcgcccaaaaggatatgcgacatatcccaaacgattacgcacgt

SEQ ID NO: 211758 - DNA, 55 bp, Artificial
  Synthetic oligonucleotide
tagcgtgattactaaatctgcacggcttattgcgctagcaaccgccatacttgcc

SEQ ID NO: 211759 - DNA, 50 bp, Artificial
  Synthetic oligonucleotide
gttttaggaaaacgaataatagggtccccgggttgcgtacgttactgcac

SEQ ID NO: 211760 - DNA, 55 bp, Artificial
  Synthetic oligonucleotide
gtttatcgtccccgcactgtttccgaattcaaagcattacgcagtaacgactagc

SEQ ID NO: 211761 - DNA, 55 bp, Artificial
  Synthetic oligonucleotide
gtgttgtgctatgccccgactcgctctggcaaaggggtgagtctcgtcataccga

SEQ ID NO: 211762 - DNA, 55 bp, Artificial
  Synthetic oligonucleotide
gtgcgctaactgtatttgtgtaaagtgccataacaagtataaagactgcgatccc

SEQ ID NO: 211763 - DNA, 55 bp, Artificial
  Synthetic oligonucleotide
gtgcccgcgattgattaattatcgtggtacagttaaagcatacctgggtcgggcg

SEQ ID NO: 211764 - DNA, 55 bp, Artificial
  Synthetic oligonucleotide
gtgccaatggctaaatgcggtacgatggaaatagagtacacaggatagcgctgct

SEQ ID NO: 211765 - DNA, 55 bp, Artificial
  Synthetic oligonucleotide
gcatcccgagaaactttgaacggggccgctgatataacaaatctgatattcccag

SEQ ID NO: 211766 - DNA, 55 bp, Artificial
  Synthetic oligonucleotide
gcacgattgcatgaccattgtcgatacggtcacatcgctgggtggaacgccgatc

SEQ ID NO: 211767 - DNA, 55 bp, Artificial
  Synthetic oligonucleotide
gcaccgattcaaaacgagcaagagcatgtaattggaaccgtcttaaccttccggg

SEQ ID NO: 211768 - DNA, 59 bp, Artificial
  Synthetic oligonucleotide
cttctatgtccgaactcgtaagtttagtaaggatgagatggcgttccgctggatgtgta

SEQ ID NO: 211769 - DNA, 55 bp, Artificial
  Synthetic oligonucleotide
gcacaggcaggacactatcaataatcgcggtcggatcactacttgccttaaccgg

SEQ ID NO: 211770 - DNA, 55 bp, Artificial
  Synthetic oligonucleotide
gcaagcttctcttgggtgcgcgattatcaacgttacaaacatgatctaagcgtca

SEQ ID NO: 211771 - DNA, 55 bp, Artificial
  Synthetic oligonucleotide
gcaaatgggacaccggtaaacattaacagcccgtcacgcacattgccgaacatcg

SEQ ID NO: 211772 - DNA, 55 bp, Artificial
  Synthetic oligonucleotide
gatcgaggacggcagaaacgccagcaatttgtcagggcatgcaggagacgctatg

SEQ ID NO: 211773 - DNA, 55 bp, Artificial
  Synthetic oligonucleotide
gacgcgctcatcattcggctattatccgttgtgtgtctgatcggaggattgcagg

SEQ ID NO: 211774 - DNA, 55 bp, Artificial
  Synthetic oligonucleotide
gacgataacgtgacgccattatctgacccaccccaagccctttgtcctatagggc

SEQ ID NO: 211775 - DNA, 55 bp, Artificial
  Synthetic oligonucleotide
gaagtggatacattcgaacgcgcattgagtgcacgctttcccgagaatcagattc

SEQ ID NO: 211776 - DNA, 54 bp, Artificial
  Synthetic oligonucleotide
gaaattagcggggcccaccaagttttcaaggtagttaccataggcgagacatcc

SEQ ID NO: 211777 - DNA, 55 bp, Artificial
  Synthetic oligonucleotide
cttcagtccattcaatctgccaggtagaatccgtaatcggaaccacagcattcac

SEQ ID NO: 211778 - DNA, 55 bp, Artificial
  Synthetic oligonucleotide
ctgtggttaagcactgcaccttctaccctatccggttgtgtgaaccaaggcgcct

SEQ ID NO: 211779 - DNA, 55 bp, Artificial
  Synthetic oligonucleotide
ggacgaccccagttacatcgttctgcaagattcagttccgaacctaatattacgt

SEQ ID NO: 211780 - DNA, 59 bp, Artificial
  Synthetic oligonucleotide
gtcggctctttcggccgaatggcgagagattaccggtgattctcacgtggttgacgtca

SEQ ID NO: 211781 - DNA, 55 bp, Artificial
  Synthetic oligonucleotide
ctctcgagctctgctctattggagagcgctccgctcaggaactcagccacgtagg

SEQ ID NO: 211782 - DNA, 55 bp, Artificial
  Synthetic oligonucleotide
ctctcatagtctacgactaatatcttatggccggaaagggacgggtttagattat

SEQ ID NO: 211783 - DNA, 55 bp, Artificial
  Synthetic oligonucleotide
ctcgtctcgcaaaccgtatccaagaaacaacacggttgtattcgaaaatattgtc

SEQ ID NO: 211784 - DNA, 55 bp, Artificial
  Synthetic oligonucleotide
ctcggcaataggcaatcatcggataagctgacagcgacttttcaatggctgtagc

SEQ ID NO: 211785 - DNA, 55 bp, Artificial
  Synthetic oligonucleotide
cgtttcgcgggagtgcagtcatagcacgcttgtcggggcgcttactcggacggaa

SEQ ID NO: 211786 - DNA, 55 bp, Artificial
  Synthetic oligonucleotide
ggagcagcgctttggttgtcgccatattcgcagtacattgtcgctggatgaatcg

SEQ ID NO: 211787 - DNA, 55 bp, Artificial
  Synthetic oligonucleotide
ggacctgatttacaggaacgttttgtgcatttgcgtaaagctatgcgctcgatgt

SEQ ID NO: 211788 - DNA, 55 bp, Artificial
  Synthetic oligonucleotide
ggaagggtctctataatcacccgtctgtcgagaggcgaatccggtttggtctggt

SEQ ID NO: 211789 - DNA, 55 bp, Artificial
  Synthetic oligonucleotide
ggaactctcgaatctggaagacaagcgagccctcaagatccacaatgtacgcgcc

SEQ ID NO: 211790 - DNA, 55 bp, Artificial
  Synthetic oligonucleotide
gctgtcgtggggccgatggttcgtgtcgtcgaggtaccgaaagttgaggagtgcg

SEQ ID NO: 211791 - DNA, 59 bp, Artificial
  Synthetic oligonucleotide
gtgactaatggctgatgtatcgaaactcaagacgctaaaaggacgtcgctcaaacttag

SEQ ID NO: 211792 - DNA, 55 bp, Artificial
  Synthetic oligonucleotide
gcgtgtaggtcaccggactctcgaccgtatcggtaccttgattaagcaactcggt

SEQ ID NO: 211793 - DNA, 55 bp, Artificial
  Synthetic oligonucleotide
gcggtgccatgcaattcgagcgtcccggaaaattccgctggatatacgagaagcc

SEQ ID NO: 211794 - DNA, 55 bp, Artificial
  Synthetic oligonucleotide
gcggcaagactcctcaacaatcatcccgaactagcggtgtagaaagcgccgctat

SEQ ID NO: 211795 - DNA, 55 bp, Artificial
  Synthetic oligonucleotide
gcgctatagccgggttgtagaaatgaatgcagaccgaggaatgattacagaccgg

SEQ ID NO: 211796 - DNA, 55 bp, Artificial
  Synthetic oligonucleotide
gcctggtatgcgggcgaatcaatgaagtttcctccggtatcctggtccatatggt

SEQ ID NO: 211797 - DNA, 55 bp, Artificial
  Synthetic oligonucleotide
gccgttgttactgaagtaggcaaggcgagtatggctaacccgggcgcacatggac

SEQ ID NO: 211798 - DNA, 55 bp, Artificial
  Synthetic oligonucleotide
gccgtaacgtcaccaaaggtggatggatcgaccatacttgcgacaatacgacgcc

SEQ ID NO: 211799 - DNA, 52 bp, Artificial
  Synthetic oligonucleotide
gccctcgggtagatgtactttatgaggaattccccgtcgtacttaccttcgg

SEQ ID NO: 211800 - DNA, 53 bp, Artificial
  Synthetic oligonucleotide
gcccgttctccgtggtaccgaaggtaatacagaactcagtttgtgccgttccc

SEQ ID NO: 211801 - DNA, 55 bp, Artificial
  Synthetic oligonucleotide
gccatccgattgaatatcgaaaactgcaatagaatcagatccgccattagttgca

SEQ ID NO: 211802 - DNA, 60 bp, Artificial
  Synthetic oligonucleotide
ctgccatagttccttagcagctgacctgagccttacggctcaccctcatgggcaccagga

SEQ ID NO: 211803 - DNA, 55 bp, Artificial
  Synthetic oligonucleotide
gccagcatatccggctttagtttacgctcaggattatccacctcagtacggacag

SEQ ID NO: 211804 - DNA, 55 bp, Artificial
  Synthetic oligonucleotide
gccaagctcacttatttgatataggccgcgcttgggcttattcaacaactcagcc

SEQ ID NO: 211805 - DNA, 55 bp, Artificial
  Synthetic oligonucleotide
atcgtccggcaccagtgattggttgcctttgcataattttcgtcaagatgaatcc

SEQ ID NO: 211806 - DNA, 55 bp, Artificial
  Synthetic oligonucleotide
accacaagcattatgaagcttcacccatggcgaatcatccaggaccggatgggca

SEQ ID NO: 211807 - DNA, 53 bp, Artificial
  Synthetic oligonucleotide
aagtctgaaggtggttttcattcgattgaggtaactaaccggggcaacggctg

SEQ ID NO: 211808 - DNA, 55 bp, Artificial
  Synthetic oligonucleotide
atcgggttaggaacggcgggttattcggctttgcatcccgatgcctcgctatccg

SEQ ID NO: 211809 - DNA, 55 bp, Artificial
  Synthetic oligonucleotide
agccgtggattttgactccttcctgcaatgcgcgtgtatgcgtatcaagcccggg

SEQ ID NO: 211810 - DNA, 55 bp, Artificial
  Synthetic oligonucleotide
cacgactcggtgacaaaatactcgtatccggcacactgggagatcacggtatcgc

SEQ ID NO: 211811 - DNA, 55 bp, Artificial
  Synthetic oligonucleotide
atgacccgatgtgggtaccgccattgcgtctggaacgacgttttcatttctcccg

SEQ ID NO: 211812 - DNA, 55 bp, Artificial
  Synthetic oligonucleotide
aattgaggacgaattgaacccgattgcaggacgaacccagtatatcggtggcaag

SEQ ID NO: 211813 - DNA, 58 bp, Artificial
  Synthetic oligonucleotide
cgtacttaagcatatacaaacaagtcacaagctaagcctgaatgacccgtttcagcgg

SEQ ID NO: 211814 - DNA, 55 bp, Artificial
  Synthetic oligonucleotide
cagacgccatctttgacaggatcgaggttgtccggtgttgccctgaggattgctg

SEQ ID NO: 211815 - DNA, 55 bp, Artificial
  Synthetic oligonucleotide
caatatgcacatccgttccaatgagtccaatcgatgtacctttataccaagcccc

SEQ ID NO: 211816 - DNA, 51 bp, Artificial
  Synthetic oligonucleotide
aaaggtttgcgaattgtcacaacctccggccaaaagcgttgggttagtaac

SEQ ID NO: 211817 - DNA, 55 bp, Artificial
  Synthetic oligonucleotide
cagcatccgaatatgctcgatgtcagcatgatgcgagggatcagtaactgcattt

SEQ ID NO: 211818 - DNA, 55 bp, Artificial
  Synthetic oligonucleotide
caaggcgagttgattagcactgattgagctatccgtgttctgacgcacggccgca

SEQ ID NO: 211819 - DNA, 55 bp, Artificial
  Synthetic oligonucleotide
actaccactactttacaacggagctggtagcactaatgagtctgttgcttcaggc

SEQ ID NO: 211820 - DNA, 55 bp, Artificial
  Synthetic oligonucleotide
caactttccccttcgcaatctgcacaaactcttgtcctgtagcagatctagcatt

SEQ ID NO: 211821 - DNA, 55 bp, Artificial
  Synthetic oligonucleotide
attggagcgtaccggagaactgttgcaagcgccgcagtcattcatgctggtagcg

SEQ ID NO: 211822 - DNA, 55 bp, Artificial
  Synthetic oligonucleotide
cagcgttatgttgtcgtgaccgtaccattagctaatattcaccaatcagctgata

SEQ ID NO: 211823 - DNA, 55 bp, Artificial
  Synthetic oligonucleotide
cagctgacctgagccttacggctcaccctcatgggcaccaggacccggacaaatc

SEQ ID NO: 211824 - DNA, 60 bp, Artificial
  Synthetic oligonucleotide
gttctgttccgatctagcgctacaacgcaggcatcaataagggttcccgaggcgtcatcg

SEQ ID NO: 211825 - DNA, 55 bp, Artificial
  Synthetic oligonucleotide
aggagccgctgcttgtgagctgactttgccgtctttgcgaacatccaaggggtga

SEQ ID NO: 211826 - DNA, 54 bp, Artificial
  Synthetic oligonucleotide
aaggggtaacacgggaagccgtcttatccagaccacgccagtcgagatgaatca

SEQ ID NO: 211827 - DNA, 54 bp, Artificial
  Synthetic oligonucleotide
tctacctaaatcctccattgatataataagagttccagcaatattgtgacctga

SEQ ID NO: 211828 - DNA, 54 bp, Artificial
  Synthetic oligonucleotide
cacacgcgttcggtgtgtctcactggcgtattcttagccgccatattttaccga

SEQ ID NO: 211829 - DNA, 54 bp, Artificial
  Synthetic oligonucleotide
gcgacacccataagaacggggaaatacgtggccagctaaaacgctgatacagta

SEQ ID NO: 211830 - DNA, 54 bp, Artificial
  Synthetic oligonucleotide
gggactttggaatattaattgcgcatgcattgttgccctcactctcagtagcac

SEQ ID NO: 211831 - DNA, 54 bp, Artificial
  Synthetic oligonucleotide
gcaacgcatatgtcccgccgattctgaacttgcgttatctccgcattgtataaa

SEQ ID NO: 211832 - DNA, 54 bp, Artificial
  Synthetic oligonucleotide
gccggttccgtgtacattactatccgtaccagcccattcaacgagaaagaccgg

SEQ ID NO: 211833 - DNA, 54 bp, Artificial
  Synthetic oligonucleotide
agggcttttatcgatctctagtcgactacggatggctcatcgtgagcccagtgg

SEQ ID NO: 211834 - DNA, 54 bp, Artificial
  Synthetic oligonucleotide
gcaaatctattgcagagcttacacgtactgtgatacgctaataagcgtatcggc

SEQ ID NO: 211835 - DNA, 60 bp, Artificial
  Synthetic oligonucleotide
ccatcactctgaccgatcggcaatattcggtattgcgcaagatgtcggattccagcggac

SEQ ID NO: 211836 - DNA, 54 bp, Artificial
  Synthetic oligonucleotide
ttatcccggctgctacacgtatccagatacaggctgaaaatacccttgagaacg

SEQ ID NO: 211837 - DNA, 54 bp, Artificial
  Synthetic oligonucleotide
ggtcattagattgtcatgccacatatcggtaccaaagctccgaagcaaaacgag

SEQ ID NO: 211838 - DNA, 54 bp, Artificial
  Synthetic oligonucleotide
gcgttttcttgatctggtatgaacccaaacgacccgcattcttgcttcacccgt

SEQ ID NO: 211839 - DNA, 54 bp, Artificial
  Synthetic oligonucleotide
atcggacttgtacacaaactatggagaaacaggctgatgatcagagtattgctt

SEQ ID NO: 211840 - DNA, 53 bp, Artificial
  Synthetic oligonucleotide
ctcccggttttaccattcgctccgaaacaatccggatattcaacgccccgctg

SEQ ID NO: 211841 - DNA, 54 bp, Artificial
  Synthetic oligonucleotide
atcgattcaggatctgttacgcggtgtacccggcgtgagtatttccaatagcgg

SEQ ID NO: 211842 - DNA, 54 bp, Artificial
  Synthetic oligonucleotide
ttgctgcgcgtgaatacaagccttatatcgccgtgcataaatccttagcctggt

SEQ ID NO: 211843 - DNA, 54 bp, Artificial
  Synthetic oligonucleotide
ctcatcttgacaataatcccagatctttgcacctgttcgagtcgaacgttcagc

SEQ ID NO: 211844 - DNA, 54 bp, Artificial
  Synthetic oligonucleotide
atccgtggattaattgatcagcaacgcagaaaagggaacagggtagggcagttt

SEQ ID NO: 211845 - DNA, 54 bp, Artificial
  Synthetic oligonucleotide
atcatttgtctgtcattgggtgcactggcaaccgtagtgcgtgctattttcgtg

SEQ ID NO: 211846 - DNA, 60 bp, Artificial
  Synthetic oligonucleotide
cggagctatgtatcctgctgctacgttgtcaaaatcctgcgtctttagagttgcgtattc

SEQ ID NO: 211847 - DNA, 53 bp, Artificial
  Synthetic oligonucleotide
gcaatttggaagtcgaggggccagcaaatgtttcgttagcgtggacttcccta

SEQ ID NO: 211848 - DNA, 53 bp, Artificial
  Synthetic oligonucleotide
tgagatcgcaatcgcatgtgatacgtgcgccggttagtcgtaatcacaagcga

SEQ ID NO: 211849 - DNA, 52 bp, Artificial
  Synthetic oligonucleotide
tcttccaaccaccctggaattgcctcgggaaacggtagataaactacggaag

SEQ ID NO: 211850 - DNA, 53 bp, Artificial
  Synthetic oligonucleotide
aaggagcatgtttcggtagatatgcaaagtggtttgattaacaaggttgcggc

SEQ ID NO: 211851 - DNA, 53 bp, Artificial
  Synthetic oligonucleotide
acaccgcgaccaatatgatactggcgcctcgctagtgtatttaacttactcgt

SEQ ID NO: 211852 - DNA, 53 bp, Artificial
  Synthetic oligonucleotide
acctgaagttgaatggttcgccaatttaggcaacaaagcaacacgacgcgcct

SEQ ID NO: 211853 - DNA, 53 bp, Artificial
  Synthetic oligonucleotide
tattttgcggaaactcatcgcatgctattccaacccaaaactccgcccgccgt

SEQ ID NO: 211854 - DNA, 53 bp, Artificial
  Synthetic oligonucleotide
gcataaggtcattgcgttgatcaatcgccgtgcgtatgtggatctggtgcaaa

SEQ ID NO: 211855 - DNA, 53 bp, Artificial
  Synthetic oligonucleotide
agcctacttggaacaagctggatatacggtcttagccggtaccttgcgtgata

SEQ ID NO: 211856 - DNA, 53 bp, Artificial
  Synthetic oligonucleotide
gttaacaacagtaaagtcggtgcctccgtctgcgccataatggatggcatttg

SEQ ID NO: 211857 - DNA, 60 bp, Artificial
  Synthetic oligonucleotide
gcaattgtcagcacgactaccccgatagacaaaagccacatcgaaacgctattgagcatc

SEQ ID NO: 211858 - DNA, 53 bp, Artificial
  Synthetic oligonucleotide
cgcaaacttgttgatctggcgatacctgagtttggctataaggatcacatcag

SEQ ID NO: 211859 - DNA, 52 bp, Artificial
  Synthetic oligonucleotide
ttaaataacccgcgttggtttaatgttgagcttaccctaacaagaagaatcc

SEQ ID NO: 211860 - DNA, 53 bp, Artificial
  Synthetic oligonucleotide
cagcgtagtgtcgtaattcaggccactggcttcaaagcgtatctggtcgagta

SEQ ID NO: 211861 - DNA, 53 bp, Artificial
  Synthetic oligonucleotide
ggcaagccccgtttattgccgcaacccgaattggaacgctactgcgaactaat

SEQ ID NO: 211862 - DNA, 53 bp, Artificial
  Synthetic oligonucleotide
aagccgttgttcaaccgattgagtaagaatagcgcgcaacttgcgttctattt

SEQ ID NO: 211863 - DNA, 51 bp, Artificial
  Synthetic oligonucleotide
caacggggtcgagacttttaatctccgcggttttaatacctgggattatta

SEQ ID NO: 211864 - DNA, 53 bp, Artificial
  Synthetic oligonucleotide
gctcgtataggccgagaaattagtccaggtgaaaccctgataagggctcaggg

SEQ ID NO: 211865 - DNA, 53 bp, Artificial
  Synthetic oligonucleotide
actgagtgtgaaagcagtagtattaggaactttagagcagcaagatgtccaga

SEQ ID NO: 211866 - DNA, 53 bp, Artificial
  Synthetic oligonucleotide
attgccagtccgctatctgtttcttccatcgcgtctctgagcaagctgcgtaa

SEQ ID NO: 211867 - DNA, 53 bp, Artificial
  Synthetic oligonucleotide
tgctgtccgaaaggatggcacagtctcttaccgtactgctgatggaggcacgg

SEQ ID NO: 211868 - DNA, 59 bp, Artificial
  Synthetic oligonucleotide
cgctcccattctgtgaccggatatttgtgatcccacgccataagaatacgttgctgggt

SEQ ID NO: 211869 - DNA, 52 bp, Artificial
  Synthetic oligonucleotide
gcatcaggctcataaagaggcagccatatcccttgtcccatcggaagagaat

SEQ ID NO: 211870 - DNA, 52 bp, Artificial
  Synthetic oligonucleotide
agtgcactttcagatgaacggggtaactcctgtgcgaatgttgcttgaaaac

SEQ ID NO: 211871 - DNA, 52 bp, Artificial
  Synthetic oligonucleotide
ttgtgcaccgtagcgtgtaacccaatccgcgtagaacaatacttcgatatac

SEQ ID NO: 211872 - DNA, 52 bp, Artificial
  Synthetic oligonucleotide
aaattccttacgccgttagtgatgatagcctggtatcggctcatgatggtgc

SEQ ID NO: 211873 - DNA, 52 bp, Artificial
  Synthetic oligonucleotide
taggccgcttttatatacgactcgatacgatgagccgtattgtttccgtcac

SEQ ID NO: 211874 - DNA, 52 bp, Artificial
  Synthetic oligonucleotide
ggtagcagacaggatcttgcagaaatttttgtcgccgcgtcacttccggttt

SEQ ID NO: 211875 - DNA, 52 bp, Artificial
  Synthetic oligonucleotide
gaggccagacctgctgaactaaacctcgggtggcggttgcttcttttacaag

SEQ ID NO: 211876 - DNA, 52 bp, Artificial
  Synthetic oligonucleotide
ggccaatgcaaccactgtttatgaccggatagcgcaaggtatgacgccaaat

SEQ ID NO: 211877 - DNA, 52 bp, Artificial
  Synthetic oligonucleotide
gcactcgccatacgccattcttcccgtgattttgcacctgatccgctgtcta

SEQ ID NO: 211878 - DNA, 52 bp, Artificial
  Synthetic oligonucleotide
atctgctaataaggctcgttctgctgtactcatatccgaattgtcgaacaat

SEQ ID NO: 211879 - DNA, 54 bp, Artificial
  Synthetic oligonucleotide
agcgtttcgttgagttttctaagtctgaaggtggttttcattcgattgaggtaa

SEQ ID NO: 211880 - DNA, 52 bp, Artificial
  Synthetic oligonucleotide
atcaccggggtttacataaaagagagtcagcgacctgttgcgaaacgcttct

SEQ ID NO: 211881 - DNA, 52 bp, Artificial
  Synthetic oligonucleotide
tacccacacactggataaatccgcgatctgataaagcacttctccaggcata

SEQ ID NO: 211882 - DNA, 52 bp, Artificial
  Synthetic oligonucleotide
gaattcttgcgtcgagctattgatgatgctctttccagagcggaggaacgta

SEQ ID NO: 211883 - DNA, 52 bp, Artificial
  Synthetic oligonucleotide
cacctgcacttgcccgctactctcaggaatagtgtgcaaaatcgggctttca

SEQ ID NO: 211884 - DNA, 52 bp, Artificial
  Synthetic oligonucleotide
caataacgcgcattaaactcgctcaggcgatttaatagctactgaaggtagt

SEQ ID NO: 211885 - DNA, 52 bp, Artificial
  Synthetic oligonucleotide
tgggtgtcaagtcacgcagctcacgcaagcacaccgatgttcatgggacagc

SEQ ID NO: 211886 - DNA, 52 bp, Artificial
  Synthetic oligonucleotide
gcaaaaccccctggttatcgcctctttattcgctctcgctatttattctttt

SEQ ID NO: 211887 - DNA, 52 bp, Artificial
  Synthetic oligonucleotide
agcattataagcttgacggtaccttcgcaggagagcccaaattcaagtatca

SEQ ID NO: 211888 - DNA, 52 bp, Artificial
  Synthetic oligonucleotide
atacccaaaacggggatagcggcttgatgcttcaattatccgtgtggcaaca

SEQ ID NO: 211889 - DNA, 52 bp, Artificial
  Synthetic oligonucleotide
gcctgcaacctttcaagtttcatctgttggtattcccgggctgacataacca

SEQ ID NO: 211890 - DNA, 58 bp, Artificial
  Synthetic oligonucleotide
ccggggcggatccatctcgacatcagaaagccgaaatatctccaacacggcgggagaa

SEQ ID NO: 211891 - DNA, 57 bp, Artificial
  Synthetic oligonucleotide
cgcgctatttcgggttaattgcgcgtgatcagattaggcaggttgtacgtccagttt

SEQ ID NO: 211892 - DNA, 52 bp, Artificial
  Synthetic oligonucleotide
acacttgatagcaacgatcaaatttgttgcgtccgcgagtaagccaacatcg

SEQ ID NO: 211893 - DNA, 52 bp, Artificial
  Synthetic oligonucleotide
agcgggtgttgggccggaagatacttttgtaacctatgagtacgaatggaat

SEQ ID NO: 211894 - DNA, 51 bp, Artificial
  Synthetic oligonucleotide
taactgccacaaaggttgagcaatggacgcagcatcgtgctctggaagtgc

SEQ ID NO: 211895 - DNA, 51 bp, Artificial
  Synthetic oligonucleotide
cagatgaaacgcatatgccgtcaagcgagcaagaaagggcatgatagccat

SEQ ID NO: 211896 - DNA, 51 bp, Artificial
  Synthetic oligonucleotide
cagcgtatcaattggaaaggattcgattaaattcgcaaaacctgtaagggt

SEQ ID NO: 211897 - DNA, 51 bp, Artificial
  Synthetic oligonucleotide
tgccgtgcaagttacgttcggcaagcgtcgagccattcgtgtaaacaaacc

SEQ ID NO: 211898 - DNA, 51 bp, Artificial
  Synthetic oligonucleotide
aagcggtaggatttacggttcagtgactcatacggatcatacacacccgcc

SEQ ID NO: 211899 - DNA, 51 bp, Artificial
  Synthetic oligonucleotide
attgtccgcaacttcatccatagccaactgaacagtaaaagctaccggtat

SEQ ID NO: 211900 - DNA, 51 bp, Artificial
  Synthetic oligonucleotide
tgacactttgagcgtgagacatgggttctactgttgaggtatcgactgctt

SEQ ID NO: 211901 - DNA, 51 bp, Artificial
  Synthetic oligonucleotide
aagtcgcgcaaaaccataagtctaacacggtgtatctcgccgtctacgcga

SEQ ID NO: 211902 - DNA, 57 bp, Artificial
  Synthetic oligonucleotide
gcagaaaatctcatggatgggcgggtctggtttatgccggttttccatgagttttcg

SEQ ID NO: 211903 - DNA, 51 bp, Artificial
  Synthetic oligonucleotide
gcgccgaacgttttcctttgacggagaatactgaggcggtgggtctagcgg

SEQ ID NO: 211904 - DNA, 51 bp, Artificial
  Synthetic oligonucleotide
gactttaactaaccaccccgctccgaagcggggatatcattcacacgggca

SEQ ID NO: 211905 - DNA, 51 bp, Artificial
  Synthetic oligonucleotide
ccattagtcgccatcccatatttataagggcagtttccgaaggctgctcct

SEQ ID NO: 211906 - DNA, 51 bp, Artificial
  Synthetic oligonucleotide
aatcggtaattacgtgcacgaaaatgacaagagcgccaaaatccgttatgt

SEQ ID NO: 211907 - DNA, 51 bp, Artificial
  Synthetic oligonucleotide
gtagtgcaagcgttgcgccatgttgcataaaatacagggcaattgaccgtg

SEQ ID NO: 211908 - DNA, 51 bp, Artificial
  Synthetic oligonucleotide
cacgctacgaccattgcgcactacgcgacaatgaggcgctaccatatcagc

SEQ ID NO: 211909 - DNA, 51 bp, Artificial
  Synthetic oligonucleotide
ttgccgatacgcctttcaatattgccgctggttacaccgattttgtgaata

SEQ ID NO: 211910 - DNA, 50 bp, Artificial
  Synthetic oligonucleotide
accggcccggaagaaattgtctccggtttttacgcggtgggagagtgcgc

SEQ ID NO: 211911 - DNA, 50 bp, Artificial
  Synthetic oligonucleotide
accgcttttagccttgccactctggcacggtgtggtttccgcaacgggaa

SEQ ID NO: 211912 - DNA, 50 bp, Artificial
  Synthetic oligonucleotide
accgcacccggaatcaactgctattcccgccgggagcccctcagcttgcc

SEQ ID NO: 211913 - DNA, 59 bp, Artificial
  Synthetic oligonucleotide
agcgataccaggcgcaactgattgtcataattgaacgttagcgcgttacccgaaggatc

SEQ ID NO: 211914 - DNA, 50 bp, Artificial
  Synthetic oligonucleotide
accctcggttctgtcgccaaacttctaccggagcccccgttgaagccggg

SEQ ID NO: 211915 - DNA, 50 bp, Artificial
  Synthetic oligonucleotide
acggccgctactgattcagaacgcactccagttcgggtgggtccaggctt

SEQ ID NO: 211916 - DNA, 50 bp, Artificial
  Synthetic oligonucleotide
acggagttgttgcacgaaccctccaaccgctacttgggcgcggatgcggg

SEQ ID NO: 211917 - DNA, 50 bp, Artificial
  Synthetic oligonucleotide
acgctcgctactcagcgcgcactagggacaccgaggggaaccgagtaact

SEQ ID NO: 211918 - DNA, 50 bp, Artificial
  Synthetic oligonucleotide
acgcgtgacccaagcgcccagagttcttctcgcaggttgggaccgtcata

SEQ ID NO: 211919 - DNA, 50 bp, Artificial
  Synthetic oligonucleotide
acgcgccctcccacggacctttgtggggatagcgtcaagtgaaaccgggt

SEQ ID NO: 211920 - DNA, 50 bp, Artificial
  Synthetic oligonucleotide
acgcgcccaatgcaggattccaccgccccatcaggcgtgcgtatagacca

SEQ ID NO: 211921 - DNA, 50 bp, Artificial
  Synthetic oligonucleotide
acgcatgacccggatctccctctggaccggcttgagaatggcgccagcat

SEQ ID NO: 211922 - DNA, 50 bp, Artificial
  Synthetic oligonucleotide
acgcatagccgggcgtgtagccataccagggggtaaacccgtaagccgga

SEQ ID NO: 211923 - DNA, 50 bp, Artificial
  Synthetic oligonucleotide
acgattcgaaccctccgcagccccgctgaggatactgctcagtcccgtgc

SEQ ID NO: 211924 - DNA, 60 bp, Artificial
  Synthetic oligonucleotide
cggattgattcagaatgatatctaactgcgtataaacattcgcagttgttccactaaaca

SEQ ID NO: 211925 - DNA, 50 bp, Artificial
  Synthetic oligonucleotide
acgagtcatccccggcaaacggtgctcctcgcccgcaaaaatcggctcaa

SEQ ID NO: 211926 - DNA, 50 bp, Artificial
  Synthetic oligonucleotide
acgacaacccatgcgcgaatcagtcaggaagcacgggacgctgcagggat

SEQ ID NO: 211927 - DNA, 50 bp, Artificial
  Synthetic oligonucleotide
acctcagcgcgccttagccaggcttggtctttgccgttcgagtggtcgag

SEQ ID NO: 211928 - DNA, 50 bp, Artificial
  Synthetic oligonucleotide
acctacggtgtcagggtaatcccccagggcagagcatccgcgcacatcgg

SEQ ID NO: 211929 - DNA, 50 bp, Artificial
  Synthetic oligonucleotide
accgtggatagagcgggggcgccggtagcagcagattccccgggcgtagc

SEQ ID NO: 211930 - DNA, 50 bp, Artificial
  Synthetic oligonucleotide
accgtgctacccgctccggttctcgctgcatgatacgcaacgcttccaga

SEQ ID NO: 211931 - DNA, 50 bp, Artificial
  Synthetic oligonucleotide
accgtccaacaggttggacagcaagacgggaccatcgtgccgactcgcgt

SEQ ID NO: 211932 - DNA, 50 bp, Artificial
  Synthetic oligonucleotide
accgggatctgggccaattgaaaacgcaactcgggcaagcggcacaactg

SEQ ID NO: 211933 - DNA, 50 bp, Artificial
  Synthetic oligonucleotide
accggctgtggccgatacaagtcagcacacagcgcgttttcctcggcgtt

SEQ ID NO: 211934 - DNA, 50 bp, Artificial
  Synthetic oligonucleotide
aaggcggtctcaacgcctgcgcggaagaagggttcagcgcgaaacctaac

SEQ ID NO: 211935 - DNA, 59 bp, Artificial
  Synthetic oligonucleotide
gccagaagtattagggcaatcgtccgagtctttcagattctcagtgccacttaaaggcg

SEQ ID NO: 211936 - DNA, 50 bp, Artificial
  Synthetic oligonucleotide
aaggcgggtgacttcacggcatcaagggtcagagtgcacatacggccctg

SEQ ID NO: 211937 - DNA, 50 bp, Artificial
  Synthetic oligonucleotide
aagctcgtctccgcgggcacttcaggagtggtgagcagattgagcggttg

SEQ ID NO: 211938 - DNA, 50 bp, Artificial
  Synthetic oligonucleotide
aagcggggtaggtcgtggactgcaaaagcgaggtaggttgggctgccgaa

SEQ ID NO: 211939 - DNA, 50 bp, Artificial
  Synthetic oligonucleotide
aagcgccggttggacagcaacatgggacgtaccttcacgcactcgctggt

SEQ ID NO: 211940 - DNA, 50 bp, Artificial
  Synthetic oligonucleotide
aagcgccattttccatctggcacagcagcacgacgattgagtcgagcgga

SEQ ID NO: 211941 - DNA, 50 bp, Artificial
  Synthetic oligonucleotide
aagcgatgcaccggattgctgcgcactccctccgtcccccatctgtggaa

SEQ ID NO: 211942 - DNA, 50 bp, Artificial
  Synthetic oligonucleotide
aagcctgtctgttcggcccctcacatatccccgattgctgcgcagactga

SEQ ID NO: 211943 - DNA, 50 bp, Artificial
  Synthetic oligonucleotide
aagccgagcagactgaagaaagggacgccccatagagtgggcccggtgga

SEQ ID NO: 211944 - DNA, 50 bp, Artificial
  Synthetic oligonucleotide
aacggtaattgccccagtgctgtggtgcttccgccttcgtcccagcgaac

SEQ ID NO: 211945 - DNA, 50 bp, Artificial
  Synthetic oligonucleotide
aacgcaactgccgcgcaatgcaatcgccggaaccgtgcttatggccagtc

SEQ ID NO: 211946 - DNA, 58 bp, Artificial
  Synthetic oligonucleotide
cgcctcccgaccgaattcaccatttgtcagacatgtcctcactcggtatggttttcga

SEQ ID NO: 211947 - DNA, 50 bp, Artificial
  Synthetic oligonucleotide
aacgattacgtgaggccgatgcgagtggttatcctctattacacaagccg

SEQ ID NO: 211948 - DNA, 50 bp, Artificial
  Synthetic oligonucleotide
aacgaaacgtacccagttcacccggagagcggtcgagcaatacggcgcat

SEQ ID NO: 211949 - DNA, 50 bp, Artificial
  Synthetic oligonucleotide
aacctggcttctcttgtacatcgctctcactggctatgggggctgccggc

SEQ ID NO: 211950 - DNA, 50 bp, Artificial
  Synthetic oligonucleotide
aaccggtttttcaggccgggaaatactgatcagggggcggatcgcaggga

SEQ ID NO: 211951 - DNA, 49 bp, Artificial
  Synthetic oligonucleotide
aacccttcagccccggtaggtccgggagatattcgccccaccccaaccg

SEQ ID NO: 211952 - DNA, 50 bp, Artificial
  Synthetic oligonucleotide
aaccctgaaaccccgcaccgctcacacgcaatcaaaccattctacgacga

SEQ ID NO: 211953 - DNA, 50 bp, Artificial
  Synthetic oligonucleotide
aacccgcaagcggcctaacgcaatcaggcgcactggtactttttggcgca

SEQ ID NO: 211954 - DNA, 50 bp, Artificial
  Synthetic oligonucleotide
aacccgatggcccatggggaactgagcataccctcgcaacctggataccg

SEQ ID NO: 211955 - DNA, 50 bp, Artificial
  Synthetic oligonucleotide
aaccatatgcctccggggcggataactcgagcctgctctcgagctctgct

SEQ ID NO: 211956 - DNA, 50 bp, Artificial
  Synthetic oligonucleotide
aaagggtgctcgcaatagtcctcgccaatcaccaagggcggagtgggcaa

SEQ ID NO: 211957 - DNA, 60 bp, Artificial
  Synthetic oligonucleotide
gataaatcgggtattgcgtcgataggcgtcttcaatactgcatacacgccccaagctacc

SEQ ID NO: 211958 - DNA, 50 bp, Artificial
  Synthetic oligonucleotide
aaacgccagtcaggtgtgagtaccggatgtgcagggcgtaacagcggggc

SEQ ID NO: 211959 - DNA, 50 bp, Artificial
  Synthetic oligonucleotide
aaacaacggtggcaagcagccagcttccctgctccgcggaccactcgtgc

SEQ ID NO: 211960 - DNA, 50 bp, Artificial
  Synthetic oligonucleotide
aaaacgacagccccttgtgaatgttataagttgcgatatgtaatgtccga

SEQ ID NO: 211961 - DNA, 50 bp, Artificial
  Synthetic oligonucleotide
aaaacatgcgggcagactcgctgatatttctggcgcaatccaggccggcg

SEQ ID NO: 211962 - DNA, 50 bp, Artificial
  Synthetic oligonucleotide
acccggtgaataacccaatgcatcctgcaacgtcgaggcacggccggtag

SEQ ID NO: 211963 - DNA, 50 bp, Artificial
  Synthetic oligonucleotide
acccgcgcatctcaagccacgtcctacggcgctcagcccgttaaaaagga

SEQ ID NO: 211964 - DNA, 50 bp, Artificial
  Synthetic oligonucleotide
acccgaattggtggtgctatcgggcgacattacgcaacgtgcccggcgct

SEQ ID NO: 211965 - DNA, 50 bp, Artificial
  Synthetic oligonucleotide
accccgagggagtgcatcgcctcactgcacagaaactcgcgtacggaaga

SEQ ID NO: 211966 - DNA, 50 bp, Artificial
  Synthetic oligonucleotide
accccacaggtaactgccctacctggagcgcacccgtccctcacgttttt

SEQ ID NO: 211967 - DNA, 50 bp, Artificial
  Synthetic oligonucleotide
accatagcaatcggagccgcgcccgttttctccccgttttgcccggaaaa

SEQ ID NO: 211968 - DNA, 60 bp, Artificial
  Synthetic oligonucleotide
atcgtgatctaaatcccattggacgagatcccatcacgaaacaatcattgggagtcgtcg

SEQ ID NO: 211969 - DNA, 50 bp, Artificial
  Synthetic oligonucleotide
accactgccccgacaatccgtgagccaggcaacgcgctgtttatcccatc

SEQ ID NO: 211970 - DNA, 50 bp, Artificial
  Synthetic oligonucleotide
acatcccatacgtcaggcgacggcatcgcgtatcgggccggctctgatat

SEQ ID NO: 211971 - DNA, 50 bp, Artificial
  Synthetic oligonucleotide
acagccagagccgtgcgtaggtaaccggcagaatcggatcgctcgccaca

SEQ ID NO: 211972 - DNA, 50 bp, Artificial
  Synthetic oligonucleotide
acagcacaaaacgagtcatccccggcaaacggtgctcctcgcccgcaaaa

SEQ ID NO: 211973 - DNA, 50 bp, Artificial
  Synthetic oligonucleotide
acagatagcacaaccgcaagcttcctgccatcgggagaccatgccggcgc

SEQ ID NO: 211974 - DNA, 50 bp, Artificial
  Synthetic oligonucleotide
taaatcccccgagcttcagcgacaaattaaccggactttaagatacctcg

SEQ ID NO: 211975 - DNA, 50 bp, Artificial
  Synthetic oligonucleotide
acacggcaagcgggcaggtaccagagagtacatcctgcgggttcgggaac

SEQ ID NO: 211976 - DNA, 50 bp, Artificial
  Synthetic oligonucleotide
acaatgcttgggtatcgcggttggcggcggactatgccgaaagcggtgcg

SEQ ID NO: 211977 - DNA, 50 bp, Artificial
  Synthetic oligonucleotide
acaagctcgcgtcgtaaattgcccgcaaggtctcatccgtcgatgcgcga

SEQ ID NO: 211978 - DNA, 50 bp, Artificial
  Synthetic oligonucleotide
aattgtcgttgtgggtgcttcaacgggtggcccgcctgcactcgaggcga

SEQ ID NO: 211979 - DNA, 60 bp, Artificial
  Synthetic oligonucleotide
atcgtgccaggcacacgattattatctacctctggtgaatcggagcagagatacagtagt

SEQ ID NO: 211980 - DNA, 50 bp, Artificial
  Synthetic oligonucleotide
aatggaccgtctaccattagtgcccgccacgctgttaaacccgcgcacgt

SEQ ID NO: 211981 - DNA, 50 bp, Artificial
  Synthetic oligonucleotide
aatcttccggtgattccccggtttccgcataacgccagtcgggagtggga

SEQ ID NO: 211982 - DNA, 50 bp, Artificial
  Synthetic oligonucleotide
aatcggtggagcttcgccggaggaagagtgcgtctcacgctggcaataga

SEQ ID NO: 211983 - DNA, 50 bp, Artificial
  Synthetic oligonucleotide
aatcggatcgctcgccacagcaacggaggtgccattcggggtaccgaatc

SEQ ID NO: 211984 - DNA, 50 bp, Artificial
  Synthetic oligonucleotide
aatcccgggcgggagagtgatgaaggtgcactgcgggtacatggactgac

SEQ ID NO: 211985 - DNA, 50 bp, Artificial
  Synthetic oligonucleotide
aatagcccgcatagccgattcctcggcacgaatccgaggggagagcctga

SEQ ID NO: 211986 - DNA, 50 bp, Artificial
  Synthetic oligonucleotide
aagtgctccgcgcctgatcacgcatcgccagtgactccgcttcgcgtggc

SEQ ID NO: 211987 - DNA, 50 bp, Artificial
  Synthetic oligonucleotide
aagtctttgcccgaaaccgagcctcgctcccgtggaaccgcccctcctct

SEQ ID NO: 211988 - DNA, 50 bp, Artificial
  Synthetic oligonucleotide
aagtcgggtgaggtcgtatcccacgacgcccttggtcgtatagcagcccg

SEQ ID NO: 211989 - DNA, 50 bp, Artificial
  Synthetic oligonucleotide
atttgcattaagcgatgcaccggattgctgcgcactccctccgtccccca

SEQ ID NO: 211990 - DNA, 60 bp, Artificial
  Synthetic oligonucleotide
gccggatattgcagctcgctgataccggtgacgattcggtcatctgtgcctgtcttacca

SEQ ID NO: 211991 - DNA, 50 bp, Artificial
  Synthetic oligonucleotide
ccgatgggcgtgattatagggcttcactcgtaggcgcgagtccggcgcac

SEQ ID NO: 211992 - DNA, 50 bp, Artificial
  Synthetic oligonucleotide
ccgccccgtttgagttcgcgcaaacacgcttcgcgaatgatgcccattga

SEQ ID NO: 211993 - DNA, 50 bp, Artificial
  Synthetic oligonucleotide
ccgcgctcaggattggggcataaagggcttgtgcttggtaacctggtgcc

SEQ ID NO: 211994 - DNA, 50 bp, Artificial
  Synthetic oligonucleotide
attcggaccattttggaatgccccattgagcggataatgccgccgcccga

SEQ ID NO: 211995 - DNA, 50 bp, Artificial
  Synthetic oligonucleotide
ccgctggtggtagcccaccctaggactgactcgatacgacctcgtaggcg

SEQ ID NO: 211996 - DNA, 50 bp, Artificial
  Synthetic oligonucleotide
ccgcttgttcgtgggaaacggattctgacggcgttgtgagccgcttcgct

SEQ ID NO: 211997 - DNA, 50 bp, Artificial
  Synthetic oligonucleotide
ccggagcgtgcccgttcaccggtcaaatcactatccggcggagaacgtaa

SEQ ID NO: 211998 - DNA, 50 bp, Artificial
  Synthetic oligonucleotide
ccggctggcggcaatttgtgatcccggctgaacaaaagtaccgcacccca

SEQ ID NO: 211999 - DNA, 50 bp, Artificial
  Synthetic oligonucleotide
atgttgacgagtatcccgcgttgtcggacgcaatgcagcgcgcatcaacg

SEQ ID NO: 212000 - DNA, 50 bp, Artificial
  Synthetic oligonucleotide
ccggtaggtccgggagatattcgccccaccccaaccgggcgcattatatt

SEQ ID NO: 212001 - DNA, 58 bp, Artificial
  Synthetic oligonucleotide
attccttatccgtggatcctataagcgctaacgctaatggcccgagtgccaggtcgta

SEQ ID NO: 212002 - DNA, 57 bp, Artificial
  Synthetic oligonucleotide
atcgttgttttgttacttcagtccattcaatctgccaggtagaatccgtaatcggaa

SEQ ID NO: 212003 - DNA, 50 bp, Artificial
  Synthetic oligonucleotide
ccgttcgaagagtggccacgtcatataggccatgaggcgcggagcgtaga

SEQ ID NO: 212004 - DNA, 50 bp, Artificial
  Synthetic oligonucleotide
atgtgcgcgagcccttcttatcttgcacgcatgggggaaccccaatcgcc

SEQ ID NO: 212005 - DNA, 50 bp, Artificial
  Synthetic oligonucleotide
atgggggcaccacgaaaacggctggtaccacgcaattgggctgaccagaa

SEQ ID NO: 212006 - DNA, 50 bp, Artificial
  Synthetic oligonucleotide
atgcggcccgccacctaccccgttcccgtataagcgagctcgtatactgc

SEQ ID NO: 212007 - DNA, 50 bp, Artificial
  Synthetic oligonucleotide
atgcctccttgccggaatctgcctaccgttttctgactgccagcggtgga

SEQ ID NO: 212008 - DNA, 50 bp, Artificial
  Synthetic oligonucleotide
atgatgcaagcgacgttcgagcagcgtcatcaacactgcgtgcaaggccg

SEQ ID NO: 212009 - DNA, 50 bp, Artificial
  Synthetic oligonucleotide
atgaatgatttcccccggcttaagctggctcatcgcccgactcccccgga

SEQ ID NO: 212010 - DNA, 50 bp, Artificial
  Synthetic oligonucleotide
atgaagcggcctgtaagcgcgaggaggtacaacccgggcgtatgttcgtt

SEQ ID NO: 212011 - DNA, 50 bp, Artificial
  Synthetic oligonucleotide
cgatatggattgtgccacccggggcattcgcgccaacgcagtggaccccg

SEQ ID NO: 212012 - DNA, 50 bp, Artificial
  Synthetic oligonucleotide
atgaagcgacctgagccaaccgggcaagagaatcagggcgaaccgactga

SEQ ID NO: 212013 - DNA, 60 bp, Artificial
  Synthetic oligonucleotide
cgcacgatgcacgatcaaacattaccagctacatgcgaacaaagacgccattaaagagcg

SEQ ID NO: 212014 - DNA, 50 bp, Artificial
  Synthetic oligonucleotide
atcgtcccggttcactgtgcagacgtaactgtccaaccagccgcccctcc

SEQ ID NO: 212015 - DNA, 50 bp, Artificial
  Synthetic oligonucleotide
atcggggcatcacgcgctgtgggacttttgttccgtccgccactcatgct

SEQ ID NO: 212016 - DNA, 50 bp, Artificial
  Synthetic oligonucleotide
atcggaggcacgatttgtacacctaactgtaatggcgggccgacgcgcgc

SEQ ID NO: 212017 - DNA, 50 bp, Artificial
  Synthetic oligonucleotide
cgcgttgcacaagctcacgtagaagccggctgggcgcctaaaaatacccg

SEQ ID NO: 212018 - DNA, 50 bp, Artificial
  Synthetic oligonucleotide
atcggaattctattggcgccacatgcccggcctacggctctcggtgcaga

SEQ ID NO: 212019 - DNA, 50 bp, Artificial
  Synthetic oligonucleotide
atcgcggccgcagctaagctctcgggtgttggggatagtcatcgctgcat

SEQ ID NO: 212020 - DNA, 50 bp, Artificial
  Synthetic oligonucleotide
atcgcactaacccgtgcagggcgaaccgaagtgttaccccgggcaaacac

SEQ ID NO: 212021 - DNA, 50 bp, Artificial
  Synthetic oligonucleotide
cagctggtgaccgccagtggctttccgctgcagccatccattaccattcc

SEQ ID NO: 212022 - DNA, 50 bp, Artificial
  Synthetic oligonucleotide
caggggatccagcgccgaacgaccagttcgcttttgggcgtgtgcgtatc

SEQ ID NO: 212023 - DNA, 50 bp, Artificial
  Synthetic oligonucleotide
cagtagaccctaaagggattcataacggatatttaacccgtacacctggt

SEQ ID NO: 212024 - DNA, 60 bp, Artificial
  Synthetic oligonucleotide
gcctggtcgatagtcacggattgatgagaggtgttcggttaccggatgatcttgtggatg

SEQ ID NO: 212025 - DNA, 50 bp, Artificial
  Synthetic oligonucleotide
cagtgtgatctgacctgcgcttggccgggcactccagggcttatatcggc

SEQ ID NO: 212026 - DNA, 50 bp, Artificial
  Synthetic oligonucleotide
cagccagcgtagcaggcgagacacaaagcgttccggttgccaaggcataa

SEQ ID NO: 212027 - DNA, 50 bp, Artificial
  Synthetic oligonucleotide
catcgctctcactggctatgggggctgccggctctaccggaacagggatc

SEQ ID NO: 212028 - DNA, 50 bp, Artificial
  Synthetic oligonucleotide
catgcatgcgcgctttgtccattacgccgtccccaagcgtacaccagtcg

SEQ ID NO: 212029 - DNA, 50 bp, Artificial
  Synthetic oligonucleotide
catgcggagtgatccccggttgtgccatgcaccagtaacagcggctttcc

SEQ ID NO: 212030 - DNA, 50 bp, Artificial
  Synthetic oligonucleotide
cagatcggtaaggcgacgccaacaattgcaccggctagcgccatggatgc

SEQ ID NO: 212031 - DNA, 50 bp, Artificial
  Synthetic oligonucleotide
cattgtgcgcgaggatttactgggcatgccgatagcaggcaccccaacgc

SEQ ID NO: 212032 - DNA, 50 bp, Artificial
  Synthetic oligonucleotide
cacttctgccaggctatatcgctcggatccggggttgctatgtcagaact

SEQ ID NO: 212033 - DNA, 50 bp, Artificial
  Synthetic oligonucleotide
cactggtgcgggtagagtgggggttataccctgaaccgcggcttgtggac

SEQ ID NO: 212034 - DNA, 50 bp, Artificial
  Synthetic oligonucleotide
ccacttcgccggtatcttgccactgtccggtctcatcccgcttctgcact

SEQ ID NO: 212035 - DNA, 60 bp, Artificial
  Synthetic oligonucleotide
cgataaggccgattagaggttatcgaatccaaggcatctattaccatgaatagacgtgca

SEQ ID NO: 212036 - DNA, 50 bp, Artificial
  Synthetic oligonucleotide
ccagattcacggttgcttcctgcactccgggcacagctttgagcgcccgt

SEQ ID NO: 212037 - DNA, 50 bp, Artificial
  Synthetic oligonucleotide
ccagcacgagtgcttgcccccaataagccatcgcaagcccgggatccaat

SEQ ID NO: 212038 - DNA, 50 bp, Artificial
  Synthetic oligonucleotide
ccagcgtgcctcagaatccacaccgggctgggtcacttcaatgacctgca

SEQ ID NO: 212039 - DNA, 50 bp, Artificial
  Synthetic oligonucleotide
ccaggcacaagcatgaccccacaattgcatcgtcagcatcgcacgcgtgg

SEQ ID NO: 212040 - DNA, 50 bp, Artificial
  Synthetic oligonucleotide
ccaggcttcaaactgcacggaattccgctcactccggcaataggcccgta

SEQ ID NO: 212041 - DNA, 50 bp, Artificial
  Synthetic oligonucleotide
cacgccacaactgaccatgcagtctggggctgacgaattcgcggaggcca

SEQ ID NO: 212042 - DNA, 50 bp, Artificial
  Synthetic oligonucleotide
cccaaagtccaagggtgggaacatccattaccccgtgcccgatggcccgt

SEQ ID NO: 212043 - DNA, 50 bp, Artificial
  Synthetic oligonucleotide
cccacatttgctgccacgcatggatttctctacgggcatccccgcgcaat

SEQ ID NO: 212044 - DNA, 50 bp, Artificial
  Synthetic oligonucleotide
cccaccttccttagcgccaaaatttgcaccgtggcagcccggatcgcaag

SEQ ID NO: 212045 - DNA, 50 bp, Artificial
  Synthetic oligonucleotide
cacgatagccgcgttcgtgcaatgctttggccacacagtagccgatcccg

SEQ ID NO: 212046 - DNA, 60 bp, Artificial
  Synthetic oligonucleotide
agagtaatggccgattgctacaatcaatctggacagattgcggtcggatgaagggcggct

SEQ ID NO: 212047 - DNA, 50 bp, Artificial
  Synthetic oligonucleotide
caccaattcagccggccagtctcagcggacagaactcccaactagccgcg

SEQ ID NO: 212048 - DNA, 50 bp, Artificial
  Synthetic oligonucleotide
caagtgcgctcgcaagatacgccgtaagttcctcatgaaagtacccggta

SEQ ID NO: 212049 - DNA, 50 bp, Artificial
  Synthetic oligonucleotide
cccgcggtcttaccgcagggataggtgcagggcgcgcggagtaaatttat

SEQ ID NO: 212050 - DNA, 50 bp, Artificial
  Synthetic oligonucleotide
cccgtgcacgaagtctggagtgttcctgcgggaaatcaccagccgtctga

SEQ ID NO: 212051 - DNA, 50 bp, Artificial
  Synthetic oligonucleotide
ccctgctagtgcgctgttatgcgtatcaccggcttgtgcaacgctggcta

SEQ ID NO: 212052 - DNA, 50 bp, Artificial
  Synthetic oligonucleotide
aggcatcaagaataacgcactgggtacgctttgcctcgcacaggcggctg

SEQ ID NO: 212053 - DNA, 50 bp, Artificial
  Synthetic oligonucleotide
aggaagccgcaggctgacgtggcaacccaggaaatgcagtgcaaccgtta

SEQ ID NO: 212054 - DNA, 50 bp, Artificial
  Synthetic oligonucleotide
agctgtagcgacatccccgagttgtccgtcgagtgtgcgtgcccccagca

SEQ ID NO: 212055 - DNA, 50 bp, Artificial
  Synthetic oligonucleotide
agcgggctggccaagaatagtgagtcgcaccacaccgcgcaaaagtagcg

SEQ ID NO: 212056 - DNA, 50 bp, Artificial
  Synthetic oligonucleotide
agcggcctaacgcaatcaggcgcactggtactttttggcgcaacgggtga

SEQ ID NO: 212057 - DNA, 57 bp, Artificial
  Synthetic oligonucleotide
gaggtgttcggttaccggatgatcttgtggatgaacctcttcaaggcttgccgttcg

SEQ ID NO: 212058 - DNA, 50 bp, Artificial
  Synthetic oligonucleotide
gcaggctaaacaggttagtttattgaggctacaaacgcctattgaaccta

SEQ ID NO: 212059 - DNA, 50 bp, Artificial
  Synthetic oligonucleotide
agccggtacgggcggggttatatcagggatgggttgcggttcatgaccaa

SEQ ID NO: 212060 - DNA, 50 bp, Artificial
  Synthetic oligonucleotide
agccgcttcaatttccatcagttggcgtgattcccgggcaagagagccga

SEQ ID NO: 212061 - DNA, 50 bp, Artificial
  Synthetic oligonucleotide
agccatcagcatgaatcgccgtcagcccattgagcgcgctgccccacaaa

SEQ ID NO: 212062 - DNA, 50 bp, Artificial
  Synthetic oligonucleotide
agccacctgaccgctcgcgggccgttctctacaatatgacgtgtcatggc

SEQ ID NO: 212063 - DNA, 50 bp, Artificial
  Synthetic oligonucleotide
gccccaataatgcttattggtgcgatgcccaatatcacggaaatacatga

SEQ ID NO: 212064 - DNA, 50 bp, Artificial
  Synthetic oligonucleotide
agccaacgcaacccaacgttcccgagcaatacccaaagcgccactacctg

SEQ ID NO: 212065 - DNA, 50 bp, Artificial
  Synthetic oligonucleotide
agcattagtgcgctcactgtttcggcatccaggcagacccgccagtgcgt

SEQ ID NO: 212066 - DNA, 50 bp, Artificial
  Synthetic oligonucleotide
agcatgcgtggtccgcgcgtagaagggcctatggcacttgatccgctaca

SEQ ID NO: 212067 - DNA, 50 bp, Artificial
  Synthetic oligonucleotide
agcatctcgaacaaggctgccaggggagctacacagcggggcaggagttc

SEQ ID NO: 212068 - DNA, 58 bp, Artificial
  Synthetic oligonucleotide
atgaggcagcccatacccatagtaacctagatcataacctaagcctaggccgtaccca

SEQ ID NO: 212069 - DNA, 50 bp, Artificial
  Synthetic oligonucleotide
agcagcgccttatagtggtcgagggcactgctctgggttcggaagctccg

SEQ ID NO: 212070 - DNA, 50 bp, Artificial
  Synthetic oligonucleotide
agcaaactcccgtaatttattctccagtgccttacccgcatattgcacta

SEQ ID NO: 212071 - DNA, 50 bp, Artificial
  Synthetic oligonucleotide
agagtggcaggctcgcaatgaaacagcacgcgaatccccgccctgtctgg

SEQ ID NO: 212072 - DNA, 50 bp, Artificial
  Synthetic oligonucleotide
agaggccgggcgttttacgcaaccgacacaacatggcgcagatgagttgg

SEQ ID NO: 212073 - DNA, 50 bp, Artificial
  Synthetic oligonucleotide
actttcggcgggattcgccatgacggtaggtccgctctacgcccaagccg

SEQ ID NO: 212074 - DNA, 50 bp, Artificial
  Synthetic oligonucleotide
acttgtccgcaagaccgcaaaggaggccgggggacatgccactctgttcc

SEQ ID NO: 212075 - DNA, 50 bp, Artificial
  Synthetic oligonucleotide
acttcacatgaatgacggccttacctggtggcaacggcctgtagtcagtc

SEQ ID NO: 212076 - DNA, 50 bp, Artificial
  Synthetic oligonucleotide
actgcatcaacggagtggggcgtcaatgcgtgcccgaaaatcccgtttgc

SEQ ID NO: 212077 - DNA, 50 bp, Artificial
  Synthetic oligonucleotide
actgagcggagcggcgcaatgggacaattaagcgcgagcattcgggtgca

SEQ ID NO: 212078 - DNA, 50 bp, Artificial
  Synthetic oligonucleotide
acgtccgaccgctggtaatcgattccacgcctcttagggcccacccacgg

SEQ ID NO: 212079 - DNA, 60 bp, Artificial
  Synthetic oligonucleotide
atgatcggcgaggtctgtccagccgggttatggagccagtgaatgattcgggcttgggtg

SEQ ID NO: 212080 - DNA, 50 bp, Artificial
  Synthetic oligonucleotide
acggttgcttcctgcactccgggcacagctttgagcgcccgttcgatacg

SEQ ID NO: 212081 - DNA, 50 bp, Artificial
  Synthetic oligonucleotide
acgggttgcacatcccagtcgccagatactgtcggccactctgtgcccga

SEQ ID NO: 212082 - DNA, 50 bp, Artificial
  Synthetic oligonucleotide
ggacttaagtacaccctgtactttggtacaaggcgatgggagcggggaga

SEQ ID NO: 212083 - DNA, 50 bp, Artificial
  Synthetic oligonucleotide
atcgatcgcagcgggattgtgcgcgaacgtacaccggaggactaccaggt

SEQ ID NO: 212084 - DNA, 50 bp, Artificial
  Synthetic oligonucleotide
atcgagtgaaagctcctgagccggaaaaccccgctgatcggccattcccc

SEQ ID NO: 212085 - DNA, 50 bp, Artificial
  Synthetic oligonucleotide
atcctggaagctggagaacgcatactcgcattcggtgcttgtggcccgga

SEQ ID NO: 212086 - DNA, 50 bp, Artificial
  Synthetic oligonucleotide
atccggtttgctaccacgcttccacgaccggtatccgctcacgctgacat

SEQ ID NO: 212087 - DNA, 50 bp, Artificial
  Synthetic oligonucleotide
atccggttcgtggttgagctggggcgctatatcgtggcagaagcgggtat

SEQ ID NO: 212088 - DNA, 50 bp, Artificial
  Synthetic oligonucleotide
atcccccagggcagagcatccgcgcacatcgggtagatcgtaccgaacag

SEQ ID NO: 212089 - DNA, 50 bp, Artificial
  Synthetic oligonucleotide
atcaggtacgcctggtgaaccggggtcgaccagaatgctggctgcctaca

SEQ ID NO: 212090 - DNA, 60 bp, Artificial
  Synthetic oligonucleotide
gctcaagtatctcggacacccggggcggatccatctcgacatcagaaagccgaaatatct

SEQ ID NO: 212091 - DNA, 50 bp, Artificial
  Synthetic oligonucleotide
ataggccggcgtggttaagagcgcaaacggtgcatagggtgcaacgggtg

SEQ ID NO: 212092 - DNA, 50 bp, Artificial
  Synthetic oligonucleotide
agtgttactgtacaccctggcacgcccggctttacaacccgaagcacccg

SEQ ID NO: 212093 - DNA, 50 bp, Artificial
  Synthetic oligonucleotide
agtgcttgcccccaataagccatcgcaagcccgggatccaatcgcgccgc

SEQ ID NO: 212094 - DNA, 50 bp, Artificial
  Synthetic oligonucleotide
ctctggctgcgctaagttatgctaagtcattaggccatcgctacaattta

SEQ ID NO: 212095 - DNA, 50 bp, Artificial
  Synthetic oligonucleotide
agtgcggtttgcccgaagactagcagaggtccgttgggattgacggtccg

SEQ ID NO: 212096 - DNA, 50 bp, Artificial
  Synthetic oligonucleotide
agtgcgggtatgttttcgccagtagctctgcgtccgccaatccggcacaa

SEQ ID NO: 212097 - DNA, 50 bp, Artificial
  Synthetic oligonucleotide
agtgcggcgatgtcaaaggccataggcgttccctcatatccgtagccgga

SEQ ID NO: 212098 - DNA, 50 bp, Artificial
  Synthetic oligonucleotide
agtgcgcgcctaatgcagggagaccaggcttgcaatagacacgccccgga

SEQ ID NO: 212099 - DNA, 50 bp, Artificial
  Synthetic oligonucleotide
agtctgatcaggatggtcagctggtgaccgccagtggctttccgctgcag

SEQ ID NO: 212100 - DNA, 50 bp, Artificial
  Synthetic oligonucleotide
aggttagcgagcgtcggtttcaccagcaattgttccgcacgatgccccct

SEQ ID NO: 212101 - DNA, 59 bp, Artificial
  Synthetic oligonucleotide
gctgatattccacctgagattgaatggttcgccaatttaggtaacgtcgagactcggcg

SEQ ID NO: 212102 - DNA, 50 bp, Artificial
  Synthetic oligonucleotide
aggtgcacccatgcagagtactaacgtgccaagctcgggagcgcaccctt

SEQ ID NO: 212103 - DNA, 50 bp, Artificial
  Synthetic oligonucleotide
gacagcaagctgcatgcacgcaaacggtaccggcgctaccaagagttggg

SEQ ID NO: 212104 - DNA, 50 bp, Artificial
  Synthetic oligonucleotide
agggttccggttgcatgacccgtatgccttcgctgcgtatctgccaggca

SEQ ID NO: 212105 - DNA, 50 bp, Artificial
  Synthetic oligonucleotide
agggtatgctctaccgtatgcgggtaggctgtccctggcgagacctgccc

SEQ ID NO: 212106 - DNA, 50 bp, Artificial
  Synthetic oligonucleotide
agggccacgactggcaaatgcgcgactggtacgctgacagcatgtctcct

SEQ ID NO: 212107 - DNA, 50 bp, Artificial
  Synthetic oligonucleotide
agggaaacgatggttgtgataagaaagccggtttggtcccgggcggcgca

SEQ ID NO: 212108 - DNA, 50 bp, Artificial
  Synthetic oligonucleotide
aggctggtcgcatagtggaacgttacggcaggtcagcaatgcgggaggta

SEQ ID NO: 212109 - DNA, 50 bp, Artificial
  Synthetic oligonucleotide
aggcgggaccggtgatgcgtttcatggaagcaaccgcaaacagcctgcac

SEQ ID NO: 212110 - DNA, 50 bp, Artificial
  Synthetic oligonucleotide
aggcgatagcgtcaataccctccgccgtggttgcttcattcaccgctgct

SEQ ID NO: 212111 - DNA, 50 bp, Artificial
  Synthetic oligonucleotide
aggcgaccggatccttcctatgctcgaagtgtgtggcgcgcacaaggtaa

SEQ ID NO: 212112 - DNA, 60 bp, Artificial
  Synthetic oligonucleotide
ggcgatatagatctgatggacagcacaattaaccagattgaaaccaggcagaaaggcgat

SEQ ID NO: 212113 - DNA, 59 bp, Artificial
  Synthetic oligonucleotide
gaggcgaaactggtaatagccggcgtggggcgaagaatgctggatacacccgcgcgaga

SEQ ID NO: 212114 - DNA, 50 bp, Artificial
  Synthetic oligonucleotide
aggcatgttagcggcacccgtggggtagatcagactggtccgcgtatgca

SEQ ID NO: 212115 - DNA, 60 bp, Artificial
  Synthetic oligonucleotide
gagctattacacctagtatgagcggttctcctcttgatagtctgtcagcaaccctactgc

SEQ ID NO: 212116 - DNA, 60 bp, Artificial
  Synthetic oligonucleotide
agggcgcatgttaaaactagatcgagcaaatttctatccggaaatgctcgaagtgatcga

SEQ ID NO: 212117 - DNA, 59 bp, Artificial
  Synthetic oligonucleotide
tctcggacacccggggcggatccatctcgacatcagaaagccgaaatatctccaacacg

SEQ ID NO: 212118 - DNA, 57 bp, Artificial
  Synthetic oligonucleotide
ccaaaatacaatcgccgagcattggcctcggcccaatttattccccaggaatatcta

SEQ ID NO: 212119 - DNA, 59 bp, Artificial
  Synthetic oligonucleotide
aagtacgctcttaagttctctgatcttgagcctggccatcttttcgaagcgtacaagat

SEQ ID NO: 212120 - DNA, 60 bp, Artificial
  Synthetic oligonucleotide
tctcgttgtgttcgcggggcgaacatttcattttcgcttgtcgctgtctcgccagaagta

SEQ ID NO: 212121 - DNA, 60 bp, Artificial
  Synthetic oligonucleotide
tctgaccgcatcagataaggattgtgtagccaggacgactgagcaattttgttttcgcaa

SEQ ID NO: 212122 - DNA, 57 bp, Artificial
  Synthetic oligonucleotide
tctgtttgtgtcgtatgtcagttcggcacggcgtccgaatggatcggttattccggt

SEQ ID NO: 212123 - DNA, 54 bp, Artificial
  Synthetic oligonucleotide
cattaatcttgcgcacgtttaactttttgaacccgtggaatgtcgcgttcaccg

SEQ ID NO: 212124 - DNA, 55 bp, Artificial
  Synthetic oligonucleotide
gaattctgcgaaagcagtgaccacctctactaacaggggggtcacacccaacggg

SEQ ID NO: 212125 - DNA, 58 bp, Artificial
  Synthetic oligonucleotide
tgcgatccagaagatccgatcaatttaagggtaaccaggtatcggctaagccacgaaa

SEQ ID NO: 212126 - DNA, 56 bp, Artificial
  Synthetic oligonucleotide
catcgtttgcagtttccgaaaattgaggacgaattgaacccgattgcaggacgaac

SEQ ID NO: 212127 - DNA, 60 bp, Artificial
  Synthetic oligonucleotide
tggatagtcagagccgcccttcatccgaccgcaatctgtccagattgattgtagcaatcg

SEQ ID NO: 212128 - DNA, 55 bp, Artificial
  Synthetic oligonucleotide
tggctatggcgtataacttaaaaaggttacccagactcttaactacccagtcatc

SEQ ID NO: 212129 - DNA, 58 bp, Artificial
  Synthetic oligonucleotide
tggggaaatgctggtatttgtagcgggctaccctgtaattcgtggacgccagattctg

SEQ ID NO: 212130 - DNA, 56 bp, Artificial
  Synthetic oligonucleotide
tggtactggctatacctacgtttatcgtccccgcactgtttccgaattcaaagcat

SEQ ID NO: 212131 - DNA, 51 bp, Artificial
  Synthetic oligonucleotide
ataacagtcgtgaaaccggaaggtacttatacagcggcaagtttttaaccg

SEQ ID NO: 212132 - DNA, 54 bp, Artificial
  Synthetic oligonucleotide
ttaacggttaagaatggacctgatttacaggaacgttttgtgcatttgcgtaaa

SEQ ID NO: 212133 - DNA, 59 bp, Artificial
  Synthetic oligonucleotide
ttatctagtccgttattattggttggtgtcagatttactgcaaatggccaggacttatg

SEQ ID NO: 212134 - DNA, 60 bp, Artificial
  Synthetic oligonucleotide
ttctgcgatgtagtaggacagaggtataaatgatgcagcgccgttatcgactacaaaatt

SEQ ID NO: 212135 - DNA, 57 bp, Artificial
  Synthetic oligonucleotide
gggacgttgccacgacaggcattacccaggtggaacgcttgccagcgttaccttatc

SEQ ID NO: 212136 - DNA, 56 bp, Artificial
  Synthetic oligonucleotide
ttgacgtcaggcctttaactgatccagttgacggctttcttgaggtttgtaagtac

SEQ ID NO: 212137 - DNA, 56 bp, Artificial
  Synthetic oligonucleotide
caggacgctctggttaaagggcaaaacccttacgctgctatcttgggttgcgccga

SEQ ID NO: 212138 - DNA, 58 bp, Artificial
  Synthetic oligonucleotide
ttggtacagcggctttgtcaattcctcgggtagtgctgaataaacgcgcaagtctaag

SEQ ID NO: 212139 - DNA, 51 bp, Artificial
  Synthetic oligonucleotide
ttggttttagggtaccggcgcaacgcagattttccgtcgcgggttacgccg

SEQ ID NO: 212140 - DNA, 60 bp, Artificial
  Synthetic oligonucleotide
ttgtctggcccatcgcacgcaactgaaggtaatcgccaagtatcacaagtgttacgataa

SEQ ID NO: 212141 - DNA, 49 bp, Artificial
  Synthetic oligonucleotide
tttaaacgtatttgatacaccggagtcaacgaaccgaaaaaccggggaa

SEQ ID NO: 212142 - DNA, 60 bp, Artificial
  Synthetic oligonucleotide
tttgctgctttctatgatcggcgaggtctgtccagccgggttatggagccagtgaatgat

SEQ ID NO: 212143 - DNA, 60 bp, Artificial
  Synthetic oligonucleotide
cagcttctggcatatcaagtaggtaatccttcatgcggaagtcaaccactggaccagtcg

SEQ ID NO: 212144 - DNA, 60 bp, Artificial
  Synthetic oligonucleotide
taaagctatgcgctcgatgttcaaatctcgcagaaatactaatcaaggccagcgtttcgt

SEQ ID NO: 212145 - DNA, 60 bp, Artificial
  Synthetic oligonucleotide
tacccatccccacaccactgcttcgtcagacagcgcaaaagtgtgttgtagatacagcag

SEQ ID NO: 212146 - DNA, 58 bp, Artificial
  Synthetic oligonucleotide
acgaacccagtatatcggtggcaagaccagtgattatcggggtcggctctatgagaag

SEQ ID NO: 212147 - DNA, 60 bp, Artificial
  Synthetic oligonucleotide
tacttgcttacgaatgctggaattgctctcgatcggggacttgaagctgagcagaatctt

SEQ ID NO: 212148 - DNA, 60 bp, Artificial
  Synthetic oligonucleotide
tagattgatcgcgtatcgtgaaatgtttcagggaacattgacgtgtgcctcggtatatcc

SEQ ID NO: 212149 - DNA, 60 bp, Artificial
  Synthetic oligonucleotide
cactccatccggtgaacttctgttccacgtattcggtgcacttgcccagtatgaaagagc

SEQ ID NO: 212150 - DNA, 53 bp, Artificial
  Synthetic oligonucleotide
tcaaatgagaaggagttgcaattgtgaagggggaaaaactaaaccccctgtcc

SEQ ID NO: 212151 - DNA, 60 bp, Artificial
  Synthetic oligonucleotide
tcactaatgaacaaacgtggttcatattcatagcgaagcgtggcaactttatggactgca

SEQ ID NO: 212152 - DNA, 60 bp, Artificial
  Synthetic oligonucleotide
aatgggaaaaatcctcatgccttttcgagcgggcaagatactgatgcattcgtcgatctg

SEQ ID NO: 212153 - DNA, 59 bp, Artificial
  Synthetic oligonucleotide
ccaatttgctacccgtgttaccccagactgggatgcgcgtatcagggctatagctgacc

SEQ ID NO: 212154 - DNA, 60 bp, Artificial
  Synthetic oligonucleotide
tcagagccgcccttcatccgaccgcaatctgtccagattgattgtagcaatcggccatta

SEQ ID NO: 212155 - DNA, 60 bp, Artificial
  Synthetic oligonucleotide
tccaaaccaaccttatagatcataggccaaagaattggaacttgctctccttggcagata

SEQ ID NO: 212156 - DNA, 60 bp, Artificial
  Synthetic oligonucleotide
tccaatgttgcccgtttgacaagatatatcgttaatgccaagggaggaattgatccgaga

SEQ ID NO: 212157 - DNA, 60 bp, Artificial
  Synthetic oligonucleotide
gggcgtcaaaacaagtccgctttgttctggcatgttatcccacagcaatcgggatatctc

SEQ ID NO: 212158 - DNA, 60 bp, Artificial
  Synthetic oligonucleotide
tccagcggacaacctatgagcggatttatcacagacctcattgaatcggccttgcctact

SEQ ID NO: 212159 - DNA, 60 bp, Artificial
  Synthetic oligonucleotide
ccaatattggtaataggcgatccagccgagatgcttttaactcgtgagcaagcatgacac

SEQ ID NO: 212160 - DNA, 60 bp, Artificial
  Synthetic oligonucleotide
tccgatgattgcttggcggctgaatcggatcagggggcctgcggcgcttgccgtttgccg

SEQ ID NO: 212161 - DNA, 53 bp, Artificial
  Synthetic oligonucleotide
tccgccggataaagtaggcggagttacccagtcaaaaaaccttgaccacgtca

SEQ ID NO: 212162 - DNA, 58 bp, Artificial
  Synthetic oligonucleotide
tccgagaccttggacttagcaatagcctttcggtggaactatcacttgaaaatggcaa

SEQ ID NO: 212163 - DNA, 60 bp, Artificial
  Synthetic oligonucleotide
tcctggtctaccgatctggccagggaagcgctatcacttgagatggagcgcttctatgtc

SEQ ID NO: 212164 - DNA, 56 bp, Artificial
  Synthetic oligonucleotide
ttcatgagcgattttgataaataccttttgtatcgtgctttacaccgtaagtttac

SEQ ID NO: 212165 - DNA, 59 bp, Artificial
  Synthetic oligonucleotide
agcgattggtaggattggccagaacccgagaaatggaagcacgcaataatccgacaaca

SEQ ID NO: 212166 - DNA, 57 bp, Artificial
  Synthetic oligonucleotide
aggtctgtccagccgggttatggagccagtgaatgattcgggcttgggtgtaatcgg

SEQ ID NO: 212167 - DNA, 59 bp, Artificial
  Synthetic oligonucleotide
caacttacgcatattcgagatcaggggggcatgatgctattccgtaccccattctatgc

SEQ ID NO: 212168 - DNA, 60 bp, Artificial
  Synthetic oligonucleotide
cggcgatcgacacatgcaagtctcgatcattgaggcacacagcactaccggcaaagcata

SEQ ID NO: 212169 - DNA, 57 bp, Artificial
  Synthetic oligonucleotide
gcctgtcctgaaacttgccggcgtccggacgtatcgcacaagggcacccccttgcac

SEQ ID NO: 212170 - DNA, 50 bp, Artificial
  Synthetic oligonucleotide
aatatcgcgcccacttcgtgcggggagggttgtatgtcggcgctgccttt

SEQ ID NO: 212171 - DNA, 50 bp, Artificial
  Synthetic oligonucleotide
aatagccggtccgcagccaacctgcacgtagcatcggtcgaatctccgcg

SEQ ID NO: 212172 - DNA, 50 bp, Artificial
  Synthetic oligonucleotide
aatgtggttcatgccgcaatatcgcgcccacttcgtgcggggagggttgt

SEQ ID NO: 212173 - DNA, 50 bp, Artificial
  Synthetic oligonucleotide
aataaccctcggacctctgcccggaatcaaacccgttacgtgcggcggct

SEQ ID NO: 212174 - DNA, 50 bp, Artificial
  Synthetic oligonucleotide
aagtgcctaccgccggccttccgacgaaccagcttccccgttcctgtgcg

SEQ ID NO: 212175 - DNA, 50 bp, Artificial
  Synthetic oligonucleotide
aagtactcgaccacattcgccggtaactcgcccctcgggatggcccgaag

SEQ ID NO: 212176 - DNA, 50 bp, Artificial
  Synthetic oligonucleotide
aaggtgtatgtcggggcactgtatctcgcgccggggactaaccctgagcg

SEQ ID NO: 212177 - DNA, 50 bp, Artificial
  Synthetic oligonucleotide
aagggacgcccgatatccttcctggcaccacagcgtactcggacctccaa

SEQ ID NO: 212178 - DNA, 50 bp, Artificial
  Synthetic oligonucleotide
aagcgtcgcccagactgtttccggtcgtccaagccgcaatgctcgatgtg

SEQ ID NO: 212179 - DNA, 50 bp, Artificial
  Synthetic oligonucleotide
aagcgccagaattgcaaggccgtgttggtctgatccggccctccgtagac

SEQ ID NO: 212180 - DNA, 58 bp, Artificial
  Synthetic oligonucleotide
gcggtcactctattaggaatgccccctcttgtcacccccagcgatagagaggggtctc

SEQ ID NO: 212181 - DNA, 50 bp, Artificial
  Synthetic oligonucleotide
aagccttcggagttgctcgatctgagccgcgaagtcaaacggcgtggggg

SEQ ID NO: 212182 - DNA, 50 bp, Artificial
  Synthetic oligonucleotide
aagaccccaccggcgttttcaaagcggctcgcgttggacaaagaggcaga

SEQ ID NO: 212183 - DNA, 50 bp, Artificial
  Synthetic oligonucleotide
aagacatcatcgccacgtgctcggtcctccgctcctgcgccccagtccga

SEQ ID NO: 212184 - DNA, 50 bp, Artificial
  Synthetic oligonucleotide
aactcggccaggattgtgaacaggcgctctttgtgttggggcaatcccgg

SEQ ID NO: 212185 - DNA, 50 bp, Artificial
  Synthetic oligonucleotide
acaatggcgccttgcgagactaccccgccatagactctgaggtgtccggc

SEQ ID NO: 212186 - DNA, 50 bp, Artificial
  Synthetic oligonucleotide
aacgggggcagaacgaggatgactaccggctgaggggcgggcattgatgt

SEQ ID NO: 212187 - DNA, 50 bp, Artificial
  Synthetic oligonucleotide
aacggatccggtgggcatcgcggatagaacatctacaggcctcgcaccgc

SEQ ID NO: 212188 - DNA, 50 bp, Artificial
  Synthetic oligonucleotide
aacgcgcaggacccccggatgaggcgatatcgatgatggacgtgtcgaga

SEQ ID NO: 212189 - DNA, 50 bp, Artificial
  Synthetic oligonucleotide
aacgcagcccatcgataagggtggtcgttggcttgtgaggcggccatggg

SEQ ID NO: 212190 - DNA, 56 bp, Artificial
  Synthetic oligonucleotide
aggaaccgtgatctgtatcgagttggtgactatcgccgggtagtccttatatccct

SEQ ID NO: 212191 - DNA, 56 bp, Artificial
  Synthetic oligonucleotide
atagtcctgagaagatcaagagtccggaggttacccaaaaggtcgatgtcacctcc

SEQ ID NO: 212192 - DNA, 60 bp, Artificial
  Synthetic oligonucleotide
ggttggatagtcctatatggctgatgatttcgagacgcttggggtgggacagagcggaga

SEQ ID NO: 212193 - DNA, 60 bp, Artificial
  Synthetic oligonucleotide
gtagaggctgactcattgccataagaccggcgatcgacacatgcaagtctcgatcattga

SEQ ID NO: 212194 - DNA, 52 bp, Artificial
  Synthetic oligonucleotide
tttaagtcttcgggccagtaacagtaaatggttgggttcaatcccggctatt

SEQ ID NO: 212195 - DNA, 60 bp, Artificial
  Synthetic oligonucleotide
catgcattcgttccaacatgcacatgcgggggacagtgctcatttcgcgtcaaaactgcg

SEQ ID NO: 212196 - DNA, 60 bp, Artificial
  Synthetic oligonucleotide
attggtgtcaatcgcactacgttatctgaaacgttgactcgcattggcaggaacacccaa

SEQ ID NO: 212197 - DNA, 60 bp, Artificial
  Synthetic oligonucleotide
tgcacatgcgggggacagtgctcatttcgcgtcaaaactgcgactaacaaaccgcgatgt

SEQ ID NO: 212198 - DNA, 56 bp, Artificial
  Synthetic oligonucleotide
cggatgcaagttgtaattcggactcccctttcggacggaataaagccatgtcacgc

SEQ ID NO: 212199 - DNA, 57 bp, Artificial
  Synthetic oligonucleotide
gttcaggttgtcttgagattcgggggtgtactcttgaggttcatgtcggtccttgcg

SEQ ID NO: 212200 - DNA, 54 bp, Artificial
  Synthetic oligonucleotide
taagcaaaaacgcgtgacatggctttattccgtccgaaaggggagtccgaatta

SEQ ID NO: 212201 - DNA, 57 bp, Artificial
  Synthetic oligonucleotide
aaaggaagagacccctcggcttcgtctcagggtgacaaagcggagattcctcgcatc

SEQ ID NO: 212202 - DNA, 55 bp, Artificial
  Synthetic oligonucleotide
tcgagttggtgactatcgccgggtagtccttatatcccttatcggcgttcggacc

SEQ ID NO: 212203 - DNA, 56 bp, Artificial
  Synthetic oligonucleotide
gactcgctttgggaagggccgattgaaagaggccgattactttttctgaccgtgca

SEQ ID NO: 212204 - DNA, 58 bp, Artificial
  Synthetic oligonucleotide
acatcgccgattagtcagaaaagcggagcccattactgagccccgcttctcaagaacc

SEQ ID NO: 212205 - DNA, 51 bp, Artificial
  Synthetic oligonucleotide
tctccggagggggaccgggataaggtcgaccggagacaaaaccgttcgtga

SEQ ID NO: 212206 - DNA, 57 bp, Artificial
  Synthetic oligonucleotide
ccttttgttacaatgagaccgtttgaacaaattagagtagatgtggcgtatatgaac

SEQ ID NO: 212207 - DNA, 55 bp, Artificial
  Synthetic oligonucleotide
ccaccatccatgagcaaagatgtttctcggaagtggaagttcaagtgccataagc

SEQ ID NO: 212208 - DNA, 55 bp, Artificial
  Synthetic oligonucleotide
cgcttcaatcactaaaggttattccgatgggtctcaataaccctgacgaatttga

SEQ ID NO: 212209 - DNA, 60 bp, Artificial
  Synthetic oligonucleotide
gaacgctcccgctggcttgacagaggtcgtagtacgggtatgatcatatagtgtatttga

SEQ ID NO: 212210 - DNA, 55 bp, Artificial
  Synthetic oligonucleotide
cagtgaaacagccgagtggcttcgaactgcggagtttgtaaagatcagaccggtt

SEQ ID NO: 212211 - DNA, 55 bp, Artificial
  Synthetic oligonucleotide
cagtccccggtcgtgaagacccttgagcacagcaagccgttcttccaacgaagac

SEQ ID NO: 212212 - DNA, 52 bp, Artificial
  Synthetic oligonucleotide
actccttagggaaagcactaagtttgcggataaaagccttaaatccgtggga

SEQ ID NO: 212213 - DNA, 55 bp, Artificial
  Synthetic oligonucleotide
agcaattgccacgcttgccgatagggcgcgaataacttatcgataccggacgacc

SEQ ID NO: 212214 - DNA, 55 bp, Artificial
  Synthetic oligonucleotide
ccggcccaatttccgcttcaccattcctagcaccacgtccaattcctccgagccg

SEQ ID NO: 212215 - DNA, 55 bp, Artificial
  Synthetic oligonucleotide
atatggctgatgatttcgagacgcttggggtgggacagagcggagaacatctccg

SEQ ID NO: 212216 - DNA, 55 bp, Artificial
  Synthetic oligonucleotide
atcactactgtctcattaaatccataaggaagtatggttcaacctctgtatggag

SEQ ID NO: 212217 - DNA, 55 bp, Artificial
  Synthetic oligonucleotide
atcgttcccctaacatttgtatcaagatatccccagggattttcaaccgatgctc

SEQ ID NO: 212218 - DNA, 55 bp, Artificial
  Synthetic oligonucleotide
cctcccctcttggtaagaagcctcttcacgatcactgccatccggtcaatggctt

SEQ ID NO: 212219 - DNA, 55 bp, Artificial
  Synthetic oligonucleotide
tgtagctgtgcggcaatgacgaagggctgaccttgtctcgtcaaccaggttgcat

SEQ ID NO: 212220 - DNA, 56 bp, Artificial
  Synthetic oligonucleotide
gacctaccacaccgcattatgggacctaccgatttttcggattacctccagtgctg

SEQ ID NO: 212221 - DNA, 55 bp, Artificial
  Synthetic oligonucleotide
tctaacgggtgtgaggaatctgacccgtagggtctatcctgaggctaaggtcccc

SEQ ID NO: 212222 - DNA, 55 bp, Artificial
  Synthetic oligonucleotide
tccgctcccaaagcgacttgatgccagtctgaggaatccggttactgtcccgatg

SEQ ID NO: 212223 - DNA, 55 bp, Artificial
  Synthetic oligonucleotide
aacagagggaatatctacgtaacagttggttgtaatctctcctgcgaccataaca

SEQ ID NO: 212224 - DNA, 55 bp, Artificial
  Synthetic oligonucleotide
gtgcgcttcctgagattcgattatcggtggaaggggcgtcctcttcgaaacaacc

SEQ ID NO: 212225 - DNA, 55 bp, Artificial
  Synthetic oligonucleotide
gtgaacttattgatcttctctatgctcacattccctcaggagttggctcaacagg

SEQ ID NO: 212226 - DNA, 55 bp, Artificial
  Synthetic oligonucleotide
gtcgcattacctcgtccggaaccgtggaagtcgttcgttctgcgtgagaatctag

SEQ ID NO: 212227 - DNA, 55 bp, Artificial
  Synthetic oligonucleotide
ggtctatcagtctctaactcaaggctgacgtagttgcttctatcaagcatgaggg

SEQ ID NO: 212228 - DNA, 55 bp, Artificial
  Synthetic oligonucleotide
ggtatcgcgccaaaaggaacaccgcgaattcttatatcaggtagtccatttgcaa

SEQ ID NO: 212229 - DNA, 55 bp, Artificial
  Synthetic oligonucleotide
gggctctgcgtcagagatactaggggcgggaccgacttgagagctgaagtcgcag

SEQ ID NO: 212230 - DNA, 55 bp, Artificial
  Synthetic oligonucleotide
gggcaggtaggtcccgaaggaataccccaccatctgcttcgtcgcacattcgtga

SEQ ID NO: 212231 - DNA, 58 bp, Artificial
  Synthetic oligonucleotide
acccctcggcttcgtctcagggtgacaaagcggagattcctcgcatccattgagggta

SEQ ID NO: 212232 - DNA, 55 bp, Artificial
  Synthetic oligonucleotide
ggactggataagtttctcacaagaaatgacgaccgggcactttttggcttgccgg

SEQ ID NO: 212233 - DNA, 55 bp, Artificial
  Synthetic oligonucleotide
gctaatgctcggggtgacagaatacgactgtccattccaaaccgtagggaagccc

SEQ ID NO: 212234 - DNA, 55 bp, Artificial
  Synthetic oligonucleotide
gatgtctgcaaggaatcgatgcaagttcaacggattccagagtgccgagcggagc

SEQ ID NO: 212235 - DNA, 55 bp, Artificial
  Synthetic oligonucleotide
gaggaggctccctttatccaatatctggcagagttacgaaaggcgcatcaggtgt

SEQ ID NO: 212236 - DNA, 55 bp, Artificial
  Synthetic oligonucleotide
cttggtagaagcctctgtcctacaacccatttaagtgtatctgaaatcctgagcc

SEQ ID NO: 212237 - DNA, 55 bp, Artificial
  Synthetic oligonucleotide
aatggcacgtctgaacaggcggtgtcccagacccaagcctcgataggccggtcgt

SEQ ID NO: 212238 - DNA, 55 bp, Artificial
  Synthetic oligonucleotide
ctggcagagcaccattagaagctgttagcatgggacttacactttctaaggatga

SEQ ID NO: 212239 - DNA, 55 bp, Artificial
  Synthetic oligonucleotide
cgtcggtcctggtcactttgacgatcggtccgatctctattttcgagggcatgga

SEQ ID NO: 212240 - DNA, 54 bp, Artificial
  Synthetic oligonucleotide
ggctgttccagaggaggtttgtaacatccatgcatcagagttaaacagacgatt

SEQ ID NO: 212241 - DNA, 54 bp, Artificial
  Synthetic oligonucleotide
gagagaatgtggcgtacaggccaacggggaggaaggctctcgaagtgttcaatg

SEQ ID NO: 212242 - DNA, 55 bp, Artificial
  Synthetic oligonucleotide
gatcaaccttcttcgtatttcccattggggaatggtcgaatcttatgggaattcc

SEQ ID NO: 212243 - DNA, 54 bp, Artificial
  Synthetic oligonucleotide
tttgtactcgcggtcgatattagagacgatcccaccgagcgagtctccgccccc

SEQ ID NO: 212244 - DNA, 54 bp, Artificial
  Synthetic oligonucleotide
attttggatcgcttgggtgagtattatatttggagctcctatcggcataacctt

SEQ ID NO: 212245 - DNA, 54 bp, Artificial
  Synthetic oligonucleotide
agtgagtcgtgacggtcgtccggaggagaatgtctccggtgcacagcaacggtt

SEQ ID NO: 212246 - DNA, 54 bp, Artificial
  Synthetic oligonucleotide
aacggttgcggatcgagacacatcgcgcgggattttcctccgacccagaccatg

SEQ ID NO: 212247 - DNA, 53 bp, Artificial
  Synthetic oligonucleotide
aaaataaaccgtcggccggtctctcggatgtccacaagaagcgcgcgcgtcta

SEQ ID NO: 212248 - DNA, 53 bp, Artificial
  Synthetic oligonucleotide
ttgtttcaggggtgtccgatctcctcgatggtccggagtcggacccatcactt

SEQ ID NO: 212249 - DNA, 53 bp, Artificial
  Synthetic oligonucleotide
ttgggaatcgctctcattcgtttggaggaggatggctgcatagggagcattcc

SEQ ID NO: 212250 - DNA, 53 bp, Artificial
  Synthetic oligonucleotide
tgagagcgaggaatcccctatctcacctattatcagcctaatccaccgaacaa

SEQ ID NO: 212251 - DNA, 53 bp, Artificial
  Synthetic oligonucleotide
tcagtaagcactgtctgcatgtgattaacaagcactgcataactacgcctctt

SEQ ID NO: 212252 - DNA, 53 bp, Artificial
  Synthetic oligonucleotide
ggggatactgagagggtgttattcgtcccctcacgcggtatcgaactcgggga

SEQ ID NO: 212253 - DNA, 60 bp, Artificial
  Synthetic oligonucleotide
acgagcattccatgcattcgttccaacatgcacatgcgggggacagtgctcatttcgcgt

SEQ ID NO: 212254 - DNA, 53 bp, Artificial
  Synthetic oligonucleotide
aatactcgactcccttcttccgggagtaatcgtggacaagtcccaagcgctgg

SEQ ID NO: 212255 - DNA, 53 bp, Artificial
  Synthetic oligonucleotide
cccgcgaagagttcagtccttcagtcctcccctttatccaggactgaccatct

SEQ ID NO: 212256 - DNA, 52 bp, Artificial
  Synthetic oligonucleotide
cctacttaacggactcataatattctcttgccgctccgcggtaatcactcgc

SEQ ID NO: 212257 - DNA, 52 bp, Artificial
  Synthetic oligonucleotide
atcgagggtactgggcgattgctttgactaccctgatatggggatttcatta

SEQ ID NO: 212258 - DNA, 52 bp, Artificial
  Synthetic oligonucleotide
gacgagactgtccctcatccgcatcacatagggttctgaaatacggaatgaa

SEQ ID NO: 212259 - DNA, 52 bp, Artificial
  Synthetic oligonucleotide
ggggtgtactcttgaggttcatgtcggtccttgcgttcaagggttggatcaa

SEQ ID NO: 212260 - DNA, 51 bp, Artificial
  Synthetic oligonucleotide
gtattgtgtcagcttactatacagtttatcatgccgcaaaagcacttctac

SEQ ID NO: 212261 - DNA, 51 bp, Artificial
  Synthetic oligonucleotide
ggtcggtcgtgtgggcccaataggcgacgtcatccaagtagtggctcccgc

SEQ ID NO: 212262 - DNA, 51 bp, Artificial
  Synthetic oligonucleotide
taaaattctcgcacctattctcgtaggtttatcacacttaggacacacaag

SEQ ID NO: 212263 - DNA, 51 bp, Artificial
  Synthetic oligonucleotide
tcctgtagcaccatcagcagtctatgaacctgtgtataaagtgatgccgag

SEQ ID NO: 212264 - DNA, 59 bp, Artificial
  Synthetic oligonucleotide
gcaggttaggcttcctccgaagaggcatgcacaccgctacctacgctggctccctaacg

SEQ ID NO: 212265 - DNA, 51 bp, Artificial
  Synthetic oligonucleotide
aaagggtataggtccgtgttacacagataaaattgcgagaaacggagttag

SEQ ID NO: 212266 - DNA, 51 bp, Artificial
  Synthetic oligonucleotide
ttcatcccccatccgttgatcgatgcccccccgatcgatgagtccgttccg

SEQ ID NO: 212267 - DNA, 50 bp, Artificial
  Synthetic oligonucleotide
aaagctccctctgtccgcggaatttattcggtgtcaggcctcaggggccg

SEQ ID NO: 212268 - DNA, 50 bp, Artificial
  Synthetic oligonucleotide
aaattgccatgtccgcgttgactgccgaccagaggccatcgtcgacctta

SEQ ID NO: 212269 - DNA, 50 bp, Artificial
  Synthetic oligonucleotide
acacgtggcgaacacgcctgcggagcagacatgccagcctgggagccgtc

SEQ ID NO: 212270 - DNA, 50 bp, Artificial
  Synthetic oligonucleotide
aacaccctatcgtctcgcttgccgggacccccattgttccagtcgggacg

SEQ ID NO: 212271 - DNA, 50 bp, Artificial
  Synthetic oligonucleotide
acacccacctttcttgtccgcgcgtggttgcctcgctccccgaccgcagc

SEQ ID NO: 212272 - DNA, 50 bp, Artificial
  Synthetic oligonucleotide
aacacgagtgcgctgaaccagccgaacgcgagaaacactgcccaccggac

SEQ ID NO: 212273 - DNA, 50 bp, Artificial
  Synthetic oligonucleotide
aaacggtgtggggtcgtccgtgaggggctgttcgcacgtggcgcagtccg

SEQ ID NO: 212274 - DNA, 50 bp, Artificial
  Synthetic oligonucleotide
aacacgggtcgtccctgtgcctacccaaatgaccgcaattgtgcccgacg

SEQ ID NO: 212275 - DNA, 60 bp, Artificial
  Synthetic oligonucleotide
gccactcttacgattacgtcccagtgccacagcacgctgtagcacatcgggcgtcaccgc

SEQ ID NO: 212276 - DNA, 50 bp, Artificial
  Synthetic oligonucleotide
aaacctgctccctgtgaaccgcttcacacctacgcccgcgaccagtgcga

SEQ ID NO: 212277 - DNA, 50 bp, Artificial
  Synthetic oligonucleotide
aacaggcgtgtggaagtgaggccggtccgatgcagtgactgtcaggaggt

SEQ ID NO: 212278 - DNA, 50 bp, Artificial
  Synthetic oligonucleotide
aacagttgagcaactcaggcgcgcaacgggcctctcccagcggcgaatcc

SEQ ID NO: 212279 - DNA, 50 bp, Artificial
  Synthetic oligonucleotide
acactccactacgacgcacatgcgggcatcggagccccgtaacgcgcacc

SEQ ID NO: 212280 - DNA, 50 bp, Artificial
  Synthetic oligonucleotide
aaccacgtcggcagtagtcgtgcgggcgacagagtcgggcatcggacgct

SEQ ID NO: 212281 - DNA, 50 bp, Artificial
  Synthetic oligonucleotide
aaaagcgaccgtgcacgacggccataacgcagaacccgcgcatccatttc

SEQ ID NO: 212282 - DNA, 50 bp, Artificial
  Synthetic oligonucleotide
cttatagtaaccttccatgattcctgtaacccctctcgtggtatgggaat

SEQ ID NO: 212283 - DNA, 50 bp, Artificial
  Synthetic oligonucleotide
aatcttctgtgcgtgtcgggagaatgaccctggtgcgcgtacgtccggtt

SEQ ID NO: 212284 - DNA, 50 bp, Artificial
  Synthetic oligonucleotide
aatccccctccagcgtgcgttcccgaggctatcgccaccgggtaatgtat

SEQ ID NO: 212285 - DNA, 50 bp, Artificial
  Synthetic oligonucleotide
aatcacaagcaccccgcgcctactgccgccctgtggtacctcgctcatca

SEQ ID NO: 212286 - DNA, 54 bp, Artificial
  Synthetic oligonucleotide
agtctatttgaccgtaaacagccctgtcccggtctacaacggaacggaggctga

SEQ ID NO: 212287 - DNA, 57 bp, Artificial
  Synthetic oligonucleotide
aggggctagagaagagatcttccgctccgctaattaccggcactaaacataaagcac

SEQ ID NO: 212288 - DNA, 60 bp, Artificial
  Synthetic oligonucleotide
cctcacctacgcacctatggagaacctgcgatgaacagcaacgattacgactggggtgcg

SEQ ID NO: 212289 - DNA, 50 bp, Artificial
  Synthetic oligonucleotide
accattcgcagtcttcgggggacgcgatcaggcaccgttgctccgggttc

SEQ ID NO: 212290 - DNA, 50 bp, Artificial
  Synthetic oligonucleotide
atcgactcctctgcggggcaacatgattggcgggaccgcacacaacgcgt

SEQ ID NO: 212291 - DNA, 50 bp, Artificial
  Synthetic oligonucleotide
acccagcgggagcacccgtggaatccgtcgcccgaccggactagtggact

SEQ ID NO: 212292 - DNA, 50 bp, Artificial
  Synthetic oligonucleotide
atccgcgggacgcgtatgtactccggatcgcagccacagtgggtcgtttg

SEQ ID NO: 212293 - DNA, 50 bp, Artificial
  Synthetic oligonucleotide
accccggaggatccgtgaaactcgatcgtcgcgactgcccggactggatg

SEQ ID NO: 212294 - DNA, 50 bp, Artificial
  Synthetic oligonucleotide
cccgcggacttcaagacacgggtacttttcccggagtcgaagcagcacct

SEQ ID NO: 212295 - DNA, 50 bp, Artificial
  Synthetic oligonucleotide
acgcggtggtcatacgctcaggcagttccgtcagtgtgtcggttgccgat

SEQ ID NO: 212296 - DNA, 50 bp, Artificial
  Synthetic oligonucleotide
aggtttctgaatgtccatgcgtggcgtctcacccgtgccctgacgcgtgg

SEQ ID NO: 212297 - DNA, 50 bp, Artificial
  Synthetic oligonucleotide
acggcagaacgaccggtagacatacctgttttcgtgcccggggccgtcca

SEQ ID NO: 212298 - DNA, 50 bp, Artificial
  Synthetic oligonucleotide
aggtgcccctccatggccctagccgaatgaataggcgcacagcgtcgtgt

SEQ ID NO: 212299 - DNA, 58 bp, Artificial
  Synthetic oligonucleotide
cctacctggtaagccaagggttcacacaagtcgcgacgcgtgcggtcaattctctggc

SEQ ID NO: 212300 - DNA, 50 bp, Artificial
  Synthetic oligonucleotide
acggcccgaacgacttgcgctgacggtacttgatgggcatgtgcagcctc

SEQ ID NO: 212301 - DNA, 50 bp, Artificial
  Synthetic oligonucleotide
cgagtcgctccgctacttggcgcatcgacagcttcgggcttgggccggtt

SEQ ID NO: 212302 - DNA, 50 bp, Artificial
  Synthetic oligonucleotide
aggtgacatggggcgggcctttggtgagagtgcggttgcatcttcgttcg

SEQ ID NO: 212303 - DNA, 50 bp, Artificial
  Synthetic oligonucleotide
aggtgaacggactgtagtgccgggagccaggacggaggagtcatgccagg

SEQ ID NO: 212304 - DNA, 50 bp, Artificial
  Synthetic oligonucleotide
acggcgataccgtctttccagatgcgggatcgcgtggtgatccatcggtg

SEQ ID NO: 212305 - DNA, 50 bp, Artificial
  Synthetic oligonucleotide
acggctgcgaagtatggcggacgctccacgatactgggcatggggtcgtc

SEQ ID NO: 212306 - DNA, 50 bp, Artificial
  Synthetic oligonucleotide
aggtctaccgccgattccgccttttcgtggcgcggtcttgccttggaacg

SEQ ID NO: 212307 - DNA, 50 bp, Artificial
  Synthetic oligonucleotide
acggctgtgcacatgttgttcgtgcccgggggaggtaaccacccctcata

SEQ ID NO: 212308 - DNA, 50 bp, Artificial
  Synthetic oligonucleotide
gtaccgtcgtgcgccacacatcgcgccgagggtagtagtcgagcgacgaa

SEQ ID NO: 212309 - DNA, 50 bp, Artificial
  Synthetic oligonucleotide
gtacagggttgatgtgcgatcccacccgttgggttcagtccgacgcaccg

SEQ ID NO: 212310 - DNA, 54 bp, Artificial
  Synthetic oligonucleotide
cctaccagccctcacggaagttctggcactacacattcgacaacgggggaaccc

SEQ ID NO: 212311 - DNA, 50 bp, Artificial
  Synthetic oligonucleotide
gtaaaggtgacctgcgttcacccaggtggcattcggaccaccatcgcgcg

SEQ ID NO: 212312 - DNA, 50 bp, Artificial
  Synthetic oligonucleotide
acgggactctcacaggggagtccaccaaaatttcggggacccggcctcgc

SEQ ID NO: 212313 - DNA, 50 bp, Artificial
  Synthetic oligonucleotide
gtgatctccgaacggagtcagcatcgcgggtccggtcaaccgtcaccgtt

SEQ ID NO: 212314 - DNA, 50 bp, Artificial
  Synthetic oligonucleotide
atcatcgttgtaccggagggagccgcacgcgccacggtaactgcattctc

SEQ ID NO: 212315 - DNA, 50 bp, Artificial
  Synthetic oligonucleotide
accggcacgtaccactcccttcgctgatgcagcgtctcgcgaggtatcaa

SEQ ID NO: 212316 - DNA, 50 bp, Artificial
  Synthetic oligonucleotide
atagtcggcgtcctgctaacctgccggttacggtcccctggaatccgtcc

SEQ ID NO: 212317 - DNA, 50 bp, Artificial
  Synthetic oligonucleotide
cgatgtaatagctgcaccgttgcagccgccaaacacccggcaccgtcgcg

SEQ ID NO: 212318 - DNA, 50 bp, Artificial
  Synthetic oligonucleotide
accgtcaagtacgagtggcgagccaagcccgtcggtttcgtcgcgtacgg

SEQ ID NO: 212319 - DNA, 50 bp, Artificial
  Synthetic oligonucleotide
acctaccgacaaccccgcgcgtgtcatccgaactgccttcgaacgtccgg

SEQ ID NO: 212320 - DNA, 50 bp, Artificial
  Synthetic oligonucleotide
ataatcgggccgcatgccccagattgccgttacacagccagcacggtatg

SEQ ID NO: 212321 - DNA, 55 bp, Artificial
  Synthetic oligonucleotide
ccgttggtgttgtttcgggcggagcaagatggagacttaggtgccctaagtcgtc

SEQ ID NO: 212322 - DNA, 50 bp, Artificial
  Synthetic oligonucleotide
acctcacctggcgcatgtgcctcggtgtccgtgaaccctccgtcgcggag

SEQ ID NO: 212323 - DNA, 50 bp, Artificial
  Synthetic oligonucleotide
acgacggagggctcgagtgaccgagaaaccaagcaccacaacggacgaga

SEQ ID NO: 212324 - DNA, 50 bp, Artificial
  Synthetic oligonucleotide
acgagaactccctcgggcggaagccgtcctacgacgagcagcgccttatg

SEQ ID NO: 212325 - DNA, 50 bp, Artificial
  Synthetic oligonucleotide
agtaggtggcggatcacactcggccacggttgtgtgcggagtcctgtgtg

SEQ ID NO: 212326 - DNA, 50 bp, Artificial
  Synthetic oligonucleotide
cgagttcctcgtgctagcgccaacaccgcacctaacccgcctggtttgtg

SEQ ID NO: 212327 - DNA, 50 bp, Artificial
  Synthetic oligonucleotide
acgatcgcctacagcgcacttccgatggctggaggatcacgcaccggcgt

SEQ ID NO: 212328 - DNA, 50 bp, Artificial
  Synthetic oligonucleotide
agtaggcccgggacggaggtacggcagtcgctgtcgataacgactccccc

SEQ ID NO: 212329 - DNA, 50 bp, Artificial
  Synthetic oligonucleotide
gcccgtaaccccaccggctcatcccgtcgccataccagaacatcatcgtg

SEQ ID NO: 212330 - DNA, 50 bp, Artificial
  Synthetic oligonucleotide
gtcgatatgatgacgtggggtgcagagctattgcaatggtgggccgcggc

SEQ ID NO: 212331 - DNA, 60 bp, Artificial
  Synthetic oligonucleotide
ccgtaaatggcttcaacgtaggagcggcactattatcgatgctggtgcggacgtactgcg

SEQ ID NO: 212332 - DNA, 57 bp, Artificial
  Synthetic oligonucleotide
ccggttacgtcgcccaggcatgggaaacttgatctttatccggcgcaagtcggatga

SEQ ID NO: 212333 - DNA, 56 bp, Artificial
  Synthetic oligonucleotide
cctttggtgcgttcatcaaggactacctagagggtcgttccgaggtgacgttcgca

SEQ ID NO: 212334 - DNA, 55 bp, Artificial
  Synthetic oligonucleotide
ccggagtacgttccaggaggtaggtccaatgccagagaggcggaaccctgtcgcc

SEQ ID NO: 212335 - DNA, 58 bp, Artificial
  Synthetic oligonucleotide
ccggaatctcaccccttagcggggcgtgcgactatccggatagcagacgcttccgata

SEQ ID NO: 212336 - DNA, 58 bp, Artificial
  Synthetic oligonucleotide
cgaatgcgcatgcaggccggtaggggggacgtgccgtctccccagtacgatccggcta

SEQ ID NO: 212337 - DNA, 57 bp, Artificial
  Synthetic oligonucleotide
gcggctgcccgggactcgggtgcggtaacagtgtccgattccggagaccacgagatc

SEQ ID NO: 212338 - DNA, 56 bp, Artificial
  Synthetic oligonucleotide
cgaccaggcgcttcaccccgctccgaacgcggtgactccgtaaattatctgcggta

SEQ ID NO: 212339 - DNA, 56 bp, Artificial
  Synthetic oligonucleotide
ccgagctgtgtcgtgtgcggctcggagctcccccggcagaagaagggccgaccccg

SEQ ID NO: 212340 - DNA, 60 bp, Artificial
  Synthetic oligonucleotide
cgacgttgctagtcgcatccgtgcaaacagggtcgtctctcaggttgcgaagcacgtcgg

SEQ ID NO: 212341 - DNA, 51 bp, Artificial
  Synthetic oligonucleotide
ccgaccaacgtaagaacccacgggttcggacccaatgcggacctgaatacc

SEQ ID NO: 212342 - DNA, 60 bp, Artificial
  Synthetic oligonucleotide
ccgaaaacaagttcgccgacatgcccgcaagcttcagaccgaaggagtgatcgcatgatg

SEQ ID NO: 212343 - DNA, 60 bp, Artificial
  Synthetic oligonucleotide
cgagtcatcacgaaggaggtgcgaacgccgtgagcgaatcagacccacagtcaacgtccc

SEQ ID NO: 212344 - DNA, 57 bp, Artificial
  Synthetic oligonucleotide
ccctcggtgtgttcaaagttaatcgtgaagccaagtcagatgtttcggtgtcgccag

SEQ ID NO: 212345 - DNA, 55 bp, Artificial
  Synthetic oligonucleotide
ccctcggtgtgttcaaagttaatcgtgaagccaagtcagatgtttcggtacgccc

SEQ ID NO: 212346 - DNA, 57 bp, Artificial
  Synthetic oligonucleotide
ccctagatgactgaggcccgcgagagagtttgcgggacgggaagaatatagtcggcg

SEQ ID NO: 212347 - DNA, 60 bp, Artificial
  Synthetic oligonucleotide
cgatcgtgaacagactcgccgggatcgtgccggcaaggtgctgtctcgccttacgtgagc

SEQ ID NO: 212348 - DNA, 60 bp, Artificial
  Synthetic oligonucleotide
gcgtcagctaccgccgaaggcctgtcatcgaccggcttcgactgaagtatgagcaacgtc

SEQ ID NO: 212349 - DNA, 58 bp, Artificial
  Synthetic oligonucleotide
caacccgagcacacctcttgcaccaaggtgccgaccgtggctttccgctcgcagaggt

SEQ ID NO: 212350 - DNA, 60 bp, Artificial
  Synthetic oligonucleotide
attttccatatggcctcggcgcgtcggactcgaatagttgatgtgggcgggcacagttgc

SEQ ID NO: 212351 - DNA, 57 bp, Artificial
  Synthetic oligonucleotide
atttacgacgcagacctgagttccattgaacgcactaacgaccgtacaagtgtgatt

SEQ ID NO: 212352 - DNA, 60 bp, Artificial
  Synthetic oligonucleotide
attgcaagacatgccgacgctctggaaacgtatctgcgactgaccctctccgagtatgga

SEQ ID NO: 212353 - DNA, 60 bp, Artificial
  Synthetic oligonucleotide
gaatcgatctcaagtgcaagtacgatctcttcctgaggttacaaaagtaggaaagtgtga

SEQ ID NO: 212354 - DNA, 60 bp, Artificial
  Synthetic oligonucleotide
gaccgtggatctcagagacatccgaacccccatcatgtgaacaaaattcgcgtactcagt

SEQ ID NO: 212355 - DNA, 59 bp, Artificial
  Synthetic oligonucleotide
gaccgttcacaagaaagcctctaaggcaatcgccttcacagtcgcattgcggctccctt

SEQ ID NO: 212356 - DNA, 52 bp, Artificial
  Synthetic oligonucleotide
atgtttcggtacgcccctggggaaaccccttcaagtccggcactcccaatgc

SEQ ID NO: 212357 - DNA, 60 bp, Artificial
  Synthetic oligonucleotide
gacgcgtgttcctccggttcgtgccgtgcggctgtgggtgtgagtggactctatcccaca

SEQ ID NO: 212358 - DNA, 60 bp, Artificial
  Synthetic oligonucleotide
atggacagtgccgaccgagcatcccagctcattggcgatagctctcatggacatgccagt

SEQ ID NO: 212359 - DNA, 57 bp, Artificial
  Synthetic oligonucleotide
aggcccaacccctcctagcgtcgaacactgtgaatgaccgatcgaaaaggcaagcgc

SEQ ID NO: 212360 - DNA, 60 bp, Artificial
  Synthetic oligonucleotide
gacttaccttccgcagtctgagactcagtcccgttccccagtgcttgccttgctgtggtc

SEQ ID NO: 212361 - DNA, 60 bp, Artificial
  Synthetic oligonucleotide
gagactgtgcctgcatgcacttcctccaagcgtggtgcggtgaaccgggacaacactgaa

SEQ ID NO: 212362 - DNA, 60 bp, Artificial
  Synthetic oligonucleotide
gagccgcgaccaatccgatgcgaccagaccgcttggccgccggtaacagctgctgttacc

SEQ ID NO: 212363 - DNA, 60 bp, Artificial
  Synthetic oligonucleotide
atctggtcagtcctgcgtaccagcaatggaacgacgaatacgagcagagcgccgaagacg

SEQ ID NO: 212364 - DNA, 58 bp, Artificial
  Synthetic oligonucleotide
atctgcggaccagggtctcgcttgaccagggccgtgtctacgctggcggtttgacgaa

SEQ ID NO: 212365 - DNA, 60 bp, Artificial
  Synthetic oligonucleotide
gagctatagcgactacgtccggacgaaacactgctccgttcggagcatgagccatacttg

SEQ ID NO: 212366 - DNA, 53 bp, Artificial
  Synthetic oligonucleotide
gaggaccgtcgcccgtaacacccccagaccgccggctccgcgttgcgagaagg

SEQ ID NO: 212367 - DNA, 60 bp, Artificial
  Synthetic oligonucleotide
atcggccttcgactggattcgccgagccgtcttcagcagcaacgcggctcgctcctcgat

SEQ ID NO: 212368 - DNA, 59 bp, Artificial
  Synthetic oligonucleotide
gagttcaatccgcgcacgtctcgccgccctccgcaacgatgcccgcgagggtgccaacg

SEQ ID NO: 212369 - DNA, 60 bp, Artificial
  Synthetic oligonucleotide
cgtactcacgcgggttggcctggatgaagcgctttaacagtgcatcgctacgcggcattc

SEQ ID NO: 212370 - DNA, 57 bp, Artificial
  Synthetic oligonucleotide
gcgtccacacctaatagcccgagtaccccgcgccgacctttcggatctatcgcgcca

SEQ ID NO: 212371 - DNA, 58 bp, Artificial
  Synthetic oligonucleotide
cgtatcgagatgatgcgaacgcacgtaaaagggccggtcagcaacgttgccaaccggc

SEQ ID NO: 212372 - DNA, 60 bp, Artificial
  Synthetic oligonucleotide
cgtcacggctgcgaatgacgcgagcacggcagcgggtcctgcggcctcagtcgtgaacgc

SEQ ID NO: 212373 - DNA, 55 bp, Artificial
  Synthetic oligonucleotide
ctacgcccaggaccccaaccgctccgatgggcagtacaccaagttccctgagacg

SEQ ID NO: 212374 - DNA, 55 bp, Artificial
  Synthetic oligonucleotide
cacggctccgggcgtgtcggaccctgccgagtttgaacgcggttggctggcaggt

SEQ ID NO: 212375 - DNA, 60 bp, Artificial
  Synthetic oligonucleotide
ctatcccacaccccgacccctatgatacgaatggtctcgcacagagactatcggtctcta

SEQ ID NO: 212376 - DNA, 60 bp, Artificial
  Synthetic oligonucleotide
ctcagggcagagcctgcgtagctgcgtgctgttcgcccaaccgcgattgcatgcgatgcc

SEQ ID NO: 212377 - DNA, 60 bp, Artificial
  Synthetic oligonucleotide
ctcatcagtcacgacgacatgaaatcacctacagcgcaaggtcgctcggcgattgcccct

SEQ ID NO: 212378 - DNA, 59 bp, Artificial
  Synthetic oligonucleotide
cacctgactgtgaatcgagggtcacgggtttcgcagcgggcagccaacttggtgccgta

SEQ ID NO: 212379 - DNA, 51 bp, Artificial
  Synthetic oligonucleotide
ctcgcgcacccgcccgaccagggcggaatccaaaaccccggggttttgcaa

SEQ ID NO: 212380 - DNA, 58 bp, Artificial
  Synthetic oligonucleotide
ctcgctggtgttaccgaggtggtgtgccaacgagaatccaacttgccgcagcgtttgg

SEQ ID NO: 212381 - DNA, 55 bp, Artificial
  Synthetic oligonucleotide
gctacacgaccccaccagaatccaacgtccgtcgaccgagccaggtcgacggacg

SEQ ID NO: 212382 - DNA, 60 bp, Artificial
  Synthetic oligonucleotide
ctgactcgctaccttgctgactcgctaccttgctgactcgctaccttgctgactcgctac

SEQ ID NO: 212383 - DNA, 60 bp, Artificial
  Synthetic oligonucleotide
caccccgggaactgtggatctcgtcggctgactccggattcactgatggtgcaagaggtg

SEQ ID NO: 212384 - DNA, 58 bp, Artificial
  Synthetic oligonucleotide
ctggtgggagtacgaacaggccactgcgggaaggtcagcaatccgatggagtccgggc

SEQ ID NO: 212385 - DNA, 59 bp, Artificial
  Synthetic oligonucleotide
caagaccgtctaccgctacctcgcagacgaaacccgcgcaccgcaggcatgaccaccga

SEQ ID NO: 212386 - DNA, 60 bp, Artificial
  Synthetic oligonucleotide
caacggtctcaatgggaggggccaacgctcaggagctagctggcaccaagacgtcggatg

SEQ ID NO: 212387 - DNA, 60 bp, Artificial
  Synthetic oligonucleotide
gaaatgtactggtgtgacggtgaactggcacaccgcagggcggcagacgcgtcgccgcag

SEQ ID NO: 212388 - DNA, 54 bp, Artificial
  Synthetic oligonucleotide
caaccttgcggttcctgggaacagctaaaccgaacggtgtcgcttcggcagtcg

SEQ ID NO: 212389 - DNA, 52 bp, Artificial
  Synthetic oligonucleotide
caaccgagggagacctggcggtcccgcgtttccggacgcgcgggaccgccta

SEQ ID NO: 212390 - DNA, 55 bp, Artificial
  Synthetic oligonucleotide
gaaccatgccagggtcgcccacaaccacgaaatcgattcggtccgtaaacggctc

SEQ ID NO: 212391 - DNA, 60 bp, Artificial
  Synthetic oligonucleotide
tatagcccatatgggctataggggagcgggctgtcagctgcggagccagtcggcgcaccg

SEQ ID NO: 212392 - DNA, 54 bp, Artificial
  Synthetic oligonucleotide
agcggggcacccctgccccaatcagcggggcgaaactacgaactcactacgtac

SEQ ID NO: 212393 - DNA, 60 bp, Artificial
  Synthetic oligonucleotide
acacttgtatgagtgcgatctgttttactgcgtctccaggacgtcacaaaacggtcataa

SEQ ID NO: 212394 - DNA, 60 bp, Artificial
  Synthetic oligonucleotide
taggaggaaccctcgcacgcatttgacgactattcgactaggcacgcggcgtgttgcatg

SEQ ID NO: 212395 - DNA, 57 bp, Artificial
  Synthetic oligonucleotide
tgctcagcgttgtcccccactgtcccgacttccctttcgttcacgcgtgctccccca

SEQ ID NO: 212396 - DNA, 57 bp, Artificial
  Synthetic oligonucleotide
tagcgaccagtgggaggatgcgggtcggttttccgagtacgcgttgtctcgatttgc

SEQ ID NO: 212397 - DNA, 60 bp, Artificial
  Synthetic oligonucleotide
tgctcccactgaaggagaccgatcgatggtagcaactgcgcacgataacgggcctgcgga

SEQ ID NO: 212398 - DNA, 57 bp, Artificial
  Synthetic oligonucleotide
tagaacgcctggtcggacggttcgggctgtagcgtttggcaaggtcaagccagcgcc

SEQ ID NO: 212399 - DNA, 58 bp, Artificial
  Synthetic oligonucleotide
tacttttcgccaatttcgcagtcgcccaacccttttgcggcatgtaacaagttgcagc

SEQ ID NO: 212400 - DNA, 57 bp, Artificial
  Synthetic oligonucleotide
tacgtgagtaagtcgcccctgttgtctggcctaccccgccacagacgacaggggcgc

SEQ ID NO: 212401 - DNA, 59 bp, Artificial
  Synthetic oligonucleotide
tgctgttaccggcggccctcccaacagtctgaggttcagcaagaggtgtgtctgaaact

SEQ ID NO: 212402 - DNA, 60 bp, Artificial
  Synthetic oligonucleotide
tggacgccccgagtagcttggaagtctggagccggggatgccttgagcgctggtggcttg

SEQ ID NO: 212403 - DNA, 55 bp, Artificial
  Synthetic oligonucleotide
gctcggggactggccaaagtcggctggccgcagggcaaacccggtgttcggttca

SEQ ID NO: 212404 - DNA, 58 bp, Artificial
  Synthetic oligonucleotide
aacgccatgaccatgaccccacttccggccggtcttgaacgcccacagaggtgtatga

SEQ ID NO: 212405 - DNA, 60 bp, Artificial
  Synthetic oligonucleotide
tggacgcctgatctcgcggcgagggagacagtgcggagcggtctccctcgcttgtgggtt

SEQ ID NO: 212406 - DNA, 46 bp, Artificial
  Synthetic oligonucleotide
tacgacaaccgaaaaaaagaacccccgggggcctaatcccgagggt

SEQ ID NO: 212407 - DNA, 59 bp, Artificial
  Synthetic oligonucleotide
tacctcggtctgtcgcgctcaggtggggtaattcgtgaatccgtcgctcaagccgagta

SEQ ID NO: 212408 - DNA, 55 bp, Artificial
  Synthetic oligonucleotide
taccgctcgagcaccccgagagcgacggaggctcccgggaccccgcccgtgcgga

SEQ ID NO: 212409 - DNA, 59 bp, Artificial
  Synthetic oligonucleotide
acatgccagtaccgcgtagctcccgtatcttctcgcgccgttgctgtgcccgggacagg

SEQ ID NO: 212410 - DNA, 55 bp, Artificial
  Synthetic oligonucleotide
taacttcacgtcgtttttcggtcatggtctttccgcccttgtggcctcgattagc

SEQ ID NO: 212411 - DNA, 59 bp, Artificial
  Synthetic oligonucleotide
accacctgaccaccaggagattggagctccgaagtgaccacacccattatcccagcctg

SEQ ID NO: 212412 - DNA, 58 bp, Artificial
  Synthetic oligonucleotide
taactagtaaatcgccaggttaggagccttgatgagcccaggaaagcgtcgtcaccca

SEQ ID NO: 212413 - DNA, 46 bp, Artificial
  Synthetic oligonucleotide
taacggccggtacgacaaccgaaaaaaagaacccccgggggcctaa

SEQ ID NO: 212414 - DNA, 60 bp, Artificial
  Synthetic oligonucleotide
gctgaaagtctcgcagcgctgcaatcagcggcactacggggtgaatccgtggacgtcgcc

SEQ ID NO: 212415 - DNA, 60 bp, Artificial
  Synthetic oligonucleotide
tggtggaatacgcgaacatattgggcacaaggcccacctcgtgcatcgagaacgcgcgaa

SEQ ID NO: 212416 - DNA, 55 bp, Artificial
  Synthetic oligonucleotide
gtttttccactcgggacacggagctgcttgtacttagtggaacttccccgcatct

SEQ ID NO: 212417 - DNA, 53 bp, Artificial
  Synthetic oligonucleotide
gttttgtttcggcgcgtttggttttcggcaggcatttaggcctccagttccgc

SEQ ID NO: 212418 - DNA, 60 bp, Artificial
  Synthetic oligonucleotide
tgtctcagatcagaatggcagcggggcggtttcactgggcgcccatgggtgaacgacaag

SEQ ID NO: 212419 - DNA, 57 bp, Artificial
  Synthetic oligonucleotide
tgtgcgaccacgatagcaggggtgggcgtcttttcacctattcgccaccccacgtgg

SEQ ID NO: 212420 - DNA, 59 bp, Artificial
  Synthetic oligonucleotide
acccagtgcccgtgcaaggtcgcgtagctcatacggagtcggatggcaccaccgcgtat

SEQ ID NO: 212421 - DNA, 58 bp, Artificial
  Synthetic oligonucleotide
accccaggatatgccgtgtgttatatttgttctcagcacagtcgtgcccaaacaaagg

SEQ ID NO: 212422 - DNA, 56 bp, Artificial
  Synthetic oligonucleotide
aacccaaatcgccaggccgcacaatgcatttggcggcaggatcgggaaaccgtacc

SEQ ID NO: 212423 - DNA, 60 bp, Artificial
  Synthetic oligonucleotide
gttgcagcggccagccgattcgggcaagcatcgggttgctcgcttttaactcgtgagcac

SEQ ID NO: 212424 - DNA, 60 bp, Artificial
  Synthetic oligonucleotide
gttatccgccgaccatgtctcgtgtgcagcccatacgtcaagggtcgatatgatgacgtg

SEQ ID NO: 212425 - DNA, 60 bp, Artificial
  Synthetic oligonucleotide
gctgcaatcgggagtcatcgagtgacgtcgaaggcgcagccacctcgctggaccgacgat

SEQ ID NO: 212426 - DNA, 57 bp, Artificial
  Synthetic oligonucleotide
tgaacctcggaaatgtcgccagggagttagggcggttcgagcaggcacgagagttct

SEQ ID NO: 212427 - DNA, 60 bp, Artificial
  Synthetic oligonucleotide
aaggaaggcacctaccgacccaaccgtgaccctgggactgcaatgtggatgctgcagaga

SEQ ID NO: 212428 - DNA, 60 bp, Artificial
  Synthetic oligonucleotide
tctgggcatagctcgctccggtgtctggtcaccaggataggcgaggaacgagccgatgga

SEQ ID NO: 212429 - DNA, 60 bp, Artificial
  Synthetic oligonucleotide
tctctggcggacctcccggcgccaggcgagttctgccgtgaggccatgttcggcacccgc

SEQ ID NO: 212430 - DNA, 60 bp, Artificial
  Synthetic oligonucleotide
tctcctccatgcgtagcagcatcgcattgtgtgcggacatgctcatacagttgggatgtg

SEQ ID NO: 212431 - DNA, 58 bp, Artificial
  Synthetic oligonucleotide
tcggtggttcaaccgaactatttcgagcgtgaagtatcttcactagtgttcaacagtg

SEQ ID NO: 212432 - DNA, 60 bp, Artificial
  Synthetic oligonucleotide
tcgggagtcacggagctgcgcagcagtagaggatagaagcgggctcgcgttgttcatgca

SEQ ID NO: 212433 - DNA, 60 bp, Artificial
  Synthetic oligonucleotide
aagtcataagctgtatcggactcgatcgaaggaactcgcatgaatgttcagctcggaacg

SEQ ID NO: 212434 - DNA, 60 bp, Artificial
  Synthetic oligonucleotide
tgactacagcgacgtggacggcctcgctctagacatccgcaatgcccgccgaggcaaagc

SEQ ID NO: 212435 - DNA, 60 bp, Artificial
  Synthetic oligonucleotide
tgagaacatcgggtttttgacaaagtgaggtgtgactgacgcagtggtgtcactgcgcga

SEQ ID NO: 212436 - DNA, 55 bp, Artificial
  Synthetic oligonucleotide
gccaacggccccggtggtcactgtccgaggcggctaggcgtacaggggtcagtcg

SEQ ID NO: 212437 - DNA, 60 bp, Artificial
  Synthetic oligonucleotide
gagttcgtgtatcacgccacctgagcgacacacccccaacgctttcgcgctgccagagtt

SEQ ID NO: 212438 - DNA, 60 bp, Artificial
  Synthetic oligonucleotide
tcgcccaacccttttgcggcatgtaacaagttgcagcggccagccgattcgggcaagcat

SEQ ID NO: 212439 - DNA, 58 bp, Artificial
  Synthetic oligonucleotide
tcgccaggcgcccctcggtgtgttcaaagttaatcgtgaagccaagtcagatgtttcg

SEQ ID NO: 212440 - DNA, 55 bp, Artificial
  Synthetic oligonucleotide
tgagaccgccccgcacctaaagtgtggggaggcgactgtcggtgaaacaggaacc

SEQ ID NO: 212441 - DNA, 60 bp, Artificial
  Synthetic oligonucleotide
aatcagttcacccttgcccaggcgatcaacgcgagtgactggcagttccgtgacgacgcg

SEQ ID NO: 212442 - DNA, 59 bp, Artificial
  Synthetic oligonucleotide
tcgaaggcgattacgccgaacatcgcccatcggttgcgtcgcggtcatcggggattcca

SEQ ID NO: 212443 - DNA, 60 bp, Artificial
  Synthetic oligonucleotide
tgagtttcgcgtgacgatggacggtgagaagcgcaccgactgggacaaagcctttggtgc

SEQ ID NO: 212444 - DNA, 60 bp, Artificial
  Synthetic oligonucleotide
tcctggcactgctctcgacgcggttcacgcgtcgagctgggataacgtcgcggtgatccc

SEQ ID NO: 212445 - DNA, 60 bp, Artificial
  Synthetic oligonucleotide
tcctcacttacgtgaggtaagtgtctatcttgctctccgcacaagcagccgagccgcgac

SEQ ID NO: 212446 - DNA, 60 bp, Artificial
  Synthetic oligonucleotide
tccggcctgatctaactttgcgcgggcacagttcatccgcagtcataactatgacaggtc

SEQ ID NO: 212447 - DNA, 60 bp, Artificial
  Synthetic oligonucleotide
tgcgatcggtggagtgatctatacggggttggtgctctacacccgctcgttgtggcccgc

SEQ ID NO: 212448 - DNA, 58 bp, Artificial
  Synthetic oligonucleotide
gataaccgaatacccacaactcaatacacaaccgaatacggagacaccatgagttcaa

SEQ ID NO: 212449 - DNA, 58 bp, Artificial
  Synthetic oligonucleotide
tccgcgacgatgtccgtcttcgtagagggacggcgattgataaccgctgcgtcggaac

SEQ ID NO: 212450 - DNA, 60 bp, Artificial
  Synthetic oligonucleotide
aatgcatgaacacctcgagggacgcgatttcgaaactctgactgcaccgtggatcagtct

SEQ ID NO: 212451 - DNA, 60 bp, Artificial
  Synthetic oligonucleotide
tccgaaccatgtgctcaattcgccgcggactcctggtgccaggtcggtagcgccgagttg

SEQ ID NO: 212452 - DNA, 60 bp, Artificial
  Synthetic oligonucleotide
aatgggccgcgtgcctctcgctcagtctgcgtcagtgagtcttgccaagcgatgacatcg

SEQ ID NO: 212453 - DNA, 57 bp, Artificial
  Synthetic oligonucleotide
tcccatcgttgccacgcgcgtttcggtgtccgtgatgttctcgaaactcgggtagtc

SEQ ID NO: 212454 - DNA, 60 bp, Artificial
  Synthetic oligonucleotide
tccatcattcctgggaacattcgaccggaccgcagatacacaactgatccgagtggtgat

SEQ ID NO: 212455 - DNA, 57 bp, Artificial
  Synthetic oligonucleotide
acaaccgaacacacaggaggacataccttgatcggctacccgacagacgcaatcccg

SEQ ID NO: 212456 - DNA, 57 bp, Artificial
  Synthetic oligonucleotide
tccacgcaaccgtccaaccggaaaaccgttcacacctcatgcaccgactgtgcgacg

SEQ ID NO: 212457 - DNA, 60 bp, Artificial
  Synthetic oligonucleotide
tcaaacactgacgcgatagaggcctgacctagaaactccccggatgacacgatgtcgtgt

SEQ ID NO: 212458 - DNA, 59 bp, Artificial
  Synthetic oligonucleotide
tgcgggcatgttcgaggacacgccgaaaagtgcagggggtgacctgagtatcaccggga

SEQ ID NO: 212459 - DNA, 59 bp, Artificial
  Synthetic oligonucleotide
gatgacaccgacaggggtgccccaatcagcggggcacccctgccccaatcagcggggca

SEQ ID NO: 212460 - DNA, 56 bp, Artificial
  Synthetic oligonucleotide
tatcccgttggcaaacatccccgcagaggggatgtgcggcagcacccaaaaacccg

SEQ ID NO: 212461 - DNA, 60 bp, Artificial
  Synthetic oligonucleotide
ttcggtgcctccactcgcacaatccaacgcttgtttgctgagccgcgtgacgattacctc

SEQ ID NO: 212462 - DNA, 51 bp, Artificial
  Synthetic oligonucleotide
acccgtaacggctatcacttacgccagtgaacggttaccggggaagtgtac

SEQ ID NO: 212463 - DNA, 54 bp, Artificial
  Synthetic oligonucleotide
ttcgggaagcccggacgagcacgaccggaccccggatgggcgactgaagtggga

SEQ ID NO: 212464 - DNA, 60 bp, Artificial
  Synthetic oligonucleotide
ttctctccgtgcagtgcgtcgtcacaaagtgtgtgagcggaaggaggattcattccggct

SEQ ID NO: 212465 - DNA, 55 bp, Artificial
  Synthetic oligonucleotide
accgagtacttcgcggcccgcatctgacccctggggcttactcagagccgtaccc

SEQ ID NO: 212466 - DNA, 60 bp, Artificial
  Synthetic oligonucleotide
ttgatgagacaagcggctcgggtgtacatattcaggcaggttgtaggccataatggacgt

SEQ ID NO: 212467 - DNA, 54 bp, Artificial
  Synthetic oligonucleotide
accgcacagttatcgttggggcgccaaaataaagtgggggagccggagtggcca

SEQ ID NO: 212468 - DNA, 60 bp, Artificial
  Synthetic oligonucleotide
gtgctcgcgattgcgtgtcgtctgaccctgcgatattcgtggacaccgttactcctcgca

SEQ ID NO: 212469 - DNA, 60 bp, Artificial
  Synthetic oligonucleotide
ttgtgatccgctcggcgtgagagaagtcctccagcaacggaatcagccactcggcggccg

SEQ ID NO: 212470 - DNA, 60 bp, Artificial
  Synthetic oligonucleotide
atcctatccggacacggactctccagtatcgctggatgattcgtcgataccgacagtcca

SEQ ID NO: 212471 - DNA, 57 bp, Artificial
  Synthetic oligonucleotide
aaacctgcccacggaacgagtcgtaacgactgcactccggatcaaatcaggctggcc

SEQ ID NO: 212472 - DNA, 56 bp, Artificial
  Synthetic oligonucleotide
gtgtgctgtttagcgaaaggccggtagaggctgacggtatggccttcggtccggta

SEQ ID NO: 212473 - DNA, 55 bp, Artificial
  Synthetic oligonucleotide
tttaagagtctcgctagcaaaccatgtcaggtgttgcggtgggttccgggtaaac

SEQ ID NO: 212474 - DNA, 56 bp, Artificial
  Synthetic oligonucleotide
tttacccgcccgaatgaccatgtcggcagcgtttagccaggtcaccacgccctacg

SEQ ID NO: 212475 - DNA, 60 bp, Artificial
  Synthetic oligonucleotide
ttttgcggtgggagttcgagaaccgtgcaggtgaggatctgtgggagttctcgcacgagc

SEQ ID NO: 212476 - DNA, 53 bp, Artificial
  Synthetic oligonucleotide
tttcgaccgggagtccaagctcggggaatccctattgataaagtcgacgttaa

SEQ ID NO: 212477 - DNA, 58 bp, Artificial
  Synthetic oligonucleotide
gtcttctcccgcttattacgaggtgttgcagtccagaggtgttgcagtccaaggggga

SEQ ID NO: 212478 - DNA, 60 bp, Artificial
  Synthetic oligonucleotide
aaaatcaagcgcgccgggagcattcgctgaacgcagacacgcgatctgtgatgaggcgca

SEQ ID NO: 212479 - DNA, 60 bp, Artificial
  Synthetic oligonucleotide
gtgaatagagggctattttcgcgcgacgaaattaggatcgcggctatgacgacaccgcga

SEQ ID NO: 212480 - DNA, 54 bp, Artificial
  Synthetic oligonucleotide
gtgacgtggcaatccggcagattgacgctggggttgaagggggaaccttcgggg

SEQ ID NO: 212481 - DNA, 58 bp, Artificial
  Synthetic oligonucleotide
atccggacgacctcgccggtactgcaacgaggcgtgccgcaaggccttctctcgtaca

SEQ ID NO: 212482 - DNA, 60 bp, Artificial
  Synthetic oligonucleotide
gtgagattgcacgacggttgaacgatgccgggatcctgtccaagcggggcggcaagtggc

SEQ ID NO: 212483 - DNA, 54 bp, Artificial
  Synthetic oligonucleotide
gtgagggttgtgtggggattccgggatacctgataaggcttttggttcgtcgta

SEQ ID NO: 212484 - DNA, 58 bp, Artificial
  Synthetic oligonucleotide
gtgttgcatgaaaaatattcgactaggcatcccgaagccaagtcaggtagtcgaattt

SEQ ID NO: 212485 - DNA, 54 bp, Artificial
  Synthetic oligonucleotide
tgtcccccactgtcccgacttccctttcgttcacgcgtgctcccccacgaagac

SEQ ID NO: 212486 - DNA, 59 bp, Artificial
  Synthetic oligonucleotide
gacgagaaaggaaagccgcatgactgacgtgcaatgtgaacccgcgcttgcggggagaa

SEQ ID NO: 212487 - DNA, 59 bp, Artificial
  Synthetic oligonucleotide
cgacgttccgacgctggcacagtccatgatgaccagcgggaataagcagcctcagcccc

SEQ ID NO: 212488 - DNA, 59 bp, Artificial
  Synthetic oligonucleotide
cggtctcgcccatcccaactcgggtgtatcgaccgaaccatcaatggagcgctcatgtc

SEQ ID NO: 212489 - DNA, 58 bp, Artificial
  Synthetic oligonucleotide
gcagtcaagggcgctctttcccttgacttcctcggaagggctggacaatcgaggccag

SEQ ID NO: 212490 - DNA, 57 bp, Artificial
  Synthetic oligonucleotide
ccattcttcctggtctaagccctgccgccgataggtcaccgagggggatcatccacc

SEQ ID NO: 212491 - DNA, 56 bp, Artificial
  Synthetic oligonucleotide
aatcacatggaacttccaccggagctacgaacacccgggcccgactggcacgacaa

SEQ ID NO: 212492 - DNA, 60 bp, Artificial
  Synthetic oligonucleotide
gcaaaggacgatcagtgatgctcgaaaaccatgacgacaatgcgatccacgtagatcccg

SEQ ID NO: 212493 - DNA, 58 bp, Artificial
  Synthetic oligonucleotide
tgatgtttttcgcgtcatgtgccagagagcagtggcgaagcaagagtgtcaaggagcg

SEQ ID NO: 212494 - DNA, 58 bp, Artificial
  Synthetic oligonucleotide
ctcgtgaagtggtcatcgctagacactgtgcaaccctctcgatacgatgtgcgcatac

SEQ ID NO: 212495 - DNA, 55 bp, Artificial
  Synthetic oligonucleotide
gcccgagaggagcgaacggcctacccgagcgtatacccccaggggtacttgcata

SEQ ID NO: 212496 - DNA, 58 bp, Artificial
  Synthetic oligonucleotide
tgatccgaccgcagaaatcaaccgcgcacgtgcgatcgctcgcatccagggacgtgac

SEQ ID NO: 212497 - DNA, 58 bp, Artificial
  Synthetic oligonucleotide
tcggctgcaactagaaggatctccggtcacgcacctaaagttgcagtgtgaacactca

SEQ ID NO: 212498 - DNA, 58 bp, Artificial
  Synthetic oligonucleotide
catgaccgattacatgcgtctcaccaatcccatgcgtgcctccgctccggagagtcct

SEQ ID NO: 212499 - DNA, 58 bp, Artificial
  Synthetic oligonucleotide
cacgctgcaggatgatcgctacttcgttcgggtctcgcgtggtgtcttccgcatcaag

SEQ ID NO: 212500 - DNA, 57 bp, Artificial
  Synthetic oligonucleotide
gaggcaaagcgttgatgattcgggctggtgacgaccccgcgggcaaggacgtcggac

SEQ ID NO: 212501 - DNA, 55 bp, Artificial
  Synthetic oligonucleotide
tcccccagtggtctgtgtacggcgattccgtcccccagatccagggagtgaacgg

SEQ ID NO: 212502 - DNA, 58 bp, Artificial
  Synthetic oligonucleotide
gtttactgcaattcggcccgtacgcgggtagcggcggagagagccgctcgatcggcca

SEQ ID NO: 212503 - DNA, 57 bp, Artificial
  Synthetic oligonucleotide
gcaacgacactcgccaaacaagaagccgtccgaaacaatgcaagaaagtacgacgaa

SEQ ID NO: 212504 - DNA, 56 bp, Artificial
  Synthetic oligonucleotide
agcacataggttcgtttgcgggcgtagttcggcaccagtactcctacttcggtaga

SEQ ID NO: 212505 - DNA, 58 bp, Artificial
  Synthetic oligonucleotide
cgatgggcgtgtgaagtattcgactggtgcactgctccgagttgcacgcaaagatgga

SEQ ID NO: 212506 - DNA, 58 bp, Artificial
  Synthetic oligonucleotide
agagatccgatctgttgccgtcatccgcgagtagtgaaagttccgagcaagcctcgtt

SEQ ID NO: 212507 - DNA, 58 bp, Artificial
  Synthetic oligonucleotide
gggatagagctcccgctcttcgcctctgcaaagtcgtaggtgtttgcagcgtgctcga

SEQ ID NO: 212508 - DNA, 55 bp, Artificial
  Synthetic oligonucleotide
ggggggtacacttattcttatgacgaagcgaacggaacttctcaaagagatacga

SEQ ID NO: 212509 - DNA, 57 bp, Artificial
  Synthetic oligonucleotide
cgacacccgaatcatctacgccgaaagctgactaccaggcgatacgtgcggatccgg

SEQ ID NO: 212510 - DNA, 57 bp, Artificial
  Synthetic oligonucleotide
gcccgtctgtggactgcgctggaaggaccaccagggatacggcggtaatgtctctac

SEQ ID NO: 212511 - DNA, 57 bp, Artificial
  Synthetic oligonucleotide
tccaaacccacgccagcgcagagtcacccatcacgcaccccttcgcagaggaccgac

SEQ ID NO: 212512 - DNA, 57 bp, Artificial
  Synthetic oligonucleotide
ccccagagcgcgaacctggggggctgactggtgtcaacggatggctgacgactatcc

SEQ ID NO: 212513 - DNA, 57 bp, Artificial
  Synthetic oligonucleotide
gatgagggcgtgtcgggcgggaagggtcctgccgagcgtcccggtttggcggctgca

SEQ ID NO: 212514 - DNA, 60 bp, Artificial
  Synthetic oligonucleotide
atatcttgctccgctcgaggtgaccgaacaggcgagaatttctccgcgcaccaccgacac

SEQ ID NO: 212515 - DNA, 57 bp, Artificial
  Synthetic oligonucleotide
cctgattccgttccgagagctccgtcacatagttcttccgtccggctgctatatcga

SEQ ID NO: 212516 - DNA, 57 bp, Artificial
  Synthetic oligonucleotide
cgcacaatccaacgcttgtttgctgagccgcgtgacgattacctcggccgtgcgaaa

SEQ ID NO: 212517 - DNA, 54 bp, Artificial
  Synthetic oligonucleotide
gacactacgcccgatgttcggaaatcctcctagttccgtccggtgcgggattct

SEQ ID NO: 212518 - DNA, 57 bp, Artificial
  Synthetic oligonucleotide
gaccaccgactaccgagagggcaccatcatgacgagcgcatacgaccgtggacatgc

SEQ ID NO: 212519 - DNA, 57 bp, Artificial
  Synthetic oligonucleotide
atgtggtgcgattcggttacctcgcgagcgcgcacgtagaaagatatcggacgacct

SEQ ID NO: 212520 - DNA, 57 bp, Artificial
  Synthetic oligonucleotide
cgccatgagaacaccccaccgatacagcagcccgggtgagtcaggtggcagtggttg

SEQ ID NO: 212521 - DNA, 57 bp, Artificial
  Synthetic oligonucleotide
gtgagcgaagcgaatgggaggcgagcgcccagagttcggagttactcagtcacggag

SEQ ID NO: 212522 - DNA, 56 bp, Artificial
  Synthetic oligonucleotide
agactctggtaaccgcgggtcaaaaggtgcgtgccggagaattgattgcgacggta

SEQ ID NO: 212523 - DNA, 56 bp, Artificial
  Synthetic oligonucleotide
cacgaccacatatccccgggccggtaccaagtgccggccgagaaacgtgcatctcc

SEQ ID NO: 212524 - DNA, 56 bp, Artificial
  Synthetic oligonucleotide
tgagtacaaactcgattctacgttataccggtcgtaaatatagagcactatttgtt

SEQ ID NO: 212525 - DNA, 60 bp, Artificial
  Synthetic oligonucleotide
gcaatcccctgacctggctacgaagacgaattctcggctgaggtcacgattcccgtgtgc

SEQ ID NO: 212526 - DNA, 56 bp, Artificial
  Synthetic oligonucleotide
cgcgtactccatgtagggccggcgggcgttctggttcacggttcgcttgctcatcc

SEQ ID NO: 212527 - DNA, 56 bp, Artificial
  Synthetic oligonucleotide
gcaagggaaatactcgggacgaagtacggcctctacagcgcgttgacgtatgcctt

SEQ ID NO: 212528 - DNA, 56 bp, Artificial
  Synthetic oligonucleotide
ctgggtttttgtctccgaccgagtggggcgctactgggcgcttacctcgtctgcga

SEQ ID NO: 212529 - DNA, 56 bp, Artificial
  Synthetic oligonucleotide
acgggtgtagatctccgcggctcgcgcatagtgctcggctgcctgtccccgctggt

SEQ ID NO: 212530 - DNA, 55 bp, Artificial
  Synthetic oligonucleotide
cgtgaatacatgaagtttcccccgcggcagctaggtcgtgggggttcttcctctc

SEQ ID NO: 212531 - DNA, 53 bp, Artificial
  Synthetic oligonucleotide
acaaggcttcttcgaccaacccggactacggcgccaaatgatccgaacggttc

SEQ ID NO: 212532 - DNA, 56 bp, Artificial
  Synthetic oligonucleotide
aaactttctgtacgttgagatttcgctgaggcaacatagcaccgggaagtgctgcg

SEQ ID NO: 212533 - DNA, 56 bp, Artificial
  Synthetic oligonucleotide
cgtactcagttcacattgaggctcggccgagtgtttgtcaactatgttcgcgaaca

SEQ ID NO: 212534 - DNA, 56 bp, Artificial
  Synthetic oligonucleotide
tcgacgttaactagtaaatcgccaggttaggagccttgatgagcccaggaaagcgt

SEQ ID NO: 212535 - DNA, 56 bp, Artificial
  Synthetic oligonucleotide
actctggcgcgagtttgagttcggttcgatgggacgccgagcaatcgcatggtctc

SEQ ID NO: 212536 - DNA, 57 bp, Artificial
  Synthetic oligonucleotide
gcacgcaagtactcggtcagctcctaaccgagaagccgtcgtcgtatccgggccagg

SEQ ID NO: 212537 - DNA, 56 bp, Artificial
  Synthetic oligonucleotide
attgttgcccttcccggagtgccatcatgcgctagcgcgttttatagttgcgtgtt

SEQ ID NO: 212538 - DNA, 56 bp, Artificial
  Synthetic oligonucleotide
acgttttacggaccactcaacatgtttcatggactacattgtgtaggcacgtcgtt

SEQ ID NO: 212539 - DNA, 56 bp, Artificial
  Synthetic oligonucleotide
caggacgcaggggaaccccactgagaggatcacgaccatgccgcagacgttcgtta

SEQ ID NO: 212540 - DNA, 56 bp, Artificial
  Synthetic oligonucleotide
ccaaatggatctggcgcaatttcaccgaagaacagtaccgagcccgacaagcgcat

SEQ ID NO: 212541 - DNA, 55 bp, Artificial
  Synthetic oligonucleotide
ctgcggacgaaagggacatgagcacactccatcgctgagattcggtgcaacctga

SEQ ID NO: 212542 - DNA, 55 bp, Artificial
  Synthetic oligonucleotide
cctccttgcatcgagagtaagtcgcttcgggaactaccgagactctaacttacaa

SEQ ID NO: 212543 - DNA, 55 bp, Artificial
  Synthetic oligonucleotide
ttcgtgggctgtgcggccgttcggggagtgacccggcatcgaaacctccatgttc

SEQ ID NO: 212544 - DNA, 55 bp, Artificial
  Synthetic oligonucleotide
ctgccggaccacgatgtcatcccttccccgaccgaactcccttctcagagtacgg

SEQ ID NO: 212545 - DNA, 55 bp, Artificial
  Synthetic oligonucleotide
cgagggtagccaatgtgtccggaggataagctgtgcacgcgagaagcacacacgc

SEQ ID NO: 212546 - DNA, 55 bp, Artificial
  Synthetic oligonucleotide
cctcgacattccgtgggatcatgagggtgtatgacgaaaacacatcgcacagaag

SEQ ID NO: 212547 - DNA, 60 bp, Artificial
  Synthetic oligonucleotide
gccagacatacacgccggctccgatcgttgaggccatggtgaaatgggcgcgtcaacagg

SEQ ID NO: 212548 - DNA, 54 bp, Artificial
  Synthetic oligonucleotide
atagaccccctcaaggaagtcgtttgttgccaaaggccagaacggtagccacat

SEQ ID NO: 212549 - DNA, 55 bp, Artificial
  Synthetic oligonucleotide
cgccgaaggcctgtcatcgaccggcttcgactgaagtatgagcaacgtcacagcc

SEQ ID NO: 212550 - DNA, 55 bp, Artificial
  Synthetic oligonucleotide
cgccggtactgcaacgaggcgtgccgcaaggccttctctcgtacaaaatcccagg

SEQ ID NO: 212551 - DNA, 55 bp, Artificial
  Synthetic oligonucleotide
cgccgtactcagcttgttgccgacactcgatgaagttcgtaccactctctgcgtc

SEQ ID NO: 212552 - DNA, 55 bp, Artificial
  Synthetic oligonucleotide
tgtggctggaactccctatcgtcgtgacagtcatgcgcggtgtcttccgtagaag

SEQ ID NO: 212553 - DNA, 55 bp, Artificial
  Synthetic oligonucleotide
cgagggacgcgatttcgaaactctgactgcaccgtggatcagtcttgtccgaccg

SEQ ID NO: 212554 - DNA, 55 bp, Artificial
  Synthetic oligonucleotide
tgagagaagtcctccagcaacggaatcagccactcggcggccgactgtccctctc

SEQ ID NO: 212555 - DNA, 55 bp, Artificial
  Synthetic oligonucleotide
cggcaaagcgaaccccataactgaacaggagtcataccgatgccccgtccgctgc

SEQ ID NO: 212556 - DNA, 52 bp, Artificial
  Synthetic oligonucleotide
cgggaaatttctgtcgaattcgtcctaattaaggtaattgtccgtagtggtg

SEQ ID NO: 212557 - DNA, 55 bp, Artificial
  Synthetic oligonucleotide
cctgatacgtgagtattaccgcccggaatcgccgtacgtcgacatgtcaccccgc

SEQ ID NO: 212558 - DNA, 55 bp, Artificial
  Synthetic oligonucleotide
cgggacaggtaggcctctcgcggctctgatgtccaccggatgatgctggccgtcg

SEQ ID NO: 212559 - DNA, 55 bp, Artificial
  Synthetic oligonucleotide
gcactggtcgaaggattcgttcctggacaaggcttcttcgaccaacccggactac

SEQ ID NO: 212560 - DNA, 55 bp, Artificial
  Synthetic oligonucleotide
ctcgatcgaaggaactcgcatgaatgttcagctcggaacgtccctccccgtcgca

SEQ ID NO: 212561 - DNA, 55 bp, Artificial
  Synthetic oligonucleotide
ctccagattcgtcgaaccatgcaaccactgcgcgatcgcccgaaaacccttcccc

SEQ ID NO: 212562 - DNA, 55 bp, Artificial
  Synthetic oligonucleotide
cgggatttggttagaatggccataagtcctctggacttgagtaagtgaagttcgg

SEQ ID NO: 212563 - DNA, 55 bp, Artificial
  Synthetic oligonucleotide
tggtccgacactcaaggaatcgcgcgtcgtctggcacagttcggaggtttctcgc

SEQ ID NO: 212564 - DNA, 55 bp, Artificial
  Synthetic oligonucleotide
cttgtccgactgcgctaacagtcgacttgctgttctgacggtcccctggctgcgc

SEQ ID NO: 212565 - DNA, 55 bp, Artificial
  Synthetic oligonucleotide
cttgcgatcagcaggggtgaaaccagctcgagcacacgatcttctgtgccggtcg

SEQ ID NO: 212566 - DNA, 55 bp, Artificial
  Synthetic oligonucleotide
cttctggcgcacactctatttgcgtctcgacaggaagcgggctgactatgaccgc

SEQ ID NO: 212567 - DNA, 55 bp, Artificial
  Synthetic oligonucleotide
tgacccagaacacgatatgtgtcaacaccgagcgaatagtccccgcttacagcag

SEQ ID NO: 212568 - DNA, 55 bp, Artificial
  Synthetic oligonucleotide
cttccgtgggcgagtgttgagctcacgcgttaccgaccgcacatgagcgtgactg

SEQ ID NO: 212569 - DNA, 55 bp, Artificial
  Synthetic oligonucleotide
tttggaggcgaacaaaagttataccgcggtgtccctctcgtctcatttgcacaag

SEQ ID NO: 212570 - DNA, 57 bp, Artificial
  Synthetic oligonucleotide
gcagcttcctggggaacatgctccccacacccaactggggcgtgctccccgaggacc

SEQ ID NO: 212571 - DNA, 53 bp, Artificial
  Synthetic oligonucleotide
tgaccgtaagcccgggaaccacctgggattcccacgacggtatctcgtacgaa

SEQ ID NO: 212572 - DNA, 55 bp, Artificial
  Synthetic oligonucleotide
tggggattccgtggcttcactcgacgtgcggtgtatgtcgctactgcctacgcgg

SEQ ID NO: 212573 - DNA, 55 bp, Artificial
  Synthetic oligonucleotide
cctcacgcgcctacgtgacgatctatctgcaacggcgtcgtagagcgccagctag

SEQ ID NO: 212574 - DNA, 55 bp, Artificial
  Synthetic oligonucleotide
tggctcggtcggtttgtcggtggacaggcgtagattccggtccgtgaggaccgag

SEQ ID NO: 212575 - DNA, 55 bp, Artificial
  Synthetic oligonucleotide
ctggggaaaccccttcaagtccggcactcccaatgcctcatcgtgcgcatgcagg

SEQ ID NO: 212576 - DNA, 55 bp, Artificial
  Synthetic oligonucleotide
cctccgacgggtagtggacgagacattgtgcctgtggcccattgctccgggttac

SEQ ID NO: 212577 - DNA, 55 bp, Artificial
  Synthetic oligonucleotide
cgcactgaccaagctccacacggccgcgtactgaggattcgaaacatgtcggacg

SEQ ID NO: 212578 - DNA, 55 bp, Artificial
  Synthetic oligonucleotide
cggctcgggtgtacatattcaggcaggttgtaggccataatggacgtatgaccac

SEQ ID NO: 212579 - DNA, 55 bp, Artificial
  Synthetic oligonucleotide
ctggcggattcactgtcttcgcgccaagcaccgcgcaactgtccgactgagaagc

SEQ ID NO: 212580 - DNA, 55 bp, Artificial
  Synthetic oligonucleotide
ctgctcactcttgttacgagcttctcagtcggacagttgcgcggtgcttggcgcg

SEQ ID NO: 212581 - DNA, 60 bp, Artificial
  Synthetic oligonucleotide
gcagtaggcgcaagattctgagcatttagggttgctgcgtggattttaagggagacgcta

SEQ ID NO: 212582 - DNA, 55 bp, Artificial
  Synthetic oligonucleotide
tggcaagttcgtctgcaagtcgttggatgccgaatcggaggctattccggtgggg

SEQ ID NO: 212583 - DNA, 55 bp, Artificial
  Synthetic oligonucleotide
tgtgtgtacgacggcgggaggtaagtcgggtacggctcggactgcggtagagcaa

SEQ ID NO: 212584 - DNA, 55 bp, Artificial
  Synthetic oligonucleotide
cgcacagggagcaaagaggtcacacgacgttcgaagtacctcgtccgcaggaacg

SEQ ID NO: 212585 - DNA, 55 bp, Artificial
  Synthetic oligonucleotide
cgtttgttgccaaaggccagaacggtagccacatttgctcccagtccccaccttc

SEQ ID NO: 212586 - DNA, 55 bp, Artificial
  Synthetic oligonucleotide
cgttggacgctcatacggtcgctcctgcggtcttgatgggtagttcgttgagaag

SEQ ID NO: 212587 - DNA, 55 bp, Artificial
  Synthetic oligonucleotide
cggtcggtgtacagccaaagtgaactccgcgtgaacttcccaattttgtgcactc

SEQ ID NO: 212588 - DNA, 55 bp, Artificial
  Synthetic oligonucleotide
cgttggaactctggcgcgagtttgagttcggttcgatgggacgccgagcaatcgc

SEQ ID NO: 212589 - DNA, 54 bp, Artificial
  Synthetic oligonucleotide
cgttcaagagtgaaagcgatctacggaaccgaaccctacttcgcggcgtccaag

SEQ ID NO: 212590 - DNA, 55 bp, Artificial
  Synthetic oligonucleotide
cgtgcagacgccccaaggtcattcgaccactctcgcacagccggggaaatcatgc

SEQ ID NO: 212591 - DNA, 55 bp, Artificial
  Synthetic oligonucleotide
cgaaaagtcgaacttttaggcgggaacctacaggggatctggcgagatcgcagag

SEQ ID NO: 212592 - DNA, 60 bp, Artificial
  Synthetic oligonucleotide
agtgtgatttgccgacgagaaaggaaagccgcatgactgacgtgcaatgtgaacccgcgc

SEQ ID NO: 212593 - DNA, 55 bp, Artificial
  Synthetic oligonucleotide
cgcttcgttcatcggttccggagctcaccagagctacggagaaatggtcatcgac

SEQ ID NO: 212594 - DNA, 55 bp, Artificial
  Synthetic oligonucleotide
tgtcggtgcggcatgattcgccatggtcggtcatagtcgtcatatgaggtaatgg

SEQ ID NO: 212595 - DNA, 51 bp, Artificial
  Synthetic oligonucleotide
cgtaacaaacccgtgaacgcttcaacggtactccgcgcccgacttattccc

SEQ ID NO: 212596 - DNA, 55 bp, Artificial
  Synthetic oligonucleotide
cgtcgtgtctgggtcggttttctgactatgggccaaccccgccgtgagggatgca

SEQ ID NO: 212597 - DNA, 55 bp, Artificial
  Synthetic oligonucleotide
ttgccgcgtgagcgaacttttgggctacgcgagggtctcaaccgcggagcagact

SEQ ID NO: 212598 - DNA, 53 bp, Artificial
  Synthetic oligonucleotide
cgaaacccaataacggcggccgaaatttagaacatgttgcagaaacaggccgt

SEQ ID NO: 212599 - DNA, 55 bp, Artificial
  Synthetic oligonucleotide
cgaacgacttgcgctgacggtacttgatgggcatgtgcagcctccctgatccggc

SEQ ID NO: 212600 - DNA, 55 bp, Artificial
  Synthetic oligonucleotide
cgaacgtgcatggtcacgaccactcctcccgaactgtcacagccccttcacaggg

SEQ ID NO: 212601 - DNA, 55 bp, Artificial
  Synthetic oligonucleotide
cgaactatttcgagcgtgaagtatcttcactagtgttcaacagtgttcactggcg

SEQ ID NO: 212602 - DNA, 55 bp, Artificial
  Synthetic oligonucleotide
ttgtcggttgagtctcggtacccgagtcgcgtgagcgtcagcggactccctcgat

SEQ ID NO: 212603 - DNA, 60 bp, Artificial
  Synthetic oligonucleotide
agtgtcctcgagatgacgacaggtcgagatgaaggatcacgctcgaagtggacgcgcggt

SEQ ID NO: 212604 - DNA, 55 bp, Artificial
  Synthetic oligonucleotide
cggacacctacacgccagcgggaaccgttgtgacataaaacagtcggccgcactc

SEQ ID NO: 212605 - DNA, 55 bp, Artificial
  Synthetic oligonucleotide
tgctactccaccgatcgcacatggcggaactgcgcggagggacgctggcccgata

SEQ ID NO: 212606 - DNA, 55 bp, Artificial
  Synthetic oligonucleotide
cgggcagcagtacgacgcatccatcgtgcgaaacactccactgttcgacaacctg

SEQ ID NO: 212607 - DNA, 55 bp, Artificial
  Synthetic oligonucleotide
tgtgcggaatcgcgatggcgtctgagtccacgactgccggcgggtaaatccagtc

SEQ ID NO: 212608 - DNA, 55 bp, Artificial
  Synthetic oligonucleotide
cgcacaatgcatttggcggcaggatcgggaaaccgtaccgcctcaccatcgggca

SEQ ID NO: 212609 - DNA, 55 bp, Artificial
  Synthetic oligonucleotide
tgatcacgatgaacctcttctcggcgcgtgtgcgccaatcatccgcggttacccc

SEQ ID NO: 212610 - DNA, 55 bp, Artificial
  Synthetic oligonucleotide
cgcgagcctattctatttggtatgggttctatgtagagtggtgtcgtattagtcc

SEQ ID NO: 212611 - DNA, 55 bp, Artificial
  Synthetic oligonucleotide
cgggcagtcttcacggatgaacaactcacatcatttgcttccgagaggaatccaa

SEQ ID NO: 212612 - DNA, 55 bp, Artificial
  Synthetic oligonucleotide
cgggcgctggctccgttacagttcggcggcaaacgtcaatcaggttgttccgaga

SEQ ID NO: 212613 - DNA, 55 bp, Artificial
  Synthetic oligonucleotide
cctgcgccatgacaacttcgtcagttctccgcgcaccgagtgagaccgccgattc

SEQ ID NO: 212614 - DNA, 57 bp, Artificial
  Synthetic oligonucleotide
agtggttcccaggacaggacgcgatggggtgggacaccggtacgtgtagtgcgatgc

SEQ ID NO: 212615 - DNA, 55 bp, Artificial
  Synthetic oligonucleotide
ttcgacccattctgccagctcaggcggggtctcctgcggtgtcatgtcgtatctc

SEQ ID NO: 212616 - DNA, 55 bp, Artificial
  Synthetic oligonucleotide
cctgcggccaatccggaatggttcgaagtgctttcgcccagaaccaacccactca

SEQ ID NO: 212617 - DNA, 55 bp, Artificial
  Synthetic oligonucleotide
ctacctcatgacctacacagttactgtcaccggaacggacatcagctttccgtgc

SEQ ID NO: 212618 - DNA, 55 bp, Artificial
  Synthetic oligonucleotide
ttcagggagcgctacgcgcgcctacgggagtcggtgcagttgatgcgagacctgt

SEQ ID NO: 212619 - DNA, 55 bp, Artificial
  Synthetic oligonucleotide
ctacccgaaaggtggaccaggcggatcacgatcacccacaaccgtagtagcgacg

SEQ ID NO: 212620 - DNA, 55 bp, Artificial
  Synthetic oligonucleotide
cctgtgctcaccatccaccgacgcaaagcccaacccgagcacacctcttgcacca

SEQ ID NO: 212621 - DNA, 55 bp, Artificial
  Synthetic oligonucleotide
ccttgtgacccctccacaactccatagagacgagaacagattcatgagcgctatc

SEQ ID NO: 212622 - DNA, 55 bp, Artificial
  Synthetic oligonucleotide
ctacatgcaggcaagcggtagtgggtagccgccgttcccgggcacaaactctgcg

SEQ ID NO: 212623 - DNA, 55 bp, Artificial
  Synthetic oligonucleotide
cggtcgccaacactcgattcattgctcacgactgcgcctcagaggacgtagtggg

SEQ ID NO: 212624 - DNA, 55 bp, Artificial
  Synthetic oligonucleotide
cggacgacctgactggcactctcgatgtctgcccatacgggtggatgtagctggt

SEQ ID NO: 212625 - DNA, 54 bp, Artificial
  Synthetic oligonucleotide
agtgggttatggaacagtcttgccccgtgagcgaacttttgggctacgcgaggg

SEQ ID NO: 212626 - DNA, 55 bp, Artificial
  Synthetic oligonucleotide
ggctcaatcgcgcggctacggcctgcggtactggcagatcaaggaccccgaactc

SEQ ID NO: 212627 - DNA, 55 bp, Artificial
  Synthetic oligonucleotide
ggctctccgtccagatattcggatggcctccggtctgtgaactattattgcgcac

SEQ ID NO: 212628 - DNA, 55 bp, Artificial
  Synthetic oligonucleotide
gggaacattcgaccggaccgcagatacacaactgatccgagtggtgatcggagca

SEQ ID NO: 212629 - DNA, 55 bp, Artificial
  Synthetic oligonucleotide
gggactcgggcaggattcgtgcaagacaagcgttatacccagatacaacccttcg

SEQ ID NO: 212630 - DNA, 55 bp, Artificial
  Synthetic oligonucleotide
gggacttgacaagccccgtggctgttcgtataacgaacatatgagcaattctcga

SEQ ID NO: 212631 - DNA, 55 bp, Artificial
  Synthetic oligonucleotide
gggcaactgagttgtcggaccgcacacatggattcgcgtagttccgagtaggcag

SEQ ID NO: 212632 - DNA, 55 bp, Artificial
  Synthetic oligonucleotide
gggccgagcctttcaggacctatgcgggtacggaggcgacatgacggagccgagt

SEQ ID NO: 212633 - DNA, 55 bp, Artificial
  Synthetic oligonucleotide
gtgttcagaccgcattggatcgaacagtcgcgatcaaggtcttgaatgaaggctt

SEQ ID NO: 212634 - DNA, 55 bp, Artificial
  Synthetic oligonucleotide
gggcgcacttttggtttgccctagttgtccgaccccagttgtgagcgaacggcac

SEQ ID NO: 212635 - DNA, 55 bp, Artificial
  Synthetic oligonucleotide
gggctgtcttcatcccgcggcgagtggggaacgacttgcccgcagcttacttaca

SEQ ID NO: 212636 - DNA, 60 bp, Artificial
  Synthetic oligonucleotide
gcatacccccctgggtatatgcaacagtgggtagacgctcgtcagaaaggactgtctatg

SEQ ID NO: 212637 - DNA, 55 bp, Artificial
  Synthetic oligonucleotide
ggggagtctaattcggtagcggacctgaccagttcgctcgattctggaggattcc

SEQ ID NO: 212638 - DNA, 55 bp, Artificial
  Synthetic oligonucleotide
ggggatcggctgaggctttcgtgcgagtccgcaggactcactggctgaatcgggg

SEQ ID NO: 212639 - DNA, 55 bp, Artificial
  Synthetic oligonucleotide
gtgtctatcttgctctccgcacaagcagccgagccgcgaccaatccgatgcgacc

SEQ ID NO: 212640 - DNA, 55 bp, Artificial
  Synthetic oligonucleotide
ggggtctcaagttccatcacggcgtaggaggcccctatggacgagtatgaaggaa

SEQ ID NO: 212641 - DNA, 54 bp, Artificial
  Synthetic oligonucleotide
gtgtcggaccctgccgagtttgaacgcggttggctggcaggttgggcggagttt

SEQ ID NO: 212642 - DNA, 55 bp, Artificial
  Synthetic oligonucleotide
gtgggtgcagtcggggcactgcagatggacgttggttccctgattgctcagcagg

SEQ ID NO: 212643 - DNA, 55 bp, Artificial
  Synthetic oligonucleotide
gttttcatagcgacgttagatacgactgcgcttatagcgataacagcaacgatcg

SEQ ID NO: 212644 - DNA, 55 bp, Artificial
  Synthetic oligonucleotide
ggactcgggtgcggtaacagtgtccgattccggagaccacgagatctgtgggtcg

SEQ ID NO: 212645 - DNA, 55 bp, Artificial
  Synthetic oligonucleotide
ggagctgcgcagcagtagaggatagaagcgggctcgcgttgttcatgcaccagcg

SEQ ID NO: 212646 - DNA, 55 bp, Artificial
  Synthetic oligonucleotide
gtttcgcgtagctcaacaagcaccgccactgcgtgcgagactacgaaaccagacc

SEQ ID NO: 212647 - DNA, 57 bp, Artificial
  Synthetic oligonucleotide
gcatcgccctactcgagcaggttacccctgcggggtaatttcgatgcaggttccgac

SEQ ID NO: 212648 - DNA, 55 bp, Artificial
  Synthetic oligonucleotide
ggatgcatacacctacgacccggtatccgtccgcggtaccacgcgcaaaagacgc

SEQ ID NO: 212649 - DNA, 55 bp, Artificial
  Synthetic oligonucleotide
ggatggtcggatagtgcttcgttgacaggtacaactctgcccactccagcgcccg

SEQ ID NO: 212650 - DNA, 55 bp, Artificial
  Synthetic oligonucleotide
ggcaggtatccgtgacaaagaaccaggcaggggtcatgacatccgcgactgctgg

SEQ ID NO: 212651 - DNA, 55 bp, Artificial
  Synthetic oligonucleotide
ggccaaacggtctagcgattggttacagagattgaccactgctgtgcgcggcgag

SEQ ID NO: 212652 - DNA, 55 bp, Artificial
  Synthetic oligonucleotide
gttgtcagacgtaactgctatgacagggcagtcgggaacctgtgtggagcaaagg

SEQ ID NO: 212653 - DNA, 55 bp, Artificial
  Synthetic oligonucleotide
ggccattgccaggtagctcctacctacagttaccgctacgattttgcgcctcgcc

SEQ ID NO: 212654 - DNA, 55 bp, Artificial
  Synthetic oligonucleotide
ggccccttgtggatcaccgtgtcatatcccgagttcggcctggctccgacaacga

SEQ ID NO: 212655 - DNA, 55 bp, Artificial
  Synthetic oligonucleotide
gttgcgttccctccgataaccgcgaaacaacgatgacaaagcaagaccaactaac

SEQ ID NO: 212656 - DNA, 55 bp, Artificial
  Synthetic oligonucleotide
ggcgacaaagtacatcgagttccgcacacagaggaacgcatcccgcacaacagtc

SEQ ID NO: 212657 - DNA, 55 bp, Artificial
  Synthetic oligonucleotide
ggcgcgacttgtcgtaggcagattccggcatccgttggataagggaattcccgtc

SEQ ID NO: 212658 - DNA, 56 bp, Artificial
  Synthetic oligonucleotide
agtaccgccgtactcacccacctgtgctcaccatccaccgacgcaaagcccaaccc

SEQ ID NO: 212659 - DNA, 56 bp, Artificial
  Synthetic oligonucleotide
ggggttacgcccccatgtgtaggcgaaaacggcatcgtcccaatctgtgcgctggg

SEQ ID NO: 212660 - DNA, 55 bp, Artificial
  Synthetic oligonucleotide
gttattgtccaggcgagtccttcgaccggaaactctgctgccatagggcgtagac

SEQ ID NO: 212661 - DNA, 55 bp, Artificial
  Synthetic oligonucleotide
ggcggaccacactcacgcgtgtaccgcttctacttttcgccaatttcgcagtcgc

SEQ ID NO: 212662 - DNA, 55 bp, Artificial
  Synthetic oligonucleotide
ggcggactcggaatgtaggccagtacgtccacagtggaagtcacgacgccacggt

SEQ ID NO: 212663 - DNA, 55 bp, Artificial
  Synthetic oligonucleotide
ggttcgaggtcagacgaattcacggatccgagggaggactcgtgctagctcttcg

SEQ ID NO: 212664 - DNA, 55 bp, Artificial
  Synthetic oligonucleotide
ggttctgacgagggaattggtccggcctcatctggggacggtcactgttgctccc

SEQ ID NO: 212665 - DNA, 55 bp, Artificial
  Synthetic oligonucleotide
gtacctcaccaggaatggcgaagtgacatctgtagtttgcgagttgctcgccacg

SEQ ID NO: 212666 - DNA, 55 bp, Artificial
  Synthetic oligonucleotide
gtgcgggtatttgaaccgccagcggtccaaccaggcgtcaacagcagcggtcatg

SEQ ID NO: 212667 - DNA, 55 bp, Artificial
  Synthetic oligonucleotide
gtgccggtcaccccgcactcgacggtccccgcatcacaatcgcatcgaacctgtt

SEQ ID NO: 212668 - DNA, 55 bp, Artificial
  Synthetic oligonucleotide
gtcagtgatctggagataccatcgccaggtcccgcgagagcggggtaatgcggtg

SEQ ID NO: 212669 - DNA, 55 bp, Artificial
  Synthetic oligonucleotide
gtccaattcagtcatcgcgacttcaggataggcgacatcaccgtgcgacggttac

SEQ ID NO: 212670 - DNA, 52 bp, Artificial
  Synthetic oligonucleotide
gggtccaccggggcgctgtcaccgggtcgaacgcgacttgggtgaaaactcg

SEQ ID NO: 212671 - DNA, 55 bp, Artificial
  Synthetic oligonucleotide
gtccctgctcccgtaatctccgctgctctgttcgcgagatttgcttcacgacagg

SEQ ID NO: 212672 - DNA, 55 bp, Artificial
  Synthetic oligonucleotide
gtcgagggagcaaacacgtcacgagtagtgatcctgcgaaccagtgtcgtgttgg

SEQ ID NO: 212673 - DNA, 55 bp, Artificial
  Synthetic oligonucleotide
gtcgattccttcggccaccgccacaggtgtattacggggattctccggattaatc

SEQ ID NO: 212674 - DNA, 55 bp, Artificial
  Synthetic oligonucleotide
gtgaagcaccacacgctgtcgcgaacatccctaccatcaaatgaagtgagatttc

SEQ ID NO: 212675 - DNA, 55 bp, Artificial
  Synthetic oligonucleotide
gtctcgttcgcccggcactacccgttgactgaacaacgacacgcgtttgcccagg

SEQ ID NO: 212676 - DNA, 55 bp, Artificial
  Synthetic oligonucleotide
gtcgtccgcgcggccgcagagcgctgagcaagataggcacttacctcacgtaagt

SEQ ID NO: 212677 - DNA, 55 bp, Artificial
  Synthetic oligonucleotide
gtcgttcgttctctgctaccgtatcgggtagatacgaggacaaggtccctcgtga

SEQ ID NO: 212678 - DNA, 55 bp, Artificial
  Synthetic oligonucleotide
gtctagcggggttttcgcatgtctacaggcccaaaccgtccacgaccctgccgag

SEQ ID NO: 212679 - DNA, 55 bp, Artificial
  Synthetic oligonucleotide
gtctcgtgtgcagcccatacgtcaagggtcgatatgatgacgtggggtgcagagc

SEQ ID NO: 212680 - DNA, 55 bp, Artificial
  Synthetic oligonucleotide
gggtccacactgctcggggcgataattgattcggcgtcctcgcaggtcgttgcgt

SEQ ID NO: 212681 - DNA, 54 bp, Artificial
  Synthetic oligonucleotide
actagaactagaagggcggtagggcatcaggcccagtcgccgacacccgggagg

SEQ ID NO: 212682 - DNA, 55 bp, Artificial
  Synthetic oligonucleotide
gtgggccaggggagtccgtcaagttcgaagagacgtactgctatgaccatccagt

SEQ ID NO: 212683 - DNA, 55 bp, Artificial
  Synthetic oligonucleotide
gggtcctgagtgggtagtggctgcttgcgaccacaatctcgggattgttgccata

SEQ ID NO: 212684 - DNA, 55 bp, Artificial
  Synthetic oligonucleotide
gggtcgtggaggaacgtcgatcgccgtagtttcgacggatggctcaatcgaaggc

SEQ ID NO: 212685 - DNA, 55 bp, Artificial
  Synthetic oligonucleotide
gtggattcgtccgtcagtttgaccctcggggcagccatcctcactcggcgcttca

SEQ ID NO: 212686 - DNA, 55 bp, Artificial
  Synthetic oligonucleotide
gggtgagaccgtcgacaaagacggtggtgcatgacactacaatttcgaccgatcg

SEQ ID NO: 212687 - DNA, 55 bp, Artificial
  Synthetic oligonucleotide
gtggaccccgatcgatgcagtcggcacccgtagtcggtgaccccgccaggggcca

SEQ ID NO: 212688 - DNA, 55 bp, Artificial
  Synthetic oligonucleotide
gggttccgagcaggtgagaacaaccgaccggctgttatcgttacgcccgtcacgc

SEQ ID NO: 212689 - DNA, 55 bp, Artificial
  Synthetic oligonucleotide
ggtaacgcgagtgtcacacaatctgacgaacaagcgtctcctccattcacctccg

SEQ ID NO: 212690 - DNA, 55 bp, Artificial
  Synthetic oligonucleotide
ggtacgcctcgagtttccgcgctgtgtgttcgatcgcacaatattgcagacctct

SEQ ID NO: 212691 - DNA, 55 bp, Artificial
  Synthetic oligonucleotide
gtgctcccacacttctagcctcgaacgccctaccggaatccgaacccacctggac

SEQ ID NO: 212692 - DNA, 56 bp, Artificial
  Synthetic oligonucleotide
actacggcgccaaatgatccgaacggttcgcgtaggtgagtactcgacctacgcga

SEQ ID NO: 212693 - DNA, 55 bp, Artificial
  Synthetic oligonucleotide
ggtccataacgctcaaccttacattgagactttatcccgaatttctcggacccgc

SEQ ID NO: 212694 - DNA, 55 bp, Artificial
  Synthetic oligonucleotide
ggtcgatacacgcgctgagtccataccgctcgccaggagcacgtttcggagacga

SEQ ID NO: 212695 - DNA, 55 bp, Artificial
  Synthetic oligonucleotide
ggtgaagcttcagcccgagaccatccggaatgatgggaccttcgacgtgcgggga

SEQ ID NO: 212696 - DNA, 55 bp, Artificial
  Synthetic oligonucleotide
gtgcgtggcttcgcaattcgctgtcggccctcgggagccagccaacgctcgactg

SEQ ID NO: 212697 - DNA, 55 bp, Artificial
  Synthetic oligonucleotide
ggtgggcgtcttttcacctattcgccaccccacgtggtcacggttcacggcatcc

SEQ ID NO: 212698 - DNA, 55 bp, Artificial
  Synthetic oligonucleotide
ggtgtagtcggggacatgcactcaccgacccaaccaggagccctcattcttcgat

SEQ ID NO: 212699 - DNA, 55 bp, Artificial
  Synthetic oligonucleotide
gagcagatcgagtcggagactcgctggagcacagtaagcgacgaaccgcagacca

SEQ ID NO: 212700 - DNA, 55 bp, Artificial
  Synthetic oligonucleotide
gagcgacactcttgattgcgaacatctaactatcgacttttctgtggcctacgtc

SEQ ID NO: 212701 - DNA, 55 bp, Artificial
  Synthetic oligonucleotide
gagcgactggacgagctgggtctgtcccaggtcaccgacccagcaacacgtcccc

SEQ ID NO: 212702 - DNA, 54 bp, Artificial
  Synthetic oligonucleotide
tcgagggcgaacataacgttcgcgagacccggcaaaaggtgggaccagttgtgg

SEQ ID NO: 212703 - DNA, 60 bp, Artificial
  Synthetic oligonucleotide
gggtgcctcagtcagtgaggcaggggtgcctcagtcagtgaggcaggggtgcctcagtga

SEQ ID NO: 212704 - DNA, 55 bp, Artificial
  Synthetic oligonucleotide
gagtctgcggcgtgtcgcacaccaatatttggttccttctgcggaatcgtgtccg

SEQ ID NO: 212705 - DNA, 55 bp, Artificial
  Synthetic oligonucleotide
gagtgggagtcgatgccgagacagaacatgcctatcgaattccggtggacgccgc

SEQ ID NO: 212706 - DNA, 55 bp, Artificial
  Synthetic oligonucleotide
tcctggacaaggcttcttcgaccaacccggactacggcgccaaatgatccgaacg

SEQ ID NO: 212707 - DNA, 55 bp, Artificial
  Synthetic oligonucleotide
gatcgatggtagcaactgcgcacgataacgggcctgcggaccgccgaagctgtgt

SEQ ID NO: 212708 - DNA, 55 bp, Artificial
  Synthetic oligonucleotide
tccgcgcagagcgagtccagtggggccttcgtcagcagtggactacacgtgcaat

SEQ ID NO: 212709 - DNA, 55 bp, Artificial
  Synthetic oligonucleotide
tccgcaatagatcgtccgatgccccgcgacgtcgtagcgtccccaggactcgggg

SEQ ID NO: 212710 - DNA, 55 bp, Artificial
  Synthetic oligonucleotide
gatgagtcctcgagttcgaccgtgcacagcgatgacgtgacgatcgagggctgcc

SEQ ID NO: 212711 - DNA, 55 bp, Artificial
  Synthetic oligonucleotide
gcaagaggtgtagcggagattggaccgttaccggggagcatgaggtgtgaccctc

SEQ ID NO: 212712 - DNA, 55 bp, Artificial
  Synthetic oligonucleotide
tcccgtgcacattaacttctgtgcaaactcccacgatcacattcaaactacggac

SEQ ID NO: 212713 - DNA, 55 bp, Artificial
  Synthetic oligonucleotide
gcaccaccggcatccgagaaccgataggaccggacgcctcgttcgccaaacgttc

SEQ ID NO: 212714 - DNA, 57 bp, Artificial
  Synthetic oligonucleotide
ggtaacgcccaaggttcccgcgggctatgtggagctgggcgagctgtgtcgggtcca

SEQ ID NO: 212715 - DNA, 55 bp, Artificial
  Synthetic oligonucleotide
gcactcgcggtgtccgttgaggatggcacgtctccggcgagttgcggacgagacg

SEQ ID NO: 212716 - DNA, 55 bp, Artificial
  Synthetic oligonucleotide
gcagcaacagaacaccgtgccgtacgcacggatcgaccactgtgctggatgtttg

SEQ ID NO: 212717 - DNA, 55 bp, Artificial
  Synthetic oligonucleotide
cttgttacgagcgtctcagttggacagttgcgcggtgcttggcgcgaagacagtg

SEQ ID NO: 212718 - DNA, 55 bp, Artificial
  Synthetic oligonucleotide
tgaaagtacggctgatgatcggagggctcagtaaatgtcgagcggtctctcccgc

SEQ ID NO: 212719 - DNA, 55 bp, Artificial
  Synthetic oligonucleotide
tcttgacgttcatgttctgtgaggttcgcctgagaatgtcgaaggcgtcctcaga

SEQ ID NO: 212720 - DNA, 55 bp, Artificial
  Synthetic oligonucleotide
gaacagtcttgccccgtgagcgaacttttgggctacgcgagggtttcgaccgctg

SEQ ID NO: 212721 - DNA, 55 bp, Artificial
  Synthetic oligonucleotide
tctgtgtcgacgcatgcggggctcccctgcgggaggtgacttcggttgtgctgga

SEQ ID NO: 212722 - DNA, 55 bp, Artificial
  Synthetic oligonucleotide
tctggttccgtccgcgacaaccagcgtgtgcgagcgtccctcctcgcggttcaca

SEQ ID NO: 212723 - DNA, 55 bp, Artificial
  Synthetic oligonucleotide
gaacgagtcgtaacgactgcactccggatcaaatcaggctggccgaatgatcatc

SEQ ID NO: 212724 - DNA, 55 bp, Artificial
  Synthetic oligonucleotide
gaaggaactgtgctctggtacgacggagccaccggacttccgcgattcagcgtgg

SEQ ID NO: 212725 - DNA, 59 bp, Artificial
  Synthetic oligonucleotide
ggtacgacgcgatagagataccgaacatcagtaacaacgcagccgcgaaatagtggtta

SEQ ID NO: 212726 - DNA, 55 bp, Artificial
  Synthetic oligonucleotide
gacaggcttgagcgacaaagtctctcgaatgtccaacttgtattcagggtccgat

SEQ ID NO: 212727 - DNA, 54 bp, Artificial
  Synthetic oligonucleotide
gaccaacccggactacggcgccaaatgatccgaacggttcgcgtaggtgagtac

SEQ ID NO: 212728 - DNA, 55 bp, Artificial
  Synthetic oligonucleotide
gacctcagtgatccgcactcgttggaatgcacttcacgctaggtagccaggctgt

SEQ ID NO: 212729 - DNA, 55 bp, Artificial
  Synthetic oligonucleotide
gacctgagttccattgaacgcactaacgaccgtacaagtgtgatttgccgacgag

SEQ ID NO: 212730 - DNA, 55 bp, Artificial
  Synthetic oligonucleotide
gacgaaacccgcgcaccgcaggcatgaccaccgactaccgagagggcaccatcat

SEQ ID NO: 212731 - DNA, 55 bp, Artificial
  Synthetic oligonucleotide
tcgcttccccgcacgcccctactccctgcagcaacattccttcatgcttgcggaa

SEQ ID NO: 212732 - DNA, 55 bp, Artificial
  Synthetic oligonucleotide
gactgccgaaactctccgctgtgaatctcgtcccgaagactgttcacgaccgaac

SEQ ID NO: 212733 - DNA, 55 bp, Artificial
  Synthetic oligonucleotide
tcgatgcccagacctcgtggtgggtggacctgcaaactcaggttgctccgacgca

SEQ ID NO: 212734 - DNA, 55 bp, Artificial
  Synthetic oligonucleotide
gagaccgtctccgagaaagagtccgacgcgacctctagaagcccgcgcaattttg

SEQ ID NO: 212735 - DNA, 54 bp, Artificial
  Synthetic oligonucleotide
gcgcgcccctttagtccgatttgccgcgattgtgggtccgaataaccgacccag

SEQ ID NO: 212736 - DNA, 59 bp, Artificial
  Synthetic oligonucleotide
acgtcgagcgggaaactcatattccaaatattcggcgccctcagtgaattcgagcgcaa

SEQ ID NO: 212737 - DNA, 55 bp, Artificial
  Synthetic oligonucleotide
gcgcgctaagtcaggtaggttagctacctcgcctcgctaacctagacagggtagg

SEQ ID NO: 212738 - DNA, 55 bp, Artificial
  Synthetic oligonucleotide
gcgcgggcacagttcatccgcagtcataactatgacaggtcaacgtagtgcgacc

SEQ ID NO: 212739 - DNA, 55 bp, Artificial
  Synthetic oligonucleotide
gcgctctacggggcaatgagacggcactacacacaacttcatacggagacgaccg

SEQ ID NO: 212740 - DNA, 55 bp, Artificial
  Synthetic oligonucleotide
tacggcgcctcggtcatagcgacgtacgacgcccgacaaatgcgagacttcgcca

SEQ ID NO: 212741 - DNA, 55 bp, Artificial
  Synthetic oligonucleotide
gcggtgagccgttagcgagcagagacgggactcgtgcgaactgaagcgtgcacta

SEQ ID NO: 212742 - DNA, 55 bp, Artificial
  Synthetic oligonucleotide
gcggttcacgcgtcgagctgggataacgtcgcggtgatccctggggatctggatc

SEQ ID NO: 212743 - DNA, 55 bp, Artificial
  Synthetic oligonucleotide
gcgtacgtggactcgacgagatgtttcggtcctacccgcacgcagagcggttcgt

SEQ ID NO: 212744 - DNA, 55 bp, Artificial
  Synthetic oligonucleotide
gcgtccaggtcgacgcatggagctccggtcatgtcctcacagaatgtcctcacag

SEQ ID NO: 212745 - DNA, 55 bp, Artificial
  Synthetic oligonucleotide
gcgtgatcgatatcgtccattgaactattattgcgcagagtgcgccgaatgggca

SEQ ID NO: 212746 - DNA, 55 bp, Artificial
  Synthetic oligonucleotide
gcgtgcactgttagttgagtaggcgtaacacaccgtctggactccgatcccgcgg

SEQ ID NO: 212747 - DNA, 56 bp, Artificial
  Synthetic oligonucleotide
ggtgccccaatcagcggggcacccctgccccaatcagcggggcacccctgccccaa

SEQ ID NO: 212748 - DNA, 55 bp, Artificial
  Synthetic oligonucleotide
taccaacctcgtacccactgtgcggtcgttcgatgaacttgacggcaggtctgcg

SEQ ID NO: 212749 - DNA, 55 bp, Artificial
  Synthetic oligonucleotide
gctcaatggattcgtgtaactcgggtactcccgcgccattccttcactcgccgcg

SEQ ID NO: 212750 - DNA, 55 bp, Artificial
  Synthetic oligonucleotide
gctccgctaccgtggcgtcgtgacttccactgtggacgtactggcctacattccg

SEQ ID NO: 212751 - DNA, 55 bp, Artificial
  Synthetic oligonucleotide
taaccgcccgactatcggctgccggggcaggaatgggcggcggatcttccgcagc

SEQ ID NO: 212752 - DNA, 55 bp, Artificial
  Synthetic oligonucleotide
gctgtcattgggtgaaatccggagggccatagcgcaatcgtcagttctgacggcg

SEQ ID NO: 212753 - DNA, 55 bp, Artificial
  Synthetic oligonucleotide
gcttagttcgcgcagttcagacagggtggtgaagctttggcgtccgcgagtgaac

SEQ ID NO: 212754 - DNA, 55 bp, Artificial
  Synthetic oligonucleotide
tccacgcacggtatgcccattgccgcgtcacatcgaacatccagcagtttcgtcc

SEQ ID NO: 212755 - DNA, 55 bp, Artificial
  Synthetic oligonucleotide
tcaatacacaaccgaatacggagacaccatgagttcaatccgcgcacgtctcgcc

SEQ ID NO: 212756 - DNA, 55 bp, Artificial
  Synthetic oligonucleotide
tcaagactgtcgcggtcgtgtggtcgtttcaacggcacaactcgtccacttgtgc

SEQ ID NO: 212757 - DNA, 55 bp, Artificial
  Synthetic oligonucleotide
gcatgtaacaagttgcagcggccagccgattcgggcaagcatcgggttgctcgct

SEQ ID NO: 212758 - DNA, 55 bp, Artificial
  Synthetic oligonucleotide
gtagggacctttgacggtcggacggaggtccttcgatgccgctcgaggctacctc

SEQ ID NO: 212759 - DNA, 55 bp, Artificial
  Synthetic oligonucleotide
tatggtgtggaacccgtacgagcaggcgtctaccgcggtggcacgaacacatccg

SEQ ID NO: 212760 - DNA, 55 bp, Artificial
  Synthetic oligonucleotide
gccaggcgagttctgccgtgaggccatgttcggcacccgcaaagccgatctagtg

SEQ ID NO: 212761 - DNA, 55 bp, Artificial
  Synthetic oligonucleotide
gccatcccaatgtcgttaacgtcctgcaggtcggagtaactgagaacgaccggcc

SEQ ID NO: 212762 - DNA, 55 bp, Artificial
  Synthetic oligonucleotide
gccctgtcccggtctacaacggaacggaggctgagactgtcccagaaacattgac

SEQ ID NO: 212763 - DNA, 55 bp, Artificial
  Synthetic oligonucleotide
gccgaacatcgcccatcggttgcgtcgcggtcatcggggattccattggagcaag

SEQ ID NO: 212764 - DNA, 55 bp, Artificial
  Synthetic oligonucleotide
tagagggcctagctagacgtagtagggaacctaggtcgactagagatcgtgccgg

SEQ ID NO: 212765 - DNA, 55 bp, Artificial
  Synthetic oligonucleotide
gccgatattagcgcaactgtgctagattgaggtccgttgtagcacgactgagcta

SEQ ID NO: 212766 - DNA, 55 bp, Artificial
  Synthetic oligonucleotide
gccgatgcccggaccagaccaagttgtcaccgcactcgactttcgagacagggga

SEQ ID NO: 212767 - DNA, 55 bp, Artificial
  Synthetic oligonucleotide
gccgtgtcctgggtcacctccgacgaaagtgcagttttgaacgaccactatgctc

SEQ ID NO: 212768 - DNA, 55 bp, Artificial
  Synthetic oligonucleotide
gcgaacgacgagaaatcattcggatggcctacgagcagtgctggtcaccgagcct

SEQ ID NO: 212769 - DNA, 60 bp, Artificial
  Synthetic oligonucleotide
gcccgtccactcatcagacttttcaggcggggatggtcaggccatgcgaactaaggtatc

SEQ ID NO: 212770 - DNA, 56 bp, Artificial
  Synthetic oligonucleotide
acggctcgggcgctgctctagacccgcccgtaacggctcactacgcccgttcgcag

SEQ ID NO: 212771 - DNA, 55 bp, Artificial
  Synthetic oligonucleotide
gcgaattgtcagcacggtgccaattctgttgccctcccactcaaccgggtgttgg

SEQ ID NO: 212772 - DNA, 55 bp, Artificial
  Synthetic oligonucleotide
gcgactctatgagaaccgggcatgtcaacgctagttgcccatcgattagggttcc

SEQ ID NO: 212773 - DNA, 55 bp, Artificial
  Synthetic oligonucleotide
gcgatctcattgtccgcccggttggcaagagtgacggcttcctccgtcgcgcgaa

SEQ ID NO: 212774 - DNA, 55 bp, Artificial
  Synthetic oligonucleotide
caataccgcaatacctttgtaccgttgcgggaccatgcgaagtcgccgtggtgtc

SEQ ID NO: 212775 - DNA, 55 bp, Artificial
  Synthetic oligonucleotide
caacttccatgcccgatgtgagcgtccagatgtgaaggtcgtgagcgtccttgac

SEQ ID NO: 212776 - DNA, 53 bp, Artificial
  Synthetic oligonucleotide
caactcgttggaaatcccatgtcctgcaccgagtaaccggaggaaccgaaccc

SEQ ID NO: 212777 - DNA, 55 bp, Artificial
  Synthetic oligonucleotide
attggtcgtcgctaccgctagcgaggtgctctccgtcagcactgaaggccacgga

SEQ ID NO: 212778 - DNA, 55 bp, Artificial
  Synthetic oligonucleotide
attcggaattgcggaattttagaagtacggtatcgcgatccggtaggactgtcga

SEQ ID NO: 212779 - DNA, 55 bp, Artificial
  Synthetic oligonucleotide
attcgccgagccgtcttcagcagcaacgcggctcgctcctcgatccattgtgcga

SEQ ID NO: 212780 - DNA, 55 bp, Artificial
  Synthetic oligonucleotide
attcgccattggatgcgttgggttacgggcgagagggccggagtagtggggatcg

SEQ ID NO: 212781 - DNA, 54 bp, Artificial
  Synthetic oligonucleotide
gtcaagctcccacccttgagttttgagggggccggttgccggcgccatacccat

SEQ ID NO: 212782 - DNA, 55 bp, Artificial
  Synthetic oligonucleotide
attcgaggcgacaacttccccgcatcagtcggttcccgctccacggccccaatcg

SEQ ID NO: 212783 - DNA, 55 bp, Artificial
  Synthetic oligonucleotide
atgtggatgaccggacgcgtgatatgcccgggtgtcgataaggatgggcgcacgg

SEQ ID NO: 212784 - DNA, 55 bp, Artificial
  Synthetic oligonucleotide
atggctgctccctgtgatcgatgtgccactactgggccgtgtcgcgaagctcgtt

SEQ ID NO: 212785 - DNA, 50 bp, Artificial
  Synthetic oligonucleotide
atgcttgggttggaccggaacaggtttccgtgggtcggcgaaaaccggac

SEQ ID NO: 212786 - DNA, 55 bp, Artificial
  Synthetic oligonucleotide
atgatgctacttgcaggattggcaaacctaaccattcggatttggtggactgagc

SEQ ID NO: 212787 - DNA, 55 bp, Artificial
  Synthetic oligonucleotide
atgaaatccgcaacggggggcgtgctgagcgatcggcaatgggcggatgcggtgt

SEQ ID NO: 212788 - DNA, 55 bp, Artificial
  Synthetic oligonucleotide
atcgcgcggagggagaccgactgcattcacgtctcggatcagagtgctcgccgta

SEQ ID NO: 212789 - DNA, 55 bp, Artificial
  Synthetic oligonucleotide
atcgcagtagttgtgacggacattacacaggtaataaaaccccgtcctaccatcg

SEQ ID NO: 212790 - DNA, 55 bp, Artificial
  Synthetic oligonucleotide
atccgaaggcagtgaaccatttccggatgagagggccggctccaactcgagggcc

SEQ ID NO: 212791 - DNA, 55 bp, Artificial
  Synthetic oligonucleotide
atccagtcgggaaacccaccgctgttgcgatgacgaatccgagtccgacagcact

SEQ ID NO: 212792 - DNA, 54 bp, Artificial
  Synthetic oligonucleotide
gtccgaagctcggaatccggtagcggacctttcgagtgcgacaccagttcgggg

SEQ ID NO: 212793 - DNA, 55 bp, Artificial
  Synthetic oligonucleotide
atagcgcgcgaatcaccgaggcccttctcgacaatttccccggggtgcgttgcac

SEQ ID NO: 212794 - DNA, 55 bp, Artificial
  Synthetic oligonucleotide
agttcttggagcgggcacgtgcggtgtataccgaatcagggctcgagcgtaaggc

SEQ ID NO: 212795 - DNA, 55 bp, Artificial
  Synthetic oligonucleotide
agtgccctgcggggcaatgtgggacgcgggattcagcgcccgtgcgagtgctttt

SEQ ID NO: 212796 - DNA, 55 bp, Artificial
  Synthetic oligonucleotide
agtgagtcccggaacacccggtacgcgatcacaggcatcaccgctatcgtcccct

SEQ ID NO: 212797 - DNA, 55 bp, Artificial
  Synthetic oligonucleotide
agtaggtgctggcttacttgaccagttggtgcattagtttagcctcgatacaccg

SEQ ID NO: 212798 - DNA, 55 bp, Artificial
  Synthetic oligonucleotide
ccaatacgagatctgatctgcgcgttcctccatccgagcaataaccgattcccgg

SEQ ID NO: 212799 - DNA, 55 bp, Artificial
  Synthetic oligonucleotide
ccaagtcggctcctctcttttgatgccgggatatccagaacttgcagagctggag

SEQ ID NO: 212800 - DNA, 55 bp, Artificial
  Synthetic oligonucleotide
catctgacccctggggcttactcagagccgtacccggcttaccttccgctgtcga

SEQ ID NO: 212801 - DNA, 55 bp, Artificial
  Synthetic oligonucleotide
caggcgtatcaaggtgtgaggtgggtgtagagggctgaaattatcacgactccct

SEQ ID NO: 212802 - DNA, 55 bp, Artificial
  Synthetic oligonucleotide
caggcgggcggtgtcagcacaatgattggtataggcggtgggaatgggcgatggc

SEQ ID NO: 212803 - DNA, 58 bp, Artificial
  Synthetic oligonucleotide
acgcgaattgtgcttgtccaggcggaccacactcacgcgtgtaccgcttctacttttc

SEQ ID NO: 212804 - DNA, 55 bp, Artificial
  Synthetic oligonucleotide
cagcgtatgaggtgattcctcatccgcaacgcaaggatctccatgttccacccca

SEQ ID NO: 212805 - DNA, 55 bp, Artificial
  Synthetic oligonucleotide
cagcgcgacagtgagaccttgctggcatcgcgctagcaggttgatgggctttcgg

SEQ ID NO: 212806 - DNA, 55 bp, Artificial
  Synthetic oligonucleotide
cagcgaacgtgtccaggtacctctctactgttcgccatacgaaagtctccgatac

SEQ ID NO: 212807 - DNA, 55 bp, Artificial
  Synthetic oligonucleotide
cagatggtgccggccactttcgtagtttgcggttctgatccgtcaggacggggtc

SEQ ID NO: 212808 - DNA, 55 bp, Artificial
  Synthetic oligonucleotide
cagactgtcggacaaacgtgtttcgttctcggctcggctggatgggtcgcatcgg

SEQ ID NO: 212809 - DNA, 55 bp, Artificial
  Synthetic oligonucleotide
cagacagtcctgtgtcggtacggagaggaatcgatccgactgccgttgacaccag

SEQ ID NO: 212810 - DNA, 55 bp, Artificial
  Synthetic oligonucleotide
cagaagcgccttctgttagctagatgttgctctcttcagtccgacgagtcaaccc

SEQ ID NO: 212811 - DNA, 55 bp, Artificial
  Synthetic oligonucleotide
cagaagcagcaaggtctcgaagaacaagctaaccaggcccgattgatcaacgcgg

SEQ ID NO: 212812 - DNA, 55 bp, Artificial
  Synthetic oligonucleotide
cacttgaaccggcgagtgggctggcttggatcaccctaactcaaccggttgtgtc

SEQ ID NO: 212813 - DNA, 55 bp, Artificial
  Synthetic oligonucleotide
cacgtactgcacacacatgcgaatcagaggcggcaaggtggtcttgattcgcgag

SEQ ID NO: 212814 - DNA, 54 bp, Artificial
  Synthetic oligonucleotide
acgcgaacagagaccttgtgtgtacgacggcgggaggtaagtcgggtacggctc

SEQ ID NO: 212815 - DNA, 54 bp, Artificial
  Synthetic oligonucleotide
cacggagtggagaggggaaccttgcttgcgtttctcccgggtgcgtgaattaac

SEQ ID NO: 212816 - DNA, 55 bp, Artificial
  Synthetic oligonucleotide
cacgatgagtgctgtcggactcggattcgtcatcgcaacagcggtgggtttcccg

SEQ ID NO: 212817 - DNA, 55 bp, Artificial
  Synthetic oligonucleotide
cacctcttgcaccaaggtgccgaccgtggctttccgctcgcagaggttccagaag

SEQ ID NO: 212818 - DNA, 55 bp, Artificial
  Synthetic oligonucleotide
caccgtgacgactctggtactcggggccactggtttcatcggctccgcagtgatg

SEQ ID NO: 212819 - DNA, 55 bp, Artificial
  Synthetic oligonucleotide
caccgaacacctcaacacgtctccgactttgctagagatccgatctgttgccgtc

SEQ ID NO: 212820 - DNA, 55 bp, Artificial
  Synthetic oligonucleotide
cacagcagactacacactgcccggtacgccctgcaatgccggacttttctaggag

SEQ ID NO: 212821 - DNA, 55 bp, Artificial
  Synthetic oligonucleotide
cacagaacacgctcctccacgtcggcaccaggttgctatccggaacactgctccg

SEQ ID NO: 212822 - DNA, 55 bp, Artificial
  Synthetic oligonucleotide
cacacacgtcacctaacggagcgttgcaggacaacacccgagaatgacctagcac

SEQ ID NO: 212823 - DNA, 55 bp, Artificial
  Synthetic oligonucleotide
cacaacgcttttcaacaaccgtaaggcaccctatcgcgcccactaggagatcccc

SEQ ID NO: 212824 - DNA, 55 bp, Artificial
  Synthetic oligonucleotide
acccaaccgtgaccctgggactgcaatgtggatgctgcagagactcacggctccc

SEQ ID NO: 212825 - DNA, 56 bp, Artificial
  Synthetic oligonucleotide
gtcgagtaaatgttcggaaagggggctcacatgattgacccctcctgtcgaactag

SEQ ID NO: 212826 - DNA, 55 bp, Artificial
  Synthetic oligonucleotide
acatcaaatcaggacggcatctccgggtggctatgaggttcggagacgcgtcggg

SEQ ID NO: 212827 - DNA, 55 bp, Artificial
  Synthetic oligonucleotide
acatacagcggttatacgaccagaccgcatcgttccagttcaacgcggtcgggcc

SEQ ID NO: 212828 - DNA, 55 bp, Artificial
  Synthetic oligonucleotide
acagcggactcgctcaggactggcatgactcaatggtaaggatgtgcgctcagtg

SEQ ID NO: 212829 - DNA, 55 bp, Artificial
  Synthetic oligonucleotide
acacctcgcgcccctcatccgcgcccagtacccgtttccggtgacagtgctcgac

SEQ ID NO: 212830 - DNA, 55 bp, Artificial
  Synthetic oligonucleotide
acaacctgacgtttgtacataacacgcgtaaatactgactcatcaaccgattacc

SEQ ID NO: 212831 - DNA, 55 bp, Artificial
  Synthetic oligonucleotide
acaaccgaagtcacctcccgcaggggagccccgcatgcgtcgacacagacacgct

SEQ ID NO: 212832 - DNA, 54 bp, Artificial
  Synthetic oligonucleotide
aattcgggtagtggagccttcttgggcacgggcttcgctgtacgaaccccgcgc

SEQ ID NO: 212833 - DNA, 55 bp, Artificial
  Synthetic oligonucleotide
aatgcatgcagaatcgtggaattgctccggctgagttggacgcaggctgggctca

SEQ ID NO: 212834 - DNA, 55 bp, Artificial
  Synthetic oligonucleotide
aatcgtgaagccaagtcagatgtttcggtgtcgccaggcgcccctcggtgtgttc

SEQ ID NO: 212835 - DNA, 54 bp, Artificial
  Synthetic oligonucleotide
aatcgccctcattttcggaacatccctggaggcgatcggtcggtgggtccggac

SEQ ID NO: 212836 - DNA, 60 bp, Artificial
  Synthetic oligonucleotide
acgccaaaccgcagttatccctgaatggtgcttggatgtagcggtgtctgaacagagtcc

SEQ ID NO: 212837 - DNA, 55 bp, Artificial
  Synthetic oligonucleotide
aagctcgtaacaagagtgagcaggagtgaaatgcccgagcagtcgtggatcgctg

SEQ ID NO: 212838 - DNA, 55 bp, Artificial
  Synthetic oligonucleotide
aagcatcgccgcgctgaggactcggcccatccataacttcacccgccacaggaac

SEQ ID NO: 212839 - DNA, 55 bp, Artificial
  Synthetic oligonucleotide
aagattcgctggactacgcaatgccactcggtactacataattcggttcccgtgc

SEQ ID NO: 212840 - DNA, 55 bp, Artificial
  Synthetic oligonucleotide
aacttaactccgaatgagtattaacttacggagcgatcggagccagctatgaggt

SEQ ID NO: 212841 - DNA, 55 bp, Artificial
  Synthetic oligonucleotide
aactctctcacgcccgatcgctccgacgacaatcagcactccggtcatgacgaat

SEQ ID NO: 212842 - DNA, 53 bp, Artificial
  Synthetic oligonucleotide
aaccttggaggagtcggtgcgtacttcccaccgtgccagggaatcgtcccacc

SEQ ID NO: 212843 - DNA, 55 bp, Artificial
  Synthetic oligonucleotide
aaccgctcccgcggtcactacggactcgggtgttctcaccggagatagtcaaggc

SEQ ID NO: 212844 - DNA, 55 bp, Artificial
  Synthetic oligonucleotide
aacagctaaaccgaacggtgtcgcttcggcagtcggggatgacgacgccaggtgc

SEQ ID NO: 212845 - DNA, 55 bp, Artificial
  Synthetic oligonucleotide
aacacggggctgttcgtagcatgctaggtgcatgtagcatgctacgaatgatctc

SEQ ID NO: 212846 - DNA, 55 bp, Artificial
  Synthetic oligonucleotide
aaattgcactatcgacactcggcactgaaacaaacaccacgacagatcccctttg

SEQ ID NO: 212847 - DNA, 57 bp, Artificial
  Synthetic oligonucleotide
gtcggaggggatccacaagcgttggaactctggcgcgagtttgagttcggttcgatg

SEQ ID NO: 212848 - DNA, 54 bp, Artificial
  Synthetic oligonucleotide
aaaggcaacaaccctcctgatgtcgacacctcgggtggggcgtgtcgtcacggg

SEQ ID NO: 212849 - DNA, 55 bp, Artificial
  Synthetic oligonucleotide
aaaaccccacagttcccgcgctctcacccaacgagtgggagtggcgacaacacgc

SEQ ID NO: 212850 - DNA, 55 bp, Artificial
  Synthetic oligonucleotide
aggttggtcacggaatccgatgctgcctgcacaatcacggccctcagcgtaccgg

SEQ ID NO: 212851 - DNA, 55 bp, Artificial
  Synthetic oligonucleotide
aggtgatgtcgtctccatccaaccgctgtccaactgggctggcgaagaaatgtac

SEQ ID NO: 212852 - DNA, 55 bp, Artificial
  Synthetic oligonucleotide
agggttgccatgattctcctatgatcggcgggtggtctgctaagcaaatgtgggg

SEQ ID NO: 212853 - DNA, 55 bp, Artificial
  Synthetic oligonucleotide
agggcctactgcgggtgctcatccgttaccgcgtgagcgctgcgggcgtctacac

SEQ ID NO: 212854 - DNA, 55 bp, Artificial
  Synthetic oligonucleotide
agggaactgccgtgtaaccgagttcgagaggcacgttgtatgccgtctgacgcgg

SEQ ID NO: 212855 - DNA, 55 bp, Artificial
  Synthetic oligonucleotide
aggcgcgatgggactcacctatggtcggaggtcagaacctttcgccgatctcgca

SEQ ID NO: 212856 - DNA, 55 bp, Artificial
  Synthetic oligonucleotide
aggactacctagagggtcgttccgaggtgacgttcgcagcgcaggctgacgacgt

SEQ ID NO: 212857 - DNA, 55 bp, Artificial
  Synthetic oligonucleotide
agcctctgtcgcctgcaagcgttaccgagacgccaggtcatctggactttcccgg

SEQ ID NO: 212858 - DNA, 60 bp, Artificial
  Synthetic oligonucleotide
acgagcgaaagggcatcgatcgctttctgcgagcagctaagagcgacggcgtccatgagg

SEQ ID NO: 212859 - DNA, 55 bp, Artificial
  Synthetic oligonucleotide
agcccgaagagattgcggcaaccgttggattccttctcagccccggggccggata

SEQ ID NO: 212860 - DNA, 55 bp, Artificial
  Synthetic oligonucleotide
agacctgggcgtggtcataccgcggtgcgagagtgccggctggtgccacatgagt

SEQ ID NO: 212861 - DNA, 55 bp, Artificial
  Synthetic oligonucleotide
acgtccacctcacggggagcgagggttgcgagctcccaatcgagtacggccacag

SEQ ID NO: 212862 - DNA, 55 bp, Artificial
  Synthetic oligonucleotide
acgtagaggcatggcgaactcctgtagtactagagccgggacaacatgacttcac

SEQ ID NO: 212863 - DNA, 55 bp, Artificial
  Synthetic oligonucleotide
acggcattgctccccgtttacgccaatacggggcccggcctattgcgtgccattg

SEQ ID NO: 212864 - DNA, 55 bp, Artificial
  Synthetic oligonucleotide
acgcccgcctcgattgttaattcacttgcggcctcgcccatactgggacgagccg

SEQ ID NO: 212865 - DNA, 55 bp, Artificial
  Synthetic oligonucleotide
acgagcacgaccggaccccggatgggcgactgaagtgggacgtgtccctcgttgc

SEQ ID NO: 212866 - DNA, 52 bp, Artificial
  Synthetic oligonucleotide
acgaattccggcaagatacttgtaactctcgttactactccggggttctacc

SEQ ID NO: 212867 - DNA, 55 bp, Artificial
  Synthetic oligonucleotide
acctgcgggacggaaagacgaggtcgcgcatgctccacatggccagcgtgggtgt

SEQ ID NO: 212868 - DNA, 55 bp, Artificial
  Synthetic oligonucleotide
accggtactcgccgagtgcgtcgaaatactctgcggtgtcgtgtaggaggcccgc

SEQ ID NO: 212869 - DNA, 60 bp, Artificial
  Synthetic oligonucleotide
gtcggggatgacgacgccaggtgcgctgggggctacaaaggaacgagatgctcgctggtg

SEQ ID NO: 212870 - DNA, 53 bp, Artificial
  Synthetic oligonucleotide
accgggtcgaacgcgacttgggtgaaaactcgtgacggtctgtccctgcccga

SEQ ID NO: 212871 - DNA, 55 bp, Artificial
  Synthetic oligonucleotide
accggaaaaccgttcacacctcatgcaccgactgtgcgacgtgggaaaaccctgc

SEQ ID NO: 212872 - DNA, 55 bp, Artificial
  Synthetic oligonucleotide
accgctacctgttcagctgccgcccgctgggcatgagcaacggccaactctcgtt

SEQ ID NO: 212873 - DNA, 55 bp, Artificial
  Synthetic oligonucleotide
accgagaatgcacgcgagcggactcaccatcacagcgcggacaccgtcccccgtc

SEQ ID NO: 212874 - DNA, 55 bp, Artificial
  Synthetic oligonucleotide
accctatctgtgttcgggcgacgtcggaagcgttaggtcgtccgcacgtggtgct

SEQ ID NO: 212875 - DNA, 54 bp, Artificial
  Synthetic oligonucleotide
acccctgccccaatcagcggggcacccctgccccaatcagcggggcgaaactac

SEQ ID NO: 212876 - DNA, 55 bp, Artificial
  Synthetic oligonucleotide
ccagtcccgcggagggccgtgattttgcgcgttggatgaagattgcggataaacc

SEQ ID NO: 212877 - DNA, 55 bp, Artificial
  Synthetic oligonucleotide
ccagtgcggtctcatgtcgatacgtaatagaaagcgtgaaatcgggcctcggggc

SEQ ID NO: 212878 - DNA, 54 bp, Artificial
  Synthetic oligonucleotide
cccacgagttacgtcctgtcgtacagttcacaccggccgagggttctcctagtg

SEQ ID NO: 212879 - DNA, 53 bp, Artificial
  Synthetic oligonucleotide
ccccaactccggtcggctcagacttaccacaccccaccgactcgggaggccca

SEQ ID NO: 212880 - DNA, 60 bp, Artificial
  Synthetic oligonucleotide
aggtgccatgtactgcagcatccgaagcagggaagaccgtcgaccgctgggccagacata

SEQ ID NO: 212881 - DNA, 58 bp, Artificial
  Synthetic oligonucleotide
gctggaaaattcgccaaaggcgcgatgtactaccactttccatccaaagaagcgatcg

SEQ ID NO: 212882 - DNA, 55 bp, Artificial
  Synthetic oligonucleotide
ccccaccggctcatcccgtcgccataccagaacatcatcgtgcactcctcgatcg

SEQ ID NO: 212883 - DNA, 55 bp, Artificial
  Synthetic oligonucleotide
ccccacgctatataggaacaggttctacttattgtggcaagggttgtgcgagagg

SEQ ID NO: 212884 - DNA, 55 bp, Artificial
  Synthetic oligonucleotide
cccgccgctacagcccgattctggcgaaccaggcgtatcgcttccgattaccaac

SEQ ID NO: 212885 - DNA, 55 bp, Artificial
  Synthetic oligonucleotide
cccgcttagtcgaaggcagtcacccaattacccgtcagtacagttattcgatagc

SEQ ID NO: 212886 - DNA, 55 bp, Artificial
  Synthetic oligonucleotide
cccgtcgcatcaatccctctggtcccgctaagctcgtgtcagcacgtgcgtgtct

SEQ ID NO: 212887 - DNA, 55 bp, Artificial
  Synthetic oligonucleotide
ccctcgtagtctcggcatacccgcattagaacatgtgttcgacaggtttgcccag

SEQ ID NO: 212888 - DNA, 55 bp, Artificial
  Synthetic oligonucleotide
ccgaatgccagtgcgatagcttaagatattcgtagggtcgcgccctggtttcatg

SEQ ID NO: 212889 - DNA, 55 bp, Artificial
  Synthetic oligonucleotide
ccgaatgtaggcgagcttgcacgccgtaacccctgacgctcgaacatcggtgagc

SEQ ID NO: 212890 - DNA, 55 bp, Artificial
  Synthetic oligonucleotide
ccgacacggagaaccctgatgaacttgacaatcctgattccacataatggccaag

SEQ ID NO: 212891 - DNA, 55 bp, Artificial
  Synthetic oligonucleotide
ccgacgacatccgttcagttttcacccgtcgtccacagaagaatccctccatgac

SEQ ID NO: 212892 - DNA, 60 bp, Artificial
  Synthetic oligonucleotide
gctggggatatctcgtccacgcacggtatgcccattgccgcgtcacatcgaacatccagc

SEQ ID NO: 212893 - DNA, 55 bp, Artificial
  Synthetic oligonucleotide
ccgactctaatagctcggtagccgagacacaaggaatcctgaaggcacggagccc

SEQ ID NO: 212894 - DNA, 54 bp, Artificial
  Synthetic oligonucleotide
ccgatcatgtttcgcgattcgggcgggtcgtacaaaatatcggtttgtcctccc

SEQ ID NO: 212895 - DNA, 55 bp, Artificial
  Synthetic oligonucleotide
ccgatccgcgagttcagtcatagcgcttccaatctgcacaagtattccgcgtcac

SEQ ID NO: 212896 - DNA, 55 bp, Artificial
  Synthetic oligonucleotide
ccgatcgggagaacggtaaatgatcggccctcgatcactgcagggaagtgcaagt

SEQ ID NO: 212897 - DNA, 55 bp, Artificial
  Synthetic oligonucleotide
ccgcacataaagtgtggggaggcaactgtcggtgaaacaggaacctcgggacgcg

SEQ ID NO: 212898 - DNA, 55 bp, Artificial
  Synthetic oligonucleotide
ccgcgcggtttattatcactgtcggataaccgcaggtcagattagtgtccttgcg

SEQ ID NO: 212899 - DNA, 55 bp, Artificial
  Synthetic oligonucleotide
ccggagcaggagcgtcgaccaatgcgagatagtcgaggaccatctttcgggcggt

SEQ ID NO: 212900 - DNA, 55 bp, Artificial
  Synthetic oligonucleotide
ccggccggatgcctatccccggtacctgactgatatccgaccagtgactgcgatc

SEQ ID NO: 212901 - DNA, 53 bp, Artificial
  Synthetic oligonucleotide
ccgggaacgttaatcctggttgacccaacccctggcacctagtcgacgatcgc

SEQ ID NO: 212902 - DNA, 55 bp, Artificial
  Synthetic oligonucleotide
ccgggccgacccctgtatccatcctaaataggcaggtcaaccgccgattgcgtcc

SEQ ID NO: 212903 - DNA, 60 bp, Artificial
  Synthetic oligonucleotide
gctgtctacgatccaatcgtcgagctacacgagttgcgcaacagagtcgcacaccacgaa

SEQ ID NO: 212904 - DNA, 55 bp, Artificial
  Synthetic oligonucleotide
ccggtaaagcaacgaattcagctattgcccgcaatgcttgcgcaacgcccgtcgt

SEQ ID NO: 212905 - DNA, 55 bp, Artificial
  Synthetic oligonucleotide
ccggtgtctggtcaccaggataggcgaggaacgagccgatggagacgcagatcag

SEQ ID NO: 212906 - DNA, 55 bp, Artificial
  Synthetic oligonucleotide
ccggtgttcgcaccaccggaccacctgaccaccaggagattggagctccgaagtg

SEQ ID NO: 212907 - DNA, 55 bp, Artificial
  Synthetic oligonucleotide
ccgtacgaatcgattgcggtagaacgactctccgtcacgaaagcccacgatgtga

SEQ ID NO: 212908 - DNA, 55 bp, Artificial
  Synthetic oligonucleotide
ccgtgattaactgagttgtccagatcacacgaacggaaatatgtgaccgatgacc

SEQ ID NO: 212909 - DNA, 54 bp, Artificial
  Synthetic oligonucleotide
ccgttgtagcgttacaacatttcaagcgttagcatgtgaaccgttacacggttt

SEQ ID NO: 212910 - DNA, 55 bp, Artificial
  Synthetic oligonucleotide
cctacctattggacccagtggcaccgaactttgcccgtccctcgccatcgtgcag

SEQ ID NO: 212911 - DNA, 55 bp, Artificial
  Synthetic oligonucleotide
cctatgcggacccacctcccgacaactccacttctcgcaacgacgggagggttga

SEQ ID NO: 212912 - DNA, 55 bp, Artificial
  Synthetic oligonucleotide
ccaatcagcggggcacccctgccccaatcagcggggcgaaactacgaactcacta

SEQ ID NO: 212913 - DNA, 55 bp, Artificial
  Synthetic oligonucleotide
ccagcacgagctgttgtttcgccgatcctgtcgaacgcagtgccgactcgacgtc

SEQ ID NO: 212914 - DNA, 56 bp, Artificial
  Synthetic oligonucleotide
gcttttgcgaggcctttgagcgagtacggatccgagggaccccagaccgtcgtcca

SEQ ID NO: 212915 - DNA, 54 bp, Artificial
  Synthetic oligonucleotide
gggcgactcacataggtcagtccgaatacgacgtatgcactgatcagtccgacg

SEQ ID NO: 212916 - DNA, 50 bp, Artificial
  Synthetic oligonucleotide
gaaaggtcccgcccggagggcgagacctttcgactcctgtttacggacgg

SEQ ID NO: 212917 - DNA, 54 bp, Artificial
  Synthetic oligonucleotide
gcgcgaagaaggggcaaactatagcgacggtacgatgcttgtacgcgcttcatc

SEQ ID NO: 212918 - DNA, 54 bp, Artificial
  Synthetic oligonucleotide
ccgaagagaacgatccacaggacccagttcaggatgcggagaaagccattcgct

SEQ ID NO: 212919 - DNA, 54 bp, Artificial
  Synthetic oligonucleotide
gaactaggacagcacaaacactaatcgacagcaccgacggaattggtctgaaat

SEQ ID NO: 212920 - DNA, 54 bp, Artificial
  Synthetic oligonucleotide
ggtcgcgacatggctacgcggacagggacgatagaaaatcgcctctgttggatt

SEQ ID NO: 212921 - DNA, 54 bp, Artificial
  Synthetic oligonucleotide
gcctaagtcctcacgcgcgtgtgcgacgtgggaaaccacaacccacacctaacc

SEQ ID NO: 212922 - DNA, 54 bp, Artificial
  Synthetic oligonucleotide
ccacagtgcgatgctagtaaggctacctagcgtcgatagagacgctaggtatct

SEQ ID NO: 212923 - DNA, 54 bp, Artificial
  Synthetic oligonucleotide
tgaagaagtctaactcagggaatcagtatcggtacacggttttgctttcgagct

SEQ ID NO: 212924 - DNA, 54 bp, Artificial
  Synthetic oligonucleotide
gtaccgcttccgtttttgcgctgctgctcactttgccgcggcgtgcctggattt

SEQ ID NO: 212925 - DNA, 53 bp, Artificial
  Synthetic oligonucleotide
ggacgccaatccaatagggggctttttctatgcccggaccacctttccagttc

SEQ ID NO: 212926 - DNA, 54 bp, Artificial
  Synthetic oligonucleotide
gtacctggggtaggtgttcgcgcagcactcgacacttgttcgggtcacgctcga

SEQ ID NO: 212927 - DNA, 54 bp, Artificial
  Synthetic oligonucleotide
tctcgggttcacctgtcactgcttcggcgatacgtgtcacccgctgcatgaaca

SEQ ID NO: 212928 - DNA, 54 bp, Artificial
  Synthetic oligonucleotide
tctcgaactccggttcagtagcgtgcttttcgctcgtactcgtcttcagtgagg

SEQ ID NO: 212929 - DNA, 54 bp, Artificial
  Synthetic oligonucleotide
gacgacaaccgtggatacagcatggatcggtcgcgtcagaccttcgtgttgccc

SEQ ID NO: 212930 - DNA, 54 bp, Artificial
  Synthetic oligonucleotide
gtcagagcgagctctcgtcgggggatccgattcagtcgttgacctcgatcagtg

SEQ ID NO: 212931 - DNA, 54 bp, Artificial
  Synthetic oligonucleotide
cagaccctcagatcaacgtcgaccaataagtccagaatgcgctgagaatcatgc

SEQ ID NO: 212932 - DNA, 54 bp, Artificial
  Synthetic oligonucleotide
tcccgagtagaccgcatagcccaattcgcgcaacatgatcgcctgagtggggtc

SEQ ID NO: 212933 - DNA, 54 bp, Artificial
  Synthetic oligonucleotide
atctctgcacaggtggcagcctacggccacggcacacaccggtcacgttcggac

SEQ ID NO: 212934 - DNA, 54 bp, Artificial
  Synthetic oligonucleotide
gagtcaacctttagcccatatggggtataggggatataggtacaagtatgggca

SEQ ID NO: 212935 - DNA, 54 bp, Artificial
  Synthetic oligonucleotide
agtgaacggccggcagcctatgtcgttgtttcaccccacggacccacagatgac

SEQ ID NO: 212936 - DNA, 60 bp, Artificial
  Synthetic oligonucleotide
agcagcgtgtccattgttgtcagacgtaactgctatgacagggcagtcgggaacctgtgt

SEQ ID NO: 212937 - DNA, 54 bp, Artificial
  Synthetic oligonucleotide
acagctggggcagggtcgcttggacgtagagccagcagcacgggtacacgtgtc

SEQ ID NO: 212938 - DNA, 54 bp, Artificial
  Synthetic oligonucleotide
tacctcgcagacgaaacccgcgcaccgcaggcatgaccaccgactaccgagagg

SEQ ID NO: 212939 - DNA, 54 bp, Artificial
  Synthetic oligonucleotide
taagacgcagggtacatgccatttacgcacgtcagtgagtgaaccgggtaggcc

SEQ ID NO: 212940 - DNA, 54 bp, Artificial
  Synthetic oligonucleotide
gatggtcgttccggagatgggcgactccggaaactatctgccgtagtgctgaag

SEQ ID NO: 212941 - DNA, 54 bp, Artificial
  Synthetic oligonucleotide
gttcaagccctgtattgcagatgaggcgacgagtcgaaatcgttcgtagaacct

SEQ ID NO: 212942 - DNA, 54 bp, Artificial
  Synthetic oligonucleotide
gcagagtgcggcgcatgtccatagcctccatcgctcgagtgccggggccggcac

SEQ ID NO: 212943 - DNA, 54 bp, Artificial
  Synthetic oligonucleotide
atacatgcccctccttacgtttgtgtgggcagttttacctcgattccgccgaga

SEQ ID NO: 212944 - DNA, 54 bp, Artificial
  Synthetic oligonucleotide
atatcgctgggatgcaacgacgttggccgccactattctcttcagcctcgcaat

SEQ ID NO: 212945 - DNA, 54 bp, Artificial
  Synthetic oligonucleotide
caccaactagcacctatcgctcccaggacatcaaccgaaagttgatgttcccca

SEQ ID NO: 212946 - DNA, 51 bp, Artificial
  Synthetic oligonucleotide
agatttttcgaccccaggggttgcactccggccccctcataccggtccaaa

SEQ ID NO: 212947 - DNA, 60 bp, Artificial
  Synthetic oligonucleotide
agcagcatgagaacggggaactgtagtcaatgtagctatactgactacatgagcgaaatc

SEQ ID NO: 212948 - DNA, 54 bp, Artificial
  Synthetic oligonucleotide
aaagcgcgaagctcagcaaagcgaatttacgactcgccatcttgtccggtgcca

SEQ ID NO: 212949 - DNA, 54 bp, Artificial
  Synthetic oligonucleotide
ttgtgcagcaactggacactacgcgatattatgtgtacggtttgaagtgtagat

SEQ ID NO: 212950 - DNA, 54 bp, Artificial
  Synthetic oligonucleotide
ctcggaccgagacggtgtgtccgcccaatggacgaggggttgtcagcgagactt

SEQ ID NO: 212951 - DNA, 54 bp, Artificial
  Synthetic oligonucleotide
agcaatgaggccgcgttcgttcccgatatgggtgtcgggcgcaaccactcgatg

SEQ ID NO: 212952 - DNA, 53 bp, Artificial
  Synthetic oligonucleotide
agtcactgcgcgcactgggatcgacctctcatcgcggaaatgctgttcgcagt

SEQ ID NO: 212953 - DNA, 53 bp, Artificial
  Synthetic oligonucleotide
acgattgcgaagtctcggccggtccagcccaagtcccacaagctctcctcaat

SEQ ID NO: 212954 - DNA, 53 bp, Artificial
  Synthetic oligonucleotide
aatcgtgtggcgaccctgatcgcaaaggcccacggcttcgtgtggcagccgta

SEQ ID NO: 212955 - DNA, 53 bp, Artificial
  Synthetic oligonucleotide
ggaccgcgcaaaactatcactcgcaccgagagtcgatggacgcgaccagtgcc

SEQ ID NO: 212956 - DNA, 53 bp, Artificial
  Synthetic oligonucleotide
cgagtgcgacaccagttcggggttacgcccccatgtgtaggcgaaaacggcat

SEQ ID NO: 212957 - DNA, 53 bp, Artificial
  Synthetic oligonucleotide
ccttgccaacgaacagatgtggctcagcttgcacgggattcgatgttcttctc

SEQ ID NO: 212958 - DNA, 56 bp, Artificial
  Synthetic oligonucleotide
agcaacgaccatccccggaaaaggactacgaccatgcagaattcacccgtattcga

SEQ ID NO: 212959 - DNA, 53 bp, Artificial
  Synthetic oligonucleotide
tattttcgcgcgacgaaattaggatcgcggctatgacgacaccgcgatgcccc

SEQ ID NO: 212960 - DNA, 53 bp, Artificial
  Synthetic oligonucleotide
tcggaactgccgcccgggtacacacctcttccaccatcggtgacccccgtact

SEQ ID NO: 212961 - DNA, 53 bp, Artificial
  Synthetic oligonucleotide
cagttctggtctgtccgatgcattgcaacggtttcagtccatctcgccgtgta

SEQ ID NO: 212962 - DNA, 53 bp, Artificial
  Synthetic oligonucleotide
ggaccctgcgacaccgagcgtgttcgctttccgagactgtagaaggccgatct

SEQ ID NO: 212963 - DNA, 53 bp, Artificial
  Synthetic oligonucleotide
gcttgtggcctacaggtacgtggtacagagcgagaagatataccccagcgggg

SEQ ID NO: 212964 - DNA, 53 bp, Artificial
  Synthetic oligonucleotide
cagctcgggtatggaaggtgctgtgttcaaacgtgtttcgtcgctgtaccttc

SEQ ID NO: 212965 - DNA, 53 bp, Artificial
  Synthetic oligonucleotide
agccctcgaccggctcgtagctcacacccggcagcagagccgatagaaaacgg

SEQ ID NO: 212966 - DNA, 53 bp, Artificial
  Synthetic oligonucleotide
acctctcctcggtcaggcattcagatgtaatagtacagtcgtgcgaaatagga

SEQ ID NO: 212967 - DNA, 53 bp, Artificial
  Synthetic oligonucleotide
accagttgcgatctgcgcatgttcccggtgctcattcggactcctctgtcgtg

SEQ ID NO: 212968 - DNA, 53 bp, Artificial
  Synthetic oligonucleotide
cgaacatctcagatccccctgacgggggctcacacgtgcggttccaacggaaa

SEQ ID NO: 212969 - DNA, 56 bp, Artificial
  Synthetic oligonucleotide
ggccaactcaccaagaacccgatccatcccgactgggagacgatctacggaccgtc

SEQ ID NO: 212970 - DNA, 53 bp, Artificial
  Synthetic oligonucleotide
gtctgcagtaccccacgaggtatctgtttccggaagcgcaccaacccccacgc

SEQ ID NO: 212971 - DNA, 53 bp, Artificial
  Synthetic oligonucleotide
ttgtgccgttacaacggttgaacggctaaacgttgtaacgtagaatggttgta

SEQ ID NO: 212972 - DNA, 53 bp, Artificial
  Synthetic oligonucleotide
gtggatagcgatgcgagacgcaacttcgtagcttagatgtgaggccgaacaca

SEQ ID NO: 212973 - DNA, 53 bp, Artificial
  Synthetic oligonucleotide
aaaacgatgggcaaacacgtgcgaaaacacgcggttgcacacgtatgagacaa

SEQ ID NO: 212974 - DNA, 53 bp, Artificial
  Synthetic oligonucleotide
gcacgcgtgagcgggcacaggcatactccaccgctgccgtgatttccggtgta

SEQ ID NO: 212975 - DNA, 53 bp, Artificial
  Synthetic oligonucleotide
cgaagaaccgaacgtagagtggccagatcccggtgcaacgtggttccgacgcc

SEQ ID NO: 212976 - DNA, 53 bp, Artificial
  Synthetic oligonucleotide
agcggacctttcgagtgcgacaccagttcggggttacgcccccatgtgtaggc

SEQ ID NO: 212977 - DNA, 53 bp, Artificial
  Synthetic oligonucleotide
gggagacagtgcggagcggtctccctcgcttgtgggttcatctggttcccaga

SEQ ID NO: 212978 - DNA, 53 bp, Artificial
  Synthetic oligonucleotide
ctgtcgcacaccggaaatcgagggcacatcagccggggcgggacttttgcggg

SEQ ID NO: 212979 - DNA, 53 bp, Artificial
  Synthetic oligonucleotide
ccagttcggggttacgcccccatgtgtaggcgaaaacggcatcgtcccaatct

SEQ ID NO: 212980 - DNA, 60 bp, Artificial
  Synthetic oligonucleotide
agatgatgccgacgtatcgagatgatgcgaacgcacgtaaaagggccggtcagcaacgtt

SEQ ID NO: 212981 - DNA, 53 bp, Artificial
  Synthetic oligonucleotide
caacgcacccgcacggcagggctgtcccaagggggacgggctggtagtggacg

SEQ ID NO: 212982 - DNA, 53 bp, Artificial
  Synthetic oligonucleotide
gggctgtgaagagttgatacttcgccgcgctaccggttctgggaggatcggat

SEQ ID NO: 212983 - DNA, 53 bp, Artificial
  Synthetic oligonucleotide
actaggcacgcggcgtgttgcatgaaaaatattcgactaggcatcccgaagcc

SEQ ID NO: 212984 - DNA, 53 bp, Artificial
  Synthetic oligonucleotide
tggggcagggccgtacacccaagcccttcgtgccgttggagcaagtgatcaag

SEQ ID NO: 212985 - DNA, 53 bp, Artificial
  Synthetic oligonucleotide
ggtagttcagcgttcgcggcaacccaacggatcgataccgctcgtggctgcct

SEQ ID NO: 212986 - DNA, 53 bp, Artificial
  Synthetic oligonucleotide
gcggtgcttggcgcgaagacagtgaatccgccaggtgatggtttctccaagga

SEQ ID NO: 212987 - DNA, 53 bp, Artificial
  Synthetic oligonucleotide
tgtccacgaccccagctcacgtgtgcccactcgcatcacgctaccggcaatca

SEQ ID NO: 212988 - DNA, 52 bp, Artificial
  Synthetic oligonucleotide
agagtctcgagggatcccgtggcacccgggcgaaagcggtgccgtacccggg

SEQ ID NO: 212989 - DNA, 53 bp, Artificial
  Synthetic oligonucleotide
ggccaccgtcacgggtaaatcccggccacgcaacatcaggcttgcgtggtcac

SEQ ID NO: 212990 - DNA, 53 bp, Artificial
  Synthetic oligonucleotide
aggatgcactcgacgcgagctttctcgccgaatggcgcatccatcgcatgctt

SEQ ID NO: 212991 - DNA, 60 bp, Artificial
  Synthetic oligonucleotide
gccgaggcccgataaccgtcgtccgcgcggccgcagagcgctgagcaagataggcactta

SEQ ID NO: 212992 - DNA, 60 bp, Artificial
  Synthetic oligonucleotide
ggcccgtgaagctcgacgcaggcgttgggcgcgtagcaatcgctattgcagcccactaca

SEQ ID NO: 212993 - DNA, 53 bp, Artificial
  Synthetic oligonucleotide
tctgtacgagaaccccggcgacgcgacaactgctctgcgggaaggttatgcga

SEQ ID NO: 212994 - DNA, 53 bp, Artificial
  Synthetic oligonucleotide
atggcaggtggtagcgaccgagaatttccggtaggcactctactctcttgtga

SEQ ID NO: 212995 - DNA, 53 bp, Artificial
  Synthetic oligonucleotide
attcatcaggtccgcccggtcgtcactgaagtagtggatgcattcgacgcggc

SEQ ID NO: 212996 - DNA, 53 bp, Artificial
  Synthetic oligonucleotide
gtcactacatgtgatcgacccgaaggttgagccattcgccgacgcaactacca

SEQ ID NO: 212997 - DNA, 53 bp, Artificial
  Synthetic oligonucleotide
ttattgccctccgtaagcatgatgttcgctggcttcaatccgccgtgagcgat

SEQ ID NO: 212998 - DNA, 52 bp, Artificial
  Synthetic oligonucleotide
cgacaacgacattgtcgacgcattcgacggaccgcagaccatcttctactcg

SEQ ID NO: 212999 - DNA, 52 bp, Artificial
  Synthetic oligonucleotide
agaaatgagtgagtcgggacagtggctacctgccccgactcgctctcccgaa

SEQ ID NO: 213000 - DNA, 52 bp, Artificial
  Synthetic oligonucleotide
gcgctgcaggggccagcggatgaggtggccgtagatcttggtgcgtgctccg

SEQ ID NO: 213001 - DNA, 52 bp, Artificial
  Synthetic oligonucleotide
gtcagaacgtgtgtggggtgcagggaacaagggtcggctgtcgatctgttga

SEQ ID NO: 213002 - DNA, 52 bp, Artificial
  Synthetic oligonucleotide
gcttacattacccagccagtcaccattaaatcccctggtcagttacgtaaaa

SEQ ID NO: 213003 - DNA, 60 bp, Artificial
  Synthetic oligonucleotide
agagcggtccggatgggagggcctactgcgggtgctcatccgttaccgcgtgagcgctgc

SEQ ID NO: 213004 - DNA, 52 bp, Artificial
  Synthetic oligonucleotide
aggaatgaacggaaacgcccgacaacatactgactcctgggtaacctggagt

SEQ ID NO: 213005 - DNA, 52 bp, Artificial
  Synthetic oligonucleotide
agggaagcggctacccccggtgagtcgacaggcccggggatgacaggaaaga

SEQ ID NO: 213006 - DNA, 52 bp, Artificial
  Synthetic oligonucleotide
gtccctgcttcttccggattgtgtgtgcagtagtgggcaactgagcacaaga

SEQ ID NO: 213007 - DNA, 52 bp, Artificial
  Synthetic oligonucleotide
ggcacggagggaacgggcccgcgctggtcaaggctgtcgccttgcttcggta

SEQ ID NO: 213008 - DNA, 52 bp, Artificial
  Synthetic oligonucleotide
gtcgctgagcgactagggccgaactctcaccgctacgactgcggtgaaaccc

SEQ ID NO: 213009 - DNA, 52 bp, Artificial
  Synthetic oligonucleotide
ggcgaaaacggcatcgtcccaatctgtgcgctggggatatctcgtccacgca

SEQ ID NO: 213010 - DNA, 52 bp, Artificial
  Synthetic oligonucleotide
gcgttggctgctgatgttccgcagttctctacgcataccacccgacacctgt

SEQ ID NO: 213011 - DNA, 52 bp, Artificial
  Synthetic oligonucleotide
ggtgacgcgggggggctcacgattccgggagctggcgcattctgggggactc

SEQ ID NO: 213012 - DNA, 52 bp, Artificial
  Synthetic oligonucleotide
agtctccaccagccccagggtggttcatctgtacagccagctcggcaacccc

SEQ ID NO: 213013 - DNA, 52 bp, Artificial
  Synthetic oligonucleotide
tcgatctgggaccgcttggccccgtgtcggcccgtggatctgatcgggtacc

SEQ ID NO: 213014 - DNA, 51 bp, Artificial
  Synthetic oligonucleotide
ggcggaattctgagttacactcccccccaaggaacgccgggggggagtgac

SEQ ID NO: 213015 - DNA, 52 bp, Artificial
  Synthetic oligonucleotide
tcgctgcccacactagtaagggtacggggagactcgtctggctcactgtgcg

SEQ ID NO: 213016 - DNA, 52 bp, Artificial
  Synthetic oligonucleotide
ttacgcaggcctcgcagaacatctccccggacatgtgttgtacggagtgcag

SEQ ID NO: 213017 - DNA, 52 bp, Artificial
  Synthetic oligonucleotide
atgtcagtgcctgcgaccccccgttgcccggggacggatcaggttctcccga

SEQ ID NO: 213018 - DNA, 52 bp, Artificial
  Synthetic oligonucleotide
gaccgacgatctactcgaaatagactctgaaaagtcgaaggcgttattccgt

SEQ ID NO: 213019 - DNA, 52 bp, Artificial
  Synthetic oligonucleotide
cgccccgaggtgggtacttgggccccgaggcgagtctctattaccagaacta

SEQ ID NO: 213020 - DNA, 52 bp, Artificial
  Synthetic oligonucleotide
cacagcgggcgacggacgaacgccgtccatcggttccgatcggacgtcgaga

SEQ ID NO: 213021 - DNA, 52 bp, Artificial
  Synthetic oligonucleotide
cccacggaactgcgcattcgaatcccaccactttggttacaggttgctttcg

SEQ ID NO: 213022 - DNA, 52 bp, Artificial
  Synthetic oligonucleotide
tggggcggcctactccgggtgctcatcgacctccggatcggtactcagggag

SEQ ID NO: 213023 - DNA, 52 bp, Artificial
  Synthetic oligonucleotide
caaacacccggcaccgtcgcggaatagtcgtcagatcgcacgaggcgtaact

SEQ ID NO: 213024 - DNA, 52 bp, Artificial
  Synthetic oligonucleotide
tggcgtcactttacgtgacaaatggagccagggcgtagacgcgtacctcgga

SEQ ID NO: 213025 - DNA, 58 bp, Artificial
  Synthetic oligonucleotide
agaactagcctcacccccgcatagcaccccgaaacgcactgagggcgaaccaatgcac

SEQ ID NO: 213026 - DNA, 52 bp, Artificial
  Synthetic oligonucleotide
tggaagagcatggggagactcgtctgactcactgcgtggtcttctggcgatg

SEQ ID NO: 213027 - DNA, 52 bp, Artificial
  Synthetic oligonucleotide
tggccgtatatccctattccgtcctgaaaagccagccgtccaacaactatcg

SEQ ID NO: 213028 - DNA, 52 bp, Artificial
  Synthetic oligonucleotide
tggaccgagggcgaggatgtgccagtggacgttgaaccgatgcggtcgggtg

SEQ ID NO: 213029 - DNA, 52 bp, Artificial
  Synthetic oligonucleotide
aacgccctctcgcggaagggctgtggccgcgcgtgcgaggagtaagggatcg

SEQ ID NO: 213030 - DNA, 52 bp, Artificial
  Synthetic oligonucleotide
tggataggggcggggggagcacggatatccgctaccgctccggtagcgtctg

SEQ ID NO: 213031 - DNA, 52 bp, Artificial
  Synthetic oligonucleotide
ttttgcggctctgggtcattggtgaactcgtttcgcttgtgcactggcaccg

SEQ ID NO: 213032 - DNA, 52 bp, Artificial
  Synthetic oligonucleotide
ttccgatctgaagagtcgaacaccgtcgagtctgcgcggtagcgggcgcaaa

SEQ ID NO: 213033 - DNA, 52 bp, Artificial
  Synthetic oligonucleotide
gttgactgtttgagtagattcgacatcgggtggtgaggtttccggtttgttg

SEQ ID NO: 213034 - DNA, 52 bp, Artificial
  Synthetic oligonucleotide
acaatcgccgtccggccgcgcacacatcggatggtggctcggccccaaccac

SEQ ID NO: 213035 - DNA, 52 bp, Artificial
  Synthetic oligonucleotide
ccgcgtttccggacgcgcgggaccgcctaccgctcgagcaccccgagagcga

SEQ ID NO: 213036 - DNA, 60 bp, Artificial
  Synthetic oligonucleotide
gggcagtcggagttctacatcacccgatagccgggcgatgctcgtggggtgtctatgccc

SEQ ID NO: 213037 - DNA, 52 bp, Artificial
  Synthetic oligonucleotide
ttggtgagcggtcgccccaactccaacgatgaaagcagcgcacaacgtaatg

SEQ ID NO: 213038 - DNA, 51 bp, Artificial
  Synthetic oligonucleotide
cagccggcatgggacagtattggatctacgcgaaggagcatgtgaagcgga

SEQ ID NO: 213039 - DNA, 51 bp, Artificial
  Synthetic oligonucleotide
agcctctcgtggccacctatctctatcggatcggcagattcgcctaccggc

SEQ ID NO: 213040 - DNA, 51 bp, Artificial
  Synthetic oligonucleotide
ttgtccccaagtgggtaccgggcttaacggcattgggcacccacgacattt

SEQ ID NO: 213041 - DNA, 51 bp, Artificial
  Synthetic oligonucleotide
tgtcatctatgcagacgtcgtccgggtgatcgactgtcgacggccacctct

SEQ ID NO: 213042 - DNA, 51 bp, Artificial
  Synthetic oligonucleotide
cggagccacgtatgaacccgctcaccgcaagtagttcgggatgtaagggcc

SEQ ID NO: 213043 - DNA, 51 bp, Artificial
  Synthetic oligonucleotide
aaccgcgattgcatgcgatgccattcggtccaacttcgccgagtcaccgag

SEQ ID NO: 213044 - DNA, 51 bp, Artificial
  Synthetic oligonucleotide
ggagtgctcacggcctccatacttccactcgagcgcaaacggatatcggag

SEQ ID NO: 213045 - DNA, 51 bp, Artificial
  Synthetic oligonucleotide
tgtcttggcttcgaatgtgatcgcgatacgcgcagtcaggcgaagcccacc

SEQ ID NO: 213046 - DNA, 51 bp, Artificial
  Synthetic oligonucleotide
ttccaggcggatagttgaaccttgcaacgattgagagcacacagagacttg

SEQ ID NO: 213047 - DNA, 60 bp, Artificial
  Synthetic oligonucleotide
actcttccgactctcagaaaggctgcatcatgaccgaaacagctaccgccacacgttttg

SEQ ID NO: 213048 - DNA, 51 bp, Artificial
  Synthetic oligonucleotide
cggaccactccaactggtccgccctctggctttcacccggcagaacctctc

SEQ ID NO: 213049 - DNA, 51 bp, Artificial
  Synthetic oligonucleotide
accgcgtgagacggagcaatccagccgtctgcataccgatagagcaaccgc

SEQ ID NO: 213050 - DNA, 51 bp, Artificial
  Synthetic oligonucleotide
gtgaactatgggtcaaccctatcggacacgcacctcggatctgtcggggcg

SEQ ID NO: 213051 - DNA, 51 bp, Artificial
  Synthetic oligonucleotide
acccggtatccgtccgcggtaccacgcgcaaaagacgccacaaggttgcgg

SEQ ID NO: 213052 - DNA, 51 bp, Artificial
  Synthetic oligonucleotide
gttgcaggagcccgggactcagattccatcggtcctgaccgaaccgggaca

SEQ ID NO: 213053 - DNA, 51 bp, Artificial
  Synthetic oligonucleotide
acagtcgtgatcaactgagctcagcctaacttcttgacatgcgaatgtctg

SEQ ID NO: 213054 - DNA, 51 bp, Artificial
  Synthetic oligonucleotide
gtcgtaggtcattcagcgggctccttgccggatgagggggtcacaggtggt

SEQ ID NO: 213055 - DNA, 51 bp, Artificial
  Synthetic oligonucleotide
cgaccatgagcaactcagcccgacgcaagcatgaaggctaacggccccaga

SEQ ID NO: 213056 - DNA, 51 bp, Artificial
  Synthetic oligonucleotide
tcgtcagttgcgccacactcctcgtctgcggttcgaacaccagaaagtagg

SEQ ID NO: 213057 - DNA, 51 bp, Artificial
  Synthetic oligonucleotide
tcgtgcagaggggtgatttgctgttcagtcgagcgaacacgtccgaacttg

SEQ ID NO: 213058 - DNA, 60 bp, Artificial
  Synthetic oligonucleotide
actctccatgcaaggatgtcgcacatggctggagtaaagcgcctgtcgtactcacgaaag

SEQ ID NO: 213059 - DNA, 51 bp, Artificial
  Synthetic oligonucleotide
ggttcgagcaggcacgagagttcttcgagcgggcacggacggcctatgtcg

SEQ ID NO: 213060 - DNA, 51 bp, Artificial
  Synthetic oligonucleotide
aacttcaagcatgcgcaacggtgttatcagtcggcgcgtgccgtgtattcc

SEQ ID NO: 213061 - DNA, 51 bp, Artificial
  Synthetic oligonucleotide
cgactcggcatctggcaatcactaggcgcacccgcccaccctaagggatcg

SEQ ID NO: 213062 - DNA, 51 bp, Artificial
  Synthetic oligonucleotide
tgagtgtcagtagagggtgcgcggttgcccgctgaattgttagtggggtga

SEQ ID NO: 213063 - DNA, 51 bp, Artificial
  Synthetic oligonucleotide
tgattaagatcttcagcgcgattgggcagcgctaccctgcatgggacgggc

SEQ ID NO: 213064 - DNA, 51 bp, Artificial
  Synthetic oligonucleotide
aacgcgaggttggtcacggaatccgatgctgcctgcacaatcacggccctc

SEQ ID NO: 213065 - DNA, 51 bp, Artificial
  Synthetic oligonucleotide
ggggcatctaaatatagccaacgaaagatgtccacattcgcaaaccatact

SEQ ID NO: 213066 - DNA, 51 bp, Artificial
  Synthetic oligonucleotide
cagccgccaaacacccggcaccgtcgcggaatagtcgtcagatcgcacgag

SEQ ID NO: 213067 - DNA, 51 bp, Artificial
  Synthetic oligonucleotide
cgcgggctgtctcccttgccgtgagtgatgctcacttgtcgacccctccag

SEQ ID NO: 213068 - DNA, 51 bp, Artificial
  Synthetic oligonucleotide
gatttgaatctatacaagatcactcttcggctcgagtcgacccgcgtgcgt

SEQ ID NO: 213069 - DNA, 54 bp, Artificial
  Synthetic oligonucleotide
gggggtccgggaacattcacgagaaaagtcacgctaaggagttaccgcacatag

SEQ ID NO: 213070 - DNA, 51 bp, Artificial
  Synthetic oligonucleotide
ctgagagcgagctcgtggacactgctacggcccaccgtcggatgcgtcatg

SEQ ID NO: 213071 - DNA, 51 bp, Artificial
  Synthetic oligonucleotide
ccagcggccgatccgtctctgcccgacccgtttcctctggtcattgcacat

SEQ ID NO: 213072 - DNA, 51 bp, Artificial
  Synthetic oligonucleotide
gaaccgagctacgcgaggccacactctccgaatcgacaggcttcggacgca

SEQ ID NO: 213073 - DNA, 51 bp, Artificial
  Synthetic oligonucleotide
agttaccaggagggacgaatgacgcaggggcgtgtacctcgccagtttggc

SEQ ID NO: 213074 - DNA, 51 bp, Artificial
  Synthetic oligonucleotide
cgatcgaaaaggcaagcgcgcccggagtattcgccggctgcagacacgcga

SEQ ID NO: 213075 - DNA, 51 bp, Artificial
  Synthetic oligonucleotide
cgtcggacaccgtggatgatcggtcgaaaaatcaagcgcgccgggagcatt

SEQ ID NO: 213076 - DNA, 51 bp, Artificial
  Synthetic oligonucleotide
cgcaggcatgaccaccgactaccgagagggcaccatcatgacgagcgcata

SEQ ID NO: 213077 - DNA, 51 bp, Artificial
  Synthetic oligonucleotide
gccgcgggcaagggggcaattagacgtgccgaccaagggtgtgacgaccac

SEQ ID NO: 213078 - DNA, 51 bp, Artificial
  Synthetic oligonucleotide
cgtgtactcgacacgtgcctccatgctcgcccactcctcaggtttagtgtt

SEQ ID NO: 213079 - DNA, 51 bp, Artificial
  Synthetic oligonucleotide
gacctgctcgcggccacatgcaagacggaagcagtacctactggcactcga

SEQ ID NO: 213080 - DNA, 56 bp, Artificial
  Synthetic oligonucleotide
gggggtccttcgcactgaatctcaaaggtggccggctgaatttcgtcgcgcgaaaa

SEQ ID NO: 213081 - DNA, 51 bp, Artificial
  Synthetic oligonucleotide
cgccagggagttagggcggttcgagcaggcacgagagttcttcgagcgggc

SEQ ID NO: 213082 - DNA, 51 bp, Artificial
  Synthetic oligonucleotide
gctagccggcatgcggacacaaacaagagcccggtgtgggttgttaccgtt

SEQ ID NO: 213083 - DNA, 51 bp, Artificial
  Synthetic oligonucleotide
agctgttgacgcagctgagggaccgttcagagtgcaagccgactgttgacg

SEQ ID NO: 213084 - DNA, 51 bp, Artificial
  Synthetic oligonucleotide
ccaggcgtcaacagcagcggtcatgaccgccaagctagggccggatctgta

SEQ ID NO: 213085 - DNA, 51 bp, Artificial
  Synthetic oligonucleotide
ctcagcgggattgccgccgagaggttatttacgaatagggccaacagggca

SEQ ID NO: 213086 - DNA, 51 bp, Artificial
  Synthetic oligonucleotide
ctcatgtcggactccttgcttcggtaccactacccggtgtgggtacttcgt

SEQ ID NO: 213087 - DNA, 51 bp, Artificial
  Synthetic oligonucleotide
gagtgttgcaacgatgactagaacccgcccttcagggttcaactggtgcca

SEQ ID NO: 213088 - DNA, 51 bp, Artificial
  Synthetic oligonucleotide
gcgtcttggggcctagtatgtatgtttctgccatggtcgtcgggggattcg

SEQ ID NO: 213089 - DNA, 51 bp, Artificial
  Synthetic oligonucleotide
cgctcaggggcactcgactgtgccgaaagcctgtcccgtctcgggggtcgg

SEQ ID NO: 213090 - DNA, 51 bp, Artificial
  Synthetic oligonucleotide
gaggtaccgcattggggctacgtcttcgaaggccggtatttcaccaccagt

SEQ ID NO: 213091 - DNA, 54 bp, Artificial
  Synthetic oligonucleotide
ggggtgggttggcgctgaagtgtccgccggaacgcgggcctcgtctatttacac

SEQ ID NO: 213092 - DNA, 51 bp, Artificial
  Synthetic oligonucleotide
atctatacggggttggtgctctacacccgctcgttgtggcccgcgatctct

SEQ ID NO: 213093 - DNA, 50 bp, Artificial
  Synthetic oligonucleotide
aatcccacgggggcgcaggtccggtgctgccatacgttcgaatgttgtca

SEQ ID NO: 213094 - DNA, 50 bp, Artificial
  Synthetic oligonucleotide
aatccacgaatgcgccgtggtgtctccaaccctgcgtgaacgtacgcgtc

SEQ ID NO: 213095 - DNA, 50 bp, Artificial
  Synthetic oligonucleotide
gagccacccggctatccacctgccaggctgtcagacaggtgcaattgtta

SEQ ID NO: 213096 - DNA, 50 bp, Artificial
  Synthetic oligonucleotide
aatccaccctctgcggcagtcgttgtggcacagttcggtccatgcctgcg

SEQ ID NO: 213097 - DNA, 50 bp, Artificial
  Synthetic oligonucleotide
acaggagcgggcgggcaattcttcgaacgatcatgggcggactccctacc

SEQ ID NO: 213098 - DNA, 50 bp, Artificial
  Synthetic oligonucleotide
acatagagtgacccctcgagccgtcaaacgcggagctcgcctaggcgccc

SEQ ID NO: 213099 - DNA, 50 bp, Artificial
  Synthetic oligonucleotide
aatatggccccctgcccagtgagatcgggtcatcacctccgcagccttcg

SEQ ID NO: 213100 - DNA, 50 bp, Artificial
  Synthetic oligonucleotide
aagggtgcgtgccccgtcctttgcccggaatagcctcgcagcgtgaacga

SEQ ID NO: 213101 - DNA, 50 bp, Artificial
  Synthetic oligonucleotide
tcgcatccgtcaacggtgtcccggtgacactcggctactcgcacgctctc

SEQ ID NO: 213102 - DNA, 59 bp, Artificial
  Synthetic oligonucleotide
gcctacctcggggctcaatcgcgcggctacggcctgcggtactggcagatcaaggaccc

SEQ ID NO: 213103 - DNA, 60 bp, Artificial
  Synthetic oligonucleotide
cgcagttcgtcactcaccaccgaacacctcaacacgtctccgactttgctagagatccga

SEQ ID NO: 213104 - DNA, 50 bp, Artificial
  Synthetic oligonucleotide
aatagtggagttcgaacggggtgagccccggctaggagaaaacggtgcgg

SEQ ID NO: 213105 - DNA, 50 bp, Artificial
  Synthetic oligonucleotide
cagtccacgagcgcacgagaagaggcacacgcgatgacaacccaccgatc

SEQ ID NO: 213106 - DNA, 50 bp, Artificial
  Synthetic oligonucleotide
aagttggggtgaacaatggggtcggtaaccgtagcgggaactggctccgg

SEQ ID NO: 213107 - DNA, 50 bp, Artificial
  Synthetic oligonucleotide
atggtcccgctacaacgagacccgcgaaaccgcctagaccgatgactgcg

SEQ ID NO: 213108 - DNA, 50 bp, Artificial
  Synthetic oligonucleotide
aagttaccggtaggtaggggtagtgagccagggggcatggttgcgctcgg

SEQ ID NO: 213109 - DNA, 50 bp, Artificial
  Synthetic oligonucleotide
aagtatggcggacgctccacgatactgggcatggggtcgtcacatgcgac

SEQ ID NO: 213110 - DNA, 50 bp, Artificial
  Synthetic oligonucleotide
tcgggcgatcggcatgtacaaggtgggtgtcacgcgctctctcagtgacg

SEQ ID NO: 213111 - DNA, 50 bp, Artificial
  Synthetic oligonucleotide
acagtgccggacccgtgtgggatctgctttcggagccgcgaatggctcca

SEQ ID NO: 213112 - DNA, 50 bp, Artificial
  Synthetic oligonucleotide
aaggtctagcgtaacgcgccccgagagtgtaaaggaccagcgccctggag

SEQ ID NO: 213113 - DNA, 50 bp, Artificial
  Synthetic oligonucleotide
acagtgcgttggggtggggctgtcttcatcccgcggcgagtggggaacga

SEQ ID NO: 213114 - DNA, 60 bp, Artificial
  Synthetic oligonucleotide
ccatggattacaaggccgacgtagccctctctatgacaccaatcgagatcgtagtggatc

SEQ ID NO: 213115 - DNA, 50 bp, Artificial
  Synthetic oligonucleotide
acaatcccggtcctgcgagcacgagaactcccgaaggcggggtagctgac

SEQ ID NO: 213116 - DNA, 50 bp, Artificial
  Synthetic oligonucleotide
acaagcgcggtctcgcagcaacggaactttcgcctcggtgactatgcccc

SEQ ID NO: 213117 - DNA, 50 bp, Artificial
  Synthetic oligonucleotide
acaactgcacggtaagaccgctccacaactgcacaccgctcccgtcaggg

SEQ ID NO: 213118 - DNA, 50 bp, Artificial
  Synthetic oligonucleotide
tcatcgcgcaatactcccgctgaggtagacgtcacttgtcggggaccgcc

SEQ ID NO: 213119 - DNA, 50 bp, Artificial
  Synthetic oligonucleotide
atctcctcttccgggattccggtggtgtcgggtcggagttgttgtgccgc

SEQ ID NO: 213120 - DNA, 50 bp, Artificial
  Synthetic oligonucleotide
catcacctggcggattcactgtcttcgcgccaagcaccgcgcaactgtcc

SEQ ID NO: 213121 - DNA, 50 bp, Artificial
  Synthetic oligonucleotide
gagtccgatccagcggccgatccgtctctgcccgacccgtttcctctggt

SEQ ID NO: 213122 - DNA, 50 bp, Artificial
  Synthetic oligonucleotide
acaaccccgcgcgtgtcatccgaactgccttcgaacgtccgggaggctgc

SEQ ID NO: 213123 - DNA, 50 bp, Artificial
  Synthetic oligonucleotide
cctgctcactttccgggtcggagcctgaaacaatgggccggtgactaccc

SEQ ID NO: 213124 - DNA, 50 bp, Artificial
  Synthetic oligonucleotide
tcccacctgcactggccttgtctcggagtgaccaatccccacggtcactt

SEQ ID NO: 213125 - DNA, 59 bp, Artificial
  Synthetic oligonucleotide
cgccttacgtgagcagcgcagatgtaagtggtggcccggtgttcgcaccaccggaccac

SEQ ID NO: 213126 - DNA, 50 bp, Artificial
  Synthetic oligonucleotide
aattcggatgtactaccccgaacgagggcgaggcgtgtgtgaccggaggc

SEQ ID NO: 213127 - DNA, 50 bp, Artificial
  Synthetic oligonucleotide
tataggcggtgggaatgggcgatggcatttggtgtgacgatgggtcggaa

SEQ ID NO: 213128 - DNA, 50 bp, Artificial
  Synthetic oligonucleotide
acactcggccacggttgtgtgcggagtcctgtgtgcgggcatccgacctc

SEQ ID NO: 213129 - DNA, 50 bp, Artificial
  Synthetic oligonucleotide
aattcgcagcctcgggtccagtaccccggacggattttcgtgaccagggt

SEQ ID NO: 213130 - DNA, 50 bp, Artificial
  Synthetic oligonucleotide
atcgtcgtgcaggccaacttcagcgaaccatcgccccaaccccgaatgcg

SEQ ID NO: 213131 - DNA, 50 bp, Artificial
  Synthetic oligonucleotide
atcttggtcgcgtactcccttgccgcccaaatgctcgtccgtgcatcacc

SEQ ID NO: 213132 - DNA, 50 bp, Artificial
  Synthetic oligonucleotide
tcccggagtcgaagcagcacctctacggagctaggcgacacctctcctcc

SEQ ID NO: 213133 - DNA, 50 bp, Artificial
  Synthetic oligonucleotide
aattcacgctcccctagcgtcgggcgtcgacactgcccctggaaaggacg

SEQ ID NO: 213134 - DNA, 50 bp, Artificial
  Synthetic oligonucleotide
tagctgcgtgctgttcgcccaaccgcgattgcatgcgatgccattcggtc

SEQ ID NO: 213135 - DNA, 50 bp, Artificial
  Synthetic oligonucleotide
aatcggatctcatgaggcgctcggaagtgcggttgtcgggggctgcgacc

SEQ ID NO: 213136 - DNA, 59 bp, Artificial
  Synthetic oligonucleotide
cgcgacttcctaccgatcgcatccgtcaacggtgtcccggtgacactcggctactcgca

SEQ ID NO: 213137 - DNA, 50 bp, Artificial
  Synthetic oligonucleotide
atcggtcgcccgtgtaatgaggtgactggtcaaacggtcgccttgtgccg

SEQ ID NO: 213138 - DNA, 50 bp, Artificial
  Synthetic oligonucleotide
catcgccggcggactccccatggccgacaccgaatgccgactgaaatggg

SEQ ID NO: 213139 - DNA, 50 bp, Artificial
  Synthetic oligonucleotide
aatcgaggtagggagtccgcccatgatcgttcgaagaattgcccgcccgc

SEQ ID NO: 213140 - DNA, 50 bp, Artificial
  Synthetic oligonucleotide
atgaacgtggcgagccccgtgcaagtcgagtacgtgcagccaaacggatc

SEQ ID NO: 213141 - DNA, 50 bp, Artificial
  Synthetic oligonucleotide
aatccgacgcagaagctccgaaagacttgcggtaccaggcgacacaggcg

SEQ ID NO: 213142 - DNA, 50 bp, Artificial
  Synthetic oligonucleotide
tcgaagcagcacctctacggagctaggcgacacctctcctccgcgaatct

SEQ ID NO: 213143 - DNA, 50 bp, Artificial
  Synthetic oligonucleotide
aatcccatcgaccgaccgtcacgcagactgatcacccgatcctcgggcct

SEQ ID NO: 213144 - DNA, 50 bp, Artificial
  Synthetic oligonucleotide
acaggaaggagcaccggtgacagactcccgagcacttaccggccgtaccg

SEQ ID NO: 213145 - DNA, 50 bp, Artificial
  Synthetic oligonucleotide
ctccccatggccgacaccgaatgccgactgaaatgggccgcgtgcctctc

SEQ ID NO: 213146 - DNA, 50 bp, Artificial
  Synthetic oligonucleotide
ctcgacgggtcagttgtttaggggaaccagggcgacccgagtcgcggcat

SEQ ID NO: 213147 - DNA, 60 bp, Artificial
  Synthetic oligonucleotide
cgcggcattcggaaggatccatcgatccgcggattgttcgacgcgagtggataacgccca

SEQ ID NO: 213148 - DNA, 50 bp, Artificial
  Synthetic oligonucleotide
aacagcacggggcgagagtctgttcccggaccgctctagagtctgtgctc

SEQ ID NO: 213149 - DNA, 50 bp, Artificial
  Synthetic oligonucleotide
aaccaccaactgcgcacccgacgactgacccatcgcagcaggataggtca

SEQ ID NO: 213150 - DNA, 50 bp, Artificial
  Synthetic oligonucleotide
caccgaggttgggcgccttgaagattcccagacgcaccagaggttcccga

SEQ ID NO: 213151 - DNA, 50 bp, Artificial
  Synthetic oligonucleotide
aaccagtggcctactggggatctaccccgtcgttcgggcacgcactgtgt

SEQ ID NO: 213152 - DNA, 50 bp, Artificial
  Synthetic oligonucleotide
aaccgaaacgggccggacaacggggtccactcgcagtcttaagatgtccc

SEQ ID NO: 213153 - DNA, 50 bp, Artificial
  Synthetic oligonucleotide
ccagggcacatgtcacctggcaatccgaacgcatactgcggggaattggg

SEQ ID NO: 213154 - DNA, 50 bp, Artificial
  Synthetic oligonucleotide
cctcgaccagaccgctcgcggtggcactctcgactagcagcttatcgagc

SEQ ID NO: 213155 - DNA, 50 bp, Artificial
  Synthetic oligonucleotide
aaccgtcaacgctgtcgcggtcaatccaggcgatgtcctctcagtgtgga

SEQ ID NO: 213156 - DNA, 50 bp, Artificial
  Synthetic oligonucleotide
cgcgagggatggtacggacggggtcctttgcctcgttgcggaacactgcg

SEQ ID NO: 213157 - DNA, 50 bp, Artificial
  Synthetic oligonucleotide
aacctcccggtgtttcgtcactgtgacagccaagtggggcgttgaggcct

SEQ ID NO: 213158 - DNA, 58 bp, Artificial
  Synthetic oligonucleotide
cgctccacgggccgcacagacggcaaagcgaaccccataactgaacaggagtcatacc

SEQ ID NO: 213159 - DNA, 50 bp, Artificial
  Synthetic oligonucleotide
aacctctccacgggagagtcatgctcgagagggggcgtttcgatgggtga

SEQ ID NO: 213160 - DNA, 50 bp, Artificial
  Synthetic oligonucleotide
cctctacggagctaggcgacacctctcctccgcgaatctgaaccaggcgg

SEQ ID NO: 213161 - DNA, 50 bp, Artificial
  Synthetic oligonucleotide
aacgacgccctctaccgacgcatgcgacccgatcaggagatgcccggacc

SEQ ID NO: 213162 - DNA, 50 bp, Artificial
  Synthetic oligonucleotide
cgctcacactgcgaaacagcacacaaaccgtacgcgcggaaccgagccct

SEQ ID NO: 213163 - DNA, 50 bp, Artificial
  Synthetic oligonucleotide
cactgtcttcgcgccaagcaccgcgcaactgtccgactgagaagctcgta

SEQ ID NO: 213164 - DNA, 50 bp, Artificial
  Synthetic oligonucleotide
tttcggccggtgaagatcccattgggcgccacggtaacggaaacagatgc

SEQ ID NO: 213165 - DNA, 50 bp, Artificial
  Synthetic oligonucleotide
aaaagcgtgacgccagtcacatgcccgttcagtgggacatttgtggccgg

SEQ ID NO: 213166 - DNA, 50 bp, Artificial
  Synthetic oligonucleotide
cactgatccgcacctacagacgactccggcacccctgacaaccagcacgt

SEQ ID NO: 213167 - DNA, 50 bp, Artificial
  Synthetic oligonucleotide
aaacactgatcctcctcgggtaggtccgcctttcccccgactcggcggtc

SEQ ID NO: 213168 - DNA, 50 bp, Artificial
  Synthetic oligonucleotide
cactcctcggcgcatcgacaacggaaggttccccatgcgatacgcccgtg

SEQ ID NO: 213169 - DNA, 60 bp, Artificial
  Synthetic oligonucleotide
cggaaactgaaacatgccgccgagaatcgtgcaatccccgcatacccacattcatgatgc

SEQ ID NO: 213170 - DNA, 50 bp, Artificial
  Synthetic oligonucleotide
cgcgttacatgcgggacactggaccgtgcggttcgataacctcggacccg

SEQ ID NO: 213171 - DNA, 50 bp, Artificial
  Synthetic oligonucleotide
aaactcgctgtcgcgtccgagcgccgttccctacgatctcggggcatggc

SEQ ID NO: 213172 - DNA, 50 bp, Artificial
  Synthetic oligonucleotide
ctatgcgatgcacggtggggcaacgaaggcacaggctgcgggagatctct

SEQ ID NO: 213173 - DNA, 50 bp, Artificial
  Synthetic oligonucleotide
cacgctctgcgtgcttgacacttgggctccgacccctccggtcgaaagag

SEQ ID NO: 213174 - DNA, 50 bp, Artificial
  Synthetic oligonucleotide
ccaacgctcaggagctagctggcaccaagacgtcggatgcggcacttctc

SEQ ID NO: 213175 - DNA, 50 bp, Artificial
  Synthetic oligonucleotide
cgcgtgagacgtgaggcgaaagcagtaccgctcgagggcaaatgaccgcc

SEQ ID NO: 213176 - DNA, 50 bp, Artificial
  Synthetic oligonucleotide
aacaccgcaggtcaaaagccgttggcaggagatgcgcgacaaagcccgcg

SEQ ID NO: 213177 - DNA, 50 bp, Artificial
  Synthetic oligonucleotide
aacaccggacgcgtgtcctaccgatgagctgtgggtgaactcgctcgggc

SEQ ID NO: 213178 - DNA, 50 bp, Artificial
  Synthetic oligonucleotide
aacacgccctacctcctcgactacgggaccatgcggtactccgaccgcgg

SEQ ID NO: 213179 - DNA, 50 bp, Artificial
  Synthetic oligonucleotide
ttcctctgttagcgtacggtctaagtccttggccctgtaacctccgctca
